United States Patent Application Publication US 2006/0134663 A1 - sequence listing, part 78

SEQ ID NO: 207576 - DNA, 1000 bp, Homo Sapiens
cccctgtgtctagtatagtcaaaaatagtaggtgatgggtaaatacatgtgcaataaatatatcctttcatctttccttcctatcttagggaaacaaatgtccctttcttttctgtcttacctccctaataacatcagtacttctttgtccctcctccaatattgacctctgaatcatgtcctccttcttgaaatcttgccttcttaattgtctgcttttattaatttacataggtgtccagccatctggctggcctttctccagttcttttgctggaaaatcctctcctcttctctttaatacaggcagcctctaagattgccccttcagttgctttcttcccttggtatttttcttttttttgcagttctcattgactcatatctggtcaacttttacctctaggtacaatgattcttcaatttccacctccagccccaaatttaattcctagatatggacatgcttggagccaaccccaccatgtcacctcaatacactctgcttttcatccaaatcttcctttccatccaggcagcaaactccagagtcctttccactcctgttcaacctttctacttcacatatgacaggtgtgtgaattttacctggtggcaaaccaacgtggtgattctcttgaattcatgtattacttagacaaattcaacagcctcctaaatgatctccttctagctgctctcctccctctccatctgtcttgctagatgagcctggcttcttttttcctgcagaaagatcaaacttttcagtttaacccgcatcaccttttaaaattcattgccagtgtagttcccaatatggcctcatactgacttcagataccccagtgtatctgaagaaagtaatcccagctacttgggaggctgaggcatgagaattgcttgaaccggggaggcagaggttgcggtgagccaagatcacgccactgcactccagcctgggcgacagaccaaaactaccgtcaaaaaaaaaaaaaaa

SEQ ID NO: 207577 - DNA, 1000 bp, Homo Sapiens
tgtcttcagagacaattctccttgaatctcatgttcttcatgtttagacattaacaagcaatttgctcagatttatttacattccaggatagtaaagatagagaatgtctccctccctggagactttcccagagaagatttggttgcattccaggttaataaagattatatatatatatacccaaagaagaggatggacaataaaacaatataacattatttccctcacatcttaattatgtgtattttcaatcatgtagaaatattgaaaacacagtacaacctatataacatccatctagatttaacaatttatatgtaatttttcctgaaataccagtggtaagttatagatataacattataaccataaataattgagcattcatctcctaaaaataaggacattctcccacatacctggaatatcattatcaatctaattctatgatatatccagtccatttccaaatttctcccattgtccccaaacatattttacagttttaatgaggtagaattagcatacagaaagtggaacttgtttaaagtgtacaatttgatgagttttgacgtgtgcacctttccaaccatcatgacaatacaaataatgaacatatcaatcaccccaaaaaagtttccttatgcctctttgtcattcagccccctttccccacattcttcccacatccacaggcaatcatggatctgttttctattgttatagattagtttgcgtttcctacaattttatacacatggaataatactataggtactcttgtttggctccttccatccagcataataagtttgagattcattcatgttgttatatgcgtctatgttcattcctttttattgctaagtgttatttcattatatggacataccagaatttgtttatccattcatgttttgatggaaatttgtatttccagcttttggctattacaaataaaactgatgtgaacatttgtttaaaaaaaaaaaaaaaaaa

SEQ ID NO: 207578 - DNA, 1000 bp, Homo Sapiens
ctaacttagaatatttatttcctaactaaaagaaacataagtaagagtcaacaatattgtttgttttgctttttatgtagtgtcaggcacagaaatatgctcagtaaacacttgttggttaatggccactgcaggtccctgaatttgcgttgagttgaaagaaatgccaccaacctgcccctccactgccaggagttcaagtcaggagagcagccagcctgactatagaagaactacacagtgcctaaagttccaggaaaccttccagttgcaaggagagagagcagtgctattttaataaatagtacatgatagttttgctgtataccaggcctacacagtgctagacactggaggcaaagacagacaaacagacaaaataattaaaatgtggttaagatcatatccaaatgtaaattaggtccaccactgtggaaaacagtgtggcagttcctcaaagacctaaaaacaggactaacatttgacccagcaatcccattgctggatatacacccaaaggaatataaattgttctattataaagacacatgcacatgtgtattcgttgctattcaaaatagcaaagacatggaatcaacctaaaggatcatcaatggtagacgagataaagaaaatgtggtacatatgcaccatggaatactatgcaaccatacaaaagaatgcgatcatgtcctttgcagaaacatggacagagctggaggacattatccttagcaaactaacacaggaagagaaaaccgaatattgaatgttctcacgtacaagtgggagctaaatgttgcaaacacatggacacatactggggcctatcggagggtggagggtgggaagagggagaagatcaggaaaaataactaatgggtactaggcttaatacctgggtgacaatataatttgaataccaaacccccatgacacaagtttccctatatgacaaacttgcatatgtacccctgagtttaaaataaaaaaaaaaaaa

SEQ ID NO: 207579 - DNA, 1000 bp, Homo Sapiens
cattcagcactactgggttatccatctgtccgtctgtcaattaaacaagtgcttatgagggcctggggccaggggcacataccgagattactaagactaaataagacacagcgtgtgccctccacagcagttcaggcgcaacctgaccactttctctatttggttaaactccagaaagttcttgactttattattcgcagttcaaaagcagcatgagcttttgtgtctgctccccttcacccactaagtgtcatgacgagcaggcagaacgcccatatagatgccacacatgctatgggttacgatataggacaggaacaccgagcttgggggatccaccatcttgtggcagacagcaagcaagccagctttttgtctcagagggaaacattacctcatgtctcaggattggttgctgcaaacccaacccaggtacagagcagtcagagccttgcattctttgtctacccagcaagatgtgcaggaatgcaagaaactcatggagaagtgtctccaaacaatgcattagcattgcacatgtctggatttgaatcctacatctaacaatttaagtgcgaaattaagtgcgaaattgggtaaattgcaatggctgaacttctcagcctcagtttcctcttctataagatggggataatgcctactttccaggtgactgtgaaagagagtgtagggtcactcgtctgggaacacagtagtgaactaagaaagcccttgagttcaagaaacttagttgcacggggaatcctttcagctatgtattaagtatgcaatgccagttagtcatgtgtgtggaaaagaatagaggaggctgggcacggtggctcatgcctgtagtcccagcactttgggaggctgaggcaggagaattgcttgaacccaggaggcacggaggttgcagttagccgagattgcgcccgtgcactccagcctgggcaaaagagcgagactccgtctcacaaaaaaaaaaaaaaaaaaaaaa

SEQ ID NO: 207580 - DNA, 1000 bp, Homo Sapiens
tcttagtttcgacaaatgcactgtaagatgttaacatttagggaatagacttgtctgcagtatctttgcaacttttacgtaaatttaaaattattccaaaataaaaagtttattaaaaaaatttacaagaaaaaaataaccccatcaaaaagcaggtaaaggatatgaacagatgcttctcaaaaggaagacatttatgtggccaagaagcatatgaaaaaaagctcatcatcactggtcattagagaaatgcaaatcaaaaccacaatgagataccatctcatgccagttagaatagcgatcactaaaaagtcaggaaacaacagatgctggagaggatgtggaaaatgggaatgcttgtgcactgttggtgggagtgtaaattagttcaaccattgtggaagatagtgtggcgattcctcaaggatctagaactggaaataccatttgactcagcaatccattactgggtatatacccaaaggactataaatcattctgctataaagacacatgcacgtgtgtgcttattgtagcactattcataatagcagacttggggccaacccaaatgcccatcagtgatcgactggataaagaaaatgtggcacatgtacaccatggaatactatgcagccataaaaaggaatgagttcatgtcctttgcagggacatggatgaagctggaaaccatcattctcagcacagtaacacaggaacagaaaaccaacaccgcatgttctcgctcataagtgggagttgaacatgagaacacatggacacagagaggggaacatcacagaccagggcctgttgggggctgggggcaaggggaggcatagcattaggacaatacccatgcatctggggcttataacgagatgacaggttgatgggtgcagcaaccaccatggcacacatatacctatgtaacaaacctgcatgttctgcacacgtatcccagaacttaaagtataaaaaaaaaaaaaaaaaaaaaaaa

SEQ ID NO: 207581 - DNA, 1000 bp, Homo Sapiens
ttccagagtattatcaaaaaatttaagaagaaaaatcagatttttaatacaaagagcacatcatagatgtggtttgtagtttgtagacaaaaaataaaaaaataaataaagaacaattaaaaggcaacactgaattttaggatataaattataagtacttgaaaaaaaaagcaatgttgttttattttgtccagtgcaatttacataattgattggctacccagggtccattttccttttgcattattctaccccacccatccactccatgtgctgtggagaaggtagaccacatccccagctgggaagagagggcagagttgatttaaattaatccatattttgtatcccattgggcaggccttgattaaatagtggcaaaaataaaattacttttaattcttgctgggaatcctagatctaaagggctctgcctctaggcatatatgagacccagaattgttgtaaccattagataacacactaaaaaaaattatcatgcacagttaaaaaatcacagacaaatacagcaaaatcatgactgaaccatgacgtttcacaactctacttataacttaagccactttgtactgagcattggttacttccagcagaaaccatcctaaatgataatacaaatatattggaatcatctaatacaaatatatatagaatcatctaactgattcataatcacttctaaaccattgtttatatctccttttagaagatcttgtctgtttttgcccgaagtggacagatcacaaggtcaggagtttaagaacgtcctgggcaacatgatgaaaccctttctccactaaaaccacaaaaattagctgggtgtggtggcacgtgcctgtaaacccagctacttgggaggctgaggcacgagaatcgcttgaactcaggaggtggaggttgcagtgagccgagatcgcgccactgcactccagcctggagacagagcaagcctctgtctcgaaaaaaaaaaaaaaaaaaa

SEQ ID NO: 207582 - DNA, 1000 bp, Homo Sapiens
ccaaatcccgccctgagccaggccgctccatgagtgctagcagtggcttgtcagcaagtaagtgccggggctacaggaaggtgcctctgagacagggtgacccccagctccctcccctcctgtcccgtgggtgacatgtccttcacttacgtgtgcccattgcattctcaaggggctgcagtgtctcagaccctgctgggtaatgcctaataggcacaaatgcagttgttaagaaaatagtcccagagtccttctagagtgtacaggccatctgggagacagacaaatatgattacaaattgtgatgataaaggctctgaaggaagtaaacagcatacattaatagagaataacaaggggtagctgttagggatgaatccctacttggcagaataattaggaaaatcactccctagaggtggagtcatgtttgagtaatgtttggttaactgaaagaaggctagtatggctacatggtagtggtgaggaagtaacaaaaattagagcggggtagcaggtaagggtcagaccagcagggacttgaagaccaaggtaagacattttttactttattcaaaaggaaaaggaagacttttaagtagggaagaattttctttcaatttacattcttaaaacaatcctgcgggctgccaagtggagaatggactagaggcaggaagagtggaagccagcatccagataggagactcctagagtggtcccaatggaaaccaatgagggcttgggatgcagcaggggcagaaggagagaagatggtagattctccagatatattttcagagttaaaagcagtaagacttgatgatgaattagtcatggaaaagtaagggagagagttaaagatgactcccagacttcctgctagggccttagtatgataccatttactcccatttaccaccgtttaagaaggggctgaggcaggacattccacgcatgtccaaaggtcccgaggtagcaaaaaaaaaaaaaaaaaaaa

SEQ ID NO: 207583 - DNA, 1000 bp, Homo Sapiens
agcggacactcaccatcaatgcatttcagcatcagcagtgtgatggtacaccaagaaggggctgttgatataaatttttttaaaatattggtatagttaaatacttatattttaaaatattggtgtgttttttggtgctataaattactaacttgtgtgttcctaaaatcaagttgaaactaggataattgtctagttcttgctttgataagaacgcagtagttctgatgcttgtgtccatgtgtatgggtctgttattcttgcaagtgggtaagcaatgcatagctttttttatactgagagcactagaaggccaaagcatctcaaaaccatgggttctgggtatgcataatttttggaaaggcacgataagcaaatctcacagtctggctggtcagcagctgcagggataaggagactaattgccaaggccatgcaaatgcaaagaggaaggtgaggaggattcccagatgtgatcatagcttgcaaagatggtcatctcatggggccagaattcgtgcatgcccacacctacaaagctgagaactggtaatggtcatgtgtccgcttcaagcaatgcatgtattcacagccgccagcatcaagaggggccatcttttgataggatgacacatgcatgttcaaacatattttaaaagattagggagaaaagaatactgtgaacaaatagaaaccaattatgagcaaattcacgaattcggttatgtactattgtggctggcaaaagccacttaaactaggctctctagcctgattttcagccatcattacccctcactaagaatccttgtaaaatttcttccgtaaaagttaattacactcatcaccactgtttgctaatgggagcaaacccctagccaatattttttagaataatatggttgggataactttttttttttttttgctaaatgaatgcatgattatcttatacaataaaagtataacacaaaaaaaaaaaaaaaaaaaaaaaaaaaaa

SEQ ID NO: 207584 - DNA, 1000 bp, Homo Sapiens
tccatcacctgccctctgaaaaaagctagcttcctccttcccaaagctgtaagccccaggatgaaggagaattgctcacgccaggtcagggtatgggcaggacagctttcccccaacatcagattgtttagaccagtggttttcaaagtgtgttctgtggatccctggagggccctgggatccttttagttgcgggggtagggtgggggggtctgtgaggtcacaactgtttcataattagactatgacattattttcctttttcaatgtgttgacatttgctgtgatacggcgcaaaagcagcagtggttaaaactgcgttaaggcagtgggttcctcatgccacacactcacagtacaaacaggccagttctaatgaatgtctatgaaatagtaaagttactaattttgttaaatcttgacctttgtacacacacctttttaacactctctactgaaatggaaagtatgtgtaaaacatttctgctaagtactgtagtacagtgcttgcctaaagggaaagcatgtgtgcagttgtttgagttgtgagctaaattagctgctttttttttagaaaagaaagtaaattttacttggaaagaaccaacaaattataatttttcagacttgggtatttggcagacatttttcttgaaaaggatgaagtgagcctatcactttaaagaaaacaactgaggctaggcacagtggctcacacctgaaatcccagcactttggaaggccgaggcaggcagatctcttgaggtcaggagttccagaccagcctgggaaacatggcgaaaccccgtctttactaaaaatacaaaaaaatatagctggggatggtggcgtgtgcctgtaatcccagctaccagctactcaggaggttgagttgcttgaacccaggaggcggaggatgcagtgagccaagatcgcaccactgcactccagcctgggtgacagagtgagactgtctcaaaaaaaaaaaaaaaaaaaaaaa

SEQ ID NO: 207585 - DNA, 1000 bp, Homo Sapiens
tatgcaagtaacagatacttatttttcataagcgtgtgcttagtaaagttgggttctggaggtcaatattataggaagatcatgatctttgattctgaaggatagcatatgtttatccttatgccagtaccacactgtcctgatttctttcaaagtcaggaaatagaagtccaacattgttcttcattttcaagattgttttggctatcctgagtccattgcatttccatatgcattttaagataagcttgtcagttccccatctaatttaaatttgtgattcagtgctcaggaagattcaattgctgttggcatctaagtttgaaggaaatggtttgatcgtttatccaacaaatatttattaatattgttgtgccgggcattgtagagttggtgctgcaacatacaccaataaacaaatccaaacacaatctttgtatccacatggcttacaattgaagaaaattagcagatattaatcagtcttcacgttgaaacataattaaaaactgagataaattccatgatctaatctgaagatgcagagtttctctgagaatataatatttaaggaagtacaggagttacctaggcactgaagatgagagaggaagccttccagacagagagaacaacatgggcaaaggacctgtggtggaacaactgcagcatgttccaggatctaagaaaatgtccaatgggccgggcacagaggctcacacctgtaatcccagcactttgggaggccaaggtgggcagatcacctgaggtcaggagttcgagaccagcctgctcgacatggcgaaaccctgtctctactaaaaatgcaaaaaagtagctgggcgtggtggcggacacctgtaatcccagctacttgggaggctgagggaggagaatcaattgaacccaggaggtggaggttgcaatgagccaagatcgcgccactgcactccagtctgggcaacgagtgaaactgtctcacaaaaaaaaaaaaaaaaaa

SEQ ID NO: 207586 - DNA, 455 bp, Homo Sapiens
  misc_feature (420)..(420): n is a, c, g, or t
  misc_feature (438)..(438): n is a, c, g, or t
  misc_feature (451)..(451): n is a, c, g, or t
gaaggcaggctaccgttgtcactactactaatttatctgcagtatgagtagcagtaggtgacttcaccataactcacatcatctggatctcaaagagccactctgatgacgtaagtataatctggcagtatcgtgggaatcaggaccaccgtctttgctgtagcaatacccgggacctcagtttacatatctcctttatgtgtcgagaaagtgtatgtgtggggtggtaggagggccgggaaaaaaagctaaaatcactcaccgtgtgattgttcaggcatgaactgtaccgcactaaggcttcactaggcttccttacgctactggtacccaatggacagggtcattgaggaaggctgtaggtgtcttgggagggtgattgggttcacaacgggccccagttacttcaagttgggggangatttttcccatggaggncggttaggggccnggtt

SEQ ID NO: 207587 - DNA, 445 bp, Homo Sapiens
  misc_feature (394)..(394): n is a, c, g, or t
  misc_feature (430)..(430): n is a, c, g, or t
  misc_feature (444)..(444): n is a, c, g, or t
gtagagaagggcccattccagtggaacaatgagaaaaataacttttctttctgtaggctgttgcaacctcaccagaacagctgaagaatgaatttcagcctggactctaccttattagttgggcacccttggggagggtgcaacctgcccaacattttctgctggccctgtcttacctcatgactaagagagccttcctaggtctggaaggtagcagtcagtctgttctggagggtggagagagacaccagtgttttcccatggtttctgggtagtagataaaattggtctattctaaggttaatttgatattttaaaattttgattctgactagcttattgggatttttttggaataatgtttgattaatgtaaaggtttaaaaataaaaccnaatatttccagcttaagcaaatggggattttctttnattaaggggtgttnt

SEQ ID NO: 207588 - DNA, 427 bp, Homo Sapiens; identical to SEQ ID NO: 50420
  misc_feature (373)..(373): n is a, c, g, or t
  misc_feature (381)..(381): n is a, c, g, or t
  misc_feature (395)..(395): n is a, c, g, or t
  misc_feature (426)..(426): n is a, c, g, or t

SEQ ID NO: 207589 - DNA, 447 bp, Homo Sapiens
  misc_feature (1)..(1): n is a, c, g, or t
  misc_feature (3)..(3): n is a, c, g, or t
  misc_feature (6)..(6): n is a, c, g, or t
  misc_feature (8)..(8): n is a, c, g, or t
  misc_feature (191)..(191): n is a, c, g, or t
  misc_feature (442)..(442): n is a, c, g, or t
nanatntntttatttttcacaaactcattctcatttcctagaatgatacctcaggtataaatacctaaaaaggtgtgttctttattctctctcacatacaaaagaagtgcaaaataaccccagtattaaagatgctactatggttacatgttatggattaaactgtattcccctaaaattcatatactgangccctaatctcatgtgatagtacttggagatggaggcctctgggaggtaatcaaggttggatgagatcataagggaggggcccgggtccagttggactgggtgttcttatacaagagggagagacacagaggcacctgctcttccctctccctctggctcctcctacatttcccctcctatggggctgagggaaagggctgtgtgaggacacgcagggaaaggcagtctgcagggccgggggtagggcttncacca

SEQ ID NO: 207590 - DNA, 594 bp, Homo Sapiens
tgacaagaaattacatttcctgataactacactgtatattttaattatggcaatatttttcaagtacaacttcaggtgaaaagatctgtgtttcttccactaaaaagattcaactgtgttatctgcctcaagacatccatcacatgaatgccaatatcttaggatttaaaagggggctttttgaaactttctaagtatttaatcaataggttccttttcatatagagctacactgcctgcatagaccgtgaacatgttttttctttaatctaaatttgaaatagcatttactatgtactgagcagctattagacttccgttacagcactgggttcttttcccaaatcacagtattctaatgctcacatccatgctgtaccattatcccattttactaataaagaaacaaaatgactaagaacttcaaaacagtctgatggtacaaaatcactctctcaggaaaaaagaaagagggcgagagagagcaggaacccaaactacattaacattcatgttgaaattccagttataaattaaaagggttttttttttttgggccccccggtaccgggccaaatccgaatctgtatgtct

SEQ ID NO: 207591 - DNA, 653 bp, Homo Sapiens
gagcggccgcttgatggcgggcacttacagccataaataccatcagatttagaaggttcttcacaggattgttctaaggattaaataagagaacggctacaaagcacttagcaccatttgcagtacttagaaatctatcagagtacagctagtacccttcctactgattctctgtattttagtaaaatctgatgagaaatcaattgcaaacataatttctcatcagatttcagataaaaacccaactccttcccttggttctctaaatcatgcacatctgtcctccacctgcttctgaagctccaacctcctccctcaccatattgcagccatagtagcctttctcatccaaattatgccaactttctatctcctcatgagatatttgcacctgccgttcccagtaacctcagggctcagtgcatgagttgaagctgcctttctttatgtttttgagacatggtctcactctgtcactcaagctggagtgcagtggcatgactgtggctcactgcagccttgacctcctggactccagtgtcccttctacttcagcctctggaatggctggaacccgtcatgtgccatcacatccagcgaatttttaaatattttggtagagatcgggtctccctaagttgccgccaatcgat

SEQ ID NO: 207592 - DNA, 512 bp, Homo Sapiens; identical to SEQ ID NO: 50458

SEQ ID NO: 207593 - DNA, 350 bp, Homo Sapiens
  misc_feature (253)..(253): n is a, c, g, or t
  misc_feature (279)..(280): n is a, c, g, or t
  misc_feature (341)..(341): n is a, c, g, or t
  misc_feature (349)..(349): n is a, c, g, or t
catttgaagtgtttgttcactgttctcggagcacctgacgaagagtttccacttttaatacagttgaaccgaaagaaaatattattgtagtaaatttcctttaaaaaagcaatattgatgttcccgtatttttgggaataaaaaagcacccttttttttttaaattattatactttaagttttagggtacatgtgcacaatgtgcagggttacatatggtatacatgtgacatgctgggtgcggctgccccancttaactcggtcattggaacaatggnnaaggcaccctatttttaaaatggcattatggtaaatagggctcattcccaaggctggaccntagggcant

SEQ ID NO: 207594 - DNA, 312 bp, Homo Sapiens
  misc_feature (263)..(263): n is a, c, g, or t
  misc_feature (271)..(272): n is a, c, g, or t
  misc_feature (308)..(308): n is a, c, g, or t
tgttaatatgatacctgctcagagacttccttagcttgcacggaaaatgcatagacgttgccaacatctcctacgtgcatttctaaaataatacagttggccattgaacaacacaggtttgaacttctcaagtccaatgttatgcagagttttaaaaataaatatattggaaaattttttggaggtatgtgacaatttgaaaaaaacagatgaacctcatagccaagaaataaaaaaattaagaaagtgaggtatgtcatgantatataanntatatgttgggtagtctattttatcatttactaccntaaa

SEQ ID NO: 207595 - DNA, 821 bp, Homo Sapiens; identical to SEQ ID NO: 49126

SEQ ID NO: 207596 - DNA, 624 bp, Homo Sapiens; identical to SEQ ID NO: 55808

SEQ ID NO: 207597 - DNA, 842 bp, Homo Sapiens
  misc_feature (716)..(716): n is a, c, g, or t
ccggcgtggcagcggcaatccctggccaaaggtacttggggtcattttccgcggggggttacgtgcgggagcgtgtcctccacaaacggattttccccccttaagcggacttatttccatccggagtgacagaatttaattccaaaccgagagctttccagactgacgaatttttaccgggactaacagagaattacctcagcctgacaacattttatctcgtgcgccacttcgggatccgagtggagccgaaagtcgagatagagcgcagttgggccttgggttcgaaaagactggacagaggtttcagtgagccgagatcgcgccactgcaccccggcctgggcgacagagcgagactccgtctcaaaaaaaagaaaaagaaaaaagcctggaaagaaattctgcggaatagaagtctttaagaaatgagatcgtgccctttaaaactaagtttaacaatagtgagggcttaataaaccgataggtgttatctcaaaaaaaaaaaaaaaaaaaattttgggggccgcgggccagaaaatttttaacacttgtggggcgggcccatgggtataggagacggctcaactggtcccaggaaaccgtcagaaaggtgcggtttcccccaaaaaaagccggggacggcggtccgaacaaccgagggtgcgggccacacggttcaccagggagccagacctaataaccgcccccgggganatcacaatcaaacgacgcgcgcacagcagagaacagcactgagtagctgagagaaacaccgacagcacacgtcacacacaccaacatgatacgagcaagagacacgaacgacaactaatatagcac

SEQ ID NO: 207598 - DNA, 414 bp, Homo Sapiens
  misc_feature (394)..(394): n is a, c, g, or t
  misc_feature (400)..(400): n is a, c, g, or t
tctatggctcattgctttttctttagaagtgttatcacaagctatatcaacctgctgttcccatcagcttgcaatgttaagcatccttctactgtgccctgcctaactatgagaagataaattcatttctctattttcagcttcttaaacagtccttctggcatccctatgtaccagctataattttaatagaaactataaaaactagggggattttttgtagtttttgtaggtacaaaaatttgattttcaatataaatattacaaaattctaaatgaacacaactcaatactacagaaaattgtaaatctaccgtgggttcaaaggcaagttgctaaaacttatgggctaggctcatgaaggaatgtagggttgtcttatatacttacacanctattnttaaaaggggtcta

SEQ ID NO: 207599 - DNA, 807 bp, Homo Sapiens
tgtacctgaggaaatcagagagcatggtggctcctgtattaaaaagcttccaagccgaggtggtggcccttagtaagagaagtcaggaggcggaggctgcttttctgagtgtttacaagcaattaattgaagcaccaggcaaattatttgtcgaaatactcctccccgtcacccgaagccacacaagtcctgattcaacattcttgtttgagtgactgctgccaacacagatctttggcagagaatacgacagagcctgatggctcagcagtatttcgataagtgtgcagcctggcatgtctgtaattacgacagacaaccgtaacatctttctggatatgcttcaacacagatgtggcgtgaacgtgacggacaacaacaagccgtcaaaaacgtgttcaaaagcctactcaatgtccttgtcgtgggttgatgatgtgatttaaaacctctctgacttctgtatttggtgattggctgatacctatatacgcactcgtgagagtcactaggtacggcaccccagcctacagaaaaggctaccatggtcaaccggagtgaataagcaacgaggacaaccacaaacgaccaccacacacaaaaacaaacacatcgttggcccgcaggagacccagagaaaaggctaaagaaccaacctgctggggcgacgggccccacagcgccacgccacgtgaccacaagcccagcaaccgggaccacacagggtgggatccacacacaaacggcgcgcagccgcgcgtaaccacacgggcacgtcaccggccacaaggccaagccgcaaaaatc

SEQ ID NO: 207600 - DNA, 566 bp, Homo Sapiens
gttttgccctcatacctatactctagactctgaagaattctcatacctttctctttatcactgcaaaagggcctttattaactttttaaacttgtatatccattcatcatttcacctgcaaatattttatcataatattttatattactttattgtaaagattttgaaaacatatttttaagggcagcatttgttcctctaaagattataagatgtaatttgtctgctttcccaaggaaaagcattttcctttgtaaaaatcaccttacattaatgatttcttggatctcacactctattgtagtatttctgtagctaaacaattataacatggtggagagtatactataataaagttatgtataaagtctcatgggaacagatgtaagaaaaattaactggcctaggcagtttctgaggaaagataaagaaaatagagccgacatttgtctcgtggatgaaaaaagagtaagtaggcattgaccaggttaacacaagaagaggatgttctaggcaatatagaattatcaagaagatggcgggtgcagtggtcagcctgtgatcct

SEQ ID NO: 207601 - DNA, 395 bp, Homo Sapiens
  misc_feature (252)..(252): n is a, c, g, or t
  misc_feature (265)..(265): n is a, c, g, or t
  misc_feature (278)..(278): n is a, c, g, or t
  misc_feature (291)..(291): n is a, c, g, or t
  misc_feature (330)..(330): n is a, c, g, or t
  misc_feature (384)..(384): n is a, c, g, or t
agtcaaatgagttattgcatctaaaggaaaccagtgaagcatgccatttgactttggattatttcaagacagcacactgagcccacatccactgtttcattaatatttagataggacagaaaagcaaatgttgataagaacaaatactacaccacttaataaataatgaatggtatgaataatggaaatttgatgaatcagatgaatcagtacttatttagttcatacaatgtgttagtcattattctaagngatttatacctanacacttaataccnaatcgtttaacanggataacacaatgatttatggagaatggacacattgganaatcatattaggtgggcattaaaaccataggaataaaaatggtccggggatatnacaccaaatgg

SEQ ID NO: 207602 - DNA, 314 bp, Homo Sapiens
  misc_feature (219)..(219): n is a, c, g, or t
  misc_feature (303)..(303): n is a, c, g, or t
aatgactaccagcttgttcttggcttacattcttgagattattgtattcaaaagtgtcagttggcttcacattttggcaaagagccttctgcattcttattctccttgaagcataatgcagataatgacaacttatctttctagattagtcttttattattcaacaagacaaaggccacaacaaaggactagtaggaatagtgacctctacctgaggantttgttataactataggatgtttgtgctctgcccaagaggattctgatatactgtgatttgatgtgaggccacgatgtggaatnattataaaggt

SEQ ID NO: 207603 - DNA, 368 bp, Homo Sapiens
  misc_feature (223)..(223): n is a, c, g, or t
  misc_feature (291)..(291): n is a, c, g, or t
  misc_feature (310)..(310): n is a, c, g, or t
  misc_feature (313)..(313): n is a, c, g, or t
  misc_feature (346)..(346): n is a, c, g, or t
  misc_feature (354)..(354): n is a, c, g, or t
  misc_feature (363)..(363): n is a, c, g, or t
aaatttaggacagggtctcctcacccaggctggagcgcagtggtgcgatcacagctcactgcagcctcaaactcctgggctcaagcgatcccctacacccccaagacttcctagtagctgggacaacaggcacgcacccctactctcggctttttatttatttttattttttggagacaggggtctcgcatgttgcccaggctggtctggaactcctagcctnaagtgatcctcctgcctcggcctcccaaagagctggggttacaggagttagccgacgcgcccggcccntttccacctcttgagatgnttncagctccgagtgtgttcaagtttccgggaccgnttcaccanggtcctttncttgg

SEQ ID NO: 207604 - DNA, 547 bp, Homo Sapiens
agttggatattttagtcaacatttattaagcccatgcctcagcagtagttgacttttgtctaaagggagagaaagaaattctagttttcccaaacgtccaaggctccaaacaaaacatactgaattaagatttccagaagaaagtcctggcaacttggatatttaataggtgctccaggttatcaagcacattggaacacaatggcccaagtgctgtatctcaaaatgtgagtctgtggactggcattgtctgcctcactcgggaactcaacaagagacgcagaatctctggtcctgtttgagactattgaatcagaagctgcattttatttagcaaggcccccaggtgactcctatgcatgtttatagttgaagggctagtggagtgtggtgacaggaacatatttggtgcttgttcagggccttgttttaagaacccatgatgcttgtgcccagtggagcaacccatcagtccaattgttgggagaaaagctgaggcaagacttgctagtctgacataatatgaaaagagccttggaacatgtcc

SEQ ID NO: 207605 - DNA, 663 bp, Homo Sapiens
  misc_feature (626)..(626): n is a, c, g, or t
ttttttttagaaacaaagtatttattattttccattaaaaaaaaaaaggaaatggtgcccaagagaggaatgttcctaaggaaacccagtgtttcttgccgtgtcttctctaaatgacaaacgctctttggcaaaagaaaacaattaatgcaactagaactgccttctgagagcaaagtttaatcctgacccagaattataataatttctgaaagttctattaatttcagcacactgtgtaggaattactcaggcttttcccatcctatagctcctaaaaaaccaaagtggctaaccatatctggcataacagaggaagtaaggtgcatttcctgatcttccaccatcacagaaaagcacacttaatttgcatctcaagtcgtctggagtaaagtctatgttgctggcaacagttgtgttatcctgacttctcttccccaggtcctgttgtctgtaacagagatgtgttgtgaaatgctgtcacttgcttctccctttctttcctttgggagcacccggccaatggaagcctcgcagatgcaggcagtcagcgacgttgtgggcgatgtagtagaggttcagcatggccgcggggctgagaatgtccacttctggtttcttctgtntcttcccatgagacttgccctggccctttcctttttt

SEQ ID NO: 207606 - DNA, 530 bp, Homo Sapiens
ttaacaatgcacaggcaggctttattctttctctctgcgtgtctgcaggatgccagtctatgaggaccaaaagctcattccctgggaaagggagtcagctctaaatgggttttcttcacctctgattattctctcctgtaacggaacccttggagagcctctattttcaagttatttagaaaatgagacctcttacttaaaaaaagtcatgtggtattaaatgtctttcttgtcctcagaatattaggttagtcgtacttcccctcagttctccaagccaagaagctcttatttgaacctatccttaaaaaagtgtttacaatagcagcccgtgacctgttgcagcatctcagccccttcctattgtttcctctcaactctgaacctcagtcccaccttgcggcgcactggaaccaccgtcctcacgtcatgtatgaagacagtgagcagctctggactgtctgttacctgccacctctgctgtggcttcaggatggtgatggagttccatcccggccacatcctcttta

SEQ ID NO: 207607 - DNA, 422 bp, Homo Sapiens
ttaaaccactacttttaaaaaaacttctaatgctcacttgaatctttattacacatttcaaagtcaaagctaacaacaataaaaaaaggttacagcccaaatcaaatcacttttaaaaaacagtagcggtctaaagttgcataggatgaagataagaacggagaatgtagaatgagcactccatagactcatgtgaaccataacaaagaaggaaagaatcaccaggaaagaatgatgcagggtttcctgggagatgcgcccacctgctctggcttcaaatctccctttgcctggcctggcttgacacctccaccctccagccccagctttgatcccaaagccaaatgaaatctggtctttctttgggcaaagcatttagtggcaaagaggagactgcctgacctgttctgattcccactgga

SEQ ID NO: 207608 - DNA, 436 bp, Homo Sapiens; identical to SEQ ID NO: 33575

SEQ ID NO: 207609 - DNA, 501 bp, Homo Sapiens
ttttttttttttttaaatagaactgtcttatagatttattaatgaaaaatactttacaaaaacagtatgtttggcctaaaatagttcagctgactctgagggtttacattgacgactgagcaagtggcaataatggctgtgttattgaggacagaaggctgtgttagtgtgcctgactccatctgttcaaaagggtgaatgttatgttggcagctccgcattctaggcctaaggtttggagggcacagggaatgctgacaggccataatacctgggcaggggggctgccctgatgatgtcatcagaaccatgaccacagggctacatgtccccccaaggatgggagacagggaagacaaagggtcaggtaatagggataggtggataaaacaaagagtagaagttgggagtatagtagggaacagaggatgagggctcaggtggaggtggggacataaagcatccaggaataaaatgtgaccttaaaatcctaaggaatgg

SEQ ID NO: 207610 - DNA, 592 bp, Homo Sapiens
ataagaagagagttttattcaacattatggcatggccagtgtaattgttccaacaaagggaacctactttggtgcccgaggaaatggctgtttgtgatgctggggaaaagtcaagatgctgacgcctaatggctgttctagcctttccaggtttgtaacatgaagatggggaaggaaatggcaccactgctgtttgtaatctgaggaactcttggcagcattcactctccaaagcagtacaaaacttacaaagaagtcaaaagtcttaacactcccattctccaggaactcttgtctgtgtcatctggtaggagggaggaatcctggttccctcaggtccttgtcatgttagctttttgatagcttcaatccactcggctcgctcagccttgctgctggcctgaatgtaatagtgtgtgtcatccttagtaatcactttgaagaggtttccctggacattccctttaaccccagtgggaacgccattatcttccagagcagacacgagtgaaccacgaagagaaaacccacccactggcctgttctcttctttggaagggtcatagtaatgcaggaaagctggatcctcctt

SEQ ID NO: 207611 - DNA, 469 bp, Homo Sapiens
acttttttgcccttattgttcttgctttgtcccaagtagatgcaaatgttgtgcaaaccaacttgatcttaagatgttgttgagaacactggagtcacgtgtccatgggtccttcaggctggcttttgatgggagctgggatgcagatgatttacggagggttataatctgtgatgctggtctgaagtctgaatattccaagttgctgactgcaggcagagcctcatgtcctgccctcagttctacaggaaaatccagacaaacttcccctccactttgtagttcaaagctagagggacaggcaacaggtcctctttttttcttaactaaccggtaaggcccatctttttctgcctctctgccgtgtcgccttaaagactgctccttgctatcttggtcacacgtctgggcgggaagccacgaagatcacgggaaggggttgtttactgagctcattgccgttttatgc

SEQ ID NO: 207612 - DNA, 519 bp, Homo Sapiens
agtttccaggatggttttattaaagtcccatgctgtgttagaaacatacaagtgatgagaaaaacattaacttgaaacatgcacttactggcattctctaaaataccattatacaagttttcatttaattagaaaaatacccactaaaacaatcacagttcttcttaaagatttaaaaaaaatgtattggccagaacaaagtccaagagaataaacaaagttctgaattgtatgtcaaaaaaactgtacaaggttgtacataaaactatagcttacaaaagactcaggtatagtaagaattctgaattaagatttccaaagttctatttaccaatatctattaataaaatccttatgaaataattgacttagaaaaagtgaaatgctcatgatttcagagtgtatagaaaatactaaatatcactttccgaaataaagtgtactcaaaacagcacaacatacagtctaaaatcaagatttctgtcattcatttaaactctgcatatattgccatgatgg

SEQ ID NO: 207613 - DNA, 472 bp, Homo Sapiens
ctgtgttgttgccttcactcatttttggacacaggtgtgaaaagtcaaagatttctgattggatcaactcatggagacaaatgcccagcagtgtctctgttttccttcatttcgcacatcccataatggggagggcaagagacagcttctgatgggaaggcaacacagccgagaaaaggaaaccctgaaagggcgtagccttttccaaagaaaaacatgggttcttcggcttgtggattacatgcataaatttcctttgaggaagaaaaccagagaggagtgtacggggcatgctctatcttccttgctggaatctctcttcatgcagtttcggtctgaggaaagaaaacactgcgccccaggcaggctgaaggacgactgtgtgatccttcccagagcagaagactttgatggtgatcacatgcctccttcactgcaaggcagactgtcggctcccccagcctctgatccg

SEQ ID NO: 207614 - DNA, 483 bp, Homo Sapiens
caattttttacatggcaacctttaaagccaggggttaaataccaagaccttgaacttgatgcattccacctttctcctctgcccagaaggcagatgggagaataattcaccaaagtttagacacaggtaaattgaggggagggtttcttttttctttttgtttttttgagccaagtcatgctcctgaaaaaaaatgcttactgaggataataaacacctcgagctcaagcagctctcaggagtatgtagtccctgccctgaggccacttatcatctagtttgagaagagacaggtacaaaaatagctcaaacatcaggtgccagcagttcaggggagggatctgaaaaggcagcaaggcactaaatcagcaccccaacctggttttgtgtttgttttcttaaacctgccagcaccaactcttcatcaccttgtcaaattcaagaccatcttggagagacagttaggactgacttgcaatgtct

SEQ ID NO: 207615 - DNA, 498 bp, Homo Sapiens
ttaaaaatttttccaattatagcacaaatctctcggggggggtcagtgtggaataagaatagccaaagttaatggacatgacacaggcaagattaatgcctaaagggtttcaaaagttgtgtgatacggatttcattaacattttaattgtaatgtatctttttaatcttctctcaccctaatggatttatatccaaaaaaaaaagaataaactgctgacaacaaaaagtatcaatatacaaaatttaacaaaggcgcttagctgtgcaatggaaatgaaattaaatgagcaaaactctgttaaagctgattttttaacagcacaaaagtcaagaattcagcaaagatggtacttcccctttcttggcacagacaccagctgggtggtagaagggagatgggcacagcccccgaggcagatgcccagggcctgtgtgggggccctggccagagggtatgcctcatgggtccctgggaggaggaagatgtgggacaact

SEQ ID NO: 207616 - DNA, 552 bp, Homo Sapiens
tttttatttttttttgactgtataattttaatatttgaaaaattgcatccagaaattaatacaatacagatttgtacaaaaaaggaaggacgtaaaaacttctaatcatacagacaaaaatatgactgactaagcaaagattttaaaaaaggacaggatgtttaaaaaatactgataaatactgtgtaatgctttaatttactggggcagatacaaaaatcaataattcattaacagattatatatgtaaaaaaagtaactacatgaattttctagctttttaaattaataaaatgtaacagtagtggtttttattttttaaatgaggtattattacactgtaaaccaaaaacagagcacaaataaataaaggcaatgtgcaatttagtgataaatgattatacatttcaacttaacaacagataacaaaaattctctagttatttatggacttcgtcatctaaaaatttggcttgcttgtgtggacttcttatttaaaagtgacacagctaatcgatatacaagcacatcattaaacatgcagaccaagcc

SEQ ID NO: 207617 - DNA, 553 bp, Homo Sapiens
tttttttttttttgcaagtaactagggtttattctatataatgaatatttatagatctgtaacatttgtttcaaaatgctgtttcatttttataaagtaccagtgtttagctgctttttatacattaaattagcaatttgaaaaactcaaatatctgaaggtattttattttcgtggtcctcatgaactcactagagattaaaagtagactcaaacaacttgaaaatttgactcttttagcataagattttaagtcttttgagggaattaattttcctttaccctatttgttcttcctaaatactaattaattttcaaagtcaggaaaataatagaaatcaaatggcttcctgcctgggtgatttatagaaggattgtataagggccttcaaacttaatttgttcactgaacaaggctatctatctatctatctatctccatcctgatttttttcccttgtgtataacaggttctataccgattcagcaaaatcaccatttatctcagcttgctgataaaagggggccatgaatcttgtggtctcctacttag

SEQ ID NO: 207618 - DNA, 360 bp, Homo Sapiens
  misc_feature (318)..(318): n is a, c, g, or t
  misc_feature (344)..(344): n is a, c, g, or t
  misc_feature (355)..(355): n is a, c, g, or t
agagaatgagagattatctcgatacctccattcctacctcacttctgatacatggagtggacttgagtaagttaaatgggcatgtaatgtgaccccactacttttctctgtttcttgtactttgttgccttttgcctttacttactctaaaatctgtggaaatcttatataatcccacccagcccagatgttttctctttcatgaagtttttcttgttcattcttgtaagaagtagtatgtcattttctaatctctggtaaaatcatttatttcattcatcatacatttatttgggattttagaactactgtgtttgnccttggaaggcaaggaccaacggtcnttggaatccangtaac

SEQ ID NO: 207619 - DNA, 306 bp, Homo Sapiens
  misc_feature (241)..(241): n is a, c, g, or t
aaggatttcatggggggatgctggttagaaaggaagagttaagccactaaaatcacggcccctgggattgtttttgaccaccaaatgctttctgaaactcacataattgatgcagttccaatgatttatttaaatacaatctgagtgtgagaatggtggtcaaaatcctggtggttaactaattttgtcaattaagacagccttgtaaataagtacaaagaggagctgatgaggctccagngacccctggggctcaaaataaatgggaaccgacatcattattatggggggaaggagcttttggca

SEQ ID NO: 207620 - DNA, 642 bp, Homo Sapiens; identical to SEQ ID NO: 46841

SEQ ID NO: 207621 - DNA, 653 bp, Homo Sapiens
  misc_feature (482)..(482): n is a, c, g, or t
gatactttgtatatttaatgacaagtctcttccctataattttgctcctcagaaaagaaaagcctagacagactgtatttccagtcacagaacataaaacttaatctaatgggtgttttgttttgttttgagacagaggctcactctgtcacctaggctggagtgcagtggctcgatctcagctcactgcagcctccacctcccggattcaagcaatttcctgcctcagcctcttgagtagctgggattacaggagccctccacgaggcccagttaatttttgtatctttagtggagacgaggtttccccctattggtcaggctggtctcaaacttctgacctcaagtgatccactcgcctcagcctctcaaaagtgctgggattacaggcatgaggcgccgcacttggcctagtgttttcttaactgtgaaattcccattcatttcttgaatgaggctacatcttatggacagagcaaagntattgtcctacagattcttaaaactataattatggctattgcatgaatttaaatagatttattatgtctgacatctctgggcttttattcttctggaaatatatgagctttaatcaaaacattatacgtcttcttgtaattcatgttaatacacggaaatcactttcagag

SEQ ID NO: 207622 - DNA, 511 bp, Homo Sapiens
gaccaaccgtctgcaggaggctctgaacctcttcaagagcatctggaacaacagatggctgcgcaccatctctgtgatcctgttcctcaacaagcaagatctgctcgctgagaaagtccttgctgggaaatcgaagattgaggactactttccagaatttgctcgctacactactcctgaggatgctactcccgagcccggagaggacccacgcgtgacccgggccaagtacttcattcgagatgagtttctgaggatcagcactgccagtggagatgggcgtcactactgctaccctcatttcacctgcgctgtggacactgagaacatccgccgtgtgttcaacgactgccgtgacatcattcagcgcatgcaccttcgtcagtacgagctgctctaagaagggaacccccaaatttaattaaagccttaagcacaattaattacaaagcaacctttcccttcccccgagtgattttgcgaaacccccttttcccttcagctggcttag

SEQ ID NO: 207623 - DNA, 676 bp, Homo Sapiens
gtcttgacattctgatggacccaggtaaagttgttaaaagaacgaataaaactttattaaaataatttagacacctgtgtaccagcaacaattgatttaatagacctatagtgtctatactatcccttagaataaaggtttatgattttcctgatactaagatgcagtcacataatcttttgtgcatattcctatacaaattatttctaattttaataagaaggacgtgactacggaatatttgtacatacttgtcattatgcagtatttatttaaaagttggtgtttttttttttaattttcacatctgcacctcgacttgtggtttagtcatgtaactagcactatgccagtgaccgttgttgccctgtacatagtatgtttgaaaagtaaagggaattccagttgggaaaaaagggcagattagtcctgtaatgaacaccaactaatgtaaatcaaattcattctggtgatggtatttaacactttaaataaaacattttctttaaaaaaaaaaaaaacgttcagggtgttgtaacttgggaacatctgaatgctgaggcctagagatcggtcaggggtgtgtaaactgggaccatctgaatgcttgagcctagagatcgttcagggtgttgtacctgggacatctgaatgcttaggcctaaacaatcgttag

SEQ ID NO: 207624 - DNA, 657 bp, Homo Sapiens; identical to SEQ ID NO: 47366

SEQ ID NO: 207625 - DNA, 613 bp, Homo Sapiens
gcaggcctagcaggcggaccccgcggctcggagcaagcggtgcaggggcaggagcgattcccattcgaggagtttgacctctcattttaatacaacacccgcctcttagaggcagcagaccagtccagccaggtcaaggtgtggaccgcacaacggggtgcacaggattagttaagcaaagcaggaacccagctggaaaattaaacgagccctggatctgcaaagcaggtcccttcgcgagaccaaagccgtgatcccaaccttagcaacataattctactggaggtgttgatatatatactaatccagaacaaccatgtagcaagaggaataaaatgaagttcagaagtctgtttcgggaaattttgaagccctttagaaagaaagatttctacattttgttacatgaaattcatgcaaatatatgtcaggtgccagtgctatggagttgttgaagaataagcacaataccatttattaccacttctcagttgtaaagaggctgtaactctggttgtcgaaataaaataaaatgaaatctcctagatgtgacactgtgacccctgccagttatttacaaacaagttatctgcacattttgggctgtaaacat

SEQ ID NO: 207626 - DNA, 420 bp, Homo Sapiens; identical to SEQ ID NO: 50730

SEQ ID NO: 207627 - DNA, 740 bp, Homo Sapiens
  misc_feature (516)..(516): n is a, c, g, or t
atcacgaggtcaggagatcgagaccatcctggttaacatgatgaaaccccatctctactaaattacaaaaattagctgggcatggtggcatgtggctgtaatcccagctacttgggaggctgaggcaggagagtcacttggactcaggagccagagactgcagtgagctgagatcgcaccactgcattccagcctgggcgacagagtgagactctgtctcaatcagtcaatcaatcaatcaatcaaattggaatatgagcactaaccttggtaagttaaaattttgggaaaattgtacctgcagaatatgatggatgaaaacaacagccaggtgcagtggctcacgcgtataatcccagcactttgggaggccgagacaggcacatcatctgaggtcaggacttccagaccagcctgtccagcatggtgaaactccgtctctactaaaaatacaaacaattagccgggcgtggtggtgtgtgcctgtagtcccagctgcttgggagggtgaggcangagaattgcttgaacctgggagacggagattgcagtgagccgagatggcgccattgcaccccagcctggcgacaagagcgaaaccctgtcgcaagaaaaaaaaaaaaaaaaaaacagtctgtaactacctactgatgaattttgttctgtgagacctaccagatatttttttctatctgggttggaaggcccaagctttagaggggagtttacttttacttttt

SEQ ID NO: 207628 - DNA, 658 bp, Homo Sapiens; identical to SEQ ID NO: 55649

SEQ ID NO: 207629 - DNA, 497 bp, Homo Sapiens; identical to SEQ ID NO: 55132

SEQ ID NO: 207630 - DNA, 1000 bp, Homo Sapiens
gcaggtgatccgtccacctcagcctcccaaagtgctgggattacaggcacgagccacagctcctggcctaaagttgttttgatattggacaatgcccctggccacccagaacctcatgagttcagcactgaaggcgtcgaagtgataaatgcttgctcccagagaagcatctctaattcagcctctaggtcaggggtcgtaaagacctttcaggctcattacacatggtactctttggaaaagattgtcagtgctatggaagagaaccccaatagagggaacatcatatcattgaagataccattattgtttagaaaaagatgtgaaagctctcaagcctgaaacaacaaatttttgcaggagaaaactccagatgttgtgtgacttcacaggatggaaatcatgatagagattgtggatatggcaagaaaggttgggggttaaggatttcaagatagggatcttggagatattcaggagctaatagacaccaaaccagaagaattaacagaagatgacttgatggagatgactgcttccaaaccactgccagacagtgaggaagaagacatagaaaaagagaaaaagcgtgcaagaaaacagattgacactagacagtctgacagaaggggtctgattattcaagactgcttttcacttcgtttgcaacgtggaccgtttggtgatatgagaactgaaactaaagcaaatggtggaagaaggattggtaccatatggaaacaatttagagaacaaaaaagcagaaaagtcagaaattacattgtatttccataaagttacaccaagtatgcctgcctctccagcctccccttttaccttctccacctctgctaaccctgagacagcaagaccaacccctcttctacctattcaatgtaaagacaaggatgaagacttttatgatgatcgactttcacttaatgaatagtaaatatattttctcttccttgtgattttctgaaaaaaaaaaaaaaaaaaa

SEQ ID NO: 207631 - DNA, 747 bp, Homo Sapiens
gtggaggaaattgacctcttcccattttttggcattaacatggactgtattcatcaaggtattataccacagcactctatggaaatctcaagattagaaaaaaaaaagaaccaagttatagagttagttttgtattttattttggcacttcgtcatgacagtatagagttggtttttaatggtctcataaatgacaagtggcaaattcaaatcaattcatataaaactcattctattttttctctaaaatagatctttatatggcttcatgaagtctttatgtgttttggaatttacataaatgaaagtctcataaaatatcataaagatatttgggatcgatttctaaagatgtgactcttcaaggaggagaatagggtctgagaaatggaatcatgaaaaagaaacctgggttctctgatctatccaacagaatagagcaaggaggtgatgaaatactgatctctttcctcacataagtctgagcctaccaatatggatgtactcaaagtgaaagctgccctgttctctggttgaccattggataatttattcgtgtccttagagtactgaaggagttcaataatcaacagggtattgtggagtgttttaatttgaaagcaataagggttctgcacgtgatatcagataccttatattctctaggtttaaaatgtgtatacttctcaccagggtttcttattttaggttatttctcaggatacggtatttgtttaaattagaccg

SEQ ID NO: 207632 - DNA, 866 bp, Homo Sapiens
agtacccccctaccacacacacccctgtcctccagcaccatagagaggcgctagagcccattcctctttctccaccgtcacccaacatcaatcctttaccactctaccaaataatttcatattcaagcttcagaagctagtgaccatcttcataattgctggagaagtgtgtttcttccccttactctcacacctgggcaaactttcttcaggttttcatttcttacgttctttcacttcaagggagaatatagaagcattgatattatctacaaacactgcagaacagcatcatgtcataaacgattctgagccattcacactttttatttaattaaatgtatttaattaaatctcaaatttattttaagtgtaaagaacttaaaattatgttttaaagcacatgcctttaaattggtttaattaaatttaactctggtttctaccagctcatacaaaataaactggtttctgaaaatgtgtaagtatttaacttacaaggatataggtttttctcatgtatcttttgtgcatgggcagatgaaataatttttctagggtaatgccgtatgaaaataaaattcacgattaatgtggttgttatccttaggtcacagatgaggtataatgacactcttagaatttgggatcaaataattagggccagtcctgggtctgaattatttaagtcacaactagggaagtatctggctttagatcattaattctgtaattatgcactctgagtgggtaatatgcattggggcattttgcttgaatcaaatgaaaaaaaaaaaaatggggggcgaaataactgggggagaggaagtagcgaaggtgggtaaaggaaaaggggtaagaagacg

SEQ ID NO: 207633 - DNA, 857 bp, Homo Sapiens; identical to SEQ ID NO: 43546

SEQ ID NO: 207634 - DNA, 933 bp, Homo Sapiens; identical to SEQ ID NO: 51982

SEQ ID NO: 207635 - DNA, 627 bp, Homo Sapiens; identical to SEQ ID NO: 50147

SEQ ID NO: 207636 - DNA, 658 bp, Homo Sapiens; identical to SEQ ID NO: 42499

SEQ ID NO: 207637 - DNA, 847 bp, Homo Sapiens
gcccttcttgtgtatgttctgatatccctttgctctacttttagaggagtgaaccctaataggatggtagcagcattcttgttgctttatatctctcctctgtgattgtataccgttttttcaacttaaagcaacttcagctggaaatatgtagaggttggccaaggtgaactaaatagtctgtaacattgattagatatcaagcaacgtgagcatggtagcaaaagcactaactgaagccagtgatttaatttttaattctgattctgataattgatgatagctcctcgaactttgttttttgttaaaacttggaagatatatttgtattattttggacaaattatttgaactctctggaccttgattcaatttatatataaggtaaaggcattatactggattatcctgcaatttctttgagttgttagaatataatgtagcttattaatagcaatattagcagtgtagtagattctgactgcaaaactagccttttctattgacttcattagtggtagtaaaggtattatctgatttatccctttttcaataggcagtgctttgatccaagtggcgacaattagtaattgggaccgacttagacatccaatggatccatttatctttaacttgggtgccctgcgtcttcaaaaacagtggggcaaattttcccatcttttaccttttgacatttattcatcgggacccacctgattagtactcattcttcctttgagccacatttccttttttaaggggacaaagggggttagaacaccccaaaaattctgggggcgtgcccccgacacgagaattacaacctctcgcacatttcagatttcac

SEQ ID NO: 207638 - DNA, 803 bp, Homo Sapiens
ttactttgtgccaagccctttattgagataggcactattattatccccattttatagaagaaaccaaggcttagaaagcttaccagcagttggccagctgtggtgggctcatgcctgtaatcctaccacgctgggaggccgaggcaggtggatcacaaggtcaggaaatagagaccatcctagccaacatggtgaaaccacatctccactaaaatacaaaaattagccgggcgtggtggtgctgcctgtagccccagctgctcaggaggctgaggcaggggaatcgcttgaacctattccaataaaactgctccttattggtaattgtgataataaaattgtaccatacttaaaaaaaaaaaaaaaacacaaaaaccaaaaaaaaaaaaaaacaaagaagcacaaaaacaaaaaaaaaaaaagaaacaagaagcaaaaagaggaggggcgggccacccataaaaccccccgcggcggggcggaacaacgaacgacgcaccccgcctgtgaagaaggggcgccccaacaagagacggaccaaaataaacagcacagggaagcgtggacgcgcgacaccaaccacgccgactgcgcgcggacaacacaaggccacgagcgggatctagtcgagaaaagacacaacaatccacgggggcggacgtcaacaatacgtggacgaccacacacacgacgcaaaaatgaccgaccgagcagcaaagacacaacagacgatgctacgaccggcaacaacaaccaatgcgcggcggcgacaaacaccgcaacgaggagacagagacaatctc

SEQ ID NO: 207639 - DNA, 810 bp, Homo Sapiens
acctgctgaatacgcctctgtactaggcacataatggaactaaaaaatgctcatgtccagtttttgtgttgagtgaacaatgctgcagaccctaataagattgggtacagatcggcatgcgcctgtagtcccagctactcaggagaattgcttgaacctgggaggtggaggttgcagtgagccgagatcgtgccactgcactccagtctgggcaacagagcgagactccatctcagaaaaaaagaaaaaaagactgggtacagatgtgatattggaagaaaaagatcaagctgatgaggttaggatacccaggccctttggacttaaagatcactagtgtctaaattccatcgatggcatttcagtctataggtaaacttcctggaagctggatttggagacagtttatcatctgattatcgggctttcgtataggtccttagggagcagcttacctgaaatgcatttagtgtacaccagtctgtaaacttcaacctgtaatgaaagtgtaataacatgtacattgagttgatgtgataatgtgatataataagaaatatatatttgatcttcctatctagttcctggtgcagagctcctaaaagcctggtaaattcacaagtgatggagtacatctttgtctagtattggtctttgaccccagttcctgaacaaagctcctaaatttctttaaattcccaggataggagaattgcatgcctatgaggtcatcttgatggcactggatactcagatgggggtgttcacaagacacatcgattggagttcaacgtagttccactacgaagg

SEQ ID NO: 207640 - DNA, 917 bp, Homo Sapiens
cactgtgtgaggctctgaaaatacaggggttgagcaaatccagatatctccctgccatcatgaagtttggagtctatgagataggaccccctccctatggagaagccaccaatgcagtacagggtgacctggggccagagacaggacaaatgtcacctcctgcctccatgagatactctcactagtcatattgtgggcaagaatgtggcttacacccctagggttaacaggatgctacccaagctcatggaggaagttgaatcttaagttcccttgaaactttctaccttggtggcttttctataattttcttttttctttttctttttttttttttttttggagattccatctcaaaaaaagaaaaaaaggaaaagaattatttacttgtgatggaggttgcaaagaacaccagggcccgccaaagggttttaccccatgaacaatgtgtgggatcctgacttttggttacacgagtgattggtcccaatattggaatctgatttaacattctgtggtaacccaggtatttgattgaagaaggggtcactaaggggagacatgacttgttcctattttcttttcatggaaaacctgtttttccccctattaagcatatttactcggggtcattttccttcttgtggaggttctaattaaaaattctgggacattcactttaaaatagttactttgcctctgtagtggtggcattcataaacatgggaggttttactctctttcaaatgagtttttttgaacaattttttggtgttactggaaccaccgcagtaagtttaagaccgggattggaactcatttcttccagaatggtaagtcaagctagggacaatacatatctagcgcaggttaattcaaaactcggcgaaaagatagagtggaacaacagagatata

SEQ ID NO: 207641 - DNA, 929 bp, Homo Sapiens; identical to SEQ ID NO: 49159

SEQ ID NO: 207642 - DNA, 683 bp, Homo Sapiens
atttaaaatgggatctcaagtttcaaatgatcatcatgggcttttcatgtgtatagaacaccttcactctgcataatcctacataacaacattcttgtcttctagtacatgaaaaaatggggtaacatagcatttaaagtagttatcagggaaaagtctatactgaagtgaaccctacactgttattcaagttgccttaacacattataagctattattctaaatagctttaacagattatgtggtcacactgtattactaatagttaatttaaaggcagactcagcatgttttaaactcctttaagttacatcttcagaaagtcctgaagtccttcagtattaggtcagctaagggaagatatatttttaaaaatagtgataagactatcactaatatcatactcatcctgtaatatgtaaacacagttctgttgttactggcagaaaaatgtggaatacccagcattaagtgagagaagtcagcctacttttatgatgaagctactgggatttatttgaactattattttgttagatagtataaaaatgttctaaagtgcctatttttctcattccccttttaaaaaaatgtaatgctaaaatttctagaagtgttgtaaccacgggaatacaaaaaaaatatgattgattatccaaattctcttcttcttagtaaggaaa

SEQ ID NO: 207643 - DNA, 324 bp, Homo Sapiens; identical to SEQ ID NO: 40747

SEQ ID NO: 207644 - DNA, 472 bp, Homo Sapiens
aagtacttattgttatttctttgtgcatgacataaacattaacccagatctgatacacaaggtcagtaacctacatgtttctgagagggccaattgagtttggagacctacttagaattaaagatctgatcggtgaatgaactgacttgcttttgggcgtggccctcttctccccacctgtgaggtttcctgtctgtgtgtatttccactccaccccattcctttaaacagccaggagctttcttcaggagcagccaacgccttccaaaggtcaatgtcctctagtccagagaagcttcccacagcattttaactaaaccagaaaatgaagctggacttgatatttcaaaaacaaaagcattgcaataggatatatctttatttatctatagacttaatttgtcatttggcttaccatctttattttgctttctatacaaatggctagatatgatagaaaataccaggccat

SEQ ID NO: 207645 - DNA, 585 bp, Homo Sapiens
atatttcttccatccatttattataaccagatgatgaatgggaaaagtaccttaaagtaaacaaaactggtgctaatccatggcgttgaaggaaagttttgagagaaagctgtccagtgatggtcacatagatttttaacatgttccactttaggtaggcgaaacctttgagcagaaaatagtggatcttttctccaaaaggtgtttaattttatggagatgttgaaaggtacatgccaaatctgagtatacgtgtgaaaataatatgaaagaggagcaaatactaaaccttgtatatcaagtttacatggggaaaaaaacattagataaataaatacatttacatgcctctttaagaaatagccctttggcccacaggatatactgtttgaaaatggaaagttattactaaaaagtctgctataatttattttagtcttgcacttaacagtcccactttcacatagttcaaaatcaggatatgtggatcttgattgggccttaagatgtcagttttgaagggctcagtcagctgcgtgatactaagatgggccctttgaatctttaggaaagttcatacatttt

SEQ ID NO: 207646 - DNA, 511 bp, Homo Sapiens
aaggcatcacaaagaacaagtctagacactggttccattccagcaatagtcaactgacaagtcctttcaaatggcctaagctatatgatctatttccccttctacaaccaattctgctcacgaaaacctcagagtgttttttggaagaatttaattttttttttttcagtgggactatcaatttgcaaagcatgagtagtagcttttcagttaaaacctattgctgcagggagggtgtgaaactgcagcgtggtggtgttctgtcacatgcttcctgccctgcacccaccccatccagtcctgcacacacgcacgtgcacacacacacgagcactctactctgtctctcaaatcgtattaacggatggttctgagtcaaaacactattaaattactttgtcaaccatgacaggatttatggatacataaacctgtatttctgctctctgtcaaagaaagtgcaaacaatgttcaggaagcatgtttaattctatgttgcagagagtgcctg

SEQ ID NO: 207647 - DNA, 530 bp, Homo Sapiens; identical to SEQ ID NO: 60581

SEQ ID NO: 207648 - DNA, 585 bp, Homo Sapiens
gttttttttttttttttttgtattttcaaagtatttaggaattctttaattagaaaaataaaggcaatgggattatctatcaggttctaaaagtacccatgaattaaatcacttacatctcccatttaaaacaaaaccttaaatcacattgctgttaagctttcatacagtaagaaataagaccaagctatgctggagtacaaaaacctgaaattctgagcatgaaaataatttattgattagacatcttgcttattcaagcattaggcctactggagatagaattaacacagctcatggaaaaggaaaaaaattccattcagcacctgcttcctttcaaatttcctggggacatggtttatgcattttgtactatagactcaccctaaagcatccccatgtgcttgatgttgattaacttgaacaggatatgagaaactttgtgtacactcaacttggcaaatatcattagcgatgcgacttttggaaacattcttaggcacaagaaatagcactgcctgcagtgaaagtccttgataatcaaagagaagaattccattaaatataattttacaaatatgaaag

SEQ ID NO: 207649 - DNA, 703 bp, Homo Sapiens
  misc_feature (536)..(536): n is a, c, g, or t
  misc_feature (659)..(659): n is a, c, g, or t
ttttcctactcacccgctatactaactttgttgtatctgtgatgcccacacagaaagggagaatgcaaatgtgctgaagaactaacaactgtgggatccaggtgaggtgtacaggtatttgttgcattattctagcaactttactgcagatttcactttttcaaaactaaaagttgagggaaggggaaacaccaaaaaaccctcccacggccactcgccctggcttgggctgctgctttttgagatctcagaaagttggacaagggccatgaccagcagcctggtccaaaacaacaactaggaacctgctgtgggtcacagcttgggaagctgccgggggcagatttcactttgtgcttctgggtgagggcaggggcgtgagggtgataaaatacttttgtgagctgaacagtggggaaacaaagtttcaaaacagcattgacagtgccttccctgacctcacaggcactataaacatgagacttctcccctaaagacagggtgacagtacagctaggagcagatgagcagaaggngcaaaaggacagcactattctacattttcacaaaggggaagaggaactacaaatgtccaaaacctatgggactcacaaacccttcagagcctctttgtccctgaaggtgggaatggatcagcngtgctattccagccctttacacatctcaggccattcacttcttt

SEQ ID NO: 207650 - DNA, 532 bp, Homo Sapiens
tttttttattttaaagattaaaaatattttatttaaacttttcttcataaacacttttaacatttttttcaatttaaaaacagaatggatagcataaacatgtttgaatagattatatccacggcttgggaaaaattacctgacaaaaatgtaaaggctttcaaaacaggtataaaaggcaaaccttaaattattctaagatttttatatcggccctaggattatttgactactggcccaaaatgtacctaaaggtcaaaatatttttctatagacaaagtatgcccaagaggtatagggcatatacaagttaggtagaaaataacctctcccaatcacctcactggaccattccttcagaaagcaaacacctaatccttactatatactgactaataacattttaaatgcagttgttcccaaaatgtaaaaagaaaaccaaagaatttaagggagaacaaagctgatggcattctcctcaatgttacttgtgtaatattgaagttatacggtgtactgaaaggatatgatt

SEQ ID NO: 207651 - DNA, 490 bp, Homo Sapiens
  misc_feature (474)..(474): n is a, c, g, or t
tcttaaaatatctagtggccaagaggtctacaatgacacactttgtagaaaccacacaggacattaacgtaagtttaccttctagtaattattttacaaatgtgttatttcaattagattacatattaagacactgctatgctgtaacagcactgggatgtcactaattaaggctgtaatagggcaaaagtgaactcctaataaatactgaattagagatttcttctacaagtctgtgagtttaagacaggttcaaaactaaaataagaaaaaaacactgaaaaccactttgctcacataatttatatgttaactaaaatatgtattgttcacaggttactaatccatttcaaagtgtagattttatacaaagaatatcacagaaatattttacctccctctgatgttaactctgataagctatgggatttaaggaaatggataataagctcgaaaagttcaaactaatggatntgaatcaaaaaactct

SEQ ID NO: 207652 - DNA, 247 bp, Homo Sapiens
gcggccgcctactactactatacggctgcgagaagacgacagaagggagacgtttgcaagacgagttgtactgctgtcacaggaaatggacgctggattacaagcatggcagctcaggcagcagaagttgcaggaagaacaaaggaagcaggaaaatgctcttaaacccaaaggggcttcactgaagagcccacttccaagtcaataaaaagcaactcctgcctcccttccccaaaaaaaaaaaaaa

SEQ ID NO: 207653 - DNA, 523 bp, Homo Sapiens; identical to SEQ ID NO: 60179
  misc_feature (236)..(236): n is a, c, g, or t

SEQ ID NO: 207654 - DNA, 479 bp, Homo Sapiens
ttttttattcaaaatatgaaattttattataattgatgtttaatgcaattcactttacgaaggtttttgtggttttccctaaaatttctgttttaatgaaggctcctgatcatcctggatgtcgacaagttttcttcttcatgtgacgtctctgatgcacaataaactgattagtttttctaaaactgattatattcatagggtttcatctcactctaacataaagtttaagctaaactacgtccatttaactaataagccaaatttgtaagagcttaacagactataaacttaactcttgctttaaagcaacaaaaacaaaaccctgatgaagacctggaagtgaattgttcgtttttcagactctagcttccttgaccttgtgctctatggttttgaacacacaggacccaagtttgctgcagaaataacctccaaatccatcttatgaaccaggaagactgtgagggtttttcttt

SEQ ID NO: 207655 - DNA, 572 bp, Homo Sapiens; identical to SEQ ID NO: 60321

SEQ ID NO: 207656 - DNA, 665 bp, Homo Sapiens
actattctaaaaatttaagatcatgctattacctttaagaaaaataatagctttacgatggtttttaattctccatatgaaagttaaagacttcctttttggagtccaatggctgttaacataaatctaaatcctgagtaacctacgagatgcagatcacctggccaatcaagaggctccagggacatgtttacgacatggaaaaaccatgggtgttttttgcccaaaaagagtatgttccctgatggaaaaggcaggcttgagttcattatcttgagaacaaagatcaaggcaactgcagtagctgcttacctgtgtggccctgtattctctcactgatttttgctccaaggaggtcccaaacgagcagttcaccagactgactgccagataaaacggaatttccatcccagacaaagcacctgcaagaatgatttagaaatagtcctttcttcatcatgaaggaaggatatgttgaactggccaatgtaagcccaaatgaagtgatcatgaacatgtctgtaaatgtcttcgcccccagtaactcacaaactatacctctggggctcatctgatgtcatggaagagatgagcattcctgtctgcacatcaatgacattaagacagccatcttgtcctgtgctgaggacatggccactatctgc

SEQ ID NO: 207657 - DNA, 539 bp, Homo Sapiens
aatgtctcctttctttaaatccctttaagtcatttgttggtcctattcattctactttaaagtagagtactcctgccctcctgtccctctttgttacctccagcctggctactctagatcctcattccatcaactgtggattattacaaggatctcctaactggcctctacctccagtctcttctttctaatttagccttgtcacacttgagagattctttttatgaaagcacaactctaataatgacactgactaaatttcggtgtttacctacttcctgtgaagtgacacagaaagccctcagcctggtatacaactttctataattttgcttcaatcttatctcccactcatcccttttgtggatctttttttttttttaagactaactgctttatactagcatttaatgattcatatttttatataccatagctggtaaatacaagctacgtactttatttggtgagctactaaactataatctgttccaactctatagagggaaaactggttatgttggagttatagagaagtg

SEQ ID NO: 207658 - DNA, 691 bp, Homo Sapiens
tgccagaaaagtattctttcaatatagaaaatcctacatgttaccctgcatgtggctaggatatatcataacggagtttgtactgagtccttctgatttgctggatgaagggctgaaaaatataataatgacttattaaagccgtgctccaagtgaccacaccggctgtcagtggagagatgcctgtttaagacacaagaagatgccctggtctgttgaaccctgccggtcatcacgctgtcccaccaattggctggtctagaatgcacaggccttttgcatgttctgtgtttccttttgttctcctgaattattctcatgtcctcatctagctttgccacctacacgaatcctctgctcagtgatgcctgtattgtctcatgagggggacgatgcaagacggtggacctgctagttttaagaatggatgtccgaggagttcctgggctgttgctctctgagagggctccctcaccaacatcaagtctaggaatccccggagcactgaagaaaccttgtgtaggtccttcactcttggaggtaaactgtcccggatcctccgcatcgcctggaggggaggctcattgaagtatgggggctcgccatcaatcatttctatcaccatgatcccgaaggaccagatgttcacctctgtcccataaggtagcctataaatcacctcatgggccat

SEQ ID NO: 207659 - DNA, 538 bp, Homo Sapiens; identical to SEQ ID NO: 59517

SEQ ID NO: 207660 - DNA, 468 bp, Homo Sapiens
tttttttttaattcaacctaggggctttagtttttttttaatggaaagaactggcctagaataacctactgctacagatacagctattcttctgattgggatggggaatccgtgcccacccgtgatgaaggtcccagtggtccagtcccctgcttcctggataaagggaggctcctcaggatcggaaagctaaaggcctctaagccctgatcaagtccaaagtgaaaccgccccagtgctaaaaggacggattccctgaacctgtcaagggcataagcagcctatatttgcaggtggctcacggttttcctaggacctgaagaactgagatttgtggtcagtttaatgcattgatcattataaactgagtgtctaccaggggccctactttgctaggcaacagtaggggacacaaaagtagtatgtgatcaacaaacactatctgagctcctagtgcgtggcaagcct

SEQ ID NO: 207661 - DNA, 446 bp, Homo Sapiens
caggaggcaggtcctaccttgctaaccagggcaggcgcaatagttttattgatgtgctcaacagcctttgagacacctggaaggaacaatcaaatcaaattactgacattaactttaaaacaggcttgagcagcattgttagagagaaccactgttgaggccgacgcggaagcccaccaagggaccttctgtgggacctcttccccctctcccctttccccccagaatcggaggactttccggcccagtctgagtgctcctacctaggaccccagagggttagagccacacaaaacagcagctggctcagaacgatctgactggaggttagtttgcaagaccatgcactggaaacgccattaaacaacggtcaaatggtaacatgttcgtgtgtgtagagtgcttcttacagcattaaagcgggactgaacacccagcaccaccac

SEQ ID NO: 207662 - DNA, 543 bp, Homo Sapiens
gtttgtatgaacaatccattggtcacttagacccctatgtaaaaataaaagaatcctcaaggcatgaaaacaccagtaatctgtaatctgcaggactcttcccctgtctgggaaaatatttgccacaatttgcctcaagcaaattcttcttggtcactcaaggctaagaaaaaaattcagattgtaagagttgtaattttttctctctctctttttttttttttttgccagcaaactaccattctggtggcaaatataaaagtgcagaatatatggaccacgaggccgagcatacaccactaacaatggtacatctgcctgcccaggctgcttgggagtctctggaacaggctttttaatatttattctacaatataaatgtaggtataacctattatataaaccatcttaaacttaaatctccatgtacaaaaaagactaagaatatctaataataactagtgcagtgcgtcagtttttgttttttttttgttttgttttgaaagaataactaggtaatatatgaaactagtttcacactct

SEQ ID NO: 207663 - DNA, 478 bp, Homo Sapiens
ggcattgataaagcagaattttaagattccatccacaggtgacttgaccttgggatattctaacaggaaacaacacccagtacccaggtccacaagtgtgcagccacagaggagagctgtggaacttagctgtgattgggccattttgtgaaattaaagaaataagcactcccggagggcatgtctgaatacaaacaatagaggctgcggatctcccagctgaggtgtaccctctccctcatatgaagttctttactgaacgcttgccacagccaacgcgccaggagggatccaggaaggtgccaggcggccccacccttcagccagcagccatctgggaggcaggccaagggagggccaaaactgctaacaccagaaattaataaggtttatagagaaccacataacctattctcttcaaatcactagcctataaaggcagtattgagaactacaagtttcacaagactggaactga

SEQ ID NO: 207664 - DNA, 464 bp, Homo Sapiens
ggagaagtctagagtgtttgctttattcatgttgtttatgcgttaaaatataagcatattgcatacataagcatatttacacccacatctaaaagataacatattatatatacttttccatacttctgaacaagcgtctcatatccataactaaaaattagatgagaaaggcaaagaactcttgtcttcgaattgacttcattgcactatatagcatttcacactgcggttccaggccacagggtcccttgggtagggggagacaaagggtgtggctgacagggagactctaggactaccattgccacttccaccagagcagccacacttctgttccacatagttggcatccaaatttgatttgaaaaacagtttccactactaaaagaaaaatcctatgagaaaatgaccacaagccaattatccactcaaacctgctgatcctggcctctgggagaggctgt

SEQ ID NO: 207665 - DNA, 574 bp, Homo Sapiens
ttctgttgtttttaaaaacatctttaatatcagggaaagaggtacaatgcaatcagtagaaaggtcaccagaaaagaggaaggaggaacaacgagctgtggggaaatgctgatgggacaaccagagggagaggggcctgcacggagagcaggcagaggagggtacaggggagaggtatacggtcattaccacgacaaagggatggaaacagagagcacagaatttccagcaggcaggatgcatccacagcacccaggggagaacccagcagaggccgtgagaaaagcctgggcaccgcggaagcagcaggaaccattctgggtgagaccacacctgcccttcttcctcaatgtccatcttccactccacacagcttctctcagcctaggccaggtcctggggataggaaatcctctacaaacaacataaatatcttgttagtaaatgcagcctgtcttaatactgcacaatatgcattgtttccatccccaaatgaacttgtgattaaaggtccatgcaacccagaaatgtctgaagagagaggtagaggggtcgcagaggatgcatgggtgaa

SEQ ID NO: 207666 - DNA, 514 bp, Homo Sapiens; identical to SEQ ID NO: 59653

SEQ ID NO: 207667 - DNA, 517 bp, Homo Sapiens
tttttgctaaaacatggatttatttgtgtattaccgtcaaatatgatcaaagacacaattctgatagctttgattatctgtagtactagtgaaagagcacttgtacagaacatattcatgtacaaagccaatcatttatttagcactaaaatcaaattataaaaacaacaattccatcttaaaacaggcattttaaaagcatttctgtggttctaagtttgcatcaagacagcctaagtttgcatctgcacaatctggatacccaaatccctctataatttccaaagacaaagacaatttttgctagttgtgaggtgtcagggggaagcagtgatgccctgcaaacagtctaatgggcccagggaaccctgtttctttctcaacctgaggttgcatccttgatctccaggaaaagagattagtgcttgcttaaccaggttcctagtaaatggtcagggatcttctatgcaataatgttgcaaaagttactgaagaggaaaaaaaaagcacaacggag

SEQ ID NO: 207668 - DNA, 585 bp, Homo Sapiens
tcaaagctgaaaataaatggtttatttttaacataagtaaatttacaaatcaaatgaaaaatgaaaaatacaaaagttcatgaatgaaataaaaaagacactctcaaaatattaaaacctatggaaagaaaataagtaattaatgaatgatgtttttgtttccaaatacaatgaagtgattttttattagagtccttgggaatcatctaagttacaatacagaagagaattaaataaatcgtatatgattttgtaattagacactctatatatcacagttctttgttaacctgggcatggaacgtccctatagcatatatttaaaaccattaattttttttaaaaaaatttgagacatggtttgttcttgttctctaaattatgtttccccatttcccttgaatgttctctattggccatcttctggaacattaaaaaaaaatcttgaaacaaattctcttgcaatgatacgtatcacataaacttgatatgctttatattacagcatttgtaaaattaagtaccaaaggcaggcatataaatagaaaaaacatcaaggtatttctaggggtgcccaacagcatt

SEQ ID NO: 207669 - DNA, 371 bp, Homo Sapiens
acattaagttagctatgagtggcaagagttacatggttgctccagatggttagtgtctaaaatggccaagagcagagaagtgctttactttacgtgctgaaactttattttagtaaattctactctagttttaccatctggagcaacacgatgtatactctttcattcacacagcagcattttttcattttttaaaaatgtgtaatactaaatacatgcttgtttttacacttctggaaaaaagagcagggggagcttcaaagattttcagaagtaacacgagttagctaatatcctgctcctaagcctgggcaacatggtgagaccctgtccctacaaaaaaaaaaaaaaaaaaaaaaagatttgcggcc

SEQ ID NO: 207670 - DNA, 420 bp, Homo Sapiens
ttatgcagtaactttgcaatgactaagggtctgtggctaacagtctgaggggagaggtacagaaatgggcctaaaacaatctcgggaaagagtcctatggacaaatgcatttgtcccaaggaagactatattcagcttcaatctgtggagaaggacttttgaaaggaacctcaaaggagttgggggagactaagactaggatcctagatttaagtatcctcagagctgcagggagagttccttaccccagtaggcctgccctttgatccatgcagtttccacttttacagcagtaaccttcctttgctatcatggtatatcctcctctgtagcaggcacttgggacagcttttcagagaggcatcccgtgagtaccaaaaatgcagccgtgaatgctgtgactcatccttggccaggcca

SEQ ID NO: 207671 - DNA, 589 bp, Homo Sapiens
attacaatgacaggaagactctggatacaaacacatttgctaatataatcactccactggttacctaggcctagacgtacaaaaggacacccatatctcatcaggagaaagacaattttgagtttctgggtgtagtaccaagtggttatgatcaccacgtacgtggtctatccagttaactgtgtggcaatttgctatttcaagtcctctcataacagaaattactgaaatatgtggaacaccagtcaatataaagaattcatttttaaacagactagtgaatttgtgtcataaacacacttgcgtatggatattaggagagcattgcttgaatatctctaaaactatttttaggaattaaaagctttcatagttaatggtatgatattggccttcagaattcatattgataaaagcaaaccttagtcatttaacaggaatgtttaaattttagagattctaacatgcgatgccgaaaaatcctaacatttccacttagtaatgtcagggttgtgccagttctaatttcccatagctagtaacatcagaaaatatttatcagagattcaatattggtttcattagacct

SEQ ID NO: 207672 - DNA, 585 bp, Homo Sapiens
gctgtctttattggaggtctgtggctggcagggtccttgggggtggctgcctcctggatctcttagagacactcctggcaggtcttggcttaacagtcgcggtgaagtgcggccaggtgcgcagcaggtcgaagagcgcgtcgccggggcagtcggtgcgcaccagctggcggtggcccagcagcgcgtagtctggccgcaggaggccggcgcgcaccgcacaactcgggagcgtgtcgcgcaccgtgcgcagagcggcctcggtgggcagcgccgcggtgtagttgcccactatggccacgccgaagccccgggagttgtggccgagcgtgtgggcgcccacccagtgccagccgcgtccctcgtacacgtagccgtccgagcccaccacgaaactgtagccgatgtctccccagccttgcgtgtcctggtggtagcgctgcatggagcgcatgttggctgcgcagcgcgtgaagtccgtgcagggtggtgcaagcacgtaggtgtgatgcacgtacaagaatcccagcggcagctgcagcagcttccggcgggcccgataaggcgccgctccccagcgggagg

SEQ ID NO: 207673 - DNA, 640 bp, Homo Sapiens
ttttaagacacggggtcttagtctgtcactcatgctggaatgcagtatcacaatcataactcactgcagccttgaacttctgggctcaagcgatcctcccacctcagcctcccagagctgggattgtatgtgtgaaccaccattcctggcttgatctgccttaatatgccataaatccttgcttggcatcctttcaaattcaataaacctatttacctacaaaagtagataagatcatcatgtctaccttaattgtttgcccctaatatttggatatacagcactacaaaatatttttaaaaatattgtgtccctggcattgtaacaaaaaagttttcaaaacaaagcactggatgagtccaaaatattattgttaactaccttaaaaacagtcacaatatctgagaagatataaaataactgccaaagacagtccaaccaatcattcaacgtatgttaaaagaaaaaaaagcataacaagggaatcttgaatactccagtgcctgctacaccaagtgtgctctgtagactacagcatcagcagcacctaggagtttatcagaaatgaaagactgcaggtcctaactcagacctactaaaccccgaaagtgcaattgaacaggcttcccaaggtgatctt

SEQ ID NO: 207674 - DNA, 595 bp, Homo Sapiens
acagagtctcactgtcacccaggctggagtgcagtgacgcagcctcagctcactgaaacctccacctcctgggttcaagcgattctcctgcctcagcctcaaccttccttcccacttgacttttttaactattactaaacagtttgatattttgctgtctttgtttcgttccaccttttggtggaaaatattaatttgtaaaatttagaaaataaaattaagcaaaacaagcaaagtgatcttggtaagaaacctctaagaattaggttatatcacaacgaagaaaataaagcctctgcctttttaagataatgatgtaacctgaaaacagtgtgataagaaacagaaactaaacaaaggcaaatttggcattaatacctggaaaaccaccaaacaaattaagacagccattataaaacctttctcctttaaccccaggagctctggtcataaagaggttcgttcatcggaagatttatggatagtcatcttatgaaataaataacctggaaaaacgaagagttgagatcagggttcttaactattaacttgttggggaaaaaactgcaattaagtagcattaaccctttaaaaa

SEQ ID NO: 207675 - DNA, 529 bp, Homo Sapiens
  misc_feature (521)..(521): n is a, c, g, or t
aactatcacatacttctcatccaggctgttctttgggtcgggggggctcagttgtgataaaaggtgaagttagaactagttaatggagaactagctcccattatgccacttcctggccaaatcagggactgaccatgggactgccccatatgtgaacctatgttgccttcactgagactggggactttgagaagcactggcatatttggaaactttatgcagcagttgactggtctaaaaactacacagatgaaatctctctcagaagaaatatattcttaactatcctactctctttctcctctataataaatgttataaaggtttgcccctgtgtttgttttactttacatgtgaaacaaaaattttcatgggtaaatgagttaaagtatttggcttttagctcaaacaaatgagatgttagtttaagaatagacctccacttataggctgatttataacatttgcattggaggatatggaaaggatataatgaaaacacaaaaatttccgtggcattntaaatttt

SEQ ID NO: 207676 - DNA, 599 bp, Homo Sapiens
gagggcagagggcacttaaaggaatcatgttggtgaaaagtaaaagatgttaatataaaaaaaaaacacctatggaataattatgcgtcaattgtacatatgtatcccagtgatcacagctgacgtgacccatgcaggacaccccaccttcaatgcctccagatgtgctgcatggggagtgcacagcccagtgtggttctcctgcaaaatgcgtggcctgagtgccactgtgagtctaaccccacctgagggaaggaagctgtatcacctatcacgatattccactcttcaaaactagccacagcatgacaaacattgagaacccaaggaggaagtgttaagagatgggacaactaaataagaagcaacgatgctggatcattattgttttaatgtgaaatttcctcaatgtgataactgtattgtggttaagagattgtccttgtgtttaggaaatacgctcctttggcatgaataacggggcacaaacgtctgcatctaactgaaagatttgggaaaaatagaatgagggggtgggagtgggtaagaaaaatagaggggtaccgggaaagtgaagaaagggtatttgaagcttttgc

SEQ ID NO: 207677 - DNA, 595 bp, Homo Sapiens
ttctggttttattaatatcaattacaaacataattggtttatttgaatcaagtaatctgaagatagtagagagacagtactgtaaatttcaaaggctattacaacaaagtagtcttacataggctgagaaaatgcaactagaaagcatatctaagtaaacaacttctactattgttatttatattgaatgaagtaatatttgatagcccaaaatatataatttatgaatacagccaagaacacacacataaaataaaatgatggctgttgtttctaaaatacctgagaataaacacaggtttctattttactagcgtaacaacacatcctactaagtgaaaaggtaacactcacttgattagtgccaagaaaaaaaaaaagtatttccattggctttcaaggacctttcccaactaaagatggttgagaatcatacagatttaaatacatgcctttttccacagcagacatctttcaattatttagaacaatcggaggggaggggaactctgcattgattaggaactccagataatttgtaacatatgcataagaggcacagatccactaagcattcattttcaacactgaatga

SEQ ID NO: 207678 - DNA, 588 bp, Homo Sapiens
gcactactatatacaagtctcgatatccatgaatgggaaatgtaccttgcattcatctactatgacagagttgtgtgcagcatagacacattgattagagttgctttccctgtggttcttcatgtcatcataaatggattgagtcttggtcatttcaatatcttcatgcactcgatgctgggagtcaatggtatccagctcagacttggagaggtgatagactatcccagccccaaaagagtcacccacaacattgactgaagttctcatcctgtccagcagccagtccacagccaccagcaggctgatgtcctctgttggcaggcccacggctgtcagaatgaggagcatggtgaccagcccggcactggggatactggccgcgccgacgcttgccagggtggctgtgaggcttacagtcacaatctgtcctccatccaggacaacaccattcatttgggctataaagatggcggctaccgcttcataaagggctgtaccatccatgttaatggttgctccaacaggaaggacgaatctagtcacacgcttatcaatccccagattttcttccaggcaacgaaaggg

SEQ ID NO: 207679 - DNA, 591 bp, Homo Sapiens
aagaaaagtaaaaaatagtacaaaggtagacaaaagccattcattagtccagtttctcccctcaactttaccctcaacagccacttataacagggaaccaaaaaagagtagatcatgctcttaatgcctgaaaacacgtgaccttccttcatcttgagaatgtgctagcaccatgtcaaagagcttcattgtactgcatgcacaaaagggggcagaattataatgacctaagtatttgaccttcatgtagtaaatgcatcaaagcttggctccctaacaattttttgtcatttataatagaaactgtttttcatgcaggaaatgccacttttctttcaaggacaaaacccagaattttactcagtagtttttttaagttgcatatatcttaagtgctacattcttgataataaacataaaatctttttttttaaatcagcagataagacaaatccttctcttctatttgccaatgccacaaacacacacacatacacacacacactttcatacccacattccctctctctctagtgcacgagtgaaagttcttatccaaagcaggctaaggatttttcactgtgatcacat

SEQ ID NO: 207680 - DNA, 683 bp, Homo Sapiens
  misc_feature (534)..(534): n is a, c, g, or t
tttaatgctgtgtgatcatcttagtgcaccacacattttctgcattttgatttttttcttttgtggtgactcccgaagatagaatttctgagctaaaggatattttattttatgttcctgcatacttttgccaaatggttacatacaaaggatgaagcctttacattcccactggcagaaaatgagtacccacaagtgccccaagtctatggtaacctgtcctatggagggaaatctgaaagctcttagtgagaccagtgggcagatgctgagcctgcccccagacagagggagaagtcgaaccaccaagcatttgctaggcggcgcagcatctatgtgatcagggccaatgatattcttttgctctttccagcattgcccagtgatcctggggatgccgtttggaagctgcacacctttgacatctttagggtcgaagagatgatgctccccatggggactgaccagtgatccattagtttcttgtggagtcttcggaggtctacggggcccttctggggtgcacctcatttnccccactcctgacttcgcaatttactcctttggatctttccagaaacccgcttttgcagttcttgaaacaaggccacctttcttgggtatttgtatggagcaatcacccttttcacatgcttcttgagttcccgcgttagtggctctgg

SEQ ID NO: 207681 - DNA, 698 bp, Homo Sapiens
  misc_feature (537)..(537): n is a, c, g, or t
  misc_feature (545)..(546): n is a, c, g, or t
  misc_feature (560)..(560): n is a, c, g, or t
  misc_feature (570)..(570): n is a, c, g, or t
  misc_feature (606)..(607): n is a, c, g, or t
  misc_feature (638)..(638): n is a, c, g, or t
  misc_feature (649)..(650): n is a, c, g, or t
gagtctcactctctcacccaggctggaatgcaatggtgccatctcggctcactgcaacctccacctcccaagttcaagcgattctcctgcctcagcctcccgagtagttgggattacaggtgcccaccacgcccggctaatttttatatttttagtagagacatgatttttccgtgttggtcaggctggtctcgaattcctgacctcaggtaatctgcccgcctcggcctcccaaagtgctggcattacaggcgtgagccaccgagcacagcctccgctccttctaacagagcaactcggctcccctgcaactctctcttcagcccctctgtccttcctttccctccccagcacttatctctcttctaccgaactgcaggcggtgatttcacccaagaacgtgagagttctcctagatcgggaagagatttttgcacaactcaccaacatacgctccctgcctaggacagagtttggcacgggacaggagctcagtaaacatcggatgaaagagtaagttaagcttgaaggactggngggcaganngtcgcgatccttangccttggccntgagaccccagagcgaggtcagcaaccccaaccggnngtgggacaaagacgaagcaagaaggtcttgntcaagcatgtnncccactaaacctggccggagggcttcccgggccgcgttatacgggact

SEQ ID NO: 207682 - DNA, 582 bp, Homo Sapiens
ggtatttagtagagatgggtttcaccatgttgcccaggatggtctcaaattcctgagttcaggtggtctgcccacctcggcctcccaaagttctgggattacagacgtgagccactacgcctggccataatctctttctaaaaagtatcaaaggtattgtttacagtatttgagagatatttttgaagccaaggttaagttttacttgatttcatttaaaaataaaaaagagacttcctgattcccctcacacactgacctcctcataagcatgtatgggcacacatgcacactgacccacacacttatctcaagattccaggtggcagaggaactgctggatcaaaacacatgttccacggaccacaggtttaccaggaaggaactgaagctgcttgtaaggttattacacaactttttccttggaatcacaagccatactgtggtatgaagaggaaagtaccaagggctccatggttaaggtatgtcctctttctgatggatggtttttgcaaaggctatcattattgggaaataacaaataaaataactaaacccatacataacacagatttcagatgt

SEQ ID NO: 207683 - DNA, 519 bp, Homo Sapiens
aatagtataaatgtattttgtaatttaaacaaaagcttctgttaacattattgctaacatggctagacactgtcactaaatttggtggctctgctcaggatggtctgaacacatgcaacattctttttggagccacctgaaaaacaaggattcatcatccagctgaaaccgaagacagattttttttttaccaaactggagggaattttgaaatggctgaccaaatctgtgggatacagaatgtacaaaattctcttttagggttgctggggtgacagggcagctcaaagaggtaaccatctataacatctgaaactgaggtatgagacctgtattacaactgataacaaaaaaaaaaaaaaaccgccatatatttaaaatgctggagatggtgaagacacacactcgtttcaaatattacaccccctccctccaactgaagcagcccattccaagctgcttacttgaaactgcatgtaacatgtcttaggatgaatagcaccagcaggggcttattta

SEQ ID NO: 207684 - DNA, 587 bp, Homo Sapiens
  misc_feature (583)..(583): n is a, c, g, or t
agtcttgctctgtcactcaggctggagtgcagcggcgcaatctcagctcactgcaacctccgcctcctgggttcaagtgagtattttgtatttttagtatttttagtaaattttgtatttttagtagagacgggatttcaccatgttggccaggctggtcttgaactcctgacctcaagtgatccacccacctcagcctcccaaagtgttgggattacaggtgtgagccactgcgcccagcctatagttcttatttaaactaataatttgacctaaaaaccttgtaggttcatggaatgaatgaatattcatagagtgaatgaaggggtgtatatgtattctgatttcaacagaggtaggaggttcttatttctatgcaactgaaatccatcttgtagccatcaccatccactttaatttttcctcataggaagtgtggttaagagtgctggctctggagccagatgaccatggtcaaattccagctcttgtacttaccaactgggtaacctttgatgagttaatcaaatttcaggcctcagtttcttctccttgtaaaagagtatagcagggattaagcaangtac

SEQ ID NO: 207685 - DNA, 596 bp, Homo Sapiens
ttctttttgctttttaagggtatcatgacccctctttccaggggaagcacaagaagtttatgtgcccagctagatgtcccaagccaggaatgagagctgtgacatctgaacccgggttctgaaactccctgcctcagagcactgcctgctccatatgacctcaaggaaggccagactggagggtcattcacctttgccaccacgcttacaccaggccctgcccaagacctgttgctcctccctcccaggcagaaggaccggggagtcctatccaggctctcctggcttcttcccatcaacaaggccaaacacaaccactagcactttctgttgtcccaggagatccaaaatataccagcaatggtgtaaatgtcccaagacagaaaacagaaatggagtcaatttagtataagaggaccatgagttttggaaattatggaaatgagctagcttagttctgtctcccaggctctcttcagataccagggatgctgcctgtgctcaccgtctttctattctcgacacgatcaatcaagggataccgtaacacatccgcgagggaactgccctgcactctacagagacctctctgcatt

SEQ ID NO: 207686 - DNA, 698 bp, Homo Sapiens
  misc_feature (573)..(574): n is a, c, g, or t
  misc_feature (620)..(620): n is a, c, g, or t
  misc_feature (627)..(627): n is a, c, g, or t
  misc_feature (635)..(635): n is a, c, g, or t
  misc_feature (647)..(647): n is a, c, g, or t
  misc_feature (678)..(678): n is a, c, g, or t
  misc_feature (681)..(681): n is a, c, g, or t
  misc_feature (685)..(685): n is a, c, g, or t
actctaccacgagctcaaccagaagttccacactttcgaccgctaccgcagccagtccacggccaagagggagaagcggtggagtgtgtcctcgggtggggcggccgagcggagcgtgtgcaccgataagcccagccctggggagcgccccagcttgtcccaacatcggcgccatcagagctggagcaccttcaaatctatgacactgggctcgctgccccccaagccccgagaacggctgactctgcaccgggcagcagcctgggagcccacagaaccaccggatggtgacttccagacagaggtgtgagtgccacgctggactgcccactgcatataaatatatatatctctctattttcacactccactttggaactacccaggagccagcgccctctcccctctcccgagggctgggcagggaggcgccgtggactcagccaggctgggggagccggacatggctaggcctgaggtcccagggcccttccttgattctcagaggcccctcagccactggaaccccatcttcagcccagcctgtccgtccctgtcccgggcttgggaggnnggaggtgaactttgttgggaataacttcactctgtggaaaaaaaanaaaaaanaaaaaaanaaaaaaaaaaanaaaaaaaaaaaaaaaaaaaaaaaaaaaaaanaanaaanaaaaaaaaaaaaa

SEQ ID NO: 207687 - DNA, 609 bp, Homo Sapiens; identical to SEQ ID NO: 50466

SEQ ID NO: 207688 - DNA, 500 bp, Homo Sapiens
ttttgcccatctgaaaacgggtggttttatttcttgtcaggctacagagctgtctgatgcaatacttgaaggataccccaagagcaagaagcagttctttgtaagtggagctctcttccttctttgcttccctgtggtcttatcctggtgacatctcattcacttgtctccctgtctcacaggaggaagttgggatagagacggatgaagattacaacgtcacactcccagacccctgaggggcccacggtcaggactggtggggactgcaggatgtcagaagagtgagatgtcttgcactggctaccttgtttttggttggcttttgttgttgttcctgctactttcacctttaagcagagcagtcaggagacaagcataaaccagagcactgggtagagaggatgagggctggtggtggggggtagacccagcccatttcattgtctaaattgcagtagcttgaggttaacatttagacttggaacaatgctaaagga

SEQ ID NO: 207689 - DNA, 466 bp, Homo Sapiens
ttttttcttttttaactagcacaatggcaaaaatgggagggaaagtctctttgtcctaggggaaaatctccccaccacactcatgcacacacataacgctgatctgaactttgagagtgctctaagttaaaccaatggctacctcagttcttgttcatgtccctggatatggatacagatacaagcttgaggcttgagtgggtacatgcacatcttagactctgcctgtttttgggggatgtcacagagaagcatggaagcctgaaagtgaggaaagcaggggtacataaggggcagaggcagtgctgcaaacactgggcagagaagagaacccagaccatacagcgatggaggccagaggcccaaaaatgccccttatgctccatctcactcctatgtgtctgcctgggagttcctgtccatttcccaagatttaactgttgtttttggagggtaacagggatag

SEQ ID NO: 207690 - DNA, 538 bp, Homo Sapiens
ctcatcaaaccatttgaatttaattgcattcttcaaaattctacagctacagattgcagcagagaataccagggactcagccagagaagaaagtactgtttttaaataaacagctcctggcagctctttattctagtccacattattcagatatcttcttttttcctctctttctttccatgtgtttgggaaaatttttccaggatgttttcagatgagtttgtgaacaatggccctagagtattctgtttttttccccttgaagcttctgtgacctgaagcatagattacttttatgcattggcttgttgctgagtttattcaatggtgcgaagctgtgtttaatgcagtctccccagaacatctccagaacaacctgttgagaagaccagggtacaaggctgttttttcttctgcagtaaggacagagtcttagcagcttcccagagttggaaggacaatgtccagatatttattgagacttaagtttggttgaagatggaccctttaatgggagatgagggagggggcttggcta

SEQ ID NO: 207691 - DNA, 537 bp, Homo Sapiens
  misc_feature (525)..(525): n is a, c, g, or t
gcctagcttgggagccgtagagcccttcctcaaccatcatctcagggcggcttcacgtcccctccacccacgcggaccgagctgcgcttcccttccccctgctcgggcccgcgctgggcgtcccagactcgacacttcctgaaggcctgtaatttttaattatagcagatttatgttgagaaaacttcatactgaaatcactgatttattttgggattacccaatttttttcctactattctcagatatctatcaaactactgctctgtggattcttatattaagtttatccttttctccatcttttctttcttgccacctaatgaaggaaatgtctccaaggtctttttgactaatagaaactaaatgtataactcgacatctagaagggtttcaagatagtagatatgtctgctgggatgttttgtcattaccctgcccaatgttgcgacgctaggagtttccttgacactacattataaataaggcccaacctgttagcaaaaatatcacattccctaattntctctcctttaa

SEQ ID NO: 207692 - DNA, 481 bp, Homo Sapiens
ttttttttgaaaaatggaggttcacttttattttgctaatccgtcaaaatacattcaagcatggcacaaaaattatattcaacactaggttctgtaccacctgctcccatgaactcttaaatctgaataatgttcagataattttcataggtggaagtggtcaaaacatacaaccaattgtccctcctccccaagtcccacatgccaaaatgtttgcatataaactgacaagaggaacccagaagtgactaaataccactatgcttttttcttcactacaaatagcaattttaagggtagacacatgacaatgaagtgttaatataccatgaacagaacaggttgccttcctaatacacagaaaatccttttacataattcatttgcaaactttagaagccactatattcccatgttgggaataatatgacaaccttattaaactgaaaaccctgagaaaggtgtactattccaattgacc

SEQ ID NO: 207693 - DNA, 644 bp, Homo Sapiens
ccttacgcctctatgctttgaaatcatcttccttataatgtttacattaaaataatttgtcaatctgtatacttatgtgtcatgttcttctgagttatatttaccaataatttgatttttaaaaagtataatctaataaaaaaaatatttatccaaatttcccagcgaaacctttgcaaaatctgtctgtctgaactatcaggttaagaggttaaggcttaactcacctggaagaagctgcctaaactgacagtattacaacctaataggtaatcatctttcaaatttaacaatattaccaacaaaatattgttttgtggaagggacttagaaaagtggtataatctctctctctctctcacacacacacataaacatacacacaaacccacccccaaaaattttttaaaaaagagacagtcaaaccaaatatgcttcacacttgttttgcttatattgatcatttaaaaagagatattaatcttacctattgccatgaatatttcatttacattcattgatgttttagcggatgtctccatgaataataaactattgtcatctgcataggactgtgcttcctgaaaatctactgctcttttatttgctaggtcggccttgttccccgataaagctattacaat

SEQ ID NO: 207694 - DNA, 318 bp, Homo Sapiens; identical to SEQ ID NO: 59999

SEQ ID NO: 207695 - DNA, 684 bp, Homo Sapiens
cccagaaattattctttatttagaaacaaaacaagacagaagcaattgattttaatccaaaatgtatttttccttataaaagaggtccacatactcactgtgtctactctacagaatttgtccattttattacaccacgtgtcaattcaagtttatctggtcactgcaaaaactcgtggctaatatgtgtaatacaacacaggaggaggtattgctcagttcaactactcttatttacttaaaaaaaatacagaaatgtttttgtccacttgaactgtagtccagacataaaagttacatgaaagttttagaaaatggagttattttatttggttgccacagtaccccttgaagccagttacttaaaatgctgaagttgtacatatttccattggtcaggagcagcattggtgaagcttaaacttctctctcgaaagtaatctttttttacttttttgtttgtttgtttgtcttgatttgtttttagcacaactgcagtctttcgcttatttttttatttgttcatttttggagtaggtttccttggtggttttaggacatatttgttggtaaacctataacaggtgcttttactttcagtgatgtacttttttcttttcctcttcccagagaattatcagaggaggataaagctcaccttatgccaaagtcgggtttctgaag

SEQ ID NO: 207696 - DNA, 550 bp, Homo Sapiens; identical to SEQ ID NO: 60302

SEQ ID NO: 207697 - DNA, 573 bp, Homo Sapiens
gcatgtgcaaaacaccagacacatacagaaacaattaggattctatgagggcagagaatttgtttctctaaatggggctgttcaatgtttcacagagcacaaggacaagaaattcaatatttttgagcagaaggaagaactcatttgtttttataattccttaactagttttaaacatattgcatgtactatgtgccagccactatctgcttgctttatattccctatctcatttcatcctcacaccaagcctaagaggtcggtaccattatccccatttaccaaatgaggaaactgaggatgcccagggccacacagtaatgggggcccttagtattctgtttcttaagagctgctcctttttcccctctgaaaagagataatgtggtacagtgggaaggatactagactaggaatctggattctaatctcagctctaccacaaatcaattataccaatgtgcgactctcatatgcggatcctgtcctcaggtgggattgtgatctcagacctggattcagcaaacacctgaagctgtgactctcttactgggacacagtctacagttgaga

SEQ ID NO: 207698 - DNA, 475 bp, Homo Sapiens; identical to SEQ ID NO: 33658

SEQ ID NO: 207699 - DNA, 540 bp, Homo Sapiens; identical to SEQ ID NO: 33666

SEQ ID NO: 207700 - DNA, 563 bp, Homo Sapiens; identical to SEQ ID NO: 61602
  misc_feature (499)..(499): n is a, c, g, or t

SEQ ID NO: 207701 - DNA, 473 bp, Homo Sapiens
ttcaacagtaagaatttattttctttacaaattacccagtttaaggtattttgttgtaagcaatggaaaatggactaatgcactgttgttgtatgtctgacatgccccagggatataacatacctgatttttaaattcaggacacatagctcctgaggcaggatctagacaccagctattcctatgcaatgctggagaatatgggacatccatatgtacagatacccacctcatacagctgcaacatgctctgacaactgtcaaaccaacaaccctcaagctgactgtagaactaccaataatcaaattcacggcgcgattttggatagaagtccgtcactttcccaggaactcccgaagcaatgcaaattgggcctgatgtggattgaaagctattttgtcttcttatttcttcaagagcacaaaaagttgaaggccccaaaaaccattcactttttcattctggcaaagcc

SEQ ID NO: 207702 - DNA, 511 bp, Homo Sapiens
tgcccagccgtaggctaatgtatgtgttctgagtgtgttcaaggtcagcgagaccatgacgtttgctaggttaggtgtatgagatgcagttttgacacgctatttttcaacttacgatgggtttattgggatgtaaccccattttaagtcgaggagcatctgaacagggaagaggcggaggaaaaaggtccactttgtaaggaagcatggacaagggacagatggcaatgagccaatgtgggacagaagagcaacccaggaaatacaaagcaagcgctgtcaagagtgaagccgaagcccccctcacactctctagaggggaagcagcatcgtgctgtgatgaccaggaagggattaccgagggtccgttactagaacactgagatcaaacggaagatccagatgtgtctacagatgccagtctttgggctgctactgtccttacaaactcatgtctttgaagcagtaagcaaggctgagaagcttgagagcgagagcaaaaaacaatctt

SEQ ID NO: 207703 - DNA, 707 bp, Homo Sapiens; identical to SEQ ID NO: 53733
  misc_feature (154)..(154): n is a, c, g, or t

SEQ ID NO: 207704 - DNA, 659 bp, Homo Sapiens; identical to SEQ ID NO: 40025

SEQ ID NO: 207705 - DNA, 728 bp, Homo Sapiens
  misc_feature (536)..(536): n is a, c, g, or t
  misc_feature (577)..(577): n is a, c, g, or t
  misc_feature (596)..(596): n is a, c, g, or t
tttaaataaaagaggtccattaatacttccttataaaaattctagtctgtttcattactgcccagatgttttagagataaatatttatgcagaaggtatttttgaagtctccttttgtctgatagagtttaacagatatttaaatttagtgctcagaatccacaagtcacggtctaaacacacttagaatactacagcataaatctgttagcattattgccaaataagacagttgggatccaaacccaagtcttgagcaatgtttttctcaaaaagctgctatccaatgatataggaaaatacattgtgttttcctaaacacacttttctttttaaatgtgcttcattgtttgatttggtcctgcctaaatttcacaagctaggccaatgaaggctgaatcaaagacatttcacccaccaatatcatgtgtagatattatgtatagaaaataaaataaattatggctctaacttctgtgttgctggttatcttggttattttcggcgttatactaatgtgtttattgagagcattntaccttccagacttctcatggctaacttttggtctgtattntgctccttagatgtgaatnattcttattagtctgcttcctgctacgcaatgactgcatttctatcatttctcagttggtagtatatgtggatagtattctactggataaatgattgcagtttatcacttattatatgtagcttttctacgg

SEQ ID NO: 207706 - DNA, 650 bp, Homo Sapiens
  misc_feature (488)..(488): n is a, c, g, or t
  misc_feature (623)..(623): n is a, c, g, or t
gtaaacctaagactgatgagggctgtattgagaaggcatgagcttgcttgagtggcatgcttgcccatcatagtcccagctacaaaataaaatatgattaattctcattgtaagtatagctgtaggccatttggttttgtttatgccactagcaccatctgccaagacaccaaggaggattcataatgtcctgtgtctcaggtgaaaggactttagatgttgctcctctcagtgatctccgaattagccccttgcacacatctatcatgatgtggaataaatcctgcacatgcaggaacccacagacagaaacgtccatctgtgcccctggatgtaggcttgccaatatttatttaatggtggatcttgacgtggcactataatctggctcccagtccatgaaactgaagtccagaagcagtttttcctaacctgggacctgccaaaaaacacactatatgtgcccctgtaggcatgctggctgactntattcccactgtgaatcttgaagcagtcctaaaacccagctccagtccccctacctccagtccctgtcaactaaagtctgggagcagtcctgcccacccaggaatctggagggagaaatgccatgatgccagcanacctggactttggtctcagctgtgttc

SEQ ID NO: 207707 - DNA, 653 bp, Homo Sapiens
  misc_feature (457)..(457): n is a, c, g, or t
  misc_feature (577)..(577): n is a, c, g, or t
tataatttaatatttaagtatctaatttacatgtgacaaggtatcatattcaaaaaattaaatgcaactggaaaactattaaccactaaaaacaataccaaacacaacccaaacatttataggaaagcaatagctagaatttgaattggaaaaaatgtttcatcatatttggctcattaaacaaagcatccattatagcttggaaaagagcatctcttctaattcatcaaacgtttactctttatagcatgaataacatttaaagatagtttcattaactgtatatgcacacttgtgtatatatattgtgagacatacactcgtgtgttcatttaaagatattgtatctactgataactggctgaactttggaaggtgctgaaatccacatttctatatgtcctttgacccatttaataatgtctttttaaaaacagaaattacataaaatactctngtttttattaactgaatattttcttaagcacaataatagacaatgaaagaattgcacttattataaaggtacaagtaagtgttagattgcagctcagccatgaaagatcagggactgtangacagatgatagattgtgcattatatgcaaagatgatggtggccagtgaaaattgagagcaactagttacagccgg

SEQ ID NO: 207708 - DNA, 699 bp, Homo Sapiens; identical to SEQ ID NO: 50265

SEQ ID NO: 207709 - DNA, 493 bp, Homo Sapiens
atagaactttatgtttaaataagaatcatttgctttgagtttttatattccttacacaaaaagaaaatacatatgcagtctagtcagacaaaataaagttttgaagtgctactataataagtttttcacgagaacaaactttgtaaatcttccataagcaaaatgacagctagtgcttgggatcgtacatgttaattttctgaaagataattctaagtgaaatttaaaataaataaatttttaatgacctgcgtcttaaggatttaggaaaaatatgcatgctttaattgcatttccaaagtagcatcttgctagacctagttgagtcaggataacagagagataccacatggcaagaaaaacatagtgacaattgtagagtcctcaattgtgtttacattaatagtggtgtttttacctatgaaattattctggatctaataggacattttacaaaatggcaagtatggaaaaccatggattctgaaagtaa

SEQ ID NO: 207710 - DNA, 676 bp, Homo Sapiens
  misc_feature (582)..(582): n is a, c, g, or t
  misc_feature (640)..(640): n is a, c, g, or t
  misc_feature (669)..(669): n is a, c, g, or t
cggctttagccaggatggtctcgatctcctgacctcgtgatccgtctgcctcagcctcccaaagcgctgggattataggcatgagccaccgtgcccggccccatcctgccttctaaaaccatctcgtcatattctcaaatctttctgaccctgtatgctatattttctgatatccttttaaattttcttaccttttcctgttatttcctttttatgcaattcttctttatagaattgtagagtttagcagttttctcattttgcttttgttgcacctgatttttaaattttcctttcctttaagattgatttatttccagcaatcggattccatggtgccctcaaagccctcatctctatggctaacataggagatgaaagctcagttcccacaatacccaaacaccagccactagaagaatcaatgaagagagggagagaaagaaaagcagagtgttagacttcagaataagaagtgagaatggtcacatgggaagcctgcttcatatccaaatcctaaaaacaccttcccaattccactttgacaaattattgccattttcttaatactgataaatggtnaattaattaaatctaaccaagaaggtccaaggcaaaagacagttttatttccacgttncattcagattatagcaccctagcttcctnaatattc

SEQ ID NO: 207711 - DNA, 877 bp, Homo Sapiens; identical to SEQ ID NO: 52552
  misc_feature (58)..(58): n is a, c, g, or t
  misc_feature (94)..(94): n is a, c, g, or t
  misc_feature (96)..(96): n is a, c, g, or t
  misc_feature (319)..(319): n is a, c, g, or t
  misc_feature (502)..(502): n is a, c, g, or t
  misc_feature (529)..(529): n is a, c, g, or t
  misc_feature (593)..(593): n is a, c, g, or t
  misc_feature (600)..(600): n is a, c, g, or t

SEQ ID NO: 207712 - DNA, 707 bp, Homo Sapiens; identical to SEQ ID NO: 48979
  misc_feature (521)..(521): n is a, c, g, or t
  misc_feature (647)..(647): n is a, c, g, or t

SEQ ID NO: 207713 - DNA, 642 bp, Homo Sapiens
  misc_feature (399)..(399): n is a, c, g, or t
  misc_feature (491)..(491): n is a, c, g, or t
  misc_feature (506)..(506): n is a, c, g, or t
  misc_feature (519)..(519): n is a, c, g, or t
  misc_feature (623)..(623): n is a, c, g, or t
agtggcccctgtcctgggtcagctgtaggaaggggcccctttgtaaacaagcttctgccaggttctgaggcagagcactggtctgagtccggccccacagaagggttccatcttgtggtcagcggggtgggctcagacctgcagactcccgcagtgggcccaccctttcccttgctatggcccgtctatgagtggctttcccctgcctccatcggtgtataatcaggcaggtggtgtttgctcttaggtgattagaagaggaggaaaatgcccatcaagccactgcttcagcctgttggccagggaacacctgaacagggtcaaaatggtcagctcctgggcgctgagctaaggaaatatgcagggggttttgactttccctgtcctgaggcttgcctncactttgacctggctgcatctttcctcagctcttctgggtaagctgaagagctagcaaataagaccttctgggctacctggtcatgattggngttttggatggattnttttggagagaanaagagtgtgggcttggtgccgtggcccagagggcagatctcttgagtccacgagttcaaggccaagctgggcaacatagtgaagccccatctctgcaatccaangtgggaagactttgctggg

SEQ ID NO: 207714 - DNA, 374 bp, Homo Sapiens
gcgctgctggagaaacaccctggatggccccgagcccagcccttcacaaatgatcaagaaggaaacaatactgtactagccaccgggaggcaagattctcggggaataaaagtgcaggggatcatgaggacgacacgcaaattctaacctgggcacctcaaaatctccatgcttgtgctcgggaaatgtgaactactttcggcccgaaagacgaggttaaaactgatctcaggacagcgtttggagtcctaggaaaggtgccctttttttttttttttttttttaggacatcacagacacccacggggagaagtcctgcttcttttccatcgtttcatttcaatctatttcttagaattaaaaaaaaaaaaaaa

SEQ ID NO: 207715 - DNA, 476 bp, Homo Sapiens; identical to SEQ ID NO: 47087
  misc_feature (10)..(10): n is a, c, g, or t
  misc_feature (17)..(17): n is a, c, g, or t
  misc_feature (405)..(405): n is a, c, g, or t

SEQ ID NO: 207716 - DNA, 559 bp, Homo Sapiens; identical to SEQ ID NO: 48279
  misc_feature (548)..(548): n is a, c, g, or t

SEQ ID NO: 207717 - DNA, 354 bp, Homo Sapiens
  misc_feature (18)..(18): n is a, c, g, or t
  misc_feature (233)..(233): n is a, c, g, or t
  misc_feature (296)..(296): n is a, c, g, or t
  misc_feature (341)..(341): n is a, c, g, or t
  misc_feature (347)..(347): n is a, c, g, or t
ggatcagtttgtcaattnctgtaaaaaagccagctgggactttgcaagggattgtgttgaatttgtagattaatttgggaactattgtcatgtatattagtttcctactgctgctgtaacaaactcacagactgggtgtttaaaacaatacaagtttattatcttacagttctgggagtcagaataccaaaatgtgccttatatggctaaaataaaggtgtcagcagggctgnacttctggaggctgcaggggagtattcattttcttgtctttgaagcttctagaggcagcctgnatttcctgactcacagccccttcctccatctgcaaagtatatcantccaanctctgct

SEQ ID NO: 207718 - DNA, 322 bp, Homo Sapiens
  misc_feature (1)..(1): n is a, c, g, or t
  misc_feature (51)..(51): n is a, c, g, or t
  misc_feature (53)..(53): n is a, c, g, or t
  misc_feature (61)..(61): n is a, c, g, or t
  misc_feature (71)..(71): n is a, c, g, or t
  misc_feature (108)..(108): n is a, c, g, or t
  misc_feature (175)..(175): n is a, c, g, or t
  misc_feature (256)..(256): n is a, c, g, or t
  misc_feature (258)..(258): n is a, c, g, or t
  misc_feature (270)..(270): n is a, c, g, or t
  misc_feature (280)..(280): n is a, c, g, or t
  misc_feature (294)..(294): n is a, c, g, or t
nggaaaaaaacttagccattaaagaagaaaaaatatacaggaatgcacatntntttctttngcctggggcnctaatatggctcaacagggcactacttcccacccttnttcacactgtaacatccagagaaaatattatttgtatggcacactgagataaactgagggggctgcncctttgccaagctctaaccagccactactggcttaagaggtcaataccttggcatgtccatcaaccatcggtaatggtgcnanagtggattgccnagggagttcngggttagagacctnagttacatcagtagaaggggaacctggg

SEQ ID NO: 207719 - DNA, 379 bp, Homo Sapiens
  misc_feature (64)..(64): n is a, c, g, or t
  misc_feature (148)..(148): n is a, c, g, or t
  misc_feature (153)..(153): n is a, c, g, or t
  misc_feature (211)..(211): n is a, c, g, or t
  misc_feature (253)..(253): n is a, c, g, or t
  misc_feature (273)..(273): n is a, c, g, or t
  misc_feature (333)..(333): n is a, c, g, or t
  misc_feature (345)..(345): n is a, c, g, or t
  misc_feature (351)..(351): n is a, c, g, or t
  misc_feature (364)..(364): n is a, c, g, or t
  misc_feature (373)..(373): n is a, c, g, or t
acaaataagttgggagaaaaagggaacaggaatgaagatcagaggtcccggttcacattgtttncacagactacgtccttgacctctcccccatctattttcgacataaaatgattagacgcaaacagggcatctaaactagcacaancctgntgacattagaatacacgagtaaaatgactataggattcaccacactggaccacaccgnaataatctcaataattaaaatattactaaaagtcaatttgcngagattctcacttgaggctnaacttaggaagttgtaaggagaaaaaaagacaggcagtttttaaaaaaaaaaagatgggnatactaacgagngcagcnattgaaaatatcngggaaggcnaagccg

SEQ ID NO: 207720 - DNA, 386 bp, Homo Sapiens
gtacacgagaatattctttcctgaatgcccaacacaagtatgcagttttacaacacataccagatacttagattcatttggtgaaggaagcctctgaattaaaacttttaaatatttctgatttgcaaccagacgaaaaagaagaaaattgacaacttttttgatgcaactttgtgaaatcatggtgttcctggtttttctggtctggtttttgttgttgtcttgttttgttttgccacagcttagttcctcacctgatctttccttgtatccacttcagagtctctgaaatgttatctgtttgttggttcctgggaaattgagagccttttcaaagactccatctagaagcatatttaaaagtgtgaaagaagacatttatgcga

SEQ ID NO: 207721 - DNA, 512 bp, Homo Sapiens; identical to SEQ ID NO: 36553

SEQ ID NO: 207722 - DNA, 715 bp, Homo Sapiens
tattgaatctaataaagacatttgtgcccaaaatattagaggttcctgatgataaaagtaatagtttaaaaaaagaaactctctattaatatgtttttataaatcaggaggcaaaaacataaactgttgagtttcagtgttgtatattattttaccatcatgttcatttgtcttcacagtttggctccccccttccccttttcacccacactctcctgttttgtgttgttaggaagttatcaaggaggatgctgctgaggggctttcttcacccacagactcctcgagggtaatggagtagtcctgtggtgtggatcgctggcatctcattgcttctgcctcagtaatgactgtcttaattgtgatgatagcagctcactaactctgcgttgtggtgtgatgagcagctagtgtagagtagctgaatgctaataattatggttcctgaattaattaaaaagcggatgtttaacttcacccattattttcctcctgcttttcccctttttcaatacatgggatggggttagtattattcttcaataaggaagggcttttctatcagtgtcaggggtgtaccgcggtagtattggctcctcagtgtgagctcaagcttgcctttgactggttttagtaaagcctgtggttgctattacaacatgttggaatcttcttcgcaaaagtatccagatccgctgagaatattaaagacctt

SEQ ID NO: 207723 - DNA, 653 bp, Homo Sapiens
gaacgtcaagagtgtccaggggatgtgtggtgttggcccgattcctgtcattgccagtggaaatgccatctctggagttgccccaggtgttgtgaagcaggttgggattcggagctgaacgctcctctaaagatatgtgctggcttcttatgtcatggctagacagcccctgctgggcctgttgctgtccctttctctttgcccctgagttgtgtcaggagatttgaggaacttctgactcatcctagcaagtggctatggcctttttgcaaaaagctgtgtcccaagggaagaggcaaatgtgacccaggtaggtgccagcagtcacatggcttgcagggatgacaagctcaaacaggacttgatggctgggtgtgatggaaaccataacacatgattcttgggagcaggtccatgctggctggcaggatatttggctctgtttgtgtcttgaacagtctgacaacagccataaagcctagcagctgtgaggtatttcaggtaccggaggacttctggacttcggttaaccttggggtcttggggagtaagaactttagctttgaataatctaagggcttggcctgtaacctcacgcctgtaaccccagcgctttgggaggccaaggtgggcggatcacttgaggtcaggcc

SEQ ID NO: 207724 - DNA, 815 bp, Homo Sapiens; identical to SEQ ID NO: 40878

SEQ ID NO: 207725 - DNA, 711 bp, Homo Sapiens
aagagaactcaagcagtgctgtctaggagtgttatgtaagctagatggactttagagtcaggagaccatgcgggaagatactgtgtgataagggcctgaaacatgttggttacagtgagactagaaatgggataaatccagagctgtttcaccagtagacttgcctgaatatcctgtctgactgattatggatcagaaagaaaagaaggggtgatgggaaacaagcctagattgactagagaaacctagaaatagaaaaatcgggaaggcaaagtgatttggatgataatgccatatattcagttgtccctggtggcagatattatagtatagatattatacaggcaaagaagaacagagggatagagtgtgaaggtacagatttgagtttaagcacattagggggcttaggttctggatgaagaaaacatataaaagttatgtatgtaggtatgttggaaaagagtagaaaatggagaaataacccagtgggttaaagaagaaacagactaaataaacaaacctgagtaagttgtcctaaattttatttagaggaattctcattttgctttagttttctcaattatttgctcacttttctgtttctttctctgtcagcatactggaaaggggttaatttagattcaaacaaaaacagaagaaaaaaaattgtggggggctggccaaaaaattttaaacatggtgggcggg

SEQ ID NO: 207726 - DNA, 463 bp, Homo Sapiens
tctatccttaatctatctgggcctgcagtacatatcttttaatgagccttttcattattttctgatattgtcttggaggattattgaaactatttagatggaaatcttctgagctccttatacttggttgtttattgtgcccaacctgttttttgtcaagtgataattttgaaaggtcttcatgacttcctaaaattccaagtttcttttcttcatttatcttgttcatctctgcatcttcctggaaaccttttttatggccctggaacagctcagaaatccattttttaagcttcagtaagagataaaacagggactttggactcggcaccagattgaagggtacaggaagtgttctgccctcctcaaagtaggaaaaccagagtttgcccttgcaaatttccacttcacatcagcgtcatcctcaatttcctgaaatgaactgttgatcatgcaattaaca

SEQ ID NO: 207727 - DNA, 389 bp, Homo Sapiens
tatagaatgatcctacatttctggaaaaaaagaacgctgtgattacctaaagaataaactttctcacataaagcaaagaattcaagaatatgataaagtaatgaattgggatgtacaaggttattcttaacgcttatttgaaaccactttatttttttattttattttatttttttgagatgaagtctcgctctgttacccaggctggaatgcagtggcacaatctcggctcactgcaacctccacctcccgggttcaagcaattctcctgttcaagcaattagcctccccagtagctgggattacaggcgtgcgctgccacaccccgctaatttttgtatttttagtagagacgaggtttcaccatgttggtcaggctgggaaactac

SEQ ID NO: 207728 - DNA, 523 bp, Homo Sapiens
ggagctcggtccttcttttagaagggtagagggccagctctcactcaatgcttccctcattcgggggctacctactttccacctcatttcatcttcacgcccttcgaggtagccactttcatggatgccagttttacaagaaggaaactcagatggagtcaggtaactcagagatgaaggtaccttgcaggaagccacacaccttgtgaatggtggagctggggcctgaacccatgtctgtttctacaaagcctgtgcttttagttgcagtcactgtacgtgtgacgagatgtgaaaatgacacctttcctcagttttgactgaggctccaaaggccaaagcaaaataccaaggaacctggagccccccatcccgaagaggagctagacagcatggggcaccctcttcctaggctggtgctggacccaggcctgggaggaatcgaggtgaggtggtggctgggcaagccaggagagggctcccaatgagacggcctcgctgcctcctttgtcaaactaaacgg

SEQ ID NO: 207729 - DNA, 229 bp, Homo Sapiens
gtccgggttactagaagatagagattgattcggtaaagaactgaggagaggaagcacagagttcagcagtccacagcacactcaccatgtctccaaaggcgttcatggctgttgtgaagctgtgtttcccttggctgtgttcctgattgtactgctcaatcatcttcatgttctcccacactgctctcctccatccttcttcattctaaagacaaacatgtaactgatg

SEQ ID NO: 207730 - DNA, 591 bp, Homo Sapiens; identical to SEQ ID NO: 55647
  misc_feature (60)..(60): n is a, c, g, or t
  misc_feature (71)..(71): n is a, c, g, or t
  misc_feature (96)..(96): n is a, c, g, or t
  misc_feature (100)..(100): n is a, c, g, or t
  misc_feature (117)..(117): n is a, c, g, or t
  misc_feature (178)..(178): n is a, c, g, or t
  misc_feature (197)..(197): n is a, c, g, or t
  misc_feature (388)..(388): n is a, c, g, or t

SEQ ID NO: 207731 - DNA, 493 bp, Homo Sapiens; identical to SEQ ID NO: 59469
  misc_feature (385)..(385): n is a, c, g, or t
  misc_feature (405)..(405): n is a, c, g, or t
  misc_feature (468)..(469): n is a, c, g, or t
  misc_feature (489)..(489): n is a, c, g, or t
  misc_feature (491)..(491): n is a, c, g, or t

SEQ ID NO: 207732 - DNA, 367 bp, Homo Sapiens
  misc_feature (92)..(92): n is a, c, g, or t
  misc_feature (295)..(295): n is a, c, g, or t
accctcccctcagtcacctgatacaaacccaaatcctggaacaagcccttcctaacaccctgtcactcaaatgccacggttccccgtggttngctctcttctgtgcaacagactcaactttgttgaccgtaggtatgttcttggcgtctttaattgcagggcttttccagggccaagaatatactagggatggtagttgggaggagtatctctctttgccgagggaaagttaatctaataaacaattagacatgcttaaatatttagagtgattgtgtaaggaacacatgtctgnaaattaggaggcggggcttcctggacctgccaccagcttatgacctaaggaatgttaactcagttttccttg

SEQ ID NO: 207733 - DNA, 691 bp, Homo Sapiens
agttcttactatgttgcccaggcaagtctcaaactcctgggttcaagcgactctcccaccccactctcccaaagtgttgggattacaggtgtgaggcactgcacctggcctaatccacaaactgtctagaagcaaacaaccaaacatatgagaatttttctgagtgtaaaaataaatctctttgtggcatgattctattacagatcactggtatgcctgattaaagtggactacaataaagattacatacaccagactttaaataattgcaatccactgaaataacagcatttactaatctcagcgaatgctcaatttattgagcattacacctgaccaaatgtcttaattcaacctttactcaatcctgaatcatctgtataaattgaaataacagttgtcatacaaactttaagtaattctttcactggtaccagatgataattctgtgacatgccaatagattaacagatgagggaattaatttattatcttttttcacttaaccaaaaattttttgttagcctaggcattctgctagatattagttacaaatggaagccatggagacatagtctttggcatcatggagctttaaatcttaggagagaaaacattctttattccctaattcttaaaacaggataggaggaatctgtcataatagacgtatgggtctattatacgtact

SEQ ID NO: 207734 - DNA, 638 bp, Homo Sapiens; identical to SEQ ID NO: 53058

SEQ ID NO: 207735 - DNA, 789 bp, Homo Sapiens; identical to SEQ ID NO: 46941
  misc_feature (162)..(162): n is a, c, g, or t

SEQ ID NO: 207736 - DNA, 763 bp, Homo Sapiens; identical to SEQ ID NO: 54924
  misc_feature (10)..(11): n is a, c, g, or t
  misc_feature (23)..(23): n is a, c, g, or t
  misc_feature (28)..(28): n is a, c, g, or t

SEQ ID NO: 207737 - DNA, 849 bp, Homo Sapiens; identical to SEQ ID NO: 40540
  misc_feature (580)..(580): n is a, c, g, or t

SEQ ID NO: 207738 - DNA, 654 bp, Homo Sapiens
tatgttttgaattaatcattttgggggcaagtcagaaaaatttaaaggaaaaataacttatttccagaacattatacaaaccagtggaatattgtgttgaatcattcgtacttttcaaattgccacatttcatatatttctagtagcagtcctgtgtttcctaagcatcttgaattttataaaccaacctctgatcaatcttcccatatcttgttagcattaatcaaatacctgtattatttattctgaggtacatattttttcactttcttcacactcctaaaaggtatgtatttttataaccactggtgtcttataattattattgtagcttttttcttttttacatgtatgtaaaataatgatccatcagtggcatcttggagttggtgaaatatagatgcagtcttttttgtgtcttgaggctttctatattgaaaccaacagaggatataaatttagtatgtgcagaaccatctattacaattagcgcctattaagcctgtgtatacatgttaaagctggctttagaaatgtattcatgaggcttttacccacttgcatgactaccaagttcgatttagacgtctgaattcctctccttaagtcaattattatccatcatctctcttttacctttcgcttctctctcct

SEQ ID NO: 207739 - DNA, 666 bp, Homo Sapiens; identical to SEQ ID NO: 49236
  misc_feature (574)..(574): n is a, c, g, or t
  misc_feature (623)..(623): n is a, c, g, or t
  misc_feature (648)..(648): n is a, c, g, or t

SEQ ID NO: 207740 - DNA, 690 bp, Homo Sapiens; identical to SEQ ID NO: 46961
  misc_feature (546)..(546): n is a, c, g, or t
  misc_feature (600)..(600): n is a, c, g, or t
  misc_feature (624)..(624): n is a, c, g, or t
  misc_feature (683)..(683): n is a, c, g, or t
  misc_feature (685)..(685): n is a, c, g, or t

SEQ ID NO: 207741 - DNA, 740 bp, Homo Sapiens
  misc_feature (5)..(5): n is a, c, g, or t
  misc_feature (669)..(669): n is a, c, g, or t
  misc_feature (723)..(723): n is a, c, g, or t
  misc_feature (737)..(737): n is a, c, g, or t
cggcngaagacggcctatgtgggcctttttttttttttttttatattttgagaaacctccatactgttttggcatagatagtggctgcacaattttgcattcccacccagcatacaagggttccaattcctccatatcctcaccaacactcttttgtttttttgatagtagtcatcataacaggtgaggtgatattaaggagtacttctgcactgaggcacttgtctcaactatatttttgttgtactttcaggagactaatagatctgtggaaatttatcaaatctttgctcatttttttaacttctgagagctcttctttaatctgagtgttcctttttatgaaattgttgatgaaaaaagccgaacaagtgtaaaatattttaagagatttattctgagccaaatatgagtgaccacagcccatgacacagccctcaggaggtcctcagaacatgtgcccaaggtggctaaggtacagcttagttttatatattttagggaggcataagatatcaaatacatttaagaaacacattggtctggtttagaaaggtgggacaactcaaagcaggggcttccagactataggtaaatttaaacattttctggttgacaataggatgagtttatctgaagacctgggatcaacagaaaagaaatgttcangttaagataaaggattgtggagaccaagtttcactgtgcaaaggaagctctcanagagcagacttcanaga

SEQ ID NO: 207742 - DNA, 872 bp, Homo Sapiens
  misc_feature (777)..(777): n is a, c, g, or t
  misc_feature (812)..(812): n is a, c, g, or t
  misc_feature (868)..(868): n is a, c, g, or t
aaagtcctaaaaaactctttgcagtctaaacctcccaagttttttttttttggaaccaaggcaactttacccactagagataacctagaaaatttctatctttagttcaactgaactctcagtgttatttcatagaaaccaccccagtctatttatattattcaacacataattttggttagagaatttttttttttttttaaattagggatgggggtcttgctgtgctgctcaggctggtctcaaactcctgggctaagtgattccctgactgtacctggccaagagaagtttttgtgctgtggcttaccttagcatatttctctgcttcttctcttatatcttttggaacaatttcatgtcttccattagttactgtaaattaagccacatgtgtaaatgaattttaaattgagtaccatattgtaacttgcagtataccataggatctacccaatccacatatctgactcacctaaggttgcaaagttgtactatgagtaatactcgaatatttttgtgtgctgcttctacatgagattatatgtgcctacatattaagttcttatggaaatgaaagtaaattatgctatttataaatcctgagcattaatttatagcatagtatcttaaaaccatgaaatggatgtttcaaaaaataacgtgttcacaacttaagtcaattattaagcagaactttcccttcattagacaacctagtaaatttgctttagctttcattatattagaaaggacactcagttgtaaattagctgnggtacagatcattcctaaggcaaataaatggtccnaaaataacttacattcaccaacccagctgagttctagttcaaaagctttatccttnactt

SEQ ID NO: 207743 - DNA, 699 bp, Homo Sapiens
  misc_feature (632)..(632): n is a, c, g, or t
  misc_feature (650)..(650): n is a, c, g, or t
  misc_feature (653)..(653): n is a, c, g, or t
accgttacccggggcaacagctgagccgtctgggaagggatgcatcttttcttctgtatgcttgagtcaagaactctaagtcatcttggtaataccgggttggatgcttaaagctgcagcaaaaagaccagaactttcagggcttctcaaatttaataactatggaatcttatcagaaagtccattaacatctcaaagaacaacgtggttattgtatcaatcaccatcctttataccaggatttgcatatccttcaagatgcctgaagacaatcggaggggtatacaagcaagcgaggttaagaacaatcacttttcagatcctaaacttttatatgtagtgtctgctgataatgcattccctgagaaaatggacctgtggataaaccatcatgcttcatctcatttcctgtctcctctttcaccatttttctttcttttcttttcttttttttttttttttcttgagacaagctcttgctctgtcacctaggctggagtgcagtggcgtgatcatatctcactgcaacctaaaactcaggctcaagcagtaccctcacctcagcctcccgagtggctgggactaacaggcgcactccatcatgcccgaataatttttggtaattttttganagatggggcttgctttgntgnctaggctggcttgaactgggctcaagcgatcctccactttggcctt

SEQ ID NO: 207744 - DNA, 723 bp, Homo Sapiens
  misc_feature (573)..(573): n is a, c, g, or t
  misc_feature (634)..(634): n is a, c, g, or t
  misc_feature (685)..(685): n is a, c, g, or t
  misc_feature (715)..(715): n is a, c, g, or t
acagcggggcgtcacctcggacatacgaacagcgggcggtgttcccggctccgtggggccgtcttcccggcgagtccgcgacggtcgccgcccacggcgagatgaaatctcgctctgtcgcccaggctggaatgcagtggcgtgatctcggatcactgcagcctctgcctcccgggttcgggcgattctcctgcctcggcctcctgagtagctgggattacaggtgcgtgccaccacgcacggctaatttttgtatttttagttgagacggggtttcaccatgttggtcaggctgttcttgaactcctgacctcgtgatccgcccgcctcggcctcccagagtgctgggatttacaggcatgagccaccgcgcccggcctgttttttttttgttggtttgtttttgagacggagtctcgctctgtcgcccagcctggagtgcagtggcgccatctccgctcactgcaagctccgcctcccgggttcacgccattttcctgccgcagcctcccgtgtggctgggactacaggcgcccgccggcacgcccgtcaaatttttttttttttttttgnattttttggtagtgacgggtttaccatgttggccaggatggtctcgatctcctgacctcgngatccgccgctttgtctccaaagagctgggattacaggcgtgagacaccgngccctgtccggcctggtattatcatatgantgatatct

SEQ ID NO: 207745 - DNA, 757 bp, Homo Sapiens
  misc_feature (551)..(551): n is a, c, g, or t
  misc_feature (575)..(575): n is a, c, g, or t
  misc_feature (704)..(704): n is a, c, g, or t
  misc_feature (745)..(745): n is a, c, g, or t
  misc_feature (753)..(753): n is a, c, g, or t
gtaaaggaatgtctttttaattcagcttttcttttctccatgctagtgttatcaggttttggtatttatttacttacagcatatgttatgaagctggtttgaaaattggttttagatatatctgcaagtttactactttgactgtaaaaaaaaaaaatgaaaaagtagttgacatctgtcctcagaagaagtttgcaggttgcatatttgtgtgtaaatacacaggctaaaaggtaatttatgttccttgggaattgaaatggtcagtggcccgttacagaaacttatcagtcatatatcagcaccagttcattcttttgcaccttagggaccatctgtcccctgaggtgacctgagaaacaaccagttgcccacagactgttatttcttcaagtgagccaggatttgatttcactgccttatattctatttttagtgtacagtgctttgattttttggaaaaactaaattttaaacatatttgaaaaatgttataagacttggacattaagtctgttgatagccaaagtcagtttaccaaagtaaaacanataaattctatgcttcttcattgncaaagagcagtctgccatcatgtggatataaatggactatgtaaagtgacatggtgcttactctctacctaataatagcctccctcctgttccaacaagataaccaacaggtatatttaatttaccagntaatatgttttggataattgctgccttgaaatgctatatgnttataggnccat

SEQ ID NO: 207746 - DNA, 682 bp, Homo Sapiens
  misc_feature (675)..(676): n is a, c, g, or t
  misc_feature (681)..(681): n is a, c, g, or t
aagtctagttaaactttaaacaaaggatttatgaacatctctacttccctcagtgagtttttttttttttaacaagtaatattttcaaggaaaggaaaatggacattatgatggctgtcttttgtccttttgtaaatggtggttcttctagagctgtgctatctaatatgatagccactagtcacatgtagctatttaaattaaattaaaaatttagttcttcagtcaaaataaccccatttcaaggttcagtagctacaaatggctagtggctagcatattggaccacacagatacagactgttttcatcattgcaaaaagttgtattaaactctattgtatagaatattttgctgaaatatagtatatgtggctgggcatggtgtctcacacctataatcctagcactttgggaggccgaggcgggcagatcacctgaggtcaggagttcaagaccagcctggccaacatggggaaaccgcaactctactaaaaagacaaaaatttgcctggtgtggtgacgggcacctgtaatcccagctacttgggaggctgaggcaggagaattgctggaacccaggagggcggaggttgcagtgagctgagatcataccactttactccagcctgggtgaaagagcgaaactccatcccatctcaaaaaaaaaaaaaannagaant

SEQ ID NO: 207747 - DNA, 830 bp, Homo Sapiens
  misc_feature (671)..(671): n is a, c, g, or t
  misc_feature (773)..(773): n is a, c, g, or t
  misc_feature (808)..(808): n is a, c, g, or t
  misc_feature (824)..(824): n is a, c, g, or t
ttgcaatgtaaaaatatatcttggtctctgcatgatgatatattaacatctataccatggaacttttaaaaggaaaattgtgtggtataattaaaagaatattgcatgttatagagaaacttcacctgttgatttagcaggtgccattgtgtagatgctaagcaaatcttaatatgtttccttggatttttgaaatttgaatttgttgtgtaactttgctagttaaaagatttagagggatttggctgggcgcatggctcacgcttgtaatcccagcactttgggaggccgaggtaggcagatcacgaggtcaggagttcgagaccagcctggccaatacagtgaaaccctgtctcttctaaaaatacaaaaattagctgggcctcgtggcgggcgcctgtaatcccagctacttgggaggctggcaggagaatcacttgaaccagggaggtggaggttgcaatgagccgagatggcgccactgcaccccagcctgggtggcagagctagactctgtctcaaaaaaaaaaaaaagagtgggatttatcatagtttttttttcttaactgttattgactatttttaatttttattttttaattcagtggcctctcaggattattacctgcatttttttttcaggaaaatcccaattctgcaactaactctgnggccttagacaagtctcttgccttatccagggctggttccttggctgtaaaataaagagttggctagatgatctctaaggtcccttttacatctataggttnccttgggacctatattaggggttgatccaaaccantttaatatatcttaancccgtt

SEQ ID NO: 207748 - DNA, 912 bp, Homo Sapiens
  misc_feature (811)..(811): n is a, c, g, or t
  misc_feature (819)..(819): n is a, c, g, or t
  misc_feature (836)..(836): n is a, c, g, or t
ttctaatgcttttaaggttccttttcagcccttcctcctcgtaatccacaaatactgagaccaaggcattttttgggtcagtcctaatttcaagcattctatcctgccctccccaaatgaactcacacttattagaccatatgttcctatattagttcaggaagggggaaaaaatgttcatcacacttgtatataagagatcatagaaaaacagtttactaacctgtgaaaataccattcattctctgtttacctctggtccacagctaagcaatcagtaggatataaatgtaccctatgttcactattcagtattcataagtatactacttatgaattggaaatctgacacaacatttacatgacctaattttgaaaatttaaaatagtgtaaggcccctaggcttaattttacaggggaaagattaaaaggacacaagcaaacatatattctctctctgtgctgtgggacactggtaattttttgacttaaaatatttgatacttaaaatgccaaacttctacatttctgcagtaacaaggcagttatcatattgaataccatttctttctctccagtaagtaaatattagcacatgaactgaaaatattaagtgattataaaaaagtccaaataaattcattaaaatttagcttggcaaaatgttagtttcatgttcttggtagaagtccttttatatttatattcaaatgaaatgaaccaatttacaagccaaaggaaatggcatcaaatattttgacacccctggcttcccaagggggtattggattcaatgcctttttggctcanaaatctanggtttcttccacttcanggaaaaaggagggagaaatgtacccccatacctttggggaaaaaccaagttttccgatgggccccagctttttgaa

SEQ ID NO: 207749 - DNA, 854 bp, Homo Sapiens; identical to SEQ ID NO: 50733
  misc_feature (722)..(722): n is a, c, g, or t
  misc_feature (759)..(759): n is a, c, g, or t
  misc_feature (822)..(822): n is a, c, g, or t
  misc_feature (840)..(840): n is a, c, g, or t

SEQ ID NO: 207750 - DNA, 875 bp, Homo Sapiens; identical to SEQ ID NO: 47679
  misc_feature (797)..(797): n is a, c, g, or t
  misc_feature (866)..(866): n is a, c, g, or t

SEQ ID NO: 207751 - DNA, 833 bp, Homo Sapiens; identical to SEQ ID NO: 48626
  misc_feature (689)..(689): n is a, c, g, or t
  misc_feature (810)..(810): n is a, c, g, or t
  misc_feature (825)..(825): n is a, c, g, or t
  misc_feature (827)..(827): n is a, c, g, or t

SEQ ID NO: 207752 - DNA, 809 bp, Homo Sapiens; identical to SEQ ID NO: 44738

SEQ ID NO: 207753 - DNA, 838 bp, Homo Sapiens
  misc_feature (678)..(678): n is a, c, g, or t
  misc_feature (725)..(725): n is a, c, g, or t
  misc_feature (774)..(774): n is a, c, g, or t
  misc_feature (784)..(784): n is a, c, g, or t
  misc_feature (826)..(826): n is a, c, g, or t
ggcctttttttttttttttttgacatatgttggttcaacttgtatatactattttgtaaactgtttttcccaattaacaatatacacagatgtcttcattttacacacccctctcctacacaccctcagacaaaaggcaaacctattcaagtttttgatttttgaaaatgtttcaatcagggaagctctgggtacatttcatgaagagaagtgatgaagatatccctctgacataacagaaagtggctgtttagctaggaaaatcatcaaataagtaagtagaaatgcatgcagaaacagaatgagtcaatcccaattaatgtttctgtgtttcctaaaagaaaataaacaccgcacatttgtctttagacagcttagtgtgcaccatggttccagtgtttttgctggaagtgtaaagttgttagcacaggcatatttctcagttagcagaaaacagctgctactggaattagtacccagaaatgaagttatttcctcccatcatcttactgaattgctctgctttacaaacaagaagtgaacattaattacttggaaaataggcctgacccagccaggatgaggctgacgcgtggaaagaggtaaaaataaaatgacaaagctctcttcacttcctatgctagtgtctgaaaacagagctgctcagaccattatggncatttcaaagttttcattcaataaatagttttttagacacctactgngccctacagggacatatatttttggcatacaatcaataactacaaccgnggtaagaaantaaggacctgctgaaccttacccctgcaaaaggacttatcgnccgaatttaaca

SEQ ID NO: 207754 - DNA, 693 bp, Homo Sapiens
  misc_feature (659)..(659): n is a, c, g, or t
  misc_feature (690)..(691): n is a, c, g, or t
ggcctttttttttttttttttaaggcatggacaagctgaatctaaaatgtttatgacaaataatctataacagccaaataactttgaaagaacaaagttgaaagatttaaatcatatgacttcaacatttattataaagttatagtaatcaagacatgtagtaatgccaactaagatagacaaatcagagagtccagaaatagaaccacacatctatgataaatggtcaactgatttttcataaagtgaaaatgcagctcaggagaaaaagaatagttttttaaacagtgctggaccactggatacccataaacaaaaccaaaaattttaaaaactcattttggctgagtgcaatgccttatgccctgtaatcccagcactctggggaggcagaggtgggaggactgcttgaggccaggagtttgagacctgcctggtcaacatagtgaaaccccatctctacaaaagaaaaaaattagtcaggcacggttgcatgtgcctgtagtcccagctacttgggagcctgaggccaaccatcacttaagcccagcagtttggggctgcagtgagctatgatcccatcactgcactccagccttggtgacagagtgagaccccgtgtcaaaaaaaaaaaaaaaaattttgagcattctccaagncttcgccttttctgggtttaatttaaaaccnncc

SEQ ID NO: 207755 - DNA, 769 bp, Homo Sapiens
  misc_feature (718)..(718): n is a, c, g, or t
  misc_feature (737)..(737): n is a, c, g, or t
  misc_feature (760)..(760): n is a, c, g, or t
ggcctttttttttttttttttcacttttcgctaaagtcacattccggcagcaattttatgctgtcaaaatgttctcaacaaggggagatttgactggcttctctgagaaccagtcataggaagcttgggctctgcttcttattgagttcttttttaaaattttgctgggggtccggggaaagaaggaaaaaaagcaacaacaataacgagaaacaagtcacccaggcatcttgtggagggtggctgctcttttcaggccggcggccagtccccgggcgtacagcgtgcggtgcaacctgcagctgcgggacgggtgcattcacgaggggggtgtgtgcgcctgggggtcacccctgctgtctctctgggtaggggtgcaggtgaagctcacatgtgccactctgtgagtgtcaccgcgagggaaaccctcccaggggcccgggcccagggtggccacggtgaggaggaggaggaccacatgcgcagggaagggcatggggcacagcatgtgtgtggcccacacaagggcggtctgctctcactcccctcgctgctctgtaattaagctcggctgcgcccactcaggcttccagacctttccctgagccctccgccccccgggcccactccccgttctcccagccttgctggctacttccactccccaaagagccttcaggggccttcttggcgtgatcaaaacaacagggccaccagnttctcaagagtccaagctntagtttggcccaaatgtcccggncccgggggg

SEQ ID NO: 207756 - DNA, 694 bp, Homo Sapiens
  misc_feature (422)..(422): n is a, c, g, or t
  misc_feature (630)..(630): n is a, c, g, or t
  misc_feature (666)..(666): n is a, c, g, or t
  misc_feature (682)..(682): n is a, c, g, or t
ggcctttttttttttttttttttttagctgagagcagtagctcacacctgtaatcagccctttaggaggctgaggcaggtggattgcttgatcccaggagtttgagactagcctgggctacatggcaaaaccccatctccactaaaaatacaaaaattagccaagcttgatggtggtctatagtcccatcctctttggaggctgcagtgggaggattgcttgagcccaggaggtgaaggctgcagtgagctgagatcacaccactgcactccagcctgggtgacagagcgagaatctgtctcaaaaaaaaaaaaaaaaagtaattttttaatattaggaattagagtgtggtggtcatcagttcatggctgacagaaacagcacttcctgctctttgcaatttagttcttataatggacaantcttgtttcaaatgctgcctccttggtattctgtgtacaatggaaatgggggttggattagatgctctctaaagatggtctgagctctaaaagttttcttcctggacagcagcagtttccctggataaaggacctttttcctgagcatgtggctctgtctcagaagcagcccctctccctggttccccagtagagcttccaggctcanatgaatagggccactggctttgctctacatagaggncctaaataatttaagnggcttaaaagcc

SEQ ID NO: 207757 - DNA, 861 bp, Homo Sapiens
  misc_feature (695)..(695): n is a, c, g, or t
  misc_feature (730)..(730): n is a, c, g, or t
  misc_feature (827)..(827): n is a, c, g, or t
  misc_feature (858)..(858): n is a, c, g, or t
ggccttttttttttttttttttgagatggagtttcactcttgttgcccaggctggagtgcaatggcacaatctcggctcaccacaacctccgcctcccaggttcaagcgattctcctgcctcagcctcccgagtagctgggattacaggcaggcgccactacgcccggctcattttgtatttttagtagagacggggtttctccatgttggtcagggtggtctcgaactcccgacctcaggtgatccggccacctcgatctcccaaagtgttgggattataggcgtaagccaccgcacccggtccaagaaccagtgttaataaacgtacagtagaagtggggtgggggcagggggaagctactgatcacaaacgagaaactaccacacacaaattaattttacagctttgatttagtctctcgggaccccacatctgaagaggggttaggcagcgaagtgtttcggtatggggcttgaggatagtgattttgggattctgagctactgagctcctctgagactctggggcactgctcacttgtaagcacaagggggctttgcttgacggtaatttaggtcaagcttccttgaatttcgatgaggcagctggagtttcttgaaaatattctcagctagattcagaataattctttctcctcttcgcttttgtggggactttatctcaagtgtctgnttctgctcactggaagacttaattttaggtccttnaacccctaaattcagttgaggaaatgacttctgctgcaaatagaaacctctgctttatttgcatggagaacaaggaactcaaatgagagatccaggnatccttggtttcatgccaatgggtctatcantca

SEQ ID NO: 207758 - DNA, 679 bp, Homo Sapiens
  misc_feature (546)..(546): n is a, c, g, or t
  misc_feature (597)..(597): n is a, c, g, or t
  misc_feature (629)..(629): n is a, c, g, or t
  misc_feature (669)..(669): n is a, c, g, or t
ggccttttttttttttttttttggagacagtctcactctgttgcacaggatagactgtagtggcacgatctcggtttactgcaaccttcatcgcctccctggttcaagcgattctcttgtcttagtctcctgagtagctggaccacacccagctaattttttgtgtatttttagtagggatgaggtttcgctgtgttgatcaggctggtcttcttgaactcttggtcacaagtgatccgcctgccttggcctcccaaagtgctggcattacagctgtgagccactgcgcccagcacctttttttgtcttgtttactgcgaaatccccaacaactatagcatttccaggcacatagtagatgcttaagaattacttacttacaagagcacaaacatcggcgaataaaaagaattacctattgaatgaatgagagttagctggtgcaaaaaaaaaaaaaaaaaagccagtgcagattgagagacctggccatagaaaattacaacgctcagggataaggtatggcaaggaacgttttttgttttttgntttttttttcgctttattgccgaggctggagttcagtggtatgatctcggntcactgcaatctccacctcccaggttcaagcnattctcctgcgtcagcctccgagtagctgggactataggngcacaccacc

SEQ ID NO: 207759 - DNA, 820 bp, Homo Sapiens
  misc_feature (591)..(591): n is a, c, g, or t
  misc_feature (681)..(681): n is a, c, g, or t
  misc_feature (710)..(710): n is a, c, g, or t
  misc_feature (790)..(790): n is a, c, g, or t
  misc_feature (806)..(806): n is a, c, g, or t
  misc_feature (816)..(816): n is a, c, g, or t
ggcctttttttttttttttttttttttttgcttatgaagcttggaaatctagtgtatattttacactaacagcatatctcaattgagatggccacatctcaagtgcccagtagccacgtgtggcctgaggccatgactctgggcaatacagctttaagtgagtctagggcagggcagagggcagcacctgggatcaggtgtggagcctggggccttgtttagcaccctctggtgagggcactttctttccataaaacccaggtcaagcatgcctcacaaaggggacagtggaagtgcctcagtttacttgggagcttggcctctccagcttgccttcctactgcctggaagaagattggtgtcctcttgccttctctagcccctttcacaagaaccctcccagaatttagtcctatgaagggccaggggtgcaaggagccacccacacaatgacaggacccaccagcaataccggaagttggccagccctactcatccaaattcccttctgccagctgaacatcacaaggatttcagactgccatgctgtggcaactccattttagggtctgggcatgtaaggattactgnattaatccattctcactctgctaataaagacatacctgaggctgggtaatttataaagaaaaagaggtttcatggactcacagatccatntgacaggggaggcctcatgattatggcanaaggtggagaagaagcaaaatccatcttacatggcagcaggcaagaaagttgtgcaagggagctcccctttataaaaccnttagatcaggcagggnacagtgactnacat

SEQ ID NO: 207760 - DNA, 778 bp, Homo Sapiens
  misc_feature (644)..(644): n is a, c, g, or t
  misc_feature (658)..(658): n is a, c, g, or t
  misc_feature (733)..(733): n is a, c, g, or t
  misc_feature (755)..(755): n is a, c, g, or t
  misc_feature (775)..(775): n is a, c, g, or t
ggccttttttttttttttttttaaataagctactggagaaagtgtgccttcgaaatgaggacagtaaggagagataacgacatgggaaccagggatataccacaggaaaggagccagggagaacaatttattaacaatttcttgcaactatccagggaaaatataaattatacaaaaagaaatccaaacaaatcagaaaaaaaatgaaatgactcaatagaaaaatggacaaagccattcagtcaatttaaaggaaagaagttaaacagccacgaaatgtatccaaaaaatgtccaaatctacctataattaaagaaactacatcaggtgcttgaaaagatttagtatagttaatgttagccaaatgtgtacaagaaacaagtccttttacacactgttaatgtgagtgcactgtccgaagtttatagagggcagactgacagcattttaggtacatacacttgaaaggtagcatgatttctaacagtttctacatgatacactcccttttataaggtatgacagaagactatgctgcaagtagaattagttagatatctatgcaatagcagtgaaagatctatcagaggtgttaggtagaaaaagcagaaaataagtcttatttatgtagaacgttctattgnattcatatttatgngttttcatacacaataagtctggaaaaatacaaactatagcaggttagcaataaagggagaacattcagacccanacgtggggggcttacacctggnaatcacaacacttttgggangct

SEQ ID NO: 207761 - DNA, 620 bp, Homo Sapiens
  misc_feature (584)..(585): n is a, c, g, or t
  misc_feature (589)..(589): n is a, c, g, or t
atcaagaccagcctgggcaagtttgagagaccctgtctgtgttagttcattctcatggtgctatgaagaaatacccgagactgagtaatttgtaaagaaaagaggtttaattgatgcacagttccacatggctgagaaggcctgaggaaacttataatcatggtggaaggcacctcttcacagggtggcaggagagagaatgagtggcaagcaaagggggaagccctttataaaaccatcacatctcatgaggactcacttactatcatgagaacagcagggggaaactgcccctgtgattcagttatctccacctggtcccacccttgatacctgaggattattacaattcaaggtaagatttgggtggggatacagaaccaaaccatatcactgttatctacaaaagattttttaaaaagtagccaagtgtggtggtatgtgcctatggtcccagctactctggaagctgaggtgggaagaacttttgagctcaggaggtcgaggctgcagtgagccatgattacaccactgcactctagcctgggtgacagagcgagagaccctgtcccaaaaaaacaaannacanaaaaaaaccccaagctaaaaaatttatatac

SEQ ID NO: 207762 - DNA, 810 bp, Homo Sapiens
  misc_feature (753)..(753): n is a, c, g, or t
  misc_feature (805)..(805): n is a, c, g, or t
  misc_feature (809)..(809): n is a, c, g, or t
ggcctttttttttttttttttttctggagacggactctcgctctgttgccaggctgaagtgcagtcatgtgatctcagctcactgcaacctccgcctcccgggttcaagcaattctcctgcctcagcctcttgagtaactgggattacaggcgtgcgccaccacgcccggctaattgttttatttttagtagagatggggtttcaccatgttggccaggatggtctcaaactcctgaccttgtgatccgcccacctcggcctcccaaagtgctgggattacaggcgtgagccaccgtgcctggcctctccaccttttttgcatctgtcaatgcccctagctctctagcagcagctgtgcaaacaccaggagggcccaaaggggtcttggtaagacacttttcagggcactgcggcagtgctatggtcccgtggtcaggagacctgcagcctgtcagtaactgacagtgtgaccttgagcaagatcaactctatggcttgcctcctcttatcaaatggcacaactatttcagcttagaaggttgttgtgaggttacaatgaaaaagcataatgactttttaaaaaatgactcaacttgataaaaatacaaaatactgcctttattcaaaatgaggcagagatgaataaggagggaattttgtcccagttaaatatttattccatttaaactactcaaaagtccagttgccccaataattaataattttcactttcccaaaccaccaagcaaggngcactggcattctcacctgcgggacctatgtttcccattccgatgcctttanttang

SEQ ID NO: 207763 - DNA, 811 bp, Homo Sapiens; identical to SEQ ID NO: 45291
  misc_feature (677)..(677): n is a, c, g, or t
  misc_feature (729)..(729): n is a, c, g, or t
  misc_feature (794)..(794): n is a, c, g, or t
  misc_feature (800)..(800): n is a, c, g, or t

SEQ ID NO: 207764 - DNA, 811 bp, Homo Sapiens
  misc_feature (507)..(507): n is a, c, g, or t
  misc_feature (734)..(734): n is a, c, g, or t
  misc_feature (743)..(743): n is a, c, g, or t
  misc_feature (781)..(781): n is a, c, g, or t
aaagaagcagcttgggctataactaatgcaacatcaggaggtactccagagcaaataaggtatttggtagctttaggctgcattaaaccactttgtgatcttttgactgttatggactccaaaatagtccaagtggctttaaatggacttgaaaatattttacgtcttggagaacaagaatctaagcagaatggaataggcattaatccatactgtgctctcattgaagaagcatatggtctggataaaattgagtttttgcaaagccatgaaaatcaggaaatttaccagaaggcatttgatctgattgaacattactttggtgtagaagaagatgaccccagcattgtacctcaggtggatgaaaaccaacaacagtttatatttcagcagcaggaagcaccaatggatggatttcaactttaacttactggaggaaaaaaaatttatggctaaaaagggtagcttcaggtaactcctctttgttgccaatgtaagaatgtttgnttttttacatagaacagtaaagagaatttgatgcacttttagaaagcaaaatgaaacaaaaatttccattcagatgcaacctttcattgtagtttggtggtggtttaagttttggtggtgtgcctggatttatatcttctattggttggatttttggatctatttgggaataattgaatatgccattatttagtaatttaagcttgaaaaggagaattttggtgaancttcttagnattctgaatttttcaagcattcttggaactgccattancagtaaacctatggtaatgcattttggcag

SEQ ID NO: 207765 - DNA, 799 bp, Homo Sapiens
  misc_feature (618)..(618): n is a, c, g, or t
  misc_feature (734)..(734): n is a, c, g, or t
  misc_feature (741)..(741): n is a, c, g, or t
  misc_feature (778)..(778): n is a, c, g, or t
gcggctgaagggccttttttttttttttttttggtagagagacacaagattattctaaaatgtatatggaaagcaattccaaaaaagaagagtagaggaattgccctccctgatgttgagaaccgtacagctacagcacagcgttatacggctcctggcagacaaccagtcctgctgcagcgaggtggggacaaggccgggagcagctcacttcccagtagaggccatccgatggcgccagggcacggggcagctgccgtcctcatggcccggggtaacgtgggcacagggtttcctcatcccactgtgctctgtgtctcccctgagcccggtgattttacgcacctgacttcgttagtcttctcggcaatgcccagcgtgcagaccaggctcgagaggtgtgtcggtgtgcccagggtcacgcagcttcctggtggccaagccgaggttagaagctagttctggtgggtgcgaaagcccccgatgtcggcagctctgccaccaggcccgcacaagcaggtggtgtaagaggggaggcgttggggccggcagtgctcaagtcaggattgagccgtctatctggaaggtctgttgagggtgtgtgctggtggccgggangtggtggcaaggctgactacctgccattttcctgcagtgcctaagcccaggaaagggagcagcccccggtcaggacccaactgaggacaccccatcctcatggaccttggttccgnttttcgncccccacaaatgggcttccaacataactttccccganggcttctttcttttccaaaca

SEQ ID NO: 207766 - DNA, 842 bp, Homo Sapiens
  misc_feature (703)..(703): n is a, c, g, or t
  misc_feature (772)..(772): n is a, c, g, or t
  misc_feature (774)..(774): n is a, c, g, or t
  misc_feature (803)..(803): n is a, c, g, or t
ggcctttttttttttttttttttttttttttttgagattgaacatctaatctcatagttgccaagacagtctctggtgtaaaagaaaataccaagcaatagtccttaactttgaagctgtcatggttagcatatattagtatttctagactcagattttagtttaaatttatgtctgtgctatagttacaggatgatttagcaaaattgcccgcaattaggtcatgtgtaacctagtggttagggtgttacttatgatagtcgtgatagccattctaaccctgcttatactgtctgagtgattagcacttcattggtatagtttattttatggctgtataaaagtactttcagcctttttcaagttatgtcacacagaaaatttcgtttttctaggactgtaaatggatgaggcagctgttaactggctataggctctgtcattcctgagggctgagtcaatcaatatttccacccatctataaaccactgttgcacattagtgtgccagtgcacattctttgagaaattgtggatgtatggtatataaggccattcaactactcaaatattaaatgctcaagttaatattctgaggctcttaatcaagagtcttgagggttagacaaatagtagaaactaaggaatcattttcaattgaagttagcatgatattaaatatctttgcctatattggataatgngcaaactgattcatgaaactaaatttaataatactatttttctatttgaaaaaaatggccaagttttcngnatggaaaacttaatggatttcttggttanccaaataatctttgggaatttatgagtaaacccgcccac

SEQ ID NO: 207767 - DNA, 821 bp, Homo Sapiens
  misc_feature (695)..(695): n is a, c, g, or t
  misc_feature (777)..(777): n is a, c, g, or t
  misc_feature (806)..(806): n is a, c, g, or t
  misc_feature (816)..(816): n is a, c, g, or t
aagcattaaaatgcatggtgttgagaagaatcaggagagggatacaagagaggagatggggtcccggcacccatctgtatcatcagtgcctctttgaaggtgggaaacattagtgaaaattctgttggtgccacgctttgatgagcatttgtttgaccccagtttcttcttacacttcttaccccagcctacccttcctgcatttctcttctcagctcttccatgatggattcccccccctttcctaaagccatcatgccttgataaatatatatgatcattgaaatactttttaacaaaaaacagattctatattattatatatatatatatatatatataaagatatatagagatgcattcacaggggttggctgggaggaggaagaccattctgtgaccaaaataccttggtcatttttttatattgccttatttccctatggctgagccttgttgtgacacatcaagcttttctgtagatgttgtcttggcttcccaccagcttaagcgttcatatgctctgcttttagttcatatatacatacataatgtttttcctttcttaattttgtctttttgtttgggatcagcttcttgcactccttccctaactcaactgttgccgtctcatcttctctcatctgatcacttcatgttttggttttggtactgcctggatgaagcacttctgncaattttttcaggaccttagttccagcagcagaatggaaaaatccttgaagcccagctgatgcttgaagtactggggaaggngtgtcaaaatctactgacgcagcaccttnttgcctgganagcaa

SEQ ID NO: 207768 - DNA, 558 bp, Homo Sapiens
  misc_feature (473)..(473): n is a, c, g, or t
  misc_feature (543)..(543): n is a, c, g, or t
  misc_feature (557)..(557): n is a, c, g, or t
aaggtggactagacaaagttgtatctagacccttatcatatatgtgatttgcaaatattttgattgtgtgggttgtctttttacttttttaatagcgacctttgcagcacaaattctcattttgatgaagtcaaatgtatctaactttcatttggctgcttatgctttcagtgtcatctaggaaccatagcctaatcgaaggtcattaggatttgcacctttgttttcttctaatgattttataacattggctcttatttaggtctctgatacatctgctgtgaatttttatgtatggtacgaagtgggacgggggaggggtgtcccactttaatcttttgcacatggatgtccagttgttccagcaccatttgttgaaaaaactattctttcctcatgaactgtcgtcttgcctctgttgttgaaaatcagttgactgtaaatgtatggatttacttcagaactgttaattntattccattgagctatatctattatgctagtaccatacagtcttgatgactgcatctttgtaatatgttntgagattggaaagng

SEQ ID NO: 207769 - DNA, 818 bp, Homo Sapiens; identical to SEQ ID NO: 48568
  misc_feature (653)..(653): n is a, c, g, or t
  misc_feature (754)..(754): n is a, c, g, or t
  misc_feature (773)..(773): n is a, c, g, or t
  misc_feature (789)..(789): n is a, c, g, or t

SEQ ID NO: 207770 - DNA, 845 bp, Homo Sapiens
  misc_feature (830)..(830): n is a, c, g, or t
attgtgtagctatacctagcaggaataaatactaagtctgtgtcagtattcttccccttggtttcagttatctattgctgtgtaaaaaaccatcccaactttgttgcttgaagcacccaggattcattgtttctcataagaattttctgctggtctcatgcggacttgctcgtgtcctagctgggatggctggattgttcatcttgcagttggtgctggacaatggtgggctctctctcagtggctttcatgcacaaggaggctcacacaggcttcttgatacagcagcctcagagcatcagaagggcaagagtggatgctgtctggtctttgaagtctcactcagaagtcacctgttgtcacttctgtgttctattagtgcaactgagtcctgaggcttgcccaggtttgcactgaggaaatcgattccacctcttgctgagaggagcagcaaagaatttatcgccacttttaacccactacaacctcaatttcaactgattgtctctaatgacttcttctgtaagcatccaaaacatcccttgattgaaactatctcaaggtgacctatcttccttcaacaatattttgtggttcgaaactatgtcattaagagagtgactttgaaaacctatataaggacccagatgtgaggtgactgcctagtctgaggaataatgactttaagttatatttgtagagaagtggtaaagccacgaagcagacccatggagaaatgcaaatctgtcatcagccttgaaggatgggacaaatttggtggtgccctggttaaggaggaaccagccctggggcttgctggcaaagcctangagactaatttgtaa

SEQ ID NO: 207771 - DNA, 566 bp, Homo Sapiens; identical to SEQ ID NO: 53231
  misc_feature (541)..(542): n is a, c, g, or t
  misc_feature (550)..(550): n is a, c, g, or t

SEQ ID NO: 207772 - DNA, 654 bp, Homo Sapiens
  misc_feature (496)..(496): n is a, c, g, or t
  misc_feature (586)..(586): n is a, c, g, or t
  misc_feature (605)..(605): n is a, c, g, or t
  misc_feature (637)..(637): n is a, c, g, or t
taaaatgtttgctattccttgaatataggaaatgctaaaaacaatatgtgattaaataccaagtgaatagagtaatagacagtttgaagtttggggtgttaataaatgatcagaatatcatggcttagcttcctgaaggaggttttttttttttttttttttttgagacaaggtcttgctctgttgcccaggttctagagtgcagtggtgcatgatcacggctcattgcagcctcgatcttgagggtccaagtgattctcccacctcggcctcccaaagtgctgttactacaggtatgacccaccacgcctggcctctgaaggagatttatataagtagaacaatggcaagtaggaaattagaagtattactttattattaatttgggcttttggccaaaataccaatgtaaatttgtgtagtaaacagggtgacatcatattacttaagctccaggactagtcaagggctctctcatcctcctaaatttcactgncttactactctttggttgatggctttgcagaagaccccaacaattagtcttttagagtgtgtaagagtgaaacgaccaagaacaagaacncaaactcttacatgtatgngacttttttttctatcttgcccttgaatcaanaattggggaacttttaa

SEQ ID NO: 207773 - DNA, 717 bp, Homo Sapiens
  misc_feature (96)..(96): n is a, c, g, or t
  misc_feature (660)..(660): n is a, c, g, or t
  misc_feature (704)..(704): n is a, c, g, or t
  misc_feature (716)..(716): n is a, c, g, or t
tgctgcagccacaacaagtgccaccaccaggggccttccagctgccagtgcaggctttccagagccggggactggggaacctgcagtcatcacctnagcaattctggtggcagccaggccagccagggcagcgatgatgaccgtaatgaaaagtgggatgacagctccacactggtggatgagttgagaacaccaggcagaggcatgtacctggtctttgatggttcagtggacctgcactaccattgcagtgcaaagtgcaagagttgaagcttggaaaccttcacctagatttaggaagattcagggaaaagtctggatgtccacgcagaagcctgctgcacgagtggaaccctcatggagaatctctaccagggcagtgtggaggggaaatgtggggttggagcccccacacagagtcccactggagcacttcctagtggagctatgagaagagaaccactgtcctcctgacatcataatggtagatccactggcagcttgcactctcagcctgaaaaagctacaagtactcaaggccagcccttgagagcatctacagatgctaaaccctggaaagccacaagtgtggtgctgccaaggctttgggagcccaccccttgtaccagcacgcccttgatgtgggataggaggtcaaangaagttattttggagctttaagattaatgactgctctgcttggnttttggacttgng

SEQ ID NO: 207774 - DNA, 777 bp, Homo Sapiens; identical to SEQ ID NO: 47463
  misc_feature (431)..(431): n is a, c, g, or t
  misc_feature (604)..(604): n is a, c, g, or t
  misc_feature (753)..(753): n is a, c, g, or t
  misc_feature (762)..(762): n is a, c, g, or t
  misc_feature (767)..(767): n is a, c, g, or t

SEQ ID NO: 207775 - DNA, 410 bp, Homo Sapiens
ttttaattttgaagctacctgaggtttagaattccttcagccctagctgcttttattctgctttttatttaaacaaaaagagggggaggatctgaaggaaactagttttctgtacaaaggctttgaggtccatggactatacttgtcccatttatcatcccaggtggtgctttgaccctgccataccctggctattaagataaaaagatttgtggacattaaaattatgaatatgtcagtaataatccagcacacattgaaatattgacacagattaccataatttgtgcaacatcttataaacaatgtcatttccatagtagtctaaggcttcaccagcctggcccactgtatctagactttagggtcattttaataattatgctttccttctctgtttcatttgggaa

SEQ ID NO: 207776 - DNA, 526 bp, Homo Sapiens
ttttacaagacataaaactgggcagaaacttagaagctttttttttaaagtttaactctaaagagcatataaattacgtaaacaaaggttttaatttataaccttgtgtagttattttgtaatactgctgtgccctattgtaagttcagtggctattctgtcttaatcacatgcttaaattgtaaaccacaacacgaatgctctagagcataaatatgctatataaatacaacaatccaaaaattttcaacacacctacatcataaattatgattttgccttggtgcctaactcaaagaaacaagtagctttttcctttttccagtggaacaaccccaaaaacaaacgagatgaggttagtaatgaattcaattacaagcgaagaactgtgatttttcccatctaaacctcttcccaatgtcactgtgcacctaattatgctggaggtttaaaaatctatgagtaattcttgatcactcactctttcctttacaactcacactcatctatctacaagttctgttag

SEQ ID NO: 207777 - DNA, 484 bp, Homo Sapiens; identical to SEQ ID NO: 59481

SEQ ID NO: 207778 - DNA, 379 bp, Homo Sapiens
tttttttttaaactgaattatttgccaaaaatttaaagatattttatggaaaaaacagacacccagcttctcataaaaaacaaagtcatgtgacaacattggacccacatggctactgggcaacagagtaactgagtggtcctgccccccttcacccttggcacatgtcctccagcttgcaacatccagcaccactccctgcttacctacacctggtccacttcattcattgtgttgaactgacctctagaaacatgaattcgatatagcaaccctgggtgtactctagatcccatattttagcgtttatttctatattgtcttgagccatccaagttggtttagcctctctggataggacagagctctggggtcttag

SEQ ID NO: 207779 - DNA, 690 bp, Homo Sapiens
  misc_feature (566)..(566): n is a, c, g, or t
  misc_feature (588)..(588): n is a, c, g, or t
tttttttctttttggtcacttgttttatacttactagataagccaaaagacctgtttgttacacaaacatgcatgcattcaggtattaatccattctcacactgctatgaagaaatacccgagactgggtaattataaaagaggtttaattttcgactcacagttccacatggctgggaaggcctcaggaaacttaacaatcacggtggaaggcacctcttcacagggcggcaagagtgagaatgagagccagtaggggaaatgccaggcacttataaaaccatcagatctcatgaaagctcactatcatgagaatagcatgagggaaactgcccccatgattcaattacctaccacaacacctgggaattatgaggattaaaattcaagatgagacttgggtggggatacatccaaaccatatcaatccatatatggctgaaatttacatcagacaatggtaaatatctatgttcaaagtccattgatgctttgagattctgagctattttctggtatggaaaacagacttagcatctccatctccattggatgtatgctgcctnctgtgatgatcaaggaatgcantggttctcccaagtccacagtgcacatttgccctaaagtgcctgctgcaaatttctggtcgcggctcaaacctggtaagccaacacaaagggtctcctggga

SEQ ID NO: 207780 - DNA, 592 bp, Homo Sapiens
ttttttttttttttttggttcagcataacttggaacatttgaaagcttttcaacctaaatgtggggaaaaaacaggtaaggcattatttttgcacaaaactagcattcctaatagtgcaaatgaatctgatacctcttaaaatggtgagaggtcatacacttactagattaatttaaattttctttctatggcttgacaaattatccctctataaattctactctcacccagagctgttgctgtaatcaaaagataactgtagataaagtccaaccttctcctgtatccagcaaaaggtttttgctcatatgcaaaaaaaatctaatttttaaattatcctacaagtgaatatacaacttggattcataagaaccttctattatctgcagcaacaagctgatctggacagcagtctttcaaaatgagccccataactcaaaaatagtcagtcaatctaaaaacctgcatcattcttccccctcccctgaattagctactaaaatgtccttgaaaagttaagacttggtttgaaaatgtcgtacatacaatggggatgtatcagatctactatttgatcatctgataaaactt

SEQ ID NO: 207781 - DNA, 480 bp, Homo Sapiens
aatgtagccacaaaagttccattttatttggaaaaagcaaacacaagtaaatccaacattttccatgctagagcaatggattatcggatcggaaatatgtatttcaaaataatatatgggaagaattttctattgtagttgtttttctatttttcctacaacaaacataatcattatatatttaaaaccaatgccagggggagaacaaccagaaggggattaatttcctgtgctcaaaggtaaagtatttctaggtaaatggaaacataagacggcgatacagattttactttcaaccaccattcgaagtgggtcattagaacaagatcaaaccaagttcccaaatcagttaaatgctgttactttcttcacttatttgcagtagtatctgcaatacttggtaaaggcaactaaaaagtgtaagttcctagcatactgagaggctaggtctaccggaccaggttctttttatgccgggtc

SEQ ID NO: 207782 - DNA, 539 bp, Homo Sapiens
agaaaaaaaaaccttcagtgaaagcttttggcttatattcaatgcttcttttcagatatgcaaaatgttatttcattgggttgttgtcaacatccatttgttggtcttttggaaagtatgtgaaaaaaaattcttcaggagaaaacccacaattagagagtttgaaattgaatgtaacagaaaatcactcttgcatttttttttttcaagaatcctctatgccccctacaagttcattcgttcattccaagtgttcttgctggtttctggaggacataattctgtaagtctgggtaaccactgctacaagagtctcttgatgtgctcagatacagaattttcagaagaggaaaatggttcattccattagaaaaaaacaaagctaggtcttattcagacctgcctttaactctgtatacaattgtccagcagcaagttgcagtaattaactgtaagaactttgatacttgtacatttacaaacattctcaggtctctggtatgaaccacaggtgaaaatcaatggagaaaacttttttt

SEQ ID NO: 207783 - DNA, 657 bp, Homo Sapiens
tttttttttttataaacagtataaatttatttttaacagttctggaggctgggaagtctatgaccaaggtaccaacaaatttggtgtctggtgagggtctgctttctggttcacagacggcgccttctcgtggtgtcctcccacggtagaagtggcaagcagctctctggggtctctcataagggcattcatcacatccctgagggcactgccctcatgacctgatcacctcccaaagaccctacctcgtaacatcacattggtgattagaattttgggggaaacacaaacatgcacaccacagcactctgctgttttgagttttctatctcccagagccaaactcaatcttaaatacacagctctgaaaacacattagaaaagtagtcacctgacaaattctgtctgctggtttcattttctctgttcctcgaaggagaacctggttctgaaatgctgctctctgttcctcccatcagtggttgcaaatggcttacagatacttgctcaataaaagatgtgccatgcttatggaagtaccaccattcaaatataaatattagtcctgatatcaatgaagaagtccctgtaagtgccacatagaaatgtgggtgtcaatgaatttaaaaattcagtcaccgcttgcaaattctcaca

SEQ ID NO: 207784 - DNA, 482 bp, Homo Sapiens
ttttttcaccacatgtaaaactttatttatgcataaaaccaccacacacacacaacctacacaaggaatgtgcagtcctgagtctatttagctacatgtgagtatatactccataaggcatataaaaccagtgcacagaaaatgcatccagatattaatatatctacattttaaaactgcatggaaaatacattattatatatacacaaagtgcatacctacccaatgtatggaaaatatattctgtgagttgtgtttatatacatactgtgtgtgtactaaatacattgaaattgcattcttctgggttcatgaactgtttaagacacaattctctagcaatcttaatagcaggaggaagttcaggcattgggaatggtaatctccatctgctgagttttttttctgttcttctgtacttctattattcctgccttttaaataccccttctgtgtctacatgcatcacttatttaagtgtt

SEQ ID NO: 207785 - DNA, 561 bp, Homo Sapiens
gcacctaaaagtaatagcagtttattaggaattcttccttctcacctgtgtatcaacatattgggatcagtaatttagatgaaagtatactacaaaaggagcaaaggacacagacttagtaggttagaatattctggcttatgctaaaaaacaaaaagccttttttttaaaacagacatgcaaccacaaatttctcaagtattttagacacttggttcatctgtataacaaaaaaaaaatgcatttgacttaaaaaagaaatagaaaaccctaggtttctgtagtttagtttttcagatttacacatgcaaatcatatattcagatatttaaatgggaaaacaacttactttcaacaacttaatttttccagtaacacgttactatgttaaaaagatgcgacagtatattcatttaatctggcaattttaatttcaacaaatacatattaacaacaaattaaatcctattgtaaatacacttctttgttataccacgaccaaattttctaatcctagtacaggccacaatgaaataggccaaacatgctaccattaaagtt

SEQ ID NO: 207786 - DNA, 570 bp, Homo Sapiens
ttttttttttacttccaagaagaacatttttctgtttattcttagaatgtgaattttttttttcaactcagggccaagtacaaacttttgatttttgaaattttttcaactcagggccaagtacaatcttttgatttaaaaattttttttcatgaacaaaccatcagtagttattaaggagcccaagaaataggagatgtgaaagcaggatttctttgtgtttcctttgaatgttgttattttgagtattatcattatcaggtagaggaagaaaggtaggctgggaagtaggtccttatgatatcttgactatggatcccagatttacatttcacctgtcacagagcacacataatttagataaacatgtcaagaatgacataaacagaggtaaacacaaggagctttacatttggaaccaaaaaataaaaattagaaaaattattacctatattaataacaaaaaaattacttaaactctaggaccctgtaggagtctagctttctcccctgtatacttgggatgcactttattggctggcaaacctttgataaaatcagaagtttgag

SEQ ID NO: 207787 - DNA, 769 bp, Homo Sapiens
tgctgttgttatatagtttattactgtcatagctaagaaaaaggcagtcgatttcaacataatccatatctatgttcaaattctcaaactataggatatctatgtttcaaattgtaatttataacctggtaagtattctaaacaaaatattgacaatccattagctgacctaaaatcttatgaagctgtatcatcagtttaacaaatacacacgactttagcaaaagtatatacagatagtatttataatacttataatacaggcatggactaaaaaatacagataaacattggagcaaattaaaagaggagttgcattcaaaatattttttccatttgatatcattagaattacaaaagcagtaataaaaaaatctaatgttaaggcaatgacaaataacaaagataacagttgcccaaggagcgaggggttgggaggtgaatgcacaatcaaggaggggcacaaaacagccttcaggttaatttgttttattaaggggggagtcattggtagatagtctttacatctttttatgttggaaatattgcataatacatattagaatgcgtgttaaacactgatatcctactggaagtgcttatcctctggaaacttaaggctaatgacatgactattatgaattcattcatggaggagctggttttaaatcagtatgaaacgtggcgttccgtaaaggctatcggacataagtgctatacttcctggatgtgtcaaccgcagagaatcacatttggaaacagtgggttg

SEQ ID NO: 207788 - DNA, 469 bp, Homo Sapiens
tttatatttaataaatgaagttattgttctgactttggcaaacatgatagggtagagaatttctatatactctaaaaattataaaacatgtaactttaataaatggaagatgaccatatcttaataaacatgtaatgcttttctactgtgtaccacgaactattctgtttagctttccattacatagatccgttccacctgtttctttcttttaatctcaataatctctgtactgcctccatactggcctcaataagtgccactctccagttactgcttggccccagaatgaacacatatctgtgtcttaataaaccacagcaaagttgaggccgtaaacagcttttctaatgtcacgccgttcagaagagatccctgtttgttactcgtactctgttactgatacactatcaagaccaaaaagacaaccatatgagaacacaacagcacaccagaataaaacaatctg

SEQ ID NO: 207789 - DNA, 462 bp, Homo Sapiens
  misc_feature (413)..(413): n is a, c, g, or t
ttttttttttttgataaagaaggaaataattaagtgacagatgtgactcaagagtgaccactggagagggtggactagaggctccagcagacagcacctctcctcacagggatagaagcccaggagaaagacaccagggcatcgtaagaggctgccccttagagagctcttttaggcaagtctagggtcagagtggaccccagccaggtgcctccaattagaccctgggagccacctataactaagagcttgattgtctccctaaatgggtgggaaagtgaagcaggagccacatggagcctcttcctggaaagtctgcctgccaagagccaaagggctttaccatccattgcccctgcagttcacgcagggctggccctaagtcctctggttgtcgaggggtaagtccccanggtctgggccggcttcaggggacaggagttcagtgtcaggcaactccaa

SEQ ID NO: 207790 - DNA, 500 bp, Homo Sapiens
ttttttttttttttttgggggtcaaccttttatttataaattaatgacctacatgtactaatgaactaatattgatgtatatttgatgtatatatataaaatacatccaaagtgagaaactaaataaggctgagcctcaaaatgaatataaatcaaaggcctaatcttttcttcccacccccacccagccatcctgtgtgccctcttccccttggaggccactgccctaagtgaggatcagcatcgactccaccacagcccactttagtggtgacaacttttaatccacggaagcagtttttcaaagtgaaaactgtttcaaatcacgaagcttaccacttagacaattcagacaaggtaatgctcatttagactgacacaggtatgaaaattccaatcccttcttttcactatcattgtatctgacacacacatcaccttcctaggcactatgacactatcctgggagaagcaaatgtgtacaaagaagcacaatcctg

SEQ ID NO: 207791 - DNA, 642 bp, Homo Sapiens
ttttttctgtaaatttagtttgtatggtcgtaggacactctcacagtaactggatacccaaaggataacagaaatagtctgaaaggaaaaattgcaaattcaccaataaggattacactaaaaatatctatcaggaaattagaggcaatggattcaacaaattctaacgcagttcttctatgtaaatcccttcaatttctcatgtgaatctccactctactttctgcaatcactctactgatccaggccttcatcatctcctgctcagaatactacaatggcctaactcttcagcatttcttctggctctcctagctcaaaatccatcctccacttcactccaattttctgtcacttccctgaagaagtggggactgatttaacatccttttcactcagagaagagtccaaattcctaggcatggaatccaaaggttctttacaatatgcctctcccgtcacatctctccaagcaggtaagataccaccttacctgcaaatcttaacttacatatgtatggcaaaatctacccagttgatcagtacatatcctgcactgtatcaaattagctgtttatatgtcttctcctatactacagtgtgtgcatgtacatatatgtccgcttattactcattcactta

SEQ ID NO: 207792 - DNA, 601 bp, Homo Sapiens
tttacaaatagatacaaatacaacgtcgaccagatatgctacattaactatgtacaccttatttctctagaggcaggaatattccttatttttagacaatttatcatttacactgagaccctgaggaggaccatcagcctcctgctccccaatgctgccttcctcccttagaagcttatcctgtgctttcaactcatcactgagcaagaatcctgggaggaaaaaaccaagcccttctgaagatcttgggacttttctacccctgttctagaaacaatcaagattatttactgtgatacagcctagaaacaagcttttcctcaatgatgtccttttgtatagtaaaacgaatataatccctgacactgttttaaaaaaaatgtttcaggaatggagatgaagtcttccagcagtcttttccccctccacattcatcatcttgttaccactggcttggtgaatgcttccccaggagtctatctggaggtcaaagtggttttgggctgcactatggggttcagcctttccatactcccatgtggtttggtacaaaaatatactttacttcaagtcctaatgacagtgaacgcttcagatcttc

SEQ ID NO: 207793 - DNA, 434 bp, Homo Sapiens
ttttcaaatttccaaaggtatatgtactttaattgtgacttgaactcaaggtaaataaattaaataattaataaattaaccttagcttactggacggccaccatcttatatgctgttcccttgactgaaatgttgtggggtaaatgactatatatgaaatgggacttattggaggaattaatgcatctgataatggaggttgagaagttccacaacaggccatctgcacagcagagaccctgaaatgctggaagcaggacttaatccagcccaaaaacctaagacccagggaagccgatggtgtaattcttagttcaaggccaaaatccttagatccttcgggaggccactggtgtatgccctggagtccaagggctagaaatcctagactctgatgtccacaggcagaagagtgtcccagctccaggagatca

SEQ ID NO: 207794 - DNA, 693 bp, Homo Sapiens; identical to SEQ ID NO: 61458

SEQ ID NO: 207795 - DNA, 246 bp, Homo Sapiens
tttttttttatcatttcaaaattatttaaaatatgaccagatggattcctgcttccatgaattcaatggaattcaaatcttcccatttaaaataattttgtcggttgacctaaaccccggggatcgggggcaccccgtgggagcccggagattcgcctgggggtgggagggagaagccgtcagagagggggctgagctggggaagcaaagaggggctcggggacagccgggaggagagagggtcgt

SEQ ID NO: 207796 - DNA, 553 bp, Homo Sapiens
ttttgctcttctgagctgtttacaactgaccactgtgttccacagatgtatttttcaatagctttttgttacttagttttccatgatgcctgttatttttctcttgtaaatttaaatgagctgactttaaggatcttgggaaaacccatggcataattacaattttctttttaatcgacttttcattacttttgggagtctgttggtaactaaagatgtcaacaaagaataaattggagaagttacctgtccccactatagcagtaaacaaaacagatgaaaaacaccttgctgttaactcaatggttgatctaattgtgaaatcgttcaccttgttaaacatctaagtaagtctgtagtcgctctgcaaacagccattatatttatttactctagaagaaactgtagagtagtaattcgtgctaatgagaaaaacaaaataccatgttcaaaacagatgtatttgaaaacttaatgacattgttccaaaaactagagcatgtatgtatgctgtgcatcatctcagcagacctaaaatatccccaagttgtcc

SEQ ID NO: 207797 - DNA, 551 bp, Homo Sapiens
  misc_feature (294)..(294): n is a, c, g, or t
  misc_feature (531)..(531): n is a, c, g, or t
  misc_feature (545)..(545): n is a, c, g, or t
ttttcttaccttcctatttttattaacccgggtcttctgcgcccaaagactcagcctcattcaggaccatattatgttcatacttctgctgcgtccaaggagtgttgacgaaaaagtggggccttggaggggtagaggccaagggacagtttcccctctgccctttgaagttcacgatcttccatgcaacaaaattgttttctgtgaaaagcaggaaatgaataacaacagcgtaggtgcgttggctatgtccggtggcatttcttcagaattttcattaatgacacctgattntggaggcattgtatatttttaaatacatccagatgttgtttcagttgcttcctctttggttctttttgcttttcgttgttgagcgtcacttaaattcgtgtcatttcatgttggtacaggtactccacttcaaatttcccaagaaattcagaagaattgtgaacaagttgctggtttcacaatactgcaagacactgcaagttattccaagttcctcagcaagtgtttacacattgngccaaggacagatntttcct

SEQ ID NO: 207798 - DNA, 442 bp, Homo Sapiens
tttggcagaacaactttatggacaacatataaacttgggaggacttataataccataaagcattacatgctgggattttaagtcagtttaaagctacattcaagcaaattctaggaagacagaggctgaaaagtactaatagagatgccagggctgttggcaaggagggtaaccacatttcatcctggggcctcaggttagagaactgtgtattctttttcaattaaaccgacattcctagcaatatggtatgttgcaaatgcccttccaaaagaatcatgccaaccaagatgagggagagttaagggttgtatatacaggcaagaagtaggtttgaagacatttaggatttcactttcaagaaagaacactgtgccacaaagagattccaagtgcaagagtttgaacctgagggggtaatacaggtggtgtgtgttaaggg

SEQ ID NO: 207799 - DNA, 507 bp, Homo Sapiens
tttagataatgtaactttaatgcaaaacacagacgaaaagtttacaatactgtaatgttgcaccaagatagtatataaatagatttaataattttaaaattagttctggggcaggagtgtcaggggcaccagcaggcagtgttccagactgccttaagtggcagctgtcacaggagctgtagcattcagtgttcaatgttagcagtgactgcaggttcgataaaataggccagtggcagggcttaggttgtgatcctgattattgtttaggcccctttattttgcctattttctgagtgtatttctccaggcttcctagagcaatggctcttaaaatgtgatctcacactagcaatatcagcatcactgggcaacttgtaagaaaggcaaatcactgggcctcatcccagacctactgaatcagaaactctgggagtgggacccagtaatcatgtgtgcacatgtgtgtgtgtgtctgcatgtgtgtgtgtatgtgtgtatgggcgt

SEQ ID NO: 207800 - DNA, 519 bp, Homo Sapiens; identical to SEQ ID NO: 60892

SEQ ID NO: 207801 - DNA, 429 bp, Homo Sapiens
tttggtcccatggtctaatcatttatttgcactcataaaaactggcttgctttgaaaagcttcctccaaaagctgtattgtggtacttttgactctgggacaagaggaagaagttggggaattcgggcagttggtggctgggccctcagagactgtatgtggtgaccactgtttaagacaccattcatcacttggggacggagggagcacatagatggaccccaggctcatggatgttcctcctttcgcagtcatttactaaaatacctgtttaaggaatatagttccagtctcagcctagttgagacaaccacaggcacttaaataagtaccaaggaagcctctgcagagatagtgctattggaactgagtcctgagggccagatcagccttgaccaggccaaaaaatgtggaagagtattccaagcg

SEQ ID NO: 207802 - DNA, 699 bp, Homo Sapiens
tttttggagacagggtcactctctgttgcccaggttagagtgcagtggcgcgatcacagctcactgtagccttgaactcctgggctcaagcaattcttctgcctcagcttcacaagcatgtaccaccatgcctggctaatttttaaaattttttctagagacagcgtttcactatgttgcacaggctagtcttgaactcctgggctcaagtgatccttcagccttggcctcctaaagcactgggactacaggcatgagcactatgcctgccccctactgccccttttttaaagtacctgggagaacaaagtttaaatattctatttttgtagcacctaattaacatacaatttaagacactttcaaaattttacattattgaaaataagtaggttgaagacttttacttacgatcactttgctgttatgctgcatgtgtttgaaataataaaactttattttgaaaacaaacactcaactcaaaactcttaactaatttatatgattcatactgtctcttgttaaaaatccacacgggggattttaagtctgtatcaggccatgaaaagtttagatatgaagaaggcagtgttctttgtttcctaatgtttacaccagaccaaagtgaatcattgtgagagaaccaccatctctgatttcctggtctctgccgtcgtctctgagatctcccgcttctgc

SEQ ID NO: 207803 - DNA, 518 bp, Homo Sapiens; identical to SEQ ID NO: 59566
  misc_feature (499)..(499): n is a, c, g, or t

SEQ ID NO: 207804 - DNA, 550 bp, Homo Sapiens; identical to SEQ ID NO: 61069

SEQ ID NO: 207805 - DNA, 485 bp, Homo Sapiens
tttttagcaagacaaggtgtttttattgaggtctcaggaattgcaatttgggagacagattcagctagaagccacttgtgttctgaagagagagggtagaggaggggtttttaaaaaaagctgagggtgattagacaagttgacaagttgttttgaaagaggcaactggcttagtacaaaaatccatagtttattggttggtgctgttgaggagttgtagtgctggtgaaataaaattttccaggatgcagtggtcatcgcaatttggcccaattcaaaggttcaaggtaagctcctgtattgtttttttttttggagcttttaattttttttcaagttgcaggtcatgtagggagtcctttttagaatggcttcctccctccattttagagttctgaaccaaagtgatgtcatttattttattttatttatttattttttaagatggagtctcactctgtcacctaggctggagtgcagtggcg

SEQ ID NO: 207806 - DNA, 563 bp, Homo Sapiens
  misc_feature (473)..(473): n is a, c, g, or t
tttttgctgtgcagtagtatttattgttacagtgttaaaattcactctcggggaagcgatttggggccacggccctagaaactgcatctttgttcagagccaacccatttcctctgcagccacaaaatgcctttgtgtgtcagggctcgggagattctcctcgctggccagccattggcaagaatgccagactcagaggttgccattgcccacagggctttcttctcctttcctttcacagcaggaagagccctccggagcctcgaaaagcagagtggaagtggtggtgcccaggacgcatgggctctgatgggaagagggaggtgggcctgagcatgggccttcttctccccaggtcagaggggcctggatgcccctggagggaacactgaggtcacctctggccaaatcttcctgttctgccagtacccagccctgttcagtgacgtcaagcttttgggtccctgtcctgnggccctccacgctggccgggctgtgtagagacgcccttctctccactttattgggtccagattgttgtgtggcttctcccctcctctgca

SEQ ID NO: 207807 - DNA, 466 bp, Homo Sapiens
ttttagctcatcagctattgttagtgttagtgtatttttatatgtggcccaacacaattcttccagtgtggccagggaagccaaacaattggacacccttaagggacagcccttaagtaggctgaacttaagttgcaaacattgagataaaacattagtctccacctgcccaaaataccagcatccgtcttagatcattttcccaaacagaagcaaaatctacttgcttatttaagttactttcactaaggtccatctgggcaatagctcctcattctacacaataagcctgcatcttagtccattacaagaaaaaaaaaccacattctggaaaaagaaaaaaacatttcacaatattggcttcataataaatacattttaacttaaaacagtatgaagtagaatttttaatataataaaatgcttgtcactagcagttcttttatagagaacatgtaggaggaag

SEQ ID NO: 207808 - DNA, 476 bp, Homo Sapiens
cattaaaaatctttttattattaaggtacccaccacaatacataaactataaagtgacagctaattccacaagacatttaagcaattactttgatcatttaaccagcataaactactaaactggatatatcagaacaaaattgtgctttgaggttttgtccactttcaaaaacaacaaaataaacacccagaaaaggcaggataatgatgtagccattctcttatgataacaacagttataaaaatctgtacaggtaaggattatctaaaaggtgtattttgtgacaacacaagcctagacctccacattttcccccattggatagatgaatggcttgcaatgacatcattatacggcaattttaaagtattagttcacattttcagtctactgtgtgttccaaagtaagccaactacttaatatgctttcaaaggtgatagtttcctgtctcaagcaagtaaccttttttcctct

SEQ ID NO: 207809 - DNA, 547 bp, Homo Sapiens
ttttttttttttttttttcttcttttcaacgtttttaatgaataagatatcattaagaatttatattctaaacaagcactttaaataaattttggtatttactaacttaagtattcaagaacctggtttgaagagtccaacagactgaaagtctgcttttcaagagaactatgatcgtctatcaatggagagattttcgtatttctatattctaatagttcacgatccttgcttgatgtcagtaattcattaatcactataccaatagttgcatcttccaccagaatatttgcttgatatgctccaatcggaatttcaggcaatccaatgtagtcatgatctgccactactgaaccttgcaagagataaagactttctgttgaatgaattcatctctttggtccattattattttctgaggaggtccatataagaaaaatatattgataatagctttagaaacttctgatgctgaaacatcacatagaggcaaaatcacaatccatttggtgaataaatctgtcatgattatagcatatacatgact

SEQ ID NO: 207810 - DNA, 702 bp, Homo Sapiens
  misc_feature (689)..(689): n is a, c, g, or t
  misc_feature (692)..(692): n is a, c, g, or t
  misc_feature (699)..(699): n is a, c, g, or t
atccaacagttctgatttattccactcacacaacaagtcagttcttaacacaaaccacataggttcttccttaaataaaaagctgtggctatgaagaagtgagagttttttttttttttcctctccaaaccaccacgtgctcttgtgtgttattgtagtggcttcgcagagtatttatttggccagaaagtctatagtcaaattgctcttcattctcaagtgtagtatttatttctccagctcatgcagaattctgttttatatggaggttttaaatttgtgcagaaaagtattacgtgggtttcaaaggtactcttttttcttttttgagacagggtctcgctgtgttgcccatgctggagtgcagtggtgcgatcacagctttctgcagcattgaccttgtgggctcgagcagtcctcctgcctcggcctcccaggtggcttggaaccgcaggcatataccaccatacctggacatgtttttaactttaatttttatttttgtggagatgaggtctccctatgttgcccaggttgctctcgaactcctaggctcaagcagtcttcccgccctggccttccaaagtgcaggcattttaggcatgacccatcgtgtccagcctaaatggcattcttggaagtaaaaccacaggggatctgttggaagtggcatgatggaggaattttanaangaattgnacc

SEQ ID NO: 207811 - DNA, 704 bp, Homo Sapiens
  misc_feature (267)..(267): n is a, c, g, or t
  misc_feature (509)..(509): n is a, c, g, or t
  misc_feature (526)..(526): n is a, c, g, or t
  misc_feature (585)..(585): n is a, c, g, or t
  misc_feature (613)..(613): n is a, c, g, or t
  misc_feature (622)..(622): n is a, c, g, or t
  misc_feature (670)..(670): n is a, c, g, or t
  misc_feature (692)..(692): n is a, c, g, or t
  misc_feature (696)..(696): n is a, c, g, or t
tttatggtgaaataaaaggaccaaacatggcttgcttctttaatttaaccccttcttctgaattccttaccaaatggatctttgcaaacaactggttcagaagcagggctggtctcactcaggccaacatcattctgtgcgatgatgcggaactgatactcagcatcgggaacaagccctgtgacagtgtacattgtggtggtgatctgagtcttgttgtgtctgacccacttgtcagtggatgtctctttgcgttcgatgtagtancctgtgactctagaaccaccatcatctttgggccgggaccaggacaagctaacagaactcttggttacatcgagtacttctggaggattgcttggaggttctggaggatctgtaaatataagtggaaagcacacatgtattagaatacagtcccaagtattataagccaatgactttcatttaaaaacagaaaaatgctgaaataatgtttataattttgtggttgaaagggcacttactcnatggtgtttttggtgtnactggttcctcagatttcaagggtttgcttatgccaaactggttttctgctgaaacacngaaatgggtatctacattctcttttgangccttttancaccaagaaatgttcctccggactctgggaatccaatgggtatacccnggcgggctttttagggcacttnctcnttctctcc

SEQ ID NO: 207812 - DNA, 903 bp, Homo Sapiens
  misc_feature (531)..(531): n is a, c, g, or t
  misc_feature (699)..(699): n is a, c, g, or t
  misc_feature (745)..(745): n is a, c, g, or t
  misc_feature (795)..(795): n is a, c, g, or t
  misc_feature (810)..(810): n is a, c, g, or t
  misc_feature (877)..(877): n is a, c, g, or t
  misc_feature (890)..(890): n is a, c, g, or t
  misc_feature (900)..(900): n is a, c, g, or t
gttttctatccatttttaatattgtccttacataatattgtccttagattttgatcaattctaagtctgactttgaaattccatttacaatgtagtatgttttcaatgaaaaaccataaagtaacatccaagtgtttcatggtttgttgggaaggtaattttaaaataaaacaatttccaaaaaacatttgtcagccaaggtcatccataaaagtccccgtctggaactcattttctcagcacttctcatttttataatcatagtatttagccatattagcatatctttagaggaggcctggtggaatacccggggcctctactagtctgtttttccggtcataggaagacttttttttttacgtatcaaagtatgtgtttacagatttacagagtgtgatccgtatgcatcaaagggatacagccccagactgtttctttaatggtcattcatgaactattaaaaatttcctgaatttctttttaaactacatctagatagcctaaacatctatgttagtcttccattanttaacatgtgtatagggctttcataataagtagtcacactgttacaaggtaaattttctattacaaaatccaaatttctattgcatacacttataatcatctattcataaaagctaattcattgtacttgttaatgcatgaatgttccatgcagtaagaaaaataaancactacagttcggttgttccaatcttaaatctttaaggctatttancttaaaaacatgtttaaggaatattgcccttcaccacttggttaaggaanagttattttgaatancccattattgccttaccttattgggaataaccattaatgggtttttaaagggtccaacaaaaccccnaaaattattaccntccagcttanaaa

SEQ ID NO: 207813 - DNA, 616 bp, Homo Sapiens; identical to SEQ ID NO: 48701

SEQ ID NO: 207814 - DNA, 951 bp, Homo Sapiens; identical to SEQ ID NO: 49981

SEQ ID NO: 207815 - DNA, 700 bp, Homo Sapiens; identical to SEQ ID NO: 51975

SEQ ID NO: 207816 - DNA, 412 bp, Homo Sapiens
  misc_feature (245)..(245): n is a, c, g, or t
  misc_feature (278)..(278): n is a, c, g, or t
  misc_feature (308)..(309): n is a, c, g, or t
  misc_feature (324)..(324): n is a, c, g, or t
  misc_feature (335)..(335): n is a, c, g, or t
  misc_feature (342)..(343): n is a, c, g, or t
  misc_feature (364)..(367): n is a, c, g, or t
  misc_feature (372)..(375): n is a, c, g, or t
  misc_feature (384)..(384): n is a, c, g, or t
  misc_feature (391)..(392): n is a, c, g, or t
gcggccgcggcgtccggggagctttgggggaccagaggggagggagggccccgtcctctcccgccgtcctgggcggccccgcgcacccgctagtgtctgaaccgggggctgagtacacgcggacagatcaaggagggttgagggtggagggtgtatggagttggaagctctacagctagctacatgactgatggatcagtttgagatttgttcccttgtcaaaagtttaactctgatagaagggnggcctcacattctgatgtttggacatcccttanctaggatttgtctggtcgaacacacctttnnggtaagccagatgtnctattaccttntttgcgnnaagagggcctctttgagcttnnnnaaccnnnnccggtttgngtcaccnnggaatctaccaacaaaaatc

SEQ ID NO: 207817 - DNA, 557 bp, Homo Sapiens
aactttatatatatctatttcaattttatattctgaatacaaaggctgtttattaagaatgttgagctacccaagtatcatgtataataaactatatagaaataggaaacacttctttgaataagctacatacataaaatatgatatctttaaagatatattaattaatttaagaaatttgcttagatgcctaccgaataaggcactgtgctaggagctatgtatgcagttgaataaggcacaaccctactcttaaggagcttacagactagcagaatttgtaagacaccgtgtaagatgtaagctggaagtgatttctaatgtaaacagcagcgaatactttttgcattgagcgttagtttagttgtctttgcaaaagcttctttcttttcgtaatatgcggcctcattcacaaacacggggtacacggtacagtctccgcccagtgggatcgtcttcccatcaagagttaaaaacatgggatccccaggatgcagtggtttccagtcttgatcctgcagattaggatggatgatagcagcaatttctccattttc

SEQ ID NO: 207818 - DNA, 421 bp, Homo Sapiens
ctaaagttaattttgtccccttggtatgtgatttccatctctttaatattgtaaatctgactgtaggaattttaacgcacttagcctaaaatggtatcttttttttctttttaaagagatcctgtgttcagccaaggcctaaaggatatcttttaaatttggtcatttttcttttttttgtcttgagacggagtctcgctctgtcgcccaggctggagtgcggtggcgtgatgtgcaagctccgcctcctgggttcacaccattctcctgcctcagcctcccgagtagctgggactacaggggaggccaacgcaggaagatcgcttgagcccaggagtttgaggctgcagtgagttatgattgtgccactgcactccagcctgggtaacagagtgagaccctgtctctaaaaatactaata

SEQ ID NO: 207819 - DNA, 357 bp, Homo Sapiens
aaaatacaagtaagctctttaatatctaacatagaaatccaatgtctgacacaaacgcaatattatgggcactgggcaaaaattgacaaactgtaaggaggaaaaaaaaaggtgggtccctttcaaagtctgtccaaagccttaactgagaagggtctcaggcagggtggggagaaggaaacgcgctccactccgagaggctccagcaagggcgcctccatatgcggaactctcgcccaatccctgcacaggctgaaatctcgtgaccgccggggagcctggatcaaattcagggatccgagcttggtattcggctccgactctcatcccaacatcgtgctcgtcgtcgctgctgca

SEQ ID NO: 207820 - DNA, 583 bp, Homo Sapiens
ttttaaagacaagagatacaattcttcattactactgataaatcaatgtagctaattaaaatcatcatcctagtttttgccaggacaacataaaggtcttaattcacccaagatgcttaagacagaaacctaagaagcatcctgaacttgttctctctcacccatcacttttaattaatgaccaagttgtatccattctattgctgaatatctcttgaatccacttttctctatccttccgccccagttagggcgggcctacacctgaggccaacaaacttattctgtaaagagtcaagtagtaaatcttttaggtgctgtgacaaaattgaagatgtaatatacgtacttacataatgagagaaagcaaatttccacaaaaaaattttattgaagaaatgttaaatatgctaatactaataattagatataatcttttataagtttaccactaagaatataattattttggagggagataacagttcatttaattggggttcaaagttagtgttccctatcattaaaactgagagcaactgttcatctataaatgctgatctgcaatgacattttatgtatt

SEQ ID NO: 207821 - DNA, 526 bp, Homo Sapiens
atctggagactgagttttgcactcgttgcccaggctggagtgcaatggtgcgatctcagctcactgcagtctccacctcagcaggagagcaggaatcttcagtgatccacgggcaaatatgcagccattgtgggcacctgttcctcccgcgacctttgtgcccacgtctctccctccagtacctactgcacgaccccccacgtccgcctcctgccattgccagcaggtgccttgcgcgggtacctggctgcgcttattcatccattatggtcgctctgtcactggtgccattatgtgctcacatgcccactccctcaggtttagaagtcgcgttgcccggcaacagaacaatctgctggcttagcctttggccaagttggcagctggacgaggacgctcagagcccagctcttgagagttcaagtatccgacagttccccactgctcccaggagcggttacccgggcactctgtgcccctcattcctgtttgggccaaggccgaggacctgcgagtagggctcagt

SEQ ID NO: 207822 - DNA, 573 bp, Homo Sapiens
ttttttttttccacatataatactctgctttattttcttcacagcatttattgacatttgaaattatattcagtcacttgttttggttatcttcctcactaaaatgtaagcttgacaaaagtaggtacattgttttgttcagtgccatatcctcacaccaaaaacagtatctggcacacaataactgctcaataagtatttgttgactgaaggaacccatcacatcaggtttttttattttttaagggaaaagaatctttttaagacaatagacttaaaaacataaatgaaaatttactttcttctggtcctttctctggaagtaaattaaattttgttgtcagatgcaattctcttcagtaatagccttcaggttcagattgtgagcatgaaaagatttctttactgagtgatttaaccagagtaatctgtaccgagaagtaaatagtcacagcccaaggtgtgaaacaatgtcgtgtcctgctcataatggtctcatgggatacttttattgtgctgttaaggcctaaaagaaccaaaaatcatttcttaggaagttctccctccaggtat

SEQ ID NO: 207823 - DNA, 536 bp, Homo Sapiens
  misc_feature (511)..(511): n is a, c, g, or t
tttttgaaaaaccattgcctttttattgtctccttttaacatcaaatgttttataacacacttgatccttttgtttctaccccctattcattacagtcaaattaacaggcaatataataggtctaacagaatgcttgcatttcattagggaaaaatgaacgtctctctcctgaaacaggttgtcggtaccttgaatgacataatattggtgtatagactaggttcagcagagggattttttccacatcttgaatgaaaatgttaaacatgtgatgcacagagtattaacctgtttcaaaaaagtatagataaataatttattaaaaaatatatataccttgtatatttaagccatatttgagaacaggctaggataggattatttaaaaaaagatatttactagagttagaaattacaacctactgattaaataatgcaggtttggtcctgtaagattttaaccacttttcatgcttttagagcttctgagcagttggagagagagttcangaggtattcttggcattcagtgctt

SEQ ID NO: 207824 - DNA, 538 bp, Homo Sapiens
gcggccgcctgctctgcgccatggccgtcgtcctcctcgagctcctctgagtcgtcctcatccgagtccatctccaggctctccccattcacgtgcaggctgctggcgcccaggtccttctcccccttggaacccacagtggaatgagttatgctcttaaacatctcaatcaccgtcctctgttttaatactttggtctttttcttaggaaccaggctataggttcccattcttcgttttttcttccgagatactgcagctgctaaaacaaaaggcaagcaagctgtctgtgattttgtggtggccatgtagcactggttctgaggtagcgactgatgaagggatgggaaggggggtaaaagctgctgtcgtccaaagtcagaaatgttcttgttgatctcctcttttggttccttatgatctctagcttctcgaacttctctgggatctttactggctgcatgcaggcccacgacggacttcggcatggtcttgcgtgccctgtggaccttgacgtcagcgccaggggccgggagct

SEQ ID NO: 207825 - DNA, 675 bp, Homo Sapiens
  misc_feature (136)..(136): n is a, c, g, or t
  misc_feature (184)..(184): n is a, c, g, or t
  misc_feature (303)..(303): n is a, c, g, or t
  misc_feature (326)..(326): n is a, c, g, or t
  misc_feature (396)..(396): n is a, c, g, or t
  misc_feature (406)..(406): n is a, c, g, or t
  misc_feature (429)..(429): n is a, c, g, or t
  misc_feature (543)..(543): n is a, c, g, or t
  misc_feature (599)..(599): n is a, c, g, or t
  misc_feature (618)..(618): n is a, c, g, or t
  misc_feature (622)..(622): n is a, c, g, or t
  misc_feature (641)..(641): n is a, c, g, or t
  misc_feature (654)..(654): n is a, c, g, or t
aaaagaaaaaagagagtattaaaatttctcattgtaaaatctatattttagaatcactctacaatataagcaaataatgtgttttttactgattacatgccttttttttggggggggggggttctttttttttganacagggtcttgctctgtcgcccaggctggagtgcagtggcgtgatganacttcaatgcagccttgatctcccgggctcaagtgattctcccgcctcagcctcccaagcaactgggaccacaaggtgtgtgccaccatgcctgggtaattttttgtttttttgtgganatgcgggtctcactgttttccangctggtctcaaattcctgggctcaagtgatcctcccacttcagcctcacattgttgggattacagtcacnaaccactgtncccatccatatgtcattctttanacacactacttactaaatttctctttttaaagggatatactgaatttccggttgaagccaacttaactgctaattttctattttagctttaaaacattgataagcaacatgaancaatctagaacttaacctttaaatggctttattaaagaaatcccctatgaaaatcntgcaaaatgattatttacnaacnatcctacccagcacataanaaattcctcctcnattctgaaataccatcttctc

SEQ ID NO: 207826 - DNA, 506 bp, Homo Sapiens
  misc_feature (153)..(153): n is a, c, g, or t
  misc_feature (159)..(159): n is a, c, g, or t
  misc_feature (163)..(163): n is a, c, g, or t
  misc_feature (220)..(220): n is a, c, g, or t
  misc_feature (245)..(245): n is a, c, g, or t
  misc_feature (261)..(261): n is a, c, g, or t
  misc_feature (287)..(287): n is a, c, g, or t
  misc_feature (307)..(307): n is a, c, g, or t
  misc_feature (431)..(432): n is a, c, g, or t
  misc_feature (439)..(439): n is a, c, g, or t
  misc_feature (457)..(457): n is a, c, g, or t
  misc_feature (486)..(486): n is a, c, g, or t
ggacgattaacaagaacaatagccaaggaccacaggacatctcaactggttcaaaattgaagttgagcaagctttccactcgatgggtgccaaaaccgttgtgcccagatcagctgcagacaagagcagagctttcaatggaaattttaaacnagtggnatcnagaccctgaagcatttccttgaattataacaggagatggaacaggactttaccagtnccatcctgaagacaaaccacaatcnaagcaatggctaccangaggtagaagtggcctagtcaaggcnaatgtggacaagtcaaagtnaggtcatggcaacagtttcttgggatgctcaatgcattttgcttgttgactttctggaaggcccaagaacattttttttttttttttgaaatggagtctcgctctgtcgccaggctgggagtgnngtggccnatctcagctagcttgcgnagctctgcctcccaggttcacgccattcncctgcctcagccttccgagt

SEQ ID NO: 207827 - DNA, 348 bp, Homo Sapiens
  misc_feature (308)..(308): n is a, c, g, or t
  misc_feature (333)..(333): n is a, c, g, or t
  misc_feature (338)..(338): n is a, c, g, or t
attttattacagttggtatggaaatccacaatttgatggtaaatatatacattggaatcatccagtgttagagcattgggaccctagaatagccaagaattatccacaagggagacacaaccctccagatgacattggctccagcttttatcctgaattgggaagttacagttctcgggatccttctgtcatagaaactcacatgagacaaatgcgctcagcttcaattggtgtactagccctctcttggtacccacctgatgtaaatgaatgaaaatggaagaacctactgataacttgggtacccnctatttgggaataaagctcataaantatancctgaaaggt

SEQ ID NO: 207828 - DNA, 719 bp, Homo Sapiens; identical to SEQ ID NO: 50138
  misc_feature (568)..(568): n is a, c, g, or t
  misc_feature (608)..(608): n is a, c, g, or t
  misc_feature (649)..(649): n is a, c, g, or t
  misc_feature (672)..(672): n is a, c, g, or t
  misc_feature (682)..(682): n is a, c, g, or t
  misc_feature (701)..(701): n is a, c, g, or t
  misc_feature (711)..(711): n is a, c, g, or t

SEQ ID NO: 207829 - DNA, 851 bp, Homo Sapiens; identical to SEQ ID NO: 45622
  misc_feature (663)..(663): n is a, c, g, or t
  misc_feature (787)..(788): n is a, c, g, or t
  misc_feature (824)..(824): n is a, c, g, or t

SEQ ID NO: 207830 - DNA, 757 bp, Homo Sapiens
  misc_feature (609)..(609): n is a, c, g, or t
  misc_feature (720)..(720): n is a, c, g, or t
  misc_feature (725)..(725): n is a, c, g, or t
  misc_feature (753)..(753): n is a, c, g, or t
gtaaaaaaagctcaagttcaagtttctgtataataccttctttggaaactcacactcgcttaataaaagtaaaacacccacctcagattgatatgttatacgtaggacatcctctgcatcttcactacacagtgagcatcaccagttttatcccacgttttaactttctaagcatagatctgccagtggttgtggagacatttgtcaagtacctgatttccctctcaggagctctggctattgttaatgcagtaccctgctttgctttggatggacaatggattctaaactctttcttggatgccacccttacctcagtgattggagacaatgatgtcaaagatctaatagggtttttcatcttgctgggtggcagtgtacttttggctgccaatgtgaccctgggactctggatggttacagcacggtaatgtttgcactcatctgacagaatccctgagttacagtatacagctatgtggtaatattcattgccattgaaattcttacttggtatgaaatataaagtgtttccttaaaattacatcttagccaacaaccctgagctcctcccatatccagagtacccaaactctgtggtagaagatnagcagaagaaatgaaaggcatagtccctgactatattctaatttaggactgaatgtacccagatgcttgtggaataatatctaagcaagtgcaaattcatgtaatacccgntttgnctgattacatattgggttgaaataagtntaaa

SEQ ID NO: 207831 - DNA, 918 bp, Homo Sapiens; identical to SEQ ID NO: 40091
  misc_feature (801)..(801): n is a, c, g, or t

SEQ ID NO: 207832 - DNA, 883 bp, Homo Sapiens; identical to SEQ ID NO: 53137
  misc_feature (695)..(695): n is a, c, g, or t
  misc_feature (698)..(698): n is a, c, g, or t
  misc_feature (830)..(830): n is a, c, g, or t
  misc_feature (864)..(864): n is a, c, g, or t

SEQ ID NO: 207833 - DNA, 922 bp, Homo Sapiens; identical to SEQ ID NO: 42956
  misc_feature (765)..(765): n is a, c, g, or t
  misc_feature (873)..(873): n is a, c, g, or t
  misc_feature (921)..(921): n is a, c, g, or t

SEQ ID NO: 207834 - DNA, 745 bp, Homo Sapiens
  misc_feature (690)..(690): n is a, c, g, or t
  misc_feature (699)..(699): n is a, c, g, or t
  misc_feature (732)..(732): n is a, c, g, or t
aatcagaaacggagactgttcatctgtttatcccagctctatcagtcggtgccatcatcggcaagcagggccagcacatcaagcagctttctcgctttgctggagcttcaattaagattgctccagcggaagcaccagatgctaaagtgaggatggtgattatcactggaccaccagaggctcagttcaaggctcagggaagaatttatggaaaaattaaagaagaaaactttgttagtcctaaagaagaggtgaaacttgaagctcatatcagagtgccatcctttgctgctggcagagttattggaaaaggaggcaaaacggtgaatgaacttcagaatttgtcaagtgcagaagttgttgtccctcgtgaccagacacctgatgagaatgaccaagtggttgtcaaaataactggtcacttctatgcttgccaggttgcccagagaaaaattcaggaaattctgactcaggtaaagcagcaccaacaacagaaggctctgcaaagtggaccacctcagtcaagacggaagtaaaggctcaggaaacagcccaccacagaggcagatgccaaaccaaagacagattgcttaaccaacagatgggcgctgaccccctatccagaatcacatgcacaagtttttacctagccagttgtttctgaggaccaggcaacttttgaactcctgnctctgtganaatgtatctttatgctctctgaaatgtatgacncccactttaaaac

SEQ ID NO: 207835 - DNA, 640 bp, Homo Sapiens; identical to SEQ ID NO: 49541
  misc_feature (148)..(148): n is a, c, g, or t
  misc_feature (610)..(610): n is a, c, g, or t
  misc_feature (619)..(619): n is a, c, g, or t
  misc_feature (639)..(639): n is a, c, g, or t

SEQ ID NO: 207836 - DNA, 722 bp, Homo Sapiens
  misc_feature (525)..(525): n is a, c, g, or t
  misc_feature (704)..(705): n is a, c, g, or t
  misc_feature (719)..(719): n is a, c, g, or t
ttttttttttttttttttttttacggagattaggtcttgttatgttgcccaggctggtctcaaactcctgggcgcaataaatccttccacatcagccttccaaagtgttgggattacatgctgcacccccagtgtatcagcacttcttaaattaaaataatcttgccaactaatgtcttgttttacatccttcccctttagtctactacttgccattctatccttagtagcctcgatgacggctccccttttaccccatacctctctcccccaaaaaagcttggacagcaaccaaattggcttgtatcagtattgtcaactggaggcctacatgaggactcagcttactgtttttcttctggttaattgtggacataatcaagttcattgcttttactccccatctgctaccactcttgtgcagctatttatggtgatggctttgttacgtatatacacatagaccattgttaatcccctccttttcctttggctgccaaacagtattcatttgaacatcatcanaaggtgtgcaaagcactttgggaggccgaggcgggtggatcacgaggtccagagattgagaccatcctggccaacatggtgaaaccccgtctacactgaaaaatacaaaaattagctgggcaattggtggctccgtgccctgtgggtcccgggctacttggggaagctgaagggaaggnngaataaccttggancca

SEQ ID NO: 207837 - DNA, 830 bp, Homo Sapiens; identical to SEQ ID NO: 47315
  misc_feature (738)..(738): n is a, c, g, or t
  misc_feature (740)..(740): n is a, c, g, or t
  misc_feature (778)..(778): n is a, c, g, or t

SEQ ID NO: 207838 - DNA, 830 bp, Homo Sapiens
  misc_feature (642)..(642): n is a, c, g, or t
  misc_feature (672)..(672): n is a, c, g, or t
  misc_feature (746)..(746): n is a, c, g, or t
  misc_feature (756)..(756): n is a, c, g, or t
  misc_feature (828)..(828): n is a, c, g, or t
caactaatgggaaaaataaccaagctagcatcataatgacagaatcaaattcacgcataacaatattaaccttaaatgtaaacaggttaaatgccccaattaaaagacactgactggcaaattggatagagagtcaagacccatcggtgtgctgtattcaggagactcatctcacgtccaaagacacacataggctcaaaataaagggatggaggaatatttatcaagcaaatggaaagcaaaaaaaaaaaaaaaaaagcaggggatgcaatcctagtctctgataaaacagactttaagccaacaaagatcaaaaagacaaaaaagggcattacataatggtaaagggatcaatgcaacacgaagagctaactatcctaaatatatatgcacccaaaacaggagcacccagattcataaagcaagttctcagagacctacaaagagacttagactcccacacaataatgggagactttaacaccccactgtcaatagtagacagatcagcaagacagaaaattaacaaggatattcaggacttgaactcacctctggaccaagtggacctagtagacatctacagaactctccaccccaaatcaacagaatatacattcttctcagcatcctgatccacancatcacacttttctaaaactgaccacatantggaagtaaaacagtcctcagcaaatgcaaaagaatggaaatcataacaaacagtctctcagaccacagtgcantcaagttagngttcaagattaaagaaacttgccccaaactttcaactacatgggaaactgaataacctgctccaaaatgacnac

SEQ ID NO: 207839 - DNA, 754 bp, Homo Sapiens
  misc_feature (539)..(539): n is a, c, g, or t
  misc_feature (582)..(582): n is a, c, g, or t
  misc_feature (688)..(688): n is a, c, g, or t
  misc_feature (701)..(701): n is a, c, g, or t
  misc_feature (747)..(747): n is a, c, g, or t
attataaagattctgaacaacccaagagcatatacgttgcccatatccaaggaagaatcaagattatcaagactagcaacaaagactccaagcaaaggctaccaagaaacctcatgaagtgaaacaggactttgagaagttcctacataaactgcgttccgaagctgaaattgagagagaatgtgtggcatcactatcgtcatcatcatcatcatcaccatcatcaacagacaactacaactttgaggaagaagaatactaagagaaaccagaaatgaactctattcaagaataatgcatacaattcagtggtatcagtttaattgtaacaatatatttaattcaagtccaatccatgtaatcagtattaagagtgtgttttaccattcatctttaaaatcttcaaatcaataaatctcagtaagttattcttaaaagatctgtccaagcatgatcttggctcttaatagtaaaaccatattttaagatggaaaaagaatcattatgaagcatagagagctttcaaccatttctttggnaaatatatcttgatataatagcaaccgttcatcataatacaanacagaagggagattaatttactgtggcacaagaaagtcctgccaattcctaagtgccccaagtagtttctctcagactttttacattttttcaaggctcaagcaanaccaaaggcccanctccagggtttgggagcaaacaaacttttgctccccggtgctaaanttccaat

SEQ ID NO: 207840 - DNA, 545 bp, Homo Sapiens
  misc_feature (350)..(350): n is a, c, g, or t
  misc_feature (501)..(501): n is a, c, g, or t
  misc_feature (541)..(541): n is a, c, g, or t
gtgggagacagagtctcgctctgtcacccaggctggagtgcactggcgtgatctcagcccactgcaatgtctgcctcctgggttcaagcaattctcctacctcagcctcccaagtagctgggactacaggtgcccgccaccacgcccggctaattttttgtattttagtagagacagggtttcaccatgttgcccaggctggtctcaaactcctgagctcaggcaatccgcctgcctcaccctcccaaagtgctaggattacaggcatgaagccaccgtacccagccaaaaagctgggatttttaaagatattttctttgcttttaaaagaacactataaactagtcttngaaaacaaagtacaatgtgtcaacagaaaaaaatatcaatttgcactgatgggaaactggaatcatatcctaactatacagcccttttaaattggtgaaatcaaaaaacgaaggcttattattagagaaattcctaatttcttgagccagntgcttgaaaaagttgccaattttggctgacgtccttaatnacaa

SEQ ID NO: 207841 - DNA, 502 bp, Homo Sapiens
  misc_feature (423)..(423): n is a, c, g, or t
  misc_feature (430)..(430): n is a, c, g, or t
  misc_feature (442)..(442): n is a, c, g, or t
  misc_feature (454)..(454): n is a, c, g, or t
  misc_feature (459)..(459): n is a, c, g, or t
  misc_feature (479)..(479): n is a, c, g, or t
  misc_feature (489)..(489): n is a, c, g, or t
ctcccaaagtctcactgtcaacatgtatttggggagacatcaaactcagtatgaattgacaggatgatctagcttccaagaagaccaaatttaacctcaggctgcattaagagaagtatagtagcctaccctgagaaaggtgacagttcctctgctttgcactaatcagaatatatctagagggctgtgctattctcttcactgtatttttagagggttctctgcaaactgaagcacagccagggcaggatgactaggatggtgaggcttttaggaacacgccattgaataagggttgtgaattagcactgtttgacctggaaaggagaaggatgacaggaggaaaggaggatctgatgtaattgacttcacatgtgtgagaagctaggatagggaagaaggagtaaatcagaaatgtcccanagggcanaccttggatcantgggaagttcancgaancaaattgggcttcatattangcatactttntacgagaactact

SEQ ID NO: 207842 - DNA, 553 bp, Homo Sapiens; identical to SEQ ID NO: 59148
  misc_feature (525)..(525): n is a, c, g, or t
  misc_feature (549)..(549): n is a, c, g, or t

SEQ ID NO: 207843 - DNA, 531 bp, Homo Sapiens
  misc_feature (451)..(451): n is a, c, g, or t
  misc_feature (499)..(499): n is a, c, g, or t
  misc_feature (513)..(513): n is a, c, g, or t
  misc_feature (520)..(520): n is a, c, g, or t
  misc_feature (526)..(528): n is a, c, g, or t
atttgttatgttgcagcaattacactgtaaaagtgctgcccaagattgattgctctgatctgtagttcaattgtaaattagaatacacatccccccagggacacacggcccctatttgtgattaagaaaaaagccccataatagactaatagctaaagttctctctcttttactttcaggcaattagcttgatgaaatggcctctttttgtgtaccctggaagtgtaaaccgatatcataatgaagtatatgatgtttattctattattttcaccttgctggatatgcaggaatgcataagtaatggctgctttgtctagtacgtttactgattcacaagtaaactatttcttaaagatgcagtgtacgctttctgaggcttgagttaagcaactcctaactgtggattaaccttcacgcaaatgtctactgcaggggaggaaaacgaatnccctaagttgggggagagcatgatgctgatattcaagagggcttcagncactggggcaactnttggatngatgtnnnggc

SEQ ID NO: 207844 - DNA, 570 bp, Homo Sapiens
  misc_feature (485)..(485): n is a, c, g, or t
  misc_feature (500)..(500): n is a, c, g, or t
  misc_feature (540)..(540): n is a, c, g, or t
  misc_feature (567)..(567): n is a, c, g, or t
gctattacattttattttatttttacttctcaaatgttaaggaaacctattttaaatataaagatataaatatagggaaattacataatgataaaagggtcaattcaccaagaagataaacactgaaatataatatgcaactaacaaagatccaaaataaatgaagcaaaaattgatagaactaaaagagatatggaaaaatccacagtcataactgggagactcaataagtccattctcaatgactgataaacaaatagatggaaatcaaaaaggatatatcaaacctggataacgttatcaactggtttaatataatggacatttacaaaaaacactctacccaagaacaacagaatacatattctttccaagtgcccacagaacatatacccagatagatcatattctgggtcataaaataaactaacaatttttaataaaaccacataaagcatgttctctggctataccaaaattaaacnaggaattaaataatngaaaactcccccaggctaaccaacatgggtgaaaaccccnctttcttaccattccaaaaattagctnggc

SEQ ID NO: 207845 - DNA, 570 bp, Homo Sapiens; identical to SEQ ID NO: 59271
  misc_feature (438)..(438): n is a, c, g, or t
  misc_feature (526)..(526): n is a, c, g, or t
  misc_feature (533)..(533): n is a, c, g, or t
  misc_feature (546)..(546): n is a, c, g, or t
  misc_feature (554)..(554): n is a, c, g, or t
  misc_feature (565)..(565): n is a, c, g, or t
  misc_feature (569)..(569): n is a, c, g, or t

SEQ ID NO: 207846 - DNA, 575 bp, Homo Sapiens
  misc_feature (449)..(449): n is a, c, g, or t
  misc_feature (455)..(455): n is a, c, g, or t
  misc_feature (544)..(544): n is a, c, g, or t
ggacaagagttctttattggtgctattactactgttgtgtactgtctcttgcatcaaaccaggaggtacacaataattgactgtctcatcttcaatcagtgggtttgatcagatttctacattataaaatttcccattaacctatcatctaatggttttcacatccaagaaatactgctgtctagattcactacttcattaagactttcaaacttttattttttaaaagtctatcatttcttttgcacctattagctggaaattttcctaagaattttccctcagttacttggctgcctaaaatacagttcataacaagaagggcaggataaatattatattctctcctttatcaatcttcagagtaagaatctgatgccctagcaaactctgatggtaaccaatgagtttttctggtttccaatattcttttaataggcttttaatcntttggnagatgacaccattatagcccaaacccaaaccccatacttgggaagtactggtgaactgaagcctaagttataatcccatggcccagaanggatactaccatactggaaatttctttgact

SEQ ID NO: 207847 - DNA, 577 bp, Homo Sapiens
  misc_feature (459)..(459): n is a, c, g, or t
  misc_feature (489)..(489): n is a, c, g, or t
  misc_feature (528)..(528): n is a, c, g, or t
  misc_feature (542)..(542): n is a, c, g, or t
  misc_feature (568)..(569): n is a, c, g, or t
agcttctgcaactcctaggtaagaagtttctactattttcctaataactaactgctctggtctttataggggtcttatcatatatgatgtaaggccagggtcaaagggatacttttgcagaaatgtgaggccctaacagcagggaaggattttgtgtggttggggaggttggcaagggaattctgccagcaactgacaaggaataggatcctgctagtagcaaccagcatttcagtttaaattagtgagcaaaatccctttctagtgggcatgcaaagagacacagttataaggtctgctggaagcaggaggcacatatcaccttccagcctgcctccttccacttagtgcacgaaaatgacaagtatctgaatgtagtcaagttttcattttaggaacctgcccaggacagcttatcaaatgcccatggaaaaaaaaatggaaacaatatggcccaangctgtggctacctgatgagttagacttcanggatcactgggcatcaacttctaatggcttctgcagtanacttcttacattanatgtgggacctggggactggctgccnnataaatac

SEQ ID NO: 207848 - DNA, 470 bp, Homo Sapiens
  misc_feature (113)..(113): n is a, c, g, or t
  misc_feature (117)..(117): n is a, c, g, or t
  misc_feature (122)..(122): n is a, c, g, or t
  misc_feature (135)..(135): n is a, c, g, or t
  misc_feature (223)..(223): n is a, c, g, or t
  misc_feature (291)..(291): n is a, c, g, or t
  misc_feature (343)..(343): n is a, c, g, or t
  misc_feature (442)..(442): n is a, c, g, or t
  misc_feature (448)..(449): n is a, c, g, or t
  misc_feature (454)..(455): n is a, c, g, or t
  misc_feature (467)..(468): n is a, c, g, or t
aaagaaaaacaacagaagagaaggctgatcccaagctacagggtttttttgtttgtttgtttgtttgtttgttttggagacagtctcgctctgtctcccaggctggagtgcantggngcggncatagctcactgngggctcagactcaagctcaagcaatcttcttatcttgcctttctaattgctgggattataagcatgagccactgcacctggcctgtgngacgtaattctgatgtcaactccctgatgttacatcaaatgccacaggttaaggccaccagcccccgntaggctgccctcgcttcagatgcagctgcaagcttgggtgtccacagaccgnatgtacttttcaccaactggctgcaaatttggaggttcccaccacgtcctcaggtttgataattcaccatacaacccacagaactctgaaaagcatganctttcnntttcnntatttgagacannag

SEQ ID NO: 207849 - DNA, 614 bp, Homo Sapiens
  misc_feature (546)..(546): n is a, c, g, or t
  misc_feature (561)..(561): n is a, c, g, or t
  misc_feature (565)..(565): n is a, c, g, or t
  misc_feature (575)..(575): n is a, c, g, or t
  misc_feature (584)..(584): n is a, c, g, or t
  misc_feature (606)..(606): n is a, c, g, or t
  misc_feature (608)..(608): n is a, c, g, or t
aaaaaagtatgagtgtacagtggagtgttccagaggttacatggtgtgctaaccacaacagtctgacgtagatctgagaatcttctattaaaccaggcattaaaaagatttgcaaaaatgcaagatgtcactcttatcatctatgttaacatgtaatggatttattttttgtttttggaaaaaaaaaccaagagaaaagaaaataaagtcatctttagtttccttaaattcaaagtctgagcctgaaaatggaagtatcaaagctgatggttatacgtcagtgagaaaaaaatttaaaccaagctgggtgggtctttacatgagataaactatctacaggaaagaatgaccactaacttctgcataataaatgagagtggatcttttaattctgagatggcaatgtactttacaaggaccatttacagactacatcaaacctttttctagataaaaaacgtacttcagtaacttgcctgaattgagagagccaaaccagtccggagaggaaaacttaaaatgtttccacattatcaagcccccttnagaagtcctgggggncctnggcccctccntttgaccanaggtccggttggcacagtccancnggtttt

SEQ ID NO: 207850 - DNA, 610 bp, Homo Sapiens; identical to SEQ ID NO: 59196
  misc_feature (490)..(490): n is a, c, g, or t
  misc_feature (561)..(561): n is a, c, g, or t
  misc_feature (609)..(609): n is a, c, g, or t

SEQ ID NO: 207851 - DNA, 590 bp, Homo Sapiens; identical to SEQ ID NO: 59759
  misc_feature (526)..(526): n is a, c, g, or t
  misc_feature (577)..(577): n is a, c, g, or t

SEQ ID NO: 207852 - DNA, 544 bp, Homo Sapiens
  misc_feature (478)..(478): n is a, c, g, or t
  misc_feature (492)..(492): n is a, c, g, or t
  misc_feature (531)..(532): n is a, c, g, or t
  misc_feature (536)..(536): n is a, c, g, or t
  misc_feature (539)..(539): n is a, c, g, or t
  misc_feature (542)..(542): n is a, c, g, or t
cttgttacatgtatctccttgtactctgccttttctttttttgttgttttgttttgttttgtttctgagatagtctcgctctgtcacccaggctggagtgcagtggcgcgatctcagctcaccacaacctccacctcctgggttcaagcaagtctcgtgcctcagcctcctgagtagctgggattacaggcgtgcactaccatgcccggctaatttttttatttttagtagagacagggtttcgccttgttggccaggctggtcttgaactcctgacctcaagtgatccacctgcctcagccccccaaagtgctgggattacaggtgtgaggcaccataacctacctaagttctttttagaataaggtaaggggtagagggtggaagagtggatggatggatggacggcagatgggcggatggacagatgggtggatggaggaatggatggacagacagacaaagggactgaagctgnaccaagcctttcanttcacctaaccgggactgagctcaaacaaaggccaccanngacncanaancc

SEQ ID NO: 207853 - DNA, 600 bp, Homo Sapiens
  misc_feature (476)..(476): n is a, c, g, or t
  misc_feature (511)..(511): n is a, c, g, or t
  misc_feature (584)..(584): n is a, c, g, or t
  misc_feature (591)..(591): n is a, c, g, or t
agagatggtggtctcaccatgttgcccaggctggtctcaaactcctgggatcaagcaatcctcccacctcagcttcccaaattgctgggattataggcataagccaccaaggctggctgtgaacaatattaaacaaaaattatttcctgtggtaacagagattacatcctatgggacagggagacaggcagcagactgataaattaatacaagatctgtctgatggtgataaatattgtgcaggaaaaaaaacgaaggaagaggataagaaacattgaaggactaaaggaacggtcacaaagaagaaaacatttcagaaaagaactgagtaaggaatgaagaagctgagttctgaaagtgtctgcagaaaggcttttcagtagaagtttcagaaagtgtaaaggccctaagataggaaagggtctaattgatgagcactggcctacgaaggatgtgtggccatcagcattagcccntcccaaaatcaaatttaaggagaattagactttantttaaattttgcaaccacaccacaagcatcacaaggttttggaaatgggtaagctgataccaattagtattgnaactatnaatctgctt

SEQ ID NO: 207854 - DNA, 559 bp, Homo Sapiens
  misc_feature (375)..(375): n is a, c, g, or t
  misc_feature (390)..(390): n is a, c, g, or t
  misc_feature (410)..(410): n is a, c, g, or t
  misc_feature (425)..(425): n is a, c, g, or t
  misc_feature (451)..(451): n is a, c, g, or t
  misc_feature (456)..(456): n is a, c, g, or t
  misc_feature (474)..(474): n is a, c, g, or t
  misc_feature (507)..(507): n is a, c, g, or t
  misc_feature (519)..(519): n is a, c, g, or t
  misc_feature (548)..(549): n is a, c, g, or t
  misc_feature (552)..(552): n is a, c, g, or t
acttattagtgctttatgttacatgaaattaagtgcaaaaatacttaaataatgctgtgtgccaggcaccactctcaatggtttgactcactgtactctgcacaatcacccattttccagtgaaggaaatggaggcaccaagggtaaagtagccagcacaagtcagacctcatggcggggccaaggcattctggctccaaaatcccgaatcaaaaagcagaaggtcaaaaaattaaaaacaaagaaacatcacacacggaaggaggagaggccaaagattactccgagggattaaaatctgagttttcctccggtttaccttctacaactccttttactgaccacgcctgacacactgacacatgcattccctgncacagtggcttctgnggcccgcctggctgtactgnacagtgcaacttctnaaggcggagctgcgtggacccctggnccttnttgggccatggctctaantaccccatggttccttccaaaggcaatgggcantggcataggtanccacacgtcccattttttaaaaaacctgnnccntggatgc

SEQ ID NO: 207855 - DNA, 406 bp, Homo Sapiens
  misc_feature (4)..(4): n is a, c, g, or t
  misc_feature (201)..(201): n is a, c, g, or t
  misc_feature (256)..(256): n is a, c, g, or t
  misc_feature (276)..(276): n is a, c, g, or t
  misc_feature (333)..(333): n is a, c, g, or t
  misc_feature (347)..(347): n is a, c, g, or t
  misc_feature (353)..(353): n is a, c, g, or t
  misc_feature (359)..(359): n is a, c, g, or t
  misc_feature (391)..(391): n is a, c, g, or t
  misc_feature (397)..(397): n is a, c, g, or t
  misc_feature (404)..(404): n is a, c, g, or t
ctgntaataagaagacagctttattttctcaattagttcacgtatatacatggctgaaatttacttattgctacaattctattcttcttcctttttttttgagatggagtcttgctctgttgcccaggctggggtgcagtggcacgatctcggctcactgcaacctccgccacctggattcaagcaattctcctgcctganactcccgagtagccgggaccacaggcgcatgccaccatgcccggccaatctttgnattttcagtagagacagggnttcaccatgttggccaggctggtctcgaacttctgacctcaagtgatcccgccccgntggcctcccaaagngctggnattacnggcgtgagccactgggcccagccctattcttnattttngacatgnaa

SEQ ID NO: 207856 - DNA, 557 bp, Homo Sapiens
  misc_feature (182)..(182): n is a, c, g, or t
  misc_feature (284)..(284): n is a, c, g, or t
  misc_feature (403)..(403): n is a, c, g, or t
  misc_feature (418)..(418): n is a, c, g, or t
  misc_feature (428)..(428): n is a, c, g, or t
  misc_feature (444)..(444): n is a, c, g, or t
  misc_feature (450)..(450): n is a, c, g, or t
  misc_feature (467)..(467): n is a, c, g, or t
  misc_feature (517)..(517): n is a, c, g, or t
  misc_feature (523)..(523): n is a, c, g, or t
  misc_feature (526)..(526): n is a, c, g, or t
  misc_feature (544)..(544): n is a, c, g, or t
aaatcttgttttacaatagttacaataggaacccatcccaatccttggggctggccatagcgaaaaacactaaatactggcagaaaggaaaacaactgataaatccagagcccaagattacggatttgaaattaatacactaccactaccacctctctccctgaaacagagaccctctctgngtaaaatgaaagagatgaaaggagcttaaaaagctgcttaaaactgcagaagttcctctgggtactgacctatctggttgggcctaccttttcagggactgngtccatgaccaggtctccatacatgttcatcacctggggagaagatgggaggcagcttgccatggagggtgcggcatgggtacagggctcccccatgcagagggccccagacaccctgntccctgaatcccctntcaggcctgnttctctaccctttctncctggncactgagccaagtctgnccatcaagggcccaaggcattcatggcagcacgtgccgttataagccctnggaagnccntaccatggattgcctggnatccctgggaaaa

SEQ ID NO: 207857 - DNA, 590 bp, Homo Sapiens; identical to SEQ ID NO: 59121
  misc_feature (455)..(455): n is a, c, g, or t
  misc_feature (475)..(475): n is a, c, g, or t
  misc_feature (494)..(494): n is a, c, g, or t
  misc_feature (500)..(500): n is a, c, g, or t
  misc_feature (510)..(510): n is a, c, g, or t
  misc_feature (514)..(514): n is a, c, g, or t
  misc_feature (536)..(536): n is a, c, g, or t
  misc_feature (580)..(580): n is a, c, g, or t
  misc_feature (587)..(587): n is a, c, g, or t

SEQ ID NO: 207858 - DNA, 540 bp, Homo Sapiens
  misc_feature (315)..(315): n is a, c, g, or t
  misc_feature (427)..(427): n is a, c, g, or t
  misc_feature (488)..(488): n is a, c, g, or t
  misc_feature (501)..(501): n is a, c, g, or t
  misc_feature (503)..(503): n is a, c, g, or t
  misc_feature (507)..(507): n is a, c, g, or t
  misc_feature (513)..(513): n is a, c, g, or t
  misc_feature (532)..(532): n is a, c, g, or t
  misc_feature (535)..(535): n is a, c, g, or t
aatgaagacttctcagttgtattatatttttaaaaatttaaaatgaacttgtatatgtggaaggattgatgatctgtactgactccagatggttatgttctcctgatgacagatggaagtccaggaggcggggccatcccaagtgtatgccagcaagatatggttctactgctggtgacctcatagaagcagagtcatcactggagaaagacatagctctcatcctgatgggcatctcctgcccctgaggcctcagttagctgcacttgccttctgcatctcctggggatttcactccatcagttagcatcttgnttactgccttcccatgtgatggctgtttaagctccagagtcccttactctccttcctgccactatatcatcgatatgggtggcctgggaagggatggcatttattcatgacngggggcaagtgtccagatcccagatctaccgaaaatctttcattctggtggggccccctgnttccatcctgggngncccntccccnaactttatttaacaggcanggncatag

SEQ ID NO: 207859 - DNA, 513 bp, Homo Sapiens; identical to SEQ ID NO: 61703
  misc_feature (457)..(457): n is a, c, g, or t
  misc_feature (472)..(472): n is a, c, g, or t
  misc_feature (483)..(483): n is a, c, g, or t
  misc_feature (491)..(491): n is a, c, g, or t
  misc_feature (495)..(495): n is a, c, g, or t
  misc_feature (500)..(500): n is a, c, g, or t
  misc_feature (511)..(511): n is a, c, g, or t

SEQ ID NO: 207860 - DNA, 560 bp, Homo Sapiens
gcaggcaatccatcagcatctatcaaatagttaaatgtatatgtcctttgacccaatcatttcccttcctggtgactaccctcagaaacacttgtccatatatgtaaatatctgagaacaagtgtgtttaaggctatatcgttatattatttataatccagaaataacaaaaatgtccaaccagagggaactgattattgtacagtcatttcacagaaaaatccctccatgcagacattaaaaagaatgcagttgttctttgcataatgatttctaaaacaagcaagggttagaaccataaacaaaagcagggaaattttgaaaccataagcttttgtaaagcccttctgtaaagcagaataataccacactcatgcctgtggccagtactgtggctggaacatcatgggcgcacaataaatatgtgttgagtgggtgaaagcacttgcatcttactgtggcaaacaggccaacaaaatgcagatcattagcaatggtttggagaactagagcaaaaacatacattccattaatttggctttcattcccccgaaagggct

SEQ ID NO: 207861 - DNA, 563 bp, Homo Sapiens; identical to SEQ ID NO: 59097
  misc_feature (465)..(465): n is a, c, g, or t
  misc_feature (491)..(491): n is a, c, g, or t
  misc_feature (511)..(511): n is a, c, g, or t
  misc_feature (515)..(515): n is a, c, g, or t
  misc_feature (523)..(523): n is a, c, g, or t
  misc_feature (530)..(530): n is a, c, g, or t
  misc_feature (556)..(556): n is a, c, g, or t

SEQ ID NO: 207862 - DNA, 563 bp, Homo Sapiens
  misc_feature (488)..(488): n is a, c, g, or t
  misc_feature (524)..(524): n is a, c, g, or t
  misc_feature (530)..(530): n is a, c, g, or t
gtagagatgaggtcttgctgtattgcccaggctgctcttgagctcctggcttcaagccatcctcctgtcttggtttcccaaagtgctgggactataggtgtgactcaccatgcctggcctacatccagtttaatttatactacactgtgggtttagtcctcaaacatgtttttgttttacatataaaaatttgaggtaaaagaacatttttacattggtcaataatggtacatttaaacaatggacgactatatccattaaaatcgtgttgtggaagaatattcagtgacatggaaagactgactcaagggcaagtgaaacgtgtcaagagtctgttaggtactagacactgtaaactgggtcttggctgtgttacttgcttacatcctccatcatgtgatcttttagataacaaaatcgagatcatagggataatggggtgggctgattgaaagaacagaacttgggccacacttctagatgcctgngacttttctgcatctattcagatattaaggaattgnttatgnaaaccatgggggttgaatgctaaaggaccctcc

SEQ ID NO: 207863 - DNA, 561 bp, Homo Sapiens
  misc_feature (475)..(475): n is a, c, g, or t
  misc_feature (489)..(489): n is a, c, g, or t
  misc_feature (534)..(535): n is a, c, g, or t
  misc_feature (559)..(559): n is a, c, g, or t
cctttcaaacactgtggcttacttgtttactcaactaagaaagaaaaagcaaccttattatagagattagcaagagatgaagaaaattatagggaggctgccctggcccaaaggtctgctaatggcttctgcagggaggatgaggatggtgctaggttaactgcttgtctccactacagaccagagaacgtccatgcgatgcctcttatcagtgaggtagatgatcatcctcttgccagaggtatcgagtgccagcccacagcacagcagagcaaaaaagtttaaagtaggtcaagttcaaaattatatcaaggagataagagatgggaggcaaaggctccagaagaggaacagaggcggaaggaagagaagctccaaggtgacgcccactctaggacaagatgatggggagcttgcttctgtcctgtcagacatacctcctgccaccacgagcagctgaatgaggggtgggaanggaagaaaagcccngagtgaatttttggaagaagaagtggaaggccaggaatcccttanntcctgggaaccttttgggggtttngg

SEQ ID NO: 207864 - DNA, 541 bp, Homo Sapiens
  misc_feature (460)..(460): n is a, c, g, or t
  misc_feature (471)..(471): n is a, c, g, or t
  misc_feature (495)..(495): n is a, c, g, or t
  misc_feature (502)..(502): n is a, c, g, or t
  misc_feature (520)..(520): n is a, c, g, or t
ggactgagaccatcaaaagggaagaattaggagggttcctttggtttgctcaggtcccggcctgaaaaacatggctctgacatccaagatgcctgctgctctgtccctgacttcagtctgaaccccaccctgcccaccccaaggccacgcagatggttactgtgggaacaatcccagccttctatctccccggggcctccctccctgctctgcttccctcccctgagcacttgaaacatcgccagctttgctaccttcagtcccgccaccacggggctctttcaaggctgtgggatcggcagaagagtaaccaccaccgcatcccagaaacactgcccaggaaaaactgctccatctgctcctctgccccagggccagcaggaggggaaggaaggggctggaggtctctgcagggaagccttggggttcctcctgatattgggactgctgcctggccagnttctactctgntgcaagaatctggacaggcaagantactttntcccccaagggttttttntaacggttgagcttactggtt

SEQ ID NO: 207865 - DNA, 535 bp, Homo Sapiens; identical to SEQ ID NO: 59111
  misc_feature (100)..(100): n is a, c, g, or t
  misc_feature (252)..(252): n is a, c, g, or t
  misc_feature (442)..(442): n is a, c, g, or t
  misc_feature (449)..(449): n is a, c, g, or t
  misc_feature (478)..(478): n is a, c, g, or t
  misc_feature (489)..(489): n is a, c, g, or t
  misc_feature (515)..(515): n is a, c, g, or t

SEQ ID NO: 207866 - DNA, 548 bp, Homo Sapiens
  misc_feature (170)..(170): n is a, c, g, or t
  misc_feature (191)..(191): n is a, c, g, or t
  misc_feature (223)..(223): n is a, c, g, or t
  misc_feature (239)..(239): n is a, c, g, or t
  misc_feature (325)..(325): n is a, c, g, or t
  misc_feature (370)..(370): n is a, c, g, or t
  misc_feature (391)..(391): n is a, c, g, or t
  misc_feature (411)..(411): n is a, c, g, or t
  misc_feature (451)..(451): n is a, c, g, or t
  misc_feature (480)..(480): n is a, c, g, or t
  misc_feature (500)..(500): n is a, c, g, or t
  misc_feature (503)..(503): n is a, c, g, or t
  misc_feature (528)..(529): n is a, c, g, or t
gagacagtctcattctgtcacccaggctggaatgcagtggcattatcttggcttggcaacctgcaacctcctcttcccaggttcaagtgatcctcctgcctcagcctcccaagtagctgggattacaagcgtgcaccaccacgaccagctaatttttgtatttttagtanagacatgttggccagcctggnctcgaactcctgacctcaagtgatctgcccgncttggcctcccaaagngctgggattataggtgtaagccactgcacctggcctgagacatccagatttcttctgatctaaataaccttaaagtgttaacaagnacaactaagtaggcttgggacagaaaaatgaagttagccaattgnacttaaaatgtgacaattcanagaatcacagggctacctgnttcacactagtttctatctgctagccaaggtgcacattangggtaaaaaggataacaacttcttagcantaagtggaacaataataaanggnatttcaatcccattaccaaaaatgnngatttggttcaaaaaattc

SEQ ID NO: 207867 - DNA, 646 bp, Homo Sapiens; identical to SEQ ID NO: 59089
  misc_feature (453)..(453): n is a, c, g, or t
  misc_feature (471)..(471): n is a, c, g, or t
  misc_feature (502)..(502): n is a, c, g, or t
  misc_feature (564)..(564): n is a, c, g, or t
  misc_feature (587)..(587): n is a, c, g, or t
  misc_feature (619)..(620): n is a, c, g, or t
  misc_feature (625)..(625): n is a, c, g, or t
  misc_feature (630)..(630): n is a, c, g, or t
  misc_feature (639)..(639): n is a, c, g, or t

SEQ ID NO: 207868 - DNA, 551 bp, Homo Sapiens; identical to SEQ ID NO: 61184
  misc_feature (456)..(456): n is a, c, g, or t
  misc_feature (473)..(473): n is a, c, g, or t
  misc_feature (485)..(485): n is a, c, g, or t
  misc_feature (503)..(503): n is a, c, g, or t
  misc_feature (518)..(518): n is a, c, g, or t
  misc_feature (528)..(528): n is a, c, g, or t
  misc_feature (541)..(541): n is a, c, g, or t

SEQ ID NO: 207869 - DNA, 563 bp, Homo Sapiens; identical to SEQ ID NO: 59321
  misc_feature (524)..(524): n is a, c, g, or t
  misc_feature (544)..(544): n is a, c, g, or t

SEQ ID NO: 207870 - DNA, 561 bp, Homo Sapiens
  misc_feature (482)..(482): n is a, c, g, or t
  misc_feature (537)..(537): n is a, c, g, or t
  misc_feature (542)..(542): n is a, c, g, or t
gagaatactggaccatcattaaatgtgtactgtgaagagattaatatgtatgaagggctttaccaaagtccactaaataaacactactcaagtacagactgcaaaccaaaatgtatctgtgttacgacattaattgcaaatagcaagtatggtgctaaagtctacaccaatggaattagatgagtgctatgcacttaattttaaaataaaactagttttcagtaaaatggcttcggtatttttgttttaaatacaaacttgtatatttgcagctctagtgaaccatctcatcatgtaattcagacttggaatcatgattttatttactaaaagccatcaagatgtagaatatagccattagtggcataaaacatccgttcattgcgtattccatactgagcattaaagcccacaaaagtatattggacaccactggtgcctttttgagcttaaaatcagttggtagtatgttagcaactacnggatctaattattcacaatcatgccagcatcagaaaatctggaagtttgatgtcnaagtngggccccgaaaatggttaa

SEQ ID NO: 207871 - DNA, 554 bp, Homo Sapiens
  misc_feature (461)..(461): n is a, c, g, or t
  misc_feature (472)..(472): n is a, c, g, or t
  misc_feature (480)..(480): n is a, c, g, or t
  misc_feature (529)..(529): n is a, c, g, or t
  misc_feature (538)..(538): n is a, c, g, or t
  misc_feature (541)..(541): n is a, c, g, or t
  misc_feature (545)..(545): n is a, c, g, or t
gtcaaagtcactatttgggccctaacataatcctgctcagagcgacggaaaaaaggcaagccttttcaaacataactctctctacaagccagctattatggcaagggaaaaaagaaagcatctagataaatatctatcaaaattaactttaagagaaatactctctttccttaaaagcccttattttttgagacactagaaaataagttactataaaaagtggtggtctgggggctaaaaacaaaacaaaaaaaatcctcttttctacattttttagttttctggcatatttttgaagattttacagtcccaaatgagtcaaatgcctatttgttttttgaataaacaatggacttgtcatgtgatatatgtttctaaacttaagtattacagaaaacatcactatccatttgtaaaaaactcattctggaaaatacctttcccttgggttggtataaaanaccttccatanagcttttngggaatcttggccttgaaaaaccaccggctttcattaatttcccccttnaaaatcaanggncccnaacttaaac

SEQ ID NO: 207872 - DNA, 551 bp, Homo Sapiens; identical to SEQ ID NO: 61151
  misc_feature (457)..(457): n is a, c, g, or t
  misc_feature (509)..(509): n is a, c, g, or t
  misc_feature (534)..(534): n is a, c, g, or t
  misc_feature (537)..(537): n is a, c, g, or t

SEQ ID NO: 207873 - DNA, 565 bp, Homo Sapiens
  misc_feature (522)..(522): n is a, c, g, or t
  misc_feature (555)..(555): n is a, c, g, or t
gagctggagtttcactcttattgcccaggctggagtgcaatggcgtgatctctgctcactgcagcctccgcctcccgggttcaagtgattctcctgcctcagcctcctgagtagctgcgattagaggcacccaccaccacgcccggctagtttttttatttttagtagagacgggatttcaccatgttggtcaggctggtctcgaactcctgaccttaggcaatccacccacctcgaactcccaaagtgctgggattacaggcatgagccactgtgcctggcctgctcatttctttttaacaatgaaaaatgttccactctctggatataccacagtttatttttccattcacctactgaaagacatcttggttgctttcaaattttggcaattatgactgaaactcttaaaaatatccatgtgtgggttcgttttttttgtgtgtgtgttaagttttcaactcatttgggtaaataccaaggagtatcattactggatcatatggtaagaagtccttcagntttaagagaaacttctatctggcttccaagganctggaatgaa

SEQ ID NO: 207874 - DNA, 573 bp, Homo Sapiens
  misc_feature (487)..(487): n is a, c, g, or t
  misc_feature (501)..(501): n is a, c, g, or t
  misc_feature (516)..(516): n is a, c, g, or t
  misc_feature (538)..(538): n is a, c, g, or t
gagatggaatctcgctgttgcccagggtagagtgcagtggtgcaatcacagttcactgcagcctcgacctccaaggtgcgagcgatcctcccacctcagcctcccaggtagctgggactacaggcatgcaccatgatacctggctaacttttataaaatttttttgtagagatggggtcttgctatattgcccagactggtcctgaattcctgggctcaagcaatcctcccaccttagcctcccagaatgctgaaattacaggtgtgatccactgtgccctgcctcactgaaacttttaaatcataaaattatctgcattctgtatgttccttgagcacatagatacactttttcatcaatggggacacattcctactataaggctgagaaaagagaagggagttcaatacttactgaataaatgtaggcataaacctcactacctgtttcaaaggcctcattatttccttctctaagacaaatccngagcactttgcagncattatagacttctnttaaacaacctggagcctaaanataggggtaaggggtggactttgattgaaaaaaac

SEQ ID NO: 207875 - DNA, 471 bp, Homo Sapiens
  misc_feature (83)..(83): n is a, c, g, or t
  misc_feature (164)..(164): n is a, c, g, or t
  misc_feature (166)..(166): n is a, c, g, or t
  misc_feature (259)..(259): n is a, c, g, or t
  misc_feature (320)..(320): n is a, c, g, or t
  misc_feature (375)..(375): n is a, c, g, or t
  misc_feature (427)..(427): n is a, c, g, or t
  misc_feature (433)..(433): n is a, c, g, or t
  misc_feature (443)..(443): n is a, c, g, or t
  misc_feature (446)..(446): n is a, c, g, or t
  misc_feature (450)..(450): n is a, c, g, or t
  misc_feature (463)..(463): n is a, c, g, or t
gaggcagggtcttactttgtcacccaggctggagtagtggcgcgatctcggctcactgcagcctcgaccacccaggttcaagngatccccctacctcaggccctcaagtaccctggactacagacaagtgccaccacgcctggctaatttttgtacttttgtananacggggtctcaccatgttgcccaggctggtctcgaactcctgagctcaagcaatctgcctgcctcagcctcccaaagtcctaggattataggngtgagccaccttacctggccaaaaaaaaaaaaaagccattttttaataagaaaaaaatctntacctccaaaagctggtatgatatattggggaaaaaagttggctctggctcttanacctgcctccatttttttttctttgaagaaattaaatggggttttatgctancaaggncacttttttnaanaagnctaaatctaaaanaatgggat

SEQ ID NO: 207876 - DNA, 543 bp, Homo Sapiens
  misc_feature (63)..(63): n is a, c, g, or t
  misc_feature (101)..(101): n is a, c, g, or t
  misc_feature (247)..(247): n is a, c, g, or t
  misc_feature (397)..(397): n is a, c, g, or t
  misc_feature (431)..(431): n is a, c, g, or t
  misc_feature (433)..(433): n is a, c, g, or t
  misc_feature (463)..(463): n is a, c, g, or t
  misc_feature (480)..(480): n is a, c, g, or t
  misc_feature (488)..(488): n is a, c, g, or t
  misc_feature (523)..(523): n is a, c, g, or t
  misc_feature (528)..(528): n is a, c, g, or t
  misc_feature (540)..(540): n is a, c, g, or t
  misc_feature (542)..(542): n is a, c, g, or t
ctttgacggagtcttgctttgtcgcccaggctggagtgcagggtcatgatcttagctcactgnaacttccgcctcccgggttcaagtgattctcctgcctnagcctcccaagtagctgggattacaggtgcccgccaccgcacctggctaatttttgtatttttagtagagaaagggtttcaccatcttggccaggttggtctcaaactcctgacctcgtgacccacccaccttggcctcccaaagngctggcaactgcttgattttaatgaacaaaatgtaagtctacatcaacttcctgggtcagttcactaagccattcattcgaggtccacatcatgcctctataaatcccttccttacctagggttatttctgagttggaaaaagcaaacanacccactgctctctcctcttgttccaagaagcananttaaaaagttgcactctgccttgaagcttnaatgttaaaggaaattnggtcttanaaggttattcctctttataacatcccattaagtgnccttngggggagttaantnc

SEQ ID NO: 207877 - DNA, 548 bp, Homo Sapiens; identical to SEQ ID NO: 61358
  misc_feature (521)..(521): n is a, c, g, or t
  misc_feature (541)..(541): n is a, c, g, or t

SEQ ID NO: 207878 - DNA, 546 bp, Homo Sapiens
  misc_feature (465)..(465): n is a, c, g, or t
  misc_feature (470)..(470): n is a, c, g, or t
  misc_feature (489)..(489): n is a, c, g, or t
  misc_feature (493)..(493): n is a, c, g, or t
  misc_feature (507)..(507): n is a, c, g, or t
  misc_feature (509)..(509): n is a, c, g, or t
  misc_feature (535)..(535): n is a, c, g, or t
aattcagttccaggaaccctcccacaagggtgtttaaaaattccctgtgcccagagtaacctaccgctctactgggaagagcacactgaaatgtaaaacacaggagccagacctttccagggaatggaggcaacaccaaggaaggccttggaagaggtgttggctgtctcagcagccacgccctccgcttccttcgagccagagcctctgtttcatttggctcttttgcccttgcctcatgtgactcagtggctgctgtggtctgaatgtttgtcttccctccaaaattcctatgttgaaatccttaccttcaaggtgttggtattaggaggtggggctttggggaggtaattaggtcatgaggatggaaccatcaggaatgggattagtgccctctaaggcactaagaaaaggctggtgggctagactcagtgactcatgcctgtaagcccaacactttgggangcttnagtggaaggatcatttgangctnggagtttgagaccnanctggacaccttaaaaggaccctaatnttttccaaaaa

SEQ ID NO: 207879 - DNA, 500 bp, Homo Sapiens
  misc_feature (166)..(166): n is a, c, g, or t
  misc_feature (172)..(172): n is a, c, g, or t
  misc_feature (198)..(198): n is a, c, g, or t
  misc_feature (318)..(318): n is a, c, g, or t
  misc_feature (336)..(336): n is a, c, g, or t
  misc_feature (366)..(366): n is a, c, g, or t
  misc_feature (389)..(389): n is a, c, g, or t
  misc_feature (421)..(421): n is a, c, g, or t
  misc_feature (430)..(430): n is a, c, g, or t
  misc_feature (452)..(452): n is a, c, g, or t
  misc_feature (468)..(468): n is a, c, g, or t
  misc_feature (474)..(474): n is a, c, g, or t
  misc_feature (487)..(487): n is a, c, g, or t
  misc_feature (494)..(494): n is a, c, g, or t
gagacggagtctcgctctgttgcccaggctggagtgcagtggcatgatctcggctcactgcaagctccgcctcccgggctcacgccattctcctgcctcagcctcccgagtagctgggactacaggtgaccgccaccacacctggctaattgtttttttgtatttntagtanagacggggtttcaccgtgttaaccangatggtctcaatctcctgaacttgtgatccacctgcctcggcctcccgaagtgctgggattacagcctgatttttctaaaattgaacccaagagttagaacaaaacaggatggaatctanaaggcagactgcgactgntctaagaaatctcgtgtagaagcagggatnacaggcatgtgccagtctccctnaaaactgggcccacttgagggaaactcatttntcagcatgnggggctttattaattaaccttnttggaaactgactggnccagangagacacaccctntgaaacnggagca

SEQ ID NO: 207880 - DNA, 557 bp, Homo Sapiens; identical to SEQ ID NO: 61349
  misc_feature (483)..(483): n is a, c, g, or t
  misc_feature (510)..(510): n is a, c, g, or t
  misc_feature (516)..(516): n is a, c, g, or t
  misc_feature (529)..(529): n is a, c, g, or t
  misc_feature (535)..(535): n is a, c, g, or t
  misc_feature (543)..(543): n is a, c, g, or t
  misc_feature (552)..(552): n is a, c, g, or t

SEQ ID NO: 207881 - DNA, 588 bp, Homo Sapiens
  misc_feature (518)..(518): n is a, c, g, or t
  misc_feature (562)..(562): n is a, c, g, or t
  misc_feature (570)..(570): n is a, c, g, or t
  misc_feature (575)..(575): n is a, c, g, or t
  misc_feature (577)..(577): n is a, c, g, or t
agagctgtgctttgtgttgcatgcctgttgtcctagatacctgggaggctgaggtgggaggattgcttgaggccaagagttcgaggctgcagtaggctataactgcagctgtgaaaagccactgacctccagtctgggcaacaaagcaagaccctatctcttaaaaaacaaacaaacaaacaaaagaccgaaaaaaaaaaaaaaccaactttttttgtcttttggagaatggcaaatagaaatcaatttctgggctgggcgtggtggctcacgtctgtaatcccagcactctgggaagctgaggtgggcagatcacctgaggttgggagttcgagaccagcctggacaacatggtgaaaccccatctctactaaaaatacaaaaattagctgggtgtggtgccacatgcgtggaattccagctactcaggaagctgagatgggagaatcgcttgaacctgggaggtggaggttgcagtgagccaagatcacaccactgcactccagcctggttgacanaatgagactccgtcttaaaaaaagaaatcaatttttggagtttncccaaatntttcncnccaaagggttt

SEQ ID NO: 207882 - DNA, 584 bp, Homo Sapiens
  misc_feature (468)..(468): n is a, c, g, or t
  misc_feature (477)..(477): n is a, c, g, or t
  misc_feature (507)..(507): n is a, c, g, or t
  misc_feature (548)..(548): n is a, c, g, or t
  misc_feature (558)..(558): n is a, c, g, or t
  misc_feature (579)..(579): n is a, c, g, or t
gttagaggaagggtctcgcccagctgatttcaaactcctgggttcaagcaatcctcccacctcagcctccctaagagctggcattacaggcgtgagccactgctcccggccttgttttatgcatttttccatatgtaggtaatagctcataataaaaggtttttttgaaaatacacaaaaaaactaccattacactcccaccagactggaaacaatttaaaagtccaaccaagtttaatcaagtgttgtgcaaaaagtagaacaaatggaagtctcacacatccctgatgggagggcaatgcattacgccactttgaaaaccagacaatatatgataaaattgaaggggagcacaccctactcagcaattcctttcctaactatatgctgtcaagaactcttgcacacgcacacatgtatattcccaggcatcttctaaagaaaatggtgggtatttgtgaaggttanggttactangaaaagtcgggccccgtggcttacgcctgnaatccagcttttttggaagcaaagccggaagatggtttgancccagaattnaaaactggctgaaccatttangggga

SEQ ID NO: 207883 - DNA, 569 bp, Homo Sapiens
  misc_feature (509)..(509): n is a, c, g, or t
  misc_feature (534)..(534): n is a, c, g, or t
  misc_feature (540)..(540): n is a, c, g, or t
  misc_feature (553)..(553): n is a, c, g, or t
gagacgggagtctcactcttgttgcccaggctggagtgcaatggagcgacctcggctcactgcaacctctgcctctcaggttcaagagattctcctgcctcagcctccctagtagctgggattacaggtacccaccaccatgtccagctaattttttgtatttttagtagagatggggtttcaccatattggccaggccggtctcgaattcctgacgtcaggtaatccacccacatcagcctcccaaatgctgggattacaggcgtgagccactacacccggctaccttttggcctttttgtttcatctcatttgactgtcttcttttttaattcctatgtttcttcaaatgaattaaccgtttcttttttgatcatttttatttttgcttccttgctgtacacacctctctttgaaatcattccttatggctcctcttaccatattccttcatcaagtgtaatattatgagatttctccatgattcacacatgactttcagctgatcnttacttcttagccttaattcccttnactaanccctctggcattnttagaataatgggtta

SEQ ID NO: 207884 - DNA, 579 bp, Homo Sapiens
  misc_feature (538)..(538): n is a, c, g, or t
  misc_feature (545)..(545): n is a, c, g, or t
  misc_feature (556)..(556): n is a, c, g, or t
  misc_feature (564)..(564): n is a, c, g, or t
  misc_feature (566)..(566): n is a, c, g, or t
ctttttttttttgagacagagtctcactctgttgcctaggctggagtgcagtggctccatctcggctcactgcaacctctgcctcccaggttcaagcagttctcctgcctcagcctcctgagtagctaggattacaggcatgagccaccacgcctggctaatttttgtatttttagtagagatggggtttcaccatgttggtcaggctggtctcgaactcctgacctcgtgatccgcccgcctcggcctcccaaagtgctgggattacaggcatgagccaccatacctggcctctatcttataacaagtcacttccctcaacatatcaagattaccagtatgaagggcagttacttaattcctaatttcctacaatgttaaagacattttcctctttacttacagaatttaaggtactcatattttcttggttctaaacaattaacacagaaataaaaataaactgaaatatgttttttctttttatagactgggttttgctctgcacccaggctggaatgcatggtggtgacacagnttcctgnagccttgaatnctaggagntnaagcaatcttctg

SEQ ID NO: 207885 - DNA, 555 bp, Homo Sapiens; identical to SEQ ID NO: 59185
  misc_feature (479)..(479): n is a, c, g, or t
  misc_feature (532)..(532): n is a, c, g, or t
  misc_feature (549)..(549): n is a, c, g, or t

SEQ ID NO: 207886 - DNA, 575 bp, Homo Sapiens
  misc_feature (524)..(524): n is a, c, g, or t
  misc_feature (531)..(531): n is a, c, g, or t
  misc_feature (552)..(552): n is a, c, g, or t
  misc_feature (555)..(555): n is a, c, g, or t
  misc_feature (564)..(564): n is a, c, g, or t
  misc_feature (566)..(566): n is a, c, g, or t
  misc_feature (572)..(572): n is a, c, g, or t
gaggtggagtttcactcttcttgcccaggctagagtgcaatggtgcaatcctggctcactgcaacctccaccccctgggttcaagtgactctcctgccttagcctcccaagtagctgggattacaggcccgcgccacaatgcctggctaatttttgtatttttagtagagatggggttttgccacgttgtccaggctagtctcgaactcctgaactcaggtgatccgcctgccccagcctcccaaaatgctgagattacaggcgtaagccaccgtgtctgacccattttattattatttatctgcatattcaaggaaaaaaatataaattttagattcctctggctcataataggctttcttgaagagaaaaatgacgtgcaagaaataactggagccattaaaatatattttatttttccttatttgtagttattaacagaaaaaatgctctaataggtacctaatggaagttgtcagatgtgattatcaagttgaaatgaatatttactcaaacctattaanggctttngctttttctggcaatattttnaangaagggtgncntttaanctt

SEQ ID NO: 207887 - DNA, 592 bp, Homo Sapiens
  misc_feature (475)..(475): n is a, c, g, or t
  misc_feature (560)..(560): n is a, c, g, or t
  misc_feature (565)..(565): n is a, c, g, or t
  misc_feature (569)..(569): n is a, c, g, or t
  misc_feature (587)..(587): n is a, c, g, or t
acaaaatacgccatgtcctttctcttctcttccatttgtttggggtgattgggaggtgagttttaaataagggtctcagctctctaacgggtaacaggctccaggtgggagggccaagagccccagatgccactcctcccgtggggtgtccaggcaaccacttcacccctcccctggcctgccccgactgagggctctccacgccctggcccagggctccctagatagtgaggagccctcttgggaggtggcacagagctgatgttgtgggattccaggtgggcctggttccgaatggacaggatcagacagagacggtcctatcccatgaagcagacaggccccagcagcacccctccccgcctcggtggggctcccaggtctgagaaggaggcatccagcactggcagctgctccagcacaggcgttcgcaccttcagcaccgtccggccttgctgtgtctggcagccatctntgaattctttgacataggggctagtcttccggcttagctcatcctcattggccccacggagtctcaggggaccgtcacggcttgnttcanacangggtaggaaacgtctggngggtt

SEQ ID NO: 207888 - DNA, 580 bp, Homo Sapiens
  misc_feature (443)..(443): n is a, c, g, or t
  misc_feature (530)..(530): n is a, c, g, or t
  misc_feature (550)..(550): n is a, c, g, or t
  misc_feature (563)..(563): n is a, c, g, or t
  misc_feature (565)..(565): n is a, c, g, or t
  misc_feature (569)..(569): n is a, c, g, or t
  misc_feature (575)..(575): n is a, c, g, or t
aaaaattattttagacacgaggtctcgttttttgcacgggctggtctcaaactcctagcctcaaacgatcttcccagctcatcctcccaaagtgctgggatcacaggtgtgagctacggcacccagcctgtttgttttgaatataatgtaggatgaagaaaaatcaagcctttggtggtccgtgtctctccaaaggttgagtggagaagcgtatggtgagaggcccttggtggccatggacatcaggccacacaagccacagagggcttgtggagatgcttatggctgggaacagactaggaacaaacacgggtgtggtcaaagctcaatcgctgagcactcggtaactctgcaggaagttaaaactttcacaacgaccatccatgtggttgactgggacatacaggcagagctccttctggaaaatggatttcttccactgnttggccattttaagtctaatcccaataaagtttggcagcaaatcagagcccaatcttttatcagggggctttaaggatttaacgganggacattttaatggccttanggaatgataatgncntganggattnctttg

SEQ ID NO: 207889 - DNA, 573 bp, Homo Sapiens
  misc_feature (536)..(536): n is a, c, g, or t
  misc_feature (549)..(549): n is a, c, g, or t
  misc_feature (557)..(558): n is a, c, g, or t
  misc_feature (565)..(566): n is a, c, g, or t
  misc_feature (572)..(572): n is a, c, g, or t
gagatgaagtctcactctgttgcccaggctggagtgcagtgcagtggtgtgatcttggctcactgcaaactccacctcctggagtcaagtgattctcctgcctcagccttcagagtagctgggatcatagatgcccgtccccatgcctggttaatttttgtatttttagtagagacagggtttcaccatgttggccaggctggtctcgaacttctgagctcaagtgatccacccaccttggcctcccaaagtgctgagattacagcatgagacaccatgcccagctgtgagcctgtatcttaatcaaagtcctgagaataaccttgaagaagactcccttgcaatgagcaacaacagaagaagcaagggacctggaatctggcagacctgggttcgaattctggctctgtcactttctggtgaagtgacttgagtaatgaacatgagcctttctgggtagcgttacagcacaaagcaatttgaggaataaaatgaaagagcacgtgtctaagtgcctaacaatgcgcttgacacantgccgggcttaancttatttnncacccanncttganc

SEQ ID NO: 207890 - DNA, 576 bp, Homo Sapiens; identical to SEQ ID NO: 59228
  misc_feature (498)..(498): n is a, c, g, or t
  misc_feature (538)..(538): n is a, c, g, or t
  misc_feature (574)..(574): n is a, c, g, or t

SEQ ID NO: 207891 - DNA, 560 bp, Homo Sapiens; identical to SEQ ID NO: 61183
  misc_feature (533)..(533): n is a, c, g, or t
  misc_feature (542)..(542): n is a, c, g, or t
  misc_feature (559)..(559): n is a, c, g, or t

SEQ ID NO: 207892 - DNA, 572 bp, Homo Sapiens; identical to SEQ ID NO: 59260
  misc_feature (493)..(493): n is a, c, g, or t
  misc_feature (547)..(547): n is a, c, g, or t
  misc_feature (551)..(551): n is a, c, g, or t
  misc_feature (565)..(565): n is a, c, g, or t
  misc_feature (569)..(569): n is a, c, g, or t

SEQ ID NO: 207893 - DNA, 581 bp, Homo Sapiens; identical to SEQ ID NO: 61173
  misc_feature (491)..(491): n is a, c, g, or t
  misc_feature (520)..(520): n is a, c, g, or t
  misc_feature (522)..(522): n is a, c, g, or t
  misc_feature (562)..(562): n is a, c, g, or t
  misc_feature (576)..(576): n is a, c, g, or t

SEQ ID NO: 207894 - DNA, 592 bp, Homo Sapiens; identical to SEQ ID NO: 59273
  misc_feature (403)..(403): n is a, c, g, or t
  misc_feature (489)..(489): n is a, c, g, or t
  misc_feature (564)..(564): n is a, c, g, or t

SEQ ID NO: 207895 - DNA, 571 bp, Homo Sapiens; identical to SEQ ID NO: 59292
  misc_feature (495)..(495): n is a, c, g, or t
  misc_feature (535)..(535): n is a, c, g, or t
  misc_feature (545)..(545): n is a, c, g, or t
  misc_feature (555)..(555): n is a, c, g, or t
  misc_feature (560)..(560): n is a, c, g, or t
  misc_feature (570)..(570): n is a, c, g, or t

SEQ ID NO: 207896 - DNA, 568 bp, Homo Sapiens; identical to SEQ ID NO: 59864
  misc_feature (522)..(522): n is a, c, g, or t
  misc_feature (554)..(554): n is a, c, g, or t

SEQ ID NO: 207897 - DNA, 573 bp, Homo Sapiens; identical to SEQ ID NO: 59154
  misc_feature (442)..(442): n is a, c, g, or t
  misc_feature (446)..(446): n is a, c, g, or t
  misc_feature (515)..(515): n is a, c, g, or t
  misc_feature (541)..(541): n is a, c, g, or t
  misc_feature (545)..(546): n is a, c, g, or t
  misc_feature (548)..(548): n is a, c, g, or t
  misc_feature (567)..(567): n is a, c, g, or t

SEQ ID NO: 207898 - DNA, 574 bp, Homo Sapiens
  misc_feature (498)..(498): n is a, c, g, or t
  misc_feature (520)..(520): n is a, c, g, or t
  misc_feature (525)..(525): n is a, c, g, or t
  misc_feature (554)..(554): n is a, c, g, or t
  misc_feature (570)..(570): n is a, c, g, or t
  misc_feature (572)..(572): n is a, c, g, or t
gagaatgagtcttgctctgtcgcccacgctggagtgcagtggcacaatctcggctcgctgcaacctccgcctcctgaattcaagcaatcctcctgcctcagcctccctggtagctgggactacaggtgcacaccaccatgcctgcctaatttctgtacttgtagtagagatggggtttcaccatgttggccaggctggtctcaagctcctgacctcaggtgatccacccacctcagcctcccaaagtgctgggattacaggtatgagccaccacgcccagctgataggagagctttgatggaaaccccatatgtgttgctagagtgtgagctccatgaggacaggacgtggccaccagcccccatggcaccccccgcatggtgctgggtgggggaaggcacttggcaagtgtgtgcagattgcatgacaaggtgcacccagccttgctccaagaaatcctgagcacacaactgcaggtgcacaaaagatgcagacagnttcatgtgtgcacacagacagntactnctttttgcagcctacttccccaggatgancaccccctttggaaananaa

SEQ ID NO: 207899 - DNA, 587 bp, Homo Sapiens; identical to SEQ ID NO: 59071
  misc_feature (541)..(541): n is a, c, g, or t
  misc_feature (583)..(583): n is a, c, g, or t

SEQ ID NO: 207900 - DNA, 582 bp, Homo Sapiens
  misc_feature (492)..(492): n is a, c, g, or t
  misc_feature (531)..(531): n is a, c, g, or t
  misc_feature (534)..(534): n is a, c, g, or t
  misc_feature (542)..(542): n is a, c, g, or t
  misc_feature (544)..(544): n is a, c, g, or t
  misc_feature (570)..(570): n is a, c, g, or t
  misc_feature (580)..(580): n is a, c, g, or t
gaggaactatgtaatctttttccactcttttgaaggagaaaagttaagattagagggtctcatggttttcctcttttacccagggaattgatattttagctaaccaattcccaccatatcccctggagctagggatgttcttccaaaggaaaatgaatcacagctgcaatctcacaaaatgccttgatcccacacagctgcctctctctccctcctggggaccaagaaggaaacaagggctatgttagttgtcattcaggtcagggagacagacgctccctttgaccttcttgactccctctcttcctcctctccatctttaacccctggattcaggagacttgtttaaccaggtcacattgagcattactcttgcttcatctgaagatcacccatactccactcctacccaatgtcaatttaggcaatccagtggtcatactctgtgcacagcctccttcccatatcatgttttggaaacacccttttggngcattcgaactctgaatgaggagcaccttacacccctgntgntggaaaancngacttaaatggataaaggcactgganccttacattntg

SEQ ID NO: 207901 - DNA, 579 bp, Homo Sapiens
  misc_feature (127)..(127): n is a, c, g, or t
  misc_feature (494)..(494): n is a, c, g, or t
  misc_feature (499)..(499): n is a, c, g, or t
  misc_feature (503)..(503): n is a, c, g, or t
  misc_feature (546)..(546): n is a, c, g, or t
  misc_feature (557)..(557): n is a, c, g, or t
  misc_feature (569)..(569): n is a, c, g, or t
  misc_feature (578)..(578): n is a, c, g, or t
cagtttaatgaacatttattatatattccaactgagtgaaaggcactatgctaggcagtgagagaaatacaaatgaaaataagactcaacctcttttcttacatttttttttttttttttttttganacagtctgtctctctatcacccaggctggagtgcagtggcatgatcttcgctcactccaacctccacctcctgggttaagcgattctcctgcctcagcctcccaagtagctgggattacagatatgcaccaccgcatctggctcatttttatatttttaatagagacagggtttctccatgctggccaggcttgtctggattcctgacctcaggtgatccacccaccttggcctcccaaagtgctgggattacaggtgtgagccaccatgcctggccttttcttacatttcttatcacggcatggatacaggcagagtaacacaaactatcctgtaggcagttttaaaataagtccatatttgagcncattnaaangtattgaacagatgggagattattcagaatgagattttgcttnaaagcctttcncctaatttcggnctggactgnc

SEQ ID NO: 207902 - DNA, 589 bp, Homo Sapiens
  misc_feature (569)..(569): n is a, c, g, or t
ggctttttatccaggttatattttaatatctggagttttaatccagcatacaaaaatcaccagtatacatctattaagttaactgcagtattatttcaccatcaccatttacatgtacttttcaggtatcagagacttagtgctttaagtagcaaattacctaaattatgaacacatatttccaaaaacaaaatcaagctcataattaccaagtatatatgtacagtgcagattaaaaaaaaactgaattagcacatatttctcttttctaaagctcctatgaagaacttacactcttctgcactaccaatctattctgtacatttaaaataacatttgttttgatttaaagtcaaaaatataaaggcttaaatttttgtgagactaacccataaaaaaggactccaattttaaaccaatccctgaaaccaaagcattcaaatatttgaatattagttcaatatttctacatagcacgataaggattttcaggtacttcaagttttggctttatttttaataatgggaatgggctacaattaccattaacaattattcaagtattttangggccttacatatcattacc

SEQ ID NO: 207903 - DNA, 566 bp, Homo Sapiens; identical to SEQ ID NO: 61122
  misc_feature (75)..(75): n is a, c, g, or t
  misc_feature (82)..(82): n is a, c, g, or t
  misc_feature (101)..(101): n is a, c, g, or t
  misc_feature (168)..(168): n is a, c, g, or t
  misc_feature (208)..(208): n is a, c, g, or t
  misc_feature (225)..(225): n is a, c, g, or t
  misc_feature (253)..(253): n is a, c, g, or t
  misc_feature (323)..(323): n is a, c, g, or t
  misc_feature (327)..(327): n is a, c, g, or t
  misc_feature (404)..(404): n is a, c, g, or t
  misc_feature (472)..(472): n is a, c, g, or t
  misc_feature (474)..(474): n is a, c, g, or t
  misc_feature (502)..(502): n is a, c, g, or t
  misc_feature (507)..(507): n is a, c, g, or t
  misc_feature (511)..(511): n is a, c, g, or t
  misc_feature (521)..(521): n is a, c, g, or t
  misc_feature (530)..(530): n is a, c, g, or t

SEQ ID NO: 207904 - DNA, 537 bp, Homo Sapiens
  misc_feature (455)..(456): n is a, c, g, or t
  misc_feature (460)..(460): n is a, c, g, or t
  misc_feature (467)..(467): n is a, c, g, or t
  misc_feature (485)..(485): n is a, c, g, or t
  misc_feature (490)..(490): n is a, c, g, or t
  misc_feature (493)..(493): n is a, c, g, or t
aaattttttcatctcaaagagttctcagtccccaccccacacgaggtaccgtgaaggggcactaaagtacattttgatgtagggggtagagcttaaaggtgctgtccaagctaagaatcaagatgatgctgtttaaaaaagaaaggcaattccttctacctccatctctggagtcagctgagggagggcagtgaactagactctccccagaggattgtcctaactcttaactttagagaaaactgtgtaaggacctgcacatatagaatcatttatttgtccaaaatagcaaaaataggcctatttcacccttaagaatttgcaaatctgatcagtcatgatcataaaaatgtgaatggattccagatgcaatccatgtgggcatgctctgtggaactagctatgcatcttcagcttgaatgaacatgaagctggtcattttcattaaaacctgnntttnaaacttnccttaattaaattccccntggancanttaaatcttttcttacaataattcctttacattaaaaggtatct

SEQ ID NO: 207905 - DNA, 524 bp, Homo Sapiens
  misc_feature (27)..(27): n is a, c, g, or t
  misc_feature (195)..(195): n is a, c, g, or t
  misc_feature (255)..(255): n is a, c, g, or t
  misc_feature (295)..(295): n is a, c, g, or t
  misc_feature (435)..(435): n is a, c, g, or t
  misc_feature (437)..(437): n is a, c, g, or t
  misc_feature (441)..(441): n is a, c, g, or t
  misc_feature (455)..(455): n is a, c, g, or t
  misc_feature (465)..(465): n is a, c, g, or t
  misc_feature (490)..(490): n is a, c, g, or t
  misc_feature (501)..(501): n is a, c, g, or t
cccagttaatttttgtattcttcctanagacggggtttcaccatgttactcaggatggtctcaaactcctgatctcagatgatccgcacgcctccacctcccaaagtgctgggattacaggcgtgagccaccatgctcggcctaggtgacttttcatggggagataacacacaggcatggtgagcagcgtggcanaggacctgtgtgcagggccctgtctcccgccggggaatccttcatctgggaaatctccgntgcgggacagggatgctgtgtcgtcaggacgcagcgtctntccagggcacccgggcctcctctgagcctctttgcgctctttggctgcgtgctttctttcccaaacagtgcagacatggaggagacagaaggtgaaaatggtttctgagcccctcaaccgcctttggggacaccaacctngnggtntttaaaaccaagcnttccttgaanccggaaaaggaggagcacccgggtnttggccccaanggaccaccctgaatcacaaagcg

SEQ ID NO: 207906 - DNA, 512 bp, Homo Sapiens
  misc_feature (461)..(463): n is a, c, g, or t
  misc_feature (473)..(473): n is a, c, g, or t
  misc_feature (475)..(475): n is a, c, g, or t
  misc_feature (495)..(495): n is a, c, g, or t
  misc_feature (511)..(511): n is a, c, g, or t
aagtctgttcacgtagcctgggactgggctagcctttcagtaaccatatcagtatcacacaaagcgaaccccagtctcctctgagtcttcattcctctacccagagaatgggttttcctctcagaacaagctcaaagaccttcctgacttctgcaggggagggtgtcctccctctcgtcccctcacatggctttctatcactcccttgctcctgcaagcctgcctcatggaaccctcagaccaatctccattttgccaaggacggtggggcccacctctgcctcttggagcagaccctgcagagttgctcttggcggcctcaggccttccctgggagtctctgcactgctgacttgtgcagaatctcatctcagagcttgcaaatggccccaacaatgtgctggaatgtatatggatgggggtgggctggaaagtgctgagaacccaacattttcttaatnnntttttctttncnttgagacaagttttactttnttacccaggttggaang

SEQ ID NO: 207907 - DNA, 560 bp, Homo Sapiens
  misc_feature (462)..(462): n is a, c, g, or t
  misc_feature (480)..(480): n is a, c, g, or t
  misc_feature (486)..(486): n is a, c, g, or t
  misc_feature (526)..(526): n is a, c, g, or t
  misc_feature (558)..(558): n is a, c, g, or t
gagacggagccttgctctgttgccaggctggagtgcagtggcacaatctcggctcactacaacctccgcctcccaggttcaagggattctcccgcctcagcctcctgagtagctgggattacaggcgtgcaccaccaagcccagttaatttttgtatttttagtagacatggggtttcactgtgttggccaggatggtcttgatctcctgacttcatgatccacccacctcggcctcccaaagtcctgggattacaggcatgagccactgcgcccggcccacaataaaacatttttaaaaatcagaacttttggcataatctatttcgctttcccaggaaaaggaatgtagcagattttataacagagaagagaaagtaaagtcaagtcaagagtctaaggtatttccatattatcatcaaagttgcccgggagaaggttgggggtcaaaagcttaagattncaggttggatgacctggntttggnatccaagcacagttcctcagtacttacctgaccttaggtnggtacctaaaccttttgagccttggttccctnat

SEQ ID NO: 207908 - DNA, 570 bp, Homo Sapiens; identical to SEQ ID NO: 58848
  misc_feature (489)..(489): n is a, c, g, or t
  misc_feature (512)..(512): n is a, c, g, or t
  misc_feature (531)..(531): n is a, c, g, or t
  misc_feature (564)..(565): n is a, c, g, or t
  misc_feature (568)..(569): n is a, c, g, or t

SEQ ID NO: 207909 - DNA, 571 bp, Homo Sapiens; identical to SEQ ID NO: 59106
  misc_feature (479)..(479): n is a, c, g, or t
  misc_feature (505)..(505): n is a, c, g, or t
  misc_feature (533)..(533): n is a, c, g, or t
  misc_feature (542)..(542): n is a, c, g, or t
  misc_feature (556)..(556): n is a, c, g, or t
  misc_feature (559)..(559): n is a, c, g, or t
  misc_feature (567)..(567): n is a, c, g, or t

SEQ ID NO: 207910 - DNA, 574 bp, Homo Sapiens; identical to SEQ ID NO: 59253
  misc_feature (459)..(459): n is a, c, g, or t
  misc_feature (464)..(464): n is a, c, g, or t
  misc_feature (528)..(528): n is a, c, g, or t
  misc_feature (554)..(554): n is a, c, g, or t
  misc_feature (556)..(556): n is a, c, g, or t
  misc_feature (560)..(561): n is a, c, g, or t
  misc_feature (566)..(566): n is a, c, g, or t

SEQ ID NO: 207911 - DNA, 583 bp, Homo Sapiens
  misc_feature (504)..(504): n is a, c, g, or t
  misc_feature (523)..(523): n is a, c, g, or t
  misc_feature (525)..(526): n is a, c, g, or t
  misc_feature (558)..(558): n is a, c, g, or t
aaattttggaatagtttcattatacttataatgagcattgcctttgagcggcatttgggtgctcatcaagtttcagattttgaagcatttaggattttggattttcagattggggatgctcaacctgcattcatttttcttaaaactacatttaaatattttagtacatcacagtttattataaaataaccttgagtatttgtctacatcccttgaggtattacaccagttttcaactaagaaatcagcaggaatagaaacactgcacacaaaacctacaaaacctcctatcaacagggaagagtgaacaagaatgtatcctgtctgcacagggacagtcggcatgaaaaatatagcaagtcaaagggctggcaagatggctgaataggaacagctctggtctgcagctcccagcaagatcaatgcagaaggtgggtgattctgcatcttcaactgagggtcctagctcatctcattaggactgggtagacagtgggtgcagancacggagggccagcagaancnngggttggccgtcgcctcatccgggaagtccangagcccgggaacttccttccctacc

SEQ ID NO: 207912 - DNA, 591 bp, Homo Sapiens
  misc_feature (491)..(491): n is a, c, g, or t
  misc_feature (513)..(513): n is a, c, g, or t
  misc_feature (532)..(532): n is a, c, g, or t
  misc_feature (542)..(542): n is a, c, g, or t
  misc_feature (544)..(544): n is a, c, g, or t
gttgttgttgtcaaaaatcaatattgctgaaacccaaaaagggacttgtgttcaaccattggtttcctcaatgagggatcggtcagtcttattggcaagactctttttccagctagtacaagatgctagctcttttcctagctgacaattgacagtatctataaaccttccaggccatttaactctcaatgagtaatgctatgtaacaaatggtttatcatacatgtttccatacaatgaatttcaataattaaaatgtaaaatgaatatttggaatgcgactttgcataatgcgtgcacactgactcaaaattacaccgaacaactaaaacagatttattgttctacggtgatttacttggtcatgtcagattagtaatatggatctgtttaaaaacacaaaaattaagacaagcaggataaattaatcaacttacaatatggtctcatactgcaatcaaatccggcaaataacagtagaaaatcttggntcacagaatctctttaaactgnttttatgcataaattaaanccttaagggnanatggattaccgtccaacagaactactggagcttaaagggtaatggat

SEQ ID NO: 207913 - DNA, 593 bp, Homo Sapiens
  misc_feature (468)..(468): n is a, c, g, or t
  misc_feature (472)..(472): n is a, c, g, or t
  misc_feature (475)..(475): n is a, c, g, or t
  misc_feature (510)..(510): n is a, c, g, or t
  misc_feature (528)..(528): n is a, c, g, or t
  misc_feature (557)..(557): n is a, c, g, or t
ggtcttttgctattttatagtttgcttaagaaacttaagaacaagtgactggggccgggcgcagtggctcacccctgtaatcccagcactttgggaggccgaggggggtggatcacgaggtcaggagatcaaaaccatcctggctaacacggtgaaaccctgtatctactaaaaatacaaaaaattagccaggtgtggtggcgggtgcctgtagtcccagctactcgggaggctgaggcaggagaatggcgtgaacccgggaggcggagcttgcagtgagccgagaccgcgccactgcactccagcctgggcgacagagcgagactccatctcaaaaaacgcgtacagcaaaaaagggtgccgttacataggtcattggatgctatcactggaatgtctgttgagaaataaacgttttaccatctgtagacacatgagggcgctttaagcaggcagcgtgggatgcancgtnccnaaggaaggaaggaggaagaaagctttgtcaaaagnagcctgaaattcagcctnttcctatctggttgcgacctgtgcctgcntcgggtggggggcacccaatcaattaagaaaaaaat

SEQ ID NO: 207914 - DNA, 586 bp, Homo Sapiens
  misc_feature (507)..(507): n is a, c, g, or t
  misc_feature (516)..(516): n is a, c, g, or t
  misc_feature (530)..(530): n is a, c, g, or t
  misc_feature (557)..(557): n is a, c, g, or t
  misc_feature (566)..(566): n is a, c, g, or t
  misc_feature (573)..(573): n is a, c, g, or t
  misc_feature (583)..(583): n is a, c, g, or t
gagacaatgtctggttctattgcccaggctggagtgcagtgtcacgatcttggctcactgcaacctccaactcctgggctcaagcaatcctcccacctcagcctcacgagtagccgggactacaggcatgtaccaccatacctggctaattttttttttttttgtattttttgtagagatggagttttgctaagttgtccaggctggtcttgaacacatgaactcaagcaatctgcccaccctggtctcccaaagtgttgggattacatgtgtgagccaccgcttctggtctattattgctattatatgtaagctcatcatataatgcagaataatttgctaaactgaagagttactcttaacatgagggcccatgaaaggtagcatagaataatggttaggagacagtaagctatacagcaaggctgcctggggctctgccacttaccagctctgtaaccttgggcaagttacttatctttttccctacctactttctttatctgngaaatgganaaaagtaagtagtnccaggttgagtatcccttatccaaaangattggganccaaaanggtttaaaantta

SEQ ID NO: 207915 - DNA, 596 bp, Homo Sapiens; identical to SEQ ID NO: 61309
  misc_feature (546)..(546): n is a, c, g, or t
  misc_feature (548)..(548): n is a, c, g, or t
  misc_feature (572)..(572): n is a, c, g, or t

SEQ ID NO: 207916 - DNA, 535 bp, Homo Sapiens
  misc_feature (382)..(382): n is a, c, g, or t
  misc_feature (465)..(465): n is a, c, g, or t
  misc_feature (477)..(477): n is a, c, g, or t
  misc_feature (486)..(486): n is a, c, g, or t
  misc_feature (489)..(489): n is a, c, g, or t
  misc_feature (502)..(502): n is a, c, g, or t
  misc_feature (528)..(528): n is a, c, g, or t
  misc_feature (533)..(533): n is a, c, g, or t
gagacaaggtcttgctctgtcacccaggcgctggagtgcagcggcaagatcatggctcactgcagcctcaacctcccaggctcaggtgatcctttcacctcagcctcctgagtagctggaaaaacagacatgtaccaccatgcctggctaatttttgtatgttttgtagagatgggagtgtcaccatgttgcccaggctggtcttgaactcctgggctcaagcaatccatccgcctcagcctaaatcttgatctctgccaatagagccaaacgtttttaaaaaggcaaaaatctctctataggtaaaagttttatttcaatgataatattctcaaacatttcttaagaaatgtcttcattttctaagaaatccaattactgnctcatacttccaggattctccaattttttttttcaggatattataggccatcaatttccatacgactcccacacagtggtggnaaccaaggtggnttggggacntgnaagaaaccttagnccccaattaaaagttgggcgggacangcagnca

SEQ ID NO: 207917 - DNA, 563 bp, Homo Sapiens
  misc_feature (528)..(528): n is a, c, g, or t
  misc_feature (540)..(540): n is a, c, g, or t
gtttttttttgcttttgagggaattaataagatataattaattgtgtcttaacttttgaaagaaatttttagatggaggcaactgggatgtttgtgataatagataagaaagacaccactgacctgtagttaaattggtttgaattgcagatattcattattgaatttattcctgttttctcatactttagaaaagacacctgaacaataaatgaatcctggatagtgtactgtccttcaaacaatgaagtgatattaatacttgcctgcaggagatgcatactacaggagagaacccttagactatgtcaggccacactatgaacctccccccacctgccttttttctcctttatgtttctgttaccgtactaacattgtggattaacgacactgaaattctgcataatgtgaacaggataaactatttataaatcgaaaaaaaaaaaaaacaacacagggcttctgcagggaatattctttcctcaatattctactttccttaactcttctttgaatttgcttaancatttgaggctncctggcaccctttttttccaata

SEQ ID NO: 207918 - DNA, 572 bp, Homo Sapiens
  misc_feature (518)..(518): n is a, c, g, or t
  misc_feature (524)..(524): n is a, c, g, or t
  misc_feature (550)..(550): n is a, c, g, or t
  misc_feature (552)..(552): n is a, c, g, or t
gtagagatggggttttgccatgatgcccaggctggtctcaagctcctgagctcaagcgatcctctcgccttggcttcccaaactgcttggattacaggcatgtgccaccacatccggcctaaaagtttttaagagtaataagcaaaggtagatgtgtatgtgtgtgatactgtcatggtgacatttgtccaaacctatagaatgtgccaagagtgaacactgtggactctggttgatggtgatgcatcaatgcagtttcaacaactgtgacacatccacccctctggagcgagaggtctgcagtggggaggctatatgtgtatggggggaaaagggggtgtatggaaactgtaccttccacttaattttgctgtgaacctaaaactgctctaaaaaatagtctatttttaaaaggcacatgattcaattacattttccatcaataacaactgagaggcttgggaatgatgaccggtgtggactggcccggccccattacctggtgcacgtccttctgnatccgnatcgtggtgctggccccgacacatcnanttggtgaggaagggtggctt

SEQ ID NO: 207919 - DNA, 544 bp, Homo Sapiens
  misc_feature (454)..(454): n is a, c, g, or t
  misc_feature (457)..(457): n is a, c, g, or t
  misc_feature (471)..(471): n is a, c, g, or t
  misc_feature (484)..(484): n is a, c, g, or t
  misc_feature (499)..(499): n is a, c, g, or t
  misc_feature (536)..(536): n is a, c, g, or t
  misc_feature (538)..(538): n is a, c, g, or t
aaatagagacagggttctctgttgcccaggctggaatgcagtgaggtaatcacagctcactgcagcctcgacctcccaggcccaagcaatcctcccacctcagcctccccagcagctgggaccacagatgtgcaccatcacacccagctaatttttgtattttttgtagagatggggtttcaccacgttgcccaggctggtctcgaactcctcggctcaagctatctgcccacctcagcttccgaaagtgcagtgattacaagtgtgagctgccatggctggccaaggctgtcttttaaaaagctaaagatgtgttggttcaagaccagtctgagcaacatggcgagacctcatttctactaaaaagaaaaaaaaaatcagctggctgtggtggccatgcctgtagtcatccagccacttgaaaggctgaagtgggaggatcgcttgaacccanaanggtgaagcttcagngaaccctgattgngccctggacttcggnctgggtgacaatgagaacccggtttaaaaagccttgnangggtgg

SEQ ID NO: 207920 - DNA, 578 bp, Homo Sapiens
  misc_feature (490)..(490): n is a, c, g, or t
  misc_feature (507)..(507): n is a, c, g, or t
  misc_feature (521)..(521): n is a, c, g, or t
  misc_feature (523)..(523): n is a, c, g, or t
  misc_feature (538)..(538): n is a, c, g, or t
  misc_feature (570)..(570): n is a, c, g, or t
  misc_feature (577)..(577): n is a, c, g, or t
cttcttttttttttttcttctagcatacctctggtggcaggaaaggttgattgccacattagggaaaaatcaaagaatctatattagtcaaaacaatcttgaaaaagataacttacatcacctgatttcaagactactataaaactaccatgatcaagacatttctgctcatcaaaagacatcactaaggaaaagaaaatgaataagcaagacatgcctttgaggaaaaatatctgcaatataggtatgtatatgtgacaaaggatttctagtgataaaatataaaaatgccctattggtaactgttgatatgaataacaaaaataatgagatttaagaacatgtaaaagattggaacagtcaatttacaaaagaaaatatgtgactggctaacaagcaaatgaaaagttctcaacatcagtactcatcagggaaatgcaactaacatcttacatctactaacatgactaaaatcaaatggagaacaatntcagatggtagtgagcnttgaagagccactngnactttcataccttgntgccgggggtgtaaaatggtgccatcgttcanaaactcng

SEQ ID NO: 207921 - DNA, 598 bp, Homo Sapiens
  misc_feature (206)..(206): n is a, c, g, or t
  misc_feature (327)..(327): n is a, c, g, or t
  misc_feature (503)..(503): n is a, c, g, or t
  misc_feature (544)..(544): n is a, c, g, or t
  misc_feature (573)..(573): n is a, c, g, or t
  misc_feature (579)..(579): n is a, c, g, or t
  misc_feature (582)..(582): n is a, c, g, or t
  misc_feature (594)..(594): n is a, c, g, or t
  misc_feature (597)..(597): n is a, c, g, or t
gagacggagtttcgctcttgttgcccaggctctgtttaaaaaaaaaaaaaaaaaaaggtttattattgctaatactatggaggggctcagagatgtgaggaataagacaaagctgctttatttggtgaatggcagtcattagtgacttttaaaagagcagcttggtagaatgtagggaggttgggttattttcttttttacagatnctatttattaggcactatataagattaaaagagactttaacacctcttttaaaaaaaggctttatctctttcaatgcttacactgactcttttaacaccctttttatagatgaaaagtgcnattgagagaggttaagtgacttgttcaagcccttgtataaattaagtatggacacaggatttaacccagttgtgtctgatcctaaagcttatcattttaatgagttgcctcctctctcattcatggaagccagaatgcaagtggttaaggagtaataaagaaggtgaatggaaccnggtatagaggactcttaaggacagggtttggccaaaagtgnaaagggaaaaaattgggatgttgcttttnggtttncangggaaaggaccnttnt

SEQ ID NO: 207922 - DNA, 589 bp, Homo Sapiens
  misc_feature (466)..(466): n is a, c, g, or t
  misc_feature (487)..(487): n is a, c, g, or t
  misc_feature (553)..(553): n is a, c, g, or t
  misc_feature (557)..(557): n is a, c, g, or t
  misc_feature (559)..(559): n is a, c, g, or t
  misc_feature (579)..(579): n is a, c, g, or t
cagtgaaattcattcaccttgacatgtgtagcaataatcagtcattttgacctctgtgtaccaatgatagctaaaatatattgagcattttctgtgtatcagacagtctcaactactttacatgggttaactcaatcttcacaataatcctttgaggtacatagtattatcaacctactccgtatgaagagactaaaattcaaagggattaagcaacttgcctaaaataaatgttactaggcggcagagtctggataagaacactacaatttattaatctattctctgtctatggatgtttgggcagttctaattttttgctatttcaataaatgttgctaggaataatagtgtataggccttatggtatatatgacaaaaagtttctctagaagacaaagaatagaaatactgggtcacaggatatacatatgttccagttctcataatgaaaatgatttttgangtggtttgaacaattcatgtnttcacaatcggggctccatattcttaccaagactaggactggcacactggtcactcttaaatgganttcngntatttaaattccattttaanggacccccct

SEQ ID NO: 207923 - DNA, 557 bp, Homo Sapiens; identical to SEQ ID NO: 59353
  misc_feature (447)..(447): n is a, c, g, or t
  misc_feature (474)..(474): n is a, c, g, or t
  misc_feature (493)..(493): n is a, c, g, or t
  misc_feature (501)..(501): n is a, c, g, or t
  misc_feature (541)..(541): n is a, c, g, or t
  misc_feature (549)..(549): n is a, c, g, or t
  misc_feature (554)..(554): n is a, c, g, or t

SEQ ID NO: 207924 - DNA, 536 bp, Homo Sapiens
  misc_feature (69)..(69): n is a, c, g, or t
  misc_feature (74)..(74): n is a, c, g, or t
  misc_feature (121)..(121): n is a, c, g, or t
  misc_feature (123)..(123): n is a, c, g, or t
  misc_feature (128)..(128): n is a, c, g, or t
  misc_feature (251)..(251): n is a, c, g, or t
  misc_feature (289)..(289): n is a, c, g, or t
  misc_feature (308)..(308): n is a, c, g, or t
  misc_feature (318)..(318): n is a, c, g, or t
  misc_feature (341)..(341): n is a, c, g, or t
  misc_feature (423)..(423): n is a, c, g, or t
  misc_feature (469)..(469): n is a, c, g, or t
  misc_feature (476)..(476): n is a, c, g, or t
  misc_feature (484)..(484): n is a, c, g, or t
  misc_feature (491)..(491): n is a, c, g, or t
  misc_feature (497)..(497): n is a, c, g, or t
  misc_feature (500)..(500): n is a, c, g, or t
  misc_feature (530)..(530): n is a, c, g, or t
catttttttttttttttttttttttttttgagatagagtctcgctctgtcacccgggctggagtgcagnggcgnggtctcggctcactgcaaccttagcctcccgggttcaggcaattctntngcctnagcctcccgagtagctgggactacaggcgcccgccaccacgcctggctaattgtaagccttctttttaaacaacacactagacacctccttgtttgacccactataagcttcctcctcattgncagcatttccacctcccttgccagaatttaaatgcctntcagtccatacagctactntccacaacanatggtgatgtctcattttctcgngcttagactactaaccaaaaaaaaagtcctaggaagctggctttagcttcccattcaccttcctctatgggtatgcctttgngaacagtttgttcaacctcatccaagacatgagcatggcccaatgnaaaattntggcccanaaaaatnggtggnttnagaacaaattttataattccaatggctttngggagg

SEQ ID NO: 207925 - DNA, 565 bp, Homo Sapiens; identical to SEQ ID NO: 59249
  misc_feature (159)..(159): n is a, c, g, or t
  misc_feature (187)..(187): n is a, c, g, or t
  misc_feature (485)..(485): n is a, c, g, or t
  misc_feature (539)..(539): n is a, c, g, or t
  misc_feature (549)..(549): n is a, c, g, or t
  misc_feature (560)..(560): n is a, c, g, or t

SEQ ID NO: 207926 - DNA, 581 bp, Homo Sapiens; identical to SEQ ID NO: 61724
  misc_feature (524)..(524): n is a, c, g, or t
  misc_feature (527)..(527): n is a, c, g, or t
  misc_feature (535)..(535): n is a, c, g, or t
  misc_feature (580)..(580): n is a, c, g, or t

SEQ ID NO: 207927 - DNA, 598 bp, Homo Sapiens
  misc_feature (497)..(497): n is a, c, g, or t
  misc_feature (553)..(553): n is a, c, g, or t
  misc_feature (555)..(555): n is a, c, g, or t
  misc_feature (586)..(586): n is a, c, g, or t
  misc_feature (597)..(597): n is a, c, g, or t
cacttaaatccattgttagtgacaatgtaagtgtttaaacagtattgctttaggaatctcagaagttcaagtagaaagacatattccatattctgggaaaagacggtacaaagactttaagaatttaattttttaaaagtttcagtaactaccttcagttaccttcagttaactacctacctactcatacttttcaacaaactgggaaaaaagtcttctctaaaatcagcatctacttggcagatgtatgtcatcattgtgtctctcattgtttcatccttaaaaatgtgtaatacttttaattgcagaggtaataaaagatatttatttgaaaaaaataaagtgattatctacttctttcctgaggcacacagactttcagattttatttatgcacgaaagcatttaaaaatgaggtaatatatatactctttcacctactttcacggtgtttacttttctatgtcaaaacatacaaagttagatcattaccttgnatgtattgctatttaaagtatcttcattggtagataaatacccagtgggtcctttngnttgctattcctaagtaaacttggggggattngatcctagttnc

SEQ ID NO: 207928 - DNA, 617 bp, Homo Sapiens
  misc_feature (562)..(562): n is a, c, g, or t
  misc_feature (605)..(605): n is a, c, g, or t
  misc_feature (616)..(616): n is a, c, g, or t
aaacacaagcctctgacccacagtgattcatggggagagcttagagagctccatgctactggtaacttcccttcactttgactaaagtgactaacatctctctacctgacctcactgtcccatgcagagaccacgtgttgttgatagaagattgtaccaaaggaataattcatagaacaacaaggaagaattaagctaacaacagattccaaaatgttattcaagaaatgagacaaaggtaaggaatagctgctatcacctttgttgagtgttacttccatgacgatcctgtccttgggcccaggggtcttccgacccagggatgaagaactgccttcatcggaacctcccgccgaggctcccccactggtattgaagttcggggaggcggatctgctcatgtgtgtgggtgtcgagcagggtgtgaggctggggctcaccaactttgtgcgtaccgttaaaacaaataatccactccggatttgctgagaaaacagtgaggaaaggtgggctgaaacatttggaatgccttatatcaaagggttaaaaaaaaaaaccactnaccaaacccaaccagaaggaaataagaaaggaaattggataanggagatcattna

SEQ ID NO: 207929 - DNA, 535 bp, Homo Sapiens
  misc_feature (460)..(460): n is a, c, g, or t
  misc_feature (475)..(475): n is a, c, g, or t
  misc_feature (499)..(499): n is a, c, g, or t
  misc_feature (506)..(506): n is a, c, g, or t
  misc_feature (519)..(519): n is a, c, g, or t
  misc_feature (522)..(522): n is a, c, g, or t
  misc_feature (534)..(534): n is a, c, g, or t
aagtagagagggggtttcaccatgttggccaggctggtctcgaactcccaacctcaggtgatccacctgccttggcctcccaaaatgctgggattacaggcatgagccacacccagccaatggaagaggcactttttaagaatggaaaaaagtgcctgacatgactttcacttttccataaagagtggacgttttaactaaaggcaacaagaaacataacatacaagagagaaaaactcatacaaaagggagagagaaaaagaataaaggggggatcctgaagaagttgctacttcagaggcatctgcacccctgataaaggatttgtacactcctaagggtgcacagttctctctcacgctacgtctcttggtcttacccaatcatataaaaaagaatctatacttgaattctaaaggaagatggggaacaaggtctctcttgggttggtttggtctgnctcagtacttcaccntactggttcaaggataccattatnacactgnaatggtcatgccntanaaccatggaaanc

SEQ ID NO: 207930 - DNA, 555 bp, Homo Sapiens
  misc_feature (510)..(510): n is a, c, g, or t
gaaagctgaaaatttatttcactaatatacataagaagttcacaacaatgaacagacagaaaatagcagtatatacagaatttcactacttacagtacattacaatagagaaagcattttataaacagttcagtattggattaaaatcttttaaggatggctaattctattacctaattaaattctatacccattattcaaggtttaatgcaaatctcgcctcatcaatgaaattttcttattttcctggtccaaattgaactcctctttctctaagcttgtacagactgtattctgtccaaataaattaccaataaattaggtattgctttatattactgattaattcatccatagatattattagattttaatcctagtctctcctacgagatagttaagattctttcacagctccagtccatctcccatgcaaattaaattaacaaatgcatacagtatatacatctgttcacttgaaatcttttggaggccaagtagtcaacaaanggaaggcatattacatagtttgactatgcactccgcaaaacaaat

SEQ ID NO: 207931 - DNA, 496 bp, Homo Sapiens; identical to SEQ ID NO: 59171
  misc_feature (377)..(377): n is a, c, g, or t
  misc_feature (431)..(431): n is a, c, g, or t
  misc_feature (436)..(436): n is a, c, g, or t
  misc_feature (461)..(461): n is a, c, g, or t
  misc_feature (467)..(467): n is a, c, g, or t
  misc_feature (473)..(473): n is a, c, g, or t
  misc_feature (487)..(487): n is a, c, g, or t
  misc_feature (495)..(495): n is a, c, g, or t

SEQ ID NO: 207932 - DNA, 528 bp, Homo Sapiens
  misc_feature (479)..(480): n is a, c, g, or t
  misc_feature (491)..(491): n is a, c, g, or t
  misc_feature (497)..(497): n is a, c, g, or t
  misc_feature (500)..(500): n is a, c, g, or t
  misc_feature (512)..(512): n is a, c, g, or t
  misc_feature (527)..(527): n is a, c, g, or t
gagatggagtcttgctctgtcgcctaggctagagtgcagtagcgcaatctcggctcactgcaaactctgcctcctgggttcaagtgattctcctgcctcagaatctggagtagctgggattacaggcatgtaccaccatgcctggctaattttgtgtgtgtgtgtgtgtgtgtgtgtgtgtgtgtgtgtgtgtgcgcgcgcgcgcacgcgcgtttgtgttttagtagagacaaggtttcgccatgttagccaggctggtctggaactccttacctcaggtgatctgccccccttcggcctcccaaagtgctaaaattacaggggtgagccactgtgcccagccggattatcatttcaaatgctcatttccagatggaactatgttaatttggcatgtcaacaaacaagaccataagtagatccatcatgttggaggattttaatgacatttaggatattcttgccacaataacatgcanncagggcatttnctacanggntctattatggcnatgaataaactctgna

SEQ ID NO: 207933 - DNA, 550 bp, Homo Sapiens
  misc_feature (446)..(446): n is a, c, g, or t
  misc_feature (500)..(500): n is a, c, g, or t
aaagaaaaagcctcattctgtcgcccaggctggagtgcagtggcgtgatctcggctcactgcagcctccgcctcccaggttcaagcgatcatcccacccgaacctcccaagaaactgagattaccggcatgcaccaccacacctgcctggctaatttttgtatttttagtagagatgggggtttgccatgttggccaggctggtctcaaactcctggcctcaagtgatccgcctgccttggccttccaaagtgttgggattacaggtgtgagccaccacacctggcctattcttgcaattctggaagatttagggggctggcaggagacaagactgagattgtttaggccatcctgttgctgacacaatcctggcacttaagcgggaatgcagtggcctaagtgtagggcaacatatctctcataccatttaccaaaacaaaacanaaaacacttctggggtgaatgtctgggcattcttaataagcatcttaataatcnggtttggctttttcctaaaaaaatgcttttcctcaaaaaaaaaaagtcgg

SEQ ID NO: 207934 - DNA, 554 bp, Homo Sapiens; identical to SEQ ID NO: 59234

SEQ ID NO: 207935 - DNA, 550 bp, Homo Sapiens; identical to SEQ ID NO: 57826
  misc_feature (482)..(482): n is a, c, g, or t
  misc_feature (504)..(504): n is a, c, g, or t
  misc_feature (539)..(539): n is a, c, g, or t
  misc_feature (544)..(546): n is a, c, g, or t

SEQ ID NO: 207936 - DNA, 538 bp, Homo Sapiens
  misc_feature (485)..(485): n is a, c, g, or t
  misc_feature (495)..(495): n is a, c, g, or t
agtagagacggagttttaccatgttgtccaggctggtctcaaactcctgacctcaggtgatccgcccacctcagcatcccaaagtgtgggattacaggcacgaggcactgtgctggccaactctctttctctctctcttttaatctctttattatggaaattcagaaactatacacaacccagaatagtctatgaactccctaaagactcatcaaccagcttcaacaatgatcatctttctgcccatctcattcctctcctttttttttttttttttttttgagatggagtctcgctttgtcacccaggctggagtgcaatggcacaatctcagctcactgcaacctctgcctcctgggtacaagcgattctcctgcctcagcctcccgagtagctgggattacaggcgcatgcccccgtgcccagctaattttttggattttttttaagtagaaacggggtttcaccatgcgggccaagctggncttgactccnggcctttgactggcagcttggctctaaaggggctgggatacag

SEQ ID NO: 207937 - DNA, 480 bp, Homo Sapiens
  misc_feature (101)..(101): n is a, c, g, or t
  misc_feature (236)..(236): n is a, c, g, or t
  misc_feature (421)..(421): n is a, c, g, or t
  misc_feature (431)..(431): n is a, c, g, or t
  misc_feature (447)..(447): n is a, c, g, or t
  misc_feature (456)..(456): n is a, c, g, or t
  misc_feature (459)..(459): n is a, c, g, or t
  misc_feature (477)..(478): n is a, c, g, or t
gagacagagtcttgcctaagctggtcttgaactcctggcctcaagcgatccttccacccagagtgctgggattacaggcatgggccactgcacctagcctntagcaagtcatttaatcactctgtacatcagtttccttatccataaaatgggaataataatatctcatagagttgttttgaggatttaaataaaaatatttaataactataaatatcattgtccagacacaatgncatttagcttttctcctatgttttcttccagtagtttaacagtttcaggtcttatgctgaagatgttaatccaatttgatttgattttgtaggtggtgtgagggtaagggttcgatttccctcttttgcatatggatatccaattttccaaacaccatttattgaagacactggcctttcctacnggatattctngaaccattggtggaanatcaattgnccncagtgcatgggtctcttnngg

SEQ ID NO: 207938 - DNA, 575 bp, Homo Sapiens; identical to SEQ ID NO: 59229
  misc_feature (428)..(428): n is a, c, g, or t
  misc_feature (491)..(491): n is a, c, g, or t
  misc_feature (507)..(507): n is a, c, g, or t
  misc_feature (517)..(517): n is a, c, g, or t
  misc_feature (536)..(536): n is a, c, g, or t
  misc_feature (552)..(552): n is a, c, g, or t

SEQ ID NO: 207939 - DNA, 525 bp, Homo Sapiens; identical to SEQ ID NO: 59188
  misc_feature (462)..(462): n is a, c, g, or t
  misc_feature (484)..(484): n is a, c, g, or t
  misc_feature (499)..(499): n is a, c, g, or t
  misc_feature (505)..(505): n is a, c, g, or t
  misc_feature (512)..(513): n is a, c, g, or t
  misc_feature (522)..(522): n is a, c, g, or t

SEQ ID NO: 207940 - DNA, 541 bp, Homo Sapiens; identical to SEQ ID NO: 59262
  misc_feature (412)..(412): n is a, c, g, or t
  misc_feature (469)..(469): n is a, c, g, or t
  misc_feature (477)..(477): n is a, c, g, or t
  misc_feature (499)..(499): n is a, c, g, or t
  misc_feature (516)..(516): n is a, c, g, or t
  misc_feature (537)..(537): n is a, c, g, or t

SEQ ID NO: 207941 - DNA, 552 bp, Homo Sapiens; identical to SEQ ID NO: 61182
  misc_feature (518)..(518): n is a, c, g, or t
  misc_feature (520)..(520): n is a, c, g, or t
  misc_feature (522)..(522): n is a, c, g, or t

SEQ ID NO: 207942 - DNA, 519 bp, Homo Sapiens; identical to SEQ ID NO: 61128
  misc_feature (508)..(508): n is a, c, g, or t
  misc_feature (517)..(517): n is a, c, g, or t

SEQ ID NO: 207943 - DNA, 549 bp, Homo Sapiens
  misc_feature (450)..(450): n is a, c, g, or t
  misc_feature (462)..(462): n is a, c, g, or t
  misc_feature (484)..(484): n is a, c, g, or t
  misc_feature (508)..(508): n is a, c, g, or t
  misc_feature (532)..(532): n is a, c, g, or t
  misc_feature (544)..(544): n is a, c, g, or t
ggagacagagtcttgctctgtttcccaggcaggagtgcagtggcacaatctgcctgcaacctctgcctccgggttcaagtgattctcctgactcaacctcctgagtagctgggattacaggcatgcaccaccatgccctgctaatctctgtatttttagtagagatggggtttcaccatgttggccaggctggtctcgaactcctggactcaagtaatccacttgcctcagcctcccatagtgctgggattacagtaatgagccactgcgcctggcctacatcttcttataatgactaagtttggaagtaagagaaaaaattgaaagccattctgtctaataggtactggaaaatggaaaaagaaaaaaagaaaaaaaaacttagatagatagattccagggacacaaaaccagtgttagcataaataatgacagcccagatttatttgnacttaaaaaggnatacaggtaaatatcatggggnttttggcattgggtctggttgggngatggatatggtaatcatttgggnatgctgaaccanccttg

SEQ ID NO: 207944 - DNA, 545 bp, Homo Sapiens
  misc_feature (529)..(529): n is a, c, g, or t
gagacaggtctcactctgtcacccaggctggagtgcactggcatgctcaaggctcactgcagcctcaatttcctgggctcaagcgatcctcccacctcagcctcctgagtacaggctaggattacaggcgcgcgtcaccaaaccaggctaattttttgtagagaggcagttttgccatgttgcccgggctggtcttggaactcctgggctgaagcgatccacccacctcagcgtcctaaggtttacaatcttcctgaggattagcagcatgagccactgcacccagccgatgattcattctgtccataagggaacctggcagtatattgccaatatggaaaaactcaacagttacacttttctatcactaccaaaaaagccctgggaatagtgctgttaaaatttatccgtttgaaattctaagattcagctttacatttattgcaaataaaagataccaaatatattctaatttatatccacagcatagttactatagcttatattacataaaatctcgaatgactgngactttcgactttttt

SEQ ID NO: 207945 - DNA, 550 bp, Homo Sapiens
  misc_feature (504)..(504): n is a, c, g, or t
  misc_feature (518)..(518): n is a, c, g, or t
  misc_feature (546)..(546): n is a, c, g, or t
gtaagctcttatttaaaattacatttaattatgagattgattgattattatctgcatcccccagagggctgcaagcttcatgaaaccccatgaccatgctgtttttattaaaattccaagagaccaggaaagaatattaatctgctggtgaagtcgcagaatggatttgaggtaagaaatgtaagatgagaagaccaaatcaagaaacaggagatttcaccattagcatatcaaggtacacgttacaaataacattttggaatccctatgacactaaatcatcagataggcaaggttgatttttgccccttctatttgcaaggtggaaaaatatagttcactctatagatttcttcttttttgttgtttcctttgtttttgttttctagtttaaaaagagtttattccagggtgatcgttgaagatggccactcaggagccgtagattcaagttgctctgattatacactccaactaccagccattacaagtggctttttttangaaaaaaaccagangcagttcctaagtggttacccagaattncctt

SEQ ID NO: 207946 - DNA, 530 bp, Homo Sapiens; identical to SEQ ID NO: 59871
  misc_feature (437)..(437): n is a, c, g, or t
  misc_feature (491)..(491): n is a, c, g, or t
  misc_feature (495)..(495): n is a, c, g, or t
  misc_feature (511)..(511): n is a, c, g, or t
  misc_feature (519)..(519): n is a, c, g, or t
  misc_feature (523)..(523): n is a, c, g, or t
  misc_feature (527)..(527): n is a, c, g, or t

SEQ ID NO: 207947 - DNA, 541 bp, Homo Sapiens
  misc_feature (413)..(413): n is a, c, g, or t
  misc_feature (455)..(455): n is a, c, g, or t
  misc_feature (467)..(467): n is a, c, g, or t
  misc_feature (470)..(470): n is a, c, g, or t
  misc_feature (475)..(475): n is a, c, g, or t
  misc_feature (500)..(501): n is a, c, g, or t
  misc_feature (514)..(514): n is a, c, g, or t
gagacagagtctcgctctgtcgcccagcaacttcaaatgccactctcctctccagaactgcaggcctctcctctaactgtgtggcataagtcgcacagattcaagctaacaccagggctggtgtgtgctggaaatgctgaccctctccaagggtcagctgtgcaacactggtgaagaggtagtggcagagaccccatttccacctaactgaaagtagaggagcccaccagtgcctctcggaatgataaaacccttactttcttctgtgagagcactgctgaggccattcaaagatgcctttttttgtgaaaccctttaggaaacagaaaggttgacttatttgccatgtaaacccaaagaagttctctgcgtctggatgaagcccccacggtacttggtatcacaccttttgngttgcaaccctggctctgtgaagaaacaagcccacccctggnatgacggctctntgntacanggcaaacagaaggtttgggcaatcnngtagaacttgcanccttagaacagggaccttgaacctgga

SEQ ID NO: 207948 - DNA, 539 bp, Homo Sapiens
  misc_feature (454)..(454): n is a, c, g, or t
  misc_feature (456)..(456): n is a, c, g, or t
  misc_feature (463)..(463): n is a, c, g, or t
  misc_feature (476)..(476): n is a, c, g, or t
  misc_feature (484)..(484): n is a, c, g, or t
  misc_feature (500)..(500): n is a, c, g, or t
  misc_feature (510)..(510): n is a, c, g, or t
actggaagcaaaacattcacaggccattgaactactgttggggaaaaaaacgacacaagcaagtcagttagaacgtgttgatctggttgataatgattatagattcaactatgtctaaccctgtgtcctcccgggagagagtaaacagcttcccaccgtgggagcgctgggcacgtcagttcacacgctggcaggtccattaccaggagctccaggcacagagagtcctgggctggcccagctgctgcgctctgctttctccaagcaccaaggtgcagttatgctaccgatgacccttgaaagtatgagcaattcaccaaacaactaaatcacaatgactcttctgtctctagtagctgccccgcctttcctcactggtattcatttcaagtcttaatgaagtctagccatcaattaaaaatagagtaaccttgccctttcagcatgaaactgngngggtccntctggtggagtcntataaggnccttaacttggctttnaggatctggnaagtgggaactctaaaggctgagtttaaa

SEQ ID NO: 207949 - DNA, 528 bp, Homo Sapiens
  misc_feature (478)..(478): n is a, c, g, or t
  misc_feature (486)..(486): n is a, c, g, or t
  misc_feature (501)..(501): n is a, c, g, or t
  misc_feature (503)..(503): n is a, c, g, or t
  misc_feature (510)..(510): n is a, c, g, or t
gcataaagctgttcattgttccagtaccatttattgaaaaaactacccttttcctgtggaatttctttttagcttctgccaacagtcagttgataatatttgtgtgggtctatttctgagctctctattctgtctcactgaattatatgtttatcctttggccaggaccccactggtttgacttatgtagccttatattaaaattgggtagtgtgaattctcaactttgttcctctttttccatttcaaattttgggggctcttctagttcacttgcctttccacataagttttagaattagcttgtcaatatctacaaaaaatatgctgggattttgatcatgattacactgaatatatatgtcacactggggcaaactgacatcttaacaatattgagctcaattgcactaatacttaatgacctacagattaaataaaagtaagataccttcaggttccagacttgcaaagatcncaaagaangggtaaaaatggcangntccccgnaacctgaactggatggtt

SEQ ID NO: 207950 - DNA, 559 bp, Homo Sapiens; identical to SEQ ID NO: 59202
  misc_feature (414)..(414): n is a, c, g, or t
  misc_feature (446)..(446): n is a, c, g, or t
  misc_feature (528)..(528): n is a, c, g, or t
  misc_feature (553)..(553): n is a, c, g, or t

SEQ ID NO: 207951 - DNA, 527 bp, Homo Sapiens
  misc_feature (468)..(468): n is a, c, g, or t
  misc_feature (483)..(483): n is a, c, g, or t
  misc_feature (487)..(487): n is a, c, g, or t
  misc_feature (495)..(495): n is a, c, g, or t
gagaccgagtctctctgtcacccaggctggagtgcaatggtgccatctcagctcactgcaacctccgccgcctgggttcaagcaattctcctgcctcagcctctccagtagctgggattacaggtgcccgccaccacgcctggctagtttttgtatttttagtagagacgaggtttcaccgtgttggccaggctggtctcaaactcctgagctctcgtgatccaccagactcagcctcccaaagtgcctggattacaggcgtgagccccatgtattgcttttgaaaggagcatctgaatgcatcccgaggcacaaaatagtagagcagcaagtttattttgctcagtttactaccagagtttgaatgtggaggttaggcaaactaaaaacaatgcctaaaacattttaaaatctatttctgaagatctcatgcttatttcaactttttaaggagactttatttaattnaatttttttttttgnaaangggcttanttttgccgcccaaagggaatggaatggaatgg

SEQ ID NO: 207952 - DNA, 532 bp, Homo Sapiens; identical to SEQ ID NO: 59135
  misc_feature (400)..(400): n is a, c, g, or t
  misc_feature (452)..(452): n is a, c, g, or t

SEQ ID NO: 207953 - DNA, 503 bp, Homo Sapiens
  misc_feature (370)..(370): n is a, c, g, or t
  misc_feature (443)..(443): n is a, c, g, or t
  misc_feature (449)..(449): n is a, c, g, or t
  misc_feature (454)..(454): n is a, c, g, or t
  misc_feature (458)..(458): n is a, c, g, or t
  misc_feature (490)..(490): n is a, c, g, or t
  misc_feature (493)..(493): n is a, c, g, or t
  misc_feature (496)..(496): n is a, c, g, or t
atgtgaacatgttgcatttataaagaaatgtcacacgtacacacagaaaggtcatatcaaagcaggtaaaaattaagacaacatatttctccaaaaaccagtctgacatcttataataccagaaatatacacacacttcaaacctgggaaatcatcctatgaatctgctctgaccaatatggtagccactaatacctgaaatatggagtaaccaagtaacaaatttttaaatttaaaactgatactcatttcagttattggaaaacttttaagcacatttagaccaacatgggtatgtaaatttactttgcaaatttagattttatgaaatctaaacatggattaagtattatcagtaaaactttagtgnctcaactgagatatgcaaaccagacagacttagtttcataagaatgaaaaatatcttactggaataatatctnccatgnattgnggtnaatatattaaaattaatttaccttggttttancgnggntactaga

SEQ ID NO: 207954 - DNA, 536 bp, Homo Sapiens
  misc_feature (231)..(231): n is a, c, g, or t
  misc_feature (431)..(431): n is a, c, g, or t
  misc_feature (492)..(492): n is a, c, g, or t
  misc_feature (494)..(494): n is a, c, g, or t
  misc_feature (503)..(503): n is a, c, g, or t
  misc_feature (519)..(519): n is a, c, g, or t
  misc_feature (521)..(521): n is a, c, g, or t
  misc_feature (531)..(531): n is a, c, g, or t
  misc_feature (533)..(533): n is a, c, g, or t
gagacagagtctcgttctgtcacccaggctagagtgcagtggtgtgatctcagctccctgcaacttccaactcctgggttcaagcgagtctcccgcctcagcctcccgagtacctgggattatagcctgccaccatgcccggttaatttttgtatttttagtagagacggggtttcgccatgttgcccaggctggtcttgaactcctgacctcaggtgattcgcccacctncagctcccaaagtgctgggattacaagcatgagccaccgcgcccagccaagggacattacttcttaagtacagaagcatcagtgaaggtcagtggcatgatgcgctgggccgtcctccacaggttattataaagaagacatccatgaggaccaatgtcacacctgccaggaaacactccccagtcccctgaagggcaaangtctggctttccaaaaacctggggcctggtctttttggcattctaatgggccaaaacccantnacatggctnttaatcccccacttantncctaattttntngag

SEQ ID NO: 207955 - DNA, 539 bp, Homo Sapiens; identical to SEQ ID NO: 59352
  misc_feature (518)..(518): n is a, c, g, or t
  misc_feature (537)..(537): n is a, c, g, or t

SEQ ID NO: 207956 - DNA, 549 bp, Homo Sapiens; identical to SEQ ID NO: 59156
  misc_feature (396)..(396): n is a, c, g, or t
  misc_feature (459)..(459): n is a, c, g, or t
  misc_feature (475)..(475): n is a, c, g, or t
  misc_feature (544)..(544): n is a, c, g, or t

SEQ ID NO: 207957 - DNA, 586 bp, Homo Sapiens
  misc_feature (428)..(428): n is a, c, g, or t
  misc_feature (465)..(465): n is a, c, g, or t
  misc_feature (557)..(558): n is a, c, g, or t
  misc_feature (562)..(562): n is a, c, g, or t
  misc_feature (565)..(565): n is a, c, g, or t
gtagagacaggatatccctatgttagtcaggctggtcttctcaaagtcctgggctcaagcaatcctcccagccttccaaagtgctgggatcataggcatgagccattgtacccagcccattctctttttttaatagaagcttattattccactggaaagctgtatcataatttatgtaaccagttatatttagattgtttggtcctttttttttttttaacagataataccataatgacaatctagtccatatgttattctgcatgtacaagagtatctgtaggataaattcccggaagtggaatttctggggcaaaagatatatatatgccaaagatattgccaaattgaattccatactttcaccaagacagttttataattttattatttttgccagctcatagattttaaaaaaggcttctcangggaagtttaaatttgccatttaattttgaagtggantggagaaatctttcctatatttcaaaggatggttaaggtaatttttaaaatttccatgggaaaaattttaatccacctttcctaaaaggggnnggtnaanctattttcttaattgggggcc

SEQ ID NO: 207958 - DNA, 547 bp, Homo Sapiens
  misc_feature (436)..(436): n is a, c, g, or t
  misc_feature (471)..(471): n is a, c, g, or t
  misc_feature (475)..(475): n is a, c, g, or t
  misc_feature (482)..(482): n is a, c, g, or t
  misc_feature (513)..(513): n is a, c, g, or t
  misc_feature (521)..(521): n is a, c, g, or t
  misc_feature (526)..(526): n is a, c, g, or t
  misc_feature (546)..(546): n is a, c, g, or t
aagacagggtctcccactgtcacccaggttggggcagtggtgtaatcatagttcactgcgcccctgaactcctggcctcaagcaatcctcccaagtcagcctccagagtagttgggactataggcacacacaaccacacccggctaacactaggtatttctaacatactgatgcacattgtttgaaaattaatcttagggccgggcacagtggctcacacctgtaatcccagcattctggggggccgaggcgggtggatcacttgaggtcaggagtgcgagaccagcctggccaacatggtgaaaccccatctctactaaaaatacaaaaattagtcgggcatggtggcatgcacctgcaatcccagctatctgagaggcagagacaggtgaacccaggaggcagatgttgcagtgagctgagattacaccactgnattccagcctaaggggacagaagcgaggactccgncttnaaataantaaataaagtaagtaagtaagtaaatcttangaagtttngctangcattggaacttccgtctgng

SEQ ID NO: 207959 - DNA, 557 bp, Homo Sapiens
  misc_feature (131)..(131): n is a, c, g, or t
  misc_feature (497)..(497): n is a, c, g, or t
  misc_feature (551)..(551): n is a, c, g, or t
gtcttcctcttttttttttttttttttttggagacaaggtcttgctctctcacccaggctggagagcagcggcattatcactgctcactgcaaactcaactttctgggctcaagccattctcccacctcanacccccaggtaactgggaccaaagacacacattatcacacctagctaaattttttcatagagatggggtttcgccatgttgcctaggctggtctcaaactctcctgagctcaagtgacctgcctgcctcagcctccttaagtgctaggactataggtgtgagccaccataaccagcctctatcatcttttatcctaaactcccatgtaataaatattggatcttcttcctttattaagcatgcatgtgtctaacctctctggttttccatcttccttctctggtccatattctgagtaattatttcggatctatatttcaaatcacttaatttctcctaagctggttctaaacagctacttaacanttgcattaaaataatcctttaacctccttttaagcaactttattgggacaaacntataaa

SEQ ID NO: 207960 - DNA, 508 bp, Homo Sapiens; identical to SEQ ID NO: 57886
  misc_feature (436)..(436): n is a, c, g, or t
  misc_feature (444)..(444): n is a, c, g, or t
  misc_feature (457)..(457): n is a, c, g, or t
  misc_feature (464)..(464): n is a, c, g, or t
  misc_feature (483)..(483): n is a, c, g, or t
  misc_feature (492)..(492): n is a, c, g, or t
  misc_feature (506)..(506): n is a, c, g, or t

SEQ ID NO: 207961 - DNA, 560 bp, Homo Sapiens
  misc_feature (488)..(488): n is a, c, g, or t
  misc_feature (519)..(519): n is a, c, g, or t
  misc_feature (523)..(523): n is a, c, g, or t
  misc_feature (525)..(525): n is a, c, g, or t
  misc_feature (533)..(533): n is a, c, g, or t
  misc_feature (546)..(546): n is a, c, g, or t
  misc_feature (554)..(554): n is a, c, g, or t
actttgctttaagttctgggatacatgtgcagaacgtgcaggtttgttacagaggtatacatgtgccatggtgctgttattgttattgtttatgaacctatcatctcctactactgtctgatatgtctctgtaggccccatgaccctagcaaaatgactacacatagtaggtttttccatgaatgcttaagagatgactgagcctactgtctccagcctaacttccctatttaagagctgaaaaaatcagattttttaaaagtttcattccatttaagagttaaaccatttttcttatttagtgccagattttaccttagcatatatgacatgatgttggatacaccacagttccatttctttacctacaaatcatagttctgggaaaatgagaaatgtctgctgtaggcacttattcaagtactgcaagtcatgtgccggactaaggcaaacatgactcggaatctgacgcttgacctaaggacagntttcaaggcttacatgacctacacacgaacntaangntggctttncatttaaatgccngtagtccnaaacac

SEQ ID NO: 207962 - DNA, 556 bp, Homo Sapiens; identical to SEQ ID NO: 59165
  misc_feature (456)..(456): n is a, c, g, or t
  misc_feature (493)..(493): n is a, c, g, or t
  misc_feature (507)..(507): n is a, c, g, or t
  misc_feature (510)..(510): n is a, c, g, or t
  misc_feature (522)..(522): n is a, c, g, or t

SEQ ID NO: 207963 - DNA, 541 bp, Homo Sapiens
  misc_feature (82)..(82): n is a, c, g, or t
  misc_feature (313)..(313): n is a, c, g, or t
  misc_feature (395)..(395): n is a, c, g, or t
  misc_feature (398)..(398): n is a, c, g, or t
  misc_feature (400)..(400): n is a, c, g, or t
  misc_feature (440)..(440): n is a, c, g, or t
  misc_feature (449)..(449): n is a, c, g, or t
  misc_feature (511)..(511): n is a, c, g, or t
  misc_feature (517)..(517): n is a, c, g, or t
  misc_feature (521)..(521): n is a, c, g, or t
gagacggagtctcgctctgtctcaaaaaaacaaacccctctttaattcccaaattgatttaccatggaactctttttaatgnaattataatacaattaacatccacaaaattagagatctaaggaaaacactaccctaatcaaaaggccacaaaatgtattcacagtaacagcttccacttactgggttttcttgccaggcatggggtaaaatagtttatacgcatcatcttatttaatcctcagaataactcaataaggatggtattactaactcccattttaaagaggaggaaactgacacttaggaaggntaaatacttgccccaaagtttcctagcaacccaaatcctgtcttaaccacgatgcttcaacagtcaactttccaatttttgnacngnttttatgacttttggcctctatcacttatttcttgatganggtaatggntcttctaggtttttccccaggctttaacatttggccctggcagataaacccctggcttaagnggatanttgnacctgggggcaaaaccaaaa

SEQ ID NO: 207964 - DNA, 542 bp, Homo Sapiens
  misc_feature (403)..(403): n is a, c, g, or t
  misc_feature (474)..(474): n is a, c, g, or t
  misc_feature (489)..(489): n is a, c, g, or t
  misc_feature (512)..(512): n is a, c, g, or t
  misc_feature (521)..(521): n is a, c, g, or t
  misc_feature (533)..(533): n is a, c, g, or t
gaggtggaggtctcactatgttgccctggctggtctcgaactcctgagctcaagcgatctgcccgtcttggcatcccaaagtgctaggttacaggcaagagccactgcacccagtcataatctctcttgaataaaccctcttacttccccttttgcatctctctctctaaatcctacatttgtctccacagataacatctcaccaatttagagacacttttctttatgctagatcaagatgtttaaagcatttgttctcacttctttcatgaaaccttctgagatcagtcagctaagatctagttaattgaatcatcaactactctaatacttctgcctgtcctgttttgggttgaaagggacacaattcaaggtcaaagaccatgtcagttgcttcctttgncattctcaacactcagacagcaccctctgtagacactgagtattgacaaaatgctcttcagtaagagcttnttcagtcactactgnaaaacggcctttaagaaggctcngaaaatagncctataaattantaatttttt

SEQ ID NO: 207965 - DNA, 566 bp, Homo Sapiens
  misc_feature (515)..(515): n is a, c, g, or t
  misc_feature (531)..(531): n is a, c, g, or t
  misc_feature (536)..(537): n is a, c, g, or t
  misc_feature (557)..(557): n is a, c, g, or t
aatgccagtaccatgttattttaggtattagagctttgtagtaaattttgaagtctggtagtgtgatgcttccagccctgttctttttgctcagggttgctttggctatttggggcttttatggttctgtatatattttagaatgatgccctttgtgtttgatccacaaaaagggagacatccagagctgaagagttttccctgagaattttgtcaagagctagaagagaaaggggaagaagtacatgaacaactgcatatggtgatattcactcttaagtctgctatacagaaatttaaggggtggggggcggtggttatagtgtggagccaggaacccaaggaagcctatccatagttccacatcgctgatgtaattcttagtatatggacacttgaacaattcaatatattaataagtctaaatttctatctggacaaagggtctggggtaaggagctgggggtattttggttccttatatgttgccgggaagtcagggaccccaaatgganggaccggttggaaccntggcnnaggaacctaaattggggaanatttcttgg

SEQ ID NO: 207966 - DNA, 558 bp, Homo Sapiens
  misc_feature (495)..(495): n is a, c, g, or t
  misc_feature (532)..(532): n is a, c, g, or t
  misc_feature (544)..(544): n is a, c, g, or t
  misc_feature (547)..(548): n is a, c, g, or t
  misc_feature (551)..(551): n is a, c, g, or t
  misc_feature (556)..(556): n is a, c, g, or t
gccgactaaagaaaaccatgatgtatatttgtgagagtcttaaaaaaaatttaagtggaagaaaatttttgaccaggattctaagtgaaattactctgtgcatgtgtgtgtgtgtgtgtgtgtacaggtaaagatcaaggtagttataagttattaaaaaataattatggagactttttggcagcagaaactacaattaaatcattcatattccttttaaaactagtttaaaatctatattcatctaccatgaaggtgtatacccttgtaaattgggccatatttcatttgatctacagaaagaggcataatattttggacttctatgaaattttggtcaaatttgacaaccttattaaaagctattttgaactttattaaaaagtaaagaatctagctgggcacggtggctcacacctgtaatcccagcactttgggaggccaaggcgggtggatcacttgaggcaggagttcgagaccagcctgccacacggngaaaccctgctctactaaaattccaaaaatagcttcntaagaggcttangcnnganaaatntt

SEQ ID NO: 207967 - DNA, 546 bp, Homo Sapiens; identical to SEQ ID NO: 61863
  misc_feature (398)..(398): n is a, c, g, or t
  misc_feature (456)..(456): n is a, c, g, or t
  misc_feature (476)..(476): n is a, c, g, or t
  misc_feature (488)..(488): n is a, c, g, or t
  misc_feature (517)..(517): n is a, c, g, or t
  misc_feature (523)..(523): n is a, c, g, or t
  misc_feature (529)..(529): n is a, c, g, or t
  misc_feature (536)..(536): n is a, c, g, or t

SEQ ID NO: 207968 - DNA, 538 bp, Homo Sapiens
  misc_feature (457)..(457): n is a, c, g, or t
  misc_feature (472)..(472): n is a, c, g, or t
  misc_feature (488)..(488): n is a, c, g, or t
  misc_feature (513)..(513): n is a, c, g, or t
  misc_feature (516)..(516): n is a, c, g, or t
  misc_feature (520)..(520): n is a, c, g, or t
  misc_feature (522)..(522): n is a, c, g, or t
gagacggagtctcactctgtccccaagctggagtgcagtggtgcaatctcagctcactgcaacctccgcctcccaggttcaagtgattctcttgcctcagcctcctgagtagctgggactacaggtgcacgccaccatgcccagctaatttttgtatttttagtagagacagggatttcaccatgttggccaggatggtcttgatctcttgaccttgtgatccacctgcctcagcctcccaaagtgctgggattacaggcgtgagccaccacatccggccagttagtattctttttaccctctaaatacttctttttaaaaccacctatttcttgactctagtttctcttccccatcctcaccctcgcagtcttaatttaggcctcattgtccttgcctgaactgctgcaacggccatctgactggcttcatgcttcagaattcataccctggaatncacctttcccactgntgatagaaggatttgnctaaaacacaaactgatcagacagnttnaatncnaaaggcattccccatt

SEQ ID NO: 207969 - DNA, 569 bp, Homo Sapiens; identical to SEQ ID NO: 58904
  misc_feature (436)..(436): n is a, c, g, or t
  misc_feature (536)..(536): n is a, c, g, or t
  misc_feature (567)..(567): n is a, c, g, or t

SEQ ID NO: 207970 - DNA, 569 bp, Homo Sapiens; identical to SEQ ID NO: 59227
  misc_feature (392)..(392): n is a, c, g, or t
  misc_feature (418)..(418): n is a, c, g, or t
  misc_feature (426)..(426): n is a, c, g, or t
  misc_feature (462)..(462): n is a, c, g, or t
  misc_feature (482)..(482): n is a, c, g, or t
  misc_feature (509)..(509): n is a, c, g, or t
  misc_feature (524)..(524): n is a, c, g, or t
  misc_feature (529)..(529): n is a, c, g, or t
  misc_feature (539)..(539): n is a, c, g, or t
  misc_feature (547)..(547): n is a, c, g, or t
  misc_feature (566)..(566): n is a, c, g, or t

SEQ ID NO: 207971 - DNA, 585 bp, Homo Sapiens; identical to SEQ ID NO: 59115
  misc_feature (547)..(547): n is a, c, g, or t
  misc_feature (553)..(553): n is a, c, g, or t
  misc_feature (570)..(570): n is a, c, g, or t
  misc_feature (572)..(572): n is a, c, g, or t

SEQ ID NO: 207972 - DNA, 588 bp, Homo Sapiens
  misc_feature (480)..(480): n is a, c, g, or t
  misc_feature (505)..(505): n is a, c, g, or t
  misc_feature (531)..(531): n is a, c, g, or t
  misc_feature (548)..(548): n is a, c, g, or t
  misc_feature (551)..(551): n is a, c, g, or t
  misc_feature (561)..(561): n is a, c, g, or t
  misc_feature (581)..(581): n is a, c, g, or t
  misc_feature (584)..(584): n is a, c, g, or t
ctttttgagacggagtttcgctgttgttgcccaggctggagtacaatggcatgatctcggctcactgcaacctccgcctctcgggttcaagcgattctcctgcctcagcctccggagtagctgggattacaggcatgcaccaccacgctcagctaattttgtattttgagcagagaaggggtttcaccatgttgaccaggctggtcttgaactcctgaactcaggtgatccacccgcctcatcctcccaaagtgctgggattacaggtgtgagccaccgtgcccagcaaaagacttttgatgcttaaacagaaacatatatttcatgctttggtttacaagttatatggtaagcaccccgctccccaaccaaaggaaagtctacccaagtactagaaaagaaagactgaaaaggaacaagcacgttaacatctctttggatctataaaaaggtattcactcaaattcaagacttttggangggttttggaataaaaatggtttgnaagggcacaagtggaaggttaaaganggaaggaaatcccaagnggnttaacagtcnaagaccggtttgttttgganaanaaac

SEQ ID NO: 207973 - DNA, 576 bp, Homo Sapiens
  misc_feature (323)..(323): n is a, c, g, or t
  misc_feature (484)..(484): n is a, c, g, or t
  misc_feature (523)..(523): n is a, c, g, or t
  misc_feature (556)..(556): n is a, c, g, or t
  misc_feature (565)..(565): n is a, c, g, or t
ggtagagataggatttccctatgttacccaggctggtttcaaactcctgggctgaaggaatccttccatctcagcctcttaaagtgttgggattacaggtgtgagccattatgcccagcccctcattattattatttaaagaaagctaggacattttcactatttttttaagaactcttttctaatcatcatatgctagaaactgagaaggaactcttcattgattattatttcttcttggactcatgagttatttagaagaatgtttcttaatttcaaaatttgggaaaatatatattagttttttttgtttttgtttttgnttttattgatcattcttgggtgtttctcccagagggggatttggcagggtcataggacaatagtggagggaaggtcagcagataaacaagtgaacaaaggtctctggttttcctaggcagaggaccctgcggccttccgcagtggttggggtcattgggtncttgagattagggagtgggggatgactcttaaccgagtntgccggcctttcaacatctgtttaccaaagccncattttgcnccaccttaatt

SEQ ID NO: 207974 - DNA, 562 bp, Homo Sapiens
  misc_feature (145)..(145): n is a, c, g, or t
  misc_feature (539)..(539): n is a, c, g, or t
  misc_feature (552)..(552): n is a, c, g, or t
gcccacgctggagtcgagtggcatgatctcggctcactgcaacgtccacctcctgggttcaagctattctcctgcctcagcctcctaagtaactgggattagaggtccatgccaccacgcccagctgtttttgtatttttagtanatgtggggtttcaccatgttgcccaggctggtcttgaactcctgacctcaagtgatccacctgccttggcctctcaaagggctgggattacaggcatgagccaccatgcccagccatatgtcttaacccagcatctatcatatgatcctcagaatgacagcttccttagattttgtaccctaattgccttctcttgctgcagcctagttttggctccagcaattcagtaaaagtagttctactgaggtccagtatcatacaatccagatagctccttgatggtcttgcttgggtcaaggaaactttgggctctatggtaaaatagtggaattcctttaggaatctctccatcttcatagatattatttttcacaagtgaactgtaggaaaagtnccaagtttacagntagaattttg

SEQ ID NO: 207975 - DNA, 579 bp, Homo Sapiens
  misc_feature (466)..(466): n is a, c, g, or t
  misc_feature (478)..(478): n is a, c, g, or t
  misc_feature (512)..(512): n is a, c, g, or t
  misc_feature (514)..(514): n is a, c, g, or t
  misc_feature (566)..(566): n is a, c, g, or t
  misc_feature (573)..(573): n is a, c, g, or t
gagacgcagtcttgctctgttgcccaggctggagtgcagtggcacgatcttggctggctacaagctccgcctcccgggttcacgccattcttctacctcagcctcccgagtagctgggactacaagcgcccgccaccactcctggctaattttttgtatttttagtaaggacggggtttcactgtgttagccaggatggtcttgatctcctgaccttgtgatccacctgcctcggcctcccaaagttttgggattacaggcgtgagccaccgcgcctggcccgataattttgaaatatgtaatacatgagtgaaatgatcacaattaaaatatggaatacttccaccacccacaaaagttttctattgtctctttgcaatcgattcttcttgccatcccagcttccaggctaccactggttggcttcacattagtaggttagtgtgcattttccagaactttctanaaagggaaccgnggttcatggccttggggtctggcttccatcactntnaaagcataatttgagatcccctgtggtacacacagggacttattcctttaangaagganaagttt

SEQ ID NO: 207976 - DNA, 586 bp, Homo Sapiens; identical to SEQ ID NO: 61147
  misc_feature (487)..(487): n is a, c, g, or t
  misc_feature (500)..(500): n is a, c, g, or t
  misc_feature (572)..(572): n is a, c, g, or t

SEQ ID NO: 207977 - DNA, 555 bp, Homo Sapiens
  misc_feature (381)..(381): n is a, c, g, or t
  misc_feature (410)..(410): n is a, c, g, or t
  misc_feature (495)..(495): n is a, c, g, or t
  misc_feature (505)..(505): n is a, c, g, or t
  misc_feature (521)..(521): n is a, c, g, or t
  misc_feature (527)..(527): n is a, c, g, or t
  misc_feature (546)..(546): n is a, c, g, or t
aagttctcttaagtcaagtaaaacagaaatggcactttctttttagggttctcccacacagctgcactgtcttccttagccagcagaggacacccttcagcttacaaagactcaccgctttcttctggatgaaaatttgtgcatccttcaggtggccggcaatgttctcacacagacgtttcctctgttcctcattcagcacgttcacatagaatgcccgcacctgctcagagaaaagagcaagtgcagagaattgaatcaccagtttatcaccaacaaaattcacctactacaacacttaggaaatcaatgataaaaaaaactttagaagttaagaataattttaaattttaaatttgggttgtgtccttcactttttgntttaagcaaaataagtaaaattcatttgntaatagctcatacctgctttctaataatatcctttataggaactgctataaatctcttataaatagatctacaatttaaaacctnaccacattcntaatctggccaggctnaaatgngccagctggctttgaaggnaacctaacc

SEQ ID NO: 207978 - DNA, 553 bp, Homo Sapiens; identical to SEQ ID NO: 59291
  misc_feature (382)..(382): n is a, c, g, or t
  misc_feature (435)..(435): n is a, c, g, or t
  misc_feature (509)..(509): n is a, c, g, or t
  misc_feature (540)..(540): n is a, c, g, or t

SEQ ID NO: 207979 - DNA, 540 bp, Homo Sapiens
  misc_feature (510)..(510): n is a, c, g, or t
  misc_feature (527)..(527): n is a, c, g, or t
  misc_feature (537)..(537): n is a, c, g, or t
aaagagacagggtcttgctgtcacccaggatggactacagtgaaggatcatgggtcactgtaaccttgagctcaagggggtcaagtgatcctcccctcccatctcagcttcccaagtagccaggactacaggctcatgccactatgcccagctaattttttatttttttgtagagacagggtctcgttatgtcgcccaggctggggattctctcaaagatggtattacaagcatgagccatcacgcccggccaagttatattctttagttgctcagtccgtaacccttggagtcgtccttgacccttcttctacctgactgctctcaaaagtctagaatctggtcatttcgcactaccgccactattactaccctgattcaagtcacctcgacctttaacctggataaatgcagtcaatggcctactaacaactcttatttctgcacctgctgcatacagtcaacatagcaatcagatcttttaaaacacaagttagatcaactcactgnttactcaaaaccaactnattcaaaggncca

SEQ ID NO: 207980 - DNA, 556 bp, Homo Sapiens; identical to SEQ ID NO: 61843
  misc_feature (503)..(503): n is a, c, g, or t

SEQ ID NO: 207981 - DNA, 559 bp, Homo Sapiens
  misc_feature (475)..(475): n is a, c, g, or t
  misc_feature (485)..(485): n is a, c, g, or t
  misc_feature (525)..(525): n is a, c, g, or t
  misc_feature (529)..(529): n is a, c, g, or t
  misc_feature (552)..(552): n is a, c, g, or t
ggagacagagtcttgctctgttgccctggctggagggcagtggcataatctctggtcaatgcaacctccacctcctgggttgaagtgcttctcctgcctcagcctcctaagtagcttggactacaggtgcgtgccactgcacccagcccgtaaggggtgctagctttggtctgggaaacagtgaaatgaaaaccacaagtcacaaaccacaaccaggcaaagttctgtggggccctccgatgcatccagagcacactgtgggtttgttatagtgaaacctgaaaggtcccatggagatgttgatcttcacagtcccaaagattctgttatatccatgagggatgcctccctttccccatattcctggaattgagtcctctgtgccatccagatttcaggggcacagtacaaggcacagccctataactgacacatgatgtaaatcatatatggaagatgttctgatgtccatganggtccaagancggctaaaaaattggactgattgaattccaagtggtgganaggnttccactagcattttggataaanctctcaa

SEQ ID NO: 207982 - DNA, 547 bp, Homo Sapiens
  misc_feature (462)..(462): n is a, c, g, or t
  misc_feature (521)..(521): n is a, c, g, or t
  misc_feature (535)..(535): n is a, c, g, or t
  misc_feature (539)..(540): n is a, c, g, or t
ctcagttcaaaggtttaaaaagggagaacctttgctcttcttatagagattcaagtctgcatttctcttgattgaccacaagggacagactgaaaaaaaaaataatagcagaaagtatgcatgatgtaccttgggaaaggatagttccgtacagatcccctagacttggtggaagtcttggggcaaaccaaaatgaaattaagactacacgtctcaatatatagtgaaaagccttgagaaggaatgatcttgatgtcacaggaactttgtaattagtccactgggaaataattgtttacattttcaaataagtaaataaatagacaataatagtcgctggtcccataggagtagggattttgactcactctctgtaggaattttcttatatagtattgacctactatgaccctcaattcccatacactatcccccggcatattgatatctacaacccttggngggattggtgaatgaagacatttatattaccctggatgtaggtgccaattaaggaaaantggatctctgaccnctgnncaatgaa

SEQ ID NO: 207983 - DNA, 537 bp, Homo Sapiens
  misc_feature (439)..(439): n is a, c, g, or t
  misc_feature (467)..(467): n is a, c, g, or t
  misc_feature (469)..(469): n is a, c, g, or t
  misc_feature (480)..(480): n is a, c, g, or t
  misc_feature (494)..(495): n is a, c, g, or t
  misc_feature (535)..(535): n is a, c, g, or t
ggagacggagtctcactcgatcacccaggctggagtgcagtggtgcgatctcggctcactgcagccttcgccttctgggttcaagtgattctcctgccttagcctctcgggtagctgggactataggcatgcgccaccacgcccggctaatttgttatgcaacttttagatggctcaagtcatggataaactgagactatttagactagagaactggatgggcttgacagtcttccatcaataccactattctcaatgggttctgacaagaaatgagctgcaaatgtctttaggttattgcctctgtctaggtccagaattgcatatattctacactgtttgaaggtaagtttgtacactttcaagatcagatgaataggctggcaattctaaaagttgaggattcctgtaataattgagaagccaatccaaaaatcgngccttgcaggaagcatccactttccagntncaagagctaanaggcaaatccaagnnttctggtcttcatgaaaggtggaacttaaatcccccaatngg

SEQ ID NO: 207984 - DNA, 553 bp, Homo Sapiens
  misc_feature (213)..(213): n is a, c, g, or t
  misc_feature (395)..(395): n is a, c, g, or t
  misc_feature (442)..(442): n is a, c, g, or t
  misc_feature (455)..(455): n is a, c, g, or t
  misc_feature (494)..(494): n is a, c, g, or t
  misc_feature (499)..(499): n is a, c, g, or t
  misc_feature (513)..(513): n is a, c, g, or t
  misc_feature (515)..(515): n is a, c, g, or t
  misc_feature (531)..(531): n is a, c, g, or t
  misc_feature (551)..(551): n is a, c, g, or t
gtaaagacagaatcttgtttcactatgttaccaggctggtcttgaactcctagctttaaatgatcctcccaccttggcctcccagagcactgggattaaaggtgtaaaccaccacacctggccttcagaggttctttatatattctgatacacatctttaatcccttgtaaatgctgggaatttctgtttttttaactcattctgtggcttgnctattcattttcttaatgctgtcttttgatgagcaaaaactatgaataagacctattcatcaaattttcttttgagattagtgctgtgtcctgtccaacaaatccttgctcagttttaaaagatttcttcatgtaagctctgctatggtttaagtttatttctagataagtgatctttttgntaattttctgaatgggtttttctcttccactatactttataattagntattggtcagatnaagaaaaactatagcccgggcctggtggctcatgcctgnaattncagcactttgggangnccaggcggccggacanctgggaacaggagttgggancc

SEQ ID NO: 207985 - DNA, 557 bp, Homo Sapiens
  misc_feature (509)..(509): n is a, c, g, or t
  misc_feature (551)..(551): n is a, c, g, or t
gagatggaatcttactctgttgcccaggctggagtgcagtggcgcaatctcagctcactgcaagctccgcctccggggttcacccattttcctgcctcagtctcccgagtagctgggactataggcacccgccaccatgactggctaattttttgtatttttagtagagacgaggtctcatagtgttagccaggatggtcttgatctcctgacctcgtgatctgcccgcctcggcctcccaaagtgctaggattacaggcgtgagccaccacgcccggcccacaatactttaattttttaaaagcaccttttgtatgtggaacttgtcaaaagccctgcaaaagtgtgaagaattttatctatgctccctttctaactctcaccatttatcattgacttttacgtacaaaaaactatttaataccttcttatgtctgtttcaaaaaataatttaagtgaatcttctgaatccttttctaagaccatggaaaataatttcatcttttggntacctttttcacccggaaatatctttctggaacatcttttanggggag

SEQ ID NO: 207986 - DNA, 554 bp, Homo Sapiens; identical to SEQ ID NO: 59179
  misc_feature (550)..(550): n is a, c, g, or t

SEQ ID NO: 207987 - DNA, 532 bp, Homo Sapiens; identical to SEQ ID NO: 59824
  misc_feature (446)..(446): n is a, c, g, or t
  misc_feature (462)..(462): n is a, c, g, or t
  misc_feature (473)..(473): n is a, c, g, or t
  misc_feature (480)..(480): n is a, c, g, or t
  misc_feature (482)..(482): n is a, c, g, or t
  misc_feature (500)..(500): n is a, c, g, or t
  misc_feature (529)..(529): n is a, c, g, or t

SEQ ID NO: 207988 - DNA, 557 bp, Homo Sapiens
  misc_feature (484)..(484): n is a, c, g, or t
  misc_feature (488)..(488): n is a, c, g, or t
  misc_feature (495)..(495): n is a, c, g, or t
  misc_feature (533)..(533): n is a, c, g, or t
  misc_feature (543)..(543): n is a, c, g, or t
  misc_feature (554)..(554): n is a, c, g, or t
aatggctgaacaatacattccacagtttatttttttcttcaacttttaagttccggggtacatgtgcaggatgtgcaggtttgttacatagataaacatgtgccatggtgctttgctgcacagatcaacccactacctaggtagtaagcccagtatccattagctattcttcctgatgctctccctccccccacctttccccaggacagacaccagtgtgtgttgtttccccgaccaaccccacgtgtccatgtgttctcattgttcaactcccacttatgaatgaaaacatgtggcgtttggttttatgttcctgcattagtttgctgaggataatgccttccagctctatccatgtccctgcaaaggacatgatctcatttcttttcatggctgcataagtattccatggtatatatgtaccacatttctttatccagctaccattgatgaaccattgggttggattccatgtccctgctantggngaatagngctgcaatggaacataagttttcctggtcttattaaanaaattttctnttgccaaagtntaa

SEQ ID NO: 207989 - DNA, 549 bp, Homo Sapiens
  misc_feature (446)..(446): n is a, c, g, or t
  misc_feature (481)..(481): n is a, c, g, or t
  misc_feature (498)..(498): n is a, c, g, or t
  misc_feature (526)..(526): n is a, c, g, or t
  misc_feature (536)..(536): n is a, c, g, or t
  misc_feature (541)..(541): n is a, c, g, or t
  misc_feature (543)..(543): n is a, c, g, or t
  misc_feature (547)..(547): n is a, c, g, or t
acagagacagggtctctctatgttgcccaggctggtctcagtgatcctcccaccttggcctcccaaagtgctgtgattaggcctacgttgtgtgtcactttcttaagagacctacgttgctaccgtgtctacagtagtctgtggctcaccccagcctctgcagccccactgccctctctcattacctggctttagtttctccctaacacttacctcacctgtgtaagaactccttcccatgagactgtgagctctgcggtacagggaccttaccttcctgtactgccgcaatttctatcatattccctgcctctagggcaatgcctggccacagcaggtgctccctaaacatttgccaagtgaactgtcccttaccgagtcctcctccatcacccccaagcctggctggtgacctggagagactcggggtagtggcaaggctgcanggatctggaactgcctgggccttgccactactgangcctggccattcgatgncttcctttgatctgaaagtactgggganccttaaaaanggctntngggnaa

SEQ ID NO: 207990 - DNA, 537 bp, Homo Sapiens
  misc_feature (433)..(433): n is a, c, g, or t
  misc_feature (459)..(459): n is a, c, g, or t
  misc_feature (469)..(469): n is a, c, g, or t
  misc_feature (481)..(481): n is a, c, g, or t
  misc_feature (502)..(502): n is a, c, g, or t
  misc_feature (525)..(525): n is a, c, g, or t
  misc_feature (534)..(534): n is a, c, g, or t
acttattaaaatttattttttctaacttttgttattattgcactaccagctttgatccattataatcgtacaggaccatcgtacacgcagtccactgttgactaaaatgttatgtggcacgtgactgtacataccaggccagactcaaggcctctgctcttaatcactttgctggactgcttcaatttccactgtgctattctgcttggttttcccaccttatattttatgagttctaccaataaaacttcttgtagtttgatacgtttgaagttctgggttaccttctccatggttgtccaggcctgacgtaatggagttgtgaaacagttggggagtggccaccttccctgcagatattggattcaatttctaatcgtacaacatcatcaaatccaagaggatgtgtggcttgggagggagaagtacttgncatataaaatcatggcatcattctgngccttctgtncatcacattggncctttttggcagcaagctganactggaagttatctgctggccancagaatgtnaga

SEQ ID NO: 207991 - DNA, 573 bp, Homo Sapiens; identical to SEQ ID NO: 61324
  misc_feature (477)..(477): n is a, c, g, or t
  misc_feature (481)..(481): n is a, c, g, or t
  misc_feature (484)..(484): n is a, c, g, or t
  misc_feature (564)..(564): n is a, c, g, or t

SEQ ID NO: 207992 - DNA, 570 bp, Homo Sapiens
  misc_feature (462)..(462): n is a, c, g, or t
  misc_feature (544)..(544): n is a, c, g, or t
  misc_feature (564)..(564): n is a, c, g, or t
agtagagacgtgggtttcaccgtgtaagccacgatggtcttgatctcctgacctcatgatccgcctgcctcaggctcccaaagtgctgggattacagacgtgagccaccgcgcccggcctgattagacaatatttaacactatcttattgtgatgtaccaataaacaaaacaaaacaaaaaacccacattgaaacaaatcagaaaaaattaaagcatgaacaaattttatatagtatataataagaataaaagtcccacaacttaaggctctaattataacaatgaaatagatccaaagttcttgaatcacttttttcaattttgaagatgactgttgtaaatatatatctatttaaagtttcatccacaaggtttattaatcaagtaaaatgtacatttttaaacccattcctgggtaaacaaatatttatttgcaagcttttcttaattggactcctcangcacatctaatattgcaacatatgcaggttaggaaaatatacacataatcctaaacaatctttacttataaatttgaatgcntattctaatctaccaagagnaagatt

SEQ ID NO: 207993 - DNA, 531 bp, Homo Sapiens
  misc_feature (414)..(414): n is a, c, g, or t
  misc_feature (468)..(468): n is a, c, g, or t
  misc_feature (488)..(488): n is a, c, g, or t
  misc_feature (491)..(491): n is a, c, g, or t
  misc_feature (516)..(518): n is a, c, g, or t
  misc_feature (528)..(528): n is a, c, g, or t
aaatttagagacagggtcttgctctgtcacccaggctggagtgcagtggcgtgatcatagctcactgcagcctcgaattcctgggctcaagccatcctctagcctgggcctcttgaaatgttaggatcacaggcgtgagccaaggcacagactctgggtttaaggcagaagcacttgttacatgaatcacatcacataaagcaatcttttggtcaggtggccaggcgaggagaggcccaagaaacaggaaaaggagagcaagtgagagtgaatcggcgaagccatcacctaatgaaggagccagacaccctgagtgtggagccccagccatgggtcctgccccttgcgccgctcagggcaaatcttcttgctgcctggtccacagcagttactggggggcttggcagggtgaantgtgtgtcaccagacctgcacaagcttcttcttacagatacaacgctgactcantgtgaaggcccttaaggctntanaaaaaccccaaccaagggaggggcnnnaacccccaanaag

SEQ ID NO: 207994 - DNA, 539 bp, Homo Sapiens
  misc_feature (464)..(464): n is a, c, g, or t
  misc_feature (487)..(487): n is a, c, g, or t
  misc_feature (489)..(489): n is a, c, g, or t
  misc_feature (495)..(495): n is a, c, g, or t
  misc_feature (512)..(512): n is a, c, g, or t
  misc_feature (514)..(514): n is a, c, g, or t
  misc_feature (519)..(519): n is a, c, g, or t
ggtgttcaactactctgcagaatgtctctacctttgtttctgatctgagatgtcagtgcttttttttgttgctactaatgttatgcacataaggtttgtaacttcttagcccaagccaaagttctatggcagctttggtggacagttctcatatggtttgaggtctttctacctcaagttcctgagtttctctgcctgaatctcttctctggccagagaagcatgttcagcctgagtatgggatgggctggagtgccagggaggtaattctccaagtaaaaccctcaagcaacaaagggcagtaattgggagacagacatcccagtttccttgatcctgcatgggacaattctaaggtgtgtttcatgggctctgagagggtcccagcaggactgagtgcagttgcccacaggagtaactttttcaataatatccttccttattgacttttctcatccttatgncttacctggccctaaatttccangncaattnccaaatgaaatacttgnancccangcccttttttaagtcgggat

SEQ ID NO: 207995 - DNA, 545 bp, Homo Sapiens
  misc_feature (477)..(477): n is a, c, g, or t
  misc_feature (506)..(506): n is a, c, g, or t
  misc_feature (508)..(508): n is a, c, g, or t
  misc_feature (521)..(521): n is a, c, g, or t
  misc_feature (533)..(533): n is a, c, g, or t
accgcaaactggttccctccacctgagtatcctacccattatgggctttgaatgtgtatgccctgcctcagacctttgagattagggtctaaacttaagttcacaaaagaagcatcacctccatagtgaatcaccttttcagcatgaagggtgaaatgtgaaatgatctaatctgcttgtacgcaatgcctaacgtggggttgcatagatgtgatgctggatggttttgtaaccattcctggaggcaagattcctccacaaccatgttccattactctgtggccatgttctaccttgctttgacagcctagcatagaacattttggcagtttcagatcctgactagatgtctgctggaggagttaaaagctgtagtcactgggacagatgcgtggtgaggctcccggcttaccatgtcttcatgtgccgaagctttttcatttcctctctggattcaagtggaagttacaagccttnaatattaccctcattatactgaggctganancaatcagtttacntcctagaaattncattagcccttc

SEQ ID NO: 207996 - DNA, 352 bp, Homo Sapiens
  misc_feature (70)..(70): n is a, c, g, or t
  misc_feature (83)..(83): n is a, c, g, or t
  misc_feature (138)..(138): n is a, c, g, or t
  misc_feature (140)..(140): n is a, c, g, or t
  misc_feature (218)..(218): n is a, c, g, or t
  misc_feature (224)..(224): n is a, c, g, or t
  misc_feature (257)..(257): n is a, c, g, or t
  misc_feature (278)..(278): n is a, c, g, or t
  misc_feature (321)..(321): n is a, c, g, or t
  misc_feature (336)..(336): n is a, c, g, or t
  misc_feature (339)..(339): n is a, c, g, or t
  misc_feature (345)..(346): n is a, c, g, or t
aaagagagcaggtcttgccatgtggcccaggctggtctccaactcctgggctcaggtaacgtcccacagnggccttgcaaagngctgggattacaggcatgagccaccacccctggcacattttttaattttttgtananatagggtctcgccatgttgcccagtctagtcatgaactcccgagttcaagcaatcagcccaccttggcctcccaaagngttganattacaggtgttgggccaccacacttggcctanaaatcattttccaggcacggnggctcatgcctataatcccggcacttttgggaggcgaggcggntggatcacctgaggncanaagttnnagacca

SEQ ID NO: 207997 - DNA, 562 bp, Homo Sapiens
  misc_feature (392)..(392): n is a, c, g, or t
  misc_feature (421)..(421): n is a, c, g, or t
  misc_feature (440)..(440): n is a, c, g, or t
  misc_feature (496)..(496): n is a, c, g, or t
  misc_feature (540)..(540): n is a, c, g, or t
gagacggagtctcgcttgttgcccaggctggagtgcaatggcacgatttcgactcaccacaatctccgcctcccaggttcaagcgattctcctgtctcagcctcccaagtagctgagattacaggcatgcaccactacacctgtctaattttgtattttcagtggagatggggtttctccatgttggtcaggctggtcttgaactcccgacctcaggtgatccacccgccttggcctgccaaagtgctgggattacaggcatgagccacagcacctggccctatttttgtatttttaatggagacgaggttttaccatgttggccaggctggtcttgaactcctgacctcaagtgatctgccagcctcaggtgccaaagtgctgggattacnggcaagaaccactgtgcccagcctactgncaagtatttttcagatganggaaaacccagacttcagagaaattaaggaatctgtccaaggcgtatagtcaaggnatcagaatctggaactggagcctttcaatccaaagtccaagctnttaatcttcaggccccactggt

SEQ ID NO: 207998 - DNA, 560 bp, Homo Sapiens; identical to SEQ ID NO: 61155
  misc_feature (496)..(496): n is a, c, g, or t
  misc_feature (511)..(511): n is a, c, g, or t
  misc_feature (520)..(520): n is a, c, g, or t
  misc_feature (523)..(523): n is a, c, g, or t
  misc_feature (533)..(533): n is a, c, g, or t
  misc_feature (547)..(547): n is a, c, g, or t
  misc_feature (549)..(549): n is a, c, g, or t

SEQ ID NO: 207999 - DNA, 558 bp, Homo Sapiens; identical to SEQ ID NO: 59152
  misc_feature (435)..(435): n is a, c, g, or t
  misc_feature (437)..(437): n is a, c, g, or t
  misc_feature (496)..(496): n is a, c, g, or t
  misc_feature (506)..(506): n is a, c, g, or t
  misc_feature (555)..(555): n is a, c, g, or t

SEQ ID NO: 208000 - DNA, 570 bp, Homo Sapiens
  misc_feature (443)..(443): n is a, c, g, or t
  misc_feature (488)..(488): n is a, c, g, or t
  misc_feature (529)..(529): n is a, c, g, or t
  misc_feature (564)..(564): n is a, c, g, or t
gagcatgttcaaagacagaagtgtaggcctgtgggctttggcactcaagtctgagtatggtgagccaaaaattgacgtatgcttgaggactgagtggggactcttaaatgctgttctgtgggaaaatcttctagaaggtagagttcatgaaatttccaaatatctcaatgttacaaaaactcaaaatggtggccatagtcataaagtatggcctccagtggatgagtggacgcgtggagttagaaataaggaaggtatctatttattttattttacgatttttttttgagacagagtcttactctgttgcccaggctggagtgcagtggtgtgatctcggcttactgcaacctctgcctcccgtatccaagcaatttgtcctgcctcaacctcccgagtagctgggattacaggcgcccgccatcaagctcagctaattttgnatttttatagagatgtcgtttcaccatgttggccagctaaaaatnccaaaaattaactgggcatggtggtgcaccctggaatcttnggcccctgggaagcttaacccggaaattctttgancccgga

SEQ ID NO: 208001 - DNA, 573 bp, Homo Sapiens; identical to SEQ ID NO: 59697
  misc_feature (452)..(452): n is a, c, g, or t
  misc_feature (483)..(483): n is a, c, g, or t
  misc_feature (506)..(506): n is a, c, g, or t
  misc_feature (508)..(508): n is a, c, g, or t
  misc_feature (514)..(514): n is a, c, g, or t
  misc_feature (547)..(547): n is a, c, g, or t
  misc_feature (562)..(562): n is a, c, g, or t

SEQ ID NO: 208002 - DNA, 501 bp, Homo Sapiens; identical to SEQ ID NO: 60788
  misc_feature (352)..(352): n is a, c, g, or t
  misc_feature (354)..(354): n is a, c, g, or t
  misc_feature (437)..(437): n is a, c, g, or t
  misc_feature (449)..(449): n is a, c, g, or t
  misc_feature (476)..(476): n is a, c, g, or t
  misc_feature (478)..(479): n is a, c, g, or t
  misc_feature (493)..(493): n is a, c, g, or t
  misc_feature (499)..(499): n is a, c, g, or t

SEQ ID NO: 208003 - DNA, 560 bp, Homo Sapiens; identical to SEQ ID NO: 59041
  misc_feature (423)..(425): n is a, c, g, or t
  misc_feature (430)..(431): n is a, c, g, or t
  misc_feature (474)..(474): n is a, c, g, or t
  misc_feature (479)..(479): n is a, c, g, or t
  misc_feature (534)..(534): n is a, c, g, or t
  misc_feature (557)..(557): n is a, c, g, or t

SEQ ID NO: 208004 - DNA, 567 bp, Homo Sapiens
  misc_feature (383)..(383): n is a, c, g, or t
  misc_feature (532)..(532): n is a, c, g, or t
  misc_feature (548)..(548): n is a, c, g, or t
  misc_feature (554)..(554): n is a, c, g, or t
gagacagagcctcactctgttgctcaggctggagtgcagtggcacaaactcagctcatgacaacgtatgcctcccgggttcaagcgattctcacgcttcagccaactaagtagctgggatttcaggcatgcgccactcctggctgactttttctatttttagtagagacagagttttgccatgttggccaagctagtctcgaactcttggcctcaagcgatccgcccacctcagcctcccaaagtgctgggattacagacaggcgggagccacagtgcctggccttgcattaatttttaaaatgagaaataatacagtcttgctttcatttaaaactttttccaagaaaccatgagcaaacctgtgtttaccatatatactgnactgaatatttggacatcaccatttcaatgtaaagtcagatgctaataattaacacagactgaccaacactctgaaatgacttggtattttctaaaataccattaggtacagacctgaggaatgcttgggtcactttcattaacactgncaggagaattcaggcntgagtngatccttctaaaa

SEQ ID NO: 208005 - DNA, 560 bp, Homo Sapiens
  misc_feature (467)..(467): n is a, c, g, or t
  misc_feature (513)..(513): n is a, c, g, or t
  misc_feature (529)..(529): n is a, c, g, or t
  misc_feature (532)..(533): n is a, c, g, or t
  misc_feature (549)..(549): n is a, c, g, or t
  misc_feature (556)..(556): n is a, c, g, or t
gtgtgatagatttttttccctatccctttactttgaacctatgagtcctgttacatgtgagagaggtctcttgaagacagcagaaggctgggtcttgtttttaatccaatttgccactccaagtcttttaggtggggtgtttaggttgtttacattcaaggttaatattgagacatgaggctttattcctaacatggtgtcattagctggttgctctgtagtttggattgtgtagttgctttacagggtctgtgggctatgtgcttatgtgtatttttgtggtagcaggtgtcaccattctttcatttccatgtttagaactctcaagactctcttgtagggccagtctggtgataacaaattcttttagcagttgcttgtctgggaaagattttatttcttctttgctcatgtagcttagtttggcaggatatggaattcttggttaggatttttcttttttattnttttcttaaagagactgggtctcactatgggtttttgggttttggntttttggtttgagacnaanncttgctgtggtgccanctggaangcaa

SEQ ID NO: 208006 - DNA, 565 bp, Homo Sapiens
  misc_feature (321)..(321): n is a, c, g, or t
  misc_feature (437)..(437): n is a, c, g, or t
  misc_feature (482)..(482): n is a, c, g, or t
  misc_feature (498)..(498): n is a, c, g, or t
  misc_feature (511)..(511): n is a, c, g, or t
  misc_feature (517)..(517): n is a, c, g, or t
gtagagatgggggtctcactatgttgcccaggctggtctcaaacttctgagctcaagtgatcctccttcctcggtctcccaaagtgctaggattacaggcgcgagccaccgtgctcagccttttttgggtccaatcattcacccttccctgtatctaagcctttatcatgtaactttttcattccttcccaaagaggcaagtacagttgctcactccccaactgatctctggcttagctacataacttgctttagcaaatgagttgttaacagataaaacacaagcagggccttgaaatgtacttgcagacttgactttgntccttgtacctctgctatcaccactataggaaattctcctgggtaactgctgccccttcgacccaggtcccagaataaatacacgtggagcaaacaagctcttacctggagtgaangagccaagctagctagacttgcagactgaagcacaactgcactgntgagcccaattgaaangctggttcctaanccatgnacaagcactttaacaacctatggttccggtgggtattaattggaattt

SEQ ID NO: 208007 - DNA, 568 bp, Homo Sapiens; identical to SEQ ID NO: 61307
  misc_feature (111)..(111): n is a, c, g, or t
  misc_feature (208)..(208): n is a, c, g, or t
  misc_feature (383)..(383): n is a, c, g, or t
  misc_feature (402)..(402): n is a, c, g, or t
  misc_feature (526)..(526): n is a, c, g, or t
  misc_feature (545)..(545): n is a, c, g, or t
  misc_feature (555)..(555): n is a, c, g, or t

SEQ ID NO: 208008 - DNA, 557 bp, Homo Sapiens
  misc_feature (437)..(437): n is a, c, g, or t
  misc_feature (467)..(467): n is a, c, g, or t
  misc_feature (480)..(480): n is a, c, g, or t
  misc_feature (489)..(489): n is a, c, g, or t
  misc_feature (501)..(501): n is a, c, g, or t
  misc_feature (520)..(520): n is a, c, g, or t
  misc_feature (540)..(540): n is a, c, g, or t
  misc_feature (551)..(551): n is a, c, g, or t
gagacgatctcgctgtgttgcccaggctagactcaaacccctaaactcaagcatccttcaacttcagcttccaaataactgggaccatatgcacgcatcaccacacccagtttcccctgccttttggaaaactctgtaatattccatatttcacagcgtgactggagaaagtagatgttgggatgaagtgggaaacctgatactcacccaccaagacagccgtatgcttgtgagcggggtcaaaggggctttggccttttccctccatgaccttgtcctccgagatgggcaacaggtaggaatcttgaagttcctaaatggggagagaggctggggggccagaacgccaaggtctcacatctgggaaatgaggggcttgaggaaggaagggaaagggacatagagggaaattggtctggggccaggaagttcatganggtcctgcatctggaaaggccagagttttncagagcttcagangaaaagtcntgggtagatgtnaaaagggatgcttgggggncttaacccttgggcaccaanaacttaccatngaaggg

SEQ ID NO: 208009 - DNA, 543 bp, Homo Sapiens
  misc_feature (476)..(476): n is a, c, g, or t
  misc_feature (508)..(508): n is a, c, g, or t
  misc_feature (518)..(518): n is a, c, g, or t
  misc_feature (525)..(525): n is a, c, g, or t
  misc_feature (537)..(537): n is a, c, g, or t
  misc_feature (540)..(540): n is a, c, g, or t
gagacggagtctcactctgtcgcccaggctggagtgcagtggcacgatctcggctcactgcaacctctgcctcctgggctcaagcaattctcctgactcagccttctgagtagctgggactacaggtgcccaccaccacgcccagctaatttttgtattttagtagagacggggtttcaccagtgttcctcgatttctaaatcagccctagtaacttcataatgttaagtaataaaagtcatcttctatagcccagtcacctgatactatgatctgatcattgatactctcaggggtaaggcaattctagtactgtaacttcttgctggcattaaatttaaaaatgtaaaatatacttaggagcagaatctgacttttgtggatttatattataaattaatccaccaaagacaagacttttgcacatatttcagtaaataaacacactgattcatatacatgcagccaagcaaatncaaagatcctggagtaaataccaacaacgtgncacaaaagtnaaatttncaaaatcttggnctntgg

SEQ ID NO: 208010 - DNA, 555 bp, Homo Sapiens
  misc_feature (463)..(463): n is a, c, g, or t
  misc_feature (548)..(548): n is a, c, g, or t
  misc_feature (554)..(554): n is a, c, g, or t
aatttttagtacagacagggtttcaccacgttggcaggctggtcttgaactcctgacctcaagtgatccgcctgccttggcctcccaaagtgctgtgattacaggcgtgagacaccgcacctgggctcaaactaagaaatattaaaattttcttccttttaagatttagagtaaaggccaaataagcacactgatgtcttcccctcttctataagtttaaaatgaaacctgaaagcagggtcgatgattaaaagctgatgttcctaactagtcttttatggactgccagccatggtatgctctcaaattcttctgatgttcctttactcctaattgaattgtgaatgttttattatcaaaattcacaaaattttgatagaatgtgccaaatatttcctgagttacaatttctcatttagaaacatttgctttaaattctcatacatatccaaaactgttctgncattttcctgttgactactttttctaccttgacttgagatctccagaagagatatccttggtggtaacaagaaaataagctaatnttaaang

SEQ ID NO: 208011 - DNA, 552 bp, Homo Sapiens
  misc_feature (515)..(515): n is a, c, g, or t
  misc_feature (525)..(525): n is a, c, g, or t
agaaagccaagttagttgtaatgatggaaaaaaagatctacatattgatgcttaaccaaaaatctgaaaatgtgactaaattaagaatggaatgttaactagggtagagaggtctaaaatatacttttaaaagtgatcagagaggcactgtttcatcaataccctgtaatgatttgcgtttgaatctaggatactcacagatcatggaccatatacacctatttacaaacattaaaggcagtctaagtttagactgatatacataaagtgaataattacttttgaaatgatactattgaagtagacattgatatacttattagacctttgcctaagagaaaaaaaaaaacctcatttaatgaaacaagtcaactgccaaatctgtatgaaaatttatattgcattatggaaccaaatataatgttacatgtaaaacacaattaaaatcattatcacagataataaaacttaccccaacagaaacttaatgataattaccaaaggggcaactttgnatgggttggnttttttattccacagggagcctatttt

SEQ ID NO: 208012 - DNA, 559 bp, Homo Sapiens
  misc_feature (436)..(436): n is a, c, g, or t
  misc_feature (498)..(498): n is a, c, g, or t
  misc_feature (521)..(521): n is a, c, g, or t
gagatggagtctcactctgtcatccaggctggagtgctgtggcatgatctcggctcactgcaacttccgcctccctggttcacatgattctcctgcctttgcctccagagtagatgggattacaggtgcctgccaccatgcctggctaatttttgtatttttagtagagatgggtttcaccatgttggccaggctggtctcaaactcctgacttcaggtgatccaaccgcctcggcctcccaaagtgctggggttgtttccagtttttggctattaagagtaaagcaacattgtttgtttttttgactcttaaatgcctgtcttataaatggcgctaagcagggaaaagctaattattaaatattgtttgactgaaatgtgaaccacatttttccctaatttatgtcagaaatcactatttaataatattggttgngtttatatgtgattttaaaatgatccccaccttaattaaaatgaccatccctgaaagtgaanccaaaaggaaggaatcctctaanctactttggcatgacttggctttaaaagggcccggttt

SEQ ID NO: 208013 - DNA, 569 bp, Homo Sapiens
  misc_feature (343)..(343): n is a, c, g, or t
  misc_feature (355)..(355): n is a, c, g, or t
  misc_feature (458)..(458): n is a, c, g, or t
  misc_feature (469)..(469): n is a, c, g, or t
  misc_feature (518)..(518): n is a, c, g, or t
  misc_feature (544)..(544): n is a, c, g, or t
  misc_feature (551)..(551): n is a, c, g, or t
gtacagacggggtttctccgtgttggtcgggctgatctcaagctcctgacctcgggtgatccacccgcctccgcctccctgggtgctaggattgcaggcgtgagccaccgcgcctccggcccaatttagtaaccagaaaggaatagatcggcctggcgtggtagctcatgcttgtgatcccagcactgtggacggccgagcgcggcgatcgattgagcctaggacttccagaccggcctgggcaacgtggtgaaacactgtcttttttttttttttttttttttgagtggagtttcgctcgttttgcaggctggagtgcagtggcgtggtctcgactcaccgnggcctccacctnccgggtttaggtggttctcctgcctcaacctcctgagtgtctgggattgcaggcatgagccaccatgccagctaattttgggtttatttttttggtacaaacngggtttttcgngttgggcaagctgatctgagcttctgaccttgagtgatacgcccgcttnggcttccctgggggctgggaattgangccttanccaccgggcccccggtct

SEQ ID NO: 208014 - DNA, 574 bp, Homo Sapiens; identical to SEQ ID NO: 61357
  misc_feature (481)..(481): n is a, c, g, or t
  misc_feature (503)..(503): n is a, c, g, or t
  misc_feature (546)..(546): n is a, c, g, or t
  misc_feature (561)..(561): n is a, c, g, or t
  misc_feature (568)..(568): n is a, c, g, or t
  misc_feature (571)..(571): n is a, c, g, or t

SEQ ID NO: 208015 - DNA, 549 bp, Homo Sapiens
  misc_feature (460)..(460): n is a, c, g, or t
  misc_feature (483)..(483): n is a, c, g, or t
  misc_feature (512)..(512): n is a, c, g, or t
  misc_feature (546)..(547): n is a, c, g, or t
aattaattagaaagtaggctgggcacggtggctcatgcctataatcccagcacttggggaggccgaggatctcctctctggtggatcacttgagggcaggagttaagagaccatcctggccaacatgatgaaaccctgtctctactaaaaatacaaaaagtaggagaatcacttgaacctaggaagcagaggttgcagtgggccaagatcacaccactatactctagcctgggcgacagaggtggggaaaaaagtaggacccctgtcctatattcaggtttttctcacatatatgaacccatctaaattctacgttgttaaaggtagcttaggttaattagtctatacttatttaagaccaatatggggtgagatggatttttttttaaaaatcctacagtaaggctttctactttccttctaatgaggaaaaaggtgacaaaaattcaagtgtcaatgncccctttctgggaaaagggttanaaaaaccattgcttacctttgactttacnagttcctttgaagttaccaagcctttaaatccgnngg

SEQ ID NO: 208016 - DNA, 550 bp, Homo Sapiens
  misc_feature (470)..(470): n is a, c, g, or t
  misc_feature (484)..(484): n is a, c, g, or t
  misc_feature (502)..(502): n is a, c, g, or t
  misc_feature (518)..(518): n is a, c, g, or t
  misc_feature (522)..(522): n is a, c, g, or t
  misc_feature (529)..(529): n is a, c, g, or t
  misc_feature (546)..(546): n is a, c, g, or t
aatctacattattaacttccttttggtatattacagtgatattttctgtacatggcccagaactaagttccctatgtacatagagatgtgggggaaaagcattgaccttggaagtcgccgccttatgccctgaaagacaaggttcctttcttcattcaggagtttctcaccacatcgccattgtgaagtagcaacattctgtaaacctggaggggctaggtaaaggtctggagataggagagtgggtcaatttccttctgtctccttccacagacaaagcccgtcagcagctgctgtttttgaattcaccattctccgtgatggaaagcttggtggggttggtgggggagatgccattgcggacctgcatgctgtaccgctccttcacttgggtcagcgcgctcatcagtctggtgttggctgaatccagggacacgatcccggttttcctggttgaataatctcatctncatttatgacctgngcatcaattattttctgntttgcatcaatactgnttgnattttancatgaacctttttaagntcct

SEQ ID NO: 208017 - DNA, 537 bp, Homo Sapiens
  misc_feature (57)..(57): n is a, c, g, or t
  misc_feature (87)..(87): n is a, c, g, or t
  misc_feature (229)..(229): n is a, c, g, or t
  misc_feature (260)..(260): n is a, c, g, or t
  misc_feature (371)..(371): n is a, c, g, or t
  misc_feature (381)..(381): n is a, c, g, or t
  misc_feature (431)..(431): n is a, c, g, or t
  misc_feature (442)..(442): n is a, c, g, or t
  misc_feature (455)..(455): n is a, c, g, or t
  misc_feature (513)..(514): n is a, c, g, or t
  misc_feature (533)..(533): n is a, c, g, or t
gtaggcatttactgataaaacttccctgttgttagggggatataaaggacacaaaanaaacttcaactgcctcacaatgtgaccaanaattgatcataggtaactcttaaagatacccactctgtccacaaaaatggcttatcagcaactgtgttcctgctatgtgactctaactccacagccacaactggttggagcaggagtgaatatctgattcaagttgaatcanacctattatctctctcaagcattgacctganacaggattgggagctgggagtgagtcattctcaacagtgctattctggagggtgtgtccacatactgcagctgccacatgcccttgtaaaactggattgttcaacttctanatttcatganctccactatccttccaaaaatgctcactttttcttaaacattcttgaacngatttctgttntttttaacaatanaaatgttattaacagaacaacaaattttgtttgaaaaaaaaatctccctttctcctcnncggtttccattccgaaaanaaaa

SEQ ID NO: 208018 - DNA, 579 bp, Homo Sapiens; identical to SEQ ID NO: 59090
  misc_feature (69)..(69): n is a, c, g, or t
  misc_feature (93)..(93): n is a, c, g, or t
  misc_feature (174)..(174): n is a, c, g, or t
  misc_feature (176)..(176): n is a, c, g, or t
  misc_feature (369)..(369): n is a, c, g, or t
  misc_feature (540)..(540): n is a, c, g, or t
  misc_feature (547)..(548): n is a, c, g, or t
  misc_feature (550)..(550): n is a, c, g, or t
  misc_feature (554)..(554): n is a, c, g, or t
  misc_feature (577)..(578): n is a, c, g, or t

SEQ ID NO: 208019 - DNA, 562 bp, Homo Sapiens
  misc_feature (493)..(493): n is a, c, g, or t
  misc_feature (514)..(514): n is a, c, g, or t
  misc_feature (535)..(535): n is a, c, g, or t
  misc_feature (545)..(545): n is a, c, g, or t
  misc_feature (548)..(548): n is a, c, g, or t
  misc_feature (560)..(560): n is a, c, g, or t
gctgccttggtccaacatacttgactgatgcgtgcccagctcgtcctagttgacatgcaaactgacaaactaatcgctgaatagttctttctcatttctgccaagaggctctttttaatagtatgtgaaataaaaactccatgctgaaggccaaattgacaccagccacaagattacgtctacagtgttgtggaaatcactgcaaagaatgccatctccaaaacactcaccaccagcctggacaaagcacgagagagtacactgaagggaataatcctgccctggcccccaggggagggaccagatgggacctaatagctcttttctactactcatttctatgataattttaagttgccacatggcatatgtatttttttttaatctaaaggcagaatatcagtcaatgaagtgaccaggattttaatgaaaggtattttttcatgaaccgtatctattcacatgggataagttttcatctacccccaacttntcacttgctatacaacacatnacttactatcaaggttggganaagttttttnganggcaaccccatntg

SEQ ID NO: 208020 - DNA, 580 bp, Homo Sapiens
  misc_feature (550)..(550): n is a, c, g, or t
  misc_feature (558)..(558): n is a, c, g, or t
gtggagatgacaggtatgtttattaccctgattgtggtgatggtatcaaaggtgtgtgcatatagtcagacccatcaaattgtattcattaaatatgtaacaactgtacttctataaagctggtaaaaaacactgtacctgtttgtttttacttcaacgtggctataagaaaatataaaattacattacagcttgcattctatttgtatagtactgtcctgctcaagatggattaacaggtgtgtgacactcactgcctgctgagagcagggtgtagggaacctggggttggaaaggagacttgtcaccgtatgctcttccatttatcaatatttcatattttgagaagacatgaactttttgaacaaagataacagaaaatcattgtcaatagttaatctaccagagagattcagaaaccttgcatacttggttttcaggtcttggttgagagttctaacaccgttgaaaaatctcaagagtaacctggtaatgatatcttcattgaattaaaattacattttgctttaatctgatagtcctcttaatncaaaaggncacatcaagttaaacaacatcc

SEQ ID NO: 208021 - DNA, 548 bp, Homo Sapiens
  misc_feature (448)..(448): n is a, c, g, or t
  misc_feature (484)..(484): n is a, c, g, or t
  misc_feature (493)..(493): n is a, c, g, or t
  misc_feature (500)..(500): n is a, c, g, or t
  misc_feature (512)..(512): n is a, c, g, or t
  misc_feature (545)..(545): n is a, c, g, or t
gcgattataaccttgaagtttttatttcaatattctcgttctggacaatttcttaacagctttaaaattcagtattttatttattaacattaaatgcgctagaactcaaacagccagaccaaactgtaaatacggaactaggcacatctcaatgttctgtctctgtgtttacattactggataagaaaattaagcattcttcaacttttctatgggtcttaaaattcatggaatatgtgcattttcctaatgaccctttaaaactaataccacatatgaaatgttatcaaggcagaaaactacattaatttcgactttaataagatgtaactcatacaaccactaagctaaagaataatctgaagtctcaagtgggcatgatgatcttatttccatcaaacactaaaaactggctctgtgcagattgagctctccttacctttactgntcagttgagaggctcttaattctctaaaggtagacnaactatgcnaaactgncaattaaacagnggatcattaaattccttataaaccttaatgggnccc

SEQ ID NO: 208022 - DNA, 578 bp, Homo Sapiens
  misc_feature (537)..(537): n is a, c, g, or t
  misc_feature (577)..(577): n is a, c, g, or t
aatttaaaatgttttactctgcataatattttttaaaaaatttccagaactgtacaaatctaaattcacttaaatcaaacagacatatggtgaagaaaacaccaagtaaaattaatgactgtattggtatagcaataaaatcaatcaaaatattgatgtaaaaacgtttcttacagagtagttagaggatatgattcaaatgaaaagtacagaaggacccttgtattttaaaaaaaataaagatatttaacctatgctttaaaattaaatgaaccaattaaaaactattaggacaacaaattaaatacaattcatatcagaattaacagtaaataatatttttctgaatatgcagcaagagtagaatccaaattatccttatgtaaatcataagaaacttataattaattatagatgatctggaccactatgcacatttgaaaaaagggaaaaaaacactaaatataccttacaaataattctaccaggtcttaaatttttatgagacgctatgggggtaaatgtatcattaaatgnataggttaccccatgacggtttctaatttatcctttattnc

SEQ ID NO: 208023 - DNA, 535 bp, Homo Sapiens
  misc_feature (32)..(32): n is a, c, g, or t
  misc_feature (335)..(335): n is a, c, g, or t
  misc_feature (340)..(340): n is a, c, g, or t
  misc_feature (459)..(459): n is a, c, g, or t
  misc_feature (471)..(471): n is a, c, g, or t
  misc_feature (479)..(479): n is a, c, g, or t
  misc_feature (490)..(491): n is a, c, g, or t
  misc_feature (503)..(503): n is a, c, g, or t
  misc_feature (525)..(525): n is a, c, g, or t
cctttttgcgcgcgtatgtatgtgtgtgcgcncaaagtatctctatctagggaatgaaaaatgggcgctggcggccggaggggagccctagggaggcagcgggggaggctgcgggtgcgcagggaggcaggccggccgctcccggctgcaggaggagaagtttttttttttttttggttttgttttgtggttatttttttttacaactttaaatacggaatataaataaattttacatttaaaaaataaaaggaaagcccccaaaaatataatcaccgactttacaaactgaaggaagcaggttttggaaggcgggaagggggaaagtgcattangtggnaagggaggtgggagctcaaatcccaccccagggggtcttggggaacttttcccttctctcccccattcccagcccacgagctggtttcctaggaggagccaccagaggtggagcctcanaaagggatcaangaatgggnaaagtgttcannccatggaagggnttccgggcaaaaagggcttganccttccttgg

SEQ ID NO: 208024 - DNA, 556 bp, Homo Sapiens
  misc_feature (473)..(473): n is a, c, g, or t
  misc_feature (504)..(504): n is a, c, g, or t
  misc_feature (517)..(517): n is a, c, g, or t
  misc_feature (520)..(520): n is a, c, g, or t
  misc_feature (535)..(535): n is a, c, g, or t
  misc_feature (547)..(547): n is a, c, g, or t
  misc_feature (555)..(555): n is a, c, g, or t
aaatcaaacccaaaccactactgtcctaagcattatggttcacagaatcaagtgaaatgtatggcattttttccttctctccatacaagggtactctgatcaagagctagtctatcaactattgatcaagcatttataatgacaagagtgtaagagtaactaactgcatggttacaaagtatgttatataaggtccaggggattttccccaacagtgtagaactgattggaggataatagtaaggttcttgaattggggaaattccattcaaatgataatcctcaccagtccatggagcttttaagcccctaagcagccataaacaaaagcccacttgacaaagaaatggtatgcttggttaccataggacatctcactcctctggcctcattgcttagatccttccttgaactcagaggttctaaagttacccatatcttctaataaagaagaaaattaaagtcaaaactgngtgaaaatcaggccaaaaagtctaaaaatcnccaaaatgggggnatnccccttttaaccacnggatagggatantttcttgnc

SEQ ID NO: 208025 - DNA, 585 bp, Homo Sapiens
  misc_feature (484)..(484): n is a, c, g, or t
  misc_feature (489)..(489): n is a, c, g, or t
  misc_feature (554)..(554): n is a, c, g, or t
  misc_feature (558)..(558): n is a, c, g, or t
  misc_feature (561)..(561): n is a, c, g, or t
  misc_feature (572)..(572): n is a, c, g, or t
ctgatacaagatcttgctgtgttacccaggctagagagtgcaggggcacaatcatggctcactgcagccttgacctcctgaacttaagcaatcctcccatctcaggctcccaagtagctgggactacaggcacatgacaccacatccaactagtttttgtattttttgtagagacaggttttgccatgttgctcatgctctgcctttctatataaattttagattctgtcaatatccacaaaataacttgttaagaacaaaatcaactgagattgtgttgaatctacagattaagtagggaaaaaaatgacatcttgccaatagtgagtttttctatccatgtacatgaactagacctctcaacttatttattctttgatttctttcatcaaagtttcatagttttcctcatatagatcttgtaaatattttgctagatttatacctaattgttttggagatttttgatgctaatgtaaatggnactgngctttcagttcacattccagttggtcatgctggtatggaaggaccactggactttaaatattaancggnatnctataacctgntataatgggtaat

SEQ ID NO: 208026 - DNA, 519 bp, Homo Sapiens
  misc_feature (439)..(439): n is a, c, g, or t
  misc_feature (470)..(470): n is a, c, g, or t
  misc_feature (490)..(490): n is a, c, g, or t
  misc_feature (500)..(500): n is a, c, g, or t
  misc_feature (502)..(502): n is a, c, g, or t
  misc_feature (512)..(512): n is a, c, g, or t
  misc_feature (518)..(518): n is a, c, g, or t
aactaaactaaatggtcaatactgccatctctcttgataatgacaaagtgtttgcacaggatgcctacaggtgtgtgtgtcgctcctcactaatggatccgtagtcatatagctgtgagaggcactcctgggttgaaaatgaaggcaattatcacattactgtcagtcctgactgagtcacctctagagtttatgctttcagccttaattgaaatgaagacaattatataaaattctcacataattgatcacaaatgtgatcacagccactcttgactaagattggtgccggccaatctgctgtgagggaatgaagagaggagaggaactgcgatgtcagtccctgattctactgcaagtttccaagcacatgaaatcccattctagctttggagaccccaatgtgacaagaatctccctgtgctttaaatcatctctnacccatgctaagctgtgatcccttaccaagnctatgaaaccttggaaaaangagtgaaaantncccccggggngtgtgng

SEQ ID NO: 208027 - DNA, 571 bp, Homo Sapiens
  misc_feature (67)..(67): n is a, c, g, or t
  misc_feature (484)..(484): n is a, c, g, or t
  misc_feature (486)..(486): n is a, c, g, or t
  misc_feature (498)..(498): n is a, c, g, or t
  misc_feature (502)..(502): n is a, c, g, or t
  misc_feature (532)..(532): n is a, c, g, or t
  misc_feature (547)..(547): n is a, c, g, or t
  misc_feature (551)..(551): n is a, c, g, or t
cctgaattagaagaatatgtattgaaccttctcttgaacagaatgacgagccttttgaagatttttnatttaaaggtgttatgttcttaaatggcattaaaaagttacgaaaatccatcagtacagattttagtgaaggttgctccattccaactggtaaaacacagaagtaaaatgccagtctcaggggatctcaaaaattcaggggaagagtcagtatgtgttccaaatttaaacaatctctaccaaggagttgcctcatagtgtttatttaaattctaaatcaagcatggaagttttcagaatatttgatattttcataaaatgtccttggaatacaaaactaataaattcaatgaagtgccacaccgcccagggtttacctgcaaaatctcagccctgactgaacaaagcccaacaattttgtccaaaagggagggctggtattttcttttccctgataaagaaaccagtggagaaagcncnatgttcccttangctnaattcatggttaagggcttttccccaagancttgttttaaggccngctngataagaagccttcctttgg

SEQ ID NO: 208028 - DNA, 572 bp, Homo Sapiens
  misc_feature (533)..(533): n is a, c, g, or t
  misc_feature (535)..(535): n is a, c, g, or t
  misc_feature (539)..(539): n is a, c, g, or t
  misc_feature (553)..(553): n is a, c, g, or t
  misc_feature (556)..(556): n is a, c, g, or t
  misc_feature (569)..(569): n is a, c, g, or t
agtatgttattcagtattgtttattggaaatcaattgtaaaggcatatactttttaaaggctcaggtatatacttaaaaaaatgaatcaggacatatttttacagatagtaggcttaacttctaatttgtcaggatttaaaattagttattattacatagctctgtattttgtatgtactctttagtataattgttaaaggttccacatgtctaagaactctacaggttaatgacttcttatgaatacattgtaaatagttgcatcaaagtagtcacatgctttctgaaggtgttatttctcataatttgttaaaaacgcctcaaaatgccaagtcagtaaattacaaaagcaattgtgctgaaggttgtaaacatttctgtgctaaaatgtacaaactagaatgctgattttttatttgaaattgaaacagtaagtatttaaaaggaaagaagaatagaatattgcctatatgtataccataaaagtcagaaagtctatattgaaacccttctagaaattttaaaaagaaangngggntacatatttgaagnggnttcatttcaatanggg

SEQ ID NO: 208029 - DNA, 602 bp, Homo Sapiens
  misc_feature (517)..(517): n is a, c, g, or t
  misc_feature (573)..(573): n is a, c, g, or t
  misc_feature (590)..(590): n is a, c, g, or t
ggcttaaacaacagaaatttatttgctcataatttttgaggctggaagtccaggatcaaagtgtagataaggatgatttcctctataatgagccttaaaagaaggatctcctccaggaatctctctttgccttgaaggtaaccatttccggtcacttcacataaaattctgtgcctgctaccctggtatctctttcacttcttataaggaaaccagtcatattgaatgagggccccattctaactgcctcattttaaaatcacctctttaaaaaaaccacatctctaaataccaccattatcttgaggtcccagggatgaaagccttaatgttaatgagtggatgggacatgtgacataatctaaatcagtggtcccctaactttttggcaccagggaccagtttcgtggaagacatttttcccacggactggagttggggattaaactggtccagttcagatcatcaggcattagatctcataaggagtgtgcaacctaaatcccttgcatgtgcngttcacaataaagtcatgcctccattgagaatctaatggccctggtgaactgacanaaagttgacctcagccntaatggttgctc

SEQ ID NO: 208030 - DNA, 547 bp, Homo Sapiens
  misc_feature (471)..(471): n is a, c, g, or t
  misc_feature (492)..(492): n is a, c, g, or t
  misc_feature (495)..(495): n is a, c, g, or t
  misc_feature (507)..(507): n is a, c, g, or t
  misc_feature (525)..(525): n is a, c, g, or t
  misc_feature (539)..(539): n is a, c, g, or t
ctacaaaaataagacatttcatttattaaaattttatagagaagcatacaagactacaacaaatcactgaagtcaaggtctaaagtctttgagaagtcagatggaccggacgcagtggctcacgtctgtgatcccagcactttgggaggccgaggtgggcagatcatctgagctcaggagttacagaccaccctgggcaacaaggcgaaaccccatctttaccaaaaatacagccaggcatggtggagcatctgtggtcccagctacaccagaggctgaggtgggaggattgcttgggaggcagagattgcagtgagccgagattgtgcactgcactccagcctgggtgtcagagtgagaccccgcctcaaaaaaaaaaaaaaaaaaaaaggccgggtgcggtggctcatgcctgtaatctcagcactttgggaggccaaaatgggccggatcatgaaggtcaggagttcnaaaaccagcctggccaatacnggnggaacccttgtnttactaaaaattccaaantaacccggtgtggngggcatcc

SEQ ID NO: 208031 - DNA, 522 bp, Homo Sapiens
  misc_feature (445)..(445): n is a, c, g, or t
  misc_feature (508)..(508): n is a, c, g, or t
  misc_feature (521)..(521): n is a, c, g, or t
ccaatctgatgcgtacagaactttattgagggtaaatcagactctgattagagtctgagcaactgctggtacaatgacaacactgctgcaatccagaggttcaggcatgtaacaagctgacacaaaaatactaccactctatgaaagccaatatggatcaccagttggctcccctgtatttctctcggccctcacaggttgtcacagcctacagtgctttcttctggttatcacaaatcctcaaaaattaatcttattctttggttgactcatattgcttttaagaaaagttatcaagggtcactcacaggactgatcaggagaaaaaggaagttgcagagatgttatttattcatctgaagtatttccaaattactcatttaatatgccctctttggtttaaaaaataaattcaagtctaaactcagctgatccaatttattanaagggtttaaaagggctttctgaatgcccccaaatttaaagaatgaggtaaaattcctacttnttaaaccacggcng

SEQ ID NO: 208032 - DNA, 542 bp, Homo Sapiens
  misc_feature (398)..(398): n is a, c, g, or t
  misc_feature (501)..(501): n is a, c, g, or t
  misc_feature (509)..(509): n is a, c, g, or t
aatctcatttcattaccaggccctgcgtgaatgccatgttgctttggaaaacaaaaccaaaaaagaaagtcttggtagggaggggctttgggaaggaccatgagagagagacagtgagaaagacagattgatttatggagctccatgactagatgctgattttccaccagaggtcaaagggccaccccactgtgccaatctcctctttctccttctctcctcgggcagatgagcctggtagcccctggcagtgatgatgtgggaaccacctccacagggaatcactaggggaattctcataggaggctcccctttctctgtccccttctcctgggcagtggttcttagggggaacttctgggaatgtctgggggctgatgctgctacagggcctgcanagggtgttactggcattgatgccaggggccaggattgctggatttcctacaagggtaggacatgttcaatgacaaaatattggcctcctaatggcaaatgccntaattaanaagcctttgcaatgccggacaagcttacaaagg

SEQ ID NO: 208033 - DNA, 552 bp, Homo Sapiens
  misc_feature (492)..(492): n is a, c, g, or t
  misc_feature (518)..(519): n is a, c, g, or t
  misc_feature (535)..(535): n is a, c, g, or t
  misc_feature (547)..(548): n is a, c, g, or t
gttgtcgtgctatttgaatgcatgacagtttatgtagctatccttctgttcatggacccctgagctgtttctgtggggctattataaatgtgctataaatattcttgtacagggatttttgtggacatgttttcatttctcttggattaaaaagctaggagtagaattgctaggttttatggtagctgtatatttaactttttaagaaactgcccaacagttttctaaaaccattgtgctgttttgtgttcctgccagcacattgtactctggttgttttttacatccttgccgacaattggtattgtccacctgttgcattttagccatgcttctggatatgtggcggtatctcatggtggtttagtttgcatttccctgatgactaatggacagtacttttcatgtccttttttccttttaattggataggactcctttgtgcattctggacataaaggattgtcagatttatggggcacatatcttttnccactctataacttgcctgttcttannagtatctggtgatganaaaaagggttanntttt

SEQ ID NO: 208034 - DNA, 547 bp, Homo Sapiens; identical to SEQ ID NO: 61139
  misc_feature (366)..(366): n is a, c, g, or t
  misc_feature (415)..(415): n is a, c, g, or t
  misc_feature (441)..(441): n is a, c, g, or t
  misc_feature (464)..(464): n is a, c, g, or t
  misc_feature (498)..(498): n is a, c, g, or t
  misc_feature (510)..(510): n is a, c, g, or t
  misc_feature (517)..(517): n is a, c, g, or t
  misc_feature (541)..(541): n is a, c, g, or t
  misc_feature (546)..(546): n is a, c, g, or t

SEQ ID NO: 208035 - DNA, 534 bp, Homo Sapiens
  misc_feature (455)..(455): n is a, c, g, or t
  misc_feature (481)..(481): n is a, c, g, or t
  misc_feature (484)..(484): n is a, c, g, or t
  misc_feature (488)..(488): n is a, c, g, or t
gtcctgctgttttcttaaaaacttttttttgataccaatatcttcttatggtcagagtcacaggcattctagatgtagaagcttaacatcctctttggtagttatattttctgacaaacattcactacaaatgtaccaagaaaagagaaggccagcctcgacctcgctgtggcacatgagttatccttcaacaggtgtaggcattttgagtcagagaggcctggacaatgaagagacagcacctcaggcagccttgccaggagccactgggtttcatcctggcctgacccagaaaaatcttatggaagagaacaagaggcccaagagctctctgatctgctgtcaaccagctgcagccgggagactgccaaagcgcttgcagtgactaggcagcggccctacagaagcccgctgggaaggggattaccagcctgatcccttggctttagaagccngaaatggctcaactttacaacagcanggnctgncagggagggggccatgaccctggaaagggtttttccccttgtgggg

SEQ ID NO: 208036 - DNA, 564 bp, Homo Sapiens
  misc_feature (413)..(413): n is a, c, g, or t
  misc_feature (501)..(501): n is a, c, g, or t
  misc_feature (528)..(528): n is a, c, g, or t
  misc_feature (533)..(533): n is a, c, g, or t
  misc_feature (562)..(563): n is a, c, g, or t
gactgttgtgattttcagcaggtacagttttgattttattgcaaggcacacaatcgtatatacaatgcataattatcatcttttaaagtacaagataaaaatcatatacattatagtaaagaacatatgagtatattcttgtttcagagaagaaaattgccttaaggaagctgggttataccgtttttggatgtgattttcgtatttatactgaatcatccgaacagctcttggttagaaaataaatctcattgataggacacacaacctttcacagctttcactttacaatgttccaatttaaagtcagccagtgtgctccctgaatttgcatgagtcatcgtatttcatcccaggactagatgaaacacctataaattgtctgacaatagttatacacgtttaagaactgnatttcttagtaatatatcacagaatagaaccattttcttaagattttatgtgactctttattgattttttttctccaagctatttttncaaatgatggattaattttgggattancctanagtttgacttaaactcgaaggggctcttnna

SEQ ID NO: 208037 - DNA, 554 bp, Homo Sapiens
  misc_feature (480)..(480): n is a, c, g, or t
  misc_feature (499)..(499): n is a, c, g, or t
ctttaccaagactgtttttatttaaaatatacttggaataggtgaatattaatctaagcattttcctatcacttttaaaattttatactatgtactttgtattaaatagtacagtagtttcagtaagacatgtaaaatttgccattttaaccaccttaaagtgtacaattcagtgacatttattatatttacaatgttgtgcaaccatcaccactaattcatcaaattttaataatcttttaatttttgagccagatttagcagtgaggggctatataccaactttaatgacactaatgttaataagttctgataacccactaccatcagaccagctgtaattcatccaattttcatcatcctaaaaggaatccccatacgcattatgcagtcactcccttttcaccccctccctagttcctgataactactaattggctttgtcaccatggatttgcctattttgggatatttcatatnaatgggatcatggtggctngcttctttcacttagcatgctttcttaagggtcactcccatctattcattatggg

SEQ ID NO: 208038 - DNA, 470 bp, Homo Sapiens
  misc_feature (239)..(239): n is a, c, g, or t
  misc_feature (257)..(257): n is a, c, g, or t
  misc_feature (261)..(261): n is a, c, g, or t
  misc_feature (395)..(395): n is a, c, g, or t
  misc_feature (407)..(407): n is a, c, g, or t
  misc_feature (425)..(425): n is a, c, g, or t
  misc_feature (435)..(435): n is a, c, g, or t
  misc_feature (451)..(451): n is a, c, g, or t
  misc_feature (459)..(459): n is a, c, g, or t
  misc_feature (468)..(468): n is a, c, g, or t
caactatttaaaaacgtaaaaactattcttaggttgaagaccacccagaagcaggtggtgtgctagatttggcccatagtccaaccgtactttctgtgatgatggaaatgttcaatatttcctcaattgtctaatatggtaaccactagccacatgtggctactgatcatttgaaaggtggttacatggactgagaaactgttttttttttttttttgagatggagtctcgctctgtcnccccagctggagtgcagnggcnccatctcggctcactgcaagctccgcctcccgggttcacgccgttctcctgcctcagcctcccaagtagctgggactacaggcgcctggctaattttttctatttttagtggagacggggcctcaccgtattanccaggatggctngatctccttgaccttcgngatctgcccncttggccttccaaagngctgggantcccggggnta

SEQ ID NO: 208039 - DNA, 400 bp, Homo Sapiens
  misc_feature (183)..(183): n is a, c, g, or t
  misc_feature (187)..(187): n is a, c, g, or t
  misc_feature (270)..(270): n is a, c, g, or t
  misc_feature (283)..(283): n is a, c, g, or t
  misc_feature (302)..(302): n is a, c, g, or t
  misc_feature (400)..(400): n is a, c, g, or t
taaagactctgaactcatcatacaaattcaaatgctttattggagagtacctaatttgaattaatcagctagtctcttcctagaagtcttaaataccttttttattttattttattttttttaagacagtctttctctgtcacccaggctggaggacagtggtgcaatcatagctgcactgcngctnctaattcctgtgttcaatcgatcctcccactcagcctcctaagtagctaggactacaggtgtgtgccaccacacccaagctanattctttgtagangagagggtctctctaatgntacccaatctggtcttgagttttctggactcaagcaatcctcctgcctcccaaagtgggggggtttacagatgtgagccactgcacctggccttaaan

SEQ ID NO: 208040 - DNA, 523 bp, Homo Sapiens; identical to SEQ ID NO: 58434

SEQ ID NO: 208041 - DNA, 625 bp, Homo Sapiens; identical to SEQ ID NO: 59433
  misc_feature (614)..(614): n is a, c, g, or t

SEQ ID NO: 208042 - DNA, 560 bp, Homo Sapiens
  misc_feature (465)..(465): n is a, c, g, or t
  misc_feature (474)..(474): n is a, c, g, or t
  misc_feature (545)..(546): n is a, c, g, or t
  misc_feature (557)..(557): n is a, c, g, or t
aagatggagttttgctcttgtcacccaggcgggagtgcagtggcgtgatctcggctcactgcaacctccgcctcctgggttcaagcgattctcctgcctcagccccccaagtagctgggattacagatgcccgctaccacgcctggctaatttttgtgtagagacggggtttcaccatgttggccaggctggtctcaaactcctgacctcaggtgatccgcccaccttggcctcccaaagtgttgggattacaggcaggagccaccgtgcccggccgaatcttattcttactggttactgtagaataatttcagtcctgtcccttatgattctgaatccaattatataaaggaaaataacttttcatgtgaatgtaaaatgtttacacacataagtaagacagtttacaagacaaactggtctacacagacaaaggtctatattaaagttcaatctggaccctanaattcttgncatgggcctttgtgaagagtctgccctactcaggaatgggcacatgggttaacaattttacttattactgnnggaatggagtntaa

SEQ ID NO: 208043 - DNA, 555 bp, Homo Sapiens
  misc_feature (16)..(16): n is a, c, g, or t
  misc_feature (160)..(160): n is a, c, g, or t
  misc_feature (271)..(271): n is a, c, g, or t
  misc_feature (278)..(278): n is a, c, g, or t
  misc_feature (358)..(358): n is a, c, g, or t
  misc_feature (395)..(395): n is a, c, g, or t
  misc_feature (464)..(464): n is a, c, g, or t
  misc_feature (476)..(476): n is a, c, g, or t
  misc_feature (485)..(485): n is a, c, g, or t
  misc_feature (506)..(506): n is a, c, g, or t
aatcaacacattcagnggatttgcacaatgcaatagcagcaccaaaaattaattgaatttccataaacaataaaaaatttaaacgaaaattaaaaaacacttccatttgctagagatcttaaagtaagaaatacttaggaataaacataaaaaaactganaatttcacaccttgaaatctacaaacattaaccaaaatgattaaaaacatatatatacaacccacattgatggtttggaaaaatcaatattggtattatataagccaatgngattcanattcaacacaatacctataaaaacccctattggtttttgttaaagaaacaaaaagcaggctgggaaaagtgactcacgtntgttggccaggctgatctcaaactcatgacctcaagngatctatccaccttgggctcctaaagtgctgggtttacaggcgtgagccacacgcctggcccaatcctnttaacataaacnctttaatgncaattaatgcttcaccggaangttttaagtcactcaaactcaagccaattctggaatggctttctggcaa

SEQ ID NO: 208044 - DNA, 552 bp, Homo Sapiens
  misc_feature (496)..(496): n is a, c, g, or t
  misc_feature (502)..(502): n is a, c, g, or t
  misc_feature (507)..(507): n is a, c, g, or t
  misc_feature (514)..(514): n is a, c, g, or t
  misc_feature (518)..(518): n is a, c, g, or t
  misc_feature (540)..(540): n is a, c, g, or t
  misc_feature (550)..(550): n is a, c, g, or t
ccaagacagagtctcactctgtcacccaggctggagtgcagtggcacgatctcagctcactgcaacttctgcctccagtgttcaaatgattctcgtgccttagcttcctgagtagctgggactacaggcatgtaccaccaccccggctaatttttgtatttttagtagagacagggttttgccacgttggccaggctggtctcgaacttgtgacctcaggtgatctgcccgccttggcctcccaaagtgctgggattacaggcgtgagccaccatgcctggcccaaaggaaattcttataggcacagttattgacctaagtgtcttaaaattatcttgcttaggtgcgaaccagaaggaaactaaggctaaaaccaaattacaaattcaaattccatgattcaaatttaaaataggagatagccatccaaatgagatgagagaatgattcctgagagcgggagagactcatatccttcacatctgggaactgccangcccanaaganggcctanctgnacccaggctttggcctttccanggggattttnaa

SEQ ID NO: 208045 - DNA, 573 bp, Homo Sapiens
  misc_feature (446)..(446): n is a, c, g, or t
  misc_feature (450)..(450): n is a, c, g, or t
  misc_feature (453)..(453): n is a, c, g, or t
  misc_feature (483)..(483): n is a, c, g, or t
  misc_feature (520)..(520): n is a, c, g, or t
  misc_feature (525)..(525): n is a, c, g, or t
  misc_feature (538)..(538): n is a, c, g, or t
  misc_feature (553)..(553): n is a, c, g, or t
gcatagaacaagattttgttttcagagttttcttccttccccttcccccaattgttagcagcttgatgtgtcattctccccagcaggggagggggtggaatggcttgggttgtaaactccctcccccagccttcctgtcccttggaggggcagttcagctgggttctggttcagggtcaggcaggcagttaaggctggacgggtggtgcccgtaacaatgtgcctcatggcctgcagctgctctgggtttgactccagactccggtcgtacagcttgagtttcacatctgagggcagcagcgggacgtcccgaggtgccacaggaaagagcatgggccacagcagccagccgccctgtcagctccagggcacggtgcttggactcgcaacggctggcggttgaaggtaaagttcaccttgaaaggtcaacccatccacaaagcggntcangangctcatggaaaagctcaacttgacaccggnccaattcaccttggcccaaaggcccctatttttgaanggggncctccgggggggnttcccaggacaaaanggccaacaagtggtccccct

SEQ ID NO: 208046 - DNA, 546 bp, Homo Sapiens; identical to SEQ ID NO: 61856
  misc_feature (478)..(478): n is a, c, g, or t
  misc_feature (481)..(481): n is a, c, g, or t
  misc_feature (499)..(499): n is a, c, g, or t

SEQ ID NO: 208047 - DNA, 486 bp, Homo Sapiens
  misc_feature (2)..(2): n is a, c, g, or t
  misc_feature (7)..(7): n is a, c, g, or t
  misc_feature (10)..(10): n is a, c, g, or t
  misc_feature (13)..(13): n is a, c, g, or t
  misc_feature (16)..(16): n is a, c, g, or t
  misc_feature (19)..(19): n is a, c, g, or t
  misc_feature (24)..(24): n is a, c, g, or t
  misc_feature (333)..(333): n is a, c, g, or t
  misc_feature (407)..(407): n is a, c, g, or t
  misc_feature (410)..(410): n is a, c, g, or t
  misc_feature (431)..(431): n is a, c, g, or t
  misc_feature (433)..(433): n is a, c, g, or t
  misc_feature (439)..(439): n is a, c, g, or t
  misc_feature (448)..(448): n is a, c, g, or t
  misc_feature (466)..(466): n is a, c, g, or t
gntttgntgntgntgntgntttgnttttggttttagaaagcctcacactgtaacccgggctggagtgcaatggcatgatcttggctcactgcaacctccacctcccaggttcaaacgattctcctgcctcagcctcctgagtagctaagactacaggtgccatccaccacgcccaactaattttttgtatttttttttttttagaagagatagggtttccctatgtttaccaggttggtctcgaactcctcacctcgtgatctgcccaccttggcctcccaaagtgctgggattacaggcgcgagccactgcactcgaccgccctgagctttntttcctgcaactagagggtctgatctgtctgcttgttaagaaactgcacaacttccaaaccatcagggtaaggncgngtgtgtcgtcttgagcatttncntaaatngtaaacatnacacgtaaagttcacagnccaaattttcctgcagcttt

SEQ ID NO: 208048 - DNA, 563 bp, Homo Sapiens; identical to SEQ ID NO: 59355
  misc_feature (61)..(61): n is a, c, g, or t
  misc_feature (472)..(472): n is a, c, g, or t
  misc_feature (489)..(489): n is a, c, g, or t
  misc_feature (493)..(493): n is a, c, g, or t
  misc_feature (536)..(536): n is a, c, g, or t
  misc_feature (544)..(544): n is a, c, g, or t
  misc_feature (552)..(552): n is a, c, g, or t
  misc_feature (555)..(555): n is a, c, g, or t

SEQ ID NO: 208049 - DNA, 601 bp, Homo Sapiens
  misc_feature (528)..(528): n is a, c, g, or t
  misc_feature (546)..(546): n is a, c, g, or t
gagatggagtcttgctctgttgcccaggctatagtgcagtggcatgatctcggctcactgcaatctccgcctcccaggttcatgcaattctcctgcctcagcctcccaagtagctgggattataggcaggcgccactacaccagataatttttgtatttttagtagagatggggtttcaccatgttggccaggctagtctcgaactcctgacctccagtgatctgccccccttggcctcccaaagtgctgggattatagatgtgagccaccgtgcccagacatcgaccatatatcttaatgaagcaaaaaactcaggggcaagaatagcaagcatgataccacagtaagaaagtaggtcgtgtgtatagtcagatttgtacaattactcctcaaatggaataggaaaatgaatggaaaggaattgtattaaaatgatctgatcccaaacgtcttgcttttctgggattaaggtaatgggttacaccaaaacgtctggtctctgcactattggatctttccccattggnttctaaataattgttgcnccgggactaaatctctttcaattaatttaatccaaaggaattaggaaaacccaat

SEQ ID NO: 208050 - DNA, 469 bp, Homo Sapiens; identical to SEQ ID NO: 59356
  misc_feature (429)..(429): n is a, c, g, or t
  misc_feature (440)..(440): n is a, c, g, or t
  misc_feature (444)..(444): n is a, c, g, or t
  misc_feature (447)..(447): n is a, c, g, or t
  misc_feature (449)..(449): n is a, c, g, or t
  misc_feature (456)..(456): n is a, c, g, or t
  misc_feature (459)..(459): n is a, c, g, or t

SEQ ID NO: 208051 - DNA, 386 bp, Homo Sapiens
  misc_feature (349)..(349): n is a, c, g, or t
  misc_feature (366)..(366): n is a, c, g, or t
  misc_feature (368)..(368): n is a, c, g, or t
  misc_feature (370)..(370): n is a, c, g, or t
  misc_feature (372)..(372): n is a, c, g, or t
  misc_feature (379)..(379): n is a, c, g, or t
  misc_feature (381)..(381): n is a, c, g, or t
gaattctcaggaagaatgacaacacatcacaaaaacgggtttctttttgagggtctcactcctgtcacccagactggagtgcaatggcgcgctctcggctcattgcaacctccgcctcctgggttcaagcaattcctgtgcctcagcctcccaagtcatggggatcacaggcatatgccaccacacctggctcatttttatatttttagtagagataaggtttcgctacgttggccaggctgctctcaaactcctggcttcaagtgatccacccctctcagcctcccaaagtgctgggattgcagagccatcatgccccacctaaaaaaaccggtattaaatggaaagncaagtttaaatgttccngncncnatggctnangcctg

SEQ ID NO: 208052 - DNA, 500 bp, Homo Sapiens
  misc_feature (349)..(349): n is a, c, g, or t
  misc_feature (439)..(439): n is a, c, g, or t
  misc_feature (460)..(460): n is a, c, g, or t
  misc_feature (482)..(482): n is a, c, g, or t
  misc_feature (485)..(485): n is a, c, g, or t
  misc_feature (487)..(488): n is a, c, g, or t
  misc_feature (490)..(490): n is a, c, g, or t
gagacggagcttcacacttgttgcccaggctggagtgcagtggtgcgatctcggctcactgcaaactctgccttctgggttcaagcgattctcccacctcagcctcccaagtggctgggattacaggcgtgcaccaccacgcctggctaattttgtatttttagtagagacaggatttcaccatattggtcaggctggtctcgaactcctgacctcgaatgattcacacaccttggcctcccaaagtgctgggattataggcgtaagccaccacacccaggcagcgcacgtttttttctttttttttttgacacggagtctccctctgtcacccaagctggagtgcagnggcaccatctcggctcactgcaaccgccacatcctgggttcaagcaattcttctgcctcagcctcccaagtagctgggactacaggcgcnagccaccatgcctggctaaantttggatttttgggagaaacanggngnnancctattggcc

SEQ ID NO: 208053 - DNA, 538 bp, Homo Sapiens; identical to SEQ ID NO: 59233
  misc_feature (428)..(428): n is a, c, g, or t
  misc_feature (449)..(449): n is a, c, g, or t
  misc_feature (462)..(462): n is a, c, g, or t
  misc_feature (468)..(468): n is a, c, g, or t
  misc_feature (474)..(474): n is a, c, g, or t
  misc_feature (494)..(494): n is a, c, g, or t
  misc_feature (520)..(520): n is a, c, g, or t
  misc_feature (534)..(534): n is a, c, g, or t

SEQ ID NO: 208054 - DNA, 566 bp, Homo Sapiens; identical to SEQ ID NO: 59255
  misc_feature (463)..(463): n is a, c, g, or t
  misc_feature (491)..(491): n is a, c, g, or t
  misc_feature (507)..(507): n is a, c, g, or t
  misc_feature (529)..(529): n is a, c, g, or t
  misc_feature (551)..(551): n is a, c, g, or t
  misc_feature (554)..(554): n is a, c, g, or t
  misc_feature (565)..(565): n is a, c, g, or t

SEQ ID NO: 208055 - DNA, 568 bp, Homo Sapiens; identical to SEQ ID NO: 59351
  misc_feature (363)..(363): n is a, c, g, or t
  misc_feature (472)..(472): n is a, c, g, or t
  misc_feature (486)..(486): n is a, c, g, or t
  misc_feature (490)..(490): n is a, c, g, or t
  misc_feature (532)..(532): n is a, c, g, or t
  misc_feature (552)..(552): n is a, c, g, or t

SEQ ID NO: 208056 - DNA, 440 bp, Homo Sapiens; identical to SEQ ID NO: 59349
  misc_feature (10)..(10): n is a, c, g, or t
  misc_feature (107)..(107): n is a, c, g, or t
  misc_feature (206)..(206): n is a, c, g, or t
  misc_feature (313)..(313): n is a, c, g, or t
  misc_feature (350)..(350): n is a, c, g, or t
  misc_feature (399)..(399): n is a, c, g, or t
  misc_feature (401)..(401): n is a, c, g, or t
  misc_feature (430)..(430): n is a, c, g, or t
  misc_feature (439)..(439): n is a, c, g, or t

SEQ ID NO: 208057 - DNA, 611 bp, Homo Sapiens
  misc_feature (486)..(486): n is a, c, g, or t
  misc_feature (541)..(541): n is a, c, g, or t
  misc_feature (581)..(582): n is a, c, g, or t
  misc_feature (587)..(587): n is a, c, g, or t
  misc_feature (608)..(608): n is a, c, g, or t
gaaatttccaaattgcttctttttcaactttttattttgaaaaatttcaaacccacagaaaagtttcaagaattgtgcaatgaacaccccatatagccttcacttagattcatctcatcaattaatgtttcatcaaatatgttctctctctctctctctctctgtctctctccatgtgtgtaccccactgaaaatctttttgcagaactatttgggagttttagacagctttgccccctataggctcaaactaatttcagctcagaacaagaacattaacttacataaccaatatatattaaattcatgaaatttaacattgatgtcccaataataccagttatttttcagtcacttttttacagtcatgtttcctactaatctaaaatccaatccaagatcacacactgcatttagtttccaagtctcctgagtttgaaatagttcctcagcctctctttgactttaatgaatatttttgaagantacagaacacttatgaatggaatgtgttgaatttggggtggctgaatggttctcncgatcagatcagtttatgcagttttggggagaaagcttcnnaaatnatatgtgtgttctcctggctnccc

SEQ ID NO: 208058 - DNA, 593 bp, Homo Sapiens
  misc_feature (102)..(102): n is a, c, g, or t
  misc_feature (188)..(188): n is a, c, g, or t
  misc_feature (329)..(329): n is a, c, g, or t
  misc_feature (387)..(387): n is a, c, g, or t
  misc_feature (443)..(443): n is a, c, g, or t
  misc_feature (456)..(456): n is a, c, g, or t
  misc_feature (544)..(544): n is a, c, g, or t
  misc_feature (582)..(583): n is a, c, g, or t
  misc_feature (585)..(585): n is a, c, g, or t
  misc_feature (592)..(592): n is a, c, g, or t
acttcagaaacatttttacttaatttctttaataaattactgcttaaacaccctatctcccaactatatttttacatttcaaaaattatttctaaaacaganttgtaattttaaaaggcacctaccatccatatgacatactgattaatataatcaggatcactgagttgatttattaatggaggaanaattcctcgtgcaaggatttccctgacaaagtatcgcatgatcttgttctggaaatctccaggaggtagcaataaatatagtaagacctcacacaaatcccttaggaatccttcttcatctttgggggaagtgcacactanatcacggcaaacctccttctccatttcaacttcaacttcaaagaaaagtatctacaanatcttctgctgtacctttcacttgatcatctttctctgttattttctgttgagccnttctgaatactcntaagtgtttgccaaagtcatctacaatgcttttattaaaataaaggtgccagtctatttcttttgacctattaccaactgaaataatnctttttgaaaattctgcccatttccaaaaaaaaaatcnncncccttant

SEQ ID NO: 208059 - DNA, 474 bp, Homo Sapiens
  misc_feature (16)..(16): n is a, c, g, or t
  misc_feature (208)..(208): n is a, c, g, or t
  misc_feature (392)..(392): n is a, c, g, or t
  misc_feature (427)..(427): n is a, c, g, or t
  misc_feature (438)..(438): n is a, c, g, or t
  misc_feature (446)..(446): n is a, c, g, or t
  misc_feature (459)..(459): n is a, c, g, or t
acttgacttcaatganctcttcggcttctgaagcacctgtaataggttagatacacccaaaacgggactcaacatcagcttccggctcactgattttcgcaacacagatctctgacagtctttctcagaaatgtatcagtacgttctccaagttgtgagctgttttttcatctttttccgtgtctgctttggcttcccaggaacttanagtttctgctaaatggttaaatagctgcccatgttgcaatcctgggtctttgagaactgcatcaataaaagggatcaacgtgtgcatgtcttcatttgtatcctttgtaatatcatttatagtaaactggtaaattgtttctctgagttctgtgagacagtctagcaaattaagcaaaccccangaaggggtcatggggatcccgaattaaaatttaancttggtgggcnaaaacccnagttaaaaaaccngggggctgccaatgg

SEQ ID NO: 208060 - DNA, 483 bp, Homo Sapiens; identical to SEQ ID NO: 59134
  misc_feature (469)..(469): n is a, c, g, or t
  misc_feature (471)..(471): n is a, c, g, or t
  misc_feature (476)..(476): n is a, c, g, or t

SEQ ID NO: 208061 - DNA, 549 bp, Homo Sapiens
  misc_feature (35)..(35): n is a, c, g, or t
  misc_feature (157)..(157): n is a, c, g, or t
  misc_feature (467)..(467): n is a, c, g, or t
  misc_feature (495)..(495): n is a, c, g, or t
  misc_feature (509)..(509): n is a, c, g, or t
  misc_feature (517)..(517): n is a, c, g, or t
  misc_feature (525)..(525): n is a, c, g, or t
  misc_feature (542)..(542): n is a, c, g, or t
  misc_feature (544)..(544): n is a, c, g, or t
gagatggagtttgactcttgttgcccaagctggantgcaatggtgtgatctcagctcactgcaacctccacctctaccacctgcctcagcctcccaagtagctgggattacaggtactcgccaccacgcctggataatttttgtatttttagtaaanatggggtttcactatgttggccaggctggtcttgaactcctgacctcaggtgatccacctgccttggcctcccaaagtgctgggacagtgtgagccactgctcctggccaactttttaaagtcttctgtaagtttctgattatactttagaagctttacagttttgcctttcacatttaaatcttcaatccacttggaactgaattttatttaatacttaccatatggatacccaattgtctcaaacatcatttattgaaaaatctccatcttttacaccgatccacatatgttttgttccaaaaatggntaagttcatgttctggccttcccctaanttccctcccatccnaaaattanaacccccnttccttaaaaaacaatntnagttc

SEQ ID NO: 208062 - DNA, 566 bp, Homo Sapiens
  misc_feature (13)..(13): n is a, c, g, or t
  misc_feature (174)..(174): n is a, c, g, or t
  misc_feature (190)..(190): n is a, c, g, or t
  misc_feature (216)..(216): n is a, c, g, or t
  misc_feature (234)..(234): n is a, c, g, or t
  misc_feature (241)..(241): n is a, c, g, or t
  misc_feature (301)..(301): n is a, c, g, or t
  misc_feature (405)..(405): n is a, c, g, or t
  misc_feature (457)..(457): n is a, c, g, or t
  misc_feature (490)..(490): n is a, c, g, or t
  misc_feature (528)..(528): n is a, c, g, or t
  misc_feature (534)..(534): n is a, c, g, or t
  misc_feature (552)..(552): n is a, c, g, or t
  misc_feature (556)..(556): n is a, c, g, or t
gtatttttagtanagatgaggtttcaccatgtttgccaggctgatctcgaactcctgacatcaggtgatccacccaccttggcctcccaaagtgctgggatcacaggtgtgagccaccacacccggcccataaacatatatgtttaatcagagctttaatgaaataggatggangtactgaatttgtgantatcctttttgctttttgagacagantctcattttgtcacccangctggantgcagtggtgcaatcatggctcactacaacctctgcttcttggactcaagtgattctcangcctcatgcacccaagtagctgggattacaggtgtaccccaccacaccaagctaatttttgcatttttagtaaaaatagggttttgtcatgttgaccaaactantctcaaaccctggcttcaagtgattccccaccttgggccttaaaaattgctnaaaattaccactgaacccaccctgttgaatatnctttaaataggattataaggtttttgccttggaacaanttttcnggaaaaaaaatccaaaanaaanaacccttcct

SEQ ID NO: 208063 - DNA, 561 bp, Homo Sapiens; identical to SEQ ID NO: 61870
  misc_feature (37)..(37): n is a, c, g, or t
  misc_feature (368)..(368): n is a, c, g, or t
  misc_feature (480)..(480): n is a, c, g, or t
  misc_feature (521)..(521): n is a, c, g, or t
  misc_feature (524)..(524): n is a, c, g, or t
  misc_feature (543)..(543): n is a, c, g, or t
  misc_feature (554)..(554): n is a, c, g, or t

SEQ ID NO: 208064 - DNA, 568 bp, Homo Sapiens; identical to SEQ ID NO: 61143
  misc_feature (39)..(39): n is a, c, g, or t
  misc_feature (171)..(171): n is a, c, g, or t
  misc_feature (327)..(327): n is a, c, g, or t
  misc_feature (351)..(351): n is a, c, g, or t
  misc_feature (355)..(355): n is a, c, g, or t
  misc_feature (363)..(363): n is a, c, g, or t
  misc_feature (366)..(366): n is a, c, g, or t
  misc_feature (376)..(376): n is a, c, g, or t
  misc_feature (454)..(454): n is a, c, g, or t
  misc_feature (495)..(495): n is a, c, g, or t
  misc_feature (499)..(499): n is a, c, g, or t
  misc_feature (520)..(520): n is a, c, g, or t
  misc_feature (524)..(524): n is a, c, g, or t
  misc_feature (548)..(548): n is a, c, g, or t
  misc_feature (560)..(560): n is a, c, g, or t

SEQ ID NO: 208065 - DNA, 568 bp, Homo Sapiens
  misc_feature (5)..(5): n is a, c, g, or t
  misc_feature (205)..(205): n is a, c, g, or t
  misc_feature (239)..(239): n is a, c, g, or t
  misc_feature (510)..(510): n is a, c, g, or t
  misc_feature (549)..(549): n is a, c, g, or t
ctttnaatttatctatgaactcataggtccttcatctttcttttgttggacattaaatgctttgggaaaggttttggggtctgggtgctgacttttgaatccccctgattattattttttaaaaaattccttatattatttcggtgggcagcattattttatcccactgcgggtcctgagcagggaatttatgatttgctgccanaacattttgacctggaggatgtttacgttcccanatcgtatttctttttttccttgaaaaaataatacctaggatgcacactgattcagcccaagtatataactgtgggcctaaaaactgatcaatttgatctgccaccctgttaggattatttaacagtggctttagttctctttttatactccaaacttcagacccagtaaggggagcatccacaaaaccaatagcttctcctccttggggaactttccttaaaggaaaaaatgttgaaatttactttttgggggggcaggaaaaagggaaantctgaatatcctcctacattgttttaatttttgttgganttctttcctttaaaaaaag

SEQ ID NO: 208066 - DNA, 604 bp, Homo Sapiens; identical to SEQ ID NO: 58515
  misc_feature (453)..(453): n is a, c, g, or t
  misc_feature (496)..(496): n is a, c, g, or t
  misc_feature (500)..(500): n is a, c, g, or t
  misc_feature (539)..(539): n is a, c, g, or t
  misc_feature (584)..(584): n is a, c, g, or t
  misc_feature (593)..(593): n is a, c, g, or t
  misc_feature (600)..(600): n is a, c, g, or t

SEQ ID NO: 208067 - DNA, 588 bp, Homo Sapiens
  misc_feature (34)..(34): n is a, c, g, or t
  misc_feature (169)..(169): n is a, c, g, or t
  misc_feature (382)..(382): n is a, c, g, or t
  misc_feature (405)..(405): n is a, c, g, or t
  misc_feature (410)..(410): n is a, c, g, or t
  misc_feature (413)..(413): n is a, c, g, or t
  misc_feature (465)..(465): n is a, c, g, or t
  misc_feature (470)..(470): n is a, c, g, or t
  misc_feature (527)..(527): n is a, c, g, or t
  misc_feature (542)..(542): n is a, c, g, or t
  misc_feature (548)..(548): n is a, c, g, or t
  misc_feature (573)..(573): n is a, c, g, or t
  misc_feature (587)..(587): n is a, c, g, or t
gagacggagtctcactttgcttcccaaggtggantgcggtggtgtgatctcggctcactgcaacctctgccccccgagttcaagtgattctcctgcctcagcctcccaagtagttgagattacaggcaactgctactgcgcccagctaatttttgtatttttagtaaanatggggtttcaccatcttggccaagctggtcttgaactcctgacctcaggtgatccactggcctcggcctcccaaagtgctgggattacaggcgtgagccacagcgcctgtccaatcacaggattttaaattgtataatcagagtccaagtctctggttggttgtttttatgcagattgtttgaactgagtctcagtttacatctaagtgaanccagtacttgcctgattgtatanggtancantatgcaaactaaattttggaattgtcagtaatgaacattatttaacacacanggcantgatattgggtatattttttatgtctccccttgttccctaacttattccccatgccnaacttaagtttacantaggtnccaataatatatgttgaatattccncccggaatttagang

SEQ ID NO: 208068 - DNA, 567 bp, Homo Sapiens
  misc_feature (46)..(46): n is a, c, g, or t
  misc_feature (82)..(82): n is a, c, g, or t
  misc_feature (87)..(87): n is a, c, g, or t
  misc_feature (226)..(226): n is a, c, g, or t
  misc_feature (267)..(267): n is a, c, g, or t
  misc_feature (309)..(309): n is a, c, g, or t
  misc_feature (344)..(344): n is a, c, g, or t
  misc_feature (382)..(382): n is a, c, g, or t
  misc_feature (442)..(442): n is a, c, g, or t
  misc_feature (453)..(453): n is a, c, g, or t
  misc_feature (472)..(472): n is a, c, g, or t
  misc_feature (502)..(502): n is a, c, g, or t
  misc_feature (546)..(546): n is a, c, g, or t
  misc_feature (562)..(562): n is a, c, g, or t
ctctttattgactgttttattaagcatgcccctctgctccactcanaactgaggagtctacaaaaactgtgggcaatccaanaaggntggttattttcctgctttctgccaacccaaagcaaactgctctgccatgtctgtttgtatttcctgaatcctgagccctcaaaacactgctttatgaagtcaacaatgccaaaactgaaatttgcatttctattctaanatatagctgacaaaatgtccttttctcctgcatcctctcanaaaacacttaataacatctaagtttattttctaaggatcaanaaaacaaagttttctcatgaattgctgaatgatantttttcttgccaagggctaaaaattcaggatacccccnaatcaaattttcctaaaacaaaatatattacaggtgatttgctgcaatcatgaaacacanccttccgaaanttcatattccatctaattngttcgaaacatctaaaatgaatccatttcnttacaaaaagttggttgtgcaatcccttccaaaaaaaccaattnttaaaaaatccttaantttat

SEQ ID NO: 208069 - DNA, 482 bp, Homo Sapiens; identical to SEQ ID NO: 61378
  misc_feature (58)..(58): n is a, c, g, or t
  misc_feature (62)..(62): n is a, c, g, or t
  misc_feature (91)..(91): n is a, c, g, or t
  misc_feature (100)..(100): n is a, c, g, or t
  misc_feature (134)..(134): n is a, c, g, or t
  misc_feature (387)..(387): n is a, c, g, or t
  misc_feature (402)..(403): n is a, c, g, or t
  misc_feature (408)..(408): n is a, c, g, or t
  misc_feature (413)..(413): n is a, c, g, or t
  misc_feature (426)..(426): n is a, c, g, or t
  misc_feature (481)..(481): n is a, c, g, or t

SEQ ID NO: 208070 - DNA, 474 bp, Homo Sapiens; identical to SEQ ID NO: 59276
  misc_feature (113)..(113): n is a, c, g, or t
  misc_feature (190)..(190): n is a, c, g, or t
  misc_feature (226)..(226): n is a, c, g, or t
  misc_feature (288)..(288): n is a, c, g, or t
  misc_feature (293)..(293): n is a, c, g, or t
  misc_feature (314)..(314): n is a, c, g, or t
  misc_feature (317)..(317): n is a, c, g, or t
  misc_feature (329)..(329): n is a, c, g, or t
  misc_feature (369)..(369): n is a, c, g, or t
  misc_feature (393)..(393): n is a, c, g, or t
  misc_feature (397)..(397): n is a, c, g, or t
  misc_feature (409)..(409): n is a, c, g, or t
  misc_feature (441)..(441): n is a, c, g, or t
  misc_feature (443)..(443): n is a, c, g, or t
  misc_feature (454)..(454): n is a, c, g, or t
  misc_feature (469)..(469): n is a, c, g, or t

SEQ ID NO: 208071 - DNA, 569 bp, Homo Sapiens
  misc_feature (48)..(48): n is a, c, g, or t
  misc_feature (117)..(117): n is a, c, g, or t
  misc_feature (230)..(230): n is a, c, g, or t
  misc_feature (300)..(300): n is a, c, g, or t
  misc_feature (381)..(381): n is a, c, g, or t
  misc_feature (393)..(393): n is a, c, g, or t
  misc_feature (436)..(436): n is a, c, g, or t
  misc_feature (494)..(494): n is a, c, g, or t
  misc_feature (528)..(528): n is a, c, g, or t
  misc_feature (531)..(531): n is a, c, g, or t
  misc_feature (558)..(558): n is a, c, g, or t
  misc_feature (564)..(564): n is a, c, g, or t
  misc_feature (568)..(568): n is a, c, g, or t
agctcatcatctattattagtgttagcgtattttatgtgtggccgaanacacattcttcttctaatgtggcccaggaaagtcaaaagtttggacacccctgctctaaggcaaggaanaaaatgttttgttaaaccattctaatttgggcaacaatattattgactgtgataaagataacaacaatgatgaattgatgacacttttgtaaattgctttatagttcaaagancattttcacatatatttgtttaaatatctgtctttcctacttctgaatttcttgagggtatgtctgaaanttttaagtatgaattccagcattatctgagcaaatccaggcctcagtttcctttaggtataaaggtttgtgttttggatanttttaagtgtanacacagggcacatgtatgcttttaattcagttcttcaattaanatgatctttggaggaaaaaactctcctgatgaattttaaaaaacaaacacaggtttanatacaaaaaaactctggctggcatctggcgggantantaataatgggcctcttacattgttcangaaagngtgna

SEQ ID NO: 208072 - DNA, 543 bp, Homo Sapiens
  misc_feature (424)..(424): n is a, c, g, or t
  misc_feature (445)..(446): n is a, c, g, or t
  misc_feature (461)..(461): n is a, c, g, or t
  misc_feature (468)..(468): n is a, c, g, or t
  misc_feature (502)..(502): n is a, c, g, or t
  misc_feature (522)..(522): n is a, c, g, or t
  misc_feature (536)..(536): n is a, c, g, or t
ggtggtgatagttacacaacattatgaatgtgtttaattccactgaactgtgttcttaaaaatggttgagatggtaaaatttatgttctatgtattttaccacaataaaatgaaattgatagggaaaagatgaggcaagtacatttgtaaggaaaacagaaagcttggaccaattcttatatataaagcaagtaatatttcatgtataatcttaatctcagatggtaggtaaagaccactgtaaaactaaccagtacccttgagtgtcacaggcacatttcatttccaaagcttatgagattgtaagtaaccagaaccacttgacaagatacctgaataaatgaagcgaaggatgtctgataaacaagaacagaagagggcgtctttaacaatgactcgtaatggtgggttgcctgaagattcntggctagcacctggaaatgcnntatctctgtttatanccaaaanattctggggtttttcccgaaaaaaccggaatccngaatttcttggaaacccccnttgaaaaccccttnaaacctg

SEQ ID NO: 208073 - DNA, 479 bp, Homo Sapiens
  misc_feature (309)..(309): n is a, c, g, or t
  misc_feature (429)..(429): n is a, c, g, or t
  misc_feature (435)..(435): n is a, c, g, or t
  misc_feature (439)..(439): n is a, c, g, or t
  misc_feature (441)..(441): n is a, c, g, or t
  misc_feature (443)..(443): n is a, c, g, or t
  misc_feature (461)..(461): n is a, c, g, or t
  misc_feature (476)..(476): n is a, c, g, or t
aactttaacctaaaactttaattggaaagacaatcttataaaaatcttataacatattctagaaatggtccaaatactatcacaaatggaagaaagttcagcttgaggagcatccaatcatgtgaggtaaaagtcttctagtagaaccagcatgatcttccagaaaattacaaagtaaccattatctaccccgtcatctccttcttgcctggcatccccagagctgaagaaagggaagaaaaaaaatggatttgttttttgccatgaaaaatcttaacgtaaagattaatgcatcttgctgcttaaganaaaggtgttactttcactcggggtaaattaaatactaggattgagactaatctgttcacagccaaataggggtttactgaagctccaacgtttgaataaagaccacttattgggaagacncccccnaatncntnttattccttccctccacnaatttttattaagcntcc

SEQ ID NO: 208074 - DNA, 588 bp, Homo Sapiens; identical to SEQ ID NO: 59164
  misc_feature (81)..(81): n is a, c, g, or t
  misc_feature (147)..(147): n is a, c, g, or t
  misc_feature (155)..(155): n is a, c, g, or t
  misc_feature (158)..(158): n is a, c, g, or t
  misc_feature (202)..(202): n is a, c, g, or t
  misc_feature (213)..(213): n is a, c, g, or t
  misc_feature (249)..(249): n is a, c, g, or t
  misc_feature (308)..(308): n is a, c, g, or t
  misc_feature (310)..(310): n is a, c, g, or t
  misc_feature (340)..(340): n is a, c, g, or t
  misc_feature (344)..(344): n is a, c, g, or t
  misc_feature (352)..(352): n is a, c, g, or t
  misc_feature (400)..(400): n is a, c, g, or t
  misc_feature (415)..(415): n is a, c, g, or t
  misc_feature (429)..(429): n is a, c, g, or t
  misc_feature (438)..(438): n is a, c, g, or t
  misc_feature (503)..(503): n is a, c, g, or t
  misc_feature (515)..(515): n is a, c, g, or t
  misc_feature (518)..(518): n is a, c, g, or t
  misc_feature (549)..(549): n is a, c, g, or t
  misc_feature (567)..(567): n is a, c, g, or t
  misc_feature (580)..(580): n is a, c, g, or t

SEQ ID NO: 208075 - DNA, 533 bp, Homo Sapiens
  misc_feature (204)..(204): n is a, c, g, or t
  misc_feature (216)..(216): n is a, c, g, or t
  misc_feature (297)..(297): n is a, c, g, or t
  misc_feature (313)..(313): n is a, c, g, or t
  misc_feature (350)..(350): n is a, c, g, or t
  misc_feature (390)..(390): n is a, c, g, or t
  misc_feature (442)..(442): n is a, c, g, or t
  misc_feature (445)..(445): n is a, c, g, or t
  misc_feature (462)..(462): n is a, c, g, or t
  misc_feature (470)..(470): n is a, c, g, or t
  misc_feature (477)..(477): n is a, c, g, or t
  misc_feature (479)..(479): n is a, c, g, or t
  misc_feature (525)..(525): n is a, c, g, or t
cagtaaagacggagtttcaccctattggccaggctgatctcgaactcccgacctcaggtgatccacctgcctcggtctcccaaagtgctgggattacaggcgtgaaccaccgcacctggccaaatccttgttttaacccatatactccataaaataaccctgccaaggtgggactgtcctggccccctgtctctaggtgagganactgaggcaganaggctaagggacctgctgcaggtcacgcaggtgctgagcggcagtgcctcggtattagctccatgacccaagctgttgacntctgcccgggctgaantcaccacttccccagggctccctccgcccagtcgganctgttctccgctcacctcagaatggacggcaaacgtccanctgttctgggtcttcctctcctgggcctggttacatcaagggctggttgcangtnacacccactccatccanggtttctncaccacnanggaaccccctgcttgctgccctggttctccggccacaaccctcctngttttggg

SEQ ID NO: 208076 - DNA, 550 bp, Homo Sapiens
  misc_feature (468)..(468): n is a, c, g, or t
  misc_feature (476)..(476): n is a, c, g, or t
  misc_feature (492)..(492): n is a, c, g, or t
  misc_feature (501)..(501): n is a, c, g, or t
  misc_feature (536)..(537): n is a, c, g, or t
  misc_feature (545)..(545): n is a, c, g, or t
ccgaagagtggtgaggagggcaggacaatttctagaggcaggggaatctgaaagtttcatgccaggggaatggagctcagtttatcttcgaagcccttctccccatcccaggggggccccttacccacgcctgcattattgaacatgccgggaagcaccagcatgatgtggttgggccagtacttgcggtacagaggcatctcatactctttgaccaccaggaggtgaaggtggctgatgccctccatggcgtggaaaaggtttaggagtccgtgctcatgtcgaccactggaaggagtgaaaatagggctcttgactgcattcaaattcttgtctgaaaccaggggcagccgcatgctctccaggtgcttgccctgcttgctgaagacaaaatgactctctttggatttgggaatgatgaaatatagctgaacctcttctcccagcatagaagaagagaatgtgaangcatgaanggtggagtcagacatntggaagcanaagtgaaatccatgtactggcggacttgttacaannggtgaaanggggt

SEQ ID NO: 208077 - DNA, 553 bp, Homo Sapiens
  misc_feature (469)..(469): n is a, c, g, or t
  misc_feature (528)..(528): n is a, c, g, or t
  misc_feature (537)..(537): n is a, c, g, or t
gagacatagtctcactgtgtcgcccaggctgcagtggcatgatctcagctcactgcaacctccgcctcctgggttgaagtgattctcatgcctcagcctcccaagtagctgcgatcacaggcacacgccaccacgcccagctaatttttgtatttttagtagagacggggcttcaccatgttggtcaggatggtctcgacctcttgactttgtgatccgcccacctcggcatcccaaagtgttgggattacaggcgtgagccaccacgcccggcctcaactcttaatatatgtcagcccctcctttgcaaccagctctgcgtgctgctgctgacaagcagcatggtgtggaggcatgggatgtcctagagtccagccaacctgagctctgtgatcttgggcaagttatttcccttctttgagtgtcaagttttcttcatctattaaatggggtcatcactttcacttgncctgaaaagtatccagataatacacagttagcacagtgcctggcccacagtaaaccttngaatggtgnagcttcatgaaaaaaa

SEQ ID NO: 208078 - DNA, 561 bp, Homo Sapiens
  misc_feature (532)..(532): n is a, c, g, or t
gatacagagtctcactgtgccacccaggctggagtgcagtggcgtgatcttggctcactgcaagctccgcctcctgggttcacgccattctcctgcctcagtctcctgagtagctgggactacaggcgcccgccaccaagcctggctaattctttttgtatttttagtagagacggggtttcaccgtgctagccaggatggtctcgatctcctgacctcgtgatccgcccgccttggcctcccaaagtactgggattacaggtgtgagccactgtgcccggcccaatttgttttttaagccctgatgttttctcagttgggtttgaactcagtccctctacaaagtcattctaaactattcctagactgatagaccattcttggattggaccattcctggattgggcaatggcaacactcttccagaaaccattagaatgactctaaagagagcagaagcactttttctctctgcctcttcctaaaggctgaatatatcctattggccatgggctggtcaattccttttgangtgagggattgactccttctcaactcccc

SEQ ID NO: 208079 - DNA, 550 bp, Homo Sapiens
  misc_feature (73)..(73): n is a, c, g, or t
  misc_feature (124)..(124): n is a, c, g, or t
  misc_feature (158)..(158): n is a, c, g, or t
  misc_feature (440)..(440): n is a, c, g, or t
  misc_feature (476)..(476): n is a, c, g, or t
  misc_feature (491)..(491): n is a, c, g, or t
  misc_feature (501)..(501): n is a, c, g, or t
  misc_feature (521)..(521): n is a, c, g, or t
  misc_feature (532)..(532): n is a, c, g, or t
  misc_feature (534)..(534): n is a, c, g, or t
  misc_feature (542)..(542): n is a, c, g, or t
ccaagtcccttattttactgatgagaaaacagccagagagtgaaagctgatgattacaaatcacagccatganagctgggctctgcactcagccctgctgggctgggtggccgctgctcacggngacccttcaaggcaggcctcattctgtccagtanaggtgtggttactaagtcatagagctacagaggtgagggaccaggtgccctcactttggttccaagacccatctgcaccccacaaatgccaccagccacacctagaacaaaatggttttaatcaattgcgtcaccctcactctcctgggagcggagcaacaaaaaggctcggctcctgcccccagaggacagtaaggcttatgtgtctctccacactgcagggcccaggctgggcaggcagggggtgggaagcaggacagggggcagggaaggaaggttggnaggcagggaaggaaatggcaggtggctggaacccangaaagccaagggganccaacttggnccttgggccccagggcccanccccaatactncngttttccnttttcctg

SEQ ID NO: 208080 - DNA, 548 bp, Homo Sapiens
  misc_feature (520)..(520): n is a, c, g, or t
agctcatctgctatggttagtgttagtgtactttatgtgtgacccaagacaattcttcttttcccaaggtgccacagggaagccaaaagattggacaccctgttctagatcatcccatccagtagtgttcaaacttttatttttacagctaaattcctcaagcagatgggctcctgtgtggaatcacaatgatgctggttaagattcactgaatgcttgctatatatcaggctctgtttggagcccagcatatatatatatataatctcagttaatcccacagtacctgatgagggaggtactgctgtttgtcccatttattttttatttatttattttattttattttttttgagatggagtttcactcttgttgcccaggctggggtgcaatggcgcaatctcggctcaccacaacctccgcctcccaggttcaagcaattctcctgcctcagccttccaagtagctgggattacaggcacgcaccaccatgcccgggtaatttggtatcttttttantagaaaatggggttctccatggttggtc

SEQ ID NO: 208081 - DNA, 550 bp, Homo Sapiens
  misc_feature (480)..(480): n is a, c, g, or t
acaacaattcgtttgttttttataaaaaaaaaaagaaaggaaaaaaccaaagaggcgaaatgaggactcactgggagagcgcggccaggctgcgtcttccatgcgatccggatccacccagcatgtccgcagttgggaaggggcggcggggcagagagatacggagacctggccaggccgggcggtcagggcgtgggctgggcccgcggaggggccatgtgatctgtggctgaaatgcacggtgcaggatgctcccgtgttctccctttgtgttaacacgttggtctgtccctgtgacgaaagtctgggcttgtcctcagccaaatctactcctcccaacccgttccctcctcacaggatcatcagagagctgattgttattttttactgtaatctctctaatagaagcccatcatgtttagcgatcagagagcactgattgcttcgggagttccggaaatgttattgctgggtagtcanggcccaggatcttcagtagttttcctgatgaagactttatatgcttacttcaaataatttttccaaggaa

SEQ ID NO: 208082 - DNA, 578 bp, Homo Sapiens
  misc_feature (520)..(520): n is a, c, g, or t
  misc_feature (537)..(537): n is a, c, g, or t
  misc_feature (552)..(552): n is a, c, g, or t
  misc_feature (562)..(562): n is a, c, g, or t
  misc_feature (575)..(575): n is a, c, g, or t
cttttttttttttttgcctcagagtttctcaagctttctgactttgatcaacagtctaccaaggatatactttaaaattttacagtaatcaatatcataacagcagctaacagtacactgggtgaggatggtacttaaataattatttattgagttgcttacagaagagaggtctcccaagtcccaaatcaacttcacaaatattttattagtacttacaatatacaaaaacctttttctaagctctgccctacagattaataaaaaggagcttaaaatgaagggaaggagagagaaaaagacaaaagattaatacacaagttatggtacttctaagcaggaaagaagctgcttaacttggttgggatgggagaggggtggtttcaagccagaagctgaacagcatgttgagatgctaaaataaggaagatattccagaaagaggacaggcacagaatctccacgtgaaatttcctgtagactagtaagaaaatcaagtgagatcaacaggagaaagatntaagaagaaaactccanggccaggcacacggntcatgcctgnaatccagcctttngga

SEQ ID NO: 208083 - DNA, 562 bp, Homo Sapiens
  misc_feature (491)..(491): n is a, c, g, or t
  misc_feature (545)..(545): n is a, c, g, or t
  misc_feature (557)..(557): n is a, c, g, or t
gaggactgcaaggcacaactgtgcagacaggcagagaagcctcagcacctgtgggaaaggaacgaatccatttctgtctgctcatttcccacccatgagtgtggacagccttcctgtccctggagtgtccaggcctgcctggactgagtctgtccctctccctccccttgcaaaggctgagagtgttctggatgtggctctgaaagaatgccaaggtctatcaggtgggtccaccacagccctagcccaggatgtccctcacctgtgtccattcccccagcaaagtcctcatcataggagtcatcagtggagtcctcgccatccaccgaagaccatgctcggagcttggcttccgcgatggcaaactgctcagccactcctgtcgcagggacagaatgcataagcagagaaggtgagttaagtctagggctcagcttgaagacaggagagaggagaaacagggtatgggaagactccaacccccatgtcanacccgaggagataaagaaagcaccctggccggtgtggtggcttaagcctggaancccagcactttnggaag

SEQ ID NO: 208084 - DNA, 546 bp, Homo Sapiens
  misc_feature (356)..(356): n is a, c, g, or t
  misc_feature (495)..(495): n is a, c, g, or t
gggatggagtcttgctgttgcccaggctggagtgcagtggcacaatctccgcttactgcaacctccacctcccaggttcaagcagttctcctgcctcagactcccaagtacctgggattacaggtgtgtgccaccacactcagctaattgtttttttatttatttttgagatggagtgtcgctctcttgcccaggctggagtgcagtggcgccatctcggctgactgcaagctctgcctcctgggttcatgccattctcctgcctcagcctcctgagtagctgggactacaggtgcccgccgccatgcccggctttttttattttttttttttttttttttgtagttttggtaganacggggtttcaccgtgttagcccggatggtcttgatctcctgacctcatgacctcatgacctgtccgcctcggcctcccaaagtgctaggattacaggcatgagccactgtgcccggcttggattggattttagcaganacggggtttcactatgttggccaagctggctcaaactggtgactcaaagaa

SEQ ID NO: 208085 - DNA, 566 bp, Homo Sapiens
  misc_feature (487)..(487): n is a, c, g, or t
  misc_feature (507)..(507): n is a, c, g, or t
  misc_feature (564)..(564): n is a, c, g, or t
gagagtctcgctctgttgcccaggctggagtgcagtggcgcgatcatggctcactgcaacctccgaccccggcgttcaagcaattctcctgcctcagcctccctagtagttgggattacaggcatgcgctaccaagcccagctaatttttgtgttattagtagagagggtgtttcaccatgttggccaggttggtctcgaattcctgacctcaagtgatccgctcgctcgcctctctaccttccaaaattctggaattacaggtgtgagccaccacgcccggccagggatgtggttttataaactatgaactaactctccatgctatgttgttcttgttaattcatttctctcatagataattaaaaacaaaaaacaagaaaacaaaatccaacaagcaggcataagattatatgggagctttattaactaaatgccctaggttatattcaaagcagaatcacccagcactcctcaggagactgcancatggggtaaaattgggtgnactttgaggacattttggatatcctaatgaaacatggaccttcctggggttcttaangc

SEQ ID NO: 208086 - DNA, 550 bp, Homo Sapiens
  misc_feature (109)..(109): n is a, c, g, or t
  misc_feature (124)..(124): n is a, c, g, or t
  misc_feature (136)..(136): n is a, c, g, or t
  misc_feature (157)..(157): n is a, c, g, or t
  misc_feature (222)..(222): n is a, c, g, or t
  misc_feature (349)..(349): n is a, c, g, or t
  misc_feature (357)..(357): n is a, c, g, or t
  misc_feature (432)..(432): n is a, c, g, or t
  misc_feature (453)..(453): n is a, c, g, or t
  misc_feature (503)..(503): n is a, c, g, or t
  misc_feature (509)..(509): n is a, c, g, or t
  misc_feature (514)..(514): n is a, c, g, or t
  misc_feature (524)..(524): n is a, c, g, or t
  misc_feature (537)..(537): n is a, c, g, or t
ggatcataagtatcttcaagaccaaaataattttctactcctgagcatgctcattggtcaaaggaaggaaggaatcataatagcgttaataaggctagcgtcttttcanaagttggttctttgngccagtcttggngctagacacaccgataggaanaaaactccttcacatccccaggacaccaacatgggatacgtttgatcatcattcttaatttgcanaaggagaaataggctcagtgagatgaaatagccactccagtggcaaggctgggactggaagccgggcttgtcctgattccaaatccagtttctttccactgccacggagacggagagaagggacagnggccccanatggggatggggtgactggatgtgggcaggcctgcgggggaagagtgccctctgttgagcatccgaatgatggcnccagaaaagaaaactgggcanaatcccagttattaaaatcccctgaggggaacaggtcaccccgacccctnaggcanaagangggggggaanacaaggcccatanatgaaggccctgg

SEQ ID NO: 208087 - DNA, 549 bp, Homo Sapiens
  misc_feature (408)..(408): n is a, c, g, or t
  misc_feature (451)..(453): n is a, c, g, or t
  misc_feature (505)..(505): n is a, c, g, or t
  misc_feature (514)..(514): n is a, c, g, or t
  misc_feature (529)..(529): n is a, c, g, or t
  misc_feature (548)..(548): n is a, c, g, or t
atgattattatggttaagaattttattatcaaaattattacatctcttgtgaaagttcaaatgttacagcaaggtgtaaacactccacttgagaaagaagtgatacttcttcccttccaagagttccccccaccccccgcccctacccccccaagaggtctggtcttgacagcaccctgcccacacagagtggctggggtctctgcacgtgccaggcagggtgagggccgcctgcccgctggcctctccccttggttaaatagccaaggggagaatgcaaaccccagcccaaatggagagacatttacatacgttttatataatatacaaagaaaccagcatcccaggcaacatgatttccactcccaatgctctcccagactgatgggtttgtgggggaaacaacanaaagaaaagtacactgctgaggtctcagcatttaaaaaaaaannnaaaaaaaatctcccctcatttgagcaaacacctgatttcgattttgaaaagngaaatttgnaacaagtcacacccnaagaggagaagactgtgcnt

SEQ ID NO: 208088 - DNA, 554 bp, Homo Sapiens
  misc_feature (385)..(385): n is a, c, g, or t
  misc_feature (440)..(440): n is a, c, g, or t
  misc_feature (465)..(465): n is a, c, g, or t
  misc_feature (510)..(510): n is a, c, g, or t
  misc_feature (534)..(534): n is a, c, g, or t
  misc_feature (544)..(544): n is a, c, g, or t
  misc_feature (546)..(546): n is a, c, g, or t
cttttttttttttgaaacagcgtctcactctgtcgcccagactgctggagtgcagtggcgcgatctcgactcactggcaacctccacctcccaggctcaagcaattctcctgcctcagcctcccgagtagctgggattacaggcgcatgccactaccgcccggctaatttttttagtagagacggggtttcgctatgttggccaggctcctgacctcaaatgatctacccaccttggcctcccaaagtgctgggattataggcatgagccaccgtacctagccctcaatgcaactttctaaaaaatgcctactacaaatctcttaactaatgactctcttaggctgctgcaatacagaatttctttttttttcttttttttttanagacagggtctcgctctgtcacccaggctggagtgcaatggcacaatcacagctnactggagcctcaaactcctgggctnaggcaatcttccaccttagcctccaagtagttgggactaccaagnggcaccaacatcctgggcaatttnaaaattttgnanaaaccggg

SEQ ID NO: 208089 - DNA, 561 bp, Homo Sapiens
  misc_feature (525)..(525): n is a, c, g, or t
  misc_feature (545)..(545): n is a, c, g, or t
  misc_feature (550)..(550): n is a, c, g, or t
  misc_feature (554)..(554): n is a, c, g, or t
aaacagagtctcactcactctgtcgcccaggctggagtgcagtggcatgatctcggctcacagcaacctccacctcccaggttcaagcaattctcctgcctcctactcctcccatgtagctgggattacaggtgtgtaccaccatgcctggctaacttttgtatttttagtaaagacggggtttcaccatgtcagccaggctagtcttgcactcctggcctcaagggatctgcctaccttggcctcccaaagtgctgggattacagacatgagccaccgcacccagcctggttgggagaatgttctattgattccctaggatgctaggaagtactcagcaaatactaaatgtagcaattctcaggggttaggaggagttcaagataaatgagtattgtaaacacagtagtccaggtaagttaagcccccatgccctcttcaggaggcctggtctctggacacttacagaagaaaagtccacccctcgtatacaggccttccatagcttacttctcaacagactgnagcttcaacctgaaacaccnttttncatnttactaa

SEQ ID NO: 208090 - DNA, 575 bp, Homo Sapiens
  misc_feature (486)..(486): n is a, c, g, or t
  misc_feature (492)..(492): n is a, c, g, or t
  misc_feature (532)..(532): n is a, c, g, or t
  misc_feature (570)..(570): n is a, c, g, or t
  misc_feature (574)..(574): n is a, c, g, or t
aaagacagagtctcactctgttgcccaggctggagtgcagtggcatgatcttggctcactgtaacctccacgtcccaggttcaagcaattctcctacctcagacccccaagtaactgggactacaggctaatttttgtatgtttagtgaagactgtttccccatgttggccaggctggtctcgatctcctgatcacacgtgatccacccacctcggcctcccaaagtgctgggattacaagtgtgagccaccatgctcggccccagaggcacgtttctaagtcctgaatctgcagtgctggctacaggcaaccttccctgccattgacaagtgttatcaatctgtttgacttggctatatgcataaccaagggccctgacttcccatctccaacaaggaaccacttttcttaatgcagttctggagcaaatccagatgtttgtcaaagcttgactgcccgcatgctccctgacccatcccccaaanggcttntagaacaaacaataagccatggcaaggttctggcacgganccaagccttggaaaaactagtttggaggtaaggcttgnccang

SEQ ID NO: 208091 - DNA, 542 bp, Homo Sapiens
  misc_feature (249)..(249): n is a, c, g, or t
  misc_feature (405)..(405): n is a, c, g, or t
  misc_feature (410)..(410): n is a, c, g, or t
  misc_feature (432)..(432): n is a, c, g, or t
  misc_feature (466)..(466): n is a, c, g, or t
  misc_feature (524)..(524): n is a, c, g, or t
  misc_feature (533)..(533): n is a, c, g, or t
  misc_feature (537)..(537): n is a, c, g, or t
gagacaggttcttactctgtcacccaggctgaggtgcagtggatctatctcggctcactgcagccttgacctcccaggctcaggtgatcattccacctcagcctcctgagtagttgggactataggcacatggcaccacgtccagctagtttttgtattttttttgtagagacgaggtttcgccatgttgccccggctaggcttgaactcctggcctcaagcgatccactcgcctcggcctcccaaagngctagaattacaggcatgaggtactgagcctggcttgacttataattctgatgaaaatgttcaatgtcaacttaagaatgggcaagggagcacatgggcttttggaattcttttttttttttgagacggagtcttgctctgtcacccaggctggantgcantggcgtgatctcggctcactgnaaccttcgcttccgggttcaagcgattctcctgnctaaccttccaagtactgagaatacaggcatgcaccaacacgcccagctaatttgganttttagganaaanggggg

SEQ ID NO: 208092 - DNA, 489 bp, Homo Sapiens
  misc_feature (480)..(480): n is a, c, g, or t
  misc_feature (488)..(488): n is a, c, g, or t
gagacagagtcttgctctgtcacccaggctggagtacagtggcatgatctcaactcaccacaacctctgcctcctggttctcctaaatcgctgaagcgtttctcctgcttcagtctcccgagtagctggggttacaggcacaagccaccacgcctggctagttttttgtatttttagtagagttggggtttcaccatgttggccaggctggtctcaaactcctgacctcaagtgatccgcccacctcggctccccaaagtgctgggattacaggcgagagccaccacacctggcataaaatacattctttaaattcatattatctgcttctttttacttcttttaatgtggctcctggaaaatctaaaatttgattttagatctatggctccattatagcattcctattgggcagtgctggtcttcctttccatgagaaccctttagctgggaaaagtttttctggactaattttttttnaaattttna

SEQ ID NO: 208093 - DNA, 548 bp, Homo Sapiens
  misc_feature (474)..(474): n is a, c, g, or t
  misc_feature (505)..(505): n is a, c, g, or t
  misc_feature (547)..(547): n is a, c, g, or t
ggagatggagtttcactcttgttgcccaggctggagtgcaatggcatgatctcgctcactgcaacctccgcctcccaggttcaagtgattctcctgcctcagcctcccgagtagctgggattacaggcgtgcaccaccacacccagctaatttttgtatttttagtagagacagcgtttcaccgtgttggccagcctggtctcgaactcgagacctcaggtgatccccctgcctcggcctcccaaagtgctgggattacaggcgtgagccaccacgcccggcgtcctttgtaaggtttctatccactatgaattcttcgatgttttgcaaggtttgaattttgagtaaagaccttgccacattggttacatttgtaaggtttgctccagtatggattgccatatgggtaagttagggttgaacgaacactgaaggctttccacactcattacacctataagggttttttccagngggaattcttctatgatttgcaagatgggangttttgaagtgaagaccttgccaaattcgttacatttggaang

SEQ ID NO: 208094 - DNA, 512 bp, Homo Sapiens
  misc_feature (417)..(417): n is a, c, g, or t
  misc_feature (436)..(436): n is a, c, g, or t
  misc_feature (466)..(466): n is a, c, g, or t
  misc_feature (468)..(468): n is a, c, g, or t
  misc_feature (494)..(494): n is a, c, g, or t
  misc_feature (502)..(502): n is a, c, g, or t
  misc_feature (508)..(508): n is a, c, g, or t
aaccaacttagttcagcatccttatctcattatgccttagctacttgaaggtgatctatgcatcctctttcacacttaaataatcaagaggtgaacctggcaaatttatacttatacttcaagatttaggttgaagttatcattctctatgaatactcccatgtgcatggttcatttattacagtgctgtaattactctttttttaaagttgtttaattttctttttttttattatactttaagttttagggtacatgtacacaacgtgcaggtttgttacatatgtatacatgtgccatgttggtgtgctgcacccattaactcgtcatttaacattaggtatatctcttaatgctatccctcccccctccccccaccccacaacaggccccagtgtgtgatattccccttcctgngtccatgtgttctcatcgntcaattcccacctatgagtgagaacatgcngnggttgggtttctggccctgggtcagnttgcccanaatganggtt

SEQ ID NO: 208095 - DNA, 578 bp, Homo Sapiens; identical to SEQ ID NO: 59130
  misc_feature (510)..(510): n is a, c, g, or t
  misc_feature (515)..(515): n is a, c, g, or t
  misc_feature (517)..(517): n is a, c, g, or t
  misc_feature (541)..(541): n is a, c, g, or t
  misc_feature (543)..(543): n is a, c, g, or t
  misc_feature (571)..(571): n is a, c, g, or t

SEQ ID NO: 208096 - DNA, 517 bp, Homo Sapiens; identical to SEQ ID NO: 57802
  misc_feature (458)..(458): n is a, c, g, or t
  misc_feature (464)..(465): n is a, c, g, or t
  misc_feature (480)..(480): n is a, c, g, or t
  misc_feature (485)..(485): n is a, c, g, or t
  misc_feature (498)..(498): n is a, c, g, or t
  misc_feature (505)..(505): n is a, c, g, or t

SEQ ID NO: 208097 - DNA, 569 bp, Homo Sapiens
  misc_feature (465)..(465): n is a, c, g, or t
  misc_feature (528)..(528): n is a, c, g, or t
  misc_feature (540)..(540): n is a, c, g, or t
  misc_feature (550)..(550): n is a, c, g, or t
  misc_feature (565)..(565): n is a, c, g, or t
  misc_feature (567)..(567): n is a, c, g, or t
gttttgctaaactaagatttccagaatattcttgattagtcaatttctcaggaactaatgtcttaaacctacaaaaggaagcaggacttgagggaaatagagcaagtttcagaggcagaaggccctcactgagcttccagtaatgttccgtggaagctgtgtgactttaggtgagacactcgggctgccccagagatctggaacaagtccctcctcacagcgacagcatgatgcagggcaggcaccagcaaagaagggtgtggaaacttttaaaaactctgtttggggttacctgactgcaccaggttatatctaaatggccattccccaaaagttttaaagtggtgaaactggtaagttctgtaatttgctttcaaatcatcccaaaagtggtcattttctctacaattctatacatacttctgtaccagacatgggcagtacaggattttttaatccacctanggaagtcccctgtggtcaggaaatggcatatttcacccttaaaagggccctcttgctctttgntgggaacttttnccctcttggnccttctcttcttatnancc

SEQ ID NO: 208098 - DNA, 571 bp, Homo Sapiens
  misc_feature (443)..(443): n is a, c, g, or t
  misc_feature (517)..(517): n is a, c, g, or t
  misc_feature (524)..(524): n is a, c, g, or t
  misc_feature (545)..(547): n is a, c, g, or t
  misc_feature (560)..(560): n is a, c, g, or t
aagataagtcttttgaaaaatagtagaaatagctgaaaggcaagttcagtgtttgacaatcttcaggggcttgagggattataagtacctcatagtctaaatttgagcatattctttttggccattttgatagggtttggctgtgtccccacccaaatctcatcttgacttgtggctcccacagttccctcgtgttgtgggagggacccggtgggaggtggttgaattgtagggggtgggtctttcccatgctgttctcatggtgatgaatgagtctcaggagatctgatgattttgtaggggagagtttccctgcatcagctctcttcccttgtctgctaccatatgagacgtgcctttaaccttccaccatgattgtgaggcctccccagcctcatggaactgtgagtccattaaacatctttcttttgtaaattgcccantcttgggtaccgtctttatcagcacatgaaaagggactaatatcatttattctgaacatacttactggacattnaataggngggaaaactctggctgggggnnnaatttgaatgaanctaatccttgc

SEQ ID NO: 208099 - DNA, 574 bp, Homo Sapiens; identical to SEQ ID NO: 59230
  misc_feature (418)..(418): n is a, c, g, or t
  misc_feature (449)..(449): n is a, c, g, or t
  misc_feature (463)..(464): n is a, c, g, or t
  misc_feature (487)..(487): n is a, c, g, or t
  misc_feature (517)..(517): n is a, c, g, or t
  misc_feature (548)..(548): n is a, c, g, or t
  misc_feature (555)..(555): n is a, c, g, or t
  misc_feature (568)..(568): n is a, c, g, or t

SEQ ID NO: 208100 - DNA, 413 bp, Homo Sapiens
  misc_feature (378)..(378): n is a, c, g, or t
  misc_feature (397)..(397): n is a, c, g, or t
  misc_feature (400)..(400): n is a, c, g, or t
  misc_feature (403)..(403): n is a, c, g, or t
  misc_feature (406)..(408): n is a, c, g, or t
gcgggtcacccgtgctgtttatttacgcagctgtgttttctaacactaatacaatgcatgcatgtattgtgtgttacatggtgaaacagaacagatcctgaagttacacagatggcgtgtgcatgggggtggtgagcacccgcatggcctccgcaaaatgagtgccgcttaacaaacggccccaatgcccggcagtccggctgggcctttcagggcaccagattcctcgttccaggccaagtcagcgacggctcggggaagtctgctgcggctaggagccctcagtgtcggtgttgtcgctgcccgtggtgttctcccggtcctcctccccctgccggcatcctttctgcatcttcctgagggcgcgcttcctgcggnagttctcaaaactctcttnganggnccnnncgttc

SEQ ID NO: 208101 - DNA, 557 bp, Homo Sapiens
  misc_feature (431)..(431): n is a, c, g, or t
  misc_feature (533)..(533): n is a, c, g, or t
  misc_feature (535)..(535): n is a, c, g, or t
  misc_feature (547)..(547): n is a, c, g, or t
  misc_feature (553)..(553): n is a, c, g, or t
gagagacaataggaatttttaatgcatggacaggcctgcagggactctgggcagacccacaggtagcaggaagaggcagggtcccacaaactcaataatgtccagcaaaaaagagagagaagtccttaaagacccatgcttcctcactgcaaccatcctcagagcttccttcctggtgctgaagaggtcaaaactgtctcctctaggggtcaggtcaaaactgtccctccataggtctcctccaggggtccatggcaggaagaaagcagagtgtggcaggaagaaggaagaagagcaaaggccgcttggtctccacctgaaaacttctgcctcgggattgacagccatccataagaaaaggtttaaaaaggagagacttttgatagagtcaaataatatgtgtttcgggccattgacaccatcttctcctnacacgtgattttggtggccttgaggatgctataccacaccatgccttgcaggccggaccttcttggttggggcagaaaagataggcactggtttcacccggntntggatgtaggcncttccnagga

SEQ ID NO: 208102 - DNA, 574 bp, Homo Sapiens
  misc_feature (492)..(492): n is a, c, g, or t
  misc_feature (528)..(528): n is a, c, g, or t
  misc_feature (562)..(562): n is a, c, g, or t
  misc_feature (570)..(570): n is a, c, g, or t
tcaggatgtctaactagggacattggatgtcagttctcctcagaaagaagatcacagttactggtgaatggacaagttatgcatggaaaactgagggaagtgggccaggacccattagagtgcccacagaaagaagttgggttgcagaaaaggaaagcagcaagagtctggcagggatgaacccctgaggaactcagagcctcacggaaggggtagacagaaaaacatctctgctgtcttcacccctgcaacagttggctgactgccaaactgttgagaaacacttctgctcttgtgacccacagcaacacttatcaataatgatttggggagttccagaggacaaagaactggggaagccagattgcacaggcatgtctgcactccctggtaccctggaactaagatgacaggtaccatactgcttgtgcagctgtggtggccactgctctgctttgagaatgtgcccttgagtcaccacacccccagatnacccccaaatgttccctacaacccactctgactttnggtaagcccgtggaccagcagtccctgggaagcntttgggantctt

SEQ ID NO: 208103 - DNA, 378 bp, Homo Sapiens
ctcaatagaactgagagcaacttgagaacagttgagagcagggctcgtattttttaaattttgagtcccagggcatagcacagggccagacataaagccagtcctcaataaatatttattaaattgaaatgaggcctattagccagcagcacaatttaacacagcacttcacaaacaggttttataacaaattaaacatttgccttggttcttggtaacaaaaatattcaaattaggggttttaattataacaacttgtatttgcccacaaaaacatgatgttccctgggaacaacctcccacatcacagatgtaaagacttttcttctcccaggaattcaaacttgaggctacatgtgctaggaaggggacaaacca

SEQ ID NO: 208104 - DNA, 378 bp, Homo Sapiens
gaggaggagaatcatcagctgagagaagaggcctctcaactcgacactcttgaggatgaggaacagatgctcattctggagtgtgtggagcagttttctgaagccagccagcagatggcagagctatccgaggtgttggtgctgaggctggaaggctatgagaggcagcagaaggagatcactcagctgcaggccgagatcaccaagctacaacagcgttgtcagtcttatggggcccagacggagaaactgcagcagcagctggcctcagagaagggagtccacccagagagcctgcgagctggctcccacatgcaggattatggaagcaggcctcgtgaacgccaggaggatgggaagagccatcgtcagcgttcc

SEQ ID NO: 208105 - DNA, 913 bp, Homo Sapiens
  misc_feature (818)..(818): n is a, c, g, or t
ggtctgtccgaacccagacacaagtcttcactccttcctgcgagccctgaggaagccttctttccccagacatggccaacaagggtccttcctatggcatgagccgcgaagtgcagccatcccgcttagcctgcctcacccacacccgtgtggtacccttcagccctggccaagcttgtgaggctctgtcactgagcaatggtaactgcacctgggccggctcctccctgtgccccccagcctcagcccaattcttacccgaaagcatcaactgccttggcccctccctccggttgcccccatacactctagtgtctcctccctgggctacgcacggggacgacagcgggcttggggggtagcctagatgtgggccaacgtccacgtgtcctccttgggggcaaaagccccatttgaagaagaacagcccagctgccccctatattgtactgacatatttggggttggcactcaaaagacagaaaaaaatcactttttttaaacagacagagaacacaaaaaggggacagaagaaaagaaaaccacaaaaacaaaatagttgtgtgggacggaatagcacagaatgagagacttaacagcacccactcggtgtgttgcagcggcaccaagctgaaaaaggaaacacgcgccaaaggagtagcaggagaaacgagtggctaagaaagtggggtggatatcacacaaagaaaacggcacgggcagacacgagggatgaaaaacaccacagaagggcaggacggccaaggtggccataacaaggggccaagcagaacaatatatccggcgccgtgcagganacacacgaacgcaacggagggcacacatcgcgagaagcgcgagcaggcagcacgaacacaaagacgaacttaacatagcacaaccaaacagccaa

SEQ ID NO: 208106 - DNA, 544 bp, Homo Sapiens
aaagaacattgatggggattcactgtaaagttggcagaggctgccaaagacgaaacaactgactttaaaaatgctggaacaatgtgataaaaaataaatttgtaacaaatcttctcctttttagcccttgtcattttagccctttagtttcaactctgcattatatttagtttatatagtgtaaacttttgtttgccattaattcatctttttaggtagaagacattaaaatcacaggtttatgaagaatctctgcccattggaatgaaatgcagtcatttgaaatgagaaaggccaggatccttttttgtaccttaccctgtcttcaagagtaaaggtgaacacttacagctctcctccttgatgtcaattttgtatgttgatcattccaaactgagaagaataaagccacattttagacatatttatagaatcaattaaagctatatgtctaaaattcgtagggcaacttctgagaagaaacaccgtctttttcttttttaatggaaagtgacaatgtgacattagtcatgttgtgtgcggt

SEQ ID NO: 208107 - DNA, 533 bp, Homo Sapiens; identical to SEQ ID NO: 60245

SEQ ID NO: 208108 - DNA, 463 bp, Homo Sapiens; identical to SEQ ID NO: 61909

SEQ ID NO: 208109 - DNA, 513 bp, Homo Sapiens
tttgaatccaagacttactgttatgatagaagcaagaagcaattagggacctacccctgacatccattaaagtcaacacctacatagctatatcacaagaggtggaaaatgagattaaaatgtatatttgctagcacttaatagtttatagccagtctaaataaattatcaatctaaatagattatctcatttgattttcaaaagcaagtaaaattatgtatggagatactaaccctgtcttagaatgaagtcagaactttgggaaagatcataattttccttcaaaacactgacaacaatttgtacttttctatttttctctgtaactccacttcatccattcattccacaaatatttattaagtatctactacatgtcaggtactgtactgggtgctagagatacagcaatgaatgcaacagacaaagactgtgacccctacattccagtaaggattttttttgtttaatatctgtctcatccaaccagactataaactccacaaaggcag

SEQ ID NO: 208110 - DNA, 520 bp, Homo Sapiens
ttttaagcaagcccccaacaccatagaaaattcttgatttgctcggaggataattggatgaaggattattttcttctttgtttatgtgcaagaaatgaaaataaggaattgctttgatcagacaacttcttatctttgtggtagaaacagaactgcccttcttggagtggctctgcctctgagatcactacaggggagacagcatgccctgttcagctggctgaatatttggcaacaatctcctgaagcagctggaattgacaagaagtactggagattagctcgggccaaacccttacatctggcctgactactgctgcagtctgcctcaacttacccctaaagctggggagatgccacccacccacatctttgctacacatgccatcatgagctagagttcaccctttctccttaaagccctatttacttttctacttcaactttaaaacaaaattaaaatgtgaggatatccctgaattttaaaaagcatgaagtaaaaatgcaaattagtatagtt

SEQ ID NO: 208111 - DNA, 539 bp, Homo Sapiens
gggtagatacagggtcttgcactgttgcccaagctggtcttgactcctgggctcaagtgatcctcccatgttggcctccaaaatgcttggattacaggcatgggcccctggcgcctgaccattgctgacacttcttcaagcatcagttttactctaaagtaattctgataacccaatgtccataaatgatgaatgaataatgtggcatatccatacaatggaatgttactcagacacagaaaggaatgaagtagtgactcatgctacacattaaccttgaaaatactatgctaggtctaagagcccaggcacacaataccatatcttatgtattatatacagccaagcatcacttaacggcagggataccttctgagaaatgtgttgttagccaacttgtcatcatgcacacatcataaagtgtattcacaccaaccaagaaggtacagccttctacacaccctggctaaatggtataacctgttgcacttaggctacacaaaactgtatggccctcagtgtactgaatactgtagctg

SEQ ID NO: 208112 - DNA, 519 bp, Homo Sapiens
tcacagcacactgtacatagaatttatttgtttgcctcatacattaaaaaatcggaatagtgcaattacctacaaataatttcaatcttctcattcgcgagttgcaaagtttaaagagaaactttaaattgctttgggtttacgtttttaaagacacactcagatttactaagagagcatatcagaaaccagatctaaaatgttaaggcataaactttaattatcaggtctacttcttctgcccctctaatgccagttctgcagatcgctcacaccactccaacctacagctaaagaatgaagtaaaacaggtacacactaaatttggcatttaactgctgaaagaagtgttagaattttttagggtgaaaaagttatctgtatcaattatcttacacaattccactccttccttcaagaaaaggaatccaatggcttagctctttcccaacctttaaaatgcatcgcggtccaccccactcccctcaattccttctaggaaaatgtgaaactaacggt

SEQ ID NO: 208113 - DNA, 527 bp, Homo Sapiens
taatataatcaaaacatagttagactgtccactgctctagagataaactagatattgatctggctccaaaagaacaaggttaatccatctgccaaagcgagaacacttactaagatcttatggttaaaaaaattttttttaatttcttaacagacatataaaaatgtaattcttcttatgaagactgcttctcataattcctgttgccaacagcaagagctatatttatttcaataaatctgagctagcacttcgattccatcacggcttaaatgtgtttacaaagcttaacatataaaaggtcagtctagtcactgtctaggaaatctgctaattaaattggtgatttttcaacacagtgcagtgactgtgggtgcaattaactcagaaccataggcaactcagcagtacaacctctcctacataatgaatcttctcctttttgtaaaggtacttaagatttgagcaaccacacagatgcgctttatgtaataccagttctttggaaatgtgcatacatccatctt

SEQ ID NO: 208114 - DNA, 539 bp, Homo Sapiens; identical to SEQ ID NO: 59442

SEQ ID NO: 208115 - DNA, 465 bp, Homo Sapiens
ttttaagtgaaaatcatttattgaaaattaatttactaaatgaaaatccagcaatcaataaacaggttaatcaatatcatagattgaacatggaatacaaaatagcaacagtagctaacatgtatctatcactaactgtcccaggccctgtgctcagtcctttacatagattatcttctttcatcttcataacccaagatatgagtgctattttaacacccattttacagatgagacaatacaggcaacatattagaatctttaagaactctgtctgatctacttagcaataagatccctcacttctggggcccttcacttgcctcaagggatatagtggctgttaaggggtggggataaggatgcgatcagactttgcttatgtctcattcaatcttattgccaggtcccatgcaatatttgcctttcccctcctgatgggagagaccatactagaatgggcca

SEQ ID NO: 208116 - DNA, 534 bp, Homo Sapiens
gctttcatataaaaatgtactgtagtaatcagtaagaaaaagaaacaacattggctaagtcacgaataggcatttcaccatatgtacatgataaatggccaatcaaaataaggaatggggctcattctgctggaaattaaatacattcaaacaagaacagagatccattagcaaaatgtttaaaaataatatcacagggttaccaggggtatgacaaaaatggacacttccatacacactaggtgaatatattggtgaaaatagttcagataaacatacaaccatgtatgtaaaagtatttatcatcaatgcattatttgtagtagcaaaaacaacaagcagccttggaaaccagttaatgtcctcagcagggaattaataatattattgtatattcatgaaattgacaccatgtggccacacaaatgcattacacaggcctctatgtaacataggatattcattagagaattgtttttcaagaggacaaagtactttcatttttgcctagaaaatgggggaagacaaaaatgc

SEQ ID NO: 208117 - DNA, 549 bp, Homo Sapiens
tttcactactgttttgacagcaagaaaagaattcttcttgaaggtataattaacctatcacctgttcctatgtccaggatagaagtaacacaagtactgcagcttgttcatcatgtcacacaggagcatagatccaggcaaggaagtggtattattggaaactgtggagaaggaaatacatgcagagtttgatgatataataattttccaaacttattatttatgccatgggcccattagattcttatctcctcctaggaactttggaggtgatgccaattttacaaatatattctccaagtccactaatctacgcagacgtttgctccctttccattgtgagttgaaagagcacctattgttggtagcgaacaactttgagagtttaacaaatataaatacactcaaatatgtttcctaaattaccagaataatggaagcactagactctctgtccagtttaaggccttggttttatacctctgagacaagggacagttggtgaggtataacttttatttatgtatagtaagccaagatttatgtagt

SEQ ID NO: 208118 - DNA, 568 bp, Homo Sapiens
ttttctccactaaacgtatctttattttgatagaactacaattcactttaaccactgcattgcataggacactgttgtattataatgcttgtacaggaacgtgcattatcactagtgttacacataaactttttaccaatctagtcagtatcaacagattgatttgagttcagatgatttttttttctatgcacggatgtaaaatcacaatgtgtttacttggatattttatgcagatagcacaagatagagtatacctatgcaaacagcacaagttacagtgatacctatgtaaatcagaatcctaaaatgagatacttaatattttcattataattattttctaggttaaaaaaatgaaaaaatatttaaattttaaacaaaggcatattactgaggcagaattcagtgcagatacagaagctggtactacaactggcatagtcaagaagactagagacagtatagtgcacatttaatgatgaatggcaattgcaatttactgcagcagagcaaaatggaaaagctgtttgttctattcaaaagtgttaaagatacatagtagata

SEQ ID NO: 208119 - DNA, 544 bp, Homo Sapiens
ttttttattgtgaacacaattttctttatttcatttttggagttttctgaacagaaaaatacaattgattttctgtatattgatctagcctgtgaccttgctgaacttgattaattctattacactatgattttttgttgtggttagacccttacacaatcaaatgaggttaaaaaaaattgtcagagtggccccagaccaacaacaggatgacagtagcctttgcccatacagagataaaatttagtttttgcagtcctttcccatagagattgtatggcagtagccaattctatggcctactgccatacaacctgaactgaagtccagaaagtttaggtgactgggccacagagctaattactggtggagccaagaagagaaattatatccctacctccttgcccactaagctccccattccagtgggctgctttctggtccttttccatgattgggctttagtagctgtcatttcctccagtgtccaagagtattttcttggccttccagtaaagctccccaagttgtctgtgttccgcct

SEQ ID NO: 208120 - DNA, 557 bp, Homo Sapiens; identical to SEQ ID NO: 60655

SEQ ID NO: 208121 - DNA, 554 bp, Homo Sapiens
ttctttaatgaagtcatcttcagactctgatgcttgtctaaactgcagggttcccgagttaatgtaaaatcctccatacttcgtagtcaaagaagcaggaacaagctcatcatacgcctcagagttatcgatgaaggagtcggattcatcataaccataccccatatcgatcaagtcctgtattcggtcttttctacgtttctttccaccgtatttttcttcaaattttcgggcaagggcctctactttatgcctttccttttcttcgtcattgaaaggatctgacagatctttcttcttatctccaggctgaaggccttttaccttccctcggatattcttcaccagctctgggtagaagaactctgggcagcgtttgtgatctggttcaaagagggtgagtgtaatccgaacagctgctgcagccggctcacagtcctgatgctgttctcctgccccagcctcctccttccgggacttcttcaaaaacgcaggattcagggaacctgggagagaggtgaactggaccctgtggggctccgacatggctacca

SEQ ID NO: 208122 - DNA, 395 bp, Homo Sapiens
ttttaagtgtaacgttaactttacttattaatatgcaattacagattatcttctaaagcaatgcataaacaagtgggccttcttgcttaatatctcttttttctcccttcacttcacttgggacgtttagtataagttgcagtagcaatcgcagggaatttctaccttgagcaccagtttcaccaagctctccagtccttggctgtggtcaggagggtctgcttcgttcacgcactgtctgtttggtagtgtgcagagatggttttcttttgcacctttaggtgtcatcctggtgtctgtggcattctctgacctcattattattggtcactcttctcaagatcagaaatgagaatattttcttctaaatatactgtactaaagttggttgcagg

SEQ ID NO: 208123 - DNA, 553 bp, Homo Sapiens
ttttttttgtttttcaaaaggagcatttactaggaaactaaagggcaaccaaacagaatgcaagagaacagaggcagagttgcaaatgggctgagggagttcaaatttataaccagcctctgctcacagctgtactggctaggcaaagctttccagacacaaagccacctgcctgccatgtggatagtactctttgcctgcttgcccctacaaagccaccttctatttcataccaataagccagttgcatcctcattagtatcccaaggctgctggctctctgggcaggaagcttctgaggtggggaacagtaggcacagctgcctcaggatctccaacccaggcttccattgccaaggacatgtcagaatttattgggattgctgcctgatatctattggagccagtctgctttctctgggaccattcttctgggctcatctgcctagctttacagacaatagttctgctaactatcctggtggcgctagcccttcatgttttgcttctaacactggtatggtggaggatgtctgaatgaggagggatgagc

SEQ ID NO: 208124 - DNA, 517 bp, Homo Sapiens
agactgaattgaatgtctttaatttcacacaatgaataacatatgaataggattaactttttttttttaatagttaagtgctctatactgtgctaacctgatctggtagcggaaaagactgagctttcttttagaaaaaaatgtttaaaacccaacatctaagaccatggaggagcatgacagtaagcatgctagatgtatctacgcctcaaataacagcaagtccatgttcattttaaatgtacaaaaatgctttatgaataaaaactgttacaaaaagaacatttcaaacaatgtacaattttcttgcctctatattcaataaaatacaaatacattttttgttctaaaatatgtttacatacaatcaaagtagaacatgcaaattacactttaaaaaaggcttttaaaaaccacttatgaatacaaactaaaaattagccagcacgacttgtaagacaatcttgtgccccattttttcttttgaaatatatatgtacatatttaacacatcatg

SEQ ID NO: 208125 - DNA, 518 bp, Homo Sapiens; identical to SEQ ID NO: 58861

SEQ ID NO: 208126 - DNA, 520 bp, Homo Sapiens; identical to SEQ ID NO: 60258

SEQ ID NO: 208127 - DNA, 854 bp, Homo Sapiens; identical to SEQ ID NO: 48495

SEQ ID NO: 208128 - DNA, 498 bp, Homo Sapiens; identical to SEQ ID NO: 50410

SEQ ID NO: 208129 - DNA, 793 bp, Homo Sapiens; identical to SEQ ID NO: 46043

SEQ ID NO: 208130 - DNA, 917 bp, Homo Sapiens; identical to SEQ ID NO: 46801
  misc_feature (917)..(917): n is a, c, g, or t

SEQ ID NO: 208131 - DNA, 849 bp, Homo Sapiens; identical to SEQ ID NO: 53097

SEQ ID NO: 208132 - DNA, 834 bp, Homo Sapiens
taccaaatcttcagctgtctacttggaagaacatggaataagcatacttaacagtgaaaagaatctttaattatgtattatatctgtaatatatttattttgtttaaagaaggctttctaacaatgactgactaaataaagctgtctgctcctgcattgataatgaaggtgcgttgtatttgatacccctccccccctttttttggcaaaggaggggaaaggaaggtttaaaataattgatttaaaatgtcactaagtgtagactgatgactgtatagagatgtgaaatgtataattacacatggaagcaatatgttgctgtgtgctataggttttgttttgttttctacatcttttaaagacttttggaaatttggctgaacaattagaacacaacaggccaactcatactcatttgggatctatttagacaacgttaaccaatatatctatagctttagattatattcgataaaagtaatgggactttttttctttttttgactcgttgaacagtgtcttcgtaatatgttcttagttccctttttttgttgtataataggcgatgaaccaaataattggctcaaagagaaaaatttaatccttctggtatttttgcacatttctctgccacacgggcactttttcttagccggttgtgtcctgcacccatgggcatcgggcggccctcgggacgcaccttggggggcccccgtggcgcccgtctttcaacacgcgcacgcgggctgggcacgtctaaaaaaggttgcggggaggtacccgcacgaagccacgaagccgggcagttcttggcaaccatttgcacacggcgcg

SEQ ID NO: 208133 - DNA, 454 bp, Homo Sapiens
ctacaattttcctgctctgaaagcaattttctaaactttatcttgtaactcttctttttttctgctatcatatttttaatttacaagaattatttatttattcattcattcaacaaacactcactgcacatctactacatctagttgctattcttgaacaagcagacaataagcttactacattctggtagggagaagagatagacaataaatcaatagaacagtgaacaagtatattacatagtgtatcagagggtggtagggcttctggagaaaaaaagaatacgtagaacaggttaaagaggatggacattgcgtggggggtagattgtaatatcagatacggcaaatttgggtaggcctcatgaagacaaaatctgaacaaagatttgtgttctgttcctttttgatagcacactttttattgcatgaatgcaatatcttttattatagt

SEQ ID NO: 208134 - DNA, 453 bp, Homo Sapiens
ttttttttttaggattttcagtatttttattttccaaacattattttaaaagaacattaaaagcattagaaatacaaatcttgcctaatggttaacatacgaacaattattataaaatgtttaaaatacgtcacatactttgcatcacagtaagcatcaagagaactaattaacatatcctgataattaatcatattcaactgaattctcattacttttagttctcattttagcccttatgaagagataagttatatatttctacctccacctgtatcatcatgacacctttattatgataacacaggtagaagtagacatatataacttacgaagaaagaagttatgtctctatagatatagagatatagatacggacgggggctatgaatcgagcccactatgtatttcatgcaatttataacaataatttttttaacttttcttttggag

SEQ ID NO: 208135 - DNA, 468 bp, Homo Sapiens
aacattttaaagacttttatttaaaacataaactgttactgattaatcattcaatttgaatcttaaaaatagaagaaattaaggatcctcagaagaaagaaatcccctatgcatgtatttaagattgcttatttcctacaaaacatgacttagaactagcttccaaaaatatacgaaaacagagaatataactgaaaaacagaaaaatgaagtaatacatgaaaatggtatacagagccactcaaaataaatagggaaaaatcagtcatgaggttttgtatctatccgtatatggcaaatacaaagtaggagaagcacagctgtatcctgtaccggaaagcaaaataactttctcccataaaagggacgcatgaggccctatgcgattcatctcagaactgctgattagttggtagatctcctcctcaaacacaaccacatgataaactctggtaataatattcccta

SEQ ID NO: 208136 - DNA, 419 bp, Homo Sapiens
ttttttaacagccaacatttactgggcgtcttaacattggtggcccggcaccacgctaaacatttcacatgcatttacttctcacaactcaaagaagtgggtgctgctatctccattttacagatgtgtcagctaagcataagataattacaaagaacatccaaggtcacacagttccccttcaacctccttcccgaccacctgtaactaggcctcagtcccacccttgcctctcaggatccaccccttctttgtagaatatagctgaacaccagtctcccctgcttctccccacccaccagaggcggaagggcctacaacccgctcctccagcccattttttgttgtttgttttgttttgtttttgagatagagtctcactctgttgccctctgactctcccggggggccccaaaaag

SEQ ID NO: 208137 - DNA, 539 bp, Homo Sapiens; identical to SEQ ID NO: 60669

SEQ ID NO: 208138 - DNA, 471 bp, Homo Sapiens
tttagtttccatttttattaaagttgtgtttttctaaggaatatatcacacttaaagttcaataccataaatattagttcttaaatcttctattttacttattaaaaatgtaaacataaaacaaccactccatccctgtccctgacccaatatatattaaaaaaatattactcctctcaggtaagttcttttcttcagaatgagtaacacagacttcattaaaatctttttagtcctcctgggctgcaaggacatggcaggaatgactagtgtccactgtgacaagggtctgtgacactgtgactgaggcccgtctcctcctgccacgacgactcatgtgccctgagagacaggctcctctctgtccagtcagcgtccaagaacataacataaaagaatatcttgaagatccacttttccattcctagtgccatatacacagaagaaatccagccagcagaggaaacagat

SEQ ID NO: 208139 - DNA, 520 bp, Homo Sapiens; identical to SEQ ID NO: 60361

SEQ ID NO: 208140 - DNA, 524 bp, Homo Sapiens
  misc_feature (486)..(486): n is a, c, g, or t
gcaggatgttgtccaagatctctccccccaccccccagtccccatccctactccaaaaaacttcctccaaagcctagaaaacactttcagaaacatttgctggctgtaggctggcttgcagaacactctgtagcaacctaagtcaggaaaacaggctgaacaatgtagtttcaagtgcagaagctctgtagaataagagaagaccgtgtacagacaccaccacccacctaggccccaggagctagactctccttagcactgctctgctgagggcacaattcttttgcaaacacgctcctctcttgtcaaaacttatccagccttcccagaacctctttggagaggcaaacttgcctgctctgctgtctgccatgagctctccttggagaggagcctgtttgcttaccttccattttcttcccccagcagggcatgtggcaaaagagaagacaatagtgcaggggtgggagggggggaactgctcanagagagagagaggggaagagagagggaagagggaaaga

SEQ ID NO: 208141 - DNA, 500 bp, Homo Sapiens
tttgctttttgttgttgttagctcatcagctatcattagtatcagtgtattttatgtgtggcccaaagcaattcttccaaagtggcccagggaagccaaaagactggacattcctgatctacactatctcgttttgttcattagtttcacagacattaggttaactctccaattagactttaggcagcctgtccctcaactatttataataattcaaagtatacgtactcattgaaaccaccgcctgccagaaagggaactataacgttttcaggcaggcctaagatgagaaagaagctgttaagccaaaatagctgatatctattcaggcaagggggtggggagcagaaaaaacaggagtgacatttacaccgactctgtgcaggtattgtctaaaggggctttcacagccacgacctcgctgaatcaccacaaccatcctctgagaggggtgtatctccattttatagatgagaaaacacacacacatgctatggatc

SEQ ID NO: 208142 - DNA, 453 bp, Homo Sapiens
tttacaaaatgttttgaaaactgtcacaaataattcttccaaatgaaacaaactgaattttctcaactcccttgtatattaccatctcagtgtaggaaaattttaacaccttaaaaatgaaacctgacaatgacaaattaatacatataaccattagagtgctgtgacttaacctctgtagctactgtggtccatttttgatgtctggttatattatgacattataactatcaccaaaaaactttttgattactcgctttagaaaagtgtcctgagcagtgcactattcatctttctaataacatgaaagtgaaatagaaaaaaaaaaaaatacatgggccactggcaaatgcaggatgcagactatttgggatgttttatggaaacaggcatgactgcaaacacttggtttgcacttggtttgattcatacaacgatcgagaagtgtggatg

SEQ ID NO: 208143 - DNA, 624 bp, Homo Sapiens
  misc_feature (592)..(592): n is a, c, g, or t
tttttttttttttttatgacatgaaatgattttaattatatttcaatctcattgttcatgatctaatgatgttccttttaggtagtttcttcctcaacgtatagcagatgccctaatttttcatactaaaggagcaataaaatgctacccttttagtggctctgattgtcgtccatacatctgaactagacaaccacctctagatggccaactcctatcactagcgtacctttaatcttcatttgactcaagaaaattcaagttccattagagatggaaattatttcaccacttgctactggcattatttttaacaatcaaattaccataaattgtatataagctaaaaaatgcatactgtgagaaaatcctgctcaaatttgtacgctccacctccagtggcacaaaagacagtgtggagactcgagaagtttttatctctgcccatttgaataaaagcaggcatgtcatgagtgggaaagcgtataaagtgcagattgcctttgcgtccacacagagtcaggtccttcagctcgaggtgcacgtcccgaatgcctgtagacccataagccacattggaggtaggtacttncgaatgcttttaagactttccactttctcgtg

SEQ ID NO: 208144 - DNA, 534 bp, Homo Sapiens; identical to SEQ ID NO: 58719

SEQ ID NO: 208145 - DNA, 373 bp, Homo Sapiens
cctccttgaaaggtgcaacagaagaagatgaatcacttctttttttcccctggatctgtcatacaagaatcaaggacttgtcaatgactccaaacagcagggccttgacaactagtcaaagacaaagttgttttgtccagcatctctcctttctctggaagcattttcctcccaattaatataagttatgaggctgcactgaagagctcaataaactgacactgaaggacataagttgcttttttacactgaaaaccatggtaaactgatatatacagcttgtgtccatgaaggtggaggtgccagaacttctggtaacctctggctgcatcactgctgctgcactggggcagtcttgcattttctgatattc

SEQ ID NO: 208146 - DNA, 554 bp, Homo Sapiens; identical to SEQ ID NO: 61569

SEQ ID NO: 208147 - DNA, 588 bp, Homo Sapiens
tttcaatcgtctactttccttttaatatatgtagcatttcagagtacataaggctcatgaaagaggaggtacagatcctccggggggaaaacctggttaagcctaaagcatagtggaaaatggaaagatcaacaattagtacagaacagaaaaatgattttgaggattgtattaaggaagttttaaagaacaagaaatcagctctagaaaataaatgtattttaggagtgacaaggccagtccctggaaatacatttgactattaaatttttatttaacttcttcacccaaaattaaacagttccacctgagggagaacttgatgcggacttaaggaagacactcatattacgtgctggagttactatgagactatatgtaccagtaaaaggacgcccacctccaaagattacttggtctaaaccaaatgtcaatctaagagacaggattggactggacataaagtcaactgactttgacactttcttgcgctgtgaaaatgtgaacaaatatgatgcaggaaaatatatcttaaccctggagaacagctgtggtaaaaaggaatataccattgttgtgaaagtgctt

SEQ ID NO: 208148 - DNA, 603 bp, Homo Sapiens
tttatcttctgaaggcagggcccccaggctctgcaccaactccctccctcggcgagaactgagctgtccatttccacagatgccctgcacgcccatacctctgtgccttcatccatgccatgtccttgtctgagatgctcttctttctttcctcatattcaaactttaattgattttcaaggcccggctgaatgcctttcccccaccaagcccttcccaaacagataatatgtctctatccttggaactccctgagccagtgatccacacatctctgacagcacttatcacttgtggtttgacggtcttgatgcatctcatctcttcttccagcattttaaagtcagagatcattccctcttcatttaaatataaaccacagggcctagtacagtgcctagcagagtaggtcttgcataatctattgagtgatacattaatcaactaaaggaaaactgaaggctattaagcaagatggcgtgaggtctgccactacagaataagcttggtttccaggtaagccagctctgggttaagtagaacccatgggatatggggcagaacagtgccctatcagccatgcatggtagtgttgggcaagag

SEQ ID NO: 208149 - DNA, 576 bp, Homo Sapiens; identical to SEQ ID NO: 100848

SEQ ID NO: 208150 - DNA, 471 bp, Homo Sapiens; identical to SEQ ID NO: 60323

SEQ ID NO: 208151 - DNA, 567 bp, Homo Sapiens
tcatcagcagagctactatttattacttaagaccacagaacagtttggttatcaacgtcatcatcagcagagctactatttattacttaagaccacagaacagtttggttatcaacgtcatcatcagcagagctactatttattacttaagaccacagaacagtttggttatcaacgtcatcatcagcagagctactatttattacttaagaccacagaacagtttggttatcaacgtcatcatcagcagagctactacttattacttaagaccacagaacagtttggttatcaacgtcatcatcaacagagctactacttattacttaagaccacagaacagtttggttatcaacgtcatcatcagcagagctactatttattacttaagaccacagaacagtttggttatcaacgtcatcatcagcagagctactatttattaagtgctttacacacattgtctctaatccttacaatgaccttgaaaggcaggcattattatctcaatttgcaggagcggcaattgatgctctgagagcttaagtaacttgtccaagatcacac

SEQ ID NO: 208152 - DNA, 417 bp, Homo Sapiens
  misc_feature (374)..(374): n is a, c, g, or t
ctgtgaaagagaagtctgccctctatataggtcagccatgtatttggagaagtaaaattacagtaaaatcttgaggtaccacatcagtgtcatcctttgtgtagcagttggtaagtcacttcttcctcccaaaagtctttatcatgaggaaactaagtgtgcatggtgctgaccttgataattaaaggaaaggccattttgggagtgaatggcagtagaagtctcaagtggccagagattaggctgtgccctccacaacctcgctacccttagatcatggctgttggcccaatctcacctgaaagcacatgaaagggtgtgactgcacttgggctttccaaacacttggcccttttagcccattctcacaaaanccctccatataaattgaccctctatattctaaaaggtttattt

SEQ ID NO: 208153 - DNA, 392 bp, Homo Sapiens
  misc_feature (278)..(278): n is a, c, g, or t
  misc_feature (359)..(359): n is a, c, g, or t
  misc_feature (390)..(390): n is a, c, g, or t
tgttgcccaggctggagtggagtgcaggatcatacttcactacagccttgaactcatgggctcaaactatcttcctgcctcagcctcttggagcagctgggactacaggtgtacgccaccatgccaagctaatactggggccacacccttctggaacaccaaagcagacagcagagaacagcaactctgaacagctgcccctggccctcagcacgtttactgtatttgtgttcttctgatctctgcacgtaggtttggtggctacctcaggtagctgnctctgcctcaacattttttttttgaaattctttcagacttataggaaaacatgccagattcatgaactatatatatatatntatagttgtgggtcactgtgggccactgatntt

SEQ ID NO: 208154 - DNA, 440 bp, Homo Sapiens
  misc_feature (268)..(268): n is a, c, g, or t
  misc_feature (440)..(440): n is a, c, g, or t
cttttctttccttaacacaactattaatattcctcactccaaaccagcttgctatatttatttatttatttatttattttatttacttacttacagaatcttgctctgtcaaccaggatgcagtggtgcaatcatagcttactgcagccttgacctcccaggctcaaacaatcctcctacctcggcctcacaagtagccgggagtacaggattgtgcacgatgcctgatgcccagctaatttattttttatttttagtagagacaagntcttgctatgttgcccaggctgggcttgaacttttgagctcaagtgatcctcctgcctcagcctctcaaaatgctgagattagaggcgtgagtacttatagccagccttaccagcactatctactgagcacttaaaatgtgcctgacacagtttaaatgctttatacctagn

SEQ ID NO: 208155 - DNA, 436 bp, Homo Sapiens
attgaaacttactttttattattttttccagttacccagcatgccacaatctgattgctgacctggatggaacagagtgaaataaatgatttacaaagagatatttacattcatctggtttagacttaatatgccacaacgcaccacgaccttcccagggtgacaccgcctcagcctgcagtggggctggtcctcatcaacgcgggcgctgtccccgcacgcagtcgggcttggagctggagtctgactctagctgagcagagctcctggtgtatgttttcagaaatggcttgaagttatgtgtttaaatctgctcattcgtatgctaggttatacatatgattttcaataaatgaactttttaaagacttgagttgtaatgtttcctttttatcttgtagtgatgaacaaaacacaccaaaaaggcacatatttt

SEQ ID NO: 208156 - DNA, 616 bp, Homo Sapiens
ggtgtgctttaccggcgtgagactacatttcccgccggcctcgcgggtgcgctttctggcgccccctttctgcttccagcctcatagcccaggtgcatggaccccttagctctaccgtcgcaggactctgcccttccccaagagaggaaccagaaggaggacctatcagcccttgaaattctaaaagtcatgtcccttgggtcagaattgttcagggatgtggccatagtcttctcccaagaagaatggcagtggttggcacctgctcagagggatttgtacagagacgtgatgttggagacctacagcaactggtctcactgggtcttgccgtttccaaacctgatgtgatctccttcctagagcaaggcaaagagccctggatggtggagagagtggtgtctggaggcctgtgtccagtattggagtccagatatgataccaaggaattatttccaaagcagcatgtctatgaagtcgaatcacccaatgggagataatggaaagccttacaagttatggtcttgagtgttcaagtttccaagatgattgggaatgcagaaaccagtttgacagacaaccaggcaaatccagacagacatttccatcagatgat

SEQ ID NO: 208157 - DNA, 716 bp, Homo Sapiens
gtctagactgggctgacagtaaaagcacagaatacaaaacccaggggatggggctgggaggggctgtgaggctggcacctcagctcagaaaaggtagcagcaatcccaaagcagcagaaggcaggggttaaatcaggataaaaacagacatcagtggaatcgaaaaccaatagttagttaatataaagccagaaggtttgttttttttcaggtggggtctcgctctgtcacctagactagactggagtgcagtgagctgagatcgcaccactgcactccagcctgggcgacagagcgagacttcgtctcaaaaaaagaaatggcaactttaagcaaaatgatatataatgaaactaattttactataggctaatggatgtaaacaagagttaagttcccacggcatatgctggccataaaaacttcaccaaactttagaactttaaaccaaacacttctaatattaaacattaaatagacatgagttagttatacatacatttaagaaaaattactaaaaacaagataattacccaatttttggtgactctgagtgctggcagttgcagcgatggtgagttatatcaccagaataaatgtttgcaaagcaaaaattgtcaggagcgcctccttccaccacgcaggtcaaaacaaccagaatgaacgggtcactgggcacttccgtacagcgtctttactattgtgcatttgtatgg

SEQ ID NO: 208158 - DNA, 672 bp, Homo Sapiens
ggaaatcaagagaagagttgcttttgggaataactacaccctggacattagtttcaagaaaccgtctgctggaaatataactatatgtttaagttgacggatcattattacacgtagcagaaagaaagtcactccttgctagaaagccctgtgtaggtcattaggcatcacagtgtggagttatctaagcaagcaccaaggtaggatatctgaataactgatttatttccatgtttactgacaatattcattgcaacaagtcagtagagaaacagtaaagagggcaggcatggctatgcttctatagaatctagtgaagaggagataatttcaaataagcccaagaaggtaaatgagtagtcaaattttcaaaaggactattaactcacaaacaggaaactataatagaaaatagttggttgaaggcagaatgcccagttcagaaaagattcctctgaaaagcaatatataagcatagacttcgaggatgaagagtcactcattttgaaagagcagatgaagaaagtttcaggacaaagaaacagcatctgcaaagacctcaacaaagatatcacacagaaaatgctgtatttaatctgttgctagacaaaagtgagctacggatcacatggtctggatgagggagacagatgatataggttggggatgtcc

SEQ ID NO: 208159 - DNA, 916 bp, Homo Sapiens; identical to SEQ ID NO: 40516

SEQ ID NO: 208160 - DNA, 930 bp, Homo Sapiens
  misc_feature (520)..(520): n is a, c, g, or t
ataaataatgtttgcactaatgccagaagagaagactcaacttacagggatggtttggatggggctcacaggaagactatatgtaaggagggggtgtcaaaagcctcttacaagggggctcccagcatatctcaaaatcttccataactcttacccccgtcccctgcagccaaatgaccctgtgactaacatctgtcaggcagctgacaaacagctattcacgcttgttgagtgggcgaagaggatcccacacttttcctccttgcctctggatgatcaggtcatattgctgcgggcaggtcagtgaccttggatccctttgacttcttgacatttgacccctctttgacttcccgatctttagtgaccccagtggccttaccttgcgtacccaggagccaaacttgctgacctcgccacctcttttctccttctcttccactgatgtgcttgaatccctggcctgatttctggctcctgacccttgctgccccacccaggctggaatgaactcctcatngcctccttttcacaccgatccattgatgttcgagatggcatcctccttgccacaggtcttcacgtgcaccgaaatcagcccattcagcaggagtaggagcatctttgatcggtcccctctccaagggtgctgacaagagctaagtgtccaaaaatgccgtgacatgaggatggacaagaaaaggcttggttgctgagggcaatcattctgtgtaatccagatggcaaggctctccaacctaagggaggtggaggtctcgcggaacaggtgatgcctcagggactatgtaaacaaatacttgacagaggaggtgcaagtggggaagactcctagccggacaggctaggctaagactcgttctacaagcgggaaaccatactcctggaatgaggccaagggaggacacaagg

SEQ ID NO: 208161 - DNA, 600 bp, Homo Sapiens; identical to SEQ ID NO: 40737

SEQ ID NO: 208162 - DNA, 543 bp, Homo Sapiens; identical to SEQ ID NO: 45434

SEQ ID NO: 208163 - DNA, 900 bp, Homo Sapiens; identical to SEQ ID NO: 46995

SEQ ID NO: 208164 - DNA, 947 bp, Homo Sapiens
tcactgaggccatatctttttacaatctgaaaaaaaagtagtaaaaaggtagttaaaaaaaaaaaaaggccgggtggtgggctcatacctgtaatcctagcacttggggaggccaaggcaggcagatcacttgaggtcaggggttcaaaaccagcctggccaagatggtgaaaccccatctctgctaaaaatacaaaaaaaaattagccgggcatggtgggcacgtgcctgtaatcccagctactggggagactggaggcaggagaatggcttgaacccgggaggcggagatggcagtgagccaagatcacgccgttgcactccagcctgagcaacagagcaagactccatctcaaaaaaaacaaaactactttcattaattacccattatttatttagttacttaatttggagttcataaagggcaccctaagggaaagttgggtatgatctaaggttaatggagatgtttcaatagagattattttccctcaccctattggtggcaatatataattacgtacgacaatggaagtaacgtacagaggggtagatccaaacacagtatgtctaaattctagcactctaatggtgcttagaatacaccaaacctggaagacctttccaagagtaaaatccagtctgcactatcaaaatggcagaggcacttgaataactggtgtcctaagtaaactcagcacttcttttcatggcctagttactgagaataatacggggccacattggttcattacgacccaacggccattccttggctaaagggagagctcggtacagggacgaaaaggcccggggccaaaagggaaaggggttaaccggccaaaccacccaaaagctgtgacacacgcacccaagtggacacacagcacggacagggcacagaaaacgccgcggcagcacagacattgtattaataaaagcccgcg

SEQ ID NO: 208165 - DNA, 881 bp, Homo Sapiens; identical to SEQ ID NO: 55816

SEQ ID NO: 208166 - DNA, 974 bp, Homo Sapiens; identical to SEQ ID NO: 40754

SEQ ID NO: 208167 - DNA, 699 bp, Homo Sapiens
attgaaaatgcagctttgaggagtgcaatgtctggggaaagactgttcccagaggggcaggagcatctggggcctctggtggctcccagggtccccatgggaggagccctgtgccctccactcccaagtctcagttgtgccatctgtaaagtgggggccgccagggaggctggaggaaggtgacgggacttcaggccttggaatggggctgagtgaggggttcacatggccaccccatccctctccacgctccacccgctggctgcatccaccaggcggtgtttctgggtcacatttgctgcaattcaggtgctaatgggggcaggaggctgcagggggaggggccggtgtctagtggggcagatgtttctcaatggagaatgctcacagcggcctgcagagggggtctggtgtggcctggggctcctggggttgggatttacacagtgagcctgggctttgtggcacagctgctgctgacagagggtcttggggtctgggaaggtgcttaaagcccggcccccatgcctgagctccacacccctgtttagggacacccagatagggtgtctcctgcaggaaattccccacataattcatttatgtaaaaaatatttttttgccgggcacggtggttcatgcctgtaatcccagcactttgggaggccaaggtggggcggatcatgaggtcagagatca

SEQ ID NO: 208168 - DNA, 436 bp, Homo Sapiens
ggcatgcagcgtagtgtgtaaaaaccgcgaggtcttttactggagctcagtatccaaacagcccattctctctttagaattctaactaaaatgtcagtggcaagggatttttaaaatagcccctaggtgtttcaagtttcctgtgcttgtttcagcagactactgaccctgcctactcacaataagcgagtctcttaggatttaaatatacagctacattgccgtaacaagaaccagttacaggaagagcaggaaaaaaagtcggggggacaaactggcaggaaatgacttcaggacactttttttctttttttttaaatccaagtcaaagaataactcagctctttacagttatttaaatctgaaaactatttccctgaaaatgaaatttctaagtaatatacaaatcaacttaactagactgaaacatttaggc

SEQ ID NO: 208169 - DNA, 475 bp, Homo Sapiens
ccattgactgataacgctatttcacttcaatgaaataataatgccaaccctgaggaagacctcttcttattctgcccagcatctggtactttgaaaccagcccaggaactccaacaggaaaccccagtccagaaaacaaataataaagagaatccaagctcccattttactcctaacaaggcattttgttaattttaactattctagtccataagagaagtagattagaataatggaaacgctagttggtttatcccccaaagtgagaacagagaaaactagtctacatattaaccccagttattcaaactccccaagatatgtctagctctgcagctgccatttatggtgtgctccaaccacatgcaggcattgcactccagggcaccttcaattagttagtccttatgatgacacagtaagagggatttttttaaatttcaacttctcagatagggaaccaagttatgttata

SEQ ID NO: 208170 - DNA, 519 bp, Homo Sapiens; identical to SEQ ID NO: 8940

SEQ ID NO: 208171 - DNA, 538 bp, Homo Sapiens
tcggtaacagtgtctttagagtgcttcgaacacttactagctactaagcattcatgggtttgatctttcttgcgacatgactttaagtaagttaacaaaaaatgtagctgtagacagtaattgtttgataaatatgaacagttttaaaatggcactgaatttacatctttaatcattttaataggccatccacagcctctcttgtgtctctaattctcaacctccgagtcttaaaggctgtaaaggctcagaaagtgccagctcatgtgggtctctgtaagtgtctatgtcttcatagatgtaaatatgtgctgtatacacacacatacacacacacataaatatactttagaatcaacagatgtgcattgtcagatacaaggttgattctggcatctggataaccaagaaagctgcttttaggtgtctggacaactttgtagaaatggttgacgtagaacagtatagaatgtcttaacctctccaggactgctccaggtaactgacattttgtttatcagtactctggttctgacta

SEQ ID NO: 208172 - DNA, 360 bp, Homo Sapiens
  misc_feature (305)..(305): n is a, c, g, or t
ggtgaaattgaaaatcgagtgcaagacactggctgtgctggagttgaggaaagttttgctggagacctgcttgcaccatatgtctggtcactgatagatgaggactggccaggtcaggacagctgacacttggagaaggggctgcccaggagggcatgacagactctggaaaaggagggtcggagtattaaactggctgggaatgagaggcctccaatcttttcgcaggaaaaaaaaaaaggcttaatgctcgtgctgtggaagtcagaatggagcaaagtgggttctgtctgtcttgctgctgngagtgtgtgatggaacaacagtgtcatttgctttttctcagaaatatttaatgca

SEQ ID NO: 208173 - DNA, 557 bp, Homo Sapiens; identical to SEQ ID NO: 50097

SEQ ID NO: 208174 - DNA, 523 bp, Homo Sapiens
tctagaggatcccgctgggcactcgtcagtcttgttcggtcttggtggaggctgtggagttgcccgagtcgctgctcacagaaagcgtgtgtccacgtggttgggggtggccgacagtgtaggacgtgtggcattaacagccccggtgctgccgtgcagggagtctttcttcttcaccttagcataacaggctcccatctagtggcccctgcgtgtgtcccaccacctcctccatgccgtcatctcgatgcccactgaagttgtcgtaggagtcccagcggatgagggggtcagaggtgttatagtccacagacacgctcggcccgttctccaggtgctccatgccttgaattttctctggcccataagaaaatacaaactccactttgccatactctggaaatcgatcatctttgaaagcatcatcaaggtcctccttcccaaagacaacccccaggtcatggatggcacaaggtgtggacctgcacacggaagatgacgagtgcccagcggaaccgagctc

SEQ ID NO: 208175 - DNA, 361 bp, Homo Sapiens; identical to SEQ ID NO: 40861

SEQ ID NO: 208176 - DNA, 848 bp, Homo Sapiens
gtctcgataatggatgcagtgattgcgattgtgtgttcacacagagtaaaagcactcaggcctagacttttggagacccagattctctaataaggtataggagttggatctttagttttagggcagctattcacaaatactgccaaggcaatttctcccactgcatattgtttaattgtactgtatttccaaatccctaagcttttaaatgaacagaaaactgtacagtccaaaatgaattactatcacagttaggttgggcacagtgcatcaggatgtaatcccagcactttgggaggctgaggcaggaagatcacttgaggtcaggagttcgagaccaccctggcaaacatggtgaaaccccacctctacaaaaaataccaaaacttagctgagagtagtggcacatgcctgtaatcccagttgttcaggaggctgaggcaggaaaatcacttgaacctgggagatacgacattgccgtgagctgaagatcaaaccatgcactccatgccttagacaacagaagcaaagaattttgcccttctacatcacaaactacactgtatacataagcaagttcctatatttccgcatcaaactcttttatcgggcaccctgaccataaaatatttaacagcgccttgactcacggtatctccgatgaatgatagacaacatagaatgaaatatggtaaaaatcatcgtaatatcttgggagagaccacaccttctagtttccgggtgtaccatcgattagtaacacagagaacaaatactccaatataagaacctattcaactctacggcaagtatgcaagggtacacaggtacctaaaaatcttcgtacg

SEQ ID NO: 208177 - DNA, 463 bp, Homo Sapiens
gggccgtgttggcttatgatggtaaccacaagtagttaatggcatgtgaaaagtttttagttgcgctttatgggtggatgctgaattacattttgatttgatacttatagaaagaaaaagtatttcttcagcttaaaaaattgtttaaaagtttgtgatcatattgtctaccatgtagccagctttcaattatatgtaagagggactttttgacatttacaaataatactttgaggtagatatctgaaagcaccagcacggggaaggtgtgcagaagtaacaaattataaaatgagctaacaaacgaaaggcaaaataaaaccgtaaagcaagcagatgggaggcgtgttcagtaacttattcataatgcatctgaaatgattgctgtactcaaatatttaacgttagagtaatagtattttgaatgaaaaccatagttgattgcctacactagtggagggga

SEQ ID NO: 208178 - DNA, 418 bp, Homo Sapiens
  misc_feature (84)..(84): n is a, c, g, or t
  misc_feature (321)..(321): n is a, c, g, or t
  misc_feature (356)..(356): n is a, c, g, or t
  misc_feature (379)..(379): n is a, c, g, or t
ttggccaggctggtctcaaactcttgacctcaagtgatccacccgcctcaacctcccaaagtgttgggattacaggcgtgcacncacgcccagcctaaaaaaacacatttcaaatactcaataattatcacatgtggctagtggctatcataccggcacagatctcaacattattttaaagtcttaaataaactgatggagaaagatacctcatatgagagaaacacttaaaagacaactactgaaatgtaaatgaaatggtaacgacaggagtaaagaatctaagatggtaaggaaaaggacagcaaaccatttaattgnaatcgtcactgagaaatgaaagctctcctcgggtnagcaataggtttctggaaaatcnaagttattttccattataactgggccctcaaaattttaa

SEQ ID NO: 208179 - DNA, 480 bp, Homo Sapiens
  misc_feature (382)..(382): n is a, c, g, or t
ctatgtgggcccccaaaggatggacaatatctgcccaaatggataagggtggtccttccctactcagtctactagctcaaatgctaatctcttcggaaacaccctcacagacacagtcagaaataatatcttaccaggatctgggtatcctgtggcccagtcatgcttacaacataaaatgaaccatcacagtcctcaaccaacactatctcgtatatccttaaaacagagaaaccaaggttcagaaaagttacctactgtcacaaaagtaagtaaacagctaaaccaaaaatcaaactcgtgtctatctaaatcaagagatcaaacacaaatgccaactaagattctgtggaggagataatagtacaaagttaggcccttnctccaagaaagttcctgcagacggagatcagatttatacacatcaaacaatacaaaccctggtattattctatattgactacaacttataaacaaaga

SEQ ID NO: 208180 - DNA, 454 bp, Homo Sapiens
  misc_feature (425)..(425): n is a, c, g, or t
tatttttagtagagagggggtttcaccatgttggccaggatggtctcgatctcctgacctcgtgatccacccacctcagccttccaaagtgctgggattacaggtgtgagccactgcagctggcctctttttcacttttctaaagtgactactagaaaatctaaaatgacgtatgtgtctggcattgtatttctattggaaactactgctgtagagagaaatggtctctagggaggcagaaacatgagaaccacaagaaaggtggatggagggcagtgacagacacatcttggtgggtaccttcaggtgcggacagcgggaacccaggagattttggggtgtggacaggcccccatctatgcacagcaggagagtagcatgactgacactaggggtgctgagctgacatacagaactattcagcnttataaacatgtgaaaaacaccgctaagt

SEQ ID NO: 208181 - DNA, 526 bp, Homo Sapiens
  misc_feature (112)..(112): n is a, c, g, or t
  misc_feature (514)..(514): n is a, c, g, or t
gtatttttagtggagacgggggtttcaccgtgttggccaggatcgtctcgatctcctggacctcgtgatccgccctcctcggcctcccaaagtgctgggattacaggcgtgncacgggcgtccagccttgttaaatttcttaattccacagaagtacaaaataaagtttgttaaaaacatgtgatttcatgaatcgttaaagaaattacaattagattcagcaactctgattttaaacaatacaaacaaggacatgtgcaaagatgtgatttccagtaagataatttaatagatattactatacataccacttcctacatccgtgatccagacggattgttcatatagagtactggctgcaaatataccatggaggtgtgtcaactgtataattccaggctcgtaggaaatatccatcctctgtgaacactaatatctttgggatggttatcccctctttgacctatgtaaaccaatccattgagggagtccactggcaacacaaaatggtggntccggtaaaata

SEQ ID NO: 208182 - DNA, 458 bp, Homo Sapiens
gtagagaaaaagttttgccatgttgcccaggctgatcttgaactcctgagttcaagtggtccacccaactcagccccccagagtgctgagattacaggcgtgaaccactgtgccaggcccatagctgaattttcaaggacagaaggacaatcaggcactttgatttggaccttctctgtcctttcctctgctccagttacatgtagttaagtctgggcaggtttgaacagttaataaaacaaactgttaatgaggccatatttaccaatccgatccttatagagaataagaaaaatatgcatcactggctaaatggctctcatatttccaaatacatatttttcatcaaaaagagaataattctgcagtatgtcacacagcagagacagcaaattatatgcaaataactgggcttcctagaactggaaggaggtatttatgactgactacccagttca

SEQ ID NO: 208183 - DNA, 503 bp, Homo Sapiens
cacctctcccagtgcatggttgacaatcactggtttccatcatcaaatcttaaaatcaaagcattttggaagctgagaatgtattggcaattcatctcactcaggggttaaggttttaaaatcagcacatgtggccaaacatgggtgtactaaaatctcttgtgaaaatacctataatgactcacatgtatgttactgagggttgcacacatagcaaacctctctcggggagatcagcagggcctcccttcattcatccccacaggtttttgattctttggttggccaacaggtaaagaagtcagctagtatttgcagccacgttgaatatcaaatactatttggtgtcctttgttggccaaatgcttacatttgcatttatgtaaatcaaatgaacctatgctacatctccactgcaaggaatcttagaaaccctgcctcggaatcctggaacctaaaagtcttaaagacagaatcttgaaatactgaagttttaaaatctt

SEQ ID NO: 208184 - DNA, 475 bp, Homo Sapiens
ttaacattttaacactttatttcagttatttagttcattttaaggtattcggtcatccaaaagaactacatacatgtgatatttgacttattattcttaattaaaccatcaaagtaattttttttacatcttaaatgtcaatgttgaacctccattgagagaaaaatcaaggcacatattgtcatcattttatttagtatgatgcttttgatcttttgcaggaagttcttttttctttcatctgaaagccttaacattttacacagaagggatactgcacaaatgctgtgtggacttaccagctttctgatgaatgaggatgttaattacatattgaaagtggtaatggttttgaaatgaaaaagagagcattattggaagaatgaaaaatacatctcagaaagaaacctatagttcaacaaattaaaagaaagaaagaaaaaaagcaaaagtaggtgtcagggctggaccagct

SEQ ID NO: 208185 - DNA, 554 bp, Homo Sapiens
tttgaatttgagtgcttttatttcaggttcatattttcccatatatgttttcagttagaatgaacagtcaaaacatgtcaaggagaaaaatcaagccattcatcagaaaaacaatattttcattggtttgtcaatgtgattatgtattataggtatactaacaaaaatgaaaaaaatcagtatctgtatattccaaattttacaagtttttcaacttcacattttaattattcttttaaatccatacaatcactatagaaagtaactaaatatatgattcaggatatatttcttaataatggtttgaaaatttgtagcacttagttttcaagtagtcatctataaagatttcatctgtactaaccatttaattagaaaaaaatatgcaaagtaatgccgtgatggaaatttcaaaatatttgatagggagtacaattaaagtttatatattgagaatagaatatatttcattttattggagtatatggtgtcttctaatctagttaatatacttttcaggcagcagcaaatttaagccatatgttatcaatgat

SEQ ID NO: 208186 - DNA, 522 bp, Homo Sapiens
gaaaaacagagttaaacactttttattgtatatctttaaaatgaatttttaaaagatacatggggaaacattcttttacaaatgtaaatgcaatataccctctatttagaatttaataattctgggtatggtataattttccatctttttaaaaagaattaaatggtactgtgtgttggttttcctccatgagtcaccccagatccattctgtggattgctctgccctcctctggttcctggatgtcgacctcgcaacagcacttgcctttaggcttggttgcgcttgtccaccaacttatcaacagaagttgctattgtaatgactgatctcttgtagtcttgatcggaaaatatattgagcactgaaacttgaggatgtttctttccatttttgtcaagaagagctgcttttgctatgttctcaacaatgtattttcttccggcttctgaaacgtttagtaaacaggcagccaaacggagccccactctggaagaagacatgatttttctgcgagcgccg

SEQ ID NO: 208187 - DNA, 516 bp, Homo Sapiens; identical to SEQ ID NO: 60234

SEQ ID NO: 208188 - DNA, 571 bp, Homo Sapiens
tttttcccatggtcacgcatccacacaaatgagtcttttggatgagaaaagtcacagcaacttgagttctcctaatgaacagatgactttttagccctgtttgtttcaatggggaaaacaatgacaaaaaaaacaaaccccaggcaggcacgacacttatgtaaaatgaacacagttagtacaaaaccagtaaggcatcactttgggaaggtcagcaccgaagaggtcaggcaaggctcgtccagacggggcttctgggagggagtgaccctcacccttattgagctgcgtcatgttggttctgaggaaagtgcaagtcttttgcagggtgaccgcatcaccccaccggaagctggggcggggacgctggaggtgttggtgtgtgttctaaaccctcaaggacgagaagggaaggcaaggtccatggctcacccacatgtcgaggaccaggtcctcatccattttaaaggacacagatacccccagccctagcaggaggaggcgagtgtgtaggactgtgaggatggacaactaaaaaccaaaactgagcaggaccaaaccaaaactcaac

SEQ ID NO: 208189 - DNA, 563 bp, Homo Sapiens
ttttttttttatatctgttataagctttttcttttttagaatttaagcttatgagtttatctacgcccactatattcataattacagttttatatctgcatacaaaagctatgtaaaaatccatttttcccaaatatacaaattttttttggatagtttaaaacattttgatcacagatttcaacagagttttaggctgaaaaaaatatcaccatctagcaatatcacttaacactgtttgcaaaacacaaatcttccaatgactgtaaatctttttctattctgtagtatttttctgattctcagggcatgaaaacattatgggaaaaaaaaggattttctacgaagaaagcatggagaactaatttggctctatggtcaaattaaaaatgccaagttaataagggagaaccaaaagaaagaagtggcataatgtcacatcagctcattcatgccctgataatttctgtatcaacaatacatatgtaaagtgtctccttttgtcttacattgtgctccataatttacatgagtattatctgcatcctgaggaggacagattt

SEQ ID NO: 208190 - DNA, 566 bp, Homo Sapiens
ttttaaagatggaaagactttattccatgaataacctggtattcctcctgtctccctcagtcactcacagatgtcaagcttagtagttttctcttgtgctgtatgagttcctttcaggatgttttcaaaccgctctggcctcctggttaggtggcactcacgacaacaccactaggtccaacccagtttctcactggcaatatgtaggtactaatgctgaaaccaaatcctattactgacatttaacctaatcttaccaataacagcttgctagggacttccaaaacccatactatgcatctgtttgtgggatgaattgggatctgcttttctctgctactgactatgaatttcaggggtgttggaaaggactgtacttgtgatttgggcctagctgtttcagggagcctgagggaagctctcatttgtgtttagccaaggttggtgacatcaggtttcatcaagtcttcatatctatgcactacatagaaagcctttaaaaactcattaaagtcaatgcttccatctttgttcaagtccattatgttggcaagcttattgacttg

SEQ ID NO: 208191 - DNA, 566 bp, Homo Sapiens
aaaatacgaattttttattcttgccttatttcgtagcaaacataaaaccatcctgattttaaaagccaacactgttctttctcctttttccttggatcacaagttcatacagagtcaagcaagtgccccaaagaaaaaccccaaaattgaaaacaagtgtattcccttcagaaaaatcaaagctagaatgtttagctattgaagtgttttcccccagactgagatcaagtgacttcactgcagtggctcaagagtggatgactccctccttccaaataaagcacttattgctaattagcaggccagaggcttagactggatctctcataattggagacttcaaagtgttcagaacttcaagcctggcctatgaagtaaaaaaaaaaaaaaaatttttttaagtagaattgcaattttatttttctccagagaagtttttcttcagtccttaacaactccgctccttatatgggctttggtggaggtcatggggcagcacctgcaggtctacgttggggtggaggtgttcggtccttgcctgcttcatgagctcaatttctcaccac

SEQ ID NO: 208192 - DNA, 528 bp, Homo Sapiens
tttttttttagccaaagggtacaaagaagtttattgactatgatgcagtaaagataccaagagttacaatatttgtgcatatggcccaacagtgcctaccctcctacaaaacaaaaacaaaaacaaaaaaaggcaatgaggtgcagcagttaacagcccaacactggagtcaaaggaatggagctgcctcttctggcagcaaagtttcaagttgtgcaattaaataatagtcttggtccactccttgtgggtcttcttacagtttccctttagaaccataactgagtgacttagtagaacattcatattcaggatgtggcctccagaagtgtcgttttgttttgttttgaacaaagacgtgctaccttctctcttgaagcaccagtgctgggttcaggagctacagaggactaagatgttccccaagtagcctgaagtaacaggtcacatggaaaacacaaagcaattggtgagtccacattttgtaatagaattaagagcgtaatgcataaaacttaaagtcatgta

SEQ ID NO: 208193 - DNA, 559 bp, Homo Sapiens
cctagaaggaatagtgctttagtcttctgagctaagtcctcacattccatgatgggctgtacaagcagcaagatacattcctgaactgcaacccagcaaaacttggttacagggcgaggaggcatatttgtagaagggattcaagcctcctaaaaattcagccattacctccacccatgctaagaggaaatgtcagcctgaacccaaaatatacacaaggaaatgtgtgggggcagctctgcacacggctctcagcctcagccagaatttctagatgtggcctcggcattttccctgagggcacacagagcccagttcacacaagccaggtctgcactgctcggacagacgtgtgttccatgagccaaagtgctgacggctggtctcacaagccaaatgtacctggcaaggctctcccaggggccagtgtgctcctgcacttgaacttggcctagtcccaatttaaaataagccttcgactaaataggaagcaatgccctgcctgctgtaccttctctggcagaaaaacaactttctctaggagacagtcagatgtcca

SEQ ID NO: 208194 - DNA, 455 bp, Homo Sapiens
gaaatttcaaatttaattttttacagaagcacttttacataatagtataaatatcaagagatatcataattacaagttaaattatatgtgcaggatcagaaatccaatcaagaattctgtctctaccacttaacagctagtttgtactttagcttcctcactgcaacatggggatagaacccacctcagttgtatagtttaagtgacataagacatacagggattacaattatcacctgatacagaataagaacttggtaaatctgagttactgaaatgatgatgaaaatcatcgcagagataggtatacagatatatgatctaaacattggggaccacaatacaaactcagtctatactgagattcatcctttcaaatgtactaaataacatttggcacactaagagcaggcaaataacacagggagtagatgtgtaaattaaattttgaacca

SEQ ID NO: 208195 - DNA, 479 bp, Homo Sapiens
cacagatttcattaaatagtcctgttaagccctggcagtaaaaagttaagctttttaaaaacttaatagaagttaatcaatgttacgtgactactaaaccaagtaaaagttaaggctttattactaacctcttgttggttttttgaaggggaggatcacaaaataaccaatgcacttattaaaaaggtctaagtaatatattagtattacagtagagttcaattgtcagttactaacttactgtatcactgtcattgagtcaattcgaactagctcttcttccacttcacctaccaaaatcccaggctccattaaggtaaaattttacttcctagataactcttaccacactgttttatacttatttacaataataagtacatatggaaatacagtatgatgttataaaaaaaaaaaagttgagcatccctaatgtgaaagttcaaaatctgaaacttcagataagggacagtcagcct

SEQ ID NO: 208196 - DNA, 519 bp, Homo Sapiens
tttttttttactgtatttaaaaaccaatttatttattgtaaggctattaatataataattattcattattaatgttatatatgtcatcatgtaaattatttctactttatgtttcaatttagaccttacactgattttaaaaattatatgcataggtaggttatattatttctgaatttcatttcagaaattagtaaagagattttcagaagacttgttagaagaagtcagtgattgtggatgggactgagaatttctgctttagtggagccaactctctcttggttgagaccagggaagtggcccagcacaagagagcttctgcactccaagaactagcttcattgcttttggaaaagattcaacgtgtcaaacagctaaatgataactttctctcctgaactgatatgcgtgattttggtggttccttagttcttacatgggctaccttggtagggggtatttttcatctatttgattacttctttgtaaagttaactctctcagctttatgcatgg

SEQ ID NO: 208197 - DNA, 553 bp, Homo Sapiens
tttttcccagtttcatactgaccatcattttttatcaacatgtcactgcatgaaagatgaatctctggttggcctaggacagctttgctcttcctgccccttataggagccctcacagttcatcttcctggtggcgcagatgagtgaggcacccttgggtaacaagccacttcaaaacaggtctatgttttgttacgtgcctgggcagggcgcttagcgtagctggaatgcgcaggactggcagttgcacaataataaattagtcctcctgcacctccccttagcaggaactccttccactggcaaaggactgccactgccatctgactcaactgtggcgatgtggacggagtcaccgagctgcttttcttttgcaaaacaaaagtctttttctttgcagtcacgctgtaagacgaggctgctgaaacttgtattccagttgacccaggtcctctcgaagaacagaggggcaactgtgcaaaatcttggtgacttgctgtaccgtgaaaaggcacttctccttgagaagcctgacagtgtcgttaatgtcctg

SEQ ID NO: 208198 - DNA, 470 bp, Homo Sapiens
tttaactgtttattgttaccaacttgtaagatgatctcaaaaagtgacttagtgcagtggaaaggagtataattacattataaacacaattgccttctcctttgaaaagttcactggactacaagaaatcccataaagctggagaaagaacattccctttcccttctggtaggaacaagtaacaccctccatctgttgagctcctaatgaagctcctctgtgccacccactggatgagggatattacatatgttagctctcatcttaacccatgaaagggctggtaactcctgtttacagaagaggaaacagtcccaaagaaacatgtaaaaagcaccaaatatcacaccacttggtactggggctgggatggatattgctagtgcaaacaaatgaaggttcttacccaaagatttaaatactttcaagcatcttgcttttcaagtttagattttcatttgacctacaca

SEQ ID NO: 208199 - DNA, 549 bp, Homo Sapiens; identical to SEQ ID NO: 100047

SEQ ID NO: 208200 - DNA, 471 bp, Homo Sapiens
tttaattatatttttattttttgtagagatagatcttgctatgttgcccagactggtctgaaattcctgggctcaactggtcctcccactttggcctccccaagttttcagattacaggtgtgagccactgtgcccagccaacgcagaaaaattctaagtttattattttataaatcatattccctataatagttgttcctaatattccaaatctttgtttcttaacagctttgagataaaattcattcagacccttcttaaacagggtgctaatcatctaagttcatacgtcaaagattacttctcaaacaatgtaccttttcacccttaatttaccataacctagtaaacgccacgtttccaaagcaaatccttaagacccattacaaacatcatatatgaaataacaactcacacttgatccaagtttgatggatatggctgatgctttctttgtcgtctgactacct

SEQ ID NO: 208201 - DNA, 506 bp, Homo Sapiens
tttttcatataggaaaactagttctttattgagagattgtatattagtattagtggattctgtgtgtaacaatgtcgtcatgcacacgatacaaaaaaaggctgggcccaccatgcttcggaagggcaacataacaaaagcagcgtacaatgagcagatggcccgggctacacgaccacagtacgtttcagcagggtaacatctctaaccgagcgctgtacattgtcaactgggggatgtaaaaaaatacagatcatgctttagttttagtacaagaaaaggtgaaaaagatacacaaccaaaaggatatttgatacagaaaaaattacccacaaaataagaacaggaagtaattcagcacagcagaacacgctacccctgtttaatggaaaaccattttgctgggattcttttttcttttcttttcttttttctctttcttttcagattgccaaatggcagtctggggaggctatttgggactttattttggaagggccctcaaa

SEQ ID NO: 208202 - DNA, 546 bp, Homo Sapiens
tttcaaactgctacaatttatttaactctttctttcacaggaaatataagtatgtaatgtaaacaccgacacgtgaaataaagtacaaggatcaggaagacaagtgaattggacaatactcttgctttaacactttactgcttcctgatttcatttgcagcatgaatcacctggttatacagactggcagaaggcaacattcagatttacagatacaccagaaagcctctgaaatccaacgatgccatacggaagtctgatctttctgttgcaaaaaaaattaaagctgggcacatgtccatttatccatttacccaaggcatttaatgtaggagcataagaatgcactgattaacacgtgagctttaatatgcttgtggaggccaagattaaattgtacctcttctccctcttcagagaaaataaaattaaccaaattaaaagcagagctgcctgatactagccagaagactacataatcacagtgaattcttatttcaataaatcccaggaaatgcaaaacacaataaatgattgccactggag

SEQ ID NO: 208203 - DNA, 533 bp, Homo Sapiens; identical to SEQ ID NO: 60227

SEQ ID NO: 208204 - DNA, 570 bp, Homo Sapiens
ttttttttttttttttttttgcctgccaaacaagatttaggttttagtggaactgacttcatttaatagagaaagactcacttctgatacttaaaacgtaggcattatccaattaaatgagacttggaaggagtccatatccagtcacctgctttgcaaattgtagatgtcctatgatgaactttaagtcaccttgacctttagccaaatatgcctcataagctgagtttcatgttcattgctggtgtccaaatgtccacagttgaattctcaggtttgtggtgaacagatttggtaacttctttttaggaagcatctgctgctgctcttgtttctttattttacttattttaaagatgattcgttaggtaaggagaagaaagtcactgaggcctttgtataaggtaattaatttaccaccacaaactgatatgctagaaatatcacctttcatcctttctgattttgttgttttaaaaatgcatttttttcaatttgtttttttaaaaatttattctaatcccatggtgtctcactgggtgatggaaattgaatctgtttcattattga

SEQ ID NO: 208205 - DNA, 559 bp, Homo Sapiens
ttttcgaattaatagtgacgagtgtcttgacaccagatgctgaggaaaatcttgccgatcacgctgagttaatttcggaaatgcagaggtacacgctttctcaagcctagccgattagaaggggctgccgggcttccaccacacctcatcgaggcaatgttttctggtagagatgctcatggaaatcactgagccaatgccactcacgttgcaaagaaccaaaaaaagaaaaaaatgcttagtaactgaatccgtggtgaaacggacgcagatcagtaagccaggctgacagcagctcggtccctttatcttttctatcaatttccaaacacgcgccccctatttctcggcggaaagtcgcttccggcttacgtcacgtccggcgcctgcggcccacccctccctttccggtcccccaatccacagccgcaagtttccccaacactgcgttacgctacgccacgcccccggaggttcctaaccctgcgtgaggctctttcacctgcctcaggttaagtaggcagaccccgcgggcgggatggtcaaagatatttagttc

SEQ ID NO: 208206 - DNA, 548 bp, Homo Sapiens
tctcactttttattaaggtatagtttctgtacaataacatgcatatattttaaatgtacaggctgatgagttttgctgattaaattttaatttctctgaaggtaagagaagtatgcttgagtacgtgattgattgctgaccaaaataagatattggcaataaacacttaagtactttttagaaagcagacttcataaactgatttgtgattcttctttccttcctttagacagtaaaagaaaagggatgtaacaggtgaaacaagactgaccatgttttaataagctggctaataggtacttaagttcattatgctttgtattctctacttttgtatatgtttgaaggcttttacaataaaagtttttaaaagtaaatgcagatgctcacacacacataaaattcaaactaaagttaaaaaaaaaaattaaaaccacacgtaatactaccagactgaattcttctttcacagtatttccagcaaatctggaatcagaagagttgtattcaaattctggttttgtcaataatgagctctgtgaacttgt

SEQ ID NO: 208207 - DNA, 353 bp, Homo Sapiens
tttaagatatctgtggttaggtccttgaaatctagttccctgtgagctaaaaagcattcagggcaaaattcagactttgaagatggaagagatttcagaagttatgtaatctaacactcagtttaccaagttagaaactgaggatggataggtcatatgattaaggctataatggcagctttggatactttctaatggtctttccatcaaggccaaacctatctggcctgagggcctgatctggaagccaatttcaccgtggttgccttcagtagttttctgactttcttctcattaactatctaattcaccccaacaacagttatatacctctctactttcctcgtatttta

SEQ ID NO: 208208 - DNA, 536 bp, Homo Sapiens
cactctaatgtcttaaattacctacacttaattcaaaccagtatgtagccatttgcttttatgaagtctttccaaagcatccaatctagcttgccaaataaaaaattttatttttttcacaagattttatcaatttacacaatattaattatatattaataataagtacaattcgaatacacaggtttgaaaaatacaacagaacttcaataagcacaaagttcaactggtaagtgaagaatatggaagattatactggaaaagtagcctaacagtagtgagagaaccttttatcgggatttgcagctagaatagaaagtactggcaattctgacaagtcctttgttcacttctgctttcagtctctgtaaatttccttttgtggtcatttcatataattatcctgtaatatgtaatctttggtgtctgatttccttcattaagcataaagtttgtaaggtttattaatgttgtaacatacaacagtatttccttctgtttagggctaaacagcactccattgcatggatacacca

SEQ ID NO: 208209 - DNA, 527 bp, Homo Sapiens
aacctcctgttatttggatttggattaaaatcatttggattaaaaaagatttggattaatcttttggattaaaagcatttggatttttcaacaaatgccaaaaagacagtatgccgaataacatagttattgccgaatgagcacagaaaatcattttgcgcaagatgtgggaaggatgaggatgatgaaactacacaaggaaggacgggtatgtgggcaacagtgatgacagataactcactggtcagttgtacagctggatttacacaatactttttgaaaatgaccatttatggtgagcaacactccagctacaggaaatatgcgactcgtctgggacagatcaaacatgaccttagtactaacgcaaacaagactaccacgtgtggtttatctctgagggaaaatgtgaagagaagttacttacatacctcatagaacagtaaatgagctcccattttgatcaaggtctttagcctagtattaattacaatcatggctttgttgtgttgctacagtggcaagca

SEQ ID NO: 208210 - DNA, 504 bp, Homo Sapiens
gataataaataaattctgtttatttttttctctcacatagttcaagaaaaccagacattagtgtaagttggagaacatctgagtttggaaacaggtctttgccttaatggattgttgactagaaaatcagaggccgaaattcaaataatatgttttgaagtgttgttgtaccgtgttaataggtgtttcatataaaaagggtagcatcgactgggtgcagtgtggctcatgcctgtaatcccagccacagattcattcattcattcgttctttctttgttttaagactagtcaagtgcagtagtgagaagaggggaagagtagaacaaggagcttgatctataactgactgcgaacaatcaattgagctaactcactaccttcagaccagccacaaattcatttctttagaaaaaagatgagaattattttctaaaaactgagcaatggaaaaggaaccccttcaatgggtaaagggaggtaaagttaactgaatggccttatt

SEQ ID NO: 208211 - DNA, 505 bp, Homo Sapiens; identical to SEQ ID NO: 48966

SEQ ID NO: 208212 - DNA, 528 bp, Homo Sapiens
ttttttttttttttttctgattatgcatattttctttaatcatatagattatatatacaatagacaagacaggactatatagataatggacagacttaaatgcccgcatttttaaggtggagaaaatgatgaatctatgcatccccgagaacacttaaaatttttttttatttcactgggaaattcttacagctactttacaatcataggttaacagcctagttatacagaagacatattccactacagagctatactctatgcaactgtttttttcccctcataaacaacctgagttcaaattgaattctatcttccacaatcacaatgggtgcatcacccagtacacagaagtttgaatcacaaaacataattaccacaataaaacacagtgttcaagtatcttggcagagcaatctgccgcacaaactgcaaattaaattaactacacagactaaaaactatacagcctaccatcaacagttgtgcattataaaaaggtagtttctttccttttgttttaagtca

SEQ ID NO: 208213 - DNA, 552 bp, Homo Sapiens
ttggtaattaaccaaaagtgaaggcttttatatcaaagactcaattgaggaagcagtggccttagtcattattggcataattgctttagtttgcttatggatcttaaaacgtttatgactatatctgcaagtaaaaaaaaaattcaataattaaaaacctaaacatatcgagtgtttattttctctttttgcaaaggtatattctaaactcaatgttcttcgggaagttttccaattaaggctctgagtattgatatttgggatttagagaatggctttctatgaccagaatggttagtgatgagattttatgtaagtaggactgggtttttcagggggccttgtgtaacttgccatcaagagttgggaaaggaggccctgagcagtgcagcagagctatgtaaagtgagagtttgggtcttgggaccaggtagcctgggctcaaatctgctctcacacttagcaatgtggtcttgagcatgattcttcacttccccaggactctgttttctcttatgtaaaataggaataatatttattttcaatgatggg

SEQ ID NO: 208214 - DNA, 439 bp, Homo Sapiens
tttttgttctttttaagctttttattatagtgaatgtcttatatttcattaaaagttttgatattatatgtgaaacaacagttctgataaagcaatatctagataaaggctattacttacctttctcaaattgatagattttctccttgtaacaagctctgatataaaatatgataatttgttgaaaacttttacacattcaaaactaaattatcatatatttaatgagactttgggtgtgtatgtgtgagtgtgtgtctgtgtgtgtgaagaatttcctatatttgttaaaatgtcagatttcttatgatattacctgtctgatgaggaagactttggggataaaagccatggtcattcaggatgctgtccgagatttgtcctatgtgacttttctgacatacactgagttcagatgtcctgaaaaatcatactccta

SEQ ID NO: 208215 - DNA, 516 bp, Homo Sapiens
tttttttatcagtcaattatttctttttattgctgggtagttttgttgtattaataaacacattttgtctctccattcacagtagttgacagacatttgcactgttaggctgttatgaataatgctatcaacattttagtacagatctttgtgtgcacacgttttcattcttaacatacttacgtagtaaaattgcttggtcaaatttacaattaattttttccagaaactgccaatctctttccaaagtggttctaacattttatatttctattactagtgtaacagagtttgagtttctccacattctccgcaatacttgatactgatcgtctttgattatagccattcctagtgggttcctcagtgtggttttaatttgcaatttgctaatgtctaatgatgctgaacatcttttcatgtgctcactggctatttgagtatattctcatgtgaaatatatttaaatttttccctcatttaaaaaattgagctgtttgtcttggtattattgag

SEQ ID NO: 208216 - DNA, 474 bp, Homo Sapiens
tttttttttttatagtagaaaaggtgctttattttacatatcattggtacacgatacataaaactgcctaaaatcagtcttgaaaaacacaacagtcagtcagttacaccttaaagggtcaaagaccaagtctattttgcaagctacttcatttatgatcaaatgactacaataattttaaatactaataatgtcttcatatccaatgttacaaatgatttttgttacaagggctgtaattttttaaaataaaaatatctttagctatagaccttatttctaatcagaatgaatctttgctagtctacaagtctttgaaataatagatcaacaatttcaccttcctatagataattgtatttatgtaattgggtaatgaggcaggagtccttcatacatgcaatcagattatttcaattttttaaaaaatgcagataaaattgagtttatatataccctatgtctaattaagtt

SEQ ID NO: 208217 - DNA, 518 bp, Homo Sapiens
cttttgagacagggtcttgctctgttggctcaaactcctgtgctcaagccatcctctcacctctgcctcccaaagtgctgggattacaggtgtaatccaccaagcccagcctaggaggagaattttcttgacaaaatgtttctctgctaccaagtaccatacccttgacgcctgcccaggactttatcttgctcttagcattaccaaactctttgtaattcttatacacatcccactttcacttgcttgtctttgctcataatatcctccctgctaggtgtgattctcaacatgcttgccccttatgatttggacatcttactccaagacgcctttcctgtttcttctggccaggttaagcaactttcttccaagcttacataataatctgctcatgtgtatatttgtctctcccctagagagtgaaccgtttaagggcaaggagttcgtttcacttatatcctaagcagttagcaattgctcattaaatgtaaaatgaatgatcatctagttattgt

SEQ ID NO: 208218 - DNA, 468 bp, Homo Sapiens
ttttttaaaatcctgggaccatatttatttagaagtagctgttagtaaaacattagaaaaggagtcaggccattaggttatttatccaaatctctaagcaattaggttgaagttattaagtcaagcctagaaaagctgcctccttgtaaggctttcatgacaatgtatagtaatccacagtgtccaattcttcacactcctcaggaatatcactacctcaggttacggtacacaggctataattgatgatgatgttcagataactgaagacacaataaatgacattcagacatcaggacaattccctcatgttcttttctatgatggccacctgtaccagcaacgtgggtttcacccacacaacgatgaactgttctcttacttctccagttgattttaaagacttgttaagaggtcttactaataaaatttgggtatgatagaaaatccacaatcaaatcttgaacc

SEQ ID NO: 208219 - DNA, 648 bp, Homo Sapiens
ttacaatgatataagcacatctttatttttcatttaaacacttaatatttacaaaacattaaaccactcaattttgactattgtatcaaaagtgatatattttgcaacatatactgtaatttaaataattctattaattttcaaaaagtacatttaattaccatactaattttcaaaagaagagcaatggaatgtcagaagtaatctttcactatgtgccagtagcttgagtggttatattctgaaaaatgaatgacacattttctgttattctttcaagaaaaggatctgtaagatttaaatgatctccagaaaaatgtttccattgcttcagctgggacatagaaagaggtttcagggagttagatttctggtgatgtggaccaagctgacaatctctagagacaatgaatttttccaacgaatcacctgtatgaacttcttctcctgtacactcacagtcaagcagatcatgagtaacacaatctgaactttcatgtaatgtgaacaaattttaagttcttctactgaaaactgaatatgttcagatgtcttggtgaggtcgacaactgccccacaaagaccttgcttactgatctgcctttgatagatcttttcttctattgtacctaaagagaaaacattaat

SEQ ID NO: 208220 - DNA, 558 bp, Homo Sapiens
tttttagcaacacttttcttgtttgtaaacgcgagtgaccagaaagtgtgaatgcggagtaggaatatttttcgtgttctcttttatctgcttgccttttttagagagtagcagtggttcctatttcggaaaaggacgttctaattcaaagctctctcccaatatatttacacgaatacgcatttagaaagggaggcagcttttgaggttgcaatcctactgagaaggatggaagaaggagccaggcaccgaaacaacaccgaaaagaaacacccaggtgggggcgagtcggacgccagccccgaggctggttccggagggggcggagtagccctgaagaaagagatcggattggtcagtgcctgtggtatcatcgtagggaacatcatcggctctggaatctttgtctcgccaaagggagtgctggagaatgctggttctgtgggccttgctctcatcgtctggattgtgacgggcttcatcacagttgtgggagccctctgctatgctgaactcggggtcaccatccccaaatctggaggtgactactcctatgtc

SEQ ID NO: 208221 - DNA, 560 bp, Homo Sapiens
atgctcagatttaccatttatcaagaggtgttcacactatcaattgtgcaattatcattctacacacaggagtgataaacggagtaaaaaaccacagccatggatcgggagaccaaggtacctccagaggagtccagtgggtccagaagccctttggatgttggtcagaggctcctcttgggcagagatcacagcagcagccaacaggtctggagaagtccttagagttctcatggacaaagtttgtgaaggcatcttagacaagattcttgtctttgctggttttatgatcctctgcagatgggtctattctcattatctcagccacctttcacttcctatcagttcagttcaggtctctcatgatcccaggcagcagtagttgttatcatgtgagttcattcatatatgtttatctctttggggatggggggacaacttcactgtggacttaattctactggagatgagtgaccccattttaagacaataggatcacaaattattatcacatatcatcagggcagacaatagctacaacctggggctgaaagcaggta

SEQ ID NO: 208222 - DNA, 509 bp, Homo Sapiens
ttcttttacacagcctcaaaacatttttattaccgtcaatttgcttatagccatagccaaatggcaggatgtacaatcacatgcagaagaaaatatttattttgactcagaaggcaaagggattaagagaacattgtattaaccttgcctttcatctatgttttaaagggaaagtctcctgaggcatccattgaagttctattttttaataaagagtatcaaaggcttttaggagaccaggtgtgtgtttaactgagaggaggagaggaaggaaagaagcttcacgagagagaaaaggcagttttcacaaagctgcttcagagactgcaaaaagatgtatgtgctggaatctgttacaggcattcctaacagccagcctccttcaccgtccccccacccctttttttctgctgcttggaaacaaaatagctttttttccaagcaggttgttatcatattcatggcatggtcaatttccgtttgccaagaaaatatttaggctgatcaaa

SEQ ID NO: 208223 - DNA, 575 bp, Homo Sapiens; identical to SEQ ID NO: 45788

SEQ ID NO: 208224 - DNA, 552 bp, Homo Sapiens; identical to SEQ ID NO: 61674
  misc_feature (435)..(435): n is a, c, g, or t

SEQ ID NO: 208225 - DNA, 566 bp, Homo Sapiens
aaaaattgctaattcacagaacatggagatgagtatgttttgaaggcttggaagcatgcaagtgggagaagaaaggagtcagctacattctggctgtgtgcagaggcaggtcactgtggtgggagtgttcctgtctcatggactctgcaaatcacaatgcttggcatggcctcccgaccctgatggcagagaagcaaacaccagtcggagagctggggtcctcccagccctcttggccctgtggccaattttttctccaatagcctcataaaatcacattatttgagtgtccatggctccaaaacaagcagggatgcccatggaccctgattatccattgtcacccttccctccaaacagccacctctcccctggagacagccccatactccactcagacctgtgcacttcctggtatccttgtcacctgctttttatgtctcattttacaaacaccaaattggaagacagcaggagctgccccataataccagtaaagtgagaagcagagataaactagtcctagacagccgactcatgttgggggcagcccactcacagtggcc

SEQ ID NO: 208226 - DNA, 557 bp, Homo Sapiens
ttcacttcagaaaagtttattaaaggtaaaatcagatttacagagtataaaacaataagggatagaggtgaagaggtttcaaacaaactatgagtacaatagaaagtaaattacctacctggggttctcacagcactttttctttacttctgcacaaagcctaatgtgttttttaaaaaatccttggaaaagtctcagcagtcatatattctcatgatttagcagttaaacaaaatgtccacaatccacaaagaaagaggggtggacctaagtgacagggtactaaacatatatactatgataagctctgcttcctctgttccagttctttaaattttgtgtctgtgttttttggggaaacggttatcatgcaaaatgactgtcttggaagcaggagttgaggaaaggaaattctgggctctctaaaaagccttcttgcctccttggtgcagtaagcagcatgtcttgtaaaaagcctaacttctaccagacttataaccatattatgcaattggtacttttttaactaagcaaattttataaagaatttgaaacgt

SEQ ID NO: 208227 - DNA, 532 bp, Homo Sapiens
tttgaggcaaggtcttactcagttgcccaggctggagtgcagtggcatgatcttggctcactgcagcctccgcttcctgtactaaagcaatcctcccaccttagccccccaagtaataatatatgggactacaggcacacgctatcatgcctggctaatttttaaatattttttgtagagacaggttttcaccatgttgcccaggctggtctcgaactcctgggctcaactgatccaccaactttggcctcccaaagtgttcagattacaggtgtgagctgctaccatgcctagccccagcttctactgcttgaggctctctttggcatctccacacatcatccttagcagcccagactgcatttctgtagcagcctcttccctggtctcttctttcagtctctctgcctctaatccagtggctttaagaattttttggctgtgacttccagtaagaaatacaatttacattgtgacctagtaaatatgtgtgtagatttattaactgaaataaaaatgttatgatttaatt

SEQ ID NO: 208228 - DNA, 540 bp, Homo Sapiens
tttttcgtatatgtattatatactgtattcttacaataaagtaagctagagaagagaaaatgtttgttaagattataaggaagagaaaatatatttactattcattaagtggaagtggatcatcatgaaggtcttcatccttgtcatcttcatgttgaataggctgaggatgagaaggggttggtcttgctatcttgggtggcagaggtggaagaaaatccatgtataagtggacccacacagttcaaacccgtgttgttcaagggtcaactgtattctgactcagaatagcttaagaccctcagggtcatagaaaaataccatcataatctcttttatggtaggttggcaatataaattattaacaaactctaaaatattaccagtacctgaaaaaaaaaaattcagcagaaaactgtgaagtggaacatttagtcactgtttttcattcattttgaaatttttatatgtttacatatatctgttgtaaaaaataccaactttccaagtactaggaatgctgaccactaagcctgatct

SEQ ID NO: 208229 - DNA, 351 bp, Homo Sapiens; identical to SEQ ID NO: 40414

SEQ ID NO: 208230 - DNA, 534 bp, Homo Sapiens
ttttttctttttttgatttaaaaatccaaatatacaagggaagtcttggctccttatcctagaccccagtcctatactcctctgcccaatggcaaccaccatgaagtttattctgtattttttcaaagtctattcacatacagatacatgtatatatgcatacaaagatacatacacatacagagataagagacagaggttaaacaaacatacccttttgtacacaaaggggaacatactatatacatggttcagcaacctactttttcacacttcacaatatatcttgaatatcgctccctaccagcacatttgtatcctcagctgctttattttctctcattttcctgttaacattttttacatatataacaacccttttaaaaagatttctgctgatgcagaagccaacacagacattaagaaagagctgggtgaaaatgtcaaagaggcttatacagatggccacactcatttacataaggcaataaacagatatgcaaattcaactctaatatatggtgcttaagtaca

SEQ ID NO: 208231 - DNA, 528 bp, Homo Sapiens
tttaaagttccaagccttttactttatactttgacacatttttatatcattttatctttaacaataaccctttaaggtaggaattatctgcattttacagatgataaaacaatcgcaaagaggttcattgatttgctcaagtatatcatacagcttttttttttcttttttttttttttttttttaacacacacacactatactcttagctgaggcctgtctgcgttggttgcttatcttacagcatttcttgtcttctctacttttggagcgacggctccccttttacaagcccccttatttcctctcctttcactagcccaggtgggcttttcttgttttaatactgcatttaatagcacaaaaaatcacgaatacaaagaaactggcaaaggtgtttgtcaatgatatccctgcctcctccacttttctgctttcatacccatatatgtaatgggctacattttttagaaacttttctttttccccccaaacatataactgttatgtgattggtcaattgaagct

SEQ ID NO: 208232 - DNA, 563 bp, Homo Sapiens; identical to SEQ ID NO: 61984

SEQ ID NO: 208233 - DNA, 360 bp, Homo Sapiens; identical to SEQ ID NO: 57885

SEQ ID NO: 208234 - DNA, 556 bp, Homo Sapiens
ttaactgtttggaactgttttatatttttaagtgctgtgcatttacaaaacaaaaaaaaagtagtttctaagtaagaaaacaataaacccaagtagcaaattagttataaacacagaaagaaaacaaaatagacggcatccagttaagaattttgaaagcagaatagggctaaaacctaacagaactttattcctcgagaagctttctcttgatcaatagccctaaaattttaagacattctgtatttaagtccttaatgtacttggaaaacctcagagtctactgaatcatacaggccacgaagagccaaaatatttcaggagtaatagatgttgctaaaaattacatttgcagcgaatccaggaccaatgccagaatgatctgggaatttaaaaaacaaaacaaaacaataaacacctaatttctccttgaggagagtagaaatggagaataaaaacagaacttcctttgctgggggctctcaattctgaagctcagttccttaaaccgctaacactggctattagctttcagctgggctggttgacatggcaa

SEQ ID NO: 208235 - DNA, 496 bp, Homo Sapiens
acaagttgcttgtttccattcaacaatatattaaccatgtctctacatacagaagtaactcatttttcttttttctttttctttttaatggcctgcgacacagccccaggaaatcctgagaacatgtgccccagtaactcctttttcttaactgctgtgtagtttgtttagctattccttactgttggagatttagggtgtttccagttttttgctgttacaaacagtgttgtaatgaatagctctgtaatgtcaccctatgcataagtatggtgactgtttctctataataaatggtgagaagtggaactctgtgtcaaaaaacactaagtttataagtataacacatactattaaattggccttgctagttttgtggcatagttgttatagttaataacagtaatatatgtgaccatcagtttcacatattagtgtcctttaaaactctaggacatctcattgacttaaaactcatgtagtatatagtagaaga

SEQ ID NO: 208236 - DNA, 465 bp, Homo Sapiens
agtacttcttttttatttctatcctaacaagatgcttcaggcttatcttgtgcttatcctgccctagccctggaatcagctatttctgcaaggagccctggcttcttttaatgggagtggtattagaaaccaaaatctggtttatccatgatatgtgtgatgcactctgacctttttctgtttcattaaaaatttattttgatcttagaccaaatggattccacaatgcacattttgaaaatactgctttagggcaatgtactccattgtcactggcatcttctgaaagccaaggctaaactagtttttctgcagtattagtacagctccaagaattccctggaagctagcgcaggcctgtgggacagcgacaggctgctccccagtggctagtgctgggtttagcacgaggcaacagcaggctgtggagctgtgtttgcggcagcagctgttttccagaggcct

SEQ ID NO: 208237 - DNA, 530 bp, Homo Sapiens
tcgtttctatgaaattactcgtatttatttagtttttctccttcaacaaaaatggaatcaactataaaaactcttgcatcctactttttttcacttactaaatcttagagagttttctgtcaaaacatattgccctagctcatttaaaaaaataacatatatcttatcagtttcctgtgaatagccatttagtctgtttcccatttttattaaaacaatcagtgcccatgtttacctttttttttttgagagggatttttgctcttgttgcccaggctggagtgcagtggcacgatctcagctcaccgcaacctccacctcccaggttgaagtgattctcctgtctcagcctcctgagtagctgggattacaggcatgtaccaccatacccggctagttttgtatttttagtagagatggggtttctccattttggtcaggctggtctttaactgctgacctcaggtgatatgcccacctcagcctcccaaagtgctgggattacaggcatgagccaccacgcccagccg

SEQ ID NO: 208238 - DNA, 538 bp, Homo Sapiens
  misc_feature (518)..(518): n is a, c, g, or t
aagttgcaatagctggacaactgttacaacttcaaatcatcaagaaaaaaataaggagattaatccgtctcagtaataaagacagaaaataacttggacaaaccacatcgttttgaatgcaaaccattaatgccttctagaatatctcctgcacaatctaatacacaaaatacgtaagaagaaaggcaaataaggatgagctcattaaaacgcatttgggagtcgcaacagatcttgcttggaaagtaaaaccagcaggatgctgaattaaaaaacaaacaaaccaacactggaggaactgaggtgcacaagcagtgcacgccactgccgaggtctggacatgaacatgctggtggtctagtttggtctggggcctatgcacctgcatcgtgcacttacggttaaaaaaaaaaaaaagggaaaaagaaaatgccagtagtaataaactcagaaattatgtccaaatttacagtaccaaaataatgcatttataaacaaatgcaaaaacaatacccctntggtaaataatacagtgtct

SEQ ID NO: 208239 - DNA, 520 bp, Homo Sapiens; identical to SEQ ID NO: 61978

SEQ ID NO: 208240 - DNA, 559 bp, Homo Sapiens
aagaagagctgtcttgctagtatgctcagttttctgagaggcctcagcaggtcataaatttaggtttgccatgggcaaactacttggtcccaacatgaaatatgacaatcaatttggcataaaagaggcacacgggaacatctgatggactaagaaataactattattaatgcaactacaaatatgaatatcttattacacaaacaggaagaattacgtatttttacagggtattggtgagcagtcaaaaagcgtggcaaattacctagaagttttaaaagttttaagtgatcaaatatttgcatcaaatataattccacccaataaagaactttgtatttaaatgtttttactaaaagcacaaaattaacctttgctctcctgtaggtaccccacctttgtccatacagaagatgcatgtgcctatctcatacgtatgcacatacaaacacacatccacaaacaggtaaaaaacgaatgctaaaagtctaaaagtactccaggcgatcacaactgtcagaacattaattttcttctaaccaggataggaaatgtgggt

SEQ ID NO: 208241 - DNA, 510 bp, Homo Sapiens
ttttttagagatgtggtcttgctatgttgcccaggctgacctcgaactctgggcctcaagtgatcctcctgccttggcctcccatagtgctgggatcacaggcatgagctaccatgcccagccccagtctggtgagctgtttatgtgatctgtttgctctggaagctttcagggcctttgtttaatccaggaattgtgaaatttcacagcgatgcattgtggtttgggtaatttccattcttgggcggactttctggtggactttttaacctggaaatgcaaagcctttgggtcccgggacacttttctttttctgaaactcctatcaggggctagatttcctagactacgcctctgacttcctgatccttcctatcttccagctctgtctgtcagtgctgtgggaggggattcttcaagggcctcccaatccactgtgggcttgtctcttctctagatggtaacatccgagagccactcgttcctggaatgtttcttcttcacagcaat

SEQ ID NO: 208242 - DNA, 202 bp, Homo Sapiens; identical to SEQ ID NO: 60007

SEQ ID NO: 208243 - DNA, 559 bp, Homo Sapiens; identical to SEQ ID NO: 59856

SEQ ID NO: 208244 - DNA, 386 bp, Homo Sapiens
aactagtacataagcatttatttgaggcagatacagtgctgtgggacccctaggctaacagcatcaaaaccaatttttcagagactccattccataggaattactcaaagatccactaacacctgaagcaaagcagagaatctgttaccaccttgcagcaatccaagatctcactagaaaatatgttactaaagttgtatgtaatatgcttacagatcacagtgaaagtatatcgaatggcaaggtgaactatatacggctcttaattcaatctcactactttctattactagagaactggtcagcatcttctggcaggatactgcattaaaacagtcaactgtggctctcccggcactgcatgtggctttgggtaacaatgtgga

SEQ ID NO: 208245 - DNA, 495 bp, Homo Sapiens
  misc_feature (440)..(440): n is a, c, g, or t
aaatgctactgaaatgtctatttaatatgcaaatgccaatacaatattgagtgaccacaagagttacctttagagggactctgcttccaagttaagagtctgctctggtcaagattgagtgagagttctcattgtaatttaataaacatgatgatgcttacatgtagcttcttatttcttcaagaaatttgcaaggcgggggaaagatgtcaagtctgatttcagaaattgtcaaagactttcaatacttaggcttcaaatgctggctttacaatcttctttcttatttaaccgtttttagagaaatgaaggaaagggaaatttgaagtaaaattagagagagattccatgtccttggacagaggaaatttaacaagacaagcaggttttgaccaaccagttccagatattgcgcccgtggtcaaatacagttcggtccnaatggtcaaaatctgccgctgcccacatatttacaggctcttcggatccattagg

SEQ ID NO: 208246 - DNA, 1000 bp, Homo Sapiens
caacttgttttagccctgtctggaacccagtccactgactgctcatctttctgcaactcacaaccccttcctttgttcgctttcctctggcttcagttcagatcccatgggcttatcctttcaactgcactgctatcagcatgctggcgtccccgctgctgcctgcaccctgcagccccttactgtcttttcatctcacctgttggtcaagaccccaaagctggcttaagcctaaccatcccattccccctgcccacactcaaggagctggggggactagtcataatcaccagccacataacatttctgggagtcatatttctatctctacttagctcactttccttctgtctagagccaccagtttgaaacttccccattttcctccaactgccaatacccaccaccacccattctcagcagatgatctctacctctgatttccttttgcaattaatgacataaatgtcattagctacatgattagttgttaagtcatttatgtcattaattgcaaaaggaaatcagagaaagaaaagatcatcaccaatgctgtggctgggaggttaaggggaaagcagtgacagtagggaaaaaataacagcacaggagaggtactgccatatgcagagaaaatacacctagaccttaaatcttggaggttgtttacagtaatgagaaaggcactactaaaacagacccactgtttctaccagaaaagtctttaatataaagtactaatattatctgctgcaagtatatgaagttattgtgaaagaacactgctacaagcacaaatatgtggactttaagcatttcataacttttatattatgataatgctcttcagaaaaaaaacaatcagaaacacacacacacacacacacacacagaaaaatcgccaccaaaaagtataggtaaaaaatcagtaagaaaattaaaatgaaattctttaaaaaatttaaacaataatttaaataatgtataaaaaaaaaaaaaa

SEQ ID NO: 208247 - DNA, 565 bp, Homo Sapiens
tttttctcttaaaaataattttttattgagagatttacataaaataagcatatgataccaaaaagaaccctagcttaacaaccctaacacaaaaaattttcatttattttgaccatgagtcagcaaacttttctgtaaagggccagactgtaaattattttgctttgcaggtctctgtcctaactactaaactctaccactgtaacacaaaagcagccatatacaaaacataaacaaatgagcatagctgggttgcaatcttataaaaacaggacacaggtcctcaatttggatctatcataaaaaaactttaataacactaacttttgctcattaaaatgtttgcttagttggaggtcaaattcttagcatcagatgtaactccacaaaagtaagaaaggtattccatcacttcactactatagaactgtataataatacatttctcatttgttacctttctaatgaactattctgagcagtctgaagtaactgactgcacagccttagattaccactcagggtggaactcttaacattcacttaagtaatacctacaaacgat

SEQ ID NO: 208248 - DNA, 597 bp, Homo Sapiens
  misc_feature (552)..(552): n is a, c, g, or t
  misc_feature (571)..(571): n is a, c, g, or t
tttttgattttcccagaaaagttaaaagttttatttttcttcaggtaaactctcctattttacaggaaaataagtatctgtaagtaaaccatctgataatcaaatatttatatatgaatttactttcttactactaatgtaatagcaccttctaaaatgaatttaatgcaattattaatttaaatggacagatagcataatagtaatgctctaaaatggaccaatttcaccttccagtcattatgctgacatttcaataatacagggtaagttcatagctacaaagcaagccaacatgagtgctcatgtattctgagatgtctaatccagagttcatacttctggggagtttgctacctaccatatactttctcagctttttaatctataggccatttccaattatttgattctattctattaaagaggttttataatgaaatgggaattatgtgccaacattccttattggtattatcattttaaaaaataagacattcaccaaattttaggaagcacttaaatttggttaaatttttaactatgtcactntagttcttcacatcccatntgtcctttctttctggatagtaatac

SEQ ID NO: 208249 - DNA, 526 bp, Homo Sapiens
tttgctttgcattcacctctgggtttataggcagaacccactgcaactgatggctttcaagactgggttactgatgactctctgttacccactaaagcacatttgaacataaagagtatagggaaaacacctagctttgacaaaaggaaacctttgacaaaaggaaacattttatcatatttacttttaaaaaataaatactagatatggctgaaatcccctttattcaagaggtagccattatctaaaacttgaatgttttgcattcctaatgtatcacttaaacaatataatttttcatgtttaaaagcacataaatggtatactgtatataacctgcttcagcttcctttttctttgtcaatcttatgtttttgagagttatttgtgttgtagctctaattttaattggtgcataagcattccattatatggaatttatcctaagtttttagtatttcaaaataatgcagcatttacattgctgtatgttttcccattcacacggggtaaaagtttttctagg

SEQ ID NO: 208250 - DNA, 442 bp, Homo Sapiens; identical to SEQ ID NO: 59815

SEQ ID NO: 208251 - DNA, 447 bp, Homo Sapiens; identical to SEQ ID NO: 99947

SEQ ID NO: 208252 - DNA, 521 bp, Homo Sapiens
  misc_feature (278)..(278): n is a, c, g, or t
ttttttaaagaatactgcagactgagaattttgtaattttgggtttgtctgtggtgaattgttattacattgttaaaatagaccaagttttatcaaacttttttctgtaaaaggccacatagtattttagactttgtgaaccctgtggtttctgtcacaactacacaagtttgccattgtagcatgagagcagccatagataatacctaaagaattagcatggctgcgttacaatgaaactttatctatggtctgtgaaatttaaatttcatataatntttcgtgtgttgtgaaatattaatttcttttgattttttttccaataatttttaaaatgtaaaatccatttctagcttgcaagctgtttgaaaacaagccggtgggctggatttggccagtgcatctcatggtttgctgactctgtacaatgtctttattttcatatgctctgctcctttccagttcctgaaagaatctcttgggattctctagtagttgctcattttcagaagtctaattat

SEQ ID NO: 208253 - DNA, 519 bp, Homo Sapiens
tttgtactaggtctttgaatcctggtgtgtatttgataattagagcacatctcaatagccacatattacgtgctcaatagccaggcccgctagtgactagtggctgctgtatgggacagcacagatctaaaccttgaagtccactcaacaccttttctaaagacaaaacacatggtttttatccagcatttaaatgattaattatggctttaaagcagaaggcaagttctagtgcattaacacaactgattctgtatttgagggttttttcctgatttatttccaagccatggctctagcaacgttgtattagaagctttgatatgaaattttaaatataatgtttcatctcttctgactcacactttttgagacttatataccaaaagttatataaaatcattttttactgtagaactacaggtgaaatgcaaatcagcaggttcaagaatcctacactcagagaccactaggcatgactgccctagcccatgaccctgaactctgcctgcctgcctg

SEQ ID NO: 208254 - DNA, 453 bp, Homo Sapiens
tttccaatcctttttctgcatctattggtgtgatcttaggtttttgatacatcagcatatttttccaattttaaattgatcttcaatcccaacttggttataatgtgttgtattttacaaacattgttgaatttgattgtaaatattttgactgagactggtgcatctaaattataaataaagttgacctataatttttcttccccaagttgtctttggttttggcatcaagatcatactagccttataaaatgtactggggaggtctatttcatgagttctggagggaaacatgtataataactgaaggttttatatatatatatatatctgtgtatatatatctgtatatatatcttatgtatatatatatctgtatatatatgtacatggccaattatgtatgtatataattgcccttagatcaagtttattagttattttattagttgt

SEQ ID NO: 208255 - DNA, 534 bp, Homo Sapiens
tttttttgagacagtgtctcgctctgtcacccaggctggagtgcagtggtatctatggtagcacttgggcccagaagcttgaggccagcctgggtaatatagtgagatcctcatctccaaaaaacataaaaataaaaaatgcatatacctcttaactcagcaattctagccctatgattttattctacaggtatactcacaaatgtgcaaaataggtatcatttacaaaagaaaaagattaggaacaacctacatgttcacaaataagggactgcctaaaaaattataatatatctacacagaatattatgtagtagaaaaaaattagtagaagctctttatgtatacttatatttacaaaatatatgtgtacatccttgtatacgcataacatatctatgcattagtaaccttggctacattcaagagggaaaactgagtggctaagagacaggagtgggagacttttcactatatgtatactctgtttatcttttgagtttgtacatgtgactatttcctgtgcaaaaaaaa

SEQ ID NO: 208256 - DNA, 467 bp, Homo Sapiens
tttgtagagttggggggtctcactacattgcccagactagtctctaactcctggcctcaaatggtcctctcacctcagcctctcaatgcactaggatcacaagtgtgagccaccacactccaaaatttttcaattaacacatttataaatattctcagagaatgccaatttaactattagagggaaatctagtttgccttatttccaagttctcagtgggttgttttggaagaaaggaacagaaactactcaaactagtttaatcaataaaaatagaaggtagagttattggaatgtagggatatctcataactcaagagcattaatccttaagagttcaaggtttttttttttaaaaaaaaaaaaaaagtaaaaaagaacccaagagcaggaggagtaagtactgctaggcttctgagaaactggaaaggcgatctggaaaggagtcagaattcaaatggtttatt

SEQ ID NO: 208257 - DNA, 530 bp, Homo Sapiens
tttttggacatgtccattttggaagaaacttttgtgttaaaataaactaatatattatgggctagaacataaaattcaccaagaatttcaagataaaaatactaatgttttgcttgtttgggttatttcaaacaataactttgaaatctataattttttcaccaccgaccctctacctccttgcatgctcattctcctgtgtggctagatgcatttcggaaaagtgttttgaatattatttcagagcaagtatcattccagaaaataagtttaaagtttgaaatgtttattttttgtaacccatgaatcttcagcttaagtatcttctgacataaaagcattttcataattataaaagtgctgatattactctccacagtattatatctgatcctgcaaagtagttcagataccagagaatactcttaaacattttgactcacgcatttaattatgtttaaaatttatgtaacaagacattaaatgagaaagaatggaatgaaaaatgggttaaaagaatgccaaatcgc

SEQ ID NO: 208258 - DNA, 541 bp, Homo Sapiens
tcagtattctgaatgtttacatctgtttgacattagccatttaatgccttttttaaaggcggtattactcctacagtgtaacagcaaaatgtgaaatcaacccaaacataacatgcatgacaaacacagattgggggcgaaggccctgaacctacatagacattttatatcagcatacagaaaagtaaaatcctccttcagtcctctaccaaagaatatattattcccacaggaaaaactcagaaaaggtgtgtaaaatcctcagaagggggagcagttgattcagtaagactgcgacaatttaatactgttacgcttgctttgatacctgactaaatgtgactgagtgcaacaagcatttaagaaaatttttagacagtgttttgtttagaattcagggatcatgcattctttaatggtgctgtttgttttttatttcttttctacaaagaaaacaagtgttgcctacaaaagtgactgctcacaataccataagttaaatgaaatgaaatgtttgtctcttcatgtttctctgtctttc

SEQ ID NO: 208259 - DNA, 523 bp, Homo Sapiens
tttccatttgtgccatctcctatgtaatctgtagattgacagtctgtgcctaaaggattcctccttatttcttcagaaaacttacataactcatgtaaaattacagaatatagttttaatttagggcaataagctcaatatatttcagaaataattttaaaacatcaacctgaatttaaagtcatatcaaggttcaatccaagtcacaaatagtgactggcacaatcacagacaaaaaatgtttcaagtcgctacaacactattatctgatgctgacaaagtttcatatgttcccagtgttatctctatttcttgtatcttaaagcatatgaaacaaggtcttaaatgatttttcccaccactgttatcttaagttatggaacactttcttgagtggcaaacaaggatattatgatccagttataccactctttgagaatcaatttactgaaatacagcttagaaatctaagaggaatgaataggtatgatgccctttatccttattcaaatgtaatccaaat

SEQ ID NO: 208260 - DNA, 492 bp, Homo Sapiens
taacttttaatttctgatcgagtcacagaaggatttgttgagtagcttcagcacttcttcctttgtcatttttttctgtctgataagtcatgccatggacgttacccatttttatcccagaggcctcttacgttgacttgaaaagacggactatgtctttcagagatcttgtgggtatcacatcaatcttgacaaattttctaccctccaagtcatgatcctaagaacagcttgcctcccatttctccggtttgtgctattatgaaggccttattgtttcagccttcttcaatcttgagggttgttgtcactgtatgggtggttcagaaataagtaggtcctgttactatgaagggggtcacagcttttgttggcatagctaaactttgtggctcatggaacagtatgaatgcagaatgtagctttctccacttgtggactgctttgcatagctgccagaggcctccagagaagaccttcacggctttgtgg

SEQ ID NO: 208261 - DNA, 315 bp, Homo Sapiens
aaagatatatgaaaagggttttatttatttaacagacagacaatggaacaagcaaacaatgggagcaagtcctttgccaaaaggaacacagagggtcatgatgatgctactcctccaaggatttcagagttcccagacgcctagttttctgtctagttcttctggaagatgttattcttggggagcaataggtcctcgagtttggggctctttcaggttctctctccatttccccattctgcgctctaatctctctggttttccaaggccttgctcggtggtcctgccgggcgggctctgggagtagagggaagg

SEQ ID NO: 208262 - DNA, 427 bp, Homo Sapiens
gcggccgccaactggacggcgggcttcggccgcgggcccacgccgcccgcgcttgtgggcatccggcccgcagggccgggccgcggcgcgcgccgcctcctcgtgctggaagaattcaagacggagaagaggctgtgcaagatgttctacgccgtcacgctgctcttcctgctcctctgggggccctacgtcgtggccagctacctgcgggtcctggtgcggcccggcgccgtcccccaggcctacctgacggcctccgtgtggctgaccttcgcgcaggccggcatcaaccccgtcgtgtgcttcctcttcaacagggagctgagggactgcttcagggcccagttcccctgctgccagagcccccggaccacccaggcgacccatccctgcgacctgaaaggcattggtttatgagggaggcccc

SEQ ID NO: 208263 - DNA, 561 bp, Homo Sapiens; identical to SEQ ID NO: 59537

SEQ ID NO: 208264 - DNA, 533 bp, Homo Sapiens
tgcggccgcgcactgaggaggcggcggccgacggtggcggcgggatgcagaacgagcctctgactccaggttatcatggattcccagcgcgggacagccagggtaaccaggagccgacaacaactcctgacgcaatggttcagccttttactaccatcccatttccaccacctccgcagaatggaattcccacagagtatggggtgccacacactcaagactatgccggccagaccggtgagcataacctgacactctacggaagtacgcaagcccacggggagcagagcagcaactcacccagcacacaaaatggatctcttacgacagaaggtggagcacagacagacggccagcagtcacagacacaaagtagtgaaaattcagagagtaaatctaccccgaaacggctgcatgtctctaatattcctttccgcttccgggaccctgacctccggcagatgtttgggcagtttggcaaaatcctagatgtagaaataatctctaatgaacgtggctctaagggattcggg

SEQ ID NO: 208265 - DNA, 544 bp, Homo Sapiens
tttaaataataaatgaaagattttattcatctttgtagataacaagcactcaaaggttaatgagtgaaggagataaccatctcctccaaacaaagaggctcttaataacgcagaagcaaaaatctttccacttttagatgaaaacaaactaaaaaataacttcaggcttcagatatggaaataaagcaccatttttcaaatggtagacttggcttacttaaaataagtaaatagccccagactatctgaaaaagaaaaacatttcaatgccccttgtgagttctaattacatggctacatgttaaggaacatctcagatctctctctgaacctactagtaaacaaaaattatacagatatatatacaaatgtagtcttccatttcatttttcatttgcacaagcttccagctatttaaccaggtgacaaatcaaagtgacaagatgcactaatattcgtgagaactttaaattttaaaagctagtatttaattacccttagtgagctcatttacttacattaaaaattatgcgatcagtcatga

SEQ ID NO: 208266 - DNA, 507 bp, Homo Sapiens
  misc_feature (484)..(484): n is a, c, g, or t
tttgttaattctaattttaaaaaagagtttggtatggttttaaagtttccattgaacctctgaaggtggcttatgtctcgactcctcttctaggactggtcatgagctgagaagcatagaggcaaagtatctcaacattacaaaacccccagtcttcaaggaaaggagcacattaccatggagctacaggactccaaaggacctcagaaagcatttagccaaatctccttatgcaggaaataaatgagaatttaaggctcagatgggttaaggtgatttgtcaaggtcataagaacttgtcagttccagacttgtagtccagggctgcgtccttttgtaaaccagaaacgtctgcatagaaaggattaatccagaatatcctcaagaccgagtatgagagaagtgacctatatggtggtgactgaatagagtgcttcataccaaatagaagttgccagtgcctgcactgagctctgtgtcctgngcaccgtgctgctctgctggact

SEQ ID NO: 208267 - DNA, 539 bp, Homo Sapiens
tttcccttcccatttgatccttagtagcagctcataaaattcctctttataaattccagataatttcatcaagacatgacaaaagaggcactgctctggataatttaaatgaaatatacaaacatatatgtatgtgacttggctatttcaaattaaattctaacatcaggatatgtgcctctgctggtaatttgggtccttgtacctaaccaggtatctgaaaggtatccccacacctctgaaggcctagacagagccccatatttctcatctcttcctgacactcttgggccctgacaatctctctctccttgggatttctacagcatttattgtctgtttcaaccactcattccatacttacttacgaatttgaagcatctctttttatacatatttttatttatatatcttatacgtatatttgtttatatatattttacatgtgaatgtatagttatgtacattatcaattttcaaaccatattataagcaacttttaagaagatacattaaaatttccttatattttccataga

SEQ ID NO: 208268 - DNA, 496 bp, Homo Sapiens; identical to SEQ ID NO: 61339

SEQ ID NO: 208269 - DNA, 453 bp, Homo Sapiens
ttttaaaggtttggctatttttaaatacacttcaaatgatttttctttagtcacaaggtcattagtttttagaagtttaaagtaaaccatttttttattacaattcagacatttaaaaaattctcagaactgtcagactttttcaaccagcctttaaaaatttaattaaataattttcttcaatacaagtcagatattttaagatttttcaggagcatcagacttcttcaatcagaagaacaatgttctaaaaacatgtatgagatccatgtgtgtaatcgttcttgatataacaacattcaccttttcccaagcagagaaacctttcgtacttttccttctcctttcaggtgaatgacaaactgtaataacaatattataaacaatgtgtatatagtacatagacaatatgcatatgtacattacacacaatgtattaaaatatgttatatt

SEQ ID NO: 208270 - DNA, 514 bp, Homo Sapiens; identical to SEQ ID NO: 59964

SEQ ID NO: 208271 - DNA, 597 bp, Homo Sapiens
aatttttatttttaccctcattttattttagctggctgattgatggctatctttccaaatagaatcaatgtgtctgtggtgtctgaaacctaagattagcaaaatcgtaatgggtgatgtattcttcaaacgtttccactcatagagaagttttgcctcccggccaccacaggagcagcagtccacagctgagcccaccacgaggccacgcacctacctcctggatatgggccacgatgccagcctgggtctcaatgtccagctgtttgattctttcaatgaactcctctttcctctcacactggacagcacagcccagcaccagcagcagcaccttcttgatttcctccatgctcttcccagacagtgggtctctgccaatcatcaaaacattgggcaaattcattacaatcagctgctggagaacttcctggtagtaggtcttaatgtttctcaccaagatggtcaaattctgaatgcgaaggttcacatcattgttgacgtgcttattgatgcgttgatttgtgggcctgggatctatttgcagcataatttggttcaaaaagatgccgtccactaaatccatgtacatagtca

SEQ ID NO: 208272 - DNA, 520 bp, Homo Sapiens
ttgttaatggaatgcacaaaaagtgctattttaatagagagacacaaaatattacatattcatgggacttagggacaaaactatgccttggaaattttctggaaaatcacataagctccaaagaagttgatacaaaggcagctaaagatcttggtttgatagtggcaattctaccaatacaaatacaaaggaatcaacaaatggacaactctttagattacagttatgacacaagcaatccacaggcattccagtgaaaactgcacagagctctctctgttgttacttgcaaaaggctagcatggaaatatcttgtgttcatgtgaagagttggcccatatttccttgcgtgttatcacaagcaggctaaggggcctccagtccttatgacataattagaggagagctgggaggaatttccagacaacagccaccttcaccagccagcccttttgtctgatggtccacacaaaactcattgtatgagtcagcaggatctagaaggttcacttcctccaca

SEQ ID NO: 208273 - DNA, 539 bp, Homo Sapiens
gccatatatcacatgccatttatttttatttgtacaaatttacattaattttactacatacatatatattttaagcgttcataacaaacttagaaaatagcggatgaaatccagtacaccaatcatctagtcttagcaaatactattattttaccataattattccagatccttctttaaaaaaaaaatgttactaacataactaaagtaaccaaacataaccaccaaaccactgtctcaccccaatgctatccacttcctgccttattatactaacaatatcctgaagcgtatagaacttttagttaatatttttatattttaccacacatgtctatgccattaccaatatagataatgttctttggagtttttaacttacataagtgagaggatactgaccatgttcttcaacagcttgcttttatctcccaactctgttttcaagattcattcgttagtatatttataaatttcacttatttatgcagcattttatatgaacatattacaatttatctattccttcattgacagac

SEQ ID NO: 208274 - DNA, 449 bp, Homo Sapiens
gtagttgaaatgaaacatttaatagttattaaatagtcattgtacttcaggtaaaagtaggtaaaatgacagaaaacgagacgaatgagccagacaccacagatatgtaatgatggacaatgacctgatgtggagtgttcacccacacatgcagactttatatgttcacataaacatttatctgcatgcatcaccccatagagatgtttacacaaactgcactgacactgtgaagtcaacgaggagataaagtaaaaatcaaatagttatggagagggttgatctgtttagtgggaaacccttcagaacacgcacacagcatctcccctcccttctgaataccatccatagcctgcagtagatggcaaatcacagcctgggccacccttcccagaatgtcccaaacatggacatgcagaccacagaactcaccagatacccaacttggg

SEQ ID NO: 208275 - DNA, 512 bp, Homo Sapiens; identical to SEQ ID NO: 60459

SEQ ID NO: 208276 - DNA, 399 bp, Homo Sapiens; identical to SEQ ID NO: 152799

SEQ ID NO: 208277 - DNA, 572 bp, Homo Sapiens
  misc_feature (20)..(21): n is a, c, g, or t
  misc_feature (444)..(444): n is a, c, g, or t
  misc_feature (469)..(469): n is a, c, g, or t
  misc_feature (492)..(492): n is a, c, g, or t
  misc_feature (524)..(524): n is a, c, g, or t
  misc_feature (556)..(556): n is a, c, g, or t
  misc_feature (561)..(561): n is a, c, g, or t
  misc_feature (566)..(566): n is a, c, g, or t
aagagaaaatagaaaattannaaaaacattggatagctttaaaaatctgacctttcagttagaatccctagaaaaagagaattcccaacttgatgaggaaaacttagaactgcgaaggaatgtagaatctttgaagtgtgcaagcatgaaaatggctcagctacagctagaaaacaaagaactggaaagtgaaaaagagcaacttaagaagggtttggagctcctgaaagcatctttcaagaaaacagaacgcttagaagttagctaccagggtttagatatagaaaatcaaagactgcaaaaaactttagagaacagcaataaaaaaatccagcaattagagagtgaactacaagacttagagatggaaaatcaaacattgcagaaaaacctagaagaactaaaaatatcctagccaaaagactagaacagctgggaaaaagnaaataaatccatttagagccagagncttcctccaactgggaaaagggntaaggaaccaattgggaggagggaaattaagnggctcccggccaaccaagccaggaatttaagnttccncattngggagg

SEQ ID NO: 208278 - DNA, 565 bp, Homo Sapiens
  misc_feature (405)..(405): n is a, c, g, or t
tttttttttttttctttctggagtatggtcaatggtcagcttcatgggttttccttttctacacaaaatagcccggctgtccccaacactggctacaaccagttcaataccatctcgcaatagggctactgttgcagtagtcccagaggtcagaagagttgctacaagtattatgaaaaaaagagtacaagttagtgacagtcaaatgattggatatggaatttttattacaaaataaaacacaagcatgataaactaatgctggaatatatcattctaatttaactagagctaagcaaataaaatgcaaatgaactatgtaagtaacagcatgcagagaaacaagtatttaattcagtaacaagtctccatgcaaacggaaaggttgctaaccttatttggcanacactgcatcactatctacaaatggcctctattcatatcaagtagagctgacttgaacttataacaacaccttcatggatatctggtgtccagactgaaagtattaaaatttaattaggttggctatgatggtgggatgacttaggtctacttgagccca

SEQ ID NO: 208279 - DNA, 511 bp, Homo Sapiens
  misc_feature (20)..(20): n is a, c, g, or t
tttttttttttttttttcgnctaattatattcttttattttacaaaatagctttaacatcagacttggcatcagggacaccattggaacaaatctactttttctaagctatttctttgcatgagatgtttatgtcagttactaatagaacagattgatattagatggcaccaaaagttttttttctacctaaataggcattatttctgtatttattctttaaaaatatcaaatacttttataacttaaattcctgaggtgtcaggtgtggactgtttaactctgcttgtaacaacagatacttgaacttaccattcgtaactacaacccactgattattttaaaatttagctcatgtattataacagagataagatttgggcagttacttctcctgaattgtctttgtttttgttttgttttgcatggggccttgtctagtctaatctttatagttagaatatatgggctaggttggggtgggaaaacttgttagcagccttgggatactt

SEQ ID NO: 208280 - DNA, 582 bp, Homo Sapiens
tttttttttttttctttgacacatttttcctttattaaaatcaatgaagtaatcaagcgagttaagaaaatgcagaacttctatttttctataacacacacacattataaagtatatgcctaacactatgactagcccacagtaataggtgttttataagtgattgctcatttgaataaacacaaattataaaaaataaataataggatgtcatacagttcaagttggaagaaaaaacttttctactaatatataacaaatatttattaaaattaattataaataaaagttcttactaaacagaaaatggaagaaatattaatactattctaattgctatcccattcccttggctactacatagctttttatgcaccagaagtatcgcaatacagcagcagttcagttgagctgtctagaaaaaatgaccagaaattttagaaagtctgtcactttaaaatgtggtacttaaataacaacaatcagctaaccagagtactaaataaattgttattctaataaatcttttaagaaacatcaaatttgaacatctgctcatctgagttacaggtcacaaaaaac

SEQ ID NO: 208281 - DNA, 468 bp, Homo Sapiens; identical to SEQ ID NO: 60613

SEQ ID NO: 208282 - DNA, 483 bp, Homo Sapiens
tttttttttttttttttgccagggaatggttttattaaatgataatacatcaatataatggaataatatacagccttaaagtcacagtcacatggattctatgcctgtggacagtaatactcaaaacaaaacaaagaagtatctacttctcaaattcagacaggtgggtgagcagaaaggaaactgacatcttaggttggtgagactaagacctagaactggtgtatatgggcagattctgggctctggacccctccctggagtacaccagcagctggggcctattttgcacttcccgcttcagccttttgcacaagaagggctcagcaaacacccgctgaacaggattccatatttgcgttcttccaattttcagtaatctgtctcctctacttcccagttccatctgctatccagttagaaagtcctgtcaactatcaattaattcattcacccatcaaaacatttaagaacctactatgt

SEQ ID NO: 208283 - DNA, 280 bp, Homo Sapiens; identical to SEQ ID NO: 60761

SEQ ID NO: 208284 - DNA, 484 bp, Homo Sapiens
tttttttttttttttttcatggttacagtttattacagcaaaaggatatatcacagttgacagagggaggagttacatggattaagtccaggagaaatcaagttcaaacttccaagtaacccttcccagtggagtcacatagggatgtccttaattgttccaggaggaatgtgtgactacacatgtgaagtgttgctaggaaagctcaccgaagccttggtatcaagagtttttgttgggggtcagtcacataggcatgcagtgcccatatgaatgacctcagctactcagactccatccagtcttcaccacagagcaaaaccaggcattcatcataaatcacttttctaggataaacttatccagtcaaactggtacagtgtagcccaagggcttaatcatacaaaaacaggtgtttacaataaataccataaatacagcatggttcagggcttcgggcatacagaaaccctcgtgccgaatt

SEQ ID NO: 208285 - DNA, 550 bp, Homo Sapiens
tttttttttttttttttacaataaggccaaatgtctacccagtagttagtatcccagaaaatgtctacatgcacccaattatacatacctaaagtattatttctattatcttccacttgtattataattaaggccatgacagtaagctactgtctcttggcttcaaacccactctttggaattctgcaagcatttctgtctccctgttaggctctgccaatagagggaccagcgtgacacttcacaggtagagaaggaagaaggaatttgctgtttccttcggatgggtttcttaatcctgttaagtctcactctagcaacaattcttcactccgaaagcaatagtgcctgctagtagtagcagctgattgcaatttgggggtttcccaacacttatagaaccaatctcaatgtgccttcttgagatgccagctccaattactgggtgcttcttcctcagatacctggttcccaggtctataggctccctcctctgaactcagagaaatcagttacaggcaagcagtgacctgttctcaaaagtctgaat

SEQ ID NO: 208286 - DNA, 538 bp, Homo Sapiens
tttttttttttttttttaaaatgaggatattttattatttcaggtaattttcccagaggtgagaatagtacatgggaaattctctttaggccaggtctagtattacagtgtggtgctcaaggccgcccatcagaacagtgatactctcccaacagatttcatccaccccgtctccactaacttttgccataaaaattcctctgaattgtatcttcttggaagaagtaaatatctgttcgactatacaaagaaacagagaaaccactcccattgcaatcaatcttcaagagagggagcaggcaagccgtgttctttctgctgagttttatagactctgacaagctgtgaaataaacataaacagaagacaaaacagtgccacaaataagcagtagatgaccctgtgacaagacggcattgcagaacaaagactgacgtttaaaggggagtcatgcagagtaacatgggaacacaagcctgacaacctggtcagcttccacttactctagctcctttgaagccctcaacactaaaaaata

SEQ ID NO: 208287 - DNA, 482 bp, Homo Sapiens
tttttttttttttttttaaattaatcatttgccttttataatctaaatcagaaattgaaaaacaggaacattgtagaggtaagtggctgaaaatgctctgcttactgcacacaagcacatcatgacaaagaatgctagaagtagctttcctcagaagtaataattgaacatttaaaatattattttctcagaaaagttaaagcttttagtgtaaaaagcatggtaaatgacattttaacttaatagttaagtatacagcaaattatagattacaagcaattagttacccacatttcaccagaaccttcagtgaaagtgtctactctcaacattgaccagaaccttcctgttctgaagtgtctactctttagagttgcttcagctttacatatctgtaaaacctaagattactcaatgagaagttacaccttattctgtactagataccctcgtgccggcacgaggcctcgtgccgaattctt

SEQ ID NO: 208288 - DNA, 307 bp, Homo Sapiens; identical to SEQ ID NO: 60461

SEQ ID NO: 208289 - DNA, 576 bp, Homo Sapiens
  misc_feature (91)..(91): n is a, c, g, or t
tttttttttttttttttgcattaggaactctttttttttttgggtaaaaagctttctcatttccacgcaccctccacctttgggctgctgnggtgtataggcacatggtgtgataagtctttggtatggaatgaagctctatcctttcaaagtcaccaggttcgggttcccagccctaagtggccatggcactgggtggtctgggttcacggggctcctggagctctcgggtgtcccgtgtgccaccccaattccttgcgtgcatgcccacgaaaggccgcccaggcacccccggtgaccccatggaagtgagttttggttctgctctggcttcgaagtgcttctcaagctgaagccttagggtgtggaagatcctacagttagctggagcttccgagtgagtagcggctgcgggcctggcttcggttacggcttcggtcccagcggggtctgaaggcattggcattggacggagaagcgctgtcctggggtggggaagtggccacacccctacaggaggacctttgtgatgacgcagccgtccctgtcaccctcggggtcgtcctcctcgtgccg

SEQ ID NO: 208290 - DNA, 614 bp, Homo Sapiens; identical to SEQ ID NO: 61989

SEQ ID NO: 208291 - DNA, 595 bp, Homo Sapiens
tttttttttttttttctctttggactctacattcctgtagctcctattcttcaagggcacaggggcttacttaaacataaaattttacaacttaactggaagggtgccctgcttgcaaatggaaaactgccacagagcagacttaactgcagcaagcaggtgacagagcaaggaacaggatccaaaattatgattttttgtgtgctactgaagtaaaagaatttaagaaggttttactcagggtcataggctgggttggaagactgggaaaaggaaatcagtagtatctatatctaattatggtgacagaatttcacagacatctataacctaggtcaaacgtcaaagacatgaacacctaagacactttcacacatccctgagcatcatgattaaattcagatagttggggatctgtccccaggaccagtatcattctgttaggggcctctaaataataagactttatgtgttctcttccacaacaaagagtaggaagtgattagcagctggggagaacaaagagactttcccaagttagggtttttcaacttcgttaaacctagcaattaaagaaaggaggagcctcgtgccg

SEQ ID NO: 208292 - DNA, 654 bp, Homo Sapiens
tttttttttttttttttaataaaaatcattgtgatttaataaacagtgtggtgtttctgtacaggcccctccctgtctgtcccacagccagcgggaacgctggatggatgtgggcctgggtccctggagcccacgaggttcctgcagctttcctaagaggaaaaactgatccggtgatggaaggctgcggcctcctaaaagtctcccctgacgaggagacacggcaggggccacagtcacaaccagatcgagatgattagggaaggtgccgcggagtgcggtccactacacatcttcagggtgcatctggactctcttggggctgcaacagtatttttcacatagtttgaggagctctgacaaaatgaagacggatgaggccaatccagttaaaaacagcaaatcaagcgctcccaggttctccgtctggaagaccctctgcagcggggggatgtaaatgaccgccagctgccccaggatggaccccaggacggagtagaggaacatgtggttcctgagaaagccgatctcaaatatcagcttggtctgagagcggcaggtcaaggcgttgaagagatcgaaaaacacaaaacaagtgaacgtcatcgtcgtggtgcggggagtgcttgctctgtcttcaggcatctccttcca

SEQ ID NO: 208293 - DNA, 667 bp, Homo Sapiens
tttttttttttttttttaatgtaaaaatcaatttattatacaacaatcatagataatgctttttatctacaaagagaaatggcttctgcagcctccctgtctactccattcatgatactatgttcttaagatataattactttcaaaggaaaacaaagcgatatccatattttccaaacaaggaagcccccagacacatttatgaacgatatggaaatattggaaagaactcaaatggactcctagatacaaaaggctgttctgcccatcacagtaaacactgttttgccttaaaataaaaataataaaatatttctcaaatgcaggggtgaggactttaccccgtaacatgcctaagtggttcgatatataattttgatggcttgacaattgctatgtttaattccattcagttaacattccattttgttagtttaaaaaattgggggaattattaatagatatgctttacagtatttaagtattttcattcccatgggtcagaggaaatttgagagaaaacattctccattttttttaatagattatacaaatattaatttttcaatagttttagaaaaatcacattaaaataagcattttgggtttttgaggttacacacttaacgacaggttaaaatgtttacctggattatttttttgtggc

SEQ ID NO: 208294 - DNA, 653 bp, Homo Sapiens; identical to SEQ ID NO: 59691

SEQ ID NO: 208295 - DNA, 503 bp, Homo Sapiens
  misc_feature (204)..(204): n is a, c, g, or t
tttttttttttttttttaaaagcttaaaacagaaacagccatttatttgctcatgattctgtaacttgggcagggcttggcagggtcagctagtctttgctgaggtaacttgactggggctaaagatgcaagatggcttcacccagcttctcagttgggggctggcgtggctggaagacagcaggcccttcccttttcctttanagtctctcatcctccagggcctcattttcttcaggtgctatctctctcatgcagcacaaacttctttacatcacagctggctctgcgcaggtaacccgggcccccgcgcgcaaggccgaggcgcaggcggagcgggctggagcatgtccggccctttgttctgcgctcgtgcgtgtgtccgggtacttgagctccctagcggtccgcctgtccgtctgtctggctgccgggtccctggagggcgcgtgggagggccgggcccgtgcgccctcttcgatcctggggtgctcctcgtgccg

SEQ ID NO: 208296 - DNA, 728 bp, Homo Sapiens; identical to SEQ ID NO: 59897
  misc_feature (690)..(690): n is a, c, g, or t

SEQ ID NO: 208297 - DNA, 682 bp, Homo Sapiens; identical to SEQ ID NO: 58828

SEQ ID NO: 208298 - DNA, 714 bp, Homo Sapiens
cggccgccaactttttttaaagactactaattaaaacaacaacaacaaatagaattcaggatataaggtttaaaaacataatgaaaacacactagttagccatattttttttaatgcctattcagagtttaaaagtgtcccagtaacaaaagactgcacagctttgagacattaatttaaactgtacaaatacatataaccattaccactaggataaattactctttagattttaacatttttcaacatcttacatctgaacagttgactcttctatacaaaaatatcattattattttataatatgcctttgtataatgcccacaagatgacacttattacaatagcagttgttacaaagtcacaaaatacataaaaatctcagcagttggtaacattattattctttaaaaagaatttacagtactaaggtccagtccagaaagtggcagatttaaacagagtagcccaaagttcgaagtgtctatttaaaataccagtttggaaataaactaaggaaataatatatgtactatgtgatatcactgccccagcagctgaacgcacttgcttcagagcaaatgtgaaggtcagagctgagtcagtggtcagcagcatgagctggcttgggggaaccagctggcacacttcatctttgtgtctggtagggacacagaaacaaaacaatttgaaaagtccaatgaaccagcatca

SEQ ID NO: 208299 - DNA, 675 bp, Homo Sapiens
  misc_feature (60)..(60): n is a, c, g, or t
tttttttttttttttttgagattttacatttttatatatatgcttaaaattatgtaattnaggggcacacacatatatatctcaattgatgttcatatagatatacagatattcaagggcaaaggagatgtgcttggaatcctttggggaaatactttactccaccttcagcacactgtagattttagcaattaaccagaaacaggaaaaaaatccaactgtctctctacaaactggcactaaagcaggtttgtcagtagagggcgctggagagacatcgcaagggaaagggtttatttcctggttgatcttggctcactccacaggcttctgttttctttcagcatgctgcagcccctgacaaaatgcgatttctcgctccgcctggcagaagttgaccgcggctaacctgggaaggtagaaagccgtgcagcgggcggccctgaagcctcaggagcagccccagcctcagcagccacctcagcccggagagggcgggccactggcgctcgaggttggttcccacgcggaaaccacgagtactcatttcgggagcgggctcaggcactcgggaacacacacatgaaatcggcacccgtggaggaaataagcggaaatgacaagagcctcggacagggaacagccgaggccggctagtggcacctcgtgccgatt

SEQ ID NO: 208300 - DNA, 740 bp, Homo Sapiens
  misc_feature (674)..(674): n is a, c, g, or t
ttttttttttttttttaatcagtgttatgtatacacatggtaagtaactccatggtatagaaaaactgatgatggaattcaataggtgcactctgcctttccattcccaagcccacgctctagagcaagcctggtatagcttttgttttcagttcttctgagggttaaataaaacgagtaggtagttttgtgaattaatattgccttataattttaagtatagtacatgacccaggtggagtgctttagatacagatgtatgagtgattagttgcaggaaacacaaactactgtagctagccacatttaaaaggactgtaaaacagggaactggatgcttgcaatattgtcacaagggctaggagtgggttccatactgggtctccagaattaactcccagaaaaacactgcaggtctgtctggcttgccagaggcgctgctaccccacaataatgagaaaggtgaagaatcagggttgcatccaccacgccacttgcctcaacaactgactgcaagaattctgctgcagggaaattaaatgtctcctcaaccacacatgccaccagaacacaagcaagaggaagatggctctctcctcagttctgcattccaaatctcacacatgggtgtctgatcagtggaacccaattcacatctggaaatctacctgcanagggagtctgggaaatgtggttattttctcaccttccagcccctgcattataggaaggacactagg

SEQ ID NO: 208301 - DNA, 556 bp, Homo Sapiens
tttttttttttttttttacatagatatatttacaatttttaatgtaataattaaaaatggtattgtttatattttaaaaaacagcccagctgtattattctgtcaccaagaattattaattgaggatgctgtcaatgctgaattttatagttcagccttcacaatcccatccatgatgaagagttgattctcttacggtatacaatatactctcacaactttcagccttctcttaaagacatgccccaaatgagcaggatggatataaagaatgtaattcattcaaacaactcctccctgttctgccccctcccctcacattcccctcttctcaaaaacatctgaagtatgaaagttgtctttaaatagtaaaagcaccacaatctattaacaccacatattatctttaaacttaaatattttagtgatgtcttggacatcaaaataatttcttaaggtggactcttgagtatgtgggtccagcccaggtctgcagtttgtgcagacatagaaaaaagaggaactttaaatattcagaaaaagttgcctcgtgccg

SEQ ID NO: 208302 - DNA, 744 bp, Homo Sapiens
  misc_feature (729)..(729): n is a, c, g, or t
tttttttttttttttttaagcaagatctttttattctctatttctgtagctatatatacacttttgacaatttagtggccatcattgcaagctaactgataatccaatgtctcctttagatacaaatttgaaaaagatggaagtatacacagactcattataaaagattgcaggctggatgatgagtgtgaatatgcttgcggggtagaagacaggaagtctcgtgctagactttttgtggaaggtacatattaagtgaaaaaacaattctaatgttaccaattttttaaaattgttaatcaaaatgtaaacatatttgtatttatttcacattttctttccagaaattcctgttgagatcatcaggcctccacaagatattcttgaagcccctggtgctgatgttgtctttttagcagaactcaataaagataaggtggaagtccaatggctaagaaataacatggttgttgtccaggatagttgaaagatgtccacgtggttctgataaatgggttgcctgtggagaacctgttgcagaaacaaagtaggtttttaatttggcatgagagtaaatgtgtactcctagtcactaaaatgggctttgttggggaaaatttaaatgtttgtcttttttcattgagaacctatgctgccggtgtatctgtctgatttttaaaggtgctgctgaatgtactgcctgctcagggttttcatgacagtattganatgaaaatgtattca

SEQ ID NO: 208303 - DNA, 781 bp, Homo Sapiens
  misc_feature (759)..(759): n is a, c, g, or t
tttttttttttttttttgatatttcagtttattttccaagtttacagtataaaaaatgtgatgtgtaaaacattttacagttaattgggatgagggggggattatactggaggacccaaaaaggaacaaaataacttgggtgacaggtacactattccatcagagacactaactctgttactgacatcacaatgagaagaagtttcatagcataaaccttatgaatgtaagtaaatggacctgtacagatggttgctggtagtgtcattcattcatttacatgcttgcaaatgtgtcaaaagagcccactacccagtttatgcaggaactcactcaggccttgtcatacacatatggtgaccatgagcagaggctggttggcaaaactgcccctcctggttacaatgtacagtattaactaatcagaaagaacaaaaaaggtccctgaccacatttttacacaaaccgttatgactctgtcaggtaaagacaggtggtttcatctctgaactttctaaattggtgctggacttgaaatcaggaaatgtaaagtccttctaaccaaagcaattatcaaataatctcctctcaaataagacctgcctggcccaggcctctctggttctctcagtagcatttctgttgaggaaggggtcatctataatgtgagttaaatcactgagccagtatctgcccccaccctcatctttgctggcatcctgcactctatgcaatagttatggccataaatgactgttnggaatcaaatttggctaatcac

SEQ ID NO: 208304 - DNA, 457 bp, Homo Sapiens
tttttttttttttttttaattcatctcaggtttaagataaattctgcaaacattgattaaaacatgaaaggcacttaaataagcatacgtatctctgaaaacatgaaatgttatgtacatgtgttcaccattgtttggatttagagctttgaattcactaagagtttaaaatgcctttttttttttttccatgccaaaacgtttgactgtgaaatatcaacccagaatgctctgggaaaaagttagcaaggcttcaaccgtttttttttttttttttcaattgcaggctaaaaccatctctattcatatagaacccagaaagcatgtctccttggacatgccatgtggcctctcggtttcaccaggcatcttgaaacatcgagggcaagtaagagagttgttcattcatacctttatcaccaatatcaagtttcttttaaaaattcaacacttcctg

SEQ ID NO: 208305 - DNA, 514 bp, Homo Sapiens
tttttttttttttttttccagagggcaatgaatcagttataactttaaatggctaacccacaacaaaagtataatattaaaatgagctcagtgttttcctgccattttcataccaatctcaacattcatgtttttttctgctactgtttcccagaaacgcagaaggcaatggcaaagattcataatttgattctgttatagttgagagtggctggagtagaaagttaaataacaaatagctcttccctgagaatcagtgtccatataagaggctggcaaactagggctatgggcccactccacagtctgtttttgtaggtcctcaaactaagagctgtttttacatttttaaagtgttgttttatttatacatgtacacacatatacacatatatatacacatgtataaaacagacctatgggtcccacaggcctaaaatgctatcagggcctttacagaaaatatttgccaaccttttctctatatagtcaaactcaagactcgacctcgtgc

SEQ ID NO: 208306 - DNA, 506 bp, Homo Sapiens
tttttttttttttttttggagtggaaaaataaaactttattgcagattacatgacttttgaatatataaaattctaaggaagccctttaaaaatattggaactaataaacaagtttagcaaggttgcaggatataagatcaatataaaaataatttttattgctgtacactagcaatgaaaatctgaaaataatattaacaattttatttaaaattgcatcccaaactacaatagttaggaataaatttaacaaggaaagtgtaagacttctacactgaaaactgtaaatcattgttcaaaaaaattaaagaagatatagaaaaatgaagagacgcatggaacaaaagattttatattgtgaagatggcaatattccccagattgacctttagatttaatgtaatctctatcaaaatcccagaagctgataaattgattctaaaatttatatgtaaatgcaaggaacccagaagagccaaaatagtcttgaaaagtaaaataaagt

SEQ ID NO: 208307 - DNA, 507 bp, Homo Sapiens
tttttttttttgtttttgggaggggatgaatttaattagtgagttgttctggcctatttgagggtttcctgagttcaaatcaattccatttatgagaagtcccgggggatccccaagaaatttggttggtactggggaggtgcctcatgaagatagaaaaaggatgtccagattgattgctgatttcaatcccaggggcacagctacacttctggctgaccacagcttaacgatgagcccgattatatctcaataagggaagttacagccaatttctccttgaacacaagtccattgcagcatcttcagaggcagggccagcctctatttttcagtcatggtgacatctgtggtccttgcatttttaagagtggcctgctacttgtaaggtccagggggcaggtcctccactttctgcaagctggtccttgaggcattacttctgaaacagtcaagaaatgtcattgggactgtgggtctgagaacccactgatgaattatttttgc

SEQ ID NO: 208308 - DNA, 476 bp, Homo Sapiens
tttttttttttttttttggttactattataagctcacatatgttggtaatctatctttaagaattctttgaagccagggttgaggtatattccaccagggatgatctgagtttgcatctctcaggtgcctggaagctctatcaacttggatctactttttaaaaaaaaattcaatgtgtatatatatatatttaactttttaagcagaaaatacattttcttagttcaaaaaactccaaactagtccccttccccttcctcttagttaggcctaacacttcaactagcacggtatgtagtaaagaatttaaccttgcccaaagagaggtctggcatttgcccttagctcttaggaagtaatgttaaactctttgaatatcctcttgataatgatttactaggggacttaagccatgacagataagtctaccaatatgatttatggtagggactttaggttacatactatcaactca

SEQ ID NO: 208309 - DNA, 549 bp, Homo Sapiens; identical to SEQ ID NO: 58766

SEQ ID NO: 208310 - DNA, 535 bp, Homo Sapiens; identical to SEQ ID NO: 57801

SEQ ID NO: 208311 - DNA, 494 bp, Homo Sapiens; identical to SEQ ID NO: 61964

SEQ ID NO: 208312 - DNA, 528 bp, Homo Sapiens
tttttttttttttttctggtgattgattcaagactcgaagtcttaagttaccaacaatcgtaagccacgcctgtgtacacagcagggctcctacgctctggcaaagcatccaggcctttttaagaccacctgttctaaaagcaaatctacaataagaatgcaaccaagccaggccgcactccccgctgagcacacgcctggaagcacgttctagatcctgcacccatctcgtctgcctccagccagggccctggctcgccagcctttggtctcgaactttgtttctgagaacacagcagacatacagggtgctgggagaggacaaggaagccagcccctagagcagcaggtgctcaccgggccgcccaccacactgaggccacgccagctggaccagcccctccagggcccctgcgcttggcacccggcgcccagccagctcttgggtcccgtgagcactgtgtgcactcatttcatgggctgtttatctgcccaaccagaaaacaggttagacaacacgagctctgc

SEQ ID NO: 208313 - DNA, 529 bp, Homo Sapiens
tttttttttttttttttgagtttatgacattatagtgcaggttctcccatgctacagtgctgttctttgaaccaaatgcactatcatacttggaaattctatcactacccattccacagcccaggaagaaccaggaaggcaagtcttctacgtcacatttatttcatcagctgtttgccaaaccaagctggtttccttgctttggcagttggtttccttgcttgggtctcacttgatttccaagttcccagtttcagccatagaccctggcatctccactcatgggcaccaccctctcttctgggttcagtgatgatgtctgctaatatcttccccaactgaagctgtgctgtagatgacatagtcatatggatgggaataaaagaaatttattctcctccctgttggaaaatttactaggcaggtgaccctgagagtaaaagcagtcctcgtggtgacgcttctaccctcatgaccccatcccaagatatccaacaggaactaaggaggagatccattagttgtagac

SEQ ID NO: 208314 - DNA, 515 bp, Homo Sapiens; identical to SEQ ID NO: 52670

SEQ ID NO: 208315 - DNA, 724 bp, Homo Sapiens
tttttttccttttttttgagacggagcatcactctgtcgcaaaacaacaaaacaaaacagagaattcaggatatgatgtctcacattatacaaggatataaggcaaaactgtcaaaaagcaatttatatttcacatatcctgacattttgctgttctgtgtatacttttactatctaaagtgagcaacactaactgaactgattaatatatggaacaatgtaggagaaagaagaaattcaggagaaagaagcagaggttcctagtggttattgaggataactgaaaaggacagaaaaaaaggaacaggaagaggaagaataattaaaaatgtaccaatgcaaagaattatgacagttacaattaagactgcaaataaagtagactgactttatgcttaactcatacattaggtcttatttctgttacatagagcagtcacctttctgcttctttcttcttttccttcatcctaataccccaaagacgagaatctacacattaaaatgagtaattagcatcataaacacatattctcaatagtttgagtcaaaaatagcaagttcctggtaccattcagacacatattttccaagcctgcacttgtctgaattctaagctagtactaggtaattcggatttaactataaaatagtgaattaagaagtcccattttggttgttttttttatgaaaatgaaaatgaaagatgagcctataaacattt

SEQ ID NO: 208316 - DNA, 653 bp, Homo Sapiens
  misc_feature (637)..(637): n is a, c, g, or t
tttttttttttttttttacttcttgaaaaaagcttctacagtggaattaggagaattggataagaaatgaagcacccagaaaacacatagttctgacaactcaaatatttcagtgacttctgaacaatgctcaaatagagcagagaatccaaagttcacagaagcaggaacagagtgtgataaaggaaatgggtaagctgtacgaaatggataaaatagtatggaaaaaaggaaagtatcagaaataagatgtggaaggcattcaggattacaaatcatcattttgtgcctatattcatgtgggaaaggttgcattttgtttcatagcctttttttccaaccttccattaatctcaatttgctgctggattatcaagcttaaaatacagaattgatactactatattaaacaactgcagtaaaaacaaagtaaatgctctttatagctgacaaagatataggctttctgaggttatgaagaaactgtgtgaatcatatttttcttgaacattagaaaatattattcctagaaacatttatatgtcgcttacttcctctaatatgttcatatttcatctacaaagctcagctttagaaaagtgattttccatctaactgacagcttttcttagcttanaactattagtatattt

SEQ ID NO: 208317 - DNA, 500 bp, Homo Sapiens
tttttttttttttttttcatgaaaaggcatcaatacagggtttaagactgaggaatactgcatcagagaatcttgctccctaatttgatgataaaagatatctgcatgttatttctgcttaacaccctatttcactttatcacaaggtgaatgaatctgctgcataatattcataatatgcattttagaataaatgtatccctactcattatttagaggatgaaaaattacaatcattccactgaactggaagttaagacagccacccagccactttgggctcctcacacctctgaatcaataggcaaggaagggagttacagtgttggctggggtaattgatcctgcccaagaggaactggaactgctacacaatggaggtaaggaggagtatgtctggcttaaggagatcccttaggacatctctgtaccctgccctgtgattacagtcgataaaaataacaacaatccatacaggactatgaatgggccaaacccct

SEQ ID NO: 208318 - DNA, 451 bp, Homo Sapiens
tttttttttttttttttcacatacttgaataaatcaaatctttaattgagaacctgttgatgatacctgataaagcctttcccaccccacctgtagcttgggaaccagtaggagcactggagggggtgcctcccaccccatccctctttcttcctctccctgatcccttagcggatccagcagacctctttctgtttatggaggcagcagggaaatcaagggctggatttggtgtaggctgtggtctccgtcttggcattgtggagagagggcttagcaccttctgatgcccctgcccagcactgaggtgcctggcctcactgcagtgtgctagacttaagaggtgttattttttattcggccacaagatggcaaggccagtgtgctagggaatggtaagccacaaaatgaaatagagatctgagagctaggctgggtgcccctcgtgccg

SEQ ID NO: 208319 - DNA, 579 bp, Homo Sapiens
  misc_feature (538)..(538): n is a, c, g, or t
tttttttttttttttttacaagtaagcgtctatgcaggcatcacaaactttggcggatacagtagatatgtatttctttgatgctgaaaggtcagtccctaagacaaaatcaaatgtctcaaagaattaaaagcaaaatgcatgtgtcttcctggcaaaggtttccatttgcaatgtaatctgcatttctacaaatactcaatgtccaaggccactagagggtgaaaaaccagggcagcgtcttccagcaggagtcagggcaaacccagagccaaaactccatcctcagcccaaccttggaggcccagcagctggggctgagaagtggggcccaggcaacgccaggccctcactgcccgccaccctctgttgtgctgggtgcttggggccaggggatgggcctgcctcttcctgagccccgggacaggctgctgccgggtctgctcaccttctctgacccaagtcgaagacagcaggcaagaattggcatggggagactcagtgctgtttctgagtttcaagtatgtctgaggtgtangggagtgagtgagtgtgtgtgtgtgtgtgtgcctcgtgccg

SEQ ID NO: 208320 - DNA, 568 bp, Homo Sapiens; identical to SEQ ID NO: 59569

SEQ ID NO: 208321 - DNA, 624 bp, Homo Sapiens
tttttttttttttttttcacaattttaatagcttttaattcctttcccagttgtgtacatccagtccagtggtgtctttttatacacgataaacgcttatcattgtcggtcagcatgtcaatgtgcacagcacatacatcacaacgagggtcggcacctgtataaaactacagattctgaaaacagtggcacatacaggaacctcgaatccccatcacagcaatatgaaaacaatattttaaaggtacagttgtgttcctacaggcatcacacatgatttgttgaagaaatatctataagaagtggtcaagggtgatcaaacctaacacatgttaattcctgacaatctgattgggctctgagacaagaaatctcataataatttaaggcatttaagacaatcatggtttgttactaagtgaatacattaaaattcagaaagtcgacggatgatccctccacaccccccaacgccaaacagcatggagacctacaaacaccatctttcctgaacactcctggagcctagggtgtggtttaaaacttaaaaacagtttagtgcatggtaggaacagcagtttaagatgtgtggtcctgtcttagcggctttgcaagtgtcttctt

SEQ ID NO: 208322 - DNA, 592 bp, Homo Sapiens; identical to SEQ ID NO: 59738

SEQ ID NO: 208323 - DNA, 602 bp, Homo Sapiens
tttttttttttttttttccagctttttttccactttatgatgaacagccttacttggtgaccaggaaatggaggtcaccatgaacaatgattctggcagaaaccaggcaggacccatgtcctggaaccacacccagctcgtctgggacgtctgctgtttatatttacgtgaccagtttccttgtgttgacattcagtgggggctgggtttttgctactactaaaaccaacgcagatgaaatcactattcccaccctccctcaggataagtgggttaaggttttttccatgttgtcaatttaacctcaagaaaggtttgtcaacagggacacggaacaaaaacttgtacacaaatgttcagagcagcattgctcacaatctctataaggcagccacagcccagatgtccaccaagagatagaaacaaaacgtagctacccacgcaatggagtattacagagccataaaaaggaatgaagcacgagggaaatacagaggcagaaagcagttgactggatgtcaggggctcggtgcaggggaatgggcagtggctgctgatggggatggggtctcctttttggaagatgaaatgttctggaacta

SEQ ID NO: 208324 - DNA, 504 bp, Homo Sapiens
tttttttttttttttttgttcgaattatcaacttagtcctttattaacaacttcaaggtgcaaatttgtgagattccagacaggcagttcaatgagcagctggattttgctggttcccaagagcaaggaaaattcccttgttttaaaaagccagatccatttggaatagtctttcttccccacatattacagcatgaacgtgactctaaagtacctgccgagggtctttctttttgtgacggtgggcgctgttccccactgtcgtggacttctcacagcgctcagtgtgcattcggttgcttctctccataacgcctctcagctaactgtgctgtttctgtgctcctgggttgttaatgttcaagtcttggctctataccattttccttatcatttaggattccactgggaagacatcactaagttgtgaaatcaaacttcatgagttggctgagatcatagggttgggtgtcctctgagcacttgcaggagtgactgcaatta

SEQ ID NO: 208325 - DNA, 579 bp, Homo Sapiens
cggccgccaactccaaggcaagacaggcccctggatccttaatgacacccggactctttgctctttatcttaccaacaccatcccccaacccggtgtcattaaggatccaggtagctactacataatctgagagtagcacaaatccatctgcctccaggggcctgtcttgccttggagttggtaattcctagcatgagacattcctttggattaaggccctgttttcagaaagccttggttcaaatataaatgtgatgggataaaaatcagacacacagaattgggaacaagaagggttcagaacagagactactactgcctttgaaagggcaatctggtttgaaagcctagagtgggcccaccttcaaaataaaaattcaagggtgttattttagtgtaatgggtgagaatacaagtcagactgctgaaacctagttcactactttttaggagtgtaatctcagacaagttacttaagcagcctttagttcagtttcctcatctgtggaatgggaatattacctacttcacacagttattgctgagtgctttccacactgcctaggacattttgaggg

SEQ ID NO: 208326 - DNA, 568 bp, Homo Sapiens; identical to SEQ ID NO: 52919

SEQ ID NO: 208327 - DNA, 553 bp, Homo Sapiens; identical to SEQ ID NO: 61960

SEQ ID NO: 208328 - DNA, 639 bp, Homo Sapiens
tttttttttttttttttaatttttaaacacattgcattttattacataaaagtacaaatagtaaaatgatatactactaattcactttaattttaactaagattaaaaatggttttctcttactataatgcagaagaatattgctctgaaaacctacttcatggatcactcaatattataagttaaacacaaacagcctcttcactcaggttttcatcatgcatcttacattttaatgtccttattctttcatagaaagtgtcataaataataccgacctaacagaaatgatttctcatatctttgatgcatgaaaaattaatcacatgctttcacatgtgaatacaataggaatgaagagcatgaatttgagttgaattacatcattatttgcttttcaaaaactaatttttcaagaaaaaatataatttgaatgtaattatacatctacaaaaaaattctacttcttttaaagttatatacacattatttacctaccaactttagttttaaattattttctatactcagcattctgattctatactcagcaatgtctgaagtgtcagtaccttagatatttctactgtgaattctctgatatttatatagacttaattttggagtaaattattttta

SEQ ID NO: 208329 - DNA, 439 bp, Homo Sapiens
tttttttttttttttttaaacatcaaagacttctaacatccagaaggtaatacatttagcaggccttatcaaagataactgtctattctgatatatgaataaaggtaatacatgccatataataatattcattattaggtttgctttgggccttaaactgaatctaatgatctcttggagctgacctagggggtgtcttttcctaatgttaagaattttaaaaggagccatttattttcagtcatgtacaaggtatgtcttcttttaaacacgggactactttagacaatcaaaactccattctcctcaaaggcatgatggatgccttcaactttgtagctgtcttaagtatttctaacaagcttttttttggataaagtgataacgtttttgtgggagggaagaaaaaaattgggacaatttgggggtttgcttcttg

SEQ ID NO: 208330 - DNA, 614 bp, Homo Sapiens; identical to SEQ ID NO: 59491
  misc_feature (545)..(545): n is a, c, g, or t

SEQ ID NO: 208331 - DNA, 602 bp, Homo Sapiens
tttttttttttttttttaactttaactggcgttcaatattttcttttgaggtaaactttacatacaatgaaattcacacacttcactaagtttcataagtgcatacacctgtgtaacccaaacccctccccagcatggcaactagtttttttttttaatgtagcctctaaagcaagtgtcagagagagagagaaagagagagaaattatcttttttttttttttccactgcaacctatggaatttgagatgtcttttaaacccttgggtagaaatggtaatgaggtaggagcccaaggtttcgtggccaggtctaggttacagacagaaatttgaggattatcagaatagagacggggtttagagtcattaagctagacaagagcacctatgggtgggtgcagatagagatgtcaacgccatggccctgggtcatgccaaagttgacatgctgggctagtgactaggcctgaccagagaggtgcagagagaagggctgggagcagggagagaaagtgcttcaaggagggaggggtcagctgcaccagatgctgctgctgctcaagcatgtgtgggctatagcctggacatcatccaacactc

SEQ ID NO: 208332 - DNA, 509 bp, Homo Sapiens
tttttttttttttttttaacaccagaatctcttttagtctttaacaaaagtgtagtcggtcctgtgcatacatgggttctgcgtccctgaacccaaccaaccacagatcaaacatatttgaggaaaaaaaaaaattccacaaagtcctgaagagtaaaacttgaatttgccacgtgctgagtactatgttcaatttatgtgaatgaagtgacgtgcaggcattgtattaggtattataaataatctacacatacaagtatatgagaggatgtggttaggttatatgcaaatactacaatattttacataaggaatttgaacatctgtggtatccactgatacaaagggatgactgtacacagcaagaaaaaggcaaaaagtgattcattaatccacataatttttaaagatctgctttatctttaagttaaaaaaatgcccctttccccatcccatgccttgtataaactactcaataactgaagaaataaagttgcaccctcgtgccg

SEQ ID NO: 208333 - DNA, 456 bp, Homo Sapiens; identical to SEQ ID NO: 60706

SEQ ID NO: 208334 - DNA, 488 bp, Homo Sapiens
tttttttttttttttttaagcaggaaaaaagtaaatttatttaatcagggtcatgggtgctagtagggtttcactaaaacattaggaatcaagtatttaaaagtaagtagtaagtatttacactgaagttgttatacacttgaatcttgaacatggatttaaacttcaaacagtgcaattatatgcagattcttttctgcttccgccacccccaagacacaagaccaatccctcctcttcttcttcagtctaaacatgaagatgatgacaatgaaaactttcatggtgatccacttccacttaataaacagtaaatatattttccttatgatctcaataccattttttatcctctttattgtaagaattcggtatataataaatatacaaaatgtgttaatagactatttatgttatcgggaacgcttataacagtagttataagtagttaagttttaagggagtcaaaagttatactcagatttttg

SEQ ID NO: 208335 - DNA, 389 bp, Homo Sapiens; identical to SEQ ID NO: 60061

SEQ ID NO: 208336 - DNA, 483 bp, Homo Sapiens; identical to SEQ ID NO: 58160

SEQ ID NO: 208337 - DNA, 469 bp, Homo Sapiens
tttttttttttttttttcccaaagtgatcatcctaaacatgtgactcactactcgtaaagtctttaaacagagtaagtgatgtggggtgtcaataatgtttcagacttaacggggatgagaaagcaaacacaaagtatattcaagaaaaaaatgaatcactggtcagatccaaaggtaaattatcaaagtggttatgattttaagttataaagaaacactagtgttgctggaacataattaaaaacctggaatcatgcttaatgttagctgtaaaacaaataaacaatctgtacaatcacagttataactatatagctttcatgaaaaatctatcctagactacaaagaaaatttgggtttgaggccaatacaatttcatgattataatacataactgatacatctcaacaacataaaaattgtaaggagaaagagtaacaacagtggtattactttcaagaattgtgt

SEQ ID NO: 208338 - DNA, 468 bp, Homo Sapiens
tttttttttttttttttcctgttttattcagttatcacctccagctttgtacttcagcagctgactttccttcttcactggggagcaaatctgcacttgccttaaatgaatttctatttttgactacttttcaaatttatcacatttttttcctaaagtactgagaactaacctcatcttgtatttcttgcagcttcccaatgctgagggagtcttagaggcatttgctttgtttttattaggagtatggtttatagtcacccagccagaatgtgatatacaagggtttacaaggaaaagtagaaatgggtgtagatgtatgtgcttgttgtaagaaaaatttacacttacagatgaaagatccatatataatccagccacataccatggaaaggaaaaacaagaagaatatgtaatagtgatggttgccaaaacctcaagaaaaaagaaaaaaaacatacttaatat

SEQ ID NO: 208339 - DNA, 569 bp, Homo Sapiens; identical to SEQ ID NO: 61265
  misc_feature (476)..(476): n is a, c, g, or t

SEQ ID NO: 208340 - DNA, 531 bp, Homo Sapiens; identical to SEQ ID NO: 60306

SEQ ID NO: 208341 - DNA, 590 bp, Homo Sapiens; identical to SEQ ID NO: 58822

SEQ ID NO: 208342 - DNA, 523 bp, Homo Sapiens
cggccgctcatttctctcttcattattccatgggtagaaaagaaaaaaaaacaaagagaatgccactctcattcccacccttacaatatgcctctttaccaaccgttgcaaataactcaagtgaatacaagtaatactccaagatcatctctctgcgagggcacaggaacacacacaaataaatggaaatatatataaccatactgtattaagtttgaaggaacatcaaaatttctaatactgaatccaatcccattaaattgaaagcaattactgcttccaattgaataagaatggattaaattagatttctgattcaatataatttgtagtgtccatgacaggaaaagtgatagtataaggatcttatccaagacatgtcaagactatgcagactggacttgacagccacccaaatagaattttactgaaaaactcaagggattcccatacacactgcatttatctaacctttgggatatactttaatttttcttctaacttaaagataaaaagaataaaa

SEQ ID NO: 208343 - DNA, 506 bp, Homo Sapiens
tttttttttttttttttagatgaatgatgcttggacatgttcttaagccaaaaggaaagagccaacagagagaaggaataactgttgagggtgaagccagggcctagaggggaggtatgcttaggagaagaggaaggacaccttttcctctgagagaaatgtatgctgccatacagataggcttctagatatctaatgaaaccttcaggcagttttctgcctctgtcccctttttcttctgtggattaggaaggaaagtcatctgctgaatgtgaggtagtatttgatgggtactgaaataaaaaggcaaacagctgaactgacacaggactggggtttgcagcatactcggagaggaagataaggcagtaaggcacttatgaatagagtctaggaaagctatgtgggaagagaaactaaaagagtgagctgatgagatacataaaaaaatatagggaccaagggaataaaaacaattatatgatcaaagatgtgttcacatccag

SEQ ID NO: 208344 - DNA, 499 bp, Homo Sapiens
  misc_feature (19)..(19): n is a, c, g, or t
tttttttttttttttgtcnaacatttatttttttctttttccccagaatcctgaaacacaatagtcttttagtagaagaggtttctgagttctttctaagcaactactctaaaaaatcagtagcttctaggtggaatcatacagtttccataaatggtcttattttccttttctggttgaaatttaacccaaagaactttaaggtctaatgtgatgcagtatttacatacaaaactcttaattcatcctgcaaaatggccaatatgagcagataaataggaaagctatgcatctaataaagcacagggccagtgctctataaagattattgagttgtaaacataagatatctattcaaaagagaccactgaaatggttggggccaggttaggccaaaacttaatgcattaatgtaaacattatcagtatgtttacgtacctgttgccataccacacagatgctttccaattcctaccacaggtagtttttcttctctta

SEQ ID NO: 208345 - DNA, 501 bp, Homo Sapiens
tttttttttttttttttgcactgtggaaatctttgcccaaattactgcaagagtctcgagcatcctgctgtcgtaagtgcagagtcaaaggaagaaaacaatgattttttaaaccatctttctgctttctagtctcacctgagtgcctcacatttggcagaatcaacctggaatcctgctcataagactatcagggaaatataatttccagacttccatttccagaaaaatgtaataaatacttttaaaggggatggagatggtaccgtgtgctaaccccactctgagacaaacctgggtcacaggaaccatagggaagatgtctgcagtagaaggggacctcgaagtactcaagtacttggctcacaacagcactattcacataaagcctggcctgccccttggtgacctccttcccttacgcctctagactctactaggtgatcagaaatccctgcaagctagttggggagggaagagtgaaagtgaaaaatggagagg

SEQ ID NO: 208346 - DNA, 513 bp, Homo Sapiens; identical to SEQ ID NO: 60707
  misc_feature (510)..(510): n is a, c, g, or t

SEQ ID NO: 208347 - DNA, 478 bp, Homo Sapiens
tttttttttttttttttcatttttacaatactttttattttactttaatcaaaactaacagctttatgaaaatgtttaattagccaaacgtctccaattctttatcagggtttaaaaaatattttatgatttaaacttttcccacattttttgcctaatgattccttactacattgttttatgaataacctttttaaatctgtaatttgaaccaacttttagataactattgaattagacaaaactattctctttttttttcatgaataacataaccctttctggtacatttggtatacagaattacatgttaaatagaaacctgaaactttagtgaaaccctaaaaaacaaaaaatcctgaactaatggatgtggacaattccgcaactttagaagagacttcggatagaatggaagaaggcaggctcaccctaagtagctcccagcttgaattaacactgacatttaaaaatattt

SEQ ID NO: 208348 - DNA, 519 bp, Homo Sapiens
tttttttttttttttttgcatattactgaaacaattagcaaaatatgaaaaagatttgataatagtaaagtattaatgttaattttctgattttggtaattgtgctatggctatgcaggaaaacacccttgttctttggaaatacaaacttaagtaattggggtaaagaggcaccacatctagtaaggaatattcaaatggctcagaaaaaagtacttactcgaagttgatgataaagggaaacctcttccttacagtagaatgatgactaattaatacagaaataataatagagttagaacaatcacaattttggaaacatcctagtaaaaatttattcagacaagaatcgtcaaaggatgctaaacctaggaggggtagatttgatgaggaacagaattgtcaacaaggtctcaaagtttctcctcacaaattacccactaattgcaaaaggaaaaacaataacgatacactggagaaactggacatcttacccaagtgatcaaaattagcatcacc

SEQ ID NO: 208349 - DNA, 528 bp, Homo Sapiens; identical to SEQ ID NO: 61777

SEQ ID NO: 208350 - DNA, 529 bp, Homo Sapiens
tttttttttttttttttaagataagaccataagctagagttctggtcaaattataatgcctttcctccgcctttctttcaaatcccaaatgtccaaggaccaagttcctacttcactcatactaacttttctaaagtctctagacctacgttccccaacatggtaagcatcagccacatatggctaaatttaaatgaattaaaattaaataaagttaaaaacacagtttcttagccacattaaccacatttcagatgctcggcagccacataggaccacgtgtactctacaggacagcgcagacatttccatcttccactgcagacagttctaccggacagtgctgctctggactcatttggttttgcttttttaaaattgcattttcagacatttttataactttttgaaatgttaaatgactgctccacagagttattcatttgatggtcacacctactcaatcccagaaccaagcattttagtgtaattgcagaaatgctctgaaccaatcaacctatttgtccta

SEQ ID NO: 208351 - DNA, 603 bp, Homo Sapiens; identical to SEQ ID NO: 59170

SEQ ID NO: 208352 - DNA, 653 bp, Homo Sapiens
cggccgcatatagactaaaatatcaattataacacattcaaaatgtcccctacactggcgaatgtttaatccataaggtttttttagtagtttgtcaaacagtgaccttctcacttcccagctgtaacacatagcaaaaccaattttcctacccttggctcagcaatctgggtctcaggattatttgtgcccaacaaaatctcttagccatttcttaaactactggcaggtagttagattttccacttgacattgctaagagattaaaattgtttatctcattgtcatacacaggccttttcagtttcctgctaacagattcaggttagataaggattacagaagtgatactcccaagttcctctctataacagtcgtcatcctttccccataatattatgaggtatattttattaaatctatcattcagatagctaacgcgtaagagcattatataacatataaaaagcattatacctcatgcataagcagaggcttagacaaacaccagctcctattcaactggggaagaagcacttcacaggagatcctgctgaattacacagtcagtcatcaattgccatagagaagttgaaaacaaattgagttgagcccggaaagaatgtcagtgaaattgtgaaaaacacttgctg

SEQ ID NO: 208353 - DNA, 586 bp, Homo Sapiens; identical to SEQ ID NO: 58717

SEQ ID NO: 208354 - DNA, 544 bp, Homo Sapiens; identical to SEQ ID NO: 60580

SEQ ID NO: 208355 - DNA, 556 bp, Homo Sapiens
cggccgcctctgccccccctccccgggcagccagtgccagatgagagcaggagacaaaagtagcattttcctcgtactccggggctggcagcggggccttcccccagcaccacatggctcctggcagccctgccccctgtgccggggtggccgaggcccagccgggcccactggaccgagggacggcggcggccagagactagggggcccgtgggcccatagctggggctggcaccgggcagcctgctggccggcgggacctgccctcctcccccacccgggtgaccggctgggcccagggacgtcattttcacttcctggctttggagaagacgcctccatcctccggcacctcgggtaagtcaccttctttccttctgtcgtgaagacgagccgagggtgctgccatcttgtgccccggtgcctgttacgtgtcctccctctaattggttctccaaactcagaattctatttcagagccctccatcttccgtgcaggaagccctgccaaaaactgcagggaaaatgcagaagccaagcccatttactttcaaga

SEQ ID NO: 208356 - DNA, 537 bp, Homo Sapiens; identical to SEQ ID NO: 60722

SEQ ID NO: 208357 - DNA, 448 bp, Homo Sapiens; identical to SEQ ID NO: 53471

SEQ ID NO: 208358 - DNA, 338 bp, Homo Sapiens
ttttttttttttaaagctagtggttatggaaacacctgtcacttaggcatttgctaaccaacaacaaagtacagggtctcagacagcctggccctctgcaaggacattcactccctgccagttggccgtcagaggtagagaggaccactcaggggccgcacacctggtggagcacgtgcactctcacagagggggaacaatctgcacggagggcatgggcatcaaggccatgtgtgaagctggagcaaagtgggaggtgtgactagctggagacacaactgcagaaatgatcctgaaccgggaaggactgggaaagggtggaggccggcctcgtgccg

SEQ ID NO: 208359 - DNA, 502 bp, Homo Sapiens
tttttttttttttttttaaggattaaaagtcattttattcaatacatacaaatgtaaaaactactaataattaaaagcttacgttaactagaattttccctcatgtttgagacaagggaaaacttacaaaaacaaggcaatatttaatacatatatatgttttttaaatgccattttacttttaattgtacttcatctctgatttacctctgcaatctctatccttttggcaagatcatcaagagaaagacagctctcatcagaaggcagattctcctggagactataggatgcttcttcaggagagagatcttgaaggagatcggagtcgtcgtcttggttatcttcataggaaagggaatcttcagtatcttttaaacatccttctaaaaggctgttcaaatagtcttctgtttctttgttgagttggtcgtctttatctcccttttcctctggggccatacacacctctggaagcagtatgcctaagtcagatatttga

SEQ ID NO: 208360 - DNA, 450 bp, Homo Sapiens
ttttttttttttttattggtagaggaaattttttattacagcagggaagattttaatacatgacatctaaaatctctatagatgcttccatgttaaaaaaaatatatttatacaggtaaaaacgatcgttttcaatgctttgaaagtaagatactgcacattttttttaacctgtccaaaaacatcaaggtgggaggtcaggcattaataaacattattaaacatactccttgataataacattttgatacagatacatcttttagaggtcacaatatcatggaccaaatcgatgttaaaaaccattatcaacactataaaatgtgagacagcatattacattttttatggagattctctcatattatattctaataaaaaatatcctaatcttcatatattggtaaatccatacttgattcctcagccatcctttgtctaagtgtttga

SEQ ID NO: 208361 - DNA, 527 bp, Homo Sapiens
tttttttttttttttttagtataaaataaggtaagatagatttttcttctaaaagtattagattgttgcaaaagtaattgtggtttttgccattctcaacttatctaaacttgtaaaatatgtttgagaatgtcacaaattagaccagttatttttgttcccagataaaagaaataaattattctatgaactattcaaaatagagaaagaagacaatctacattctcagctttcatattatgaattaatccactcaatttcaaaataaattagtgctttctcaggggtatatactactaataaactaacgtttcttataatgaaaaggaactgacaattgtatttcacaaaacaaatttccattttggttagtatatgttgagctaacagattaattagtagtgccaatgaatactttttaccacagggaggggagcaaatcatgttaaagggtagtaacagccaacatgacacagtgattaccatgggccaggtactagtcaacaaccctatgaactagatgttat

SEQ ID NO: 208362 - DNA, 528 bp, Homo Sapiens
tttttttttttttttttaattaaaatttatactgtttcctattagagggaaaaatttgaagacttcagaacagcaccgttcatggggaaaaatgtgttgtttctcaggaatcaactcctaataattcctaagacagtactctctgccctgtgctgcaggattgctaggtcaccctagattaaagtggccaaagatgctacagggtcatgaagccagtagtatattaatagttctctaaagtaaagtgaaaaagaggtgaaaagtaatatagatatatataaaaagggaataccagcctaagactgggttaagaagaaaacattcaaatttttctgtcaatttaaactactgtaggaggatatcagaacataatttatcatatattatccccttcattttttacagataattatttttctatgcacagttatggctaaaccccttagtagaaacccagagaactaacaactctctgaaaaaataaaatcaagaagcattccagctgttcccagttttataagtgtatca

SEQ ID NO: 208363 - DNA, 535 bp, Homo Sapiens; identical to SEQ ID NO: 59764

SEQ ID NO: 208364 - DNA, 562 bp, Homo Sapiens; identical to SEQ ID NO: 58895
  misc_feature (443)..(443): n is a, c, g, or t

SEQ ID NO: 208365 - DNA, 562 bp, Homo Sapiens
tttttttttttttttttggaagatcaagagcagctcaggccaggcatggtggctcacgcctgtaatctcattttaatgggaacagccccttagttctcggcaaagcggcccatactgaggcacaccatgagggcagtagctcatctcagctttggtgcaggcaggaagtcaggaaggatggcacaggcctggcaggctgcctggaaactgtgcaccttcagcctccagcaggaaagccacccgtctgcaggctccctgccttccctacatctctgttcctcagtaggatccttgggtgtgctcatctcatccctccatttggtcaaggtttgcccatcaatgtgcaggacccaggcaagttcacggcctgtcctggagaaggggggaagcaatgacatcagcggcagtcccctcgctccttgccagtgacgctggggtcttaccagtggtgtttgcgagtggtgactccgaacctggcagtgcactcatagcagtaggagccgtcacaccacggaagctccttggacagcatatctgcaacacaggggggagggccggtccc

SEQ ID NO: 208366 - DNA, 564 bp, Homo Sapiens; identical to SEQ ID NO: 60101

SEQ ID NO: 208367 - DNA, 616 bp, Homo Sapiens
ttttttttttttttgttagtcacatatttacataagatatcatagtcatggtagactaatgagaggagaagcattttggttatgtcatttcgggataattttatcagttgtgagagtttaacaataaagaacataaaacttgctgtttcataaaaatatgaaattttcctggagaaattttgacttaataaaggaacaaagaactcagtttgtagtgaataaaattttacattcacttccccactttctcatagaagatctacagttggggataaccgataagaggcaattggtttctggcttaagagcctttttcattaggaattttcggtaaattaaagtctgaaattagaaaaacattagacattaatcaacagaccaacaccagtcacgtaaataaatggcattcgtataatttggcagctgaaattcttaaataatctggcaggtacaaggagagaaagaggaaaaatgaaccgttcatcattctcactgcggtctcaccgtttccctccacaccccattacagcgaatgaagagaaagaacatcgtaaaatataaagccggtattatatacagtcactagtcttccaataccttccatggattccccacc

SEQ ID NO: 208368 - DNA, 810 bp, Homo Sapiens; identical to SEQ ID NO: 48265

SEQ ID NO: 208369 - DNA, 528 bp, Homo Sapiens
cggacgcgtggtcgacccacgcgtccgcccacgcgtccgcccacgcgtccggactagttctagatcgcgagcggccgccctttttttttgcctcagcacacattttagttttctcattctctcgctgttagatagaatattcttatgtatttttttgctgttccaaagttagtttcatctgttggacctttgtggtaaactgattcttacatgcatcttacttgactgctaaattaattttttaattaggcccacaccgtgacaaaaaggcagtcttccttatgagcttcaagcgtgaagtcccggagaaagacactgatgggcccagcttgggtcatgtggccatcctgaagaaaagaaatgggctattatgatcatatgcccatccccgagggtgaatggacagtgggtactgtggtgacagctctatcacaacaatgtgagatgtgaaatacaggtttccaaaggaaggaagaatgtagggtaggtaaaaaacatgctggataatgcctataatcccagcattca

SEQ ID NO: 208370 - DNA, 986 bp, Homo Sapiens
cccacgcgtccggaagccagatcagaaatggtccatagcaaggtggggagggcagcgtggtacccacctggcagtgtagggggttggattcagcttcatcttcctgaccccttgtcaagtggacgagctccagccaaacaaaggaagtgtgttggagtggccaccagcacagaagtgtacctttctgggtaatgtgtcacccagtcccctggccatgtgagaggacaggcacagttgccacacagtactaatagttggtctcttctttaagggtcaaaaaaaaggaggtggagcacttttaagaaagtgttaaggttccatgaagatgttatggtggcgtgctggcaggtgcatatcaaccctgccctgaggccctcagcagccttcggtctccccaaagcaatatggctccttataaagaagtcttttagggctgggctcggtagctcatgcctgtaatcccagcactttgggaggccaaggcgggcggatcacaaggtcaggagttcaagaccagcatgatcagtatggtgaaatcccatctttactaaaaattcaaaaattagctgggcgtggtggcgtgcacctgtaatcccagctactcaggaggctgaggcaggagaatcgcttgaaccccaggaggcgggggttgcagtgagccgagatcacaccatgggcactccagcctggatgacagagcgagaatctgtctcaaaaaaaccaaaaagacaaatcttaccgtttgcccattgattaaaaacttttaagaaaccattacccaagcataaccccggtggtaaccccgaggacaatggcaagctgcacatacgtgggacatagactgggacgctaaagttagaagccaaacacaatagggcacaataggactaaaaagccgtaaggaaagggccatacgggcaaaagtagcaaaaggtcaactccggcacagtacacgaaaacgacgaacacgaaaatggccagaataa

SEQ ID NO: 208371 - DNA, 840 bp, Homo Sapiens
tgttatatgtcttcttagtcatgtacatgatttattagtttagtccaaacgcacacaggtgtatttgaattcatctgtatgcacgaatttttacagaaaatggcaatccaactatgtttttattgaatgtgcaatttattttccacatgatgtctattacaggttcagtatccctgatcagaatgttggaaatccaaaatgcccccatatgtgaaacttggggccacaagtttgagaccagcctgggcaacatagcaagatcttgtctctacaaaaaaaaatgtttaaagaatttttttaaattagcacccgtagctccagcttctcagaagattgaggtgggaagatcacttgagctcaggagttcaagactgcagtggactattataactccactgcactccatcctaggtgacagagcgagactatttacaaagaaaaaaaaagtttcatataagattaccttcaggctatgtgtataaggtcatatttaaaacacaaatgaatttattgtttaattcggtcctatccccaagaatagctcattatgtgcttgcaaatatttcaaaaatcaagaagaatcgaaaacacttcgggtcccaagcattcccggatagggaaaaacctatagttctattcctcctcatctaccttctggaaactcagcatttaaaagcttttaagtaccactaaacatcaattcgggaggggttcttaggcctgggctataatagcagcagaagtgtatagtgcacgctgatttgactccagctccgtctaaaaagacattggctagccggtcctaatctgacaggtaaaaacggttttccctacgtttga

SEQ ID NO: 208372 - DNA, 761 bp, Homo Sapiens; identical to SEQ ID NO: 44451

SEQ ID NO: 208373 - DNA, 587 bp, Homo Sapiens
  misc_feature (529)..(529): n is a, c, g, or t
  misc_feature (541)..(541): n is a, c, g, or t
  misc_feature (558)..(558): n is a, c, g, or t
actcatttatgaaacatttattgaattagacattctactaaccatttatttttacaaacagttaactaaacatcactggttttctttgataaatggtaatcttgcaaaggctcatttatagatacatcattatttcatgctgtataaaattgacataggagttaagaagaaatcacttaagcagaaagcaagggtatgggagtcctcggtaaggcttttttctttaatgaaaagaagctccaaatcatttgctaacaaagagcagcctgtaaagttgagctgcagacatagacaagctggcagcttgcatggggtgaatgccagcagaaactaaggactagacattttcaagatgggtggcttcatcttcccttctctgccagccacgtgttacacaagatggacccaatcaactgggaaagccccatttgcataagattaggggtgggggcgaccagcttccacatgcactttgcaaacgtcataaatgatgcaaccaatcagaaccacctcctcaaaccggactatnaaatttggcgcntcaccaccaaccagtcntttccactcggggacacatcatggggcct

SEQ ID NO: 208374 - DNA, 453 bp, Homo Sapiens
  misc_feature (325)..(325): n is a, c, g, or t
actgtaaaagctttaatttttgtctttatttttattgatacatcttagatgtgcatattttgggagtacatatgataattcaacacattcatataatcaaatcagcataattgggatatttgtcaccttaaatattgatcttttcttgatgctatgagcattaggttaatgggtacaaatgtacagttagataaaaagaataagacctggtcttcaatacatcatggtggctatagttaacattaaccattgtacatttcaaaatgctagaagagaataattccaacacgttttttgtttgcttacttttttctgaattctaatnagactgatacatcagtccctgctgtagcgaaaataatgacttcctcaaaatgcacttcaagaatgtgacctcaatggatgtaacagaaagaacctgctcttggtgtttgggaaagaaaaggtgttaga

SEQ ID NO: 208375 - DNA, 665 bp, Homo Sapiens; identical to SEQ ID NO: 55088

SEQ ID NO: 208376 - DNA, 484 bp, Homo Sapiens
gtagagacagagtcttgctatgttgtccaagctggtctctgaactcctggcctccagtggtctttccacctcagcctctcaaagctctgggattataggtgtgtgcatgtgccactgtgccaggcctaggatgaccttctagacatgagctataataagcacatacacccctaattttattgaaatacagatactggtccagtgccccgggggtgagttctgagactgtatttataatgagctcccagatgacactgatgttgcaggttcacagaccctcaggtccagaagctaagctttggaagactgtgcttgccgacaagaattcaaaacctccaccacagattgtcttgccaaaatcttcagagatgtgtcctgatatttcttgttatgaccataaatgtcaaagatataaatatgggatacagatattaacaggcctatattttacatgtatgggacccccattaaaaaaagttgggca

SEQ ID NO: 208377 - DNA, 437 bp, Homo Sapiens
  misc_feature (74)..(74): n is a, c, g, or t
  misc_feature (77)..(78): n is a, c, g, or t
  misc_feature (414)..(414): n is a, c, g, or t
ccttgccgaagtcctgaagaatggaaaaaagaaaaatgaatcttcaatatcggtttttcacctcaggaaattcnagnnccacaaaaatataatgttttagtaaaaacatttccattgcagtgcttatatcatgatatgaaatttaaaatccacattagccaattcattatttaaatgacccacccctgaaccctctcatagtgtacatgagctgatcatactaggaagcaagttattacacaaaacataaaacataaacttgcagaagttgtttccaaatgtaaaataatcacaatattcatgaatttctaagtcttttcatttgtttttaaacttagatgatgcctttttcattaaaagtgcctgtgctcacatttattaaaagttttccatccattattatttaggggatcntggattctcccatggcttccagg

SEQ ID NO: 208378 - DNA, 496 bp, Homo Sapiens
  misc_feature (3)..(3): n is a, c, g, or t
  misc_feature (285)..(285): n is a, c, g, or t
ctnaaaatgcagcttttaccagatttctaggaattgggtaaatgcaaggttctagaaaaccttcaatgcattttgatactttatagtttcttatgtcactctcaagaactcctataagaccaagagtcatctttggactgtaggatttcaggggggttttgaaaacaaatttgatgtttcttatttttaataataacgctctgttatttttgacataaacagtacatttaataattaataaataaatattttaagtatgtaaataattagtactccctgtcacanacaaaacaaaagtaaggttttactaaacagctcatgagccctcattctgccagtgaggaagccttcaaccccgtgtgatactcactctttcatgcaatagggcttccatgtaatgttgccgtataatcactttaaaaagttaaacgacccatctccaatcacctagtttatccccaggggaatacactggcatagagagccctatttacct

SEQ ID NO: 208379 - DNA, 1000 bp, Homo Sapiens
ccaggtggttatacgggctaggagaaggacatgcagaagacagacatccactaccactcgctgactggggaggccgacttcaactggcggttcatctttaccatggactaccatggcggacggagcgcacgtgtgtccagagccagaaggtaacaggcctggggcgtgaggggcaacaggcgcacaacgaacagacccaggctcctggagctcactccccccacccgtccaagaggcttgcaaatctgtaccagaacatcagaaacatgtcctcaggtggaaacgctcttccttgatagtctatcactgctgggtggagggccactgaggggtagcaagggaaacgtcacaggagaacaggccggtaagacagcccattcgggcatttacccaggattaacctcatggagcctggatgccacgtacaatggaagtacccaagcacccgacttatcatccaagatcatgggacgatgacatatactaccacgaaggactatcctacgctgcaggctactagaaaagggactagttgaacaagcatggaaagggagatccttatataggctgaatgtaagacaacaggcgcacacgaggtcactgcaagctgcactggtctgaacatgaccatcacggtcgacaagccaagcagtgcacacacaggacagaattggaagccgacgacgaaatgggcccaaaggaagagcaaaacacagcgaatgaaccggagtaaagcagaagaacagagacagggcgggaagccaggacagtacacacaaggagggaaacagcgcatatagagagagcatgtgaagtactacgaaatcagagagatactaccaaggatgagagacagagacaaatggacgagtaaacagagaaacaatgccgcacagagccacacacgagcgcagtaacaaacaccacaacaggtaaactagcgaaaacaaagaaaacagaaaacagggagagacaacactgctggcaatcgaatggatct

SEQ ID NO: 208380 - DNA, 1000 bp, Homo Sapiens
ggtggtcaagtattggcggtcacccaggccccgtgctccagaagggtgaggtttcacagtccatgcaggttggtccctgggccccgaagtcgactgcccggcccgcaaagccgtggctgctggggaagctgccccagtccagcgcgggggcttcctggcttctgggggtgggctggcctccgaggcaaggctgcacgctggatggcctggtgcgcgctccagctcgcggtggtggtggtggtgttggtggtggtggtggtggtggggtctccctgcgtctgtcccttagacgtagtccttgcggtcgtagcctgtgcccaggctggctcccgggccggtggagcgcggcgcggagtagacgaccttggtggccgtgtacttcttctcgcgtgggggacacgagcagcagagcagcgcgccccccagcagctgcagcgccgcggtacgcccaggcccacgtacaggcccgcgcccatctcgcgcttctgcgcctcgggcaccacggggttgtagaagtcccggataatggtgttggccgaccaggacagcggcacgagggtgagcagggcggcgagaaggaacagcacgcctgccaacgatggtgatcttggccttgtgccgtgtagtcctgcacgcagttggtgcactggcgcccaccagcgcatagcaaccccggaagccggcagcatgattggccaccacgaaagagggcgcggccgcctgaaaggtcgtagtggaagcaagcaggaagtacgtccacctagcactgcacaggtcgggagccatgcacaagcagtcatcacaccgaccccacagagatctagcacgaagaatagatcacaggggaaccaccagggcacaccagcacaatgagcaccaaccgggaacgaaccgacaccacaacaacgagaagcacaagaatgagaaagagcaagcacaacacaacaaagaaagacacagacgagaaaaggaaaaggacaaacacgcacaaaatacaaca

SEQ ID NO: 208381 - DNA, 766 bp, Homo Sapiens
taggaaagccagcaccccaggagggaaggtattataacaacctcgtatgccactgtcacagctccaacctctgaccatcagaactcagactgactacaggagagggacctggggtgaggaggatcaagtagccctaggctcagagtcagacccaaacgctgggcatttgttctccttccagaccatgatttgtggtgatgcctcggggtggggtccggtggctgatggttgtcagagaggcagaactggcccaccgatggtagttctgtcttcatgctatacttctgctggccccaggtatctagtacccaaaggtgttgcaaggcccacagcgggaacgaggaccacaaggattggtgacacaggatccaatgggcttttcacatgcattggtggtggcgcaggggttggagggcagcttgcagtcctcgctctccagcaggctccggtatgtgttgatctcacactccagccgcgcccgcacgtccagcagcacctgatactcctggttctgccgctccaggtcactgcggatctccggccagctgggactccacgttggtgatcaggctctgcacctgggacagctgggagctgtagcgggcctcgctctctgtcagcgtgttttccagagagtatcgcaggttgtgctgggcctgcagctcgatctccaggcattgactgtgcgtctcagctcgatgatctccgcctggtaggactgcagctgctccgagctggatacaacctggttgttccgctcctcggc

SEQ ID NO: 208382 - DNA, 757 bp, Homo Sapiens; identical to SEQ ID NO: 40862

SEQ ID NO: 208383 - DNA, 455 bp, Homo Sapiens
  misc_feature (191)..(191): n is a, c, g, or t
  misc_feature (455)..(455): n is a, c, g, or t
tagtattgactgaatcattttattattcccagaaaacacagcagtaaatcttggctcaagatttagaagcagcctgacctcgtctacggaggactcctcaatcaggcgaggggcctctgcagacaggatgccgtgggtggccataacatagatcttataggcgcctctctctttcaggatctccgcggcanaacaaaactctccacatcgtcaataatgtcatcctgggaggagaacagagtgagttggtaggaaagaaacaccctctagcccatactgtcaatgcacacaccactctactctcttctgcactcagtttcagaggatttctgatgggaaaatcagagctgtgtgcctgggtcaaagaacgagcatccagaaatggcaacagaagcacctgacagtaccttgtgtgtctgtcagaggcgggcgcagtcaagcacctgtgacattan

SEQ ID NO: 208384 - DNA, 512 bp, Homo Sapiens
attgaattctactttgccatctgaattgacttgaatgtcttaaaacaggtaaatactgtaaagtgtgtattcttgatgtttattggctcatgtggacagaaatgtacagggagaattacattattttaacacacagaagtgcaactttctgctttattttctgaatttcacattacttttacttaatgcttttgtgttttgttaatacttcataatatgtgaaaaactcggatcttttaaaaagcatcatagatcatttttccatatgacactggttccgattttaaaaattatttttaaataaccgattatgattactgtattttttttctcaagaacagtgataggtagaaactaattgaacatttggtagtctttcaagaatagtgtctcttcaaggttttacttgatttaatttgatattttactggtttaccagtaaggtgtattgttcagttttttgctccgatttgaatcgtggaggtggaagcaaattagtttacatggcatgt

SEQ ID NO: 208385 - DNA, 888 bp, Homo Sapiens; identical to SEQ ID NO: 53210

SEQ ID NO: 208386 - DNA, 893 bp, Homo Sapiens; identical to SEQ ID NO: 40441

SEQ ID NO: 208387 - DNA, 558 bp, Homo Sapiens
ttttctttttttttttatttgtttgtttgttcatttattgttgttttactgctattggcgataacatgaaatgtgatacagctattgcccataatttaatgtgaaattaatcatgatgaattctatagcatgctactgaaatgccaaattcagctattttctttctcttctaaaatggaagtttcagttttccatatcagatgtatataagtggaattataacacaatcctatcactgacagtaatcctcagtcaccttaaataatcagtgctcacagtgctgcttacagttcatttagttggcacatataaacctgtacccacacaagactgaccaaaaattttctttgcacatttttcctttctcatagtttttttctatatttcgttaagcaaaggaaggttaatatgcctatttttcctgttaggcttttagaaattattttccatgacttttgttcttataataggttagacagtttatttttcaaaggtaaaaattgtgtttctatgcattaatgtgattgaactacaaaaacagagtgcaatatgttcaaa

SEQ ID NO: 208388 - DNA, 618 bp, Homo Sapiens
  misc_feature (518)..(518): n is a, c, g, or t
  misc_feature (568)..(568): n is a, c, g, or t
aataactgttcagctacaaaattttattggtatctttttatgttccctctagaggatgtaatgcacaaaagcattgccacggaacatataaaattacaaatgaaatttattgtaaaaagtagaatgtcttctagactggtgtcagtatttatgtcattcataaaccaaaactgctgtataatatattcattgtcagcaagttcatgtgtgtaaattgccatccaatgttattgactgatataagacagatattgaaaagacaatttaaatttactcttccaaacataaactgttccacaaaagcactgtaaaaactccttcaagattttgggttgtgcttgacatttatggttaactacataatttggtcgtgtcataatccattgtgtttggcaatttggcattaaacgcctgcagagcagattggatcctcaccacctcactagtagacagcttgagtctatgacgaagcaagcaagagaaaagatctagacgacgctgaccaggtggggagagtntatttacacggtctctgatctctagtagttgcaaaagtgctgaatcctgngatccctgagtataggggtagtccagctgcaaaatcaggtcccgaattgc

SEQ ID NO: 208389 - DNA, 435 bp, Homo Sapiens
ttttaaacacagttggttgccagttactgcgtgaattttctggcgctgggacaatgaccttccctgcatccacaggagccctctgagggagctggccactctgcctcctagtcaccgtgaggcttgttattaagctactgtgtatgtctgtaccttttgtaacatggacctgctgtccacaaggtaacaaactaaggctgtcatggatgcacactagggtttgcaagttaaaatttaatcctggtcttagacatagaagttatttttaaatttaagtgacacatgctgcacaacaaaccccaggttctagctttcactctacttttgcagttaactacatgcagtcaaaatttaaaagtgccaaacgctagcagatcaaatccataacattttcaaacagatgaattttatcacttacaatgtcaaatacaaaaa

SEQ ID NO: 208390 - DNA, 518 bp, Homo Sapiens
agttttgaattaatcgagaaactttattctaatcttataccatctgtaaagtaaacccaaagcaggcaattttaaagacatagaataatttttcctatggaattaagacagaaatatgtcagtcgaccataaaatacacagttgcatgaattttttaacagacaagcagagttgccactaatctccctataaagtataaaaacagatgcttcaccagtgtttaacaggagcatttatgtattgaattggaaaggcaatacatttgcttgatttgaaaatgtacaatcagcattcctaatatatatatttttagaactggccagaaaatgtattttaatcctaatcaatcatcttatgtttactttggcaagctggaaatgacaagaaatcatctgcataatataaacagtattcccagtttgcgaaactagcttatttattactgtataaaacaaaaaaatagataacttgattttcataatctcccagaaaaaaatatgacctaaactattcattca

SEQ ID NO: 208391 - DNA, 383 bp, Homo Sapiens
gattttaaaatagctgatgaagaatccactttaatcttttttgggtgggtgatgaagggctgaagagcatcgctaagacacttttgacagaatcattaacaagaaataagccgtcagcactcagttgcaaaaccagcagctcctaaaaccaccatcttttacacattccgagggccacagaggcttcctggatgaccagagtgtgtgagggggcaacccaaagaagaggcctggcccagaccaggccctccccagcaactcccacgggtcacagacttcccttctgagacgagcagaaacaccaccactgacatgatcttctttcacgacccatggaggagcaattcacctttaccaaaatagggtgactcccgggctctgca

SEQ ID NO: 208392 - DNA, 542 bp, Homo Sapiens
gcattgatatgaatagtttcactaattccattcatggttactgtaaacattcttaaaactttgttttatgggattatcagagtaacaaaataatgtagtccctttatggactataagtaacttaatgcttttctttccctatttcatatccccatatttggtgcaataatttaattcacttacttcattattttgttttgcattgtattttacacctacatttacactattaacttatttgtacatacttaaatggtttcagtgtgaaaaagcagcttctgacctagcattcacactaggcggtggcgttctcctgctgaacatttaacaattctcaaatctctaacatcagatgaggtcactgtaatccggataaaatgagatactgtaatcatgcctgagcacagataaaaacaaagtcactgtgcaaaccataaacagccaacctcttcttgtggctaacatgggtgactgttgcttctttcctttcctcccacccacaacataaaaattaagatacccagttgcaaaatcactcccac

SEQ ID NO: 208393 - DNA, 577 bp, Homo Sapiens; identical to SEQ ID NO: 61579
  misc_feature (433)..(433): n is a, c, g, or t
  misc_feature (436)..(436): n is a, c, g, or t

SEQ ID NO: 208394 - DNA, 566 bp, Homo Sapiens
  misc_feature (24)..(24): n is a, c, g, or t
gacaaaaggcaaacaacaggcagngaaaagctgctctatcttaatatgataatcactatacatatcccagattctccatctcattcctgtaccgctgttcagacaccttgctcttatgttgcttgctctctaaatgctgccggaattccatctgttggccagctccaacattacacattgagcagtaaaactggccacttggagtaacacacatggccagatcacgtggaattctctgccgagagcggggattgaagtaaggacctgaattattctgtactgtatacatatttctcctgttaggcatcatcttaaactcattcccttctttcctggcccgccgttgacccagctcttaggattccgagaatgagttactctgagcttccgccagccgcagcctcttggcatgattcttcccttgatagtgagcctgagccacagctggggaactgaaggaggcatcacagagcttacagtaatcattctccgtggccaggatcactcggcctcctggcttaaaggagcccatctgcggagggactggaacaactggagtagctgca

SEQ ID NO: 208395 - DNA, 537 bp, Homo Sapiens
ctgtaataattaccagtttattactctggctaagagatccagaggtaattggaggtttacatttcatttttacgcttctgttattgagagtttattaagtgtttcattgccttccaaaggcgattgacaagttcttttactgtctactttagggttttttgtgacacaagtaatatacacacataaacatatattcattttttggcaagtgagaagatgcagataggcaaaaagaaaaaaaaagagatcacacagagattcactgttaacctttggtgtataataaaatcagacactttcctttgcattatgtcacatagaaatgtacaaataaagtgtacatatatacacacatatatgtatacactgttttgcaactcgttattttcactttgcaatatacaatgagcatttttccatgcaaatgaatgagacctcttattaaatgaataagattgggtcaaaagatgagatgttgacaagagtcatatgtaaatctcagcaacatcgaatgactggagtaaaacgatagcaaat

SEQ ID NO: 208396 - DNA, 534 bp, Homo Sapiens; identical to SEQ ID NO: 58956

SEQ ID NO: 208397 - DNA, 528 bp, Homo Sapiens
tatcccaagttgtattactagttttggggagtttgcagacaattgaatattctataggctgtgttgcagctttagatggatcgacctgtcatgtttttgaggttatccaggctgtatatctctggagagaagggaatggcaaagagtgggagtctgagtcaagtttggttttttttttttaagagacaaggtctctgtaatccaggctgcagtacactggcatgaccatggctcactatagacttgggctcagccaatcttcctgcctcagcctcctgagtagctgggtttggttttccccagggccatatgtcagcttatttaccctcctcacttggtgtctcccagcctgccagcccatgctgttcatccagtatctgctgaatggtgattacctattaagtggaactaacacaaaattgcttatctaaaagcaattattggtgattatttccttgcagtggcccactagagggcgccattgttaagtgtaattccagtaggtgttttgtgttttttttttttaat

SEQ ID NO: 208398 - DNA, 482 bp, Homo Sapiens
tcaagactgtaaaattagctttatagtgtttgccattgtttcacaagttacagtaattccatttatccggagagaaaaaaaggtgatggagacacatatggaaataaaggatttgacaagtaaacggatgaattcatagcatacaaaagtaggtatttaaagctgtctggtcattgtatgattgggttcagtgatgacagagtatccacagttagtgtgagatttccgacatgcaccaaatagtagctcagccttgagaaacacaaaccaccattctgctggagcaaatccaagcttaagactcacttaagaaccatgggaaagcaaggacatatatcttgcaacactgtataaggatcagatgtggttctatatatagcaagagacctaagtgtgatcaagattttggtaagtacacactgccaggagttacaagcagtgggattgtttgcatataaaatctacatgtcatttgggatttc

SEQ ID NO: 208399 - DNA, 524 bp, Homo Sapiens; identical to SEQ ID NO: 61291

SEQ ID NO: 208400 - DNA, 561 bp, Homo Sapiens; identical to SEQ ID NO: 61575

SEQ ID NO: 208401 - DNA, 572 bp, Homo Sapiens
cttaggtatttttgtttttctttactctattagtttcaaagtgaaaggtaacttaatttctttcacaatagcaaccaaatctttgaagtgactattaatacatttcacaggaaaagagcaagatcagtatacacatacacatacatttaaacatatgtatatacttacatatattaacacatgtatatgtgtgtatacatacatttatctgtcctgaaggacataaaaactgaataaatagataaatcatgttcatattgggttctctgaagggccccaaataaatagcacaatttccccccatctaaacgataaaaaattaagtagcagacagggggcaggatgaaacttttattactgatcaaattgagttggaggatgcaacttagtgtgaccattcagctaatgggccaattagctgaatgacagaattagaccaatttaccaatcacaggcaatatctgtgacaagaaattatacttgcaggtcagcccacaatgaagagggagttcagctgagcaaacccagttacccatcactatcttaccaactagataagcccacttcctcat

SEQ ID NO: 208402 - DNA, 577 bp, Homo Sapiens
cacaaggacacaattttaatagtaacttatattaagatgcagtgtctgctaaattataaaaattgctttaaaaatatattgacttaattatactcatttcctttcctttatgtattgacatttttcaaatacttcatattgaaataatttcaaaacatgattattacaacatgtggcaaatatcttcacatctgccttcattcaaattttaagctaatgcttaatgcattaaactttattgatgaaaatactacattcacatatttcttaaaaccagggctagaagggtccttagaaaataatcacttacatgaaatgctgacaaataatttacataccatttcgacacagcattctgttcacaccatgtataatcttgatattatcaataactgtggatacatttaatgttgaacttacaatttaatacttaaaagccattgttcctgtccattaattgctgaatggataaataaaatgtggtacacactcatacaatgaaacatcatttagccataaaaaggaatgcagtactgatacatgccacaacatggatgagccttgagaacatgatgct

SEQ ID NO: 208403 - DNA, 442 bp, Homo Sapiens
ttttttttaagacctaagtgatgcaacaacaagcatatcaaagacagatactatatactagggattaattgacattactatcaatttcttacaggcaactcacatcagagactttggaaagaccattttgagaacaagtgctgcagctcacatggagtggctgtgggtgcagagaagactacatgaagcccctctgcacagcctcaacaaaacacaaaaatggatgacttcagcaggcagctgcatgaagcctctgaacctttcaacagaaccccagccagctgtagggcaaatgacacctgtggagccctgcagccaccacagtcttaccctgggaacccgggttgctgcatgggggccagatgtaggatgcccagagtgcaaagggcagattagtagacttgatcttacaacagagggatcctagggtgccaagatcagc

SEQ ID NO: 208404 - DNA, 691 bp, Homo Sapiens
ctgcaccaaaggcagtctcaagccactcctttgcccccttctttgttctagaaaactctcctttaggcccacttcctcatggcagccttacttgatgaagttgctgaagaagctgaggtattgatgttgctgccattttcattcatctcaccccagctggtctggaaaagcttgtacatttgtatgggttaattctgggtccatagaaaagctagcctggtatctagatttagcaaggaccggagtttggttctgctgctgctacagatttcctaggtaattttgggcaagtctcttgatttatctgatcagtcttcttgatcacgaagagagctcagggaacaggctaacacaatgaacccttccagcaagtctatgaagtgatatcctcatgtggtaggtgggcacgcatgatcagagggatggagtgacttgtccggatcgcagggttgatgccctttccaccgcaccactgctgtttctgagcaaccgtactctggtgactcaagatggattacaggttttgggtacttagctccttaagggcaaggatgtattttactagtctttgtactttccgtctctgggcctttgcatggagggattctggagactccagcatgagcaacagctccgagttgtcaatctccagcagcatgctcgtgatcttgccagccagcctggtgtgtac

SEQ ID NO: 208405 - DNA, 390 bp, Homo Sapiens
cacctgataagatcctttaatgacaacttcaaagcagtgtttcatattctcttacaaaatagtgccatccatctccaagttttgccaagtgtcacgtaaaactgtgttcaatggtagactataaaagcatctacatttctttgccagagggttttggaataattatctgctgatgcttcaactgaaagtttattaatatgatcaatgattcctataattaagcactagaaagactgtttccacaatttaatggattaaacaactggacatcccagctaatttcaatatcacatttgaagatggtgactgctccctcttggattcattaacactactttattaccacctcctgtttttcctccctttcctgtttactactctaccttccag

SEQ ID NO: 208406 - DNA, 575 bp, Homo Sapiens
ctcattctgagtttatttaacatttcatccagttgaactgaaataatacatggcctccaacactggcaagacgctgtgctaatactgaaataaaagctgccagtcagtaaacacttacaatcatcatcctttgtatcatgttaatagaaatattaataactacttagctttataagcttattgcacttcatgtggatttttttttctccagaaaaggtatttctaaaagatcggcaaggattgccaatcttggtttatttgttctttcttataaaccgtgatcaacatacagttgatagctttatataaaagcattaagagtctgaagcatcaaaaaacaacgtttaaaaagatgcagctccatgttcatcatcccttttataatctcttttttttttttttgagatggagtttcgctcttgttgcccaggctggagtgcaatggtgcgatctcggctcactgcaacctccagctcccgggctcaagcgattctcctacctcagcctcccgagtagctgggattataggcatgtgcctccatgcctggctaattttttgtatttttagtagaggc

SEQ ID NO: 208407 - DNA, 549 bp, Homo Sapiens
tttaagcaaagaggtggggtacatccactgcagtccaggcattctggcaccacctctgttattaactggaatcaaattttaaaaatttctgtgatcttgaaggtcttgttgaagttttagaggtcttttgtttttcttttagccactagatttttcaggaaaaattcacctgctttatatgaagaacgcaccaaagggccacttgcagtataatgaaatccaagttcatttcctactttttcccagtatttgaatttttcaggagtaatatattcttcaaccttaaggtgacgccttgttggctgcatatattgtcctaaagtcaagcagtctacatctgcctcacgaagtgctttcattgttgcatatacttgctcatcattctcgcctaaacccaacattatagatgttttagaaataacatcaggctgaaccttcttggcatgtttcagtacacgtagggactgatcaaaattggcccgaggatcacgaaccttactctgtaattccgggactgtttctacattatgtgcatacacatctaatcct

SEQ ID NO: 208408 - DNA, 487 bp, Homo Sapiens
ttttaatgcatatcctgtttatttggctttttaaaatcactgtttattcaatttggtagagggttttatttttttccatacaaatatttgaacaattttgaattccccaaaaccatacatagacgataaataccatgctattaaagtattaaatttgtacaaaaatactttacagtttaatacttgtttgttacaaataaaaatacatatttaagtgactcatgatctttttttcttttttcttaacatgatcctgctttatactttcttgccctggcggttctgaaatgtgattgaaataatattttttttgcacaaaaagaaaggtgatttttttttatatttccttaaacaaaggacacagtgttcgaatactttgcctaagtggtagtttgaattattgaccaaaatgaaaatgtttggaaaataatcatttcaatatggagagtctaccatcaatatacagatctatttatttttttatgtt

SEQ ID NO: 208409 - DNA, 525 bp, Homo Sapiens
caaaaagtcaaactttattcagtgttatggtagaaatttgaaattcttaggtaagctatgaataaatccttgggcaggtgcaggcatacagattctggggtgcagctgctgagtttaaaagcttcctttggagatgccccctggccccctcaccccctgtccgcctgtcaagaggaggccatcctgggcagcacgttaggggcaaatggcccagatgcccagctgagggcaaacctccatgcctggaggaggaggtcgcctctgggagcaggaggacctgctggaacccctgctcacaggctccttttcttgctctccagcacctcctgcaggcaggcaaacagccccagcagcagtagcagcaggcccttcagcagcagggctgctgctctgctgaatgagagaagtccctctccagtgaggcagaggagcccagattgcaaaccctggtctctgcctccatagcttccactgtgcccaggactgggagcagtgtgggagctgctggctggagctgtgctggcc

SEQ ID NO: 208410 - DNA, 553 bp, Homo Sapiens
gtggacagtatttattgggcacgcctactctgactgaaggcattttggacttgctaggacagtgataagggccttgggtacaaaatgctcctgattctggtgtagctccatggcgagtcagaacactgaacaggaatatgaagccaagctggccccatctgttggtggagagccaacaagcgggggcccatctggttcttcacctgatccaaatccagattccagcgaggttttggacaggcacgaggaccaagccatgagccaagatccaggctcccaagataactcaccaccagaagaccgaaaccaacgcgtggtcaacgtggaagacaaccacaacctttttaggctctccttcccaagaaagctttggacgattgtggaggaagacacattcaagtctgtgagctggaacgatgatggagacgccgtgatcatcgacaaggatctcttccagagggaggttcttcaacggaaaggtgcagagaggatcttcaaaacagacaacttgacgagtttcattcgccagctgaacctctatggattctggaat

SEQ ID NO: 208411 - DNA, 510 bp, Homo Sapiens
ctccgtttatttttaatattaatattctcacacaaaaatcaccgaaaataggggtagggttgggaagacccctctgcccctggggcagagagacagtgcagtgcgagggtgcgggactgtaaaccccccacccctccgcagccccagcgtggagaaaaaacaaccaacaaaacgaaaataaagccccagagaaactcaccccggggtgtccctgccccagtgaggccctggccctgggttgtttcacacttaaaaagaaaagggggtgggggtgaaggtctgtgttttttaaagttggccggggctgggaaggacggggttccttttcctcatagttctttctttaaaacctttaatttttttattttatttatttttttttacaaaataccatttcagttcccacttcttcccctacagtacaggagttgctcaccctcaggtggggctggggtcgggtcgggagtggggggactggtccgagaaagtgcaggacgtaggggaggggag

SEQ ID NO: 208412 - DNA, 504 bp, Homo Sapiens
gattgaggaccaattcacctgcaaatcaaggtaatcgaaccaagtgcctacatcagacatgataggcaaagaccagatctgaggggtcagaaaacactgacaacaatgatcagagctaccactttaaagtaggaaagaaggtagacaagcaggatgccaatcaaagttcctgtacagactttcctgaacaatcgaaacgtatctagctgacggcagcttgtcttgtttccttttgcaaaatggttctttccttgtgtcattccattttgatgtatgtgagcaaagattgcttgtatgaagatcagacaccttttgtgttaacactaccaaagaaaagttctgtctgtcttattctcatgtttaaaaaattctggtgatggtgatggttatgttttaagaagtacttaaaagaataagactccaaaggaaataaatgtcttttattctggagtcaaagctttccattccttttaaggatctaatgaatcaaaataagcaggaaat

SEQ ID NO: 208413 - DNA, 537 bp, Homo Sapiens
cagtaacactaagaagtatagttaatgcatacacatgaagtgtgacaaaacttggcaaaaacactgcagaggaaagtttgattttttttaaccagcgaaaaatttatctcacttctaaagatcttatagatacttaaaaacaaaaatctcaaatctaaaacaataaccgataaagctttaaatgttgaattttaactctgaggatggggaaaaaatggatcttttctacataaagactcaattgttccctaatcttagagatggctattagagccaagtctgctgaaaacatcctgtttactctgcagagaaaaacaggcttggcgtaagcattttgctcagcatgcagacattttcattctgttttagagaagagtcaagatggcagaatataaaaaatgaaattaaaaagtacacagcatctgaggtcaaaatggaatctggctgttaaccttacaaaaatcaccccctcacccaaaaaaaaaagtggtaaaaatgagtgaatagttgcaaaaagttaacagcctatgagcttct

SEQ ID NO: 208414 - DNA, 535 bp, Homo Sapiens
gtcaccagacggctttaacaaggaaagctcttctgatcttctaatattcaggattttgcagatatcactgacagctttaaaaaccacagctgagaggctgactcgcaacctcaccatcttcaaattttgcagacgaaggcgcagcattttatgctgaggggtgaagagaagctttgcatctgcctggaccccatatttgtccagggtccagtgggttttcagaagccagcaatgcttctgttcccaccaaagagcaaagtctgaccagtcttgggatatattgatctgttctactaacttgagcatcactcctccaacatgaaggtctccagatactctcagtgtgacgtctttctgctgctcttcattgggatggtcaacgcggaccacaagctcccaggaagcaaatgtaaagtcagtggatgacagcattgtggcaaatgctggtgtctcctttccaggagcccgtagcgtccagcctcgcagtcgcgcacgtggagagctgcgtccctacaaactaccccgggccgagccg

SEQ ID NO: 208415 - DNA, 1000 bp, Homo Sapiens
gccaggtagtgagtagacaagagtggggctctggacatagatggtctgaatttgagtcctgtctcccacctactaccatcttgtgaaggtacttaaccactccaagttcctaattttaaaaaagcaaaagtaggaataatgcgagcacctacttcatgggtttgttctaatggtatactacctatccccatttttcacatattgtgaatacttaatatataacatcaaaaactacaactcctatgctgggaaaatattagaacaaataatgtttgttgttgttaatatttgtttacttattggaattggcttcagagatactctacaaataactcttggggtagagatggatgttctagcagatttgggagtcaatcagaaattggctcctgtttcagaaagttacagttattatggacttgtgacatttctgttcagaagtctgtatctggcatcttcccgcacacatgtcttgctttcaagtgctgttcagttatgtttggaatgagaatggtggtctccctacttctgcttcacttcttccacaaccttgctgacttctaaatagtttcctgcttagaatccttaggaggaattaggatctcctttcagccctatcttgggactgacttacattcccacatgtgtccatgtgcccctagacaatctaaggagagtctagcttgccacacatgtgaaatcattcccagttcacaggtgggaagttatgggaatgaagaaaatgtgggggaggtagcaataaaactctctacttacatttcattgctgcatctgctataataaaatgagagccaagagcaacttattcccttgtgacatgatgacacacctctggatagatgtatattcagggatatgggtgggtggagaatgttacaaacactttctcttccctagtatcctattacctgtctgaagaagtacactgtgtaccttcgtatcactatgtcctataaaaaaaaaaaaaaaaccggaattc

SEQ ID NO: 208416 - DNA, 827 bp, Homo Sapiens
tttttttttttttttacattccaaaactttaatgtcaattaagcagccttttcacttgatataaactcacatacccaggaacactgtgggctcagaacattatttcacaagcaggtattgctggcacgttgtttgtgtcacatttagattccgattaaatgacatcatttggttcctcagatcctgacatacacaatgaaagtatttgaaagttacataaccagttgcacttaatgagtcatcctttgtcaatattagaatgagggaaccaggatatgactaggaagagactcaaggggtaaaatctgaagattctgtcccatacctctgcagaatcatggacccccacagaggacttaggggaggggctcagaagcaaagggctgttttgaaaatagtttgattttgacacaatgatttgcagacaagcccagccaccggggagaaaagatatgagattgaagaagttccaaatggctaagatgaacatgaacttctaaacagaatgaaagctctaggattatgtccacctttaagaagtctgcgtggtgatatctggctttagaggcaggtaatgtctttggacacccctttcttcaacagcaagggggttacgccgaaaaacaaaagacgccacaaaaaaaaaaaaaaccctcttctcagggcccaggccggtgtggttaaaaccccccttgttattcccagccttttggggagggtcgaaaaggggggggttcccacaagtgttcggctccaaaaattttgggatcaacggcattgaccccttgtgccctttcccgggccaatttagttcctcctaagagcca

SEQ ID NO: 208417 - DNA, 759 bp, Homo Sapiens
ttttttttttttttggactggagaaaatcatttattagagtatgaaaataagggacatacttagtggccattaagtaccgtttatagtatgtttctttaaaaatggtttggacggcaaaaaataatacttgctcattataaaatattcaaataataaaggtagaaacaagaagccttccatcacaatccccactacccagagaacaccactatttagtggggtatgtatccttccccgcaaaagggaaaaagaaaacccaaaacatttacaaggaaatcggataagtatgagagacacagtgtaggtggtgctacaggagcacaacataggtgagaagggacagtgatagattggcgttttttttttgggttgggtggggtttttgggaagacggggtcttactctggatgcccaggctggagtacagttacagggggtggtcatcacagcccattggcagcctcgaccttccacgctcaatggatcctcccatctaagcctcctgagtagttagaaccataagttggcgtaccaccagggcccacctaaatttgggtatggtcttgggaaagagggttttccaccagagtggtccaggcgggtctcaaactctggggctcaagtgacccacccatttagcgccaagtgtgggattagggttgagcatgggccaaagaggtgacagtgtcacaaaaaaggtttccagggatagacggcacagagaaaggggggggaaatttcccaaaagattccggcag

SEQ ID NO: 208418 - DNA, 400 bp, Homo Sapiens; identical to SEQ ID NO: 40536

SEQ ID NO: 208419 - DNA, 379 bp, Homo Sapiens
tggcaccacttcttccctcattgcacaaactggaaacctgtgtcttttccctctttctgtgcctaattcttcctcaaggccctctcctttttacttgctgtatcctttagaccgtgaccctctatttcaacccgatggctgctgcctccattcagactttgctcattttaactggccatggctcccacctgccccctgctctacttgccccttctctccttagacacctgttagtgatgtcgcctcctgcttaaactcatcctgccttcttagtttaatgctaagagggaggggaataaatgcactagatgctgaacttgagctcgagaggaggtaataagggaaattagaggcctatacagcaaagctggtataaatg

SEQ ID NO: 208420 - DNA, 469 bp, Homo Sapiens; identical to SEQ ID NO: 48951
  misc_feature (52)..(52): n is a, c, g, or t

SEQ ID NO: 208421 - DNA, 495 bp, Homo Sapiens
  misc_feature (19)..(19): n is a, c, g, or t
  misc_feature (49)..(49): n is a, c, g, or t
  misc_feature (72)..(72): n is a, c, g, or t
  misc_feature (128)..(128): n is a, c, g, or t
atcatggttaataatgatnctgtggttagaaatgtatatcacaaataanaacatcctaaagaagctctagtntccagtggagtcttgaacagggaaattagccgagctgcaggaaaggctgtgctggngatcattgatgaggaaagcagtggaaacaatgcccagtgagtgtgttttctgatgccacatgaggaagatgtatcattttggagtcttctttttcaaaatgaaaagagcttttgtttctggttacaaaaataatcagaatttgaacagttcaagaggaaaaaagtagaagctctgcactggctctcacctttgtgtatccttttggtgccacattgagtgtcatgaaaccagcagtggcggtttctgtctacaggttctgtctgcttcccacttaacagacccattttggctttctatcactcaaagaaccaagggtgggaactgggcagtgcttggttcatgtcacatgttcaggtgatcaatatt

SEQ ID NO: 208422 - DNA, 419 bp, Homo Sapiens
  misc_feature (356)..(356): n is a, c, g, or t
  misc_feature (396)..(396): n is a, c, g, or t
tcccaactaatttttttatttttgtattttttgtagagacgggggtgttactacattggccaggctggtctcgaactcccggcctccagcaatactcctgccttggctcccaaagtactgggattgcaggcatgagccaccctcctctagtatttctgtagcttgagtgaacttctgctgttctaggtacccacagttcaccatctgcctccccacctgtctgcgagacccttgaaggcagggacgtgactttcctctatcttccccaggctcagttatagagccagctataggcagctgcttgggaggcgctggttaagctgaatggaggaaccagtggagctgagatgcccgtnccccgcagccaccagaccctggctggaagctctctccaangttattacctggaaggccatgga

SEQ ID NO: 208423 - DNA, 600 bp, Homo Sapiens; identical to SEQ ID NO: 49433
  misc_feature (28)..(28): n is a, c, g, or t

SEQ ID NO: 208424 - DNA, 517 bp, Homo Sapiens
  misc_feature (347)..(347): n is a, c, g, or t
  misc_feature (384)..(384): n is a, c, g, or t
  misc_feature (421)..(421): n is a, c, g, or t
  misc_feature (431)..(431): n is a, c, g, or t
  misc_feature (517)..(517): n is a, c, g, or t
tcattgttaaactcagtttaatagaataaatattcaaataagaattgactataccaatattccagtagagaaggaataagctgatagacgtgtctttgagttctgtcaggcaagacttaaccaaatcttgacacacggttaaaattggttgttaatgaaaggtaactagataaaataggtatatatttgcttaagaacattttaaaaatatttctttttttagatttggaattcacaataggtttcttccgttcctcctttgtaaattatgaaatatttattgtttagactgagtaatatgacatgaaacaacaaacctgcacatttctaatttataacaaatctgnttccttaatgggtggaaggaaatctgaggacagttcnaaggagtcctggtctgcttttccagtgcggatcttcnaggtcctacnggaagaccataccctctccagattgggcctttccccttccttctcctctccccggtcaacgtcaatcacatgcaccactccagggn

SEQ ID NO: 208425 - DNA, 452 bp, Homo Sapiens
  misc_feature (325)..(325): n is a, c, g, or t
  misc_feature (447)..(447): n is a, c, g, or t
ttttttttttttgtagagatagtattttgctatcttgcccaggctggtctcaaactcctggactcaagagaccatagggattctcctgcctcagcttcttgagtttctgggattacagccataagcctggcctggtaaatttcaagcaagcaacttcactaacattgtcaggatagaagccagactactgggtgttgcagggaaaggggtctataaaggaaattaaggaataaaatgggtaacatttacagaaccctcacatgcaccaaacagtgtgctaggttcttcatacatattatctcatgatatcctcatagcaaccctntaaaataggtgttaatataattatagttaacatttattaagtgccaatgtgcttcagagattaaaccaagccttttatatgtgttatttcatttgatggctcccccaagccctataaaatanttttg

SEQ ID NO: 208426 - DNA, 469 bp, Homo Sapiens; identical to SEQ ID NO: 61572

SEQ ID NO: 208427 - DNA, 487 bp, Homo Sapiens
  misc_feature (477)..(477): n is a, c, g, or t
aaatgttagccgctatttattatcatcattattatactgacactcaccattttataccaacaaacaatttaacagccatacatatacatctatacaaatcaatctgtatgatactgagagaagaaatagctctttttgtaggaaatttatagtgatacattttgaagaatgaaagacagaaagttacattgttacagaaaaaaatactccgtttctttgaggaaatgttctttgctaagttcggttggagctctgcatcgaaccgttcagaaaaagtttatggtctatggttttccaaacaagttaaaaacagaaataacaatacctggcaccaattatacagtaataatttattgcttttcaacaattctggtgtgataaaatttaactgaaccaaactccccatggtattttgaatgtgagaatcaagcttcccagggaagtcagatacttgagacaggacctataaagtatccncccttttaaa

SEQ ID NO: 208428 - DNA, 450 bp, Homo Sapiens
  misc_feature (386)..(386): n is a, c, g, or t
  misc_feature (418)..(418): n is a, c, g, or t
  misc_feature (433)..(433): n is a, c, g, or t
tacagaatgaaagaatgttgcatataattccattttaatacagaatttataaataaaatcatagtttatacttatagcatttcttcatttttagtgtttttttttcaagtgggttaaacagatctgtgagtaccttgagagttgtcatgtagaataagatgctaagagggcagagtttgggattccctatgtaacttcagctacaacagccttgctttatccattgtattcattcagcaacaaataggtatttgtgggccaagtcttgctttagccgatgtaatatgtctatgtgatataaacatttttttgaaaaataaataaagaaaaagttcaattaacttaaaaaagagcttaagaaaagctttgaactggatgaaaggtcnttcatcagcagaagagagagaataaaagggcngggggggagggttcngaaaatttccattagga

SEQ ID NO: 208429 - DNA, 470 bp, Homo Sapiens
  misc_feature (226)..(226): n is a, c, g, or t
gaaactgccttttgtcaattagctgtagtcagtcagcaggaagagccgctcacgtgcacacgagcacctggggccaggcatgagggccagaccctgaagggagacctccagtgaagcagcaccccggagaagacacagtcacaacacacgatacccacactttcttgctccaatccaatctcggagtcctcttcctttcaatcaacactatttcccccacacagtnaagggaagaacgggtgctaccaaattctcccagaaaactaatgttcttattaagcatatcaaccaaactcaaagcagggcacgctgcagcatgggcctttcggattcgtggccaccagcaaaacaacacagggggagcccatcccctggaggcatggccccagtctgaaagcgctcagtggagtctgcagagatctgaaagcgctcagtggagtctgcggagatctaaaagcgctcagtggagt

SEQ ID NO: 208430 - DNA, 1000 bp, Homo Sapiens
cctgggcaacgacttccacacgaacaagcgcggtgtgcgaggagatcggccattatccccagcaaaaagctccgcaacaagatagcaggttatgtcacgcatctgatgaagcgaattcagagaggcccagtaagaggtatctccatcaagctgcaggaggaggagagagaaaggagagacaattatgttcctgaggtctcagccttggatcaggagattattgaagtagatcctgacactaaggaaatgctgaagcttttggacttcggcagtctgtccaaccttcaggtcactcagcctacagttgggatgaatttcaaaacgcctcggggacctgtttgaattttttgctggagtgcgtgtatgtattttcaataaatctggggacaacagcaaacagaaaaacatcaaaaagaaaaagcgggggcatcgtactgccggggtggcgggaaaaagagggcccggcgacatgggcgacccgggcgcaaagctggacccctggacccagacttgctgggcgccaacgggggccgacatcccggaggaggcacccgaaaagaggagagagcagggaaaacgagcttcgcggaaaaacgcccaggggtaactcatgcgatgtatgagaccgccagcgcaaacacaacccgcacacaactgacaaacgcacacccccacgcaaggaattgtggaacgagtcacgggaggaccacggcacacacagcaccccacaaccaggccaacagccccacgggccgaaccaatacacaggccgccacacgccaccaaccaaccaagacacgcaccctgcacccaccacgacaccacaaatcccggcacaacgacacgcacgctccacggggcacacgcaaaccggccacaatgaccacccgcacaacaccaccacacggccaactcacgcggccaacacacgcaccacctccaccgccccaccgcatgaccacaccccgacacgaagacgacgccaccacacagcgacaaa

SEQ ID NO: 208431 - DNA, 646 bp, Homo Sapiens
  misc_feature (646)..(646): n is a, c, g, or t
gataccttgatattatctgcatgtggctacatgttacttttcttcacaagagtgatataagtgaaataaagaatgattggactgggagaaaaatggctcagaaaactttgcaaaagtacgactgtatgtaaagataagtattcaacattaaatgggaaggaggagagcaagcagtttaatatatagaattttataattttaggcctgcaaggggaccttataaaacatgagcaatggaacacttttttccaaactaaatttcgtgcagtggaacttggccgatctgtccttcctctattctaagcaccctactctagcccggtgctctgagttcagttgtgttacaaatatggacacgaaagtaccacaggcttggcacagttaatggaagtttccccttcaacccatggtaaaaaaacatactgggatgggacagggttggtgtctagaacaagaaccaagaaataaatctgtggtcacttactaatatttcaaaatcacaaagcagaatttgtgtgtggatgttagtaaaaatccttggaaatttaactgctgtgagttctaaattcttcaattaaatgctgtctggtaataaaaaagtgccatgttgcagcttatttgattttcatttttcgggaatatgacn

SEQ ID NO: 208432 - DNA, 465 bp, Homo Sapiens
  misc_feature (9)..(9): n is a, c, g, or t
  misc_feature (443)..(443): n is a, c, g, or t
taagaatgnaagtcgtttatttaaagggaaactactgctagtaaaacaataataaaaaaaggctgcaaatgtatttaacctagtcaattaaagtggaacttctttcagttttgctctgtgggttcccattccaagtgcctttccaaatgttagtgaactgtgctcgaaataaaaactaagtgtttgatacaactattttaaaggaggcatctatatgtaaatcttgttgcttagcatatttaccttaaaccattagtttgctatgaaaggtaatagggtttttttgtcgttttttttttttttttagagtcagggtctcgctctgtcacccaggcaggagtgcagtgccatgatcctagctcactgcagcctcaaactcctgggctcaagcgatcctcccacctcagcctttcaagtagctaggactacaggtggcatacctngtctaagaaaaataaagtatct

SEQ ID NO: 208433 - DNA, 792 bp, Homo Sapiens
gaaaatgatctttaccttcaataaatttataatgtagcactaatccagtatagatggagactgaatgcattcttactcttagggttcatacctctaattcatgtggttaagacagtgttgtggtgaagtaatagggcccctggaaagaatctacagaaacataaattatactgagttgtgctgtactggtttgtgagaacatcagtgtattaaggagaatggtagtttaatttgaatatttaaagaaagtaatttgaatggttctagtactagggccattattaactagtaacatagattagtgacttcaactgggtgtccttattatctgatttgtctgaagtgaaaactgttaaggtgctcttttaaaatgtatttggaaacaccatagttagggtaaatacaatgtcacaattcactcttgcatattatttgcttagccaaatttatgaattctaagttaggccaattgaaggtttggagttttacattgtgggtgagtctaaattcatgcgtttggcaagcacaagggacatgggaaaagaatctggtatttgaggcaggctgaggttatatgaagcaactcagtcctcttcatgtcctatgtatttagagaggaccgcttccctcgttttttcccttctttcctaaccattaattggcacaatacggtgttcttaaggacaggcggccgttccgtgagtttggtgcggctttaagggtcccctgggcgtgccggcctttgggcacgttcgttcatgcgggggggccatcgccgggggggctcgtcgc

SEQ ID NO: 208434 - DNA, 853 bp, Homo Sapiens; identical to SEQ ID NO: 40653

SEQ ID NO: 208435 - DNA, 758 bp, Homo Sapiens; identical to SEQ ID NO: 40764

SEQ ID NO: 208436 - DNA, 737 bp, Homo Sapiens
  misc_feature (186)..(186): n is a, c, g, or t
gtcgcaccactgcactccagcctggacaacaagagcaaaactccatctcaaaaaaaaagaaaaaagtacctgactccttctgtacgtgctgcctttaattctctatgcacacttgaatgtgtttaaaaatttgaaaagcactggttaggccgggcgcggtggctcacgcctgtaatcccagcactntgggaggtcgaggcaggtggatcacgaggtcagcagatcgagacatcctggctagcacggtgaaaccccatctctactaaaactacaaaaaattagctgggtgtggtggcgggtgcctgtagtcccagctactcgggaggctaaggcagaagaatggcatgaacccgggagtcgacatctcgttactgcactccagtctgggtgacagagggagactcccatctccaaaaaaaaaaaaggaaaggcccggtttttatcctaataatagcttcctttctataatctctcccttattattcacatctggtcttcaacactttatggtcggtaggggctgatatccactaatcctgaacatacggtcccagcatttgtgggaggccgaggtccgggggtccagggacgggctggccagctggttgacacccggtctctcctacaacttgaccaggtggcaggcgttgggcccacgctgtgggtcccaattactcggagctgagggggggaaccgttgacccaggggtggggttgcgggactgagatagccatgg

SEQ ID NO: 208437 - DNA, 810 bp, Homo Sapiens
gggaactggatgaatggtacctacaatttggatgcctaaccaaggactagagctccttcttgagatctaaatctaaagtaaatgtgcattaaagcagtgtgcttcaaaggcatcagacgatgaaagcaacataccacaactaggagttatttctcaaacttaaatgtcctctgggaatccagacttaaaaataagagcaaacttaacacactatccattttcgagcaaacttaacccactatatccattttgctcatgtgttttatgcaaccagctttccatcaaatcctcaatccttgaatccaggtaaaaggttaattatcctaggattagtgaatgattcaatgaagctttcttgaaaacaaacataggagtgtaatgtactattatgtttgtatcctgttttagtttataaagcactttcacatacattatggtatttcttcctcacaataaccttgtaaattagtcaggaaatgtaaattttatctgactcatagaactaatggaagctgaaagccaaaaataaagttataaccaggcttcaaatctcaaacatggattttatattctgtggagttatcaattattaggttaggaagcagtctcttgagtcagtcatagtgttgctttgttcagttgcctctaattcatagattggtacgaccgggatgttctggggtcagtttgctcacagaaggggtcctggttctactaccggtcagagagaaagccggggttcattcgcagtgtcgggaggttcccaaggggaggtttcccgcaaaacactcaggggaaaaacactacttc

SEQ ID NO: 208438 - DNA, 733 bp, Homo Sapiens
gtcctctctccggtccgtgcctccaagatgacaaagaaaagaaggaacaatggtcgtgccaaaaagggccgcggccacgtgcagcctattcgctgcactaactgtgcccgatgcgtgcccaaggacaaggccattaagaaattcgtcattcgaaacatagtggaggccgcagcagtcagggacatttctgaagcgagcgtcttcgatgcctatgtgcttcccaagctgtatgtgaagctacattactgtgtgagttgtgcaattcacagcaaagtagtcaggaatcgatctcgtgaagcccgcaaggaccgaacacccccaccccgatttagacctgcgggtgctgccccagcgtcccccaccaaagcccatgtaaggagctgagttcttaaagactgaagacaggctattctctggagaaaacataaaatggacctgtgtactaaaagacaacaacagaagaagaagaacaaaacaacacacttggttgggcgcgccatcggcccctaggaaaacgattcttaagaccaatcggttggggcacgcggccgccagtagtgtaaagtgaacccgggccaatagcgggtgtcaaaaggagaaccggggcctgcacatgggtgcggtgggtttctccccaataaaaaaagccggcggccacgcgcgggtttgaagcacccagaggggtcggagggccatagcggatcatcacaaggaggcacagcagcccgaatca

SEQ ID NO: 208439 - DNA, 711 bp, Homo Sapiens; identical to SEQ ID NO: 44671

SEQ ID NO: 208440 - DNA, 902 bp, Homo Sapiens; identical to SEQ ID NO: 40759

SEQ ID NO: 208441 - DNA, 820 bp, Homo Sapiens
gcaattttaaggggaattaatgcaagaacaacttcagtgtctctgggaaaacaagccaaccaaatacaaaacccattaagcctactagggtgagtcctcttaacatgggaaggcgatgattatgcaaacaccagagttccctcctcttcagttcctaagaataaagaacaggtatcaagaactttctttaaagttagtgtaactatagttaacaaagtatccattgaagtttagtgcctgtaggactgagccagtgctttatcaacccaacacatcatcaccatgtgcatactctagaaaaaaaaaatagcttccttaaaagttacagaggctcttaacgtgttaaaaccgaaaaatcacattttcttgatttcaaatatgttctacggccttactgtgggatgatatttagtatgtaacttagcattccaatttctcaagaattttttaggccgggtgcggggctcatgcctgtaatccagcacttgggaggccgagtgggcggacacgaggtcaggagatcgagaccatcctggctacacggtaccccgtctctacgtgaaaatacacaaaagttaggcggacgtgatggaggcgccagttagtcccggcaactcagaggctgaggaggagaatggcgggaacccgtgaccggagattgaaggagccgagatgcggcagtgaaatccagcggcgaagaggagattcccaaacaaaaaagagacaaaaacatggggccaccgcccaaggagttcaacactctcggcggagccaagaagacggcaaggcccgaactgaggaacagggacccaaaggcgag

SEQ ID NO: 208442 - DNA, 812 bp, Homo Sapiens; identical to SEQ ID NO: 55421

SEQ ID NO: 208443 - DNA, 808 bp, Homo Sapiens
atatcttccttggagaaatgtctatttaagtctttgcccatttttgaatgtgtgttgtttcttgttgttgagttttacgagttctctatatattctgaatattaatctcttattatacatatgattttcagatatttcctcccattctgtgggttatcttttcacccctttgatagtgtctcttgatgcacaaatttaaaacattttaatgaaatcctgttgtttcttctttgttgctttgcctttggtatcatatccaagaattcattgcagatccactatcatgaagctttgtcgtatgttttattctaagaattttataattttaagtgttacatttaggtctttgatttattttgtgtatttgtatgtggtgttaggtaagagtccatctttactcttttgcctgtacataatccagttttcccagcaccatttgttgaaaagactgtcctttactcattgagtagtcttggcacccttgtaaaaaatcatttttccatacatggtttctgggcctctattctgttccctggtctgtatctttatgtgagtacacactatttgattactatagcttgtaatatgttctgaaattaggaatgtgaagtacaccagcgttttctcttttcagatatttggtgtcacgtcctgagattctgtagttaggacggttttctattctcaaaaaaaaaaaaaaaaaattgggcgccgcgccaaagttaaacattttgggcccccgtaaaggtagcaaaacgggaaagggggtcccaaaacccggccgggaacacagtggttgttaacaccg

SEQ ID NO: 208444 - DNA, 882 bp, Homo Sapiens
  misc_feature (853)..(853): n is a, c, g, or t
gggctgttgcaatctccacgtgcgatggatccttggacccactttggtccaactcttaaactttgtgtcttgtctttatttcttttctcattccctcgtctccaccgggaaggggagagcctgcgggtggtgtatcaggcaggttcccctacatcttggcacccaacacggtctcctcgaacccaggtgaagttacacctgagcgtggtcgtgtgaagaacggtctgtccaggaactcccgagaacgtgtggtcggcctttgcggtaagcttgtgcactcggagcattccaggacaaccatgggacaatccaaaagtaaacattctgcatatttacattttattaaagctcctcttaaagagggcaggaattaaggctagcacagacacatttgattactctgtttccaacagtagagcaatatgtccttggtttcctgaacatggtaccatggacttcaaagactggaacaggtgggaattgccttaaaacaagttgtaagggaaggaaatttatccccctaacagcctggtcaaaactggggctatagtgaaaagcagcctcggaaccgtgttcaatcgggaaaaatgagggcttatcctccagcagaaagaatttctgcagaggaaggtgggatgcttgctgaacggagggagaggtagtgacgcacgattcgggaaaatacagactcaccccggagatgaggtaattctctgaggaggcagtgggacctccagtgtcctaaattgagaagcattatgccagcgttaaacaagaagctgaggacacggcccaggagacaacgggtggcggccaataaaatagctgagcggaagatgagcacatgccgtcncaacaaagggccgacacacacgggtcacc

SEQ ID NO: 208445 - DNA, 789 bp, Homo Sapiens
gcccatgaggatgttgacacaaccatgctgcgcagagctttatttaactatgttcactgtatgtttggaatcaggtatgatgactatgattatggagaagttaatcaattacttgaaagaagcctgaaggtttacattaagacagtgacctgctatcctgagagaactacaaaacgcatgtatgatagttactggcggcagttcaaacactcagaaaaagttcatgtcaatctacttttaatggaagcacgaatgcaagctgaacttctttatgctcttcgtgccataactcggcatttgacctgaagtatcacccaaggaaaatgtcatacatgtgtaaagacctttcacataagataaacattgaagctatttgtgatatagcatcaaaaattattcagttctctagtgtcaaagtttagccgtttgttttttttttttttgtggtttttggcggcgtgtaagtggtgccaggactgtgttttttttcccttgatgcttaactttcctaccattggcaaattttcctggggagccctacttggcttgtgttggtgctgcggaagttgcgagtaggtgcatcaataaattcagtgaactcggggggtaataagggcttaaaacaaaaaacacaccaacaaaatacaaacaaaaacaaacaaaacccgggcctactttggggggggagaaaagagtttataaaggggcctgtgtaatgcttatcaccccacttttgttcaaaggggacatacggcgggcccaaggggacggataaatgaaaccggacat

SEQ ID NO: 208446 - DNA, 1000 bp, Homo Sapiens
agggagaacgtgattagtttaaaatcacctgcgtgaaagaggctcttgattagtttaaaatcacccacgtgaaaggggctcttgattagcttaaaatcacctgggtgtttcgttttatctcagttggcctctgaatgtttatcctacagcttcctgcaagctccagtctaccttctaagggaataacggggctcgtctttctacgttactttatgtgggagtagttgtaaaacagaatgagggagaccgcggggattgtgcggaaatgtagccaccgtttacatgtcgggaggctgaggtgggaggatcgcttgagcccaggagtttgacaccagcatgggcaatatggtaagaccccattatctacaaaaaaaaaaaaaaggaaaagccggggcgtgggggtgggtgccggtgggccccagaggcatcggaacgcataaggggggcaggatggctggagcccaaggcagcttggacaccagctggggcaatatgggtaggaccccaatattctcccaaaaagacaacaaaacacccggaggcaacacaaaagcagggagagggagcaaaacacgcgtcaacagaagcggggccactgtgacaaaacgttggtcctagaccccacgttctctgcacaacagggaagaaccagcgaggaccaccaaggagagccgcagacaattagaaacgcagtaactcgagagactacagcgaggacagaaaagacaaaagaaggacgacacaaagagaaagcaggagcataaaccaacgtgtaccaaacaacaagcggagaggaaacggacgaacaaaacccacgcatacataaacaacgccaactctaaactcatctacacagccaaccgacaccgtagacagacgaatcgacaacacagacctacgcaccgacaaatacacgcaagcagagacgcacgaaacgccacacgcacaacgcagaaaacgcgacggcagaaccaactacgcgaagacacaccgcaaacca

SEQ ID NO: 208447 - DNA, 1000 bp, Homo Sapiens
aggccagtggggaggggagacataagacatcagtcagtacatgtgaggtgtgcatttggattgatccagaaagtcaggacgactccaagtggaaaggcctccagagacaggagacagtaaaagaaatggcctctctcctctgtcagagtggagtcccgagctcccagaaatgccacatgatggacaaacgctgggggaaaaaaaaacaaaagggagaccttaggtgggacaaaaaggcgggggctttaaaggaaaaaataaggagattaaggttgacctttcgccaaaaaattacgcgttttgtggtcttggaaagacatttacaaaggaaagggcaagcaatcgagggggcaaatactcagaataggggatctgacagaggggtgaatctagactatatgaggatattgaaaatccagcacctggcacataaaagatggcacacacgccgtgacgcaccaaagcaccccagcggacaatggaaccgaagggcaacccgcagggacaaggacaaaaaggcaggaaagcaaagctcaactggaggcacgcgaagacacacgcggagaaggccaacaaaagcggacaccacaagacatggggaatgaacgacacgcggggcacccaacacacccggcagcgtggaccggcgcaccccacgcacagccacaaacaaccaccagggaacgcgccccgtcaaaagaacgtctgagcgcgggaacaaccgcaaaaacagaccccaaaagcggccggcacagagagctggaatcagcaatccgggcgttctactcctagctaatgggccgaagctgaggaaaacacacgcaacatagcgcccgcaacgcagctcgccgaccacccagccgtcaccagcagccagaaggcagactagacagtagaagagaagtagacaccatagcggcagtgagacccacactgcacacaagctcaccacacaagaaggagaaaacactgccgacgaagaagacaccagctacgagac

SEQ ID NO: 208448 - DNA, 760 bp, Homo Sapiens
agggaacgacgagcgataatattaagagtgaatcatgatctggaacacctgatattgtacacaaactataaccaactggaaatgcctttgcaactgcataagagttagttcaaagaaacaataatttgcatttctaaaatttaaaaaatccccaataacttttgacaaaactcacagatggcttattattgctagcaatgtaaatattggatgcaaatcatgctcaaaagctgtgtgaatagccaaaagtgctaagcacattctgtcagtgctcataattcaaggaaaacattagcaaaattcaaagaaaaaaacttgaaaaatattacgaacagctttgtacaataaagtatttgaaaaaagcaacaaacagtggaaaaatgccatcagatgttagtatacagtttacccaaatgtgtaattaaatagagcattctacatcattaagtagaggcttaataaacaattatacatagtgcatatcattgcagtatagattactggttctgctggttgcaaaaccatattctacataagacacacttttggaaaatttattgaatccaagcaataaaatcattatcaagtgaagtgtcacccatttcacaaaatgtatttaagtttagtaccttaaatactaaactgtaagacttaccaggaaactggggattaagttgatctgaggaactcacacataccaacctaactcatcagtgcacaaggaaaaatagcttctaatgtgagacagatgtatgatggt

SEQ ID NO: 208449 - DNA, 780 bp, Homo Sapiens
aaatttgcatatcttggcatagtgggaggagacaaaggagacccaataacacccccacacctggctgaccaggccccttgcactgcagaggaggcagacacagctggaaggaacaggatttatgttgcatacttgaactacagcgagtgtaagactggtcctatttacagggcagaaacactgcaggtggagcgcgggggtggcagggtgggcaccagagtcctggccaagggtacccttgcctgccatcttccccacctctcccagatgcatctctgaggccccgctgggattctccggggggaacgaggcccactcacatgatgctcgctggggtgaagacagggcccacgcacagggtgtctgtgatctcccagccgcaggacagaggcttgcacacaccctccacgtcatcctcctgttctgcagccatcagctgccttcgcagcgcttcctcaggccacccgggacatggcataggtgatgtggcaggcctgggtcccccaaaagggggaaccgcatgcccacagtgtaggcgcccatgttgtcaaagaccagccagtcccctacagtgtagttgcggcagccacaaggccctcagcgcacgcaatcacagccatcaaccgccgggccccacaggctgctgctgtacaggggctgctccgtggatggtatcttctgcaggatgggggtagggcacgatgttgtcaaacaggactgagtcgaagatccatacacgccctccatcaagtggtacacgatggtctcgcgaggtggaac

SEQ ID NO: 208450 - DNA, 801 bp, Homo Sapiens
gaattttaataggaaaggattagaattgtagactgattgttggtcctttaagtatgcttggaagaaaattcaatcgagtttcaaggctttttctaaatgggagggagaacaatattgatttaggattattttctttcatttaggattagaacagttaagtgcctttaaaaaggactttaaaaattattttgatacttatatatgatttttaattgttttcgtattttccaaataccatattaaaattttaatgaaatttatctcctatgaaaggaatttctttaaagcaaaattctgctttgcctttgatttccattttaaaagttaaaggcttccatctgaaactcctcaaatagagtcagattttggcaatggaagtattaacaattccgatcagccctttggacgatgaagtttacctgcatattaggattgttaggagttttggcctcaccaagtgattcttttctattgcagagagcactttactcacctacctgttatgcaactttccctatgcctggaggtgcctccagaccaggataccctactttggttacccaattctccttttggttttacaagagtattcataatatctatatgtttatattccagactacatattctaaaaatgagatctcaatctatgacatggacttttaatactgtgtttgctacttgactataagaagatacattttaggggataatgccgggcagtttggacttcaaatactctttggaaactactagttgcaaaccctctctctttaaaaaggggtccgggtcccgggatat

SEQ ID NO: 208451 - DNA, 750 bp, Homo Sapiens; identical to SEQ ID NO: 58109
  misc_feature (512)..(512): n is a, c, g, or t

SEQ ID NO: 208452 - DNA, 1000 bp, Homo Sapiens
gttcaatgcatagttctcaataaacaggaggcagaatttttaatgggtatttcttttcagatatatgattggtctctaggtttttgataataatatggtcttaaattcataattactagcagagattgataatttggaaacaatggtagtgaatgaaactgaagttgaaaaacggctgctacttatgtcactaatcagaccatatgaatagcagaagttgagcaatttcaaagtaaaactgatatttttatttccaaaggaatttagacatttgaaaataattgacatacattaagttttaattcgataatttcttatatatggatgaacaatttctgggtttaagcttttaattcctagaaattttatacattaaatctcctgcaatttgtcactctggatgttactgtttaaacaaaaaaaaacacaacggggttcctcccagaaaaatcgggggatatataggtacgtacgtggtaaactctccctaattctatttcttagatccctacggtctatggcgcaaaacagttggtgcccctgacttttggagctcctaaaccagtacttctttcccacgtgtgtaggagctggttcccaagattcaaggctgggtttcccaaggttacggttccccatcggggagcttaaggggaccccttttgcttctctacaattccaaacttctcatattctaccacactggggtctctgtcgaaacggggcgttcaacacagaacaaactcttggacaataacacttgtgcctaggggaggcagaattaatacctggggcgcacaaataactgttatactattagtatcaccattttagggcccaagaagtccttctaaaagccagaatagatgttggtgtactgaccccattaatgtcgcagcaacaacacacatggttggaggagcaacacatactgttacggacacttctatagtttatgtgttcgtcactcatttttttataatctcatgttgcgggcggt

SEQ ID NO: 208453 - DNA, 873 bp, Homo Sapiens; identical to SEQ ID NO: 40572

SEQ ID NO: 208454 - DNA, 419 bp, Homo Sapiens
  misc_feature (416)..(416): n is a, c, g, or t
gtatttttagtagaaacggggtttcgccatcttggccaggctggctctgaactcctaaccttgtgatccacctgcctcagcctcccagagtgttgggattacaggcgagacacctgtgcccggccaggaacgatattaatgaaacatcgtgggcaactctgtacataaactattgataggagagtgaggaacttagttggatagagtttagcaagtaatggaaaagaggatttaaaattggaataacgtctattgtgtgtaggcttgaaagtaaaacaggggcttgatggcatagcagattacaaaaccattgtggatttctcaacggagatgttgacaaatgtgggcattaatgagctctgaagtgggataacaacaaattctttttatttatttatttttttgaggtggagtcnctg

SEQ ID NO: 208455 - DNA, 857 bp, Homo Sapiens; identical to SEQ ID NO: 40484

SEQ ID NO: 208456 - DNA, 842 bp, Homo Sapiens
aaacgcttaaagaacgacctgggctgccagggtaagaaccctcaggaggccgagagttactgtgcacagtacaaagtgctgacgaggaatatgagtacatcgccaagtgcctcaaagaccacaaggccaccagttccaaggggagtgactggaagaaggtggcgaaagtcatagaccgattcttcatgtggatttttcttcattatggtgttgtgatgactatttgtgatcatagcaagagcggattagtcacagatatgggcttttgctatctgggtagaaattaatacaattccctgtgatctattccaatgttcttccaagattttgttcatctataattaggggtcatgtgtctgtgcttttatttttagcttcaaatgaatgtcgaagctatctgtctgttaaattaagcagaagatccaaaatttcaagggtaggaagatggaagaaatagggaaagagcccttttatagcccacgtagtagtgggtgactggctctagttatatattatttgctcttggagtaccagataacaaaatacattttactggtaaaatttaaaccaaagaaggcataaaaaaaactcattttcccttagtgcccattaatatgcttggaactgactagtcctatatttataggtgattaagtctcaagtacctaatcggctatgccttgaagtctattcatttgaaaaggttgccggtagaggtagcttcacgtagggaaaatctcaaggagggatgggtggtttaacaagagtcggtcttgtaataaagggccatgaaaaggagggcccaaacaacggggtgtgagagaaaaaagggctggggggtg

SEQ ID NO: 208457 - DNA, 740 bp, Homo Sapiens; identical to SEQ ID NO: 59792

SEQ ID NO: 208458 - DNA, 849 bp, Homo Sapiens; identical to SEQ ID NO: 50339
  misc_feature (598)..(598): n is a, c, g, or t

SEQ ID NO: 208459 - DNA, 867 bp, Homo Sapiens
atccaagaggaattgagtgcaggtggggtgcagggaaaacagtccactccccaccaccactccgctccttccacagcaaatggggactgctcagaaaaccctgtcctttcttttcctctcttcaaaggcaggcatgtgattgaggatgtgatggtgacttctggcctgttttattttgtggtaacttcactttagtcagggaaataattggaatatctttaatctgatgtagtttgacctttagaaattgaaagtgaaacagctattgttgataattcacaaagtattaataaaacttctattacctgtacagattttttacttaatctgcgagaaaactatttagaatattatggaattgtgccatagcttctttatttgttcttaattctatattagatttttttttctctgcttcatgaacaagttcagattttaaaacattatgcctgaagacatgtccaactttattttttatatgttatattctggtccaatatactagagtaataatactctggtatttaggatatctgtcattgaacctcagttacaaattaaacaatagtagctaccatatctaagtgataagttgcatcttaggatttgtcctgatgccagtttgaagaattataagatgaccgaaatttgccttgtgtcgaatgacggggctacatactctggttcgaccacagaagctgaaatgccccggggggcaattttttgttctcaacatgaactcctttgcagtggtcttcaccgataaattcttgtgggggacaacacccgctgggggtacgccgcagggcaccttttaacactcccattttctggccccatcaacagggggggagacaggataaacgc

SEQ ID NO: 208460 - DNA, 834 bp, Homo Sapiens
  misc_feature (401)..(401): n is a, c, g, or t
gtggactttacaagtatatgttatatatacttgcaagtgacatggttctgtagatcattttataataataaatattttaatttatcataacatataaaagaaaccttgtgttgttgaaagaaaatgaaggaacagggggaaaaaaggtgcaaaatgctaaatttctaaaaatggatttggcatgtcttcccatcaagttcaggtcaaaagtgcatgttgtgagatttattaaaaaaaaaatgataacacactattttcatattttttgtttatttgcacaacttttaaaccagattactggttaaaatccaacagtacacaatttataaagtaacaaagattttataaggaaaacaaatataataaccagtgctgtgaaatgcagaagaaaggcctggttnggtagttttcttttttttaggaaaaccctgcctaaaatgttaatctttgtaaaaagtatgtatttggaatttcttcgttttaatagaatattataaacgtcaaatataaatttcttttcaaattgggagtttaagatatagctgtagagggtggtttaaatcctttagatgtctcataaatgagacttcttatatgtaatgttaataaactgaacagattattccttgaatttcgttagttaaaaggtctcgatctggtgggattgggcctgcgaattatggagttatttgtacgttgtattaaaaggtaattctattctaatggatcaatatggcttaacccaaaaaaaaaaaaagtggggccaaattaaaatggggccgaagaaaagaggtcgaagggaggggtcaaaaggagggaaagtgtaagaacaca

SEQ ID NO: 208461 - DNA, 894 bp, Homo Sapiens
cagtctgtagcagactgacctgtgaatgtgctaggggcaagcattgtcttgtatgtggtgaattttttcagtgtaacaacattatctgaccaatagtacacacacagacacaaagtttaactggtacttgaaacatacagtatatgttaacgaaataaccaagactcgaaatgagattatttggtacacctttctttttgagtgtcttatcagtgggctgattcattttctacattaatcagtgttttctgaccaagaatatgcttggattttttgaaagtacaaaaagccacatagttttttccagaaaggtttcaaaactcccaaagattaacttccaacttataagtttgtttttattttcaatctatgacttgactggtattaaagctgctatttgatagtaattaaatatgtgtgtcatttgatataaaacctgtttggttcagcaaacaaactaaaatgatgtgtcatagacagtgttttattttttcctgtggtgttgctgatttgtgagcatgctttaagatgaaaaaaagcatgaatgataacttccttaaaaggtgcggccatccaattcaaatattttcgtcctgattttaaagctgttggtgtagtgctattaaattcgtcagtaatttcctttgaaactgtcgccgtgttagggtgcccttacttccagcaggggaggggtgggagcctagcattgtggggaaaaacctttactcattcggtcacctttttctggatgccacgtttctgttcacacattggcctggtcaccgggtgttgtaatttctcaaaaaaaaaaaaattgggccgccgaaaatacatggggccggaaaatagcgacagagaggtcacaacgcggagatatcgtaataactgcacacc

SEQ ID NO: 208462 - DNA, 608 bp, Homo Sapiens
  misc_feature (419)..(419): n is a, c, g, or t
  misc_feature (596)..(596): n is a, c, g, or t
acattaactttattcttacacaatagttattcaggtactatcacaattaccattaaaatatcagtagggatttaatgcaacaataggatgtggaagatatttctgctcagtactttaagacttacatttagcctaaaaataggcttccatttaacatgtaaatgaaaggcattattccactcagcttggagaacaaaatgctaggcagcacagattacgtcagaacatttttgaagatactttttcttttttttaagtatctcactgtctcccagcctggagtacagtggcgtgatcatagttcactgcagcctcaaactctcaggctcaagcaatcttcccacctcagcctctcaagcagctgggaccacaggcacatgccaccataccaggccattttatttatttttttaaatagnaacagggtctggcactggcccaagacagtctcaaactcctaggctcaagtgatccatctggcttcgggctcccacagttctgagattatagggcacgagacactacgcctagactaaagatattttcatattccctagttatgcaactaaaagatgtgcactggaaattcacctacnaatggtatatat

SEQ ID NO: 208463 - DNA, 500 bp, Homo Sapiens; identical to SEQ ID NO: 60541
  misc_feature (320)..(320): n is a, c, g, or t
  misc_feature (395)..(395): n is a, c, g, or t
  misc_feature (409)..(409): n is a, c, g, or t

SEQ ID NO: 208464 - DNA, 427 bp, Homo Sapiens
  misc_feature (385)..(385): n is a, c, g, or t
  misc_feature (409)..(409): n is a, c, g, or t
  misc_feature (419)..(419): n is a, c, g, or t
agaaattttataaacttcttgaaggcaaagttcatattagatactgtatttctcctcttaaccttagggctgtattaggttccaaaaatgcttaatgatgcatcaccacagtaactgcggctatgctatacttccaccaaccaatggataaacccctccaagcattctataaaaagagttttactatctaaaaatgggaataataatactaacatggaatagatgtattcaaaatgtgcaatatgaattcctcacactatacaaggatcttaagagtttggcataccagccaggcacagtggctcacgcctgtaatcccagcactttgggaggccgaggctggaggatcatgaggtcagaagattgagaccatcctggctaacanggtgaaaccctggtctctactaanaatacaaaanatgagccg

SEQ ID NO: 208465 - DNA, 433 bp, Homo Sapiens; identical to SEQ ID NO: 60838
  misc_feature (264)..(264): n is a, c, g, or t
  misc_feature (353)..(353): n is a, c, g, or t

SEQ ID NO: 208466 - DNA, 645 bp, Homo Sapiens; identical to SEQ ID NO: 60864

SEQ ID NO: 208467 - DNA, 606 bp, Homo Sapiens
ctttttttttttttttggttttattttctcctgaagctgaaaatgtttcacccatataaatgtggcattttagactctagctataaacctcatcgaccagtatgttttcagagttgttcacaacaaaatattattcgtttctaaaatcagttttcactttttggtgatagtattccaggctggactgcttgaattttagatgcagagatcattttatatatatctgtcaatgtaatacagaaaaattacatgtgaattgtttatgtgccccctctacgtaggacacagtatcaatcactcaataagcactgtaacatcaggtggtgtttgggataaataacctctcgggtttcttcaatcccactaccatatgctttctactgtatttgttatgttttatgttatacaaactatctccaaatcctcaacaactcatttgtaaagatactatcattagtttaatgttccttttggtttatacatattgctgaagtcatatttcttaatttaaaaaccaggcatttaacttaagctccactggggatttatgtctgttgagttagaaatctgttcactcatccactcgaggatactcatgagcagctc

SEQ ID NO: 208468 - DNA, 419 bp, Homo Sapiens; identical to SEQ ID NO: 57915

SEQ ID NO: 208469 - DNA, 531 bp, Homo Sapiens; identical to SEQ ID NO: 51618

SEQ ID NO: 208470 - DNA, 638 bp, Homo Sapiens
ctttttttttttttttttttttttgcactttattccgccacttttattgagcaacagccgtggggacctgattctgcactaagtgctctactgtgagacatcacaggttgtcattgctagaggcaagaatctcttacaaagatgaaagggcagaacccagtgctttttttaatggttgttattccatgcagaaacactgactgatccagaactggtaactaaggcggtgatcaaacaggaatgcttttcttctcagtttaggacgaagacccgccatgacaatggcgggaacgctggagtaaaacctcacggcggccagcatgaagtttttcgccagatttgtggccccacccccaagtacccacgcggagaggcctccagtcatacagcacaaagggcatcgccttgggcagctcaggctcactctgttccacactgtctgcggtgggaggctcgggcccggcctgggtgcatccagtgagtaccacgttcccttttcccggcacactgtctccaggacaggcgtgacctgttctccagaacgggtagagatggggtttcatcaagttggccaggctggtttcgaactcctgacctcagatgccccagaaaccactcatccctgaactaatcatgca

SEQ ID NO: 208471 - DNA, 688 bp, Homo Sapiens; identical to SEQ ID NO: 60901

SEQ ID NO: 208472 - DNA, 530 bp, Homo Sapiens; identical to SEQ ID NO: 52025

SEQ ID NO: 208473 - DNA, 484 bp, Homo Sapiens
cgcccttttttttttttttttaaaaattactctattattatcaaatagaaccacagtatccaaaaggtaattataaagttctatccccaactagatgggccctacaccgcccctctgagtggccggcggccaaatcacgccccccgtgctgattggtttcatccattttattgtcaaggaaattaacagcccgaaagggttccccaggtccgcgccctcccccctggggcccccggggaaacgcggcagcaagggacctggtctcactgcccccatgtccttgggaggagggacgagaggagagggggagctcacggcaaaggggctggggggcgccccgcccccgcccgctgggctcgggcctggcggtgtccgagggggggcacggcccgtgcacctggccgggcggcggctgcggagcgcgcgctcactcgcccgtgtgggtccgcaggtggtacttgagcgactgcttgtagcggaagca

SEQ ID NO: 208474 - DNA, 461 bp, Homo Sapiens
gccttgtttccttagctctgcctgtccctcttgttctggaatactttaaggcctgtcctagacaacacgtcacttcactcatccatacttgaacatgtgtcctgacagatgaagactgtaaagaatataatcatgtggtgctgccatcagagccaaccaaattagctgttcattcctgatgtgacgattgggcctaaggcagccttcctcagcctcagcactgttaacgttttgggacagatgattctgcgctgtcggggcagccctgtgcattctagggtttcagcagcacccctggcttctacccactgaagccaatactagctccccaagttgtgacaatcaaaaatgacttttgggttgggcgccacagcttacgcctgtaattccaacactttagaaggctgaggtgggaggatcgcttgagcccaggagttcgagaccagcctgggcaacaaagc

SEQ ID NO: 208475 - DNA, 439 bp, Homo Sapiens; identical to SEQ ID NO: 57856

SEQ ID NO: 208476 - DNA, 1000 bp, Homo Sapiens
aagaaacaataataataatgaaagaaaacataaaagaagctcatgccgaagtttccattttgccggatgaccttcctgaattggaggaaggatttattgtcactatcactgaggtgaacctggtgaactctgacttctctacaggacagccaagtgtgcggaggcccggaatggaaatagctgagataatgatagaagaaaatgacgatcccagaggaatttttatgtttcatgttactagaggcgctggggaagttattactgcctatgaggtgcctccacccttgaacgttcttcaagttcctgtagtccggctggctggaagctttggggcagtaaatgtttattggaaagcatcaccagacagtgctggcctggaagactttaaaccatctcatgggattcttgaatttgcagataaacaggttactgcaatgatagaaatcaccataattgatgatgctgaatttgaattgacagagacgttcaatatttccttgatcagtgttgctggaggtggcagacttggtgatgatgttgtggtaactgttgttattccacaaaatgattctccatttggagtatttggatttgaagaaaagactgtaagttaaacatatcaggggaaagccttgtttcaggctagcgtttcatgtaattttgagtagaaagtgtctcacatttttgttttggaagtcttggccaggcatggtggctcatgccagtaatcccagcactttgggaggccgcagcgggcagatcacgaggtcaggagattgacaccatcctggccaatatggttgaattcccgtctctactgaaagtacaaaaattagctgggcgtggtggcacatgcctgtattcccagatacttgggaggctgaggcaggagactcgcttgaacccaggaggcagaggttgcagtgagctgagatcacgccattgcactccagcctggcgacatagagagactccatctcaaaaaaaaaaaaaaaaaaag

SEQ ID NO: 208477 - DNA, 1000 bp, Homo Sapiens
cttgaaataatctagaccagattactcggggttttttttaggattatttttataggtctaaatatgaatgatttgggggtatgaagtacttaaagatagttctgtgaaaaatcattttcagctgtctattcaagggaaaaaatgctaaccttgtcactttactacacaaaaccacactaaaataaaccattaatgatactgcctgcaagattttaacacaccagatagcacacacattaaggatttataaggcactgtacgtaatttttattccaagtgacctctcaattcattttcattttgcattttatccatatgaactcatgtttaatttagataataaaaatttattttattaaaaggacagtttatttaaagtgggtctttttatttgttgtagtgcatactataagaatttgtaagcctctaaagttgagctataaattttcatgcattaaaaatttgtttcagttgtgaggatatttaatcagattaaataatgttgactcttaatattttgcctgccttttttttctcctacacatgacctttgacagactaagtatatctcagctattgagggtatctgttttgttgcctgtatattttgtttaaattaacttgtatattcctttgtatacacctaggcacagatgtatgcaaaaaaaatttgttaaattacttctttctttatactaattctcaatttttaaaagattttatctggcatgtatatacttttatatagaacattataaatgtaaaggaaatgaattctaattttaattggattatgtattcatacagttattctcaatttttaaaatactaataatgtaatcattgaatgtttcctacatacgtagtgggttttatttgctcacagcatacagttatttttcaatttatgtttttctattagacttaaatttcattataataaaggcttttactcattaaatacaaaaaaaaaaaaaaaaaaaaaaaaaaaaaaaaaaaa

SEQ ID NO: 208478 - DNA, 476 bp, Homo Sapiens
ctattttaaatgtatattgaataaaacataaataggaggttaatgtgattaagacaaacagagaaaaggatttaaagagagaagaggccaggagacgcgggagaagacaatgctaacaggttgtcttaacaacacatggaaagctcctcactgcacagcccccagatgcctcactccacgagtgaaatccctgcacggcaggccgagagcgtgggtgcagcagtctgcctgacgtgagagccatgtcatcacatatctagaaggtaagggtacctccggttctggaacacacaatgtaggcacatttcgctgggggctccatgtacatttctaaatagataccagtgcagggacctggctaccctctgataagaaggaagtgaggcctgacagaaactgaccttccagtaacctggaagagactgctctgacggagacaggagatggctgctctgtgaatacacccaaatctccta

SEQ ID NO: 208479 - DNA, 463 bp, Homo Sapiens
gacccctcttcccaccagcacagacaaatagtttgtatgtgtctggatattatgtctgtcttccataggaatcttcttaaaagtcttcagcttcactggactagtactttttactacattgacaaaaggtaccatccaatctacacattctgaaatactgtcccactccaaacctgaggctttcttaaccacttcaatggaggtaaaatggcacaaggcagcagcagtcagtattctgtactggaactctaatgaatcaatggctagaatacacagatctaaaagctgagctatttgaatgaatgtttcctgagaatactgaggtagaagaactttaggagcatctttaagagcatcaacttggagaaagagatttagccaggagatgattgttacaggacaaagttcccattttaaagcctttaatataatgagttccatccttaagaaatcctcttcactg

SEQ ID NO: 208480 - DNA, 318 bp, Homo Sapiens
ttcacatattcactcaacaaacatttattgagtacctgattggcgccaagcaatctggaattacaggacttatcctataaatctcggaaaaaatggtttttctgcatcatgaactttgggcaacctgcttctaactccaaaggactggagttaggaactggggacttggtggtgaataagcccaagtctctgtcctcatgaagttcatgttctattgttgctgcaagttctggatcaaaggtatcatctgtgaacctcaagagcaggcgatgatgaggctcttcagggtgcaacacgtcctcgtccatcctaaccccg

SEQ ID NO: 208481 - DNA, 619 bp, Homo Sapiens
aatgtgaagaggattaaagaataaagaaaaaacaaaaaagtcttatactaaaataagaaatcagccccatcttggcacagttctcatgcagaatattgcacccagtgtgaactaacgctagaagcttcaaactgtataaatttaaatgtatttgcatattataaaaataaagataaacatatacatattttacactagttatggaacagcaatgaacgtcagtcgatccctctttcacatttaacagaactgaaatctgagtgctctaaatactgccacctgtactgtaactatggcttatatgtgcacggaaaacaaaatccctgagaagccattcgacttttttttttttttttcttttcttcaagtagcgcgctccttggaggatcacagttctgaggttcaggttgtaaaacatttgctccatgttctcgtccatgcttccccccaccaccccctccccacctcttccccagtcatccaaaaagcaccctgcaagcacgcgttgtcactcaagttcacagaacacgctggggtgagtgcagagggtctgccaggtgcaaaagatggtccaggtgttcagatgctctcttttctccatggaaattccacagccaca

SEQ ID NO: 208482 - DNA, 501 bp, Homo Sapiens
ctctatcattattattattatttgatacagggtctcgctctgttacccaggctggacttcagtggcgcaatcttggctcactgcaaccccggcctcctgggctccagtgatccccccaacctcagcatcctgagtagctgggaccacaggcacgcaccaccagggctaatttttaaattttttagaaacagggtttcaccatgttgcccaggctggtctcaaactcctgggctcaagcgatccaactgccctggtttcccagagtgctgggattataggcacgagccaccttgtccggcccattatttatcttttgattgaatttactgaaaggtgtaatgtgaagtctgtcaagttgaataataaaaatttgggcttgtattttacatgccttttccccccatttcatttttctagtaattcatttttatcatactttacagaaatatcaatctgcaaggggttggtaattttaaaaactggttcttcaaacacagttta

SEQ ID NO: 208483 - DNA, 406 bp, Homo Sapiens; identical to SEQ ID NO: 40096

SEQ ID NO: 208484 - DNA, 270 bp, Homo Sapiens
cccagttatgcagagagcactctgatatttactatcatggaaagatccactaatgggaggcatagcttaaaaaacaagatggtgtgctgtgtccttgctccagctgtttttacaggtgtgcctagaaggccacttgccttcatacagctgatgtgcacctgttctgtatgactctgttagtgctatcttccatgacatttcctgtgcccttccagggaaaggggtcacttatcattgagacctgaagaaggcccatgtgtgtgaagcgag

SEQ ID NO: 208485 - DNA, 378 bp, Homo Sapiens
gtgagaaggactaacaggcttcacaatccagaaaatatcaaaatataagtgttaaaagagaggcacaggccgggtgcggtggctcacgcctgtaatctcagcactttgggaggccaaggtgggcagatcatgaggtcaggagtttgagaccagcctggccaatatgatgaaaccccgtttctactaaaaatacaaaagttagccaggcatggtggtgtgctcctgtgatcccagctacttaggaggctgaggccagagaattgcttgaaccctggagtcagaggttgcagtgagccgggatcatgccactgtactccaggctgggtgacaaagtgagactgtctctaaaacaaaaaaaaaaaaaaaaaaaaaaaacac

SEQ ID NO: 208486 - DNA, 334 bp, Homo Sapiens
gaactgtacataaactttataaaattaatcagagaagaagagagggtgagaaacataaataatccaagctgcaccacattcagcattaatcactaggtcactttgcttgctgaccccttcctcatagttgtttggctattgcttcagaattatgtggagtctgttacaagattatagttccccttaactgccctatagataacagcttgaacattatgaaatgctaagttttcccttcgagacattctttcaggtcctgcatactgatgaaactactgatgtcagctggtctgaaggaccctaccagaagctaaatcatcaaagaatgcaattt

SEQ ID NO: 208487 - DNA, 568 bp, Homo Sapiens
tttagaaggactttcttggtgccttctccctcccccacctgctcccatcctctctgcaaagtaaaatctcatcttccgcaggaggttaggttgtaaagtttacacataaagtgaggattccaaataatcaaaattatcatggaaaatatctcaaatgacccagaaattcaagtatataaacatggtttggtgtatatgccagaacaaagttggaataccatatgaaatagttggcctgtaattaggagacattttatatgaaaaaataagtattctcaaaaactagaatcatgtacagcattcagaatgcccacaatgtgaagaggcacaccggacttagacatgctaaagtctcagattcaagtcctctcatctcatgctcatgttcatcctggtaaataacttcactttggtgtaaaacctcattgagtggaattgtgagcaaacttttgtactgtttatttttctcttcctggtcaagtttgcatagttaaatgcaagtatgtcgtgatcgtattttatccttcttttctgctttctgtttttctaatttctgtgcccatttcaa

SEQ ID NO: 208488 - DNA, 539 bp, Homo Sapiens; identical to SEQ ID NO: 10315

SEQ ID NO: 208489 - DNA, 538 bp, Homo Sapiens
gagtgcctgcagccggtgctgtccacagggagctccagcccttctcacactcgacccgcagaaaccacccaccttcaccatgtctgacgaggaagttgaacaggtggaggagcagtacgaagaagaagaggaagcccaggaggaagctgcagaagtccatgaggaagttcatgaaccagaggacgacctgaagaagaagaaagctctgtcttccatgggagccaactacagcagctacctggcaaggctgaccagaagagaggcaagaagcagacagcccgggaaatgaagaagaagattctggctgagagacgcaagccgctcaaacatcgatcaccttggtgaagacaaactgagggacaaggccaaggagctctgggagaccccacaatcctgtcaggggctcctgacagtcctgggggtggagagaccatcccgggcgtccccgcgtctgtgtccttggctgcttcatcccctggggcctgtgaatacagctgcagaacccccaaccaaaaaacaaacaacaacccacacaaaa

SEQ ID NO: 208490 - DNA, 515 bp, Homo Sapiens
agatatgaactaaagcaataatttgatgttgcttagggaaagtagcattactgtcattagccacacattctttacagaagtttatatgttacgtttgaaattctgcatctggtaggtccaaggtagtttgtgttagaagtagcaggatcgccttaataataataatagtttgtagcatgaagcctgagcattgtccaaagtttggaaatgtgaacgctgatagtcacatctgtccatctttccacatttctaggatgctgacagacagcaccaagaagtaattgcaatttatcggacacaccttcttagtgctgcacaggtaaaagaactacttctccttgtggaaagaatatggctttagcagataataattttttattttcaaactaaatttatggtgacaagtaattgatgtttaaagtagctgcaccccctatgcttatttaaaaataattatgttcccccccagaggaacaacaaaaaaaccaaagacaatgacaaaaaaaaaaaaaaaa

SEQ ID NO: 208491 - DNA, 718 bp, Homo Sapiens
cccacgcgtccgcttttattaccacagttgctgcctcctccagaatttttgaattttaataaaaggcaaacttttgagctgcaggaaggacaatgttggttaataataaatctcaaagtcaattgtagaaaaaaatgtcttcaaaaagaatgttgcactctgatctcttaacaaattgttacgttcaaagtttaaagtgatatattaacaaagtcacctagttatacaaacaattgtcagagaattctggatttggagggtattggggttatatgattctttcttagataatggcctctactaaataactcaagatctttctggaatgtcttctggcaggcaggtgccactgtcagcttttctccaaaaagcagccaacatcagcctcccctgtcaactcaacagttttgtatctcatattatatggactttatatgaaaatgaatattttacagtttgcacagtattattttacagaaaaggaatcagagaatctacaacatagggccccagaacaacagtttcactttgtgggcttttaattattctagaattttaactgcatctcatttttctagcatggtgagaactaatatgtaactcctttgattgaaggagctcttttgtccgtacctatcagaatgttttcttgacacttccatgttggctcttctcagctttttttgtacatatttttttttcctaaagagaagaaaag

SEQ ID NO: 208492 - DNA, 792 bp, Homo Sapiens; identical to SEQ ID NO: 40030

SEQ ID NO: 208493 - DNA, 841 bp, Homo Sapiens
aagctcatctttaggtttcagattaaagaaagcttgttttattttgctttgagagaatggtatgttttcctaactataggttattttatagagaatataaaagtataaaacattaaaaataaccctagatatactttaaaataatgttatatttatgctaaaatatgtaaattacactatacaaccatatgataggttatttctctaaccttgtcttctaacgttttaccaaaaattcataatctaatagtttatcagttttcaatagattaaataaaatgattactttaaaaataataaaatttatctaatttaaagttgatattatttttggccgttagttatctattactagtgatcagttatactgttttctatagctactttatttaacagcacagatttctatgcacctttactctttcctcaacccttgtctctatctgtacataattgctttgtcttgatgtttctatcaactatatcatgactatctattggttccataactctgtatcatgtgtattttcttattctggtataccacaaatgattcatgcaaatgaaaatttttggggtgacttggacaaacatattaaaaattcccccaactttaacagtcaacacacacaacaagccacacacacgcaacaacccaacaaagcaagaacacaacaaaccaaagacgcgcaaccacacaaggacaacagccgggggcgaaccagacaagccgcgcacggccgaacagccgcaaggaggtgcacatacgcgaagacagacgcgcagagcgggggaacatacacccacagggcgggaaaccaacccaagtccggcagcaaag

SEQ ID NO: 208494 - DNA, 460 bp, Homo Sapiens
taggatacaggtgggcttgtatttttgtttcatttccttggggtcaaagaaaaaagacaagctgggctaagcagtctccaattacaccatgttaagaatgaactgaaagtaagacccctatctctgccttttaccaatcatggaacatgtggtctggtgtattcattgatcgggggaaggaagtgaaattgggcctttttcctggtaggagaaaattaaatcatatttgcatgctctagagaatataggtaatagggtcaccatgatcatgataggttgtaattgatacctggaaccaatattacagaatgctcagaatgcttgttctttaataggtcatattgaggacagtgaggtcagtgctgccataaagtcccgtttctcatcacatgggtttttgtttcttttctactgttttgttttgagacagagtctcactccatcacccaggctggagtgc

SEQ ID NO: 208495 - DNA, 387 bp, Homo Sapiens
tacagcttctcgctaacttttatatttttagtagagatggtgtttcaccatgttgcccaggctggtcttgaactcctgacctcaggtgatccatctgccttggtctcccaaagtgcggggattacaggcatgagccactgcgtccggccagatcttcttatttatattgggctaagcatcatatctggcaaaatgaaagcaagtctttgctatatgttcagtttgctactgtcttccatctcctggttcctttgactctatgtcttcatccttttccaagaagtctcttgcacatcttccttcccacaccacaaaagcatctcttgcacgtttgggagtttgtgttgtccaggcggatgctgtaggttcaacttcagccaataaaat

SEQ ID NO: 208496 - DNA, 465 bp, Homo Sapiens
  misc_feature (436)..(436): n is a, c, g, or t
cgtgatctttgtcggatcttaaaactaattctcatggcagctacagaaatggctgccacaaagtcagtattaatgttagtgtttaattgccaaaactattttagaaacaaagaagacaaaaagtagtatacacctaggaagaatgcgaaaatgtataactttggttctagatatatcttctgaatcaaaattgcaaataaaggctaagtaacatcgttttatcaatatatgtgaacaacatatcaacatatatgatcaacatgtgaacaaatttaaaataagctatctaggatcacttgcaccatcttcatttgataaagagttcaatttagtaaacatgtttaggcatgtctattaatccatagaataggaccttttttttttttttttgaaagagagtctcactctcttggctcaggctgggagtacatgggcncaggctggagtccaatgggcacgaccccg

SEQ ID NO: 208497 - DNA, 365 bp, Homo Sapiens; identical to SEQ ID NO: 37241

SEQ ID NO: 208498 - DNA, 570 bp, Homo Sapiens
  misc_feature (308)..(308): n is a, c, g, or t
  misc_feature (442)..(442): n is a, c, g, or t
  misc_feature (464)..(464): n is a, c, g, or t
  misc_feature (476)..(476): n is a, c, g, or t
  misc_feature (494)..(494): n is a, c, g, or t
  misc_feature (501)..(501): n is a, c, g, or t
  misc_feature (537)..(537): n is a, c, g, or t
  misc_feature (555)..(555): n is a, c, g, or t
  misc_feature (569)..(569): n is a, c, g, or t
attgtctgaaatggaaatgtttcaacagagccatcagcaagcaggaatgcagcagtgtctcctgtgacttttgtgattgatgtgttcagttctcagttctatgcaatgaaagtaacataacactgggcttttctgtgaatagcctaaacctttatttgcataattcatgaaattgtattacacaaacttggttaaaaaaatcctgttagagaatttctgcagtgtttagtaatcctgtgaatgttcaccagttgacgttttgtcgcatttgtctcttgtactgtcttaatgagccactggatttcgcnttgtttcattgcatccttaaggattgggttgacatgtccaagtagtcatgcctgtttgggggaagggaatggatttagcagttcaccaagaatggatcagtctgtctttaccgtttaagggtcagaggttaccngactcagaataaggggaggacnaccttgaaagangccagataaggtgatttnataaagnactaactgcagggaaatacaagttactttcccagcngagatatatgatataccnaaggaatattttgna

SEQ ID NO: 208499 - DNA, 328 bp, Homo Sapiens
tatatgatcagagacagcatacaggaaaatcagaatgattagttttggttacacggttgcgggtagtcagccttagggtatttctaaactggggcttccatttttatttttcgttaataatacctgcatgagatgggcagctcaggtcttaaggtcacatacagtgcttcagtggtcaagtgttctgtttaaattagagtccaatagcaggctagtagctgccattcaaagggaatgtatatggcaaccatcttgggtaatttatatgtccaaaacccaagggcctggtgcatcctgatagcagtctcttgttgccgaagcttgatca

SEQ ID NO: 208500 - DNA, 388 bp, Homo Sapiens; identical to SEQ ID NO: 40794
  misc_feature (5)..(5): n is a, c, g, or t

SEQ ID NO: 208501 - DNA, 472 bp, Homo Sapiens
tggagtgcagtggtgggatctcggctcactgcaacctccgcctcctgggttcaagcaattctcttgtctcagcctgcctcagcttcctgagtagctgggactacaggtgcccgccaccacgcctggctaatttgtatttttggtagagatggggtttcaccatgttggccaggctggtcttgatctcctgacctcatgacctgccctccttggcctcccaaagtgctgggattacaagtgtgagtcaccatgcccagctggcttttttttgtggggcgggggggacagagtctcactctgttgcccaggctggagtgcagtggcgcagtctcagctcactgcaacctccgcctctcagattcaagtgattttcctgcctcatcctctcgagtagctgggactacaggcatgtgccaccactgccggctaattttttgtatttttagtagagacagggtttcaccttgttgcc

SEQ ID NO: 208502 - DNA, 456 bp, Homo Sapiens
aaggggtggggtgtctgagtcagctcaacggacaacagacatttcacattcacacaagcatttcacaaaagccgtcatgtgtgtctaccggatttgctcattataatcgtctattttttgtgaaataggcttgctcatatttaattagcttgaattgtgttacaataaatattatagtgctttaagaaaaatgtctgaaacctttgaggcaggtacagagggaaggttttcccatataggctgcacgtgtgcatgttcgggcccacgctaccttcaggctgatgtctgtccagtagatgtggttgctggacacatcaaagtccagggccgaggcctccttgacgccgagagcaggatggccacatcgttgttgttggtctcgagggagatcctgtggatggcggctctactggtgaagaccaagaaggccttgggcatgatgcaggtcttcatgtc

SEQ ID NO: 208503 - DNA, 603 bp, Homo Sapiens
  misc_feature (317)..(317): n is a, c, g, or t
tcacgcttatacttctttctttttctttcttttttttttttggagacagagtctcactcggtcacccaggcgggagtgcaggggcgcaatctcagctcacggcaacctcggcctccggggttcaagcgattctccggtcttagcctcccgagtagctgggactgcaggtgcatgccaccatgccgggctaatttctgtatttttagtagagacagggttttactatatatgggccaagcgggtctcaaactcctgacttccagtgatgtgcctgcctcggcctccagtccagattttaaaatcactcattatacggncaccacaaagtaagatttaggctgcgaccagaggaatgcataagaactagaaggtaaagtatgtctgtgggtataggggggagagtatatgtggaaaggggggctgtcactttggagaaacaaagaaggctaggggggctaaggtccagaaaatgagaagtaagagggacggggatgaggctagaaagatggttcagtgccccataggctattaagaatttaaacttttatctgagggggacaaggacctgaagagggtttaagcagaaagcatatgacagatgcg

SEQ ID NO: 208504 - DNA, 516 bp, Homo Sapiens
cttaaattgaagttcgtgtagttgattacttgaggtttctgtgtgaagtattaaagaatattttaattgttcttttatgtttagatttacacttttaacaaaatattttcagaacatgaatattaacaggcatgtaccaaagttcatgcattcagagtctgtctctgcaggagttaggtcttggttctgaatccaactgtttgatttgattcccccagttgtttttgtttacatacgtcttatgtttatttctcccctttctttactttcttggaaatctttttttcctatcccattaccaaacttttcacaaaaggaaccttatgggtttttcttttgttctaatcatcactggttgagtggttactgtcactgccttcactgtcactgtcactgtcacttccattgttgttaccgttaccagacttgctctggctgtcactctcatcattgctgtcagatgtgctgtcactgctatcactgctgtcgctgctgtcactgctgttgctgctgaag

SEQ ID NO: 208505 - DNA, 367 bp, Homo Sapiens
ggcgcgaattcactagtgatatgtgagctgagatcgcacccagaccaactctcttcttaatccatgacaatttatacagcacaaaagcagttacaagtgacaccatcatagtctttaccctgaattccatgtcatcaagctactatccataccaaggggctaccctatttctcaaattaccaggacaatcagatgtgatccaggcaatggaaggctagtatcagacatataatttatttatacagtgcttgaagatattttcattacatccacaaaatggaaggctcttacttgggcagaaatgtataacttattgtgcctattcactatatacatgagaaggagactcactctgtcaccaggctgg

SEQ ID NO: 208506 - DNA, 610 bp, Homo Sapiens
taatatgctgatctcaaactcctgtctcaagcaatcttcctgcttcgtctccccaagtgctgggattactggtgagagccactacagtcagccctttctcttaagtgactctcagaccaaagtttataagacacactgaagcacaatttcaagcaccattactgaaatgggatgtgaaaggaaggactagcagaatagcctgccacgcagcaatcagatataatgactcattttgaactaaagcatgtgaagagcatgctttggagagagttgcagcctgaccaggacactatatgtgatgttgacaatctaactatagcacagtccttatgtggacccagtatgtaaaaggcaactgatttgttgtttttttttcttttgagacagagtctcgctctgtcacccaagctggactgcagtggcgcgatctcggctcacagcaacctctgcctcctgggttcatgcgattctgctgtctcagcctcccgagtagctgggattataggcatgcaccactacacccagctaacctttttgtatttttagtagagttgggattcactgtgttggcaggatggctcaataccctgacctgtgatctgccctctca

SEQ ID NO: 208507 - DNA, 312 bp, Homo Sapiens
tttcttccttaaactccataaactgtttcctgtagagttttagccaatgtggaaggtgaggctgaccatgagtcccaagttgtgtgggccgttgcatggaagcaacaggttttttaagtttatccaacacacacacacacacacacacacacacacacacacacacacacacacacacattggatagcaaaagctgaagagaagcatctgcagcctgcacatacaacagagctgttaaattcctggctcacaagcaacagagaagaagtcagctcagaggccaaagatttccaggaacgtcgatgtttaggg

SEQ ID NO: 208508 - DNA, 566 bp, Homo Sapiens
ctccctacacacggggtcagtattcaataattgttccctagcccaacaaggctgttgaaagccttctcagccttttagacattcattcacctcttccaaattggcagacaactccaggaaaaagtagtttgaaatgctgggctcacctctccagattttttgttcttctcccaggctgtagcctcatcattcttcactacctcctcaacattacaatggcttaagattttaaaaaatacatttgaccagctttcctatcttactcactgagtgggttggttggagatacttaatgtgccattatagggagtggaggtcttagtagacattttcttttctttttttgggacagggtctctctctgtcacccaggctggagtgcaatggtgcgattatagctcactgcagcctcaacctcccgggctcaagcgatctgcccaccatggcctcccaaagtgctgggattacagtcctgagccactgctttcggccttacagaatcgtatcgtataggggcattcagaagtctgacataaaaattaacttgagacttttatgttcattct

SEQ ID NO: 208509 - DNA, 443 bp, Homo Sapiens
gtccttgcaaagttggctttctggatggagagaatgatgtgtctggcaatagggatctgtacatttcctatttcaagagcacacaaagtattgacatctgaaatgaaaacacaaaaggaaaagcttaaacttgccacataggaagttcttcatgcttgaatagtgtcttcataaccataatgggatttttttaggattataatagttctttttaaatgctttatttacttaacaaatagtaatcaaatcattgcaaattcttatatggaagatttaggtgctggcagcaatagttacataaattataatgtcaactatgacaaactttctatgtgtctagagctagaatataaaatagaagtgtgccatcatggctacaaatggttaagaatatagattctaggccgggcacggtgggctcactccgtaatcccagtcagtcc

SEQ ID NO: 208510 - DNA, 595 bp, Homo Sapiens
  misc_feature (440)..(440): n is a, c, g, or t
actcagccatgttctgtggtctattcccctgacttccccgatacctatgccacgggacgggtcggctactggaccatccgggttccgggggcctcccacatccacttcagcttccccctatttgacatcagggactcggcggacatggtggagcttctggatggctacacccaccgtgtcctagcccgcttccacgggaggagccgcccacctctgtccttcaacgtctctctggacttcgtcatcttgtatttcttctctgatcgcatcaatcaggcccagggatttgctgttttataccaagccgtcaaggaagaactgccacaggagaggcccgctgtcaaccagacggtggccgaggtgatcacggagcaggccaacctcagtgtcagcgctgcccggtcctccaaagtcctctatgtcatcaccaccagcccagncacccacctcagactgtcccaggtagcaattcctgggcgccacccatggggggctggaagccacagagttgaaggatggacagtctatggtctggcaattctcttcatcctcacagtcacagccattgtagcaaagatacttctgcacgtcacat

SEQ ID NO: 208511 - DNA, 363 bp, Homo Sapiens
aaccatacatgtctgatgacattatttggcattctcactggacagcacctttcaacattaagaaatagtggccgggcatggtggctcatgcctgtaaccccagcactttgggagaccaaggcaggtggatcacctgaggtcagaagttcaagaccagcctggtcaacatggtgaaaccctgtctctactaaatatacaaaaattagccaggcatggtggcaagcgcctgtaatcccagctactcgggaggctgaggcaggagaattgcttaaagccaggaggtggaggttgcagtgagcctagacagtgccactgcactccagcgtgggtgacagagcgagactctgtcatcagacaatgtat

SEQ ID NO: 208512 - DNA, 496 bp, Homo Sapiens
  misc_feature (5)..(5): n is a, c, g, or t
  misc_feature (408)..(408): n is a, c, g, or t
  misc_feature (483)..(483): n is a, c, g, or t
tgggncattcaaactttaaattaacatcccaagcctaaatgtaaagggcaggttctttctccatcttagcatatgtgaaattctcctgaaccacagcccggtgtttcccaaacactatggggtacccatggaacaggaagtaacacccagtttcaccagcctgcttgatgagcctctctgtgaggttctcattggtgtctgctaagtttgggaggcctgcttcaagagggctgcataatgaactggaaaagtcaacccagaagagtcatcatcgcagactaaaaccaactggagttccagtgtggatggacagtgcgtactagcacgtttgatttttgcagggttaaggaggtagaaaggctggcactctggccattggcagcgccagctctgtacaccaccttcggngggttccatctcaccatgaccccctctgatccggctgatggtgtctcccttttgccaagttgaaggaagagcaantcaactccgagat

SEQ ID NO: 208513 - DNA, 300 bp, Homo Sapiens
atgacttttgtcaatatattttggcaagccaatttcactagggcaatgagctagaaagtcagtgacactgggtagaggctagaaagatcctgggctttgaagtcagagccttcagtcagaactggcaaaaatatgacactcgtaccataactgctcctctcacttccatggcagacattagtagtcaatctcagaactcctctattttctcagagcctcaagtaggcctcataatctgcactaaagcactacaggcagccaataccctttgataggatttggcattgtaatgtggagcct

SEQ ID NO: 208514 - DNA, 442 bp, Homo Sapiens
acgttcgtgttaattttttaatgcgtgatgtgactggtagaaagatgataataaagagattcttctgtctatgtgtttcttttagattactcatgtggactgaagaaaaaaaattaaatttgttaaagaaagtgagtttgatttaggattgtgactgaggacaatagcctggaagcagttctgacagatggctgctatgtaatattttggttcacagtttataagagacatgtgggccctgtgctctatcttgttttttcttcaaagcataattctggagagctggagagtcccagagtcaggaatgttataaagtcaggctggaaaccagaaataagtaacatgactaaacatttgtgtgtttttttgtttcgttttgagacagagtctcgctctattgcccaggctgtagtgcagtggtgcaatctcggctctctgcaac

SEQ ID NO: 208515 - DNA, 471 bp, Homo Sapiens
cttttcttgactcctaccaatagagtcctctgagaggagtggttatagctatagtatgtggaacccctatgtcagttttcgtagtgtggtagatgtgaaatagtatcttgctgacactacaatagtatcttgttgcatttacttgatttcactctaaaaatgtaaaatctgatcaattaaatgtcagacttttaattttttatcttttgtgtttatccaccattgtgggagtcttattcgtcatctctctgtaccatgactagagacccaagatttaattcagtagctgaagctttcactggtagctcttgtcagcagaccctcagggaaaatctattatgccctgtgctatcagaaccaagtatctagtcattgagtcggaaaccaagccttttgtccactctgcctgaggaactgaattagtagccctcacccgtacattgttacctaacctcagacatctccagttcc

SEQ ID NO: 208516 - DNA, 1000 bp, Homo Sapiens
aagatgctcaaaggactaaaggaagtgtcaagaaagtcaacaaaaaaatgaatgaccaaaattgaaatattcataaaaagatataaaacctaaaaagaaaccaaaaagaaattctgaaggtgaaaagtataatcatggaaatgaaaattcactagagggattaaaaagcagatttgagcaggcagaagaaagaatcagagaacttgaagacaggacaatggaaattattgtctgaggaacacaaagaaaaaatattgaagaaaaatgaacaaagcctaagaaacctgtgggacaccataaaacagggcaacatatgcattgggggagaagagagactgaaagagtcaggagaacatttgaagaaataatagtttaaaattttccaaatctgatgaaagacatgtatataaacatctaagctcaacaaactccaggtaagatgaactcaaagaacccacaccaagatacatcaaacttttggaagacagataaaaagacagaatcttgaaagcaacaagaggaattactcatcacatacaaggaattgccacaagattatcagcagatatcaaaaactttggaggccagaaagcagtgggctgatatatattctgagtgttcaagaaaaaaaaaactaaggactctatatctagcaaaactgtccttcaaaagtgagagagggctgggtgtggtggctcactcctgtaatcccagctgaggtcaggagttcaggaccagcctggccaacatggtgaaaccccatctccactaaaaatacaaaaattagctgggtgtggtggtgcatgcctgtagtcccagttactcgggaggctgaggcaggagaatcgcttagaacacgggaggtggaggttgcagtcagcagagatcgcaccactgcactccaacctgggcaacaagagtgaaactccatcaaaaaaaaaaaaaaaacaaaaaagaaagagagagaaaataaaactttaaacaaaaaaaaaaaaaaaaa

SEQ ID NO: 208517 - DNA, 789 bp, Homo Sapiens
attttaatatattatgaactcatgtatttaaacatatttgatgttttaaaccattgcagttctctttattgatgcttaaattgtgtcatctttaacagtgagaaccaattcaaatgttggctcttggatccttttgagttgtttttcatagctgccttgttttccagtatgacaaaatgttccatgctcatattgtacatttcctgccccataggtgaaatctcccatttcttcaaggatttttagttccttttagtaggaaatgggagtgtagagatcacattctgggcattactggattggtcattgtttctgggccttttcggtaaacaaagctagattttgttgctgttttgtagctttatttaagataaagtactttaggagttcatactgatacttccaattcaagcccagaatttacttaacttcactaatcttacatgtatactgccttcttggatttttttctgatcacctcagccagaagtgatcactcttcctttgaaccacatcacccacttcaacacttttatagtaatcaacacattaacttttgatttattgttatttctatatatgtctgatattctctaccaaatggtaaggaatttgaggatagaatccatcctttgttaccctttgttaaataaagataaaattcctaaagtgctgatatatttcctgacatataaataccactttctctttgtattcctttaaaaatggaaccatattatacatgtactaaaaattaataaatgagtgttaaatgaaaaaaaaaaaaaa

SEQ ID NO: 208518 - DNA, 957 bp, Homo Sapiens; identical to SEQ ID NO: 24431

SEQ ID NO: 208519 - DNA, 483 bp, Homo Sapiens; identical to SEQ ID NO: 40844

SEQ ID NO: 208520 - DNA, 1000 bp, Homo Sapiens
tatattcaggtatggaatgcaatttttgtatagataacaaatctatattcatgaaatctgatgctgcccatcatccatctttttgcaaggtcttttcctgtgaaaggtatgttttttcttttcttttcttttttttttttttttgagacagagtctctctctgtcacctaggctgaagtgcagtggcacagtctcggctcactgcaacctctgccttccgggttcaagcgattctcctgcctcagcctcctgagtagctgggattacaggcatgcgccaccatgcctggctgattttgtatttttagtagagttggggtttctccatgttggtcaggctggtctcgaactcccaacctcaggtgatccacccacctcagcctcccaaagtggtaggattacaggtgtgagccaccgtgcccggccagtcctttacttttataggtggagaaactgagacctaagaactgaagtgacttacgtccatggcaaattgattgcagagccaaaagtggagtccagatctcctaacttccatactagaacatttttgctgtggggagtggagagagattgggttgatggtacctgcctgaagtttccatggttgctgggtggaaacagcactcttccttctgtcttggcactcaagcatcccgatggacattgaatttttccaatgattggtcatttgatgaccaggcaggggagcagaaaaggagatagtacagaccagaagctgtttgaggatgtgttgttgcctgaccagacaccttgaggccagaattctaagtagtttcaaaactcctccctttcataccccatctactgactttctgctttcttcaaaatgctctgttggccaggtgcagtggttcacgcctgcaatcccaacacttaggctgaggcgggaggattacatgggcccaggagttcaagaccagttgaggcaacataaggggctgggcccttttctctacgaaaaaaaaaaaaaaaaaaaa

SEQ ID NO: 208521 - DNA, 441 bp, Homo Sapiens
  misc_feature (130)..(130): n is a, c, g, or t
ttaagaaaggcagactgccacatgcagcacttcatttggatgtgtctggaatcttggaagcttgactaccctatgttctcctacaaatggacttgagagcttgtctggaggttccagcagggaagcgcantactcgtatacccttgaccaaagactggtcctcttctagtggagatggttgtcctctttgactgagaacacagctttgggaggcatgaacatggagtggtgagggaggaaggggacagccacttagccagccagatcagccgaatcaaccctggcgattaatggggtgacagatgtcacagccagatcgccctcacattccatgactttgttttatgtaatattcaataaccatggagggctggtgttacccccattttatagatgagaaaatcaatgcttagagtagttaggtagcttggcaggaaatca

SEQ ID NO: 208522 - DNA, 465 bp, Homo Sapiens; identical to SEQ ID NO: 40760

SEQ ID NO: 208523 - DNA, 416 bp, Homo Sapiens
taaggagaggcttctagctggaagggaagggcaaaatgaatgattagtgtttggaaacaccacaatactctgggaattgaacgttttctaaatccctgattgtaatgctgatgagtagaaactgactctgtttgtcatgtttagttttcataaatgataacaacgcctaacacaatataagtatattttctttttcaatataaaatgtctttgattcttgtattatttctttacatgaatggagggttggcctaagaagtatgctgtttcataggctcttgtataagataaatgaaaaagcaaagaaaatgaataaaatctaatactagaaaagaatgaaaaaatatgattaagccagtcatatattttgtagaaatggccatatgaggcattgtacccctacccccaaccacctg

SEQ ID NO: 208524 - DNA, 344 bp, Homo Sapiens
cttatgtcgtggggatctgggttggggtcttgtggcttactgagaatagaagatcatggggtagttcctggcaccctcccctcaaggaggctcacacaggccaggaccgccccctctggctgccccatcgctgccccccgacaggccctctgcctctcccctgtgaaccacgaagcacatcgatggggtgcctagcgccccgcctcagtcagggctcatgggggaggcccttctttaacgtctcttactgggcacacccagaggccacgtgttccagggtcagagagaccaggagaaatcccagcttcttcacccacggcataaggcgggcccacggcataagg

SEQ ID NO: 208525 - DNA, 504 bp, Homo Sapiens
tcgccacggcaggtgtactccctcatctttaatcaagggtgtgtgattataaaatatatatctggcacacaactgtactcaatagattttcaggtatttctcttccctttcccctgtatcaaaacttacaacgaaattcattgagctagattaaaaatcttactcataaccatacttaagcctatattttagaaactaaaatccactcaccttgatatactctgtggaatctggctcaaactgggcaaagcagagattgaggacatcaacatgcctgtcctggctatacatagtctaaaaccacacagcagagttagcatcacatgagaacactgaagttcagcacctgtcctgatgtcatgacaggcctgcccacccacatactggccactctgtgctcctcaagaagcataaagaaagaacacaggctttgtaattgtcacacctagattcaaattccagctaagccaattatgagagaaccctagtacaacctgccggtgg

SEQ ID NO: 208526 - DNA, 559 bp, Homo Sapiens
gcgcgtctgcgtgcacatgtgtgacaaagccttcaaacacaagtctcacctcaaggatcatgaaagaagacacagaggggaaaagccttttgtgtgtggctcctgcaccaaggcatttgccaaggcatctgatctgaaaaggcacgagaacaatatgcacagtgaaaggaagcaggttacccccagtgccatccagagcgagacagaacagttgcaggcggcagcgatggctgcggaagcagaacagcagctggagacgatagcctgtagctagaggcggtgggacagggacactttgcctggaaagtggagactgagatgacgtggatcataatgagtgaatgccagttacaatatttttgtggaaacgtatggaacattgtactcactggacttaaggcagtgcttggttagctatttttaagacttttcaaggaaatggtgttcctcagttctgaccaaaccgtttcactgtcttgtctggtgtctagtattaatgttgccagtaagcacctctctcccttttttttttaaataatttaaattggagaactcctgt

SEQ ID NO: 208527 - DNA, 567 bp, Homo Sapiens; identical to SEQ ID NO: 50226

SEQ ID NO: 208528 - DNA, 202 bp, Homo Sapiens
aaggttttttttgtttccttctccttccaaattatttttatagctagtgaaaaaggatatgctttcctgttcttccaatttccaaatgatatttaggtaagtccaaaagaagagaacattctttctacatctggtaaagacatgactgctgttaaacacagattgccagtgctctgagatggatccagatgttgaagagagc

SEQ ID NO: 208529 - DNA, 497 bp, Homo Sapiens
cttattttcctatggatcccctcagaaaaaccacacagcacacacaatgctacctaagaggcttcacagatcaaattcatcatgtatttcatacgtaagaatgttagtctaagaatggagtgacacaaaatattaggggtattgtaactgctaagaaagagtaagatgaagtgatgatgcctccactagggagaggtggccctaaggatccctgtcatccctcatgaacaaagtcattaactcaacccagctttagccaacaggtggaacactgtttaagtctatataacggcttgtctcatgggagagagaacaccggaataggttagactttcttgctatagcaagctcaaattgtgtcagacagttttgatcatctgccacagagtgttgcttgcaatattcaagtttaatgaagggggccctctttaccaaacaatgccagtaaaagaaactttgctgggtttccagcagaattttagtcattacttcatcta

SEQ ID NO: 208530 - DNA, 658 bp, Homo Sapiens
cagagtccagtgcctgtatttaatgtacacgatctcatttagtcttaaaaaaaacccctgtaaggtaatcatcgacaaccacattttacacaaggaagagattctgagaaactcgatagcatgtctcaagtcagacacttagcagcaaggcagagtccatttcattttatgggactagtctgcttcccagaataatcatcaaatgcaaaggaatttaattatctgcttaaaaaaacaagcccccattattaccacagttcacgtctgaccaattccaagatgttcttcccaaacttgatatgaacacattgacgcaattactggcgaaattgagcaagagtatgtagtagccagggctctgtgggaaagtgacagaaaactcctattggcaggatgtcatcctgcctgccagggcccctcacttacaacaattatctaaaacctagcattagaaatgagaaaccacctgtgtggtaaccctggaagcaacctgtggttgccttgggcctgtgggcctgtaggttacaggtcaaagagaagtccagactaggctcagccagctgctatgaggaatgcaaactcacctactcaagctctctgcctatgctgaaacaggctagaggtcagagttcagatcatctgggcaagataattgagg

SEQ ID NO: 208531 - DNA, 549 bp, Homo Sapiens
catcattcttgcgtctctgtgctgtgctgaggaatcaacctctctcttaagtgacgagtgcaagagagaaataggattatttgtgttttggaaaaaaaccttagttcattgtagagggcggacagcaagaagtgatgaggacctttaagaccacggtagtggaatttgagaggcaagagcagatttgagaactattaagaagacagactcatcagccctgtatacatgattgtgtaatggaacagaggaatgagggacctatgtaagataacgtggagttctggggtgggtggctaggtggctcatggtaccattcaccaagatgggaagtgcagaacaggcttggttagaaagaaaatgagttcagttttgcacttacttaatcctggcagacaagcaggtataaaatgggttgagctggaagacaggtcttggctatagcttagggagattttatcatattgcttatagctcaagcaatgggtatggatgaggtaacacaggcacgatgtaaaaatgagaaaataaaaataaaataataaaagtgat

SEQ ID NO: 208532 - DNA, 493 bp, Homo Sapiens
cacactccttatgagaatcttgcctgatgatctgaggtggaacagtttcatcctgaaaccaatcccctgccatccctcagttggtggaaaaattgtcttccatgaaactggtccctggtgccaaaaagattgggggcagctgcattataccatgacagagggatctttctaaaacataagccaatgcaagtcactctccttaaacccttcagtgacttttcactgcccttagagcccgggttcctccaaatctgtacctgtacctctgaactctttcccaccagtgttctcacagctcttgggcagcaatgacacctgctctgtagaagccttccctggctgacccatctaaaattgcctcaacccccaactttctgtctgtcataagagtcaacttcattttactcatatcacttatctccatctgatatttatttatttatgtagtctctctgtcttcccatcccctcagcttatattctgagctcaatgt

SEQ ID NO: 208533 - DNA, 532 bp, Homo Sapiens
aggctgggggtctgggttcaaatcctgactctaccacttaggagctgtgtgtacatgggcaggacaactggcctgcctgagtctcagtgtaggtgtctgtaaaatggaatgataatagcttccatctcacagattcactgtgtgggtaaaatgatagatatgaaatgctaagaacagcacctgtacgtagtatgtcctacatatcttactgttatcattagcatattttgtttattccaagatacattttttttggcccatttgatatctatgaaatctaaagattttttttcctgtcttgggagatagaataatgatgtgccttacaatggattgtgttttagattcactgaaattcattattgttgtttttatccctggtctgtaacatgatatttggtaaataacaaggactccatacgttttgcaaagagtaaattctctccctccctactgaggccttggtctaggtctctccaggcctttccttcctggagccacagtgcttagagacaggccactggggtcagca

SEQ ID NO: 208534 - DNA, 304 bp, Homo Sapiens
aatggagccagttacatgatgggcccactgacacagcagatgaatcacctttcgttgggcacaacaggaacgtatatgactgctgctgctcctatgcaagggacctacattcctcagtacacgcctgtgcctccgacagctgattctattgaaggtgttgctgctgatacctctccccagacagcggcaccttcatcccaggacaccagtggtcagcagcaacagatagcagtggacacatccaacgaacatgcacctgcatatttaccacaacacaatgaggctcctgacactgaccgggtac

SEQ ID NO: 208535 - DNA, 348 bp, Homo Sapiens
tcggtgtcaggagcctcaaaagcaattgttttcccaaatcattttaagccctccccagtcaatcttttccctctcatcaataacttacaaggaccctatttgaaaaacaacgcttattcattcctttttctataccccacacattccgttctaggaaattggcaaccacccaacacagcccgggttctccctccttgagatgtgaatttaaacaaatggattttcgtctcccttcttcaagcttagaggatgagcacgcgtttactacaacgcttaattccttctagcagcatttctcttctataacttacttgccactgcctttttttttttgatagaatcttgctc

SEQ ID NO: 208536 - DNA, 582 bp, Homo Sapiens
cataagagaaaatgatttgaaccagaaatgctgaattttttaaatgaacaaaaatcctatttttattcatattttataagacaatacaatgttgtttagaacctggagtatattaaaatgagattgaatttctaaaattataagtttgagaaacttgacaagttgaagttttagagaaataactcatttaattttcagaagttattatttttaatgcctgagttttcgtgcatatttttgaaggaagtgggaggtaaatgggacaggaagagtgttaaagtattatgttattatgattgtattataaattcaagttctaggtctcctaaaagaaagtttaaaagacagtaaattctacagataattttcagggccgaatgttaccatttggcttaataatatatagaggcactaaaaaactcacttcttcctaaacagtctttacgtaggttcttgggaaatttttaaagacattgagcaaagcaagtggatcttgtcacaacatttctcagtctaataatttcacatcttgtctatattttactaaactaaaatcaagcatttcctccttcaaattgagac

SEQ ID NO: 208537 - DNA, 1000 bp, Homo Sapiens
cggcctgcaggcagagggctgggcagggcggcgcgggccgaggggcgctgggcaggtgcagcgccgaggtgtagccccggtccaggaagagcggcttgtagctgggaggcggctgctcctgcttctccgcgctgtcgcggcgactcaggaagggcgtgacgatcttgcggtagaggccgcgcgtgtccgtgagcacctcgctatagggcggcggcggctctgccatcagcaccgcctcttcgtaacacggtggtttggacatgtccgattccgcttggcgcgggtagctccagggccgtggcggcaccgacaggtgcgtaggcggcgggtgcgggagcgcgtggtggtgcgggtgtgggtgcgcgtgcgcgtgcggctgcgcgggcccgtggtgcagcagcgggtgcacgtgcacgtgcggatgccgagtgcgcgtgagccggcgcctccaggcggctacggagatgagtgcgatgacttgcggcaggcgccaggccccgggggggctcccggaccaggactggccctcgagtacgacggggctccaggctctaggggcagcgcaggatctagctccgacgcagtacggtcctccatgacgccgatagaagcagagcacaagaacgccgtcaaaaggcggcgagcctgtacgatgagaccccgggaatgaaaccgaaaagccgacgaaagccgcggataaggacagcgcgtttggtgcccccgggaaacaatacaccacgaggcggcggacacagcacgagaggagcacctaaaaaaagccactcaaggaaaccaagtgcagcaccccgagatgagacacagggagcacaggacctactaaaaatggtagccacagcaaaactacaggccaaccagacggggagaacaccaacagacgtaacaatcacccgcccgacggaagaaactggccgacaaacacagatccggcgcggacaccccggcaagacgccaacaccaacctagtcgacgacaacaaacg

SEQ ID NO: 208538 - DNA, 621 bp, Homo Sapiens
gacgatgggttaactcttttgcaggtgtactagaacacaaacacaccactgaagaaaccagactaggaatttcagcattcattcgatgtttctgggacaggtctccttcttgaatttaagttttgagaatccaaaatctcttctgtttgcccatctgcttctacctctattttgttctgaatctcttttgcatctttactaaggcaagttcttatgctctcgtcctcctctaggactctctggactgtgatggcagcactcggagaactaacagtagtggcagcagcaggaacaatgactggagtgtgaggaggagaagctggaggagttggaggagttggaggaaaggaaggaactgtggaaggggtgatgggagctgggatacactccagtttcatttcttctgggggattttcgagaatctccaattcaagagtcaatggcaatacttcctgttttactatttccacaatgctctccgtggctgataatttttcgctaactccatttatttcattaattaggttagtactagaaaccagtggaatatcattaggtgctacactacagggtttcttgcatatatcatcatcattttcatttgttggtaaagggtctgat

SEQ ID NO: 208539 - DNA, 948 bp, Homo Sapiens; identical to SEQ ID NO: 55768

SEQ ID NO: 208540 - DNA, 1000 bp, Homo Sapiens
  misc_feature (1000)..(1000): n is a, c, g, or t
tgggagcccatggtgctgtctctgggactgtcccagacggatatctaccgctgtaaggccaaccacccccacaacgtgcagtcgcaggtggtggaggccttcatccgttggcggcagcgcttcgggaagcaggccaccttccagagcctgcacaacgggctgcgggctgtggaggtggacccctcgctgctcctgcacatgttggagtgatggtgcctccagcaaccgctggggagtgtgtccctgagtcatgtgggctgaatcctgactttcactcagagcaggtggttttttgtgtaggtttgttttttatttttgatgatcttcagatggaaggagaaaacagggtttccactagacattacttgaaaggccagattactcagcagatctcccatgttggctcaacaattctttgtttttaattgcttgaagattgcattgttgtaattgttcagtttttaaatgtgtaatggcattttaatagactagtaaatcacagtggttcaaaatatatatccatatatatatatatccatatatatatctcatgtcatcacattacagggcaggtgtctcatatgtaacacatttactgaatgttgtctgaggactgaactggtggacctttctaattcactatgataattcatcacaaggcgccatttaccgtttgcacaaaacagagaagaaacaaaaaacaaagaggggcgggcccaaagaccccccagaggagcagccatatcggagacacgcgttcgtgacaaaggggggcccaaagggagggcgcataataagcaggagagggcgcggcgtataacaagcggggtgggaacacacgcgtggcctctctagaggacacaccattgggggaggatagggcagcaccacgagtatcgcggcaacaaaacacgtcgggtgacagtcggtgatgttgagatactacgaagagccaagacgaggagcagctagccagcagcaagcaggctcgactgcacgn

SEQ ID NO: 208541 - DNA, 854 bp, Homo Sapiens
caggtctcgggaccacaaaaggtcacgaagtagagaaagaaggcggagcagaagtagagatcgacgaagaagcagaagccatgatcgatcagaaagaaaacacagatctcgaagtcgggatcgaagaacgatcaaaaagccgggatcgaaagtcatataagcacaggagcaaaagtcgggacagagaacaagatagaaaatccaaggagaaagaaaagaggggatctgatgataaaaaaagtagtgtgaagtccggtagtcgagaaaagcagagtgaagacacaaacactgaatcgaaggaaagtgatactaagaatgaggtcaatgggaccagtgaagacattaaatctgaaggtgacactcagtccaattaaaactgatctgataagacctcagatcagacagaggactactgttcgaagatttttggaagaatactgagaacggcataaagtgaagatcgacatttaaaaaatgaggtgaaagaaagctatagtggcatagaaaaagtataaagctcagttagtttttttattattattattattaaaagttaattcaggactgatgtgacctaccagatttcagaacatgtgttaatagtatatatgccactgaaaacttaggtcctgtatcatacttttttctttaagactttttaagaaatattacttaaacatgtggcttgctcagtgtttaattgcaagttttcaatcttggactttgaaaccggattaacgttagtaaacgcgtggaatcagactagtgggcattccatttttacactcctggtctaattaccctggctttgaattacataagattcccggacttcggtgacaacacaaaccagg

SEQ ID NO: 208542 - DNA, 620 bp, Homo Sapiens
gatttacgcactggaggagggaattagccctgagatgtcagccctgtgcccctggcgctgtccacccggacgcccgcggagcgccaggcgccgcagcggaccgcgcgcgcactgattgccgcagctactctccctgccgtcgccgcccgggaccgggtgacattgaggttttcgtctatcgccgctgggccgatagggcttctttttaagatttggctttccaagtaagattttgtttgcctgcttttctcctggaatttttttgttttggtcgaagaagcaggtaacttgcatatcttaaggaaaacattgtttttgctttgcttttgttgtttaaagatcctaaaacgtaccgtgattcctttacgttactaataattggaaagtgtgttaaatcaagggttcgcttaatgttctttagcctttgtacatagaatatataaatgtcgtgagtcatctttacgaggtttatgagtttgtgttcgggtttggctttttgttgtgtgtgcgtggtttttttttcttttcttgtaacaccgttaggcgtttcattaaggtgtatacaaagtaattttatacacctattaaaaattcccgctgctcgcgaaacaaacaaacaa

SEQ ID NO: 208543 - DNA, 624 bp, Homo Sapiens; identical to SEQ ID NO: 45968

SEQ ID NO: 208544 - DNA, 447 bp, Homo Sapiens; identical to SEQ ID NO: 45219

SEQ ID NO: 208545 - DNA, 776 bp, Homo Sapiens
cccgcaagaaagtgaatctcactactacctactcccctaaaactacctattttgtgctggctggcttgcctgctacctagtgccgactgctcccaggcaagtcccctgctgcttacagcccgcagcttttggggtccctgaggctgccctgagaatgtgctgaggtccaggatcagggtattggcatctatttaaatcgaaaaataatatatttattccaaaaagcatcctaagtgcttgcaccctagaatcaatccctccttctctggcttggcacccacagctcaggcccatcaacccccacttctggaggggaatgttcctgagctggctgcagatctgtgggttagcttctgcttagcaggactgtggagatgcttccagcttcgctgtcctttcctctggctcctgtatcttactgttcagctgtgttaaatatgtacgccctgatgtttcctataatagcagatactgtatatttgaacaagatttttttttatcatttctatagtcttggagttcatttgtaaggcagtgtcttgacttggaaaggatgtgttaatggggtgactttgtagcatggtatgtcgtcttgagttaactgtagtgggtgggcgaggtccaatgccctccgcaatgcccttcatctcctgtgttgtcctgttacctgctcagctccatcctgggggttcagggaaggcacacttcccagcccagctgtgttttatgtaaccgaaaattaagatgcgtggggaccaacacaagcaaaaagaggg

SEQ ID NO: 208546 - DNA, 928 bp, Homo Sapiens
ggaaagacttctcgacgccgagacactgctggtggtactcgatgtagcacatcttggtttggacagaccacatagtggccagtggctgccatattggacagcactggtgtaagagggtccatctctcactcccacatcaatgtccaatggtttctcattcaactggaaagtgaaattggaaatcttgtgaaagatgaagaattatgaatgtggtacgttgaactgctgggcccacccacaagacatcaacaaatgaaggtgtggaagggttaaaccagttaacgttgaacaaaggacaatggatatgatgagttacaagctgagttgtatccctccacaattcacatgttgaagtcctaacctttagtacttcagggtgtaacttatttggaaactagatcattatagaagttaaaacgaggtcataagggtgggccctaatcttactaacctgtccctataaaagggaaatttgaacacagtgacacccagagggaagatgatgtgaagacagagagagaagacagccatcagcaagccaaggagagaagtctggaatggatcctcccctcacagccctcagaaggaaccaagccagccagctctcaatctcacacttttaggcctccagatctgtgagacaataagtttatgttgtttaagcctccagtctgtggtactttgtatgtagcccagcaactaaaacatggttggctgctggcattagacaagttgccatgaaagttccggcagctatggacattgaagaatctctacttctgcctgccgtgctctgtgcaaacacaaagaaaaaaaaccccgggttttcgggcgaaaagataaaggcagctatttccgaccttttaaggaacggcctagggtatccgcaagaaaaaaaaaaagaacaagcgacagaaaacacactctc

SEQ ID NO: 208547 - DNA, 1000 bp, Homo Sapiens
gaccagaccagcctgggcaacatagggaaaccctgtctctatatacagtagttcgcctggagccacagctacctgggaggctgagtttgggaggagtggggaatccacgttctccttgtcagcctcagggctcagctggatcagaggggagctcaggtctatgagctgtcccaccaccggtgaaggtttggccacatttttattcatgtctggagtgtttgtcatgaggtcgatcagaggcctgctttcagatcctacagccacgtgtgcttctggggtatcgcagaagtcgatgagaggaaggtcaatgaggggctggcttgcagcatctggagtgaccgcgagtggttccagtttgatatctacaagaagagcctcactaggggctgcatctccacccggcttggcttcctcccgagctacttctgtggcagtacttttggagaacagtagaatcgctttcctctggagaaaagttaagtgcctgaggcacacgggaaggaggagaacccctgtcagggagacacatccaccagcctggcaatctgtctatctgtgtgctctccccttgtaggttcagtactcattgcagagtacttgcggggctcagaggaccgtctccgaacttggacaacccagggagaagccacgacctgggaatcgaacgggggccatcggggaacgcagaacaccgcgtgggaatcatgatgaggtccgcgtatccagaccggtggacacacaggtgggagacccacggaaagcccacggagttaaactgtgctcaaagtgccccctatcccttgtggtgtgcacccccaggagggttccaaccggcggccttcaacccgccaggctgtgaacaacagaaaacgacatgacaccccgagggcccaagattcacagtgttgtagatggcccccgagcataccaccattcaaaggcaacactgctatgagagaaccacgaaaagggcggcaccacggctggagaacaacagcga

SEQ ID NO: 208548 - DNA, 913 bp, Homo Sapiens
ataggagcacgtgagctaaagttttgcctaattctgaagagtgaaatcagcttgatttttaaatctttctcagctatgtgaaaatactcagtgaaaccacaaagtaccagagttggttgcaatggaatttttctttggaagagatcttgcaaggaacttttgcattctttcataacttccaagtccaagaggagacaagagaagaaattcttaaaatatgagttaaggaaaaagcttcagagaaggaagaacgcagctcagacacagaagggtggcggtggaccccgtgacacggacacacccgccttctgggggtcttcaacatgctgttccacaagttggcctcttgtacattcttctgcagaaataaagcctcttcgctgttaaggtcttcatttcaaagatgaaagatctcaagagaatacagatttgctgctattagcctattaaaggcattctggctatgtagcagctatctgtcagggggtcctgatggctactgtgttctgaaaccatcgagacagaatagcaggatgggaagaatgtagtcacaaacaatccaccagatgacaacactacacagtgcagaggtcagcacagctaggggacatgtgagaggaatagcgtttgttttggattgtcttctgcttttcaagggcccgaaggtctatccacctttggtggtcactcccatttgattttcgtcctcatcactgtacgggttccgggttccttggctgaatccttggatactccgacccccttttcttggaaattgtcctccacggccggagaacgaagttttgggagaaggcggcccccgtggttgtccattctcccggccccctttctttcgacgaaaaatgtccccctcccgcccaggtggttggctcctccccacacgccgctcggc

SEQ ID NO: 208549 - DNA, 975 bp, Homo Sapiens
ggataaacgcttgaggggagggataccccattccccatgatgtgcttatttcacattgcatgcctgtatcaaaacatctcatggaccccactatactatgtacccacaacacatacgatgtacccacaacacatactatgtacccacaacatttttaaacaatctaatacaatttttttaaatggcacttactttattgttaccttcaactattgtaaaatatgttactattatttatgattagccctgtttgaaaacaaattttaaaaacactatttaaacaccataataaatggactaagagtaacttgcataacaaatgacagaaattgctgctacttcttctaagttagttgagatggtacttctgtatattgtgaatgatctgagtagacgaattgaattgtttccacacattattttgtcatagagttaaacactgttcatattgctacttctttagaaagtagccttctacacaatattaccaacctattttaacagtcctacttgccgaaatattaaactattctttaaaaaaagtaatttatttaactacctaacttcctcaagcaatgtcctaaattttctcaagcaattatctgattttctcaagcaattgatattatcaagttgcgctagttacactgctgagaatcatttgtctacataatgagataacatcaatctgtccaatcccttaaaacgacctctattgaagcccattagataaattgtacgtcccaatctggtatggaatcggactatttaaacatatggcgtaaataaatcaagaaccagatgattgtccgtgtaagccctatttatacagcgtcgacatgaattgatgcttcaatcagcgtaaacttataggagatgatgcatttcccataaaaagccactaaattaattccgaatgtactgaagtatagttgttgaggaaatcgccacaatatgcacgagggttgcgaataa

SEQ ID NO: 208550 - DNA, 751 bp, Homo Sapiens
ctatggacctacggtgtactgatggcagaatttcctccgtatatcaccctgccaaatcactgcgtctgtggtttatttttttctagcttttcttattatggggcggccaccccatttttaagagttattgctctccacacaatcaagtattttccttttgttgcctgagttaaatagcgatctgataatctgtaatttattgagaattgcaagccagcactttgcccatgtctgcccatgcttttgaggacagggaaactagatccagagagggcaagctacttgcctgagcaaacatagctcgcagggggcagacacaggatttgaaccagctctcaagcccccagctgtgctgcccagcctccgtggcagggcaggcggccggctgtcgggagggcctcgagaccttgagtggagtggcttccgggctgtttattgttcctgtggctcatggtacaaccatcaacttgatgtttgaagggtgagggtgggggcactttgaaagagtggaggaaagcatccagaggggtctgccttttaacagacgcgatagaaaccagagggcagccaggtggctgaaagggtggtgggtggccagcaagccagccaggtgttcggtgccaccctcagatgacattgtatataggacacagactcagcagtgaggcctggagctgtctgtgggagagctggtggacctggcaatgcgtccccttctgcgggcatctgcggaatctcttctgtggctggg

SEQ ID NO: 208551 - DNA, 942 bp, Homo Sapiens
atgaggaatttgtgaaattgggaattgtgtgccatgtcttatggccacctctctcaagagatacagtgttcaatgaagaagctgtaaatggccttgtgggtgcctctcttgcccagtagtcacatctttgaggcaggcacaggtaacaaagtgatgctgatgtgaatggaccaatctttcaagacacttgatgatttcataatcaggaagagcaaggctggtcacgttcaagcctagcatctgcgacaccacctccctgaagtctgccagctgcttttctctcttttctgcttcttccagagatttttttagtgtcttcatttcactggttaccacttctatcatgtttctggccctttctttattctccttagcctcatgttctgtggtatccagttctgacttgacagacatgagctttttctcagctttctccttcatcttctccagttggtctctggatttgtttagatcttcaatggctttagtctgttccaaagttttaatcttcagttcattggtgtcggccagtttggctttgagctcggtgtgcaagtctcgacacgtgttcagctctttctgcagcctctccaccttcttctgcaagttcctgatggtaagatgcgcgttgtccctctcaaccacccaggcgtgcgtgcctgcttctcctcctccggctgggctattttctgcccggaggaggctctgtgttaattcttgctctcccagtctccctctctgtgtctcttgcctttctcctgccattgtggccatcgtctcgtctcaatgacctgcttggccccagaagaacagtgctctgtttgaggtaaccgtcacccttttaagcagattgggccctgtccctcctttgaacgcaccgaattaatgtggtccacaatacagttccgaacccgaactcttccgggttagacccagtcactt

SEQ ID NO: 208552 - DNA, 535 bp, Homo Sapiens
  misc_feature (517)..(517): n is a, c, g, or t
tttacatgacaaatgtactttattacatggatcagaaataccacatgtactaacagttgctgtacaatgatacacaacacccaactaagactatttaaaggttttgctgatattgaaaactataaagacacaatgtgagagtaagaaagtgtttcataagatagcataatgccaagacaattcatcgctttaggatattaaatacattccgcatattaaaaacttaatgtattataaagctatgccattctttaaatgaaaacttgaaggactttactccattcatttttctttacaggactattgcagtaccattcattgtttaaagcagatgtttataacatttttccatactttaaagtggaacttaatggaacgaataccagacctaacattaacaaaattaaagagatttcatattttatttccaccaaaaagatacttaagtctacagttatgtagtaccaaaaaactatgtagagcaaaacaagcatgatacatttcaaacatgacaatntattacgaggcatttttt

SEQ ID NO: 208553 - DNA, 525 bp, Homo Sapiens; identical to SEQ ID NO: 47972

SEQ ID NO: 208554 - DNA, 463 bp, Homo Sapiens
ttttttttttcaaaaaaatgttggttgcaacctattgaattgatttcgtgacacactagttcataaccctcagtttgaacaacttctgacattaaaccgcctgccaaggttttgggaaaataggaaggagacagataattaagtttgggagatgcatagtctaaggccagggttctcaatgttggcagtgcaagatcacgtgaggtacgactgaacacggagatctccaaaactgcggagagttttgcgtgtgaacgtatgcacagacatctacatggaaatggctgtaacgcatccagccataaggcgtacgagggtatatatacttacagagttaaaaaccactattctcaggagttatatgacagcctgggaagacgcccaggatgtaggaacagggagcaggcgagcgtgtggcaccttgagggtgctccgcgcgtctccgtaaagccaacgagcccct

SEQ ID NO: 208555 - DNA, 557 bp, Homo Sapiens
  misc_feature (509)..(509): n is a, c, g, or t
  misc_feature (541)..(541): n is a, c, g, or t
catcctttctttcctttcttaaaagacaaaacaaaacaaaaaaaattcctctgagtacaaatctaggcaataaaccgttcacctgggatcagttcagatgagacagtaaacagataatccaaaagacaaaaaattataagaattaatacctgcaaagaggattttccctggaaattcttttcttggtgtttccttctacaatataattttaattctgctttgtaattccagtgaaaatgtcttctattgtagttcctgctacattgctatgcttactttatctgacattggctctcatctggggttctgaaaagaagctcctctagctatttcaacttattgtccctaacatttaaaacataaagataggttgaggttgaagtcttgcttttgcttcactctaaggagctaaaagaccttacatatctttttcttctgagaataaaccaccatcctcatattgactagctaaactggtggttctcaatcaagggcaaatttgccacccncagggaacatttggtgatgtctagagacattntgcgttatcacagctg

SEQ ID NO: 208556 - DNA, 537 bp, Homo Sapiens
ctctatttcacacaaatctaatcacgtattccccagctcagaaagccctaagggctccacactatctggcaagttaaattctaactcttggctcatcattcaaggctctccataatatggccccagcctgtccttttctgccatatttcttgccacatcccccttctcccagcccggcacctttctggtgaatcgtcacagcatgacttgccatgtctgactttggcatatccttcaatgcctctgcttttgctattttacttgatatactcttccccacttattcaagccatttttcttcattttgcatgtcatccccaatcccttcgaacaaaattaaattcatcctccatgttccctcagtcctttctttgtgtgacagcaaatttcacacacttgaatcatggatgtctgtctaattcatggtaaggtctatgagtgcaagagtacattatagtcacctctgtggtcagctgaacagtggccctcagagagatacatgtcctaatccctggatatatgttaccttatatcaca

SEQ ID NO: 208557 - DNA, 513 bp, Homo Sapiens; identical to SEQ ID NO: 60263
  misc_feature (272)..(272): n is a, c, g, or t

SEQ ID NO: 208558 - DNA, 553 bp, Homo Sapiens
attactgggaggggaaaagcattctccctccccatacctgtctaccacgcagaggctagacttaaacgtttttcttaatttcttatgatctccttagaaatttagtggctaaatcatgaattacatgttaggaatgagacagcctggcaagctcaatttgactattctcatagctagaaggaaatcatttcttctgtgctttaaatttagttgccaccttttatcctgtccccattttcattacctcctctcaaccaaattagaggaggactgaggtaaagaactcttattttcagaaagtctattccacttaatgggctttcaaggaatatcttactctatgacacaaataaggcagactagagagcagttataaggttacttctttgttatatgaattctaagcaaggtgtttattccatgagagggtatctttatctcttgtgagcagacagaacagcattagtgttcagctgattactttgtaatagctgacagactgttttatctgttgtcaaattagtcttaactacactaaacattctttctgtaa

SEQ ID NO: 208559 - DNA, 612 bp, Homo Sapiens; identical to SEQ ID NO: 60005

SEQ ID NO: 208560 - DNA, 472 bp, Homo Sapiens
gagacagagtctcactctgttgcaaggctggagtgcagtgatgtggtctccgctcactgcaacctccgcctcccgggttcaagcttttaaatacatgtatgtaaaaacaagattgtactgggtctcaaatcctaactgttgttttaacatgttttgcttcaaatcataaactctctttagaattctctagtaagtcatacggaaagggactccaacaaacccaagaaaatatgtaagaaaccagccaaactgattaaattaagctccgaaaatttatttattttgcttaatatccacgatctattcaagccacaaaagaagtcctttaaagaggaaaaagtcgatgctacatgtgttcaccttctctttgccacctccaccacacaaaagagaaggaaggaagtattaaaatggaaaattatattttgatgtttatgattggatgtgctacgaacattttatctggattcag

SEQ ID NO: 208561 - DNA, 463 bp, Homo Sapiens
tttttcccatttcctagagctggaataaaatatccatgttttatgggacttgagcttggctttgtcccttggttttgttaatgttaattcctcttaaatatctaaaaacatctctacctatttgagagggccatatgctacacaggcttcctaatactgcttagcaatccttctactggttcctaagtggtttactattgtgttccctggaagaggtattacaaacgttttattcttctcaagcctcttagaactgtcaaagttgactgtgcctcctatttcatagagaaaaaactaaattattagatatgaccattcccaaaacttcttcccatctaccttcaagacttacctcttttcagccatgcatcccccttttctaagacatgcttctctgtgtgttcttgacctcattccttcccatctaagaccatattccaccctgtttaatttctagtcttcg

SEQ ID NO: 208562 - DNA, 520 bp, Homo Sapiens
  misc_feature (498)..(498): n is a, c, g, or t
gagatcacagaaaacagatttttatttgctaaggcaaaaagcattagcaataagggaagtcactacataacaagaagagttcaactcaccaggacaacacaagaattccacactttattcactcaatagaatgtataaagttaaaactgataaaagaggggaaattgtcaaatctaccattacagtaggagaattcaaaatacctttatcaattattaataggtcagacaaaagttagtaaagatatgaaagatttgaacaacacaattaacaagcagtgccacatatgtagaaaacaatcagaggccaggtgccttggcttacgcctgtaatcccaacacttcgggaggccaaggccggaggatcatttaagcccaggagttccagaccagctcgggcaacatacccagctactcaggaggctgaggtgggaggaccgcctaagcccaggatgttgaggctgcagtgagccaagatcatgccatcgtacatgcctangggacacagtgagaccagtttc

SEQ ID NO: 208563 - DNA, 585 bp, Homo Sapiens
tttgagatggagtctcgctctgtcacccaggctggagtgcagtggtgcgatctcagctcactgcaacctccacctcccggattcaagcaattctcctgcctcagcctcccgagtagctgggattacaggcgcgtgccaccacgcccagctaatttttgtatttttagtagagacggggtttcgccatgttggccaggctggtctcgaactcctgacctcgtgatccgcctgcctcggcctcccaaagtgctgggattacaggcgtgagccaccgcgcccggcccaaagacgtgcttacctttcttgacgaacttgagcgtcaccaccctctcaggtccccgctgtgatgcttttaccatggccctccctgtgttttgcatggattgggcttgcacgtgtctctctccccacttagcatctactgagtaccccaaggcagaggcacagctggtggagattcctggggtggagtagtgccacttgctgatggaaagggcctcacttcatcaggatcttacaacgcagcaagttctgaccaggggtggctgcctggtattggctggaaaaagaccgggccaagacaaa

SEQ ID NO: 208564 - DNA, 675 bp, Homo Sapiens
ttttactaaaacagaaagactttcaggaaaatgtcatttaatgatttcagctatacattacatatacaactctgtagcctagcaacaatcattgctacaccatcattaactttaaatattttgcttggtgagctattctcaaatgtagcacattttaagattttgccatcattatgactgtggaatcattgtttggttttcataggaaacagatctgtcacagtatgaagctttgtttattttaagaaactggtacacaattacatttccacttacaagagaacgccacagatataactaaaggcaggcttcgatggctccacaaaggttgcgtgcgggaccaaccccacacctcctgcttccccgtcgcaccgccctggccaggttcacatggtttcatttccagagatgctttgctcttcgcagttaggtagttttaattccttcaaaggcacacaacttccatcttttttccagcgtggctcccacacccgtgaattcctgtttgaacatgcgtggcagcctcatcaaaagcatttctatttcatttgcagatatcttggagtccagctgctgcatgtatgaccaaagatattctatgttggctccaaaaggattgacgtgaagaaacgttgatatgatacctattagcagagcttctttctctgattttaa

SEQ ID NO: 208565 - DNA, 565 bp, Homo Sapiens; identical to SEQ ID NO: 61316

SEQ ID NO: 208566 - DNA, 606 bp, Homo Sapiens
gtcggtacctgatacatctatgtagtcaaatatttgtctgcaatagcaacctgttttgcctttttctttctttcttttttttactgagatggagtctcgctctgtcacccaggctggagtgcagtggcacgatctcagctcactgcaacctccacctcctgggttcaagcgattctcatgcctcagcttcccaagtagctgggattacaagcatacgccaccatgcccagctaatttttgtatttttagtagagagggtttcaccacttggccaggctggtctcgaactcccgacctcaggtgatccgcctgcctccgcctcccaaagtgctggaattataggcatgagccaccgcgcctggccatcatcctaaattcctttctatacctcactccctacatgtattccatcaaacagtctcattggctttccctccaaaatactaatatatcatgaatctgaaaacttaagttgctttcttgccaccagccacaccagacttctcatctggattactgcattcgtgtcctgaccattcttacttcctccactcttgcccaatatagtctttctcctagatgttcgggggatctctgagtgactgc

SEQ ID NO: 208567 - DNA, 606 bp, Homo Sapiens
cctcgccagtgggtccgctcacgtacgtcctgtttcttgctccctgtctcagcctgttatctggcttatccatcagtttctgaaccaacatcaggcgcacctgccatgatgagtgtgaagaaatcatttctctatgcaagactggcatcctgggactgcacgatgaactattggagcatatagtactgcggtgtgtctcctcccatacaaagggacacatccttattttgagggtatactcacccgatcattgatttgcatccccatggcatttgcttcatttatttattgcttttgcccatgcattcaatattgatcagctcagcacttccatgggccatagccggtatgcccccagcctgccataagcgtgctttcattttcaagtagcatatgcaagagtccaaacaggctacccaatgttactacttatttttcctctcaggtcttatcagatacggctgtggagaggatgaggcatatgcgttgtcagttggaatccctccaaatggattgcaagagaaatactaaattgattctaaatctgttccattatcttctctgtaggatgcaaaacatccagttgtaatgtataagcatgcactt

SEQ ID NO: 208568 - DNA, 534 bp, Homo Sapiens
tccattaagacagtgaagtaagaggaaacagtttatgctaaaaaaatttttagaaaagtccttgagaatttttgatttagcccttgacctcatgaagctggtagttatgatgtgcatagtttgtatcaccgtttatgaagatggagaatctagtcagcacgtgttggtttattctaggaatttttagggaacacttctgttgctggcaccaggtgatgaatatggttaaaaaaagactcgtttctgcctaaacatagggaagaagagcaaattaaaaggagtaattaaaactgataaaagctcaagttacctttgtgatgatgaggcgggcagttaacgcgaaagggttgggaaaggcttcctggagggactagggggcggtctaagcacagggaacctaaccggggactccagtgtggcacagcggcaaggtatgtgctgggcaaaatgataggtgtcttgggagaccaggcaaagagagctggattaggagccgttaagtatatatttttcttctttttaaatcaaataatg

SEQ ID NO: 208569 - DNA, 486 bp, Homo Sapiens; identical to SEQ ID NO: 61997

SEQ ID NO: 208570 - DNA, 587 bp, Homo Sapiens; identical to SEQ ID NO: 50450

SEQ ID NO: 208571 - DNA, 550 bp, Homo Sapiens; identical to SEQ ID NO: 40063

SEQ ID NO: 208572 - DNA, 528 bp, Homo Sapiens; identical to SEQ ID NO: 50199

SEQ ID NO: 208573 - DNA, 389 bp, Homo Sapiens
aatacggccagagtcaaacagtgcccattactaacaattgcaaaaataatactgaggagcactactttgcattgtttgtagttggagttttggatactgatcataaatcatgaatctggcgtattaatgcttaacttcagcgcctttgggttgtgtgtatgtgtattttttctccccccaccccgccctttttttttaagaataaggacaagtgcttacaatctgctcaagcaattgtttttcagatattggaattcagcaaagagtgacctctctggccattctaaaactttaatgttgtgtcctaaatctggtggaggaaaagcatgcgctgttgaaccaagctgctcactgtacacatatttgtgtccccaggagattatttgtca

SEQ ID NO: 208574 - DNA, 452 bp, Homo Sapiens
tacttttcacaggggattgtgctactgcactgatccagcctgagcaacatagcaagactgtctcaaaaaaagaaaaaaaaaaattttcccatggctggttttcccattttctttttgaccttcccacctaccagtcttggttcccccatccttgaccctcttctccatgtggataccgttgatacatttttaggtttgaatatcacctcccttttagaatgttccatacctttaagcatttgataaaagctatggtggtttccccagaaaaatgttcaacaggaagttttgcctacattttgggattcacagacctcagttcctatggcagtgttcatatacgtaagttcagctgttacgtgtttacaactcaaatccaatggctaccagttttcccactggacctctctggatttagcaatctctaaaatggtattcacttgattcttaat

SEQ ID NO: 208575 - DNA, 502 bp, Homo Sapiens
tacttccagggaaactcagttttattattaaggcctttcaactgatggatgacacctacccagattatcaaagatacctcctttaattagacttatctgactatagatgcttacccaactacagaatactttcacagcaacatttagattcatgtttaattggaaactgggtacgatagcctagccaaatttacacataaaaccagtcatcacagtgctccagagagagagagacaaagagaggagaaatttacttatcatcttgagatctaaatgaacagtaagagagacagagtaaaaaagagaaagaaacctatcatgttaatatcttaaaaaaaaaaaaatagaggaaaaaaatctttaagaacacttaaccatgttggttattacatgtttttggagaccagattttatgccatctgtgttaacccccccaaataagtctacatcaagtatctggttaaaagtgctcacagcagaatttactgaggatttaatggaa

SEQ ID NO: 208576 - DNA, 583 bp, Homo Sapiens; identical to SEQ ID NO: 55917

SEQ ID NO: 208577 - DNA, 977 bp, Homo Sapiens
gcagaccagccctggaggcacttctaaacagtctgctcaggaaatgttttctgtttcctattcaaattgctgttttgtctcctatgtttaatcatgtatttgctattctgcttatttttctcatttggtggtaatttcaagaagagcgtttatccactattgattttcaagaaagaaaccaagcagcattgaaatcatgagtaacagaattcagaacattgtatggtggaagtcatttgtgtctgcagctgttttttcactttacaataaataagagtaaaaattgagatcatgtcaaaaaattattgcagttttaatcattatggcatagtttcacttcccctccccccattagaatcagtggagatttgttcttactagggaattttggactgctgccatttaaaacttaggtttttatttaaagcagttgtgcatttttgagaaaatgtattgggagtaactagagaggatctcccaaattttttgtatgtctctctaggagtaaacatggcaacagtttttctagaacgtggactcactgcagggactggacccaatggcattgttaagaccctaaaatctagccaccacctgcctcccccaggttttcacacaccagttggaaggtctttccctggccttgtccctgttcacacccatggaggttaagctacagagcccggggaaaccaggagattttgaggtacatggccggccccacaaaatagtggcttctgaaatctccgtagggtagcctacctcatggagggtgtgtgccaggaccctggacagggactggccaacgtaggggcccgagaacagaagatgccaacaggcaaatgaggagaatgagagagcgacggctagacgcaaactggcaggcaaagaggatggcgctaccacaaacaacaagacggaggggaggaaacacggcatatagaaaggcagcgcgcgccagtcacagcgagtaacct

SEQ ID NO: 208578 - DNA, 1000 bp, Homo Sapiens
gtcaaatggaaggaactcaaatgagtattgcccaatcagagcccattattggtaagtcatcagtaaccttaaaactccacttagacctaattattgaaaacttgcatataatgaagtgaaagaatttccattcatcaacctctcaatcccaggttttcaaagaaaaacctatctaaggaatacttaccaaaatcagataagaaaatttaaacctgcatagttatcagattggtcccactacaaccagtctgcatacagttacacatcaattcgttctgtatacactctagaactgaacagaacaaagtttagcataggaacagctgtacgaacaccaggttcctaattacggaaggctggcaaaggttcacacacgggttctcgaccacacaccctacatggtcaacaatcgaacacgtacccttcagcttccacacaaacataggaaacatccctggtacaacgttcaatatccacgttctcacagagatacgattcaaacagctgtgcttaagaacatggagaaatccaaattcaaaacataaagtacagagaccccttccgcacacaggcataaaagcgacgcaaaacacacaacgccaaagacaacaccacacgaccactgcgagaccacagcaacacaagtcacaacgaggatacaacgacccgacgcatgacctctggcgcgtctctcaacaacgaaaccataggcgacagcggacaccaacaaacgagcagaaactccaccagctgaaacgcagccatgcagagcaaacacagagcaaccacgcatcatcatacaaaaagccagagccaccacggaacccatacacgaaacagtaacaacaagcagcacaacaacaccgccgtccgacacacacgtcgatcaaatacagacaccgatagcaaaacatagcaacaacgagagcgaatcgaaagcctcaacgcctcaaccccctagtcagtcccacgccacatatacgtcctgccgcactccatc

SEQ ID NO: 208579 - DNA, 942 bp, Homo Sapiens; identical to SEQ ID NO: 53923

SEQ ID NO: 208580 - DNA, 931 bp, Homo Sapiens
  misc_feature (668)..(668): n is a, c, g, or t
  misc_feature (915)..(915): n is a, c, g, or t
gagaagctcaaggcgctacacgtcgactcagccgagtacagctgcctcaaagccatcgtgctgttcacgtcagacgcctgtggcctgtcggatgcggcccacatcgagagcctgcaggagaagtcgcagtgcgcactggaggagtacgtgaggagccagtaccccaaccagcccagccgttttggcaaactgctgctgcgactgccctcgctgcgcaccgtgtcctcctccgtcatcgagcagctcttcttcgtccgtttggtaggtaaaacccccatcgaaactctcatccgcgatatgttactgtctgggagcagcttcaactggccttacatgtccatccagtgctcctagaccttgggcgcttcccacctgccccgtccccctagagactcagaggacccacctgggccaaggactccaaagccgcggggacaccgggaagtgcagcgggccaggcaggctgggtgggagggaggagggccgagacaggagcagcccacccagcagaaatacaatccgagctacaaagcatgggaaaaagagactcttttaggatcagatctgtgagcacgttggcgaggaaaaacaaaacatacaaaaaaaaagaaccttgtgtctgtctggtgaaaaaaagaaaacaattggaagagagggccatgagaatnttataaccagagaaactatggcttcggattatgtgacggcggtggctttttcgtcggacaccctttggagtggcgagccttgttaacccccccggctggttcctcggcacctcgcttttccttcgggactactcctgcctgaaaggagcgttgggggcgcctcccgattaagcgcggggtatattggggtttgccccccgcgcgtaaagtgacccttaggagggggcggcaaaaaaagggggcccgncatggtgttgtgtgcg

SEQ ID NO: 208581 - DNA, 705 bp, Homo Sapiens
ggaagggtaagtcttcagagacacttgacggagtcctcagagacacttgacaaacttgggaaaggaaagaagagtaggaacaactgggcatgctcagtgataccctgagcaaccacattacttcgctagatcctgccctttttctcaacaaaaagtagttcaagaattatttcctgagttgatcaaaaagacttattgtcatatggttaattatgtgttgagcatgtctttttattatttttgtaacagacaaaaaaaattaccatataatttaagaaaagaaggtactttccatatctcctgagttggagatacttctgaaaggagcagaagagatgggagaaatgtacaattctactttattcctgaagtcctggttttaccagataaaatgaagtgagatgaaaattaaactttcttgtctgattttttttttctaccaagttatagactttaaatttgggcaggataaaaataaaatgtgagacagatttacttttggggctcacataacttcaaataaggcgacttaaaaatggtttggagcattagtattttgactgtagaacaaaatttattcatttaatattaactgtttatgtgtctagcgtttccttgggtctgtggtctctgctttctggtaccttatttgtctagtaccttatttgtgcgaaacaaacccaatctattcccatggtccccgaa

SEQ ID NO: 208582 - DNA, 913 bp, Homo Sapiens; identical to SEQ ID NO: 41932

SEQ ID NO: 208583 - DNA, 467 bp, Homo Sapiens
tcgagctcggtacctatctgtgtcggggttgggacaggagaaggatgagataggactagcagctgatgaaaaggaagggtggacatattcatcgtaggggtttcaggaactccattatctcacactcagcccctttgtcatctctgggatcaacacagtgttatcatcgatcagcccccagattcacttcagtgaatctgtaaagaacaagcatgtcctcctcatcccacgaattctgctgcttagaaagccacctgaaagtgatagcccttaaagtcctcagtctgcccctttagagcaccacagaaagatccctgaatggagatcctgacccttaagtatggaactgctgggaagagctatttggagattatcattacatggagggttagtaacatcactttctcttccctttatcctcatttttttcccttaaaaaaaaacacacacacccacacaaccccgaa

SEQ ID NO: 208584 - DNA, 429 bp, Homo Sapiens
gcatacactacaattacagtcatttgtgaagtaactaagataaaagtttttcttcacactagactggccccatggggttttaatcactaagaacacatggaaacattaaaaatgtaacctcaactaaatatgtcatcatcactcttctaatctaactggtgttcttttccaaaactgaagctttgaatcttcaatgaatttttttattatccactgacatttgaatgctacacataaaacaaaacctaagatatttgctgtcatttacagcaaaagaagagactatatctaagacatagttcaatctggacaattattctggcatgatcaaaataccagtaagattttcagatgcctaaaagattccaagtattttatacctttagactaacactttatgtattatatgaatgttttgctttggagcca

SEQ ID NO: 208585 - DNA, 315 bp, Homo Sapiens; identical to SEQ ID NO: 50126

SEQ ID NO: 208586 - DNA, 477 bp, Homo Sapiens; identical to SEQ ID NO: 50099

SEQ ID NO: 208587 - DNA, 616 bp, Homo Sapiens
cctggctctgaacttaggcctggctctgaacttaggctcaagtggtcctcccacctcagtctcctggaaagctaagactacaggcacgcaccaccacgtccagttagcgtgtatgtatgtatgtacgtacgtgtgtgtgtgtgtatgtgtatatatgtaactcctcctcccctcccccctccccttctcttcttttctttctagatggggtttcgccacgttgcccaggacggttctgaactcctggggccaagcgatctgccttcctcggcctcccaaagtgctgggattgcaggtgcgagccactgctcctggcccataagtctttcagtgtagaagagggaagcagaagaggtcaaagtggtgccatgtgagagctcaacccacccttgctggaggaagggagccagagccaagctggaaaaggcaaggaaacaacctttgtgattacattaggcccatccagatgatccaggataatttattttacagtcatctgattagcaacttaattctcttctgtcatgttaggtaacatattcatatgtttcagagtggtaggccattattctacctaccataccacccaaaacaaatctacattaagactatatct

SEQ ID NO: 208588 - DNA, 532 bp, Homo Sapiens
cagggcggtccctgaatgcggtctcagaaaagagtatgtaagtaaataagtacattcctctcactaagtggtcactaagctggaaaggtctgactgctgctgcttagccatagtggcggtgaagagcgcattttaccatggtctgtgccttgggtaattttccccgatttctctcttcagcttctggagatcagactgctcatatctggagatacgcggtgcagctgccgacaccccagcctgttgctgacactagtgtaagcacctttccttacctgcgaatgtgtaggatgctgatgtctgcgaatctgagaatccatttatgatatctgtcatggacggaatgtttgtgtccccccaagttcagtgttgaaggcctcacccccggtatggttgaatttggagatcgggcctctaaggtagtagttaaggttcagtgaggttgcgtgaggtcctcataagaggagacagtggagagctcacctgtgttctcaatctctctgtcactctccgtgtcacgtaagagcagagc

SEQ ID NO: 208589 - DNA, 1000 bp, Homo Sapiens
  misc_feature (1000)..(1000): n is a, c, g, or t
tcacattcacagatgacttttcctacgggatgcacagggtggaaacaagctgctctcagtgtggtgctcaccttgggcacatttttgatgatgggcctcgtccaactgggaaaagatactgcataaattcggctgccttgtcttttacacctgcggatagcagtggcaccgccgagggaggcagtggggtcgccagcccggcccaggcagacaaagcggagctctagagtaatggagagtgatggaaacaaagtgtacttaatgcacagcttattaaaaaaatcaaaatggttatcttaatagatatattttttcaaaaactataagggcagttttgtgctattgatatttttcttctttggcttaaacagaagccctggccatccatgtattttgcaattgactagatcaagaactgtatatagctttagcaaatggagacagcttggtgaaacttcttcacaagccacttatacccttgtggcaattcttttctttgagcacatggcttctttgcagtattttccccttgattcagaagcagagggtcatgggcttcaaacatgaaaatagagatctcctctgcagggtagagaccagagctgggaagtgcagggcatggagaacctgcagacacatggcttgaggccgtggaagaaccactaagataaggggagggggaggtaccaggacggtcacctggcgaaagatgagcaaggcacagaagtccacggaaggagttaagcgggcttaagaactccctagtgtgaaatggggccgaacacagggggcacagtcaggtgggtgcaggaagataaactaccacaaggggacgacaacatatgagttacaagagcgtgtgccgaggagacgcacgacgacaccatgtgcagaggggacaaaaacagcagcaggcggaagcagcccgaagacaaacgggaggtgaacatgttgagagaggcacccctgtctcaatcattcgatcttcgtcgctctgcan

SEQ ID NO: 208590 - DNA, 993 bp, Homo Sapiens; identical to SEQ ID NO: 50361

SEQ ID NO: 208591 - DNA, 949 bp, Homo Sapiens
  misc_feature (895)..(895): n is a, c, g, or t
tggagaaaaaccttatgaatgcagtgtgtgtggcaaagcctttagtcatcgtcaatcccttagtgtacatcagagaatccattctggaaagaaaccatatgaatgtaaggaatgtaggaaaaccttcatccaaattggacaccttaatcaacataagagagttcatactggagagagatcttataactataagaaaagcagaaaagtcttcaggcaaactgctcacttagctcatcatcagcgaattcatactggagagtcgtcaacatgcccctctttaccttccacgtcaaatcctgtggatctgtttcccaaatttctctggaatccatcctccctcccatcaccatagcctcgagacgtcatttctgtttgactactccagcagtttaaaaccccatctccctgcccttttgttttctttttgtcccttattagttcttcacataagtgtaaatgtaacttattcactcctcttgtaaaacttatagtttttttaaattggttaatgtgtgagatgtgctcagcacagtgcctggtccatagtaagtgctcagtaaacttagctgttttaaaaactttgtatttgaacattgaaaagttacagtagtcagctctgataaaaaaatgatgcagtagggtgagggtaggaaaaagcacatttttctatcaggaacagaatctccagtagtgggtgaggtttgccttggtggtttacacttgatctataatgccagtagttgtggcttcatctgacctatgtgatgtagggttgctgtggcgggaatcacttcttgctgtttggttaagttggcctattattgcccggccatggttatcaggcggcttgtcggtaaccggttctattaacgcggggttaattttgcgattgatnggggcaggaatccccgcgggcaacgaagaaatttgtgtttcttgagttcctccc

SEQ ID NO: 208592 - DNA, 765 bp, Homo Sapiens
cggacgcgtgggtcgacccacgcgtcgagctatagtagaaggaatggacacttctccagatatttggcttcaaaggagtacctttacttacatgtgctttatggtaagtacattgaattttactttaaatgcattttactacaaagcacaattcatttgtaatgcatatccatcttggattcaatccaaggtgctttagctatcagtagtaccaaaggatctttttacaaggcttcctgtggtattgactctgagaataacacatagtgaagatctgtgggcttttaaaattgttcacagccaatttaagaagacccctcatgaagtctcagttttcagtacagtacatcattcctcctcactaggagcactttgatgtaaaccagaatagctttaaaaagacaaaaaggatcgtagatctgatttttaaatggttggttgctttgacagatctgaacactttgcttcatgactatttcgtcataaaggtatatgtttaaaatctgaatggcagtactagctctatacttttaatactgctttgtattttatatgtaaagtagtattgctgacattttaaaaaaatacaaaatacaaaagaaaccattagaaattaataactgtggctcttccagttgacataggaattggagagaaaggattagaatatttaattaggggagtagattattgtcccaaggctttattagagaacgggtattaaacagcagttagaatagcttctatgaatggaagataatcttg

SEQ ID NO: 208593 - DNA, 878 bp, Homo Sapiens
cattgatcttatatcctgcagacttgctgggctcacttatcagctcaatggttttacaatctcttcttaatctgtatttctatccatatcagtctcctgagttccagacctttacttccaaccacgttggatgtttccacttagttgacctcatagagatatctctaacttaatatgtccaaaattaaagtcatccccttcaccccacttacaaccaaacacagcaagccaaccttttcccttctgcagtttgcgtatctcaggtattatcattgtgcctggttgcccaagcctctaatatgagaatcatctttgattcctcactgtttcaccctgtatagtcagttagttctaactcctacgtagatctcaattctatccctcttctgtatgtcactaccctggctcaggtttttatcattcttctcctagaatatttcaataatttccttactggtcttgctgtgctcgttcttccagtgctttccttgcccccagagtaatccaattatatcagttcaagatgagaaattactccaggccgggcacagcggccacgctataatcccagcacttcagaaggccaagacgggaggttcactttaggccagagttcaagacaaggcctgggcaacataagtgagacctccattcttaaaaaattagctgtagtcctagttactccagaggctgagtctgggagcgactggtggggccaggaaggttaaagctgcggtgagcccacaggggtgcctggatcccgcctggtgggagagaaactgggttcccacaagcaaaacaagaactcccctgggatgggcagaaatctcaaagagtgggcgtgccccaggaaaaagagagaaacacctccacggggg

SEQ ID NO: 208594 - DNA, 554 bp, Homo Sapiens
gatggggtttcactatgttggccaggctggtctggaactcctgacctcgtgatccacctgcctcagcctcccaaagtgctgggattacaggcgtgagccactgcgcctggcctaatggcagtgtttttaaaatttggattgtcagcagttggcctttgttgagaaaatgtgtgactttgcccaagcccagtaacttggagccttgaatttgagatgctggaaagggagtccttcctcctttctgcagtgtttgtctgggttgtcccctagtttaccaaagtccattttgaatgtaccatccccagcccaactccagcctacagatagtgccagaccgccagtaggtggagtagcactgtcttcctggtcccggacctcagagggctttgcctgttagggtactcttatcactcagagatgggccttgagttttcagagaacagaaacccattaagctgtttcccctattgtattcatgtgccctttgtgtttctggcaataatttattttatatttcaactaaattttaaatttctaattcaaaaaaaaaaaag

SEQ ID NO: 208595 - DNA, 974 bp, Homo Sapiens
  misc_feature (101)..(101): n is a, c, g, or t
gcacttgagatacttcagatcaaatgcaccatctcttttctttaggatgtcaagaaattataacttgaccctagagtttcacatttcttaataaccaaggnaggtaacaataagcatcaaataatttgtatgaatatcttataaaaactaaaatgttttgcaattgggcttacagtaatttatttttcttttaaaataacaatctaaagatcataatttgagattgtctttagaccatttgagatgtcattagataatggtaataattctgacagctattcttttttgcggacttggaccaagtatattattgaaaaaaaaaaagtacttagcatctacttggtaaaccttaggataagatatggagtaaaatatacaaatccataccctcatgggttgggatgctttttggtttaaatgggattagataataaaataaatacataacatatacgggacatggctggtgataagtgttctggaaaaaaaaggaggacaataaggaatatgggggcaggggaaagttgcagtttcaataggggatcaggtgacatttggtgggcaccatggtgcacacttatatccagactttgggaggctgaggcgggcagatctcttgaggctcaggagttcaagaacaagcttggaacatggtgaaaaccttaaggcttaacaaagaaattccgaaaaattagctggtggtgggggggcacacctgtagtggcagccactggaggcacgggcgagcaatgcttgaccccgaggctcagactggaacccgttccacacacgcacaggggaccttcactatgcctaggacgcgaagataccggggatctacgggaacgttccaaacatttcacaacaccgtgcacaagctgttgttaacacacacaaagcggcttgatccacgctctcacagacacagtacggtgctgtacatcaacagcagaaaacatacactatacgtccca

SEQ ID NO: 208596 - DNA, 438 bp, Homo Sapiens; identical to SEQ ID NO: 40893

SEQ ID NO: 208597 - DNA, 512 bp, Homo Sapiens; identical to SEQ ID NO: 49043

SEQ ID NO: 208598 - DNA, 717 bp, Homo Sapiens; identical to SEQ ID NO: 45075

SEQ ID NO: 208599 - DNA, 948 bp, Homo Sapiens
ttccaccccacccagagagagatgacttcacagtttgttcatatgagcatcatcccatgtcgtccccaacccaggctggtaggtgctacagcttgtgcttcatgctgctcctgtggcccctattcctacccagctcagagctttgcagggtctactgcagacaatcagaagtcagtttctaacaaatagcaacagccacaaatctcttcctccttcctctctgacattaccctgtgcaacttttctcaaagtctgttgcaccactcagcaaagcaagttgcaccagctatatcagaatcacctggggcagcctattaaaaatgcagactgttgagaccatcctggctaacacggtgaaaccctgtctctactaaaaatacaaaaaattagccggccgtggtggcgggcagctactcgggaggctgaggcaggagaatgacctgaacctgggaggcagagcttgcagtgagctgagattgtgccactgcactccagcctgggtgacagagcaagactccgtctcaaaaaaaaaaaaaaagaaaattgcaaactggctggcgcggggtccttgcttgtaatcccagcacttggggaggctgaggcgggcaatcactgaaatcgggggttcgaaaccagcttgttcaaatggaaaaacctgggtcctaactagaatacataatcaggggcgaaaaagggcaataacaggtagcccagtactggggtggccaggctgacccggagggaagttgcggacacgaaatggccatgaccgcgggaacaggaggatccacccaaaatttatataaaatagcacggcggcctaaccgagatccgccacggagccaggcggtaccgcccgaattgacgcagagccggtcagggagcgcagcaggcgcatcgcgacaggagaatgcacacacggagggcgaggacagaaggtagacagcg

SEQ ID NO: 208600 - DNA, 409 bp, Homo Sapiens
ccctctactgttcttgagagtacaatcaggtttgaacttcttcactccctgttgcaaatgaagtcagttcctttgggaagaaattaggagctgttttatggtttgtttttctccacaggtaaaaatctcagagttagggctctggagctggggttggggacaacagcaaacttctctgagtgacactcccactctaggaactgagagtttggtggatggagagcgggggaggacagcagcctggggtcctctcagcttgcctctactagcagcaaaagacagtgaaaccactgtcttaatacccaaggcaagagtgatctgggtcctaagtattctcggcatacctgattcaagttccacaagtgggggctgagtagaagaaggggccccatctcttaactgcacttct

SEQ ID NO: 208601 - DNA, 843 bp, Homo Sapiens; identical to SEQ ID NO: 49460

SEQ ID NO: 208602 - DNA, 320 bp, Homo Sapiens; identical to SEQ ID NO: 40799

SEQ ID NO: 208603 - DNA, 609 bp, Homo Sapiens
cccaggcgcggctgaactgactgagaaggcatcttcagtttggtgagcttggctttggcaggcactttcaagtctgttttttcaaaggtctgctgtcgatagtcctccggcagtggtttcagttcaggggattcactaggggcctgatcttgaccatccatgggccggacataagccgtgggcttctgctgcattgcaacactttttgaggggagggagggaggtggaaatgtctgagaaggcggctgggcaggggccaccaaactgtcttgaggggtctctttatcatggactttcactgctaggtccttgggagatttggctgggcaatagcctttactgttattgctgctgccatgaaccttgctgcttccttgcgtccggggaagagtttgctggttggaatgtataggtgacaaagggggaactggggaaggcaaagagattaagggagaaagctccctctctggagccgaatctgtcaccgaagcacagtggtctccgtcagctcttcggtcacctttcttgtgatgactagagccgaacccctcctgaccaaggcgatcctgggtcaggtgctggctgtccggtgggccgcagcttttggca

SEQ ID NO: 208604 - DNA, 541 bp, Homo Sapiens
cgatcgtgtatgtcttgctggattctgctcaaagaagtctgtacgagatgtgatgttggaaaactatagaaatctcacctccgtggaatatcagttgtacaggcttactgtgatctccccattggatcaagaagagataaggaatatgaaaaagagaattccccaagccatctgtccagaccagaagattcaacctaaaaccaaagaatcaactgtgcagaaaattttgtgggaggaaccatccaatgcagtgaaaatgataaaactcacaatgcataattggtcctccacattaagagaagactgggaatgccataagatcagaaaacagcataagattccagggggacattggaggcaaatgatatatgccccaaagaaaatagtacctcaggagctattccgtgactatcatgaattagaggaaaactctaaacttggatcaaaacttattttttcacagagcattttcaccagtaaacattgccaaaaatgttactcagagattggatgtttgaaacacaattcaatcataaacaat

SEQ ID NO: 208605 - DNA, 443 bp, Homo Sapiens
tgctcgccctctctggcctctcagagtgctgggattacaggcatgacccaccccatccggccctctgagtctttcttatctgtaaaatgggtataataatacctatctaatcggctttagtaatggtggagataatgcctgaaagtgctagtatagaggtttaatacccagcaaggactgttattagaatgaatagtaatatgactactgtcacattttgcaaatgtgtaaagaagaaagagggctaagtgaatcaaagggagacagccccactcaccctgttctgccccagagggctgagcgatccccaccatctggcaagctgcctcaccaggaggtccagctggggctacaggactggctactttgctacaatagcccgtctttcctgagcccagtggagggtcccaggagggcagaagtcattgataggggccagtagg

SEQ ID NO: 208606 - DNA, 494 bp, Homo Sapiens; identical to SEQ ID NO: 60588

SEQ ID NO: 208607 - DNA, 492 bp, Homo Sapiens
  misc_feature (2)..(2): n is a, c, g, or t
  misc_feature (137)..(137): n is a, c, g, or t
tnctgctccctcttcattataagatgaggaaataggctcaaggaataatttgctcaaatcacacacctgaactcaggaccatgtgactcttaactaaagcctatagattttctattctgttaggctgagtttagatntcataaaggctgggctcacccctagctagggctgcagaacaaaatcatgaacttaaaccattcaaaattgatttgtaattttttttaaggcaccaaagctgaaatagaatcatcaaagcaccaagctcaggatattcccaggattctctggggaaaaggcaaaagaagttggattgccattatcagcatatgctgtgaaaactgtgttgcttttattgagattcacattttagttcaattcaaatgttagacaggggctacatgacaccttcctagtactaatataaactctggaattgcttctggctaatagaattacttagataacagagagtttatatatgtagctgagatg

SEQ ID NO: 208608 - DNA, 599 bp, Homo Sapiens; identical to SEQ ID NO: 60270

SEQ ID NO: 208609 - DNA, 508 bp, Homo Sapiens; identical to SEQ ID NO: 60547

SEQ ID NO: 208610 - DNA, 502 bp, Homo Sapiens; identical to SEQ ID NO: 60743

SEQ ID NO: 208611 - DNA, 487 bp, Homo Sapiens
aagcattgctggtatttagaacctccatccttccctctacaaatgaaaatttgacaggtgaactttaatgtacattttgttctcctctgtctaccaagtgctcaaaattagttaaaacaacgtaacacctaaataatttaaaaagccaccttcttctaccttgccccgccactgaaacaaaaacaaagaaagccatctctctcctacattatttttggagttcaactggtaaaagcagcttaaagcttactttcctaaaaactccactttatcacgatgagcatagagccttcttctccttcttctatttaaaatgcctttgaaaaagaggtattttagcatttaaaaagatactgaaaaggatatcttccaaagtacttaccataatcatgaactatttctttgatgttaaaaaatgtatagcaactactattaaacatttccatacaaaatgcaaagctactaagggtgaaataaaaaataggtt

SEQ ID NO: 208612 - DNA, 464 bp, Homo Sapiens
tttttttctgagaagggcattgttgggacaagtggtaaaatctgaataaggtccatagatcagataatagttttgtaacactatttgtgaattttgataattacactgtggttacataagggattacttctatttttgggaaatatacactgaagtatttttagtgtaggaaaagcagtatcatgtctgtagttttttctgaaataaattgtacatgtgtgcaaagagggaaaacatgaaaacaagtggggcagatataaaagggtggttctttgtgtcattcttgcaacatttttgtaagtctgaaattatttccaaatgaagttaccaaaatccactggagtagtaaaactccgactgaatagaggggccaggccgttcagcccggcaggttcacctgggaatgacactgcatcgggagagaagaggggacatgcactgggactttgcgctcacctgtgcct

SEQ ID NO: 208613 - DNA, 109 bp, Homo Sapiens
tccaaattcactttgaggggcacggccacagccccccaaaggcgacaagatccgcttgctgtttgcacctctgtttaaaccaccgctataagaaacagtgattgtcgac

SEQ ID NO: 208614 - DNA, 496 bp, Homo Sapiens
ttatctgagagttgttttttattgcagcataagttaagcttatccttaacaatatgttgggtaaggccagaaacagaagaaaaagcctcaaatctgaaaagtactacagagaaaaggaacccagacagtaaagattggtgtaatgtttcccacgcattagtttttccatcgatgaagtaaaaattcaaaaattacaactccgtgagtatacacagtactacttcccctcaactcatttttataaaaaggaaagtattgtcctgtcctaagaggaaagatcacatatttttcccctttagcctgcttgtctcttggcccatagaaattcttggcccattcttgccttcactgaatgcctctaataccttcagaagccaagaggaaagcactcttctgggtcaatgttcttctctgtagacagtattttatcaaacagactttagtttgtcaccatgatttgataggtagccccaaaactccagctgatgttacaaga

SEQ ID NO: 208615 - DNA, 502 bp, Homo Sapiens
ctacaggtgtatgcatcatcgacagtacttcactgctaatgttctgaatatctagtgaaggcatagcactgaagtcattgctaccgctctgcattaaatgtgtgtcagtttgtcttgaggtactggtctcctctagctcgttttcccttggagaaatgtctgtttttccagtttgtttcaattctgccaccttttcctcagtaacacagatctcttcagatcctctctctctaaaattttcttttccagtttctttcaaatctgcctccatttcttcaacaacagccatctttcctgatactttctccatcatgggaatgtctctttttccagtttctttcaaatcaatctccttttcccttatagcactgaactctgctagcaccttttccctttgggaaatttcttctctaatttctttcaaatctgtctccattttacctacaggcttgacctcctctgggccattttcctgtggcgatatttctctttcagtttcttc

SEQ ID NO: 208616 - DNA, 509 bp, Homo Sapiens
gtagagatggggtctcactatgttgcccagactgctcttgaacaatcttcccacctcggcctcccaaaatgctgcgattacaggtgtaagccactgcgcccggtctgccagtgtttttctaatactaagacaagggttatgggtctgggaggaagagcccagtggtgaagcgccctgtcacatctgcccgtgtgacctctcggtgatggtgccagccttgacctctgggctgagacagtgggtcgggctctccactgtggagacgccttgcctacctcccactctgtgctctctggaaggaagtcaccatgtgcagcccacacagaaggggcacgagctggggccccctccctgtgccccttacttttatttattttgagacgaagtttcgcttgtcgcccaggctggagtgcaatggcacaatctcggctcactgcaacctctacttcctgggttcaagcgatcctcctacctcagcctcctgagtagctgggattacaggtgcccac

SEQ ID NO: 208617 - DNA, 1000 bp, Homo Sapiens
gaaaatcgtgtgcgcttcattcatatgcccccacacatcctaggcctacccgccgcagatacatgatcatactaatttcacccctctatttgatcccctaccttcccaaattatctcgatctaactaatcgactaagttacacacactcaacaatgactaatcaaatctaacctcaaatacacatatgatagccatatagaacacttagggacgaaccctgatctcttgatatcgtagatatccttaatcgagttttatattgccatcagatctaacctctctcaggactctcctacgctctacctcatttatcacctaaccatccaactatctatatagaccatagacctatggcctatccccttatgagctgggctgcagtgattataaggcttttcgctctaagattaaataatgcctctagcccacttcttaccacaaggtacacctactccccttattcccatactagttattatctgaaaccatcagtctactcattcaaccaatagccctggtcgtacgcctaaccgtaacattactgcaggtccacctactcatgcacctaattggaagcgccaccctagcaatatcaacattaacttccctctacacttatcatcttcacaattctaattctactgactatctagaaatcgctgtcgccttaatccaagccctacgttttcacactttttagtaagcctctacctgcccgaaaaagataatgacccacaataaatgcctattatatagtaaaccaagcattgacctaaaagggcctttagactcctaatgaatcggctaacatgtgattccttccatcaaaggcctattaggctaatatcacacttacctttcacgggggcgttcggaccctatggccgcccaccccttcaaggcgccgggcgcttttcccaaactcgggtggtcattccagcacgcgggggcccacgccaatcactgctgataacgccaaacccatgttccgtctcacga

SEQ ID NO: 208618 - DNA, 939 bp, Homo Sapiens
  misc_feature (939)..(939): n is a, c, g, or t
gaaattttgaaacttggttgtgctctgctggagggggttgggataaactgcttagatgtttgcctacttgtccagtgaaattacatttgcatcagtatatgtatatacctgccaaccttattggtatgtctcagaacatttatattaaaataatgcttgtcttgcagcaggtgatcccataaaacaataactccctgttcttaaaaacttactctctttttcactaacaacataggaattgtttctgtgttgagattattctgtgttgcatccattctctatgtagtggtcaccttctgtctgtcatggtgggcttaatgtgaagtaaagccattggttctctgccactttcgaagaaagggcagttcatctgatccttcttcagaatggtacctactgatatcatcgaggaaaatgttacaaatcagacctaggatatgactttttaaaattgaggcatttcccgtcatttggcctttttaccaacaagatgtgatgtacaaatttggaatcaaaggatacaaagcaacaagagaggaaatgtgtacatgtgggtaaccaaactgcatatgttacctattgtctaatcagaaaaccatagtctgaggtcctggaagccagaagtgggggttaatttccttccattcgcgctacggtttgaactacctagtcccctctggaaatcagttgcgcaatcagtaccgtgggttaacacagcctctggggtacccacttgaatccaggagcccattatttctccgacccgaaacacaccacatcctgctcggcgcctatcatgcggtgaaccacgtttgtagacgctccgctcaaacagggtcaaaagggttacccactcttctaacgacacacctccacctacgtatccactacgactccctcacgcaccaatattacattaattagtacataatattttgn

SEQ ID NO: 208619 - DNA, 902 bp, Homo Sapiens
tcatggtaaaggcgttctatgaagttgaagtgtatatactttaatgtgtgtatactgtcacatttgactatttggaagactttcacctctgtttcttgtctttgaggctgatgaatgtgtttctaagttataaatttaatattaagggattcatgtattattgtattggatccaaacaatgtgttaagtaatatttagggccagaaaaatcttgtacagaataatgatttctcctaatgtaaatcttggaaagggtttgttcaacttgagaaatattaaatttttgttctattttcttttcttcaaagattggcaaaggagagagtgggttgctaaaagtttatattgttctccaaagaatagaaacactttccatagcccaactccggtagtaaataataatgaacgctttaataatgaaagagcaatggttagtattagaatcgtttgattacaaagttagcatctctgcctgagctacccaacccaaagcggggttgttagaggaaagctaccatatttcacagaaccgaggaaggaatgcagagacctcaggtgagattcgaatgctctggtctgaccctcaatgcatattggctcatggccacctgtagctcccaaagttgttaccacgttattgatcccccaaagagaacttgatctcctggagttcagtttcccagggacggggtcaagtttgggtcaggtggccaacccctttcaaccaatccaattggtccacggtaaacgacgccccatatggtaacggcggcctgggcaggacacagcggacaagaaacagcttccaaaaaagggcacggtgggggggacaacacaaattggtgtgaaaaaggaccagcggcctccataaaacagcaaatatagaaaacgaacgtccacaa

SEQ ID NO: 208620 - DNA, 796 bp, Homo Sapiens; identical to SEQ ID NO: 40643

SEQ ID NO: 208621 - DNA, 680 bp, Homo Sapiens; identical to SEQ ID NO: 50853

SEQ ID NO: 208622 - DNA, 556 bp, Homo Sapiens
aatgaggataacactttcatttattgtctctaacacttatttatttatttttgagacaggtcttgctgtgtcactcaggctggagtgcagtggcatggacgtggctcactgcagcctcaacttcctgggctcaagcagttctcccacctcagcctctgaagtagttgggactacaggacgcactaccacatccagctaatttttaatttttgtgtagagatggggtctcactatattgcccaggttggtctctaacattttaatcctgtgacactggacattccagggtgctcttggaggtactcaagaattgtcttcagggacgagcgaggtggctcacgcctgtaatcccaactttgggagactgaggtgggcaaattacttgaggtcaggagttcgagactagcctggccaacatggtgaaacctcatctctactaaaatacaaaaattagccgggcatggtggcgggcacctataatcccagctactcgggaggctgagacacgagaatcacttgaacgtgggagacggaggttgcagtgagctgagattag

SEQ ID NO: 208623 - DNA, 834 bp, Homo Sapiens; identical to SEQ ID NO: 50398

SEQ ID NO: 208624 - DNA, 917 bp, Homo Sapiens
aagttcaccatgtgtttaaatgacagggtacagtcctggaccagaggtttttctcttcagcaaagctccctggcccttgatcgttggactgttactaatagaaaaagattcaagtcatgaagtataaaatccatcccccatcccagaactttgaaacacaaggagggagagatctttgctatggagcagtcctggagcaaagccccgtggcttccacccccagatatataccccataagtagtgctgagctccagcttagctgagccaagctcagtccttatctggtgttcagccagtgcacaggtataagcagaactacagagctgaatgtagcttccctgggatctcttctcctttctaaagcatttttcacacagttctgtacctcctacccaagttggggctgctttctgcctgctagcccacggctctgtgtactttcttttctggcttcaggtgcagacagaccctcagtaccttcctggacacagacacatattccctggaccaaggcgtggaataactagtagaccaccaagccacaggtggctggtcttgaagaaaagggattatactccttacaggccacccagaaagctatgaattccatatacaccaatgatcgtgcagttagggtgtatataatgtataaacggtgcatccattggtcatcatgcgggaactacatgaagtggccaaataaacgaaacttttggatggaggccactccgtgggaccgagatcccgtggtggtcccctggcgaagaaaggcaggcaggacacagcgaccccaaaagaggcctgaagtgaagccggaccaacaggagcaaaccaatacacaggcggaacagaacggcacattatacgatagtaggatgaaagaagaccacaaaggaaccgaaaatgaggaccagaa

SEQ ID NO: 208625 - DNA, 801 bp, Homo Sapiens; identical to SEQ ID NO: 40845

SEQ ID NO: 208626 - DNA, 720 bp, Homo Sapiens; identical to SEQ ID NO: 52510

SEQ ID NO: 208627 - DNA, 645 bp, Homo Sapiens
gagcggctcacggaggagcagattgaagctcttctccacaccgtcaccagcattctgcctgcagagccagaggctgagcagaagaagaatacaaacagcaatgtggcaatggacgaagaggacccagcatagaagagcacagctggccccggcgtttcatgaagtcagaaggcctggcagccatttcctggacgttgagaggattgtttatttgatttttatcctcatcccagcaggcctggctttgtggttagttgggtacatcacaaaaataagttaaaaagaaatatttgtgccttggggagaagaaacatggtgaaaacaggctgaggttgtcagggcagagagctgaaggtggggacagtgaccgcggacccctctgtgcttgaaagatttcctccacggcctttgccccagttgtggggaggtctctgtgcacagcggggaaaatgcttgtgtcgcctttggtgggccatgtcctaattagtttcatctgcttccctgggaacttactaaggggcccagagcactgttggaagtctggttagagtccccagagagttactctaagttaaaatgagccactgaccttggctcacctttagaggaatttcctcgagaacaacagagataaaaaaaaacaaa

SEQ ID NO: 208628 - DNA, 732 bp, Homo Sapiens; identical to SEQ ID NO: 52859
  misc_feature (696)..(696): n is a, c, g, or t

SEQ ID NO: 208629 - DNA, 967 bp, Homo Sapiens
  misc_feature (967)..(967): n is a, c, g, or t
gtggatccatgaactctgtgtctaaactgatccactatgtagggtggctatccactactgcaatgcgcattggagagcaacaatactttcttgctgcactttatttggatttctatgagaaggtgtgtgacatatatataaattataaccttccattagtggtattgtttcctcctgggatcttctattctgcactcctcagcctggataccagcatcctgaaccagctgtgttttattatgcacagatatcgtaaaaatttgactgccgcaaagaaaaatgagttggtacaaaagacaaaatcagagttcaatttcagcagcaagacttatcaagaatttaatcactatttgacatcaatggttggttgcctgtggacgtccaaaccctttgggaaaggaatatatattgaccctgaaatcctagaaaaaactggagtggctgaatataaaaacagtttaaatgtagtccatcatccttctttcttgagttacgctgtttccttttgctacagggaaagaaatggagctggtattggactatttattttcacaggggttacaaggctggaaactttttataagaagtagttgttcatcattcttccattcccagagcagagggcatacatggacaatcaatattaaatgatgttgataaagaacacatggacttgagttatcgtcattggtagagcaaagtgtctattttggaggtccccatttatttaattgaagaatgactcctcaaggagtactcagaagggctttggtcatggtaagaaggattgggtggtaagagttaagataaattttgtcagtgagagggaccttgtataaggttggttcaagagtttaacgattgttggggcttaattggtatacgtgtaggaagaagtgtaggagaaacagagtgggatatatggaaacaaagtgtagaaggagagagatgttgttttgattaatgn

SEQ ID NO: 208630 - DNA, 935 bp, Homo Sapiens
gggagtcttgctatgtttcccgggttggtcttgaactgatggcctcaagcaatcctcccgcctgagcctctcaaagtgctgggattacagaggtgagccaatgcatccagtctgtttttcctttcaatctccaaatgaaggatgtgaattagggcagctgtcccaaccctgaccactccgatttcagatctatccacctctggaggcctgcacacagttcctacacaacaggctcctgacctgctagcaagagctgaggatagtacttcctttgggtgactgtgatacaagactcagatttgggttttgtgcccagttcctggcgcagagctcacagaaccctgggaatttcctgactgatagaagcatcttgtgctatcataagatgcccctttccatcacacctgagttgatgccactgcagtggctgaggtggggacctgagagcccagcataaggccagccaccagaaagaccaatcctgtcagtagagggcgggaacactcagccccagctctgacctcaggaaggggaaaggggtctgaggttgagccccatcacaatgaccaatgatttaatcaatcataaccatgtaatggaactccaaaaaagaacctaaacagtcttggggctcagggagtttccaggttggtgagccacctgagtggctggaagtgccccaaggacggtgggaagtcgtaccttccaggttgccatgtggttcttccattggtcttctggtggtctccataaccaggagtagtaggctctcggtccgggggtacgaggccttgcgaggctgacaagtgggccgattgtggttgagggggttggcggaccatctggggttacccttgcggtcgtgagacgtcactatcaatggggccgcttgtgcgcccgtggggggcgtgttccctcctccctccccgcgcggt

SEQ ID NO: 208631 - DNA, 1000 bp, Homo Sapiens
gcctcccgagtagctgggactacaggcatgcacccccacacccggctaatttttctattttagtagagatggagtttcactgtgttgcctaggctgttctagaactcctgagctccggcgatccgcccacctcggcttcccataatgctgggattacaggcgcaagccatcgcacctggcccacaattttttttttaatatctcatcatttatcagtcaggaaacgaagcaaggcttgggctgagtgaattttctattctacagggtatccaaagaggtcctttgttggcatttaacaggccggtggacttggtctggagcatcccggattgcttctcgcacctgtctggcacctaggtaggcaaggctgcagtgctgggctcaggtagaactagaagcacctatttatggctcctccaacaaggtgggtccaaagtagtcagacttcttatgtggcagctcaggggtcccagagagaatgttccaagaaagccaagcaaagctgcaaggtttcttttgacataggcccagaagttccagaacgttacttcagctatcttcttttgatgacataagtcaataaagccaggccagaggatggggaattagaccctacctctcagtaggaaagaatttgtagccacctttaagctaccacaaaaagttattcaaaaaaaaattgtttaggccgggagcgatggctgtaatcccagcactttgggagaccgaggtgagtggatcacaaggtcaggagatcgagaccatcctgaccaacatggtgaaaccctgtctctagtaaaaatacaaaaaattggccgggcatggttgcgcgcacctatagtcccagctatcctgaggcaggggaatcactcgaacccgggaggcagaggttgcagtgagccaagatcgcaccactgcactccagcctggtgacagagcaagactccatctcaaaaaaaaaaaaaaaaaaaaaaaaaaaaaaaaaaaaaaaaaaaaaaaa

SEQ ID NO: 208632 - DNA, 520 bp, Homo Sapiens
  misc_feature (446)..(446): n is a, c, g, or t
  misc_feature (511)..(511): n is a, c, g, or t
ttttacaatacaatatacatttattaaagtatatgcatttttaatgaacaataatactaacaggtaatagacaagttgttaatagtttttcactggctaattaaataacagctttaattgtattcattttatagcttttctacaatgagcgtaaatcacatttacttttttctacataacttttctaaccacaaaaaaagaaaatggtttaaaagaagagatgagatatctttgctaaaatttaatgcctaaagaagaaacttctgagctgtatatggtatcctgaagcacctgcccttcaagacagaatgcttgtaccacatttatgcagccaagtgcatgtagtaacataaagtaaacacatgccatctggatatatatattaagactcttttgacggctgggcagggtggctcacacctggtaatctcagcactttgggaggnccgaggcaggcgtgccacccgtgcccggcctacttcactttcctcatttaaaaaagaaatggggntaatagtac

SEQ ID NO: 208633 - DNA, 476 bp, Homo Sapiens
tttttttttttgtctttttaaatgttttattatggaaaacttcaaaaatacacaaaagtaggaaaaacagtctaatgaactcccacgtaacaagcttcaacaatttagatgcagcactttaactactactggtttgtcatctttaataacatgacagcttatattttcaaaaggcatagtttttatcattcccagtgtaacggggactgtaggtggaggttagaagcataagcaaatttaactctggaaaaatgactcaaggcatcctcttgaagcagtgctcagattgtaggactcagcatacactggaggaaagcggtcctcatttctgtgggttggtatgtagcatggatgactttatatgatcattccaagtgaagtctgtggctcaggaaactacaaattttggtaaattgtatgctaaactattaactcaggaaggggacaacaaggaattatgtgtgaatctggcatcc

SEQ ID NO: 208634 - DNA, 660 bp, Homo Sapiens
  misc_feature (637)..(637): n is a, c, g, or t
tttaaacagctgagaaccaggataagccagctggcttgttaaacactatcctttggctttgcgaagagaacccatagttccatccttttttctcagagacgaaatgtcttctcaataggactacagtatggagaaagaaaggactttctggagaggacaatgtttgttattccgatgttcatctttgacttgagtgccaagcccaatttcaacagtgcaaaaaaagactctcaggaagcagcatgggggtcaaaggcttgtgtagtagctgtctacccactgggcaaggcctcgctccaccagggaccggtttatcaacaccacttcatctccaaccacactccacagctgaatcagaggaagaccagttggactgtaacttgtcacctgagcaagcagtgctgtattccccgtcatctcgctcatggcggcatctgcttccggtgaaaactggtcatcgtctgacaggggcatcacactgtccagaaggacttctgctccctgaaacggcagggtgacaaagtcagacctgatttgccggagcacgtctactttcaccctcttatatccgccgtagtccacgtatcgaatctccactttcgtggtctccttgtaggaggcaaccacttgggctcgncaccaggccccgtccgcaccagg

SEQ ID NO: 208635 - DNA, 908 bp, Homo Sapiens; identical to SEQ ID NO: 49006

SEQ ID NO: 208636 - DNA, 846 bp, Homo Sapiens; identical to SEQ ID NO: 55955

SEQ ID NO: 208637 - DNA, 976 bp, Homo Sapiens; identical to SEQ ID NO: 48533
  misc_feature (975)..(975): n is a, c, g, or t

SEQ ID NO: 208638 - DNA, 1000 bp, Homo Sapiens
  misc_feature (1000)..(1000): n is a, c, g, or t
tcttggttgtggggactgtcctgtgcattgcaggatgtttaattgcatccctggcctcgactcactgagtgcctatagtaccacctccccaggtcatgacaaccaaaaatgtctccagacattctccactgtcaattgcaaactcaccccttgttgaacaccactgatagacactaatccctaatatcaactaaccaatgaaatgctgtacctcttgttgtatgagaagaagaaacagacatcttctcaagtctatgagaatggcttttaactaatcaacaccttgattaaccagtagaaggcatatttagtgatgattcgcttatgactgcctgtacctcaccgggacaaaattgtggtttgttagagagtctttagccacaaacagaataacaaccactggcttatattgcaaaaaggatatgggaaattctatagatattggcacagacacacatatattataagaagtctaggccgggtgcggttggctcattcctgtaaccgcagcactttgggaggctgaggcaggcggatcacctgatgtcaggagttcaagaccagcctggcaacatggtgaaaccccgtctctactaaaaaatacaacaacattagctgggcgtggtggtgggcgctgtaatcccagctacttgggacgctgagccaggagaattgcttgaaacccgggagcggagggttgcaggggccagatcacgccattgcactactgctggcaacaagagcgaaattcttctcaaaaaaaacgaaaaaaaggggcgggctaaaataaacctgagggcccggtaccctccgctttgaacaggggccaaggaggcgataaaacacacggccggttcaaccgcggcggaagcgccgggatggacaacctcggggcattgacaccccgatacgccgcaaaatcggtctggcaacgatcgggagtgctgacacacagagaaggaaaccgaacacacatccgataacagcaccgcccactccn

SEQ ID NO: 208639 - DNA, 953 bp, Homo Sapiens; identical to SEQ ID NO: 42484

SEQ ID NO: 208640 - DNA, 1000 bp, Homo Sapiens
agaggcggcaggagagtggagaatgagggcgtggagggcagaggagaaactgcgtcagggatgtgtccgccaccttcatcctccagacgggacttgggagcggctgcaggaaaccctgagagattcctctttagggaagtcatccagccctggggtccccttatgccgggagcagtgaggacagaagaatgaccatctatcttgctgaaagctctgtgagggaggaacggaagaacggagggagctacgaccttgaccatcccctgagtgtccatggcctctgtgctccggatgatgccggggctgccagggaccacagagccacccactgggaggctgggggttggcctggctcaggggcgttcgtcagccatagacacccacagcatgtggtgggcagggctgggaggtgacacaggaactgaaaaacctgagaagctccagccactccgcagggtaagtgccacctggggtaaaatgattagctggttccagcccctccgcagggtaagtggcacctggggtaaaatgactgcctggagctggcagctgctttctctgctctccccagggccctgcagggaagcgtggaaaggcggcacagggctggacccagaggagctctcagaatgctggactggactggttcaggggtcatctagcccattcccagctcaggcgaggaattgcttgagcctggaaagatgaaggatcttcccagtgccggcagcccggttcactcctgtcagtgcgctgccagcaggccgaaagcgagaagaccgaccattggccgtgaagagaggtccgtgggcccaggtatggtgtggaacccgtacacagtgggacttgacacatacaccacgctacacagagcaggcacactccaccgccactcgcgcaattaataatacgcaacaaaaggcgctgaatatgagacacaccactatagccactactataataccgaccacaaacgtcagtcgtgcaccaactcggttat

SEQ ID NO: 208641 - DNA, 1000 bp, Homo Sapiens
tacacattatgtaccagatatagtcagatgtgttccaccttttcgagaaattgcatttttagaacctagagaaatcacactgcctgaggccaaagataaggtaataataatgtagattttagttttgccttttgggaatttagtataaataatgtattaatcaaaaatatttaatatcctggattaagtagaacgtgcctttttttgttgcaatgtttaaagtactattcagcctaattttctgtccaaacattactttgatttttgttagctattcttttatagaaatgcagccatcaggaaatcagattttccctgatatatgaaaattttattagaacccagacactttctgagtttagagaactgtcttgttacttgtttttactgaaaacacaacacgcttgtcatattagctattggtaatacagcgttagaaacacattctattcatgcggatattcgctgtcactaacatgaggttccagaatgtcacacactcgagaatccaggagtcactgagaaacacactaccttccaaggtggatattaagtcaaggaaagacattctctcccacaaacatctttttcacccactttcccaaatacacgtgacaatgaaggctctttcacataccactttctgtgcacaatgcactctgtccacattgtggacacacgggctatctacatctccagtcaagacacgttgtctccgtgcccatttgcggaaaccttgacaaacacacccttagcaaaagagcacgagacgtcagactgccacatcctcgtacactggcaggacgctgcgacaatcatacgtacaagattcaagtaagggcccctttgaaaaaacctcttcgttctgatcagacacagagaactaacatctgactcgctgcgcgacacacagtgtcagatgccacgatgaagaaagctcaagaacacgcagacagatcgagtatcatcagcatgtttcgtactgtcgacgtacatttcc

SEQ ID NO: 208642 - DNA, 931 bp, Homo Sapiens
gaattacatagcatgtgttgggattttttttaatggggagaagatcaaagctacttggaaggagtgcctataatttgccagtagccacagattaagattatatcttatatatcagcagattagctttagcttagggggagggtgggaaagttggggggggggttgtgaagatttagggggaccttgatagagaactttataaacttctttctctttaataaagacttgtcttacaccgtgctgccattaaaggcagctgttctagagtttcagtcacctaagtacacccacaaaacaatatgaatatggagatcttcctttacccctcaactttaatttgcccagttatacctcagtgttgtagcagtactgtgatacctggcacagtgctttgatcttacgatgccctctgtactgacctgaaggagacctaagagtcctttccctttttgagtttgaatcatagccttgatgtggtctcttgttttatgtccttgttcctaatgtaaaagtgcttaactgcttcttggttgtattgggtagcattgggataagattttactgggtatctgaattggttttacaataaaccaattttataatctttaacaactttatccaactttttaccttctgtgttcattttccaggtcagggttcttgatatctacttagtgcgtgaggggccttgcagttggggcttcggattttaccagcccattgtggttacaacctttctaagggatgcgctttaggggacagtggccccggggcggcctgtgccccactggtgcggcgtcgtgttcatataaaagcgtctgtgagaggggagagcgtgcaccacttttcgtttccactcccccgtggcggcccgcccggcgggctgcccggccccaaggggcccccgttagtgctgtcccgtcaccgaggt

SEQ ID NO: 208643 - DNA, 932 bp, Homo Sapiens
atgaatgcttgtgcgttgatagagggaacatactttaaaagcctttgccagtgagcattctttattccttttaatatttagccacctgcaatatgccatctttaagagggacaacacagaaaccagtgtacagatttcttgtagttactatgagatttattcctgtaaatctggctttgtaaggaattagagatttaacctctaaggttgtatggaatcagaaaccaattcgaggctctgtggctgggatggggatgaaactgtacatttgagcttatcactatcctgcccattatgccccaccatcaagtgaagatgtgcaggactgccatagaggtgctacaggaagtgaggactatgtgaggagacccagaaatgcagaaaaatgttttagggttcccagtaataactgtgattagcaccttctttattttgattccccaggtgtgctggagaattgacagaaaatactccaaatagggtattggaatggcattagaaacacacttagggccagacattgtgcctcacacctgtaattccagcacttttggaggccaaggcaggaggattgcttgaggccaggagtttgaagccagcttgggtacatagcaagaaaccatctctataaaaaatatttttaaaaattagacgaacatggttggtattgtgctgtaagtgccagctattcacgaagtcagtgggaaagatcccttgaggccaggagattgggggtgcaggactgggatcggaccactggtttcagcgggaaagaagtgagaaccgtcctaaaaaaaaaaaggggggggcctaaagaaaccgagggcaacttcgcgacccgtttggcaacggccaaagagggataaagaaggcggggggtaacacgcgcgcggaccgtgggctggggccacttgggggatggaccacacacg

SEQ ID NO: 208644 - DNA, 940 bp, Homo Sapiens; identical to SEQ ID NO: 48511

SEQ ID NO: 208645 - DNA, 1000 bp, Homo Sapiens
  misc_feature (31)..(31): n is a, c, g, or t
tataaatcacttcaccaggaggcatcttcangttgttctttagttagcagcaatacttgagtgcctttcttatttaagaattagtggcaaatcacactgaaaaacaagacctgtcagttgttttataaatgcttttgaacttgatccctagttgagctccttccccctcagagtctgatacaaattaccctttattgtcagagtatttgctcattagtcctgtgaactctacattcagactcattgcttcctccagatagaggagcttgtaccataatattctgtgtccatttatgttagtttaatgaaatcttgcgaatttaggaaaataaaagaactgctcattcttccatatctttgtagtaacttctgttgtgtgtccttttgtagtcccatatttccatatccatatgctttgtaattcttttttctttcatgtcgttttctccattcttcaccaaaacagcagcatacataggcacatggttttatgatctgtttttcccactcaatatttaaaaaaaaaaatttgccatgttaggtaggctgggtcggagttttacatctgtattctcagcacttgggaggcgaggagtggattacctgatgtcggagttggaatagccaaatggtgaaacccggtctctcaaattcacactactcgggggcgtggggcgacagctgttattccccacttggagcggcggcgagaaagcggaaccgcggcgcagtgtctgggagccccggttagtaaatgctacaaccggggtgaacaaaacttgttcctaacaaacaaaaaaaaaggggggggtcaaccacagcgggcgcacaacactctatacatgacccatgtatagaagcgagtgcagattcagagaatacctacagactctcggtcgtactatgtttcattagtttctcttcgctctccttcgtctttctgttccgtttgctcgatcatccctgctcacaccacacacaacacacgcaggaggggagg

SEQ ID NO: 208646 - DNA, 935 bp, Homo Sapiens
  misc_feature (660)..(660): n is a, c, g, or t
attgcattaaattttcaaaatgtaatttaaaaggattaaatactcatttaataatttaaaataattatgtataatatctacattggagaatttgaactatcaagcatatactgtatacagttagaaagttattaaatgaacattttactcatgatctgtaaaaacttctttaatctacaactgtttacaaaaacaacattcaaacaaatagtacagatgtcagtgacagaacaaaatgacttttctggagacattccagatgccatattactttattttaaacagcgctatgactttaaatccaaggctgctcggaagatttttttaggtctctcataagcctattcttccctgatcacatgagtgggagaggtagccaaatttgaattccctttctgtgttcccacaagagctgctgagaaggcctggcgcagtggctcacgcctgtaatcctagcagttgggaggctgaggcaggtggatcacaaggtcaagagattgagactatcctgacaacatggtgaaaccccgtctctaccaaaaatacaaaaattagctgggtgtggtggacgcacctgtagtcccagctactcgggagaacgggggacggagaatcacttgaaccgggaggcagagttgcagtaagtgggatcagccatgnactccaaacgggggacaccagcgcaagtctgttccaaaaaaagcaaaaaaaaagctctcggaaggggccccattcgctctcacaacgggctccccctaaagaaaacgaggggcggaggcgacaacacaggttacacacggcgcccacaaaaaccatcaaacacggcacaagggccgcgcacacaccccaaccaagcgggcaaaactcacacacacacaccccaagaaaaacatgccggaccgccaaccacacacaggcggaagaaaacacaccac

SEQ ID NO: 208647 - DNA, 940 bp, Homo Sapiens; identical to SEQ ID NO: 53695

SEQ ID NO: 208648 - DNA, 1000 bp, Homo Sapiens
agcatgctcaccacaagtgagtttttgaaagaaattagttatgagcttatcacaggaaaggtcagtttcctggcatcacatttcaaaaccacatcattaggcgatgacctagacaagctgctggaaaaaatgcaacaaagaagaggagacagtgtggttacccctttcgatggagaccttaatgaatgtgtgtcaccccaggaggctgctgctatgattcccacacaaaacctggatttagataatgaaaccttccacatttatcaaccgcagctaacagttgccagaaaactcttatcccaggtgtgtgctatagcggacagtggcagccagagcctggacctcggtcacttcagcaaagtagacttcatcatcattgttcccagatcggaggtgttggttcagcaaactcttcagcggattcgacaatcaggtaagagtgaactttcaaagaggagcccacctagatccagcttcagatcccctctgcctctttcttttgcttaatccaaacgtctagaggatgcttaaaaccttcttcagtaataaaaatcataaaagcactttgttattttgggtttatctgaagttttccctcaaagtactctgtcctttttccctcaaggtcaagggtaaattgttgtgcatgtttgccaggtatcattaagttcatgatgtaatctgtgggactagaatctggtcatttatggatgaagagaaattttctcaaggcgaggatggccctgcatgggttgatggcgtctgtgccacctgaactcctcccacctgcaggcctcatttgcataggtggattcttggccatctagcacattaacagcacgtctgggacctggaaaccagaacaccatcccccatgtcagcaatgacgttctttaagaaaaaaaggttagcgttatttctaataactttaagtgtaaagaaaaaaaaatgtttttcccagaaaatgtgaaaaggtagagagcaaaaattttacaagtct

SEQ ID NO: 208649 - DNA, 426 bp, Homo Sapiens
  misc_feature (120)..(120): n is a, c, g, or t
  misc_feature (135)..(135): n is a, c, g, or t
  misc_feature (201)..(201): n is a, c, g, or t
gtcgacggaaacaataaaactgtaaccagcccaaatatccatcaaagagaaatgggagaagtaaatcatcgcacattcacctggaccagatctattgtaaagccaataatactgaagccncttccaaggccctgngagtcctaacagtgcactggcagtgtctataatttatattatgaaatttgcataaggaaaacattntgtctcatttgtgcaatttctccttctaaatatacgtgtcactttgtacctgatttctataagacccaggacctacaaaccctgtgtctgcccctgcagccacccagggaaggactgcacagcagcaagacagattgccatggagcatgttgtgcccaactagggacagcgcagatagattctgtaatttgcctaacaatgtctataggatgatcccatttgtca

SEQ ID NO: 208650 - DNA, 491 bp, Homo Sapiens
tttttttgtttttttttcatttatgaatttcttgaagtaaatctattctaagtttgctgggtgcaccgaatcacttgctgatctttgttcaccttgtcatctttctcagtggggccccacctcccccagatcaagtctatgacagcttgctggaattttccagttctctccttttcctccagcagtgcgtttttctgctcaaaactgtgcacgctctggaaatcctgaagaaatgtgttacaggctgaactgtgaactcaccaaattcgtaagttgaagccctaaccctcagtacttcagaacatgactgcatctgaagaaaagactttagagtggtaattaaggtaaaatgaggtcatgtcagtggaccctaattcagtttgaatggtgtccttatgagaggaggaggctgggacacagacagagccagaggaaaaatcacatgagggcactgcaagaaggtgaccatcagcaggccaaggagagaggcc

SEQ ID NO: 208651 - DNA, 392 bp, Homo Sapiens; identical to SEQ ID NO: 53756

SEQ ID NO: 208652 - DNA, 559 bp, Homo Sapiens
ggattcacaaatgacctttactaaatatttgagatagaaataacaccagtcttccacaaacccctccagaaagctgaaaaacagcagatgcttctccaactcgcgctgacatcaaacaagttaggtgtgaaaacctaggacagcaggtcctcacttccgccccacattggctcaggtgcgtgtgagctatggccagacgctggtgtcacttgggtgacatgcacacctgccctggtctccagcctgggcacaaacagaactcaggcagaggtgggcctgtctgccaagaccagggctacctgctctgagtgcggggcttgggctgcccaggctggggctgctgctgtatctgagctgtggagtcacagccctggcctggcctggcctggcctgtcctttccacctgccagctgcggagctgtgggtgcgtcgctcacctcccaatctgtaaagtggacaagcctagttcttggggagcccgcgcctcgccaggggcagcccagcctgcctgggcctccatgtcttgcagcttctgggtctgcttcagctggttgagcgt

SEQ ID NO: 208653 - DNA, 539 bp, Homo Sapiens
atttcagaaaaggtacatcatgaatacataagatatatacaggttactagtctgtttatgttattggtaaggcttccagtcaacagtgggctattattattagctatgttttggagggtcaaagttatgcatggattgtcaattgcacagggggttggtgcccctaaccctaccttccatatataacttcctctgtcacctgtaagaaaaacacaatttctggaatgtgtggaagtgactaagggaagtgactgagccaagccagcccaggccatctgtaggctacagactcagctgctacctaggtctctttcccttgacttgcccatgaactaatgagaaaagaaccatgtcatggagaagcaataaatacaactccctctttccctgcaaaaagctgctgctacacttcaacaactgtcactgtgctatgtttgcagagcctaagacaagccaggccctgagttagggcctgagatgtggagggctctcaggcatgtttctcgtactctgtgagttcctgtctctgggagcaaccg

SEQ ID NO: 208654 - DNA, 472 bp, Homo Sapiens; identical to SEQ ID NO: 57993
  misc_feature (6)..(6): n is a, c, g, or t
  misc_feature (40)..(40): n is a, c, g, or t
  misc_feature (108)..(108): n is a, c, g, or t
  misc_feature (164)..(164): n is a, c, g, or t
  misc_feature (185)..(185): n is a, c, g, or t
  misc_feature (362)..(362): n is a, c, g, or t
  misc_feature (417)..(417): n is a, c, g, or t
  misc_feature (448)..(448): n is a, c, g, or t

SEQ ID NO: 208655 - DNA, 487 bp, Homo Sapiens
aacaacaatacttattttattgttgtaaaattaaaaatagtagacaagcatatatacagttcccaagcagagcaatacaaatatataaattattgcagttttcaaagaaaatataacagccaaataattgcctacttttttgaaacaaacttggtttttaccacagcagtttcattttctttttccaaaagtcttaacacaattttgtaaagtaaatttctaacaccagagagattaagttcaatgaccatagtatacgctactgttttaaagcaaggttcacacacacacacacacacacacacacacacacacaaaatggaactgaacaaaagtcactacttaatactttctaaattgcctcttttggaggtacggtgaaagaaaaacattctagatgcgtctgaaagaaacaaggtacacacacttactaaaattcccctttgctttaggtgtagttgagggaagttcaactaatctttaaacc

SEQ ID NO: 208656 - DNA, 557 bp, Homo Sapiens
gaccaaaaaactaaaactgctgtttattaagtatcactctatacacagtcccacagaatataaacagtttgggatcagagaacttacaaaaaggcaaacgcagatgtagaaaccatgtaacaagtaatgccacaaaaaagagtttaggcttttgcaggctcggcgcggtggctcacgcctgtaatcccagcattctgggagggcgcggtgggtggatcacgaggtcaggagatggagaccatcttggccaatgtggtgaaaccccgtctctactaaaaatacaaacatcagctgggtgtggcggcgcgtgcctgtagtcccaactactctggaggctgaggcatgagaatcgcccgaacccaggaggcggaggttgcagtgagctgacatcgtgccactgcacaccagcctggtgacagagcgagactccattaaaaaaaaaaaaaagtaggcttttgcataccttcacattctccccatgccctagcttttggccagtctcttcggtctgtttcaaaactgtcacctttccctcattctaacctagtatgttaact

SEQ ID NO: 208657 - DNA, 578 bp, Homo Sapiens
gagggcagggatattttattaacatatatatctctagtacctgaacaaagtgtgaaaaaagtagatggtcaataaaatgctgaatgaccaaatggaacttgttggggactctattaaatacaaatcaattaagctaaattaatgtactttcagtccagagaaaatgttgcaaaaagagttacagaagaaacagaaggcatcatggtacatcccaaccaggagcctgcagtgatagctggacaagggacaattgccctggaagtgctgaaccaggtaaaatagctgagttcttcctgtttagctactggtaaagctgttgggctatattcaattattttatatgtatacattaaatataaaactgcttacagtttatattttcactaaaggttcctttggtggatgcactggtggtacctgtaggtggaggaggaatgcttgctggaatagcaattacagttaaggtgagcagcttctggaggattccctgcttcaagcagaggatttactttacatcctaaatgttctgtattacacgtgctcaacattctgcacacattaccattccttccccttat

SEQ ID NO: 208658 - DNA, 903 bp, Homo Sapiens
  misc_feature (903)..(903): n is a, c, g, or t
gggtggcaggtcccagagcctaggtggtaggagcttgatcttgtttctgcccttacccctcagtagtggggctgcgaggtagtagacaggatgcccagttaagtttgaatttcagatagaaaataattttagaataaatatgttctatctaatacatgggacgatgttatttttagagataggatcttgctctgttgcccaggctggagtgtagtggtatgatcatagctcaccacaaccttgaactcccaggctcaagcgatcctcccgccttaactgcctgagtagctgggactacaggcatgcaccaccacgcccagctaatttttcttattttttgtagagacagggtctcactgtgttgcctcactcgagctgctgacctcaagtgatcctcccacctcagcctgccaaagcactgggattacaggcatgagccaccatgcctggcaggacatatttgaaatggggagattttaaaaattctgatgattagactgaatcctcagacgttctggtttgattgttgtgggtgtagcccaggcatgggattttttaaagagctgctcaggtaattccaatttaattgcgtgtcctaccttgggttcccgtcgtctcatgtgtttgctaaactggaaacctaccgagtacggattagcagtaaccttatctgaaatctagacgtgtccgcgcggtggggcgagagatccgtactccactcagatttcatggcctgagctgccttgggttcagtgcagccacccaaatgactgaccaggagtgactccggtcctacctctagaccgcagtgctctggtcaccagcccgcggctagacgtccaactcttcacagtcctcttacctgaagccccatctcacttctcacgggcactcgccgtccan

SEQ ID NO: 208659 - DNA, 585 bp, Homo Sapiens
attctaacaccaaaccttggtgttagagtcacaaaaagtccttttttaaaaaaacttggtgagaacagacaataacttgtctttctgggcattcgcgtcatggtccttttagccagaagagaggttttcttttgcatagttggtgagcatcaagaatcctttaaggagggtggcggtgctgacttctccccattgagagtcagcctcatcccctcctcagccttgtggatggagaagaacaggcagtgatatacattttctgctgttgaaagatgtccgcttatccttctctttcagtgaaaagttgcttttttattcaatatgtactgaacaggttctagagtttcagaaacaaaagaaacagaaccaacatttatagatctcactatagaggcatcactaattggggaaagacagactaggtaatagtcagatgtgatatagtatgtttaagctataggatggcaggtgcatgagtgttggttgtattattctttattttttgtatgacttatgatattcatgataattaaaacgtttggaacaattcaaaaaaaaaaaaaaaccacaacaaaacaaaacaag

SEQ ID NO: 208660 - DNA, 585 bp, Homo Sapiens
caaggacaaaagtaaggagaaggataaagtgaaagagaaagagaaagacaaggaaactggcagggaaacaaagtatccctggaaggaatttcttaaagaggaagaggcagatccctacaagtttaaaatcaaagaatttgaagatgttgatcccaaagtgaaattgaaagatggacttgtgaggaaggagaaagagaagcataaagataagaagaacgatagagagaaaggcaagaaagataaagataacgagagagaaagaaaaagtgaaagataaacggcagagaagataagatgaaagccccagcacccccactggtgttgcccccaaaagagttggccctgcccttgttcagccctgccacagcctccagggtcccagccatgctgccatctttgttgccagtgcttccggaaaaactgtttgaggagaacagagaaggtgaaggagaaagaacacagacacaaaggacaaaacaggagaagaagacccagaaggcacacagagaaggagaacgaaggacaaggaaacgagagcaacagagaagaagagagcgagagaaagaccacaaacaacaacaacgg

SEQ ID NO: 208661 - DNA, 922 bp, Homo Sapiens; identical to SEQ ID NO: 48325

SEQ ID NO: 208662 - DNA, 742 bp, Homo Sapiens
aataaagcttatatgaatattttacacatatctttgggtcgacatatgcatttatttctgttagtaatatacacagagaaatagagttctcttgggacttgcttgatcaaagggaatacgtatctttagctttatttaaaattgctgtatatttccttaaaaattacacatacacatactatgacttagccattccatttctggtatttacccaagagaaaataaagtgtatgtctgcacacacaaagacttgcaaattaatattcatagcagctttatttgtaacagcaaagaaccagaaacaacccaaatgttcaccagcaggtaaatggataaacaaattgatgtgtagccatacgacagaataacattcaataaaaaacaaagcaaacaaaatgacttctgatacacacaacatgggtgaatctcaaaataattgttttgggtaaagaagctagacacaaagaatacatactatgtgatttcatgtatataaaattctagacaatacaagctaattcatagtgctagaaagcagatcagttgttggctgcgtgtagtgaggattgattacgagagaaacgggaagaattgcaaaaggcatgaggaaacttctgggaatgtggacatgttcattttcttggcatggtaatggattcatgggtatatacatatgttcacatacaccatctcaccatcgtccacttaagaactgtgcacttgggctgggcattggtgcctc

SEQ ID NO: 208663 - DNA, 1000 bp, Homo Sapiens
gacttgtgtgtgtgtgtgaatgcattcatcacaaagatattgaagacaataaataatctttataacaaactccttgggttggactattaaacaatagcagagccaagaaataggacttttaaaagtcctattattcggccgggcgtggtggctcaggtctgtaatcccagcactttaggaggctgaggaggggagatcacctgaggccaggagttcgagaccagcccagccaacatggtgaaaccctgtctctaccataaattaaaaattagccgggcttggtggtgggcacccgtaatcccacctatttgagaagctgaagcagaagaatcgcttgaacctgggagatggaggttacagtgagccgagattgcgccactgcactccagcctgggtgacagagcaagactctgtcttaagaaaaatttaaaaataggccgggcatggtggctcatgcctgtcatcctagcactttgggaggccaggcaggtggatcacttgaggtcaggagaccagcccggcaacatggtgaaaccccatctctactaaaaatacaaaaattagctggaaatcgcttgaacctgggaggtggaggttccagtgagccgagatcgtggcactgcagctccaaacctgagcaagcagagtgagaaaccagctcaaaaaaactgttttaagttactactaacaggtccctattattccaagtgggttattgtaccttactgggtcgcacggggacgcttcattccagggtcgacagtcccgggaatcggaattacaaagcatgtggtatttcccgtccatgggctgcgttcatacccgtcacgtcacacttgccccgctgtgacatcacgaattaccaggggcattttctccaagggactataaggtgcacacatcgtgaccatagatacaggcctcatgaccagggcgccaccttcgcgaagcggggtcccctgtacatcagaacaacagtgtacttagacccatcgtcttc

SEQ ID NO: 208664 - DNA, 808 bp, Homo Sapiens; identical to SEQ ID NO: 53021
  misc_feature (605)..(605): n is a, c, g, or t

SEQ ID NO: 208665 - DNA, 697 bp, Homo Sapiens; identical to SEQ ID NO: 41965

SEQ ID NO: 208666 - DNA, 906 bp, Homo Sapiens
aataactaaagttagctgccctggactattcaccccctagtctcaatttaaaaagatccccatggccacagggcccctgcctgggggcttgtcacctcccccaccttcttcctgagtcactcctgcagccttgctccctaacctgccccacagccttggcctggatgtctatctccctggcttggtgccagttcctccaagtcgatggcacctccctccctctcaaccacttgagcaaactccaagacatcttctaccccaacaccagcaattgtgccaagggccattaggctctcagcatgactatttttagagaccccgtgtctgtcactgaaaccttttttgtgggagactattcctcccatctgcaacagctgcccctgctaactgcccttctctcctccctctcatcccagagaaacaggtcagctgggagcttctgcccccactgcctagggaccaacaggggcaggaggcagtcactgaccccgagacgtttgcatcctgcacagctagaggtcctttattaaaagcacactgttggtttctgcaaacaccaacacaaataaccacaacaacaaacccacaccacacagccttctcacgcacaaccattacaccccacacacacggcgctcacccgccagcgaccacttccacccccgcgcgcgccacctccgtccgcccctcccccacttttccgtccagccgcggcccctaccgcgcgcctccatccacccccccaccggcccgccacctaccacctcgcgccgccacacgcccccgctccctgcgctcggacccccccccgcgtggcccacatcggcgcaccccgcatatgtcgccgcgcaaactcagtcggtgcattggcacactatgggccctgccacccgcgccatcaacttc

SEQ ID NO: 208667 - DNA, 660 bp, Homo Sapiens; identical to SEQ ID NO: 48181

SEQ ID NO: 208668 - DNA, 696 bp, Homo Sapiens; identical to SEQ ID NO: 51068

SEQ ID NO: 208669 - DNA, 667 bp, Homo Sapiens; identical to SEQ ID NO: 47092

SEQ ID NO: 208670 - DNA, 876 bp, Homo Sapiens; identical to SEQ ID NO: 50812

SEQ ID NO: 208671 - DNA, 689 bp, Homo Sapiens; identical to SEQ ID NO: 48048

SEQ ID NO: 208672 - DNA, 776 bp, Homo Sapiens
ttggtgttttcactttgaaagagcttttagcaaggttgtgcttttcattgtgctctgtacgtatataaatatatatatatacacacacacacacacacattagtcatatcacctctgtttcctccccaacaaaagaggcttttcttcttaattacttgtggtaaacaaagacatgggattttcttacatgagattctcatttgtaggaggatgtgatgtcccacagaagacccagacggtctgtgtggcctatttcccccgtcaggttgcacaggtgcatgcaagagcattcttaggagaccactgttttgaaaaacttttgacttgtacgtgttagccttcatgaaattgcagtacagagatgggtccccaaagtggagtgtatttacagcttgttaaattagagacatgcacacacaaagaatcagtagggagaaacaaaaatacaagtcccgttctgtagctctggccctttgaatatgttcaggaagagttgcttcccatttcagggccctgcaaaaaaagaagacagcttgcctttggtggggctatgccccttggagtaaatacggctctgtgttccctagcagctgcgggagggttggccgatgaagtacctgactcagcttagctaatcagattgagacgacgacatgtgtctcttcctttttgtaaaagcacatcggtcccttatttatcagtaagcacggtttctaaaaatcttttatatcatttatgggatcaaacctatgattggttgcaaacctcacttttgg

SEQ ID NO: 208673 - DNA, 930 bp, Homo Sapiens
agaaaaatctagcaaaacttctcctttctgtaagccagagtcttgtctatcagattcccacaaccactcctgattctaaatttactgatatggtaatgaaattggtatttattttaaatattagttattctaaggagaaaaaaatgcttctgcaagattttcataattcaggggctgtggataggattgttcctctgtttccctaatcattcatctgttcatgtctccctcttgtgccagtcagcctaggttatacagatgccatgctccacaccacgagcagtgtacaaatctggctgcccgtttactttctgagcaagcactggagtccactccgacctttttctttgaacatgcatgctgctggaatatgtataaatcagaactagcagaagtagcagagtgatgggagcaaaataggcactgaattcgtcaactctttttgtgagcctacttgtgaatattacctcagatacctgttgtcactcttcacaggttatttaagtttttgaagctgggaggaaaaagatggagtagcttggaaagattccagcactgagccgtgggccggtcatgagccacgataaaaaatgccagtttggcaaactcagcactcctgttccctgctcaggtatatgcgatctctactgagaagcaagcacaaaagtagaccaacagtattaatgagtatttcctttctccataagtgcaggactgttactccactactaaatctaccaagaatgggaaccacagaatatgtccggagaatttttggaagattaatttatacctatttaaataaacttgtgtttcgagtagcttcacttctccgcctattaataagtttgggccgaccggctttatcatgcccaaggtttcccggccaaaaagaaggctactcggttcccgagccgttaacgcgaagtt

SEQ ID NO: 208674 - DNA, 418 bp, Homo Sapiens; identical to SEQ ID NO: 58278
  misc_feature (402)..(402): n is a, c, g, or t
  misc_feature (411)..(411): n is a, c, g, or t

SEQ ID NO: 208675 - DNA, 897 bp, Homo Sapiens
gttgtttacaaaaaggtttttctgcgtttcctctcagggcttgtttcaaataggtgaggctatcgctttcctgaagaacagcggaggacgtaccaaccgacgtctgagatgcacacagcaagctggtttaaaaccagcggcgaacagaacaaaggcaatacaaataaatatgacacctactgaaaataacggaacacagcggcagccaccgcataaagaactagcgatttcaggcgattacaagggcggttcaaaacgaaagcaagttaaaaaatgagacgcattttacaaggcgatttgccagagttgccagattatttaatttgtatggactatagaaaaataattgtcaacttggacattgtctttaaattcttgtcactggcccaatctttttcttaagtttaaggaagctgcagagctggactacaagttacattcttcagctaatacgtgcttttctaatattttccccgagatattacatttagaaaatacgcaaagaaaccttttaggagtaaacaaaacgcacccgaactattcattataaaggaaagaataaaaaatccataaataatacattgtaatcaaataatataaagtattctgcagacataattttttttaattaataaactccttttaatttactcaccacaaatattaaaatgttcaagtgcacctgtttaattaataaagcattttatatgcaattattaagtgctaatcattaggaagtttacgttgttgaggcaaatcactagctcagacattaaaaaccattataaaaatatagctacaaggtcagtatcaaattacccttccataggacagctcaaggacagcttctatgtgatactagaaacttttttaaacacccaaatccctctcaaagca

SEQ ID NO: 208676 - DNA, 1000 bp, Homo Sapiens
accctctgcctcccgggctcaagggatcctcctgcctcagcctctcgagtagctgggactacaggcacgcgtcaccaggcccagctaatttttgtatttttagtagagacagggttttaccacggtggccaggatggtctcaatctcttgacatcatgatccacctgccttggcctcccaaagggctgggattacaggcgtgagccaccacgcccggcctcactgaagggatttttttaatgtcacgtggctctcacaggtgcggtgtgtttgggtgcaagtgaagattacgactgatgcttaaaaacaaatgtaaaattccaggtggttgttgctatggggagcagctttaggacaatctgagtggtttcagttgcaagagtgtgcgtgtacgtccaagtgctacagtcaagattcaactgctggctttgagggcctctttaagaacagtaatgataacctaaggcagtttaacagtatggaatggttaccttttagaagttaagctatgggcatggaagttcaatcagtgcattgaagtttttcctttatctctcctatggttaatggtttctgcagaaaaggaccaattgatttctttctaaaacgttgcttcagggtgtagagacctttataggtcatgtttcaacttacagaaaatttttatagttcaaatataaattaagttcaatgtggaatttgtaatagaatttcaggtgaagtaaaatttccactttccttaggctgtttgcagtgcccagcaggccccatgatatcgagatggaagttctgttaaaggaggagattgctcagggatgggcagaataaggaatatgggcagctcaggctaatgatacaatgattgagatgtagaaagagggtcaggcacgggataacgcctgtaatcccactggcttgggaggcccagacaagagaatcgattgaggtcagaccagcctggtcaacagagtgagacctaacctgtacaataaaaaaaaaa

SEQ ID NO: 208677 - DNA, 438 bp, Homo Sapiens
  misc_feature (417)..(418): n is a, c, g, or t
acgaactacaacttcgagctctacgatggccttaagcacaaggtcaagatgaaccaccaaaagtgctgctccgaggcatgacggattgcacctgaatcctatctgacgtttcattccagcaagaggggctggggaagattacattttttttcctttggaaactgaatgccataatctcgatcaaaccgatccagaataccgaagatcggcacaggacagaaaagcgagtcgcaggaggaagggagatgcagccgcacaggggatgattaccctcctaggaccgcggtggctaagtcattgcaggaacggggctgtgttctctgctgggacaaaacaggagctcatctctttggggtcacagttctattttgtttgtgagtttgtattattattattattattattattatattttanntctttggtctgtgagcaact

SEQ ID NO: 208678 - DNA, 541 bp, Homo Sapiens
  misc_feature (1)..(2): n is a, c, g, or t
  misc_feature (4)..(11): n is a, c, g, or t
  misc_feature (14)..(14): n is a, c, g, or t
  misc_feature (19)..(19): n is a, c, g, or t
  misc_feature (24)..(25): n is a, c, g, or t
  misc_feature (29)..(29): n is a, c, g, or t
  misc_feature (31)..(31): n is a, c, g, or t
  misc_feature (34)..(34): n is a, c, g, or t
  misc_feature (36)..(36): n is a, c, g, or t
  misc_feature (59)..(59): n is a, c, g, or t
  misc_feature (139)..(139): n is a, c, g, or t
  misc_feature (198)..(198): n is a, c, g, or t
  misc_feature (261)..(261): n is a, c, g, or t
  misc_feature (265)..(265): n is a, c, g, or t
  misc_feature (273)..(273): n is a, c, g, or t
  misc_feature (359)..(359): n is a, c, g, or t
  misc_feature (403)..(403): n is a, c, g, or t
  misc_feature (420)..(420): n is a, c, g, or t
  misc_feature (422)..(422): n is a, c, g, or t
  misc_feature (437)..(437): n is a, c, g, or t
  misc_feature (469)..(469): n is a, c, g, or t
  misc_feature (471)..(471): n is a, c, g, or t
  misc_feature (483)..(483): n is a, c, g, or t
  misc_feature (486)..(486): n is a, c, g, or t
  misc_feature (492)..(492): n is a, c, g, or t
  misc_feature (501)..(501): n is a, c, g, or t
  misc_feature (525)..(526): n is a, c, g, or t
  misc_feature (533)..(533): n is a, c, g, or t
  misc_feature (540)..(540): n is a, c, g, or t
nncnnnnnnnnttngccgntgccnnattnanggnantctgatctggtgcggtccggagnctccctcctgagcaacatgtcccgccaccctctgctgcacagagtgatggggaaccaggtgttcccggaggtgaccaggntcctcaccagccacactggcaataccagcaactccgaagacatcttgtcctcggcctgntacactgtgaggaacctgatggcctcgcagccacatctggccaagcagtacttctccagtagnatgntcaacaanatcatcaacctgtgccgaagcagtgcctcacccaaggccgcagaagctgcccggcttctcctgtctgacatgtggtccagcaaggnactacagggtgtcctcagacagcaaggtttcgataggaacatgntgggaaccttagctggngncaacagcctcagganttcacctccgattcttagaagagactgtccangnagttaggcttgnagnaagatntgacccagntgagaggcctcaagccctcggtgnntggggtnttctttnt

SEQ ID NO: 208679 - DNA, 493 bp, Homo Sapiens
gttgctagtcattacccctgctacaatagatagtattgtcagtctaagttacagacaaaaaattctaggtgactgattaagaaagccatgtgttttaatttccttcatgttttaaaaacaatggacgtaagtgcagagagacctttgaaaatattaagggaaatctatttaatcctataggtatgtgatgacttgtttttttggaaaaaggtatttggaacatcaatctgtaattatccattttccattcatgcattcactaattcaatatttgatatgtgtctgggagtgctgggaataacataaatacaaaaaaaaaccctaagataatcattcaccagaagctcatagatataatacagttatatagctaaatgcaaccagttgtttttccaaatgtactcatcatctgtaataaaagaaaaatgaagtaaaacatctgaaaccttaaaaaaaaaaaaaaaaaaaaaaaaaaaaaaaaaaaaaaaagggg

SEQ ID NO: 208680 - DNA, 765 bp, Homo Sapiens; identical to SEQ ID NO: 47059

SEQ ID NO: 208681 - DNA, 631 bp, Homo Sapiens; identical to SEQ ID NO: 55857

SEQ ID NO: 208682 - DNA, 1000 bp, Homo Sapiens
  misc_feature (1000)..(1000): n is a, c, g, or t
gtatgtattagtaatattctcccatgtattaactagaacaagaatgtgagatttttacatttcttctagtgtgccttagcaaatctgctggaaagagtctagttgttttgagaattgaaaaaaaaatgtgtctctcaatttgtcaattctaagcctgtaaaggcagaaactatccacagtaatgagtttggtagtgcctggagagaggcaaatgatcattggatgtaacaaaagctacaagagaatagactaaaaaaagaatttcaatatgaaaaagtaaaatctagagagatgacaaatcagcattgggtaccaagcctcaaaatacttgaactagaagccatctcttaaagttaaaagtaagaagctccaggaaaaaataagattgcatagtaaaaagggatagatggcaggattaattcagatcaacaatatttatcaaatgtctaactctggtccaggtgctgtgttaagcagaccaggtttcccctaaagggagagacacgggcttgacaccgcgggggaccatttagcgagcagtgcacatctcacagacaccctatagagacttccaaataggggatacaacacgggcacacatgggctaccgcagacactcacggaaaaacacacggaggaacaacactatattagacacgagggggagtccacaagggggcaaaaccacgcagaaaaaaaaaggcgagcgatgcagatcagcaatgtgcaggtatcataacatcgaaagaaacgaaaagaagcggagagatcaaacaaaataaaacagagaggagcacaagaagaagaccacaatagaacacacacagcaaaatcataaacgagacaaacgaagacaaataaattgagcacgcaaagtataagtattcacaacgaaaagaagaacaaaattaagtgaggacacacaagagagaaggacaggagaataggccatagtaccgatgaaatctctctctgttctctattacttaactacataagn

SEQ ID NO: 208683 - DNA, 958 bp, Homo Sapiens; identical to SEQ ID NO: 48146

SEQ ID NO: 208684 - DNA, 806 bp, Homo Sapiens; identical to SEQ ID NO: 53603
  misc_feature (43)..(43): n is a, c, g, or t

SEQ ID NO: 208685 - DNA, 799 bp, Homo Sapiens
ctttgggctgtcacggctcatagtggaagagaggaaaagggcccccatggagaaggccaccaccaagaaacgcaccttgcgcaagaacgaccgtcaagaagcgctacacggtggtgggaaacccctactggatggcccctgagatgctgaacggaaagagctatgatgagacggtggatatcttctcctttgggatcgttctctgtgagatcattgggcaggtgtatgcagatcctgactgccttccccgaacactggactttggcctcaacgtgaagcttttctgggagaagtttgttcccacagattgtcccccggccttcttcccgctggccgccatctgctgcagactggagcctgagagcagagccccccccggggccgcaggagagggcccgggctgcgcggatgatgagggcccagtgaggcgccaagggaaggtcaccatcaagtatgaccccaaggagctacggaagcacctcaacctagaggagtggatcctggagcagctcacgcgcctctacgactgccaggaagaggagatctcagaactagagattgacgtggatgagctcctggacattggagagtgacgatgcctgggcttccagggtcaaggagctgctggttgactgttacaaacccacagaggccttcatctctggcctgctggacaagatccgggcatgcagaagctgagcacacccccagaagaagtgagggtgccgaccaagcgaacggtggtcccataggacaatcgttaccccgaactcgttcaacagcaataccgggggccccg

SEQ ID NO: 208686 - DNA, 800 bp, Homo Sapiens
gggaagctgtgcttggtgattcaggtagccaatatgaggaagagcctcttgattcagtgccagctctctggcaagctcctgcagacccacgtcaccaaggagggggagcggattctcctcaaccaagccactgtcaaattccacgtggactcctcctctgagagccccttcctcattctgcccatgacattctaccatgtgctggatgagacgagccccctgagagacctcacaccccaaaacctaaaggagaaggagtttgagcttgtggtcctcctcaatgccactgtggaatccaccagcgctgtctgccagagccgaacatcttatatcccagaggaaatctactggggttttgagtttgtgcctgtggtatctctctccaaaaatggaaaatatgtggctgatttcagtcagtttgaacagattcggaaaagcccagattgcacattttactgtgcagattctgagaaacagcaactcgaggagaagtacaggcaggaggatcagagggaaagagaactgaggacacttttattacaacagagcaatgtctgatcacaggggcgccatccaggtttaaccctgcaagctgtttccacatcagaactcccttcaaacacaaagattgctgtgaaaacgaaaatgtgtagacgcactctcaaaactgcacggacatacaaaatcatcttttcctttgatctgtggctaaaacagcattctgtgtttgaagatttcctggtaggtgcctcgccgaagtggatcctcataattcaatggttaataaggttattttaaag

SEQ ID NO: 208687 - DNA, 773 bp, Homo Sapiens; identical to SEQ ID NO: 55918

SEQ ID NO: 208688 - DNA, 728 bp, Homo Sapiens; identical to SEQ ID NO: 40758

SEQ ID NO: 208689 - DNA, 816 bp, Homo Sapiens
agatgaccccggctacctacctcacgtctacagcgaggaaggggagtgtggaggggccccatccctcagctctctggccagcttggaacaggagttgcaacctgatttgctggactcttgggttcaaaagcgactccgtttgaggaaatatattcagagtcaggtgttccttcctaaaaaaaaaagtctattttggagaattgaaataattcatggaagggaatcactattcagggatttttccccttgctcttcttttccctccttaaaagaaaaattaccttctagtcctaggatgaggacacactattagttgaattaaatgcttgatattctcagatcagccatcttgaaccaaagcaaaaccacaagttacactttcttaaaattgattgtcatattttctagagaaacttgaatttaattgtgttattcttagcttccactggcagcctagctttgagggtaaatgaaaatataacccatagattacccagccacttgggaacagcaggtaatactgaagaaaaataaaaatagattttgaaaacgttacttacatttctatgattatgattctgttccatttaagggaaaacttaggtaaatagagaaattttttctataacattgtgtagtcagtatttgaagtgattttttaaaaaataagtatggtccctgtttcactttttgattagaataaatcgattaactatgttctcttgagaaaaatgattatgctgaaaagttaataaacaggtactcttttaaaaatgagaggtggattatttacttgcttgttttgtcggaaaaggt

SEQ ID NO: 208690 - DNA, 914 bp, Homo Sapiens; identical to SEQ ID NO: 49212
  misc_feature (701)..(701): n is a, c, g, or t

SEQ ID NO: 208691 - DNA, 1000 bp, Homo Sapiens; identical to SEQ ID NO: 40528
  misc_feature (666)..(666): n is a, c, g, or t

SEQ ID NO: 208692 - DNA, 752 bp, Homo Sapiens
agagaggacatcatggaaaaagtcagactctttctaggatttgaatcgggagtctgaagaggagaggggtgaatgtgcaagcccttaaccaccccacatcactgatctggaccagagaacctgcttggaagaagtgagaagccatgctagcgaaggccaggagcttgcaggggctcagagcctggcagttgcattagtttgctgtgatgcacagtgcaaagaggtggctggtcaaggaccagtggcatggtgaagtgtctccagggtgcaccgcttttgcggcagtttagtatggacagagtctgggcaggctcagtgtagcaagcctgtcatgagaggtgaggaccaaggtggaggttggtgtgacaggaacaaggaaagggaagaacatagagcaggaacacaggagaacaaagaaaggtcaggaccgtcagcctccaaaggccactgaggaagaggggccatccactggaatggaaaacgaagacgtacctgtggggacaggatcttaaattcagttaaacagagcaggccttcagccaaatacaagaattcttaatttcaggtaggaagatattaagcagctgtcttctaatattagtaacggcaaagattcatgtccatcttagttcacaccaaatctgtctgccagcatcattaacttacctaacttgttagaaaacagacaatgctaacagcatcactgagacctgctagtctaagtgtgctttggcagaccattgcctcagcaa

SEQ ID NO: 208693 - DNA, 648 bp, Homo Sapiens; identical to SEQ ID NO: 44073

SEQ ID NO: 208694 - DNA, 640 bp, Homo Sapiens; identical to SEQ ID NO: 46711

SEQ ID NO: 208695 - DNA, 1000 bp, Homo Sapiens
gccagtgttaatggtcaaatgccacagccagagattggaccgccgacattttcttcacctctggttatccctccatctcaggtgtctgaaagtcatggacaatggtcttaccaggctgatcttgaatctgagacccctgggcagcttctgcatgctgattatgaagagtcactaagtggcaagaatatgttcccccagccatcttttggacccaatccattcttaggcccagttcctattgcacctcctttctttcctcatgttggtatgggtacccttttcagggattcatagaaaatccagtaatgaggcagaatattgtcctgccctctgatgaaaaaggagaattggatctgtctctggaaaatctggatctgtctaaagattgtggttcagtttcaacagtagatgagtttccagaagccaggggtgaacatgtacattctctccctgaagcaagtgtgagcagtaagccggacgaaggccggacagagcaatcttcccagacacgaaaggcagatacggcattggcttccatccctcctgtagcagagggaaaggctcatcctcccactcagattctaaacagagagagagaaactgtgcctgttgaacttgaactaaaaggaccattcaaagctgaagaaaaaaccgaaaaagtaaagatcctaagactgtggtgatgtggtccagcctgggggcccagcttctgtggataaggccgagtgcaaggaccgaaaagaagagagttcagcaagatgcacacgaagtggtcactcatctggaagggagatccaagcagtctaatcaactttgggacggagtacaaagggggggcaccggcgggggcgctccacgttaacggggagcggagagcgcgaatcggtatgttccactcacatcggcggcctaaggcgaagagcacgaggacgcagaggacctggctcgcatgtcaactccggtgtggaaaaaacggaggccccaccagaagaggggtaca

SEQ ID NO: 208696 - DNA, 829 bp, Homo Sapiens
  misc_feature (12)..(12): n is a, c, g, or t
  misc_feature (29)..(29): n is a, c, g, or t
  misc_feature (31)..(31): n is a, c, g, or t
  misc_feature (49)..(49): n is a, c, g, or t
  misc_feature (58)..(58): n is a, c, g, or t
  misc_feature (70)..(71): n is a, c, g, or t
  misc_feature (104)..(104): n is a, c, g, or t
  misc_feature (110)..(110): n is a, c, g, or t
  misc_feature (268)..(268): n is a, c, g, or t
  misc_feature (505)..(505): n is a, c, g, or t
  misc_feature (512)..(513): n is a, c, g, or t
  misc_feature (543)..(543): n is a, c, g, or t
  misc_feature (559)..(559): n is a, c, g, or t
  misc_feature (562)..(564): n is a, c, g, or t
  misc_feature (567)..(568): n is a, c, g, or t
  misc_feature (571)..(573): n is a, c, g, or t
  misc_feature (582)..(589): n is a, c, g, or t
  misc_feature (592)..(594): n is a, c, g, or t
  misc_feature (596)..(599): n is a, c, g, or t
  misc_feature (601)..(603): n is a, c, g, or t
  misc_feature (609)..(622): n is a, c, g, or t
  misc_feature (624)..(627): n is a, c, g, or t
  misc_feature (629)..(630): n is a, c, g, or t
  misc_feature (632)..(632): n is a, c, g, or t
  misc_feature (635)..(657): n is a, c, g, or t
  misc_feature (660)..(682): n is a, c, g, or t
  misc_feature (684)..(826): n is a, c, g, or t
ttatcttttcantcttagtgccatatacncngaagaaatccagccagcngaggaaacngattgcctagcnnaagccagagggtgaccaccaggctcgaggaacnggaacnaagatcaagtggcagagctcgggtcaggttagtggctggaggatctgtttctggaggacagagctcacagaagtcccaacatgatgggcagagcaggtttccatcgtgaatccagccattcatctggatactgacagggaggacctgcccagcccgantacacaaatatgaagtatcttggacccaaactttcagaccttgaggagaacaagaaacctgatagcatccgcttccccagtctgggtaactcagcttcctctcacacttctccataacgaatgctgatttctgaattagacaaacggaatgaggtccatacttttcagcgccatagttcttaaaaatttctggttgatttccaatattctacaatcttgagctgcgctgatattcancacttanntgccaactgattcagttggcttaaccaggntgacttgtcaaagggnttnnncannttnnnttgtcaaannnnnnnncannntnnnntnnncaaaannnnnnnnnnnnnntnnnntnnanaannnnnnnnnnnnnnnnnnnnnnnaannnnnnnnnnnnnnnnnnnnnnnannnnnnnnnnnnnnnnnnnnnnnnnnnnnnnnnnnnnnnnnnnnnnnnnnnnnnnnnnnnnnnnnnnnnnnnnnnnnnnnnnnnnnnnnnnnnnnnnnnnnnnnnnnnnnnnnnnnnnnnnnnnnnnnnnnnnnnnnnnnnnnccc

SEQ ID NO: 208697 - DNA, 870 bp, Homo Sapiens
  misc_feature (464)..(464): n is a, c, g, or t
  misc_feature (473)..(473): n is a, c, g, or t
  misc_feature (500)..(500): n is a, c, g, or t
  misc_feature (521)..(521): n is a, c, g, or t
  misc_feature (529)..(529): n is a, c, g, or t
  misc_feature (549)..(549): n is a, c, g, or t
  misc_feature (553)..(553): n is a, c, g, or t
  misc_feature (596)..(596): n is a, c, g, or t
  misc_feature (614)..(618): n is a, c, g, or t
  misc_feature (620)..(631): n is a, c, g, or t
  misc_feature (633)..(867): n is a, c, g, or t
tctcacacattcacgcatccagtcatccactcagaggccaaccagtcacacattcactcactcacaaaaacacaggttgggatgaccatcatgtgccagcggcataggttggggataaccctgagttcctggtgcagaaaataagattctcagtttttgaccttggattgagaaggacctatgaaatcaagatagacctggagaatcctccctgtccccacccactcaggcacactcagctcaaccaagagggaggcccaaaccccagtgaagcccaaggggcagagccaagctgtggatatgtcagagtttcttgggcatcttctctgctgcctgcctctttccaatcttggttcagatcagggaagcaggaagtatgggaagatccctgcatggccccttgagggcatcctaatgggacggaattggggagtttcttatattttcatgaaatatcctatttngggctcctngtgttggtggaacttgagtgattctgnagggcaggagcctccagtgangagttggnagggatcttggaaaactggntttnattttatttgggtgggtcggaattcagttgggcttaaccaggntgacttgcaaaggggggnnnnncnnnnnnnnnnnncnnnnnnnnnnnnnnnnnnnnnnnnnnnnnnnnnnnnnnnnnnnnnnnnnnnnnnnnnnnnnnnnnnnnnnnnnnnnnnnnnnnnnnnnnnnnnnnnnnnnnnnnnnnnnnnnnnnnnnnnnnnnnnnnnnnnnnnnnnnnnnnnnnnnnnnnnnnnnnnnnnnnnnnnnnnnnnnnnnnnnnnnnnnnnnnnnnnnnnnnnnnnnnnnnnnnnnnnnnnnnnnnnnnnnnnnnnnccc

SEQ ID NO: 208698 - DNA, 402 bp, Homo Sapiens
tgaaggattggttacaagatagaccatcaaacagagaaatgtaagtaagctttttcttaccattagcttgcgagagtatcatagttattgaatgttgtcttttttcctgctctttacatcatctctttaacatttctttatgagtgatgattatttattctagcatctcctctcttcacatagatgagattaggggaacaagtttattatgaattaatataaaacgttaaaatttattattttcatatacgttgtaccataattacaactctactaaggtcttcctaatagtgatacaattctgattttattatttagtcctgtttctaacttattcctgaataaatttgttgagagacctagtttgagactttagttttgtacttgcttgatttctctatc

SEQ ID NO: 208699 - DNA, 645 bp, Homo Sapiens; identical to SEQ ID NO: 41898

SEQ ID NO: 208700 - DNA, 715 bp, Homo Sapiens; identical to SEQ ID NO: 40069

SEQ ID NO: 208701 - DNA, 930 bp, Homo Sapiens; identical to SEQ ID NO: 47127

SEQ ID NO: 208702 - DNA, 875 bp, Homo Sapiens; identical to SEQ ID NO: 48653

SEQ ID NO: 208703 - DNA, 1000 bp, Homo Sapiens
accactaatgacgcaagagacaattctaaggactttcaaaacagcaaagtaggagcagctgctacctctagggatgagggagaaactcaaaaatgcatacaaaaaccattgcatgaaaagtgactggatttgtacatagcgtcaggagatgtgcgtagtgtcaaagtatctcatcacacattacttgataattacaaatgagaaaaatgaaccttcacagtggcaagacttgacttctacctctttcaaaaagatgcaattgtccaattattggtgaaattgtcatttcatgctattggctatttgaaattcctcctctaatttcagaataaatcactgaaattgacatcggccagtctgaatttcaagaaattacctgctgaagacaagagggatctcttcttcagatttgcagtctggggaagacacagcctctactgtactttagaacctgagatatggtggtggagggagccctgggtcgagtggtaagattcacccttaggttagtattgacgtaaggtgacgaggagctgtagacaaaagattgtaaccataagaacttcatagtttttgtattttcaccgagcttatatttggtgtgttttttgtcttttctttatgattatcaataaaatgcttgaaaggagatgaggttggggaataatttttgggaataccacaaaagacacttttgtgatggaaatccttaaaaagacacaatccattacctcattgggttcaaaaggcaattgtgaactactgtggagtttggaaagaagcaatgaggtaatcaaggatactgttgacaatctagcttatcctatggatggaaggaaattgaaactaatggaggcgaggctggtaaaacaatagggtttgagacaattctgtggcattagaaatgaaagaggaaggtgaatccgggagacggagcttgcagtgagctgagatcgcgccactgcactccagcctgggcgacagagcgagactccatctg

SEQ ID NO: 208704 - DNA, 1000 bp, Homo Sapiens
ccagtcacaccagcgcggcctccgccgcacaacaagcatctggctcgagtggcggacccccgttcacctagtgctggcatcctgcgcactcccatccaggtggagagctctccacagccaggcctaccagcaggggagcaactggagggtcttaaacatgcccaggactcagatccccgctctcctactcttggtattgcacggacacctatgaagaccagcagtggagaccccccaagcccactggtgaaacagctgagtgaagtatttgaaactgaagactctaaatcaaatcttcccccagagcctgttctgcccccagaggcacctttatcttctgaattggacttgcctctgggtacccagttatctgttgaggaacagatgccaccttggaaccagactgagttcccctccaaacaggtgttttccaaggaggaagcaagacagcccacagaaacccctgtggccagccagagctccgacaagccctcaagggaccctgagactcccagatcttcaggttctatgcgcaatagatggaaaccaaacagcagcaaggtactagggagatcccccctcaccatcctgcaggatgacaactcccctggcaccctgacactacgacagggtaagcggccttcacccctaagtgaaaatgttagtgaactaaaggaaggagccattcttggaactggacgacttctgaaaactggaggacgagcatgggagcaaggccaggaccatgacaaggaaaatcagcactttcccttggtggagagctaggccctgcatggccccagcaatgcagtcacccagggcctggtgatatctgtgtcctctcaccccttctttcccagggatactgaggaatggcttgttttcttagactcctcctcagctaccaaactgggactcacagctttattgggctttctttgtgtcttgtgtgtttcttttatattaaaggaagtaattttaaatgttactttaaaaaggt

SEQ ID NO: 208705 - DNA, 389 bp, Homo Sapiens; identical to SEQ ID NO: 40544

SEQ ID NO: 208706 - DNA, 1000 bp, Homo Sapiens
ctgcaagcagccctgcaccacccccagagctgactgtggtcacccgtgtatggcaccctgccataccagctcaccctgccctgtgactgcttgtaaagctaaggtagagctacagtgtgaatgtggacgaagaaaagagatggtgatttgctctgaagcatctagtacttatcaaagaatagctgcaatctccatggcctctaagataacagacatgcagcttggaggttcagtggagatcagcaagttaattaccaaaaaggaagttcatcaagccaggctggagtgtgatgaggagtgttcagccttggaaaggaaaaagagattagcagaagcatttcatatcagtgaggattctgatcctttcaatatacgttcttcagggtcaaaattcagtgatagtttgaaagaagatgccaggaaggacttaaagtttgtcagtgacgttgagaaggaaatggaaaccctcgtggaggccgtgaataaggttgaagtcgaaacatcccactggacatttctctaaggccagcttgatgaaaaaaaaaaaaagcaatcaagtcctggaaacactttcaacctagagtagttgtaggaaaaagtcacaacttctttgaggatccttatctttctcaaaacacagccattataacatctgtggaagcctgtcctggttcaggacagttgactgcagaaaagatctacagtcggctgggcacagtgtctcatgcctgtaatgccagcactttgggaggccaaggcaggcagatcacttgaggtcaggagttctagatcagcttggccaacatgacgaaaccctgtctctactaaaaatataaaaattagctgggtgtggtggcgggcacctgttattccagctacttgcaaggcttaggcaggagaattccttgaacccgggaggcagaggttgctgtgagctgagattctgccactgcactccagcctgggcaacaagagtgaaactctgtcttaaaaaaaaaaa

SEQ ID NO: 208707 - DNA, 932 bp, Homo Sapiens; identical to SEQ ID NO: 45857

SEQ ID NO: 208708 - DNA, 678 bp, Homo Sapiens; identical to SEQ ID NO: 53005
  misc_feature (630)..(630): n is a, c, g, or t

SEQ ID NO: 208709 - DNA, 839 bp, Homo Sapiens; identical to SEQ ID NO: 41793
  misc_feature (711)..(711): n is a, c, g, or t

SEQ ID NO: 208710 - DNA, 726 bp, Homo Sapiens; identical to SEQ ID NO: 42573

SEQ ID NO: 208711 - DNA, 969 bp, Homo Sapiens; identical to SEQ ID NO: 45368

SEQ ID NO: 208712 - DNA, 638 bp, Homo Sapiens
gcttcagtttcctttacagaaaactgcgtggtgggaatccaggccaatacagaaaggatcaacaagctgatgaatgagtctctaatgttttcaagccaatgatgattaaaaatgtgttacactcagccaggctgctgggggatgcttcagtttcctttacagaaaactgcgtggtgggaatccaggccaatacagaaaggatcaacaagctgatgaatgagtctctaatgttggtgacagctctcaatcctcatatagggtatgacaaggcagcaaagattgctaagacagcacacaaaaatggatcaaccttaaaggaaactgctatcgaacttggctatctcacagcagagcagtttgacgaatgggtaaaacctaaggacatgctgggtccaaagtgatttacataaatttataatgaaaataaacatgtataaaatttaaaaaaaacagactcccatttcttaaaaacggataagtttgaaaggaaactgctattgaacttaagcatctctagcagagcaatttgatcagtatataaaaccctaggatgtgctaggtctaagatggattaaacaagtataaaaataaaatacatttataaataaaaaggaaaacagacttaaaaaaaaaaaaaa

SEQ ID NO: 208713 - DNA, 741 bp, Homo Sapiens
  misc_feature (524)..(524): n is a, c, g, or t
  misc_feature (532)..(532): n is a, c, g, or t
  misc_feature (537)..(537): n is a, c, g, or t
gagtatttccccaccacgcgcttcagccaccccccgaggtactggccggtgctggacaacgcgctgcgggcggcagccttcggcaagggcgtgcgcgtgcgcctgctggtcggctgcggactcaacacggaccccaccatgttcccctacctgcggtccctgcaggcgctcagcaaccccgcggccaacgtctctgtggacgtgaaagtcttcatcgtgccggtggggaaccattccaacatcccattcagcagggtgaaccacagcaagttcatggtcacggagaaggcagcctacataggcacctccaactggtcggaggattacttcagcagcacggcgggggtgggcttggtggtcacccagagccctggcgcgcagcccgcgggggccacggtgcaggagcagctgcggcagctctttgagcgggactggagttcgcgctacgccgtcggcctggacggacaggctccgggccaggactgcgtttggcagggctgaggggggcctctttttctctcggngaccccgncccgnacgcgccctcccctctgaccccggcctggggcttcagccggttcctcccggcaagcagcccggggtccgcactgcgccaggagccgctgcgaccgcccgggcgtcgcaaaccggccggctgctctctgatttccgagtccaggcccccctgagcccaactcctccagggagccctcaggaagcccttcctgactcctggccaca

SEQ ID NO: 208714 - DNA, 807 bp, Homo Sapiens
gactactctcttcaaagctgtcagacagggacatttaagtctgcagaagtttctgctgccgttgttcaactatgccctgcccccagtactggagtccaggaaggcaggcaggcctccttgagctttggtgggctccacccagttcagtcttcccggctgcttgtttacctactcaagcttcagcaatggcggatgcccctccctcagccttgctgacaccttgcggcttgatctcagactgctgtgttagcagtgagtgaggctccgtgggtgtgggactctccgagccaggtgcgggatataatctcctggtgttccgtttgctaagaccattggaaaagcgcagtattagggtgggagggtcccgattttccaggtactatctgtcatggcttcccttggctaggaaagggaattccccaaccccttgcacttcccaggtgaggcaatgccccacgctgctccttgggctgcacccactgtgtgacaagccccagtgagatgaacccggtacctctgttggaaatgcagaaatcacctgtcttctgcgtcgctcacgctgggagctgtagactggagctgttcctttttggccatcttggaacctcggttcaaacctgagttgtaatactcactcttcctgttgctgcctatgtaattttgtagaagttacctaattgcttccaagcttctgttggattttttgagaactgaatgacatagtacattttgaatgcttaatgtattgctttgtgcatggtattatttaataaatattaagtttggttatactttgcaaaaaaaaaa

SEQ ID NO: 208715 - DNA, 583 bp, Homo Sapiens
gaacagaagtgcttaaacaactagaattagttccaacacagaatgaaagaccaatacatatgtgtagaattactgacagtggagatccttatgcttgattttcatatcaatattttctgtgataatttattactttgtatctgatcagctgtttgtggatttaattaaaaagtacttgataaattgtaatttgaaagccgtggcagacactgtaggttgcctcatctacacccaatccctccccatcttcctttcctgtctctgtcatagagactgtgaaagggtggtactcaatttcctagactcctttgcagccacgggtggccatgagagatggttctggccagtgggacaggaatagaacgccagtggtcctgccccttccccttcatccagtctggaatgtggagaggctggagctacagctgtcatcttgtggccataaagaaaaggctgaggccaggtgtggtagctcacgcctgtaatcccagcacttgggaggccgaggcaggtggatcacaagatcaagagattgagaccatcctggccaacatggtgaaaccctgtctctactaaaactaca

SEQ ID NO: 208716 - DNA, 891 bp, Homo Sapiens
  misc_feature (615)..(615): n is a, c, g, or t
ggaaggaaaaaaggaagtgttggacgacagcgagcgggagaagcggggtcaagaaatggaagataaagtgactagtccagagaaagcagaagaagcaaaattaaaagcaagatatcctcatctgggacaaaagcctggaggttcagatttcttaaggaaacggttgcagaaagggcaaaaatattttgattctggggattacaacatggctaaagcaaaaatgaagaacaagcaacttcctactgcagctccggataagacggaggtcactggtgaccacattcccactccgcaagaccttcctcaacggaagccgtcccttgttgctagcaaagctggctggctgattaagaggctgaactgcatgaatctgctaaatctcattatttctccttaatatgttacttatctactttttatttcctttcattcactagtcatttgagactgacagctttgcaggtagcagtagtgtgtgctgctattgtggaatatacgtgtgtagagttttgattagtttaacagtgcactggtgaagaggacattgttagagcaacataagtaactacttgaaaatagttgtatatattacctaattctagtgtagtactgttnctaaccagtaacagcagtttaacatttatgttggcttcactactcaccttatatagcttggatgttactcttattggaataactcatgggtgggtctcgtattaccttgggttgtgaccgacttgccccgtttagaaggctttacacatagagggccaaatggttcgggtgtcactgaggccacgtgttacaaaatgggaaggcccggaggacagaaagcggcaaccggcaaacgcggagatgccgtcgacaacacgccggcgagtgatcagcaca

SEQ ID NO: 208717 - DNA, 860 bp, Homo Sapiens; identical to SEQ ID NO: 58263
  misc_feature (19)..(19): n is a, c, g, or t
  misc_feature (267)..(267): n is a, c, g, or t
  misc_feature (806)..(806): n is a, c, g, or t

SEQ ID NO: 208718 - DNA, 805 bp, Homo Sapiens
attgtgatctgggagccctcaccgtctggcaccctagtcattggagtcatcagtggaattgctgtttttgtcgtcatcttgttcattggaatttgttcataatattaaggaagaggcagggttcaagaggagccatggggcactacgtcttagctgaacgtttctgagttcctgcatgccggtgatccctagctgtgacctctcccctggaactgtctctcatgaacctcaagctgcatctagaggcttccttcatttcctccgtcacctcagagacatacacctatgtcatttcatttcctatttttggaagaggactccttaaatttgggggacttacatgattcattttaacatctgagaaaagctttgaaccctgggacgtggctagtcataaccttaccagatttttacacatgtatctatgcattttctggacccgttcaacttttcctttgaatcctctctctgtgttacccagtaactcatctgtcaccaagcctggggattcttccaatctgattgtgattgtcgagtttgcacacagctattgaaaggctgtgccactggcacgaatgagaaagaggcacctggtccccagaaaaagccattcatggcaatctgtgggtagtatgatcggctgtttataccccggataggaggcacatattccttgaacagggcgtgcggaccaggtggtatttctctctggcatgacggtttctaccgacttcgcaagttacactggggcctacattgggcagacaacctaagattccacaccgaagaatacacaaattctaac

SEQ ID NO: 208719 - DNA, 510 bp, Homo Sapiens; identical to SEQ ID NO: 59485
  misc_feature (386)..(386): n is a, c, g, or t
  misc_feature (395)..(396): n is a, c, g, or t
  misc_feature (416)..(417): n is a, c, g, or t
  misc_feature (446)..(446): n is a, c, g, or t

SEQ ID NO: 208720 - DNA, 580 bp, Homo Sapiens
  misc_feature (307)..(307): n is a, c, g, or t
  misc_feature (391)..(391): n is a, c, g, or t
cttgatggtactcttctaagaccattaacttaaggtaactttatattggtaactctgaaagtattcatgttgactcatttttttccccatacatttctcacaataaaatgtcagagacatctactaatataaatgggagattttacagtcaggtctaattatcataacatggaagtcatttacttgtcttgcttaatattttcagaccacttgacagtgaaagtttccatttgagctgttgcgtccctggcttgctgagtaaagagcagtggctgggttcgtgtttacttttcaaatatacttcttntggctttctttggattatttacatcttttgtcagcgtagcaaacttttagaaaaccttattgaaaaactgtgcttgctcatgtngtattttgattattctgtctgtgcggcttcatcttggaatggttgtgtgctacaaatgacacttactgaggactgcatttggaatctcctagaggtaactcatggcttataggatcttttgcaactttatgtatgtaaatgtaccctgaattatatatatacacatatatatcatgtacctgtgtgtat

SEQ ID NO: 208721 - DNA, 990 bp, Homo Sapiens; identical to SEQ ID NO: 40652

SEQ ID NO: 208722 - DNA, 444 bp, Homo Sapiens
  misc_feature (444)..(444): n is a, c, g, or t
ttttttgcacttcgcccacacaggacagtggagccccacctggtcagttccacttccgggctcccatgcacttgcccaaggcggcctctttgggacggggatggtttgaggaaacacttttaaagaaaaaaggaagacattgaaaggttttagtttcttccctatctgcatgtcctctcatatagaaagcccagaattaggggctagaactccaggagagggtctccccgactcatctcttgctgacggtcaccaggatgcagaaatagggagatggttagtgggggccaaagatgccccctcccaggccttcgtggttccctcctccgccccctgcaatctttgggaggagtcagtgcctcactccagcagtgagtgcctactgtatgcaggtagtcagccaggcaaagagagactaacggtctcatgggggaacctcttgan

SEQ ID NO: 208723 - DNA, 381 bp, Homo Sapiens
  misc_feature (120)..(120): n is a, c, g, or t
  misc_feature (251)..(251): n is a, c, g, or t
ctttttaaaagtgtttatttttggcaataaagagcacaacataatctccttcatgcgtcatcgtgccacttagctgagccagccagctctgcctccctccccaaagacctttggctttanaggatgaatctgttgaggaggtctgtttccgagctggcctgggctgccccatacccctcaccagcatagctgacggcttcggcgatgttctgggaaccagtgatgtggtgccagtaggatcgccgcggcanactgcgtcgtgggtgtgcagggatacgagtaatgttccgtgcccttgttcagcagcctcacgttcttctccatttccagcaggacccgcttgtgctgctctgcgatggccagggtggcactgtggacgcg

SEQ ID NO: 208724 - DNA, 528 bp, Homo Sapiens
ctctttcaattgttcctcctcctccctgattccttcttcctcctcccttgcctcctctcccagagtatcataaaatactggatctcgatgagcagccttcctctgaaaatgcttagttttggatcctcctttaacaagtacaacttttcttttcaaacaagtacaaccaaacatgcagtctggtcggcggcagtgagcaggttggcgcttctccaaagctagactggaacatacacaacccagtcgacagaagtcattgttgcagggaggggctcgtttccttatgattgtgtggataggtttagttttgagggatgcttgagctgtaagtagagttgttaaggatacatctgctcgctcttctgtgatgtatgtccttggttttccttcccaaagtgcacagtcttccaggtccattagcttcacctgagatttagacaagcctggagggcgacttccctgttgctgttgctgctgctgctgtgcctgccgcaaactaatctgctttggaaatatattttcatccaa

SEQ ID NO: 208725 - DNA, 541 bp, Homo Sapiens
tttcactgtgccccataaatatataatctttcttaaatagaaagaggttgtgattgacagggtgggatgttgctggtcagctaggttaggtgaggatggtgaagccactgtcggacctggtgatgtggagacactgatgttgtgggagactctgccatcaggacctgtccgggcaagcatcacaggtgtgcagggcaggggcagggatgctcagggatgacagcagactgcagcaggcggagacagtgagaaagacaaactggaggtctcagggtcgggatgttgttggcgtgctgacaaagattctctacttggccaaactctggccaggctctggaatcttctcctagggccctctttgccctttcttatgaaatccagttttagcaagaaccctaatttggttaaccataatatctgaccaccctcaatggtacctgactgggttcctctctgaccgtttgcagccaatgtctgatcgccctgcctgcctgcagcaaggactctgtgaggtgggtttagccagagccccctcagccct

SEQ ID NO: 208726 - DNA, 894 bp, Homo Sapiens; identical to SEQ ID NO: 49009

SEQ ID NO: 208727 - DNA, 871 bp, Homo Sapiens; identical to SEQ ID NO: 40625

SEQ ID NO: 208728 - DNA, 815 bp, Homo Sapiens
  misc_feature (117)..(117): n is a, c, g, or t
gtagaagactattacagtgacctgcagaaaaaaatatgactctgggcaactagtgagatttacaactttactattaaataagcttttttattacaactcttttgaaaccaaacatantgagatcatttcctttcgtagggcttaaatatgtatttcccaccttattttcctgttccatctactcatattgttgttaactaaatgttaaccatttaaataagtttcccttctttctctcttaatcagaagagaggggaaccatgctcagatcaaataggaatgtctgtttacacttttgtaatcagtcactttattatgttaattctagttctacctatgttgtaattttaatagaattcttcaagactctccaggtagggtatcattaatactgctaatttaatcctcttaaaatatttgccaggaaaggtatttctacagtttttatcatgtgttccaaccctaagtatctaaatttttattatgaccaaattttattatgaccaataatgatctttccatatttgtgttaatgataaaatattcctgtttgtagcttatacatatatacatattttttctaacctataatgcttttagaagttatcctaaaatccaattggatattcatatgataaacagaattcagaaattaagaatctttaaaggggctgggtgtgggtgggtcacgcctgtaatcctagcaattgggaaggtgaggtaaggtggatcacttgacggcaggagttcggcgcagctggggacatggtggaaacccatcttcatggagggtacaaaaattagcggtgtggtgg

SEQ ID NO: 208729 - DNA, 852 bp, Homo Sapiens; identical to SEQ ID NO: 39966

SEQ ID NO: 208730 - DNA, 967 bp, Homo Sapiens
agaagtggcacatttttcaagagctgaaagaaaagaactgtcaaaccaaaattcaatatccagcaaaagtatacttcagaaatggaggggagatcaagacattctcagatgaaggaacacttagagaatctgtcaccaacataactactctaaaagaatggctaaaggaagttcttaaaatgtaaaggaaatgataaaataaggaatcttggactatcagaaagggagaaaaaacaactgaaagaaggaaaatgtgggtaaatgcgatagactttaatgcttctggagttttttataaatgctgattgtatatcattgtctaaagtggttctgaaatatataaaggaaatacttaaggtaattataaatgagggaggataaagggacttaatagtaggtaaggtttctacacttcactcaaactggcaaaatgtcaataccagtacactgtgataagctatgtatgtatagaataagaaacactttatcaacaagagcacaggaaaaataaaacagaaatgaaccaggtgtagtggctcatgcctgtaataatagctacttgggaggctaaagtggaaggattgcttgaggccaggagtttgagaccattctgggcaacatagcaagatccccatctctatgaaaaaaaaaccataacaaaacaataacccaggaagacagactcagacaagagacattgaagaacttgcgccaccacacgaacaccaaacattagtgacagattaggacctatataccaataatttaccttaatgggttacgtttacacttacgggctccccactggtaataccagtactaccttaactgtcaatgggctctaatatgtcactacaccaggatagtacgagggcctcacaacatgcccagtattgccgcaaagaaccatcataaagcaattcatacgaaaggtaaagaatacaaggtttggcagtagatccaagca

SEQ ID NO: 208731 - DNA, 685 bp, Homo Sapiens
gtttctctacattgttttgaaaccctaaacctgagtgtttaagtaaagttcactaactcattcatttattatctgacagttacacgttgacagcatcctcatgaatcctttatgttaaaagcatagcagaaagtgctcccattacttattggccaaactactgttggtccatgcaagagaaacatggaagtgtcttcatgtatgttatttccttgagggtataaagttcagaaggaaatattgataccatatcttctaatagtttgctctgttcccagtgaacctccttaaactgcatgtatatgtcactgttccaatgtatgtgtgtctctctatcacgtaacccagcacttatttcctcagccaagtggctagggggcgagcctagccaagattttacctccaatggacgcaagtttctttggtgaagatctctcctgagagttcgggactagcagaaagaagcgaggaaatttcgaccgtttggttcttacggataggtatttatgtatttggtctgtgtgaatgtaagctatgatatttaacttttcagaaaaaaataataattttttgcaagtggcatcgaatggttgaccaaacataatggtaagaactgcagtgaagtgggtaccatttttgctattaatggattgttggctttagttataaatgttatcttactgtg

SEQ ID NO: 208732 - DNA, 802 bp, Homo Sapiens; identical to SEQ ID NO: 52274

SEQ ID NO: 208733 - DNA, 655 bp, Homo Sapiens; identical to SEQ ID NO: 48880

SEQ ID NO: 208734 - DNA, 1000 bp, Homo Sapiens
gaaggaagttgtaccaggaagcaaatgctctctgcttttgtggagtggatgttcccacactgagagccagataggcagtagtcctgtgacgtcctcttacatccttttagacttcttcctgtctctctgtctgggaagagcccctttgacctttatttagtatttgttgttattttttgagacagggtctcaccctgttgcccaggctagactgcagtggcataatcatggctcactgcagcctcaacccctcagcttccggagcagctaggactacaggcaaggactactacacctggctaatttttttaaaaaattattttttgtagaaacgggggtctccctgtgttgctcagaaaagtcttgaactctggccgggcatgttggctcatgcctgtaatcccagatactcgggaggctgaggagggagaatcgcttgaacccgggaggcggaggttgcagtgagcggagatcgcgccactgcactccagcctggtgacagagcaagattctgtctcaaaaaaaaaaaaaaaaaaaaaaaaaagtcttgaactcctgggcgtgatcctcccaccttggcctcccaaagtgcagggattacaggtgcgaaccatcatgcccagcctgaataacctttagatgtgaccaccgttatcctgttaaaatctcgattccttttggaattagaacataagcattgttttcagtctccagagttctactgtgtcatatactctacatgttccatactattcactgaaatcacctggattttcccctagttagtaagtatgtagatcacttttttccatccatatcagcatgtcatgctgataacactatcaatatagtgtcattttaaaacagaggagtgggggtgcagtgtttcatcatgactgtaatcccaggaatttgggaggccaaggtaggaggataactggaggccaggaattcaaggccagcctgggcaacaatgcaggaccccatcttgacaaaacat

SEQ ID NO: 208735 - DNA, 1000 bp, Homo Sapiens
gagccaggagattgggcaggtgtagtagaagaggaaaaaagggcggtcattctacaattgggaggatgccttacccgaatcagagaaatgctgatgaaaaccacagggaggctgggcgtggtggctcacgcctgtaatcccagcactttgggagaccgaggcgggtggatcgcttgaggtcaggagtttgagaccagcctgaccaacatggagaaaccctgtctctatgaaaatacaaaggttggccaggtgtggtggcgcatgcttatagtcccagctacttaggaggttgaggcgggagaatcgcttgagcccgggaggcggaggtggcagtgggcctagatcgcgccactgcactccagcctgggcatcgcagggagtctccgtctcaagaaacaaacaaaacaaacaaaaacaaaatcacagggagagtcctttttgtttcttccagacgaataccaacactgaaggagaatgatgacggtgttgggggctcctgggtgtgaggagtgctgctgggtgggaagtgggagaatttggaaaacaattcggaaacatctagtaaagatgaggggagatgtacatctcctgcaaaccggagatcccacttgtaggtatttcccatagagaaattattacacacgtgtcctgggaggcctgaaaatcctagcagccaaaatgaaatacaacagaatgtggccaccactgatggataatggataaatatgcacatgtatgcactgtgtctacagcaaggaaaaggaatgagtgaggccacgtgcaacaaccttgactcttgggagcttggagttgaagttttcttcaaaaagttgcagaagaaaacttcatatgatttcatttaattaaagttcaaaacatgcaggccaggtgcagtggctcacacctgtaatcacacactttgggaggccatggtgggaggattacttgaggccaggagttcaagatcagcctgggcaacatggtgaaactccatctctac

SEQ ID NO: 208736 - DNA, 1000 bp, Homo Sapiens
gggccaagtaatcaaggttttactaataaagatttttttaatttcacctaaatgagtaaaattttactctaattatagatagaaattaatgacatgctgacatatctggcattcatcacagagaattcaattttaattgtccactaagaaaacttcaccatcctcagcacatcaagccccttccccaaccaaattaaacacttatttttaaacgcggctttctaaaaataagctgacgtgtctcttacatgcagccaacaaacatatgaaaaaaagctcaacatcactgagcattagagaaatgcaaattaaaaccacagtgagataccatctcacgccagtcagaatggctactatttaaaagtcaaaaaacaacagatgctggtgaggttacagagaaaaaggaatgcttctacactgttggtagaagttgggagtgtcagttagtttagccattgtggatgacactgtggtgatttctcaaagacctagaggcagtaataccatatgaccaagccatcccattactgggtatatgccccaaggaatataaatcattctattataaagatacacacacgtatgtacattgcagcgcttttcacaatagcaaagacaaggaaaaaaactaaatgcccatcagtgatgggctggttaaagaaaatgtggtacatctacaccgtggaatactatgcagccataaaaaggaatgagaggccgggcacagcggttcacgcctgtggtcccagcattttgggaggctgaggtgggtggatcgcgaggtcagggtttcaagaccagcctggccaatatggtggaaccccgtctctactactaaaaatgcaaaaaaattggctgggcacggtggcacgcatctgtagtcccggctgctcgggaggctgaagcaggagaatcacgtaaacccaggaggcggaggttgcagtgagccgagatcacaccactgcattccagcctgggcaaaagagcgagactctgtctc

SEQ ID NO: 208737 - DNA, 603 bp, Homo Sapiens; identical to SEQ ID NO: 61245

SEQ ID NO: 208738 - DNA, 649 bp, Homo Sapiens; identical to SEQ ID NO: 50209

SEQ ID NO: 208739 - DNA, 866 bp, Homo Sapiens
gctcagagtacgcacggtctgattttctctttggattcttccaaaatcagagtcagactgctcccggtgccatgaacggagacgacgcctttgcaaggagacccacggttggtgctcaaataccagagaagatccaaaaggccttcgatgatattgccaaatacttctctaaggaagagtgggaaaagatgaaagcctcggagaaaatcttctatgtgtatatgaagagaaagtatgaggctatgactaaactaggtttcaaggccaccctcccacctttcatgtgtaataaacgggccgaagacttccaggggaatgatttggataatgaccctaaccgtgggaatcaggttgaacgtcctcagatgactttcggcaggctccagggaatctccccgaagatcatgcccaagaagccagcagaggaaggaaatgattcggaggaagtgccagaagcatctggcccacaaaatgatgggaaacgagctgtgccccccgggaaaaccaactacctctgagaagattcacgagagatctggaacactagggaggcccaagaccacggaagagagacgcggaacacgctcatcggtggagcagtcagaacacacacaacattggtcgatccagtttgtcaacttctatgggtgcagttcatggtaccccaaaacaattacacacaacagggacccaaaaggggggaacattgcctggaccacagactgcgtgagagaaaacagctggtgattcatgaagagatcagcgacctgaggaagatgacgagtaactccctcagggatacgaccatgcccatgatgagaagcacaacgtggtgacctttccgaactggggcatggtgcggacct

SEQ ID NO: 208740 - DNA, 737 bp, Homo Sapiens; identical to SEQ ID NO: 51599
  misc_feature (737)..(737): n is a, c, g, or t

SEQ ID NO: 208741 - DNA, 772 bp, Homo Sapiens; identical to SEQ ID NO: 41286

SEQ ID NO: 208742 - DNA, 764 bp, Homo Sapiens; identical to SEQ ID NO: 47001

SEQ ID NO: 208743 - DNA, 742 bp, Homo Sapiens
gagctgctcagttaggacccagagggaaccatggaaaccccagcgcagcttctcttcctcctgctactctggctcccagataccaccggagaacttgtgttgacgcagtttccaggcaccctgtctttgtctccagggaaagagccaccctctcctgcagggccagtcagaatgttagaagcaactacttagcctggtaccagcaaaaacatggccaggctcccaggctcctcatctttggtgcatccagcagggccactggcatcccagacaggttcagtggcagtgggtctgggacggacttcactctcaccatcagcagactggagcctgaagattttgcagtgtattactgtcagcagtatggcggctcacccctttttggccagggaccaagttggagatcaaacgaactgtggctgcaccatctgtcttcatcttcccgccatctgatgagcagttgaaatctggaactgcctctgttgtgttgcctgctgaataacttctatcccagagaggccaaagtacagtggaacggtggataacgccctccaatcgggtaactccccaggagagtggtcaccagagcaggacagcaaggacaagaccttacagcctcagcagcacccctgaacgctgagcaaaggcagacttacgagaaaccaccaaagtcttacagcctgcgaagtcaccccatcagggcctgagctcgccccgttacaaagagttcacaggggacagt

SEQ ID NO: 208744 - DNA, 236 bp, Homo Sapiens
ggctacctatataataatcaccaggctaaggactgtatcgactcctttgttactcactgtgttcggccattctgtagtcttattcagatccatggacataacagggctcgacagagagataagcttggtcatattcttgaggaatttgccaccttgcaggatgaggcagagaaggttgatgcagcgcttcacaccatgctgttgagacagggaccccaaagggcaacatattggcc

SEQ ID NO: 208745 - DNA, 491 bp, Homo Sapiens; identical to SEQ ID NO: 54958
  misc_feature (268)..(268): n is a, c, g, or t

SEQ ID NO: 208746 - DNA, 609 bp, Homo Sapiens; identical to SEQ ID NO: 48103

SEQ ID NO: 208747 - DNA, 863 bp, Homo Sapiens
agaaaaattttttaaagtgcactaaaatgaccttttaagaatgtttaattttatgaatactatgttaaaatgtaaatctgttggttttttttagtaactatgcacatatcagctctattttcctacatctactttatatctcatattgctgtaagataataaataggtattttaaaacattgtttaaaacagaatgttaaaacactgttgtttaagcatgtttaaatcaaggtattccaaatctcttctaacacaagtaggaaacatgaaataaaatttactttcctccacatagttctctttgaacgataagtttcgtgatgagatattgtcatgttaaatcacaaattgggaaacaccttttggacccatttgtcagccatcagtatttgcatccaaatacctttattcagcatgcctacctgtgccatttttaggaagaatgtcatagaacagaactgcatttccaggttattagttttaaacgacaacttcaggtgggaagtcagctgtctgcagtattaaacatatgtatgatgacggggacctgttctgacacaagcacaatacacttagcatttctaaggattactatactaacatgtatcaccaaaaatatctcctggtcttgatgtaccaaattgatttatatctggcatcagagatgatgctgatcagtaaagtcaacaagaataactggaaggtccatatgacacccttgtcctaagttactaaccgtggggctatttctactacggggctattttcactaacgcatttggacacctaccacagtaagatacctggtcattattactttcatttacttacagcattgcagttcaacattacaggcttgcaca

SEQ ID NO: 208748 - DNA, 850 bp, Homo Sapiens
gggatcccagcggcggtcgtgtagctgagcaggcctggggcttggttctatgtccctgtggctatgtttccagtgtcctctgggtgtttccaagagcaacaagaaacgaataaatctctgccccgcagcgcctccaccccagagacccggaccaagttcacacaggacaatctgtgccacgcccagcgcgagcgcctggactcggccaacctgtgggtgtatgtggactgcatccttcgcgacacctccgaggacctgggactccagtgtgacgccgtgaacctggccttcgggcgccgctgtgaggaactggaggacgtgcggcacaagctgcagcaccacctgcacaagatgctgcgggaaatcacagatcaggaacacaacgtggtggcactgaaggaggccatcaaggacaaggaggaacctctgcacatagcccagacccggctgtacctgctctcacaccggcccaacatgcaagctgtgccgcgaagcagcccagttcaagcgcttgtgggagaagcttctagaaggggagcagtccctttgcaagctcgaggacatccacatgagcctggaggaaggatgttaccgacatgaccgacagtctcttcatcgaccgccagaagtgcatggcccatcgtacttgctaaagccccattctgcagctggctgggtaccagtgagacgcggcacggtgctatcccccaatgcgccaagtaacagggcataagtgtaaaaaaacaacgaccaaaacaagacagaaagagggggacagacaaggcgaggagagagagacaaagagaaaggaggggcaacagggaggagcagagggaaaggagacacagaa

SEQ ID NO: 208749 - DNA, 950 bp, Homo Sapiens
gtgcaatctcaagtgcacaagcatttggcgtaaaatagatcatgaatagtactttatcctcccttttctatctctttctataggaacaactaatgccaggacattctgcatgaaaaagatggtatttagatttgcagaaccctttataatgaatttgtttttatttctcataagctttaagacaaaggttaactaattataattcactgattaaacatttttggtattgttaagcattctcagttccctccagaaaacctactggggcaagtagaggcaagatgtctgttgtgaaatattccagtataacaaaattacaatagtgcacacatttttcactttaaggatccaacattgctctgaggttttagaaacaggcattttagaaccagacagagctgagctcaaaatatcctaactctggccaggcatggtggggcatgcctataatcccaatactttaggaggccaaggtctcctggaggttcacttaaggtcaggaattctagaccagcctgggcaacatagtgagacccaatctctaaaaacaactttcaaaaacaaaaaaaaaaaaaaaaaaacaaacacactttgtgaggacagcatgtggccaccgagagaaggctttacacaaacacaatgttttgaggcagcacgggccccaagaggggtaagtgagacctgtggccaaaagagctgggaccccgaaggggaaaagccccggggggccagaggacaaagggggccgcgggagactcttccacaccaaagatgaagaaaaaacgcgccaggcagtgtggaaaccaacaggaacggtcttcttgaagaaccagacgtccccagaaggtgggaggctctcggaggaggaccacacgcagggaggagcaccaacacaacggagggagggagcagcaaaacgaaggatccggacagctcaaaagttgccccga

SEQ ID NO: 208750 - DNA, 773 bp, Homo Sapiens; identical to SEQ ID NO: 55406

SEQ ID NO: 208751 - DNA, 637 bp, Homo Sapiens; identical to SEQ ID NO: 45844

SEQ ID NO: 208752 - DNA, 692 bp, Homo Sapiens
aaagataaaccttaagtgtaagaaaattatagagtgagtttgtgtgtatgaatttgtacctgttttccgaagaaaaaagcaatactgaacaaaacaaatcattttaacaagatgactactagaaaactaaaagcctcaaaaatgctaaaagaaaatgtattctctgctttgtattgaatttattactgtacattctgtggcttacagttctgaatctccccatgaaaattctgtttatacttgcctggtactcatgatagacccctaattattttgtatcttttttcatataaatattttacagattatgaagtattcattatgtgagctggtctgtgattataagaataatttttacaaaatttagtgcatacaaaatttttaaatgtaattccacaattagtgtattaagttacattttatttagttagaacacttcattctgtttttagttggagaactctatagccctttagttatttttcttttcactttttatagttgacataagtaaatttatttattgagtcaatttgttcaggtaagtactagggaagctttataagtcgtgaggatgttttatatttaaatgtagcaaacatacatgacagttcttgctgtgtaacagatgctccatagtaagccataagtattcctgctaaagttagcttgtaaattcagttcagagatgg

SEQ ID NO: 208753 - DNA, 726 bp, Homo Sapiens
ggtttaagccattcttctgcctcagcctcccaagtagctgggattacaggtgcccaacaccacgcctggctaatttttggatttttagtagagatggggtttcacaatgttggccaggctggtctcgaactcctgacctcaggtgatccacctgccttggccttccaaagtgctggggttacaggcgtgagccaccatgcctggctacaagttcttaattcttaagagacaccatgcctggctacaagttcttaattcttaagagacatggcgataattcatgctgaagaggaaatctggaaacctgaaagatgcgacattgcttttaccaacacctccacatttcctatacataaaaataaattatactagtgtaataccctagaaatgtataaaatgtgacaaagcctttatatgattgtcatacatgattgtaggtgatagaagtcatactgccaaaactcctgtaagtgtgaagaatgtggcaaaatattttattagtgcttataccttatttcacaggaaagctcttatccttgagaaaaattgtgcaaatacaaagaatatggaaaaaccattaatgcctactcacatcttactgaacagaagaaggttcatagttaataaagcattaaaagtgcaattactggtcaaaaaatctttcagaaaatagaagtctttaaagtgaagaatatttattctgaaggacaggcattaccaatttca

SEQ ID NO: 208754 - DNA, 782 bp, Homo Sapiens; identical to SEQ ID NO: 54382

SEQ ID NO: 208755 - DNA, 712 bp, Homo Sapiens; identical to SEQ ID NO: 46683

SEQ ID NO: 208756 - DNA, 784 bp, Homo Sapiens
  misc_feature (435)..(435): n is a, c, g, or t
aacaaaagaatatatactggaataattttgagagtaatttgaagaattagatgcaaataaatttgaaaaccctttaaaaagaaaccaaatggcctaactgacccaagaagggaaaggaaatctaaacagactgataaatacaaaatgaaattcagacacttacagagcagccaggcatggtggctcacacctgtaatcctgtcactttgggaggctgagatgggaggatcacttgaggctaggagtttgagactagcctgggcaaggctcccatctctaaaagaaaagaaattagctgggcatggtggcatgtgccttagtttcagctactcaggaggctgagacgaggattgcttgagcctaggagggcaaggctgcagtgagccatggtcatgccactgaattccagcctaagtgacagagcaagacccttgntctcaaaaaaaaacaacaaagaggttccggagctccaacttaattattgtggggaccaacaacaatcaacgaacagaagcacaaaaaaaccattttgttgggcggtccatggccgcagaagaaagttttgttagaaccaccgtcttggggccagccgggcccagtgtgatgtatgacacgtggtcaaagccggttccaagaaaaaccgcgggccagcaatgggggttgattttcacccattgaaaaagccggggggacaactgaggttttcgaaccacacccgcatagggtcaaggaggacatacggagctatttaaccacggtgtccaaagactctatataaagtgcc

SEQ ID NO: 208757 - DNA, 776 bp, Homo Sapiens
aggtttgaaaagcagagatgatgtcccaaaactagtgactgagttcctggcaaagaaatttgacctggaccagttgataactcatgttttaccatttaaaaaaatcagtgaaggatttgagctgctcaattcaggacaaagcattcgaacggtcctgacgtttgagatccaaagtggcaggaggtctgtgtgtcatggtgaactggagtttctcttgtgagagttccctcatctgaaatcatgtatctgtctcacaaatacaagcataagtagaagattgttgaagacatagaacccttataaagaattattaacctttataaacatttaaagtcttgtgagcacctgggaattagtataataacaatgttaatatttttgatttacatttgtaaggctataattgtatcttttaagaaaacatacacttggatttctatgttgaaatggagatttttaagagttttaaccagctgctgcagatatataactcaaaacagatatagcgtataaagatatagtaaatgcatctcctagagtaatattcacttaacacattgaaactattattttttagattgaatataatgtattttttaaacacttgttatgagttaatttggattacattttgaaatcagttcattccaatgatgcatatttactgggattagatttaagaaagacagaaaaagattaagggacgggcacattttttcacgatttaagaatcattcattacataacttggtgaaactgaaaaagtatatcctatg

SEQ ID NO: 208758 - DNA, 834 bp, Homo Sapiens; identical to SEQ ID NO: 47837

SEQ ID NO: 208759 - DNA, 456 bp, Homo Sapiens
  misc_feature (350)..(350): n is a, c, g, or t
ggggacttcagtgtctcctccatcccaggagcgcagtggccactatggggtctgggctgccccttgtcctcctcttgaccctccttggcagctcacatggaacagggccgggtatgactttgcaactgaagctgaaggagtcttttctgacaaattcctcctatgagtccagcttcctggaattgcttgaaaagctctgcctcctcctccatctcccttcagggaccagcgtcaccctccaccatgcaagatctcaacaccatgttgtctgcaacacatgacagccattgaagcctgtgtccttcttggcccgggcttttgggccggggatgcaggaggcaggccccgancctgtctttcagcaggcccccaacctcctgagtggcaataaataaaattcggtatggcctgaagttcaaagaacagcacaaaaagaaaaacaaacaaaaaaacctg

SEQ ID NO: 208760 - DNA, 393 bp, Homo Sapiens
caactgtgagattttattaaggacataatgattcgtcaataggatgggatgttatgtagtcattaaaaatgattatgtacattatataacagcatgtaaaatgtttatgatgtgacattaagttaacaaatcagatcaccctctgattcgcaaccgtgttaaatgttatgtatccacatctatatacgtgcggacaaagaatataaagaaaaatcaaacataaaaagagttttattaaaacagggaatattaaaaatgccttataattctgctctgacactgcttttcaaggagtttatctggttgaaaataaatagctcagacactgtgcggtgatttctctgagatagatgggattcccattttagtcaaaggtgctgcgtgaacagattg

SEQ ID NO: 208761 - DNA, 534 bp, Homo Sapiens
  misc_feature (383)..(383): n is a, c, g, or t
  misc_feature (519)..(519): n is a, c, g, or t
  misc_feature (531)..(531): n is a, c, g, or t
agtgaagccgagatcgagccactgcactccagcctggtgacaaagcaagactccgtctcaaaaaaaaaaaaaaaaaaagtcggtaagaacggcttaaaaatggactgttttcttttcctatgtggcattgggttgccatgtagacctgtaccccaggtgctttgggcatctgagcctatgatccatattcagcaggcagtaaagaaacggtccttgaagatgagtccttcctggtaatgcttcctgaccaccgacggcactaccagagatgttatccacaccacggtcgaatgtgtggatatcagttaacatctacatggggtgagattgacttttgcaaacaaaagggaaaagatgcacttagaaaaacagtacaagtaatngaccacaaaaacattgtttgactgaaatccagctagctaaaagaatcctcagctcactgaaggaagagacttgaaaatagggaaagaagttctgggtgatttcatcccggggggaatccccaggcttagggttganttgggtcagggnttg

SEQ ID NO: 208762 - DNA, 1000 bp, Homo Sapiens
attggaaggtcgggaggttttccaaagcttcaggagagaataaagctgaaggcagctttattaattaattctcttaccctgaggctgagggcgaacagtaggtagcaagggagtgtaaaggaatttatctagataagtttgtttacttatgccctccggaaatcatgcaagactgctccctgcaaaggggggcgacaatgttcattactcacaaattgtgttggcttcaggcctttggtattctgtctctactgaataaatacaaatggttccagcctatcaggactgcactctcttctcggctgcactaaagctggcactcccccagccgttctcatgcaaaatacctgtgtcagaatactcctttcatccatcactcagccagagtcttcaggacagactcggcatgggacttgtccaaaaaaattctaatcaaaagaggaaaatttgggaatatgccaggaatagtggaattttattttttaaatttttttataggcccatatgctctatctcaagaaacaagatgattgtaacatgtccatgattaactattggcaggattattgctgtgttaatctctgtagtctaaatgagttccttggttctggttctgcttgccttttacgttttcctgtgtccctttcaaaaaggtgtccttgaacagacaccaaagcgaatagggccagttaggcaacagcacaagtacgccttaccaagcagtctatgggaagaacccctcatccaaatcaaggggttaggtaaagaaatcttaactgggggcaacttacggaatgcagttcccgtccagtgtcgggatcactttagaaaggcccgaggggattgaggcccaaattattcagattctgtgataataagggggggaaacgtgcaacaccctagttgggtattactataacgacacattcatatatccccatacattcaagatgaaatgcccacacggaattggaaatattcaggggcgatagatatcacc

SEQ ID NO: 208763 - DNA, 738 bp, Homo Sapiens; identical to SEQ ID NO: 48558

SEQ ID NO: 208764 - DNA, 827 bp, Homo Sapiens; identical to SEQ ID NO: 40267
  misc_feature (12)..(12): n is a, c, g, or t
  misc_feature (228)..(228): n is a, c, g, or t
  misc_feature (278)..(278): n is a, c, g, or t
  misc_feature (741)..(741): n is a, c, g, or t

SEQ ID NO: 208765 - DNA, 709 bp, Homo Sapiens; identical to SEQ ID NO: 40600

SEQ ID NO: 208766 - DNA, 787 bp, Homo Sapiens; identical to SEQ ID NO: 48627

SEQ ID NO: 208767 - DNA, 840 bp, Homo Sapiens; identical to SEQ ID NO: 50669

SEQ ID NO: 208768 - DNA, 847 bp, Homo Sapiens
atagcatatatgttttattggtgaaaaatgtgtgtgtgtgcgcgtgtgtgtgtgtgtacatttttacccccaatgtatatgaccagatcttaaaaatgtatgaaatggctagaagtccacattgtttgacaaatgttacgtaaccctgccaaagttctgatggccaccacagatttgctgtttgaattatgtatgctgtgcctttctgaggaggctaagaatataccattctgctattagcactgggttatgttgtgtttcttagagctcatggttgactgatggttctgctcctaaacagaaaaatgctgtggccttaatagtaactcggaaactttcctaagattcctcctttcaaggcaagtctgcgcatcatcgtgtcatgctgcagttccctcagtagctggctgggtcaagcagaaggagaatcctctgggaattaagagtgctccacactaaaggccaagatggttgtgtgcatgtgtgcacacatgtgtgtgcacaaacacatacaccatttggggacgtaaggtcatgcaccatatctgtctcaaatcagtctataaaatgcacctcggttggctacatatgtccatggaaccatgtgttcccattctgtgggaacaattccaagtgctgaaaaagactgaaattatctgatatgcagcattctacaatagcaaatctaagttttaaaaatatgaatcctcatcaagagataatggaatagcaacagttttggtggaagttcacaattgggtgttaaatttatctagaacaggtaaggtcccgaaatgtggcgagaaaggtttgggtgaagaaccgaaaaaggggaatggagccttag

SEQ ID NO: 208769 - DNA, 805 bp, Homo Sapiens; identical to SEQ ID NO: 52971

SEQ ID NO: 208770 - DNA, 499 bp, Homo Sapiens
atatcaaaatttaaaacttttgtgcaggacgttgtcaacacagtgaaaagggaagccacagaatgggagaaaatatttgcaaattatgtatctaataaggggttaatatccagaatatataaagaatttgtgcagttcaacaacaaaaaaactcccaaacaacctttttaaaaaatagacaaaggactcgctgggcgtggtggttcatgcctgtaatcccagcactttgagaggccaaggcaggtggatcacgaggtcaggagtccaagaccagcctgaccaataatggtgaaaccccgtctatactaaaaatacaaaaattagccaggcgtggtggtgtgtgcctgtattcccagctgctcgggaggctgagacacaagaattgcttgaacctggaaggcagaggttgtggtgagtcgagatcgtgccactgcactccagtctgggcaacagagaaagaccccatccgcaaagaaaacaaaaaaaacagacaaaaaac

SEQ ID NO: 208771 - DNA, 720 bp, Homo Sapiens
ggcctcccacgtagctcgaactataggtgtacaccaccaggcctggccagtggttacattttgtgcatccaacctggagtcccctcctgcatttcaggacatccctatgcccatttagctctgtgtgaagtgctttctctggtgtagtttcccttccactagatggagctgtcaaagtccaacgcagtgtctaggcatgacaaatagctcaagaatacccaagtattttattgttgattttggaactgggactaaaggcagatgattttataagtaatctctttaagagtcatttacttccatctaataaaaaacaaatagacaactttatactgcatggcttattatacttggaggatagaatctataatttaaaaccagaatttagattgaaccagcatgtattatttctggatgaaccaatatgacaacctaaatggatggaggcagatcagaaatagtatacaaaacatacacagcagtagtattaaagacaccgaattcaaaaagtaaaccatgacttaacaacatgcaaattgagcaatattgtgagataacacctggtattctttactcccattactttccttgttgtattctttcctgctaactgagttgtcttaagctttggctagacacttggaatgtgttatcccatccgttggcagtggttcgaggccataggcccagtaaaccgataaccttctgagggtaaaccca

SEQ ID NO: 208772 - DNA, 568 bp, Homo Sapiens
gctgcttcagctgtgagcgcagaaggcaggactcgggacaatcttcatcatgacctgctcccctctcctcctcacccttctcattcactgcacagggtcctgggcccagtctgtgttgacgcagccgccctcagtgtctgcggccccaggacagaaggtcaccatctcctgctctggaagcagctccaacattgggaataattatgtatcctggtaccagcagctcccaggaacagcccccaaactcctcatttatgacaataataagcgaccctcagggattcctgaccgattctctggctccaagtctggcacgtcagccaccctgggcatcaccggactccagactggggacgaggccgattattactgcggaacatgggatagcagcctgagtgctggagtgttcggcggagggaccaagctgaccgtcctaggtcagcccaaggctgccccctcggtcactctgttcccaccctcctctgaggagcttcaagccaacaaggccacactggtgtgtctcataagtgacttctacccgggagccgtgacagtggcctggaaggca

SEQ ID NO: 208773 - DNA, 877 bp, Homo Sapiens; identical to SEQ ID NO: 42557

SEQ ID NO: 208774 - DNA, 791 bp, Homo Sapiens
  misc_feature (73)..(73): n is a, c, g, or t
  misc_feature (168)..(168): n is a, c, g, or t
catagatttttgaaagtcaagtgagaaaaattcagtcaatacttccaacatttaagaaagtgtaagtcctttntgatttattgtttatttctaaaagtaataaatatcaatagaaggaaattaatccattactgttctgaggctgcatggtgctatttttctgacatntggcttaatctggatacctctttctgcttccaggtaccattcattgtattttccatgcaactgggcatccttgccatgttcttgatcttagaagaaagtctttaagtgtttcaccattgagtatgatatttgctgtggggttttcatatgtggcttttattatggtgaggtattttccttgtatttctagctcgttgagtgttttcattctgaaaggatgttgaattctgtcagatgctttttctgcatcaattgagatgatcatgtgttttttcgcccttcattctgttcatgtggtgtattgcatttaccagttttatgtgttcaaccatccttgcattccaggaataaatcccacctggtcatggtgtataatccttttaatatgctgctgaattcaatttcctagttttttattgaggattgttacatcactgttcataagggatatgatattggtctgtagctttgggttttatagtgtctctggctttagtgtcagggagtgctggctcatagaatgagatggtaagtggaggaggtatggtacgagattaggccgggtgcagggttgtgcctgtaatcctaatactttggaaggctgaagtgggaggatcgcctga

SEQ ID NO: 208775 - DNA, 618 bp, Homo Sapiens; identical to SEQ ID NO: 40452
  misc_feature (147)..(147): n is a, c, g, or t

SEQ ID NO: 208776 - DNA, 1000 bp, Homo Sapiens
cagcaaaggttggccttacgaaatcctttgtgtcgatttcaccaagaagtggagacttttcggcatcgggccatctcagatacttggctgacggtgaaccgcatggaacagtgcaggacggaatatagaggagcactattatggatgaaggacgtgtctcaggagcttgatccagacctctacaagcaaatggagaagttcaggaaggtacaaacacaagtgcgccttgcaaaaaaaaactttgacaaattgaagatggatgtttgtcaaaaagtggatcttcttggagcgagcagatgcaatctcttgtctcacatgctagcaacataccagaccactctgcttcatttttgggagaaaacttctcacactatggcagccatccatgagagtttcaaaggttatcaaccatatgaatttactactttaaaggtatggaagctagaggggccactagaaaatcttgagaaaagtaaagttttgtttatatcacaagcaaagtccattgcagaaagcatcattattccaggactcagaatgctgaagagagaactgtgcccccagcagagtctttttctttctttctttctttttttttactgcatcaggattcaatacaatgagaatctactgcaatccaaaagcgcgaattgaaccttgaaccttgagatacatgttcctgggagatgaattgtggtgaacttgagtctaatgattggtcctgctcctttaaaatacttgtttgacattgctaaaggggagattgtacaagtcccataaactcagttacttttaattattatattcaaatatcctcacttgagaaggtgtcctcctttcctctcttacttctgaaatgtatcattttattctgagagtattatccaacataaaattgaatttttctgtaagactacagcaatattttctaattgaaaaagcagtattaaactcaatgatttttcatcgcaaaaaaaaaaaaaaaaaaaaaaaaaaaaaa

SEQ ID NO: 208777 - DNA, 731 bp, Homo Sapiens
gaagtctacatgaaaaggatggtttcttggagcttccacaaacttaaaaccatgaaacatctattattgctactattgtgtgtttttctagttaagtcccaaggtgtcaacgacaatgaggagggtttcttcagtgcccgtggtcatcgaccccttgacaagaagagagaagaggctcccagcctgatgctggaggctgtcttcacgctgacccagacctgggggtgttgtgtcctacaggatgtcagttgcaagaggctttgctacaacaggaaaggccaatcagaaatagtgttgatgagttaaataacaatgtggaagctgtttcccagacctcctcttcttcctttcagtacatgtatttgctgaaagacctgtggcaaaagaggcagaagcaagtaaaagataatgaaaatgtagtcaatgagtactcctcagaactggaaaagcaccaattatatatagatgagactgtgaatagtaatatcccaactaaccttcgtgtgcttcgttcaatcctggaaaacctgagaagcaaaatacaaaagttagaatctgatgtctcagctcaaatggaatattgtcgcaccccatgcactggtcagtttgcaatattccctgtggttgtctgggcaaagaatgtgacggaaattatcaggaaaggaggtgaaaccatctgaaatgtatctcattcaacctgacagttctgtcaaaccgtatagagtatactg

SEQ ID NO: 208778 - DNA, 782 bp, Homo Sapiens; identical to SEQ ID NO: 52231

SEQ ID NO: 208779 - DNA, 529 bp, Homo Sapiens
gacactttgtatggcaagtggaaccactggcttggtggattttgctagatttttctgatttttaaactcctgaaaaatatcccagataactgtcatgaagctggtaactatcttcctgctggtgaccatcagcctttgtagttactctgctactgccttcctcatcaacaaagtgccccttcctgttgacaagttggcacctttacctctggacaacattcttccctttatggatccattaaagcttcttctgaaaactctgggcatttctgttgagcaccttgtggaggggctaaggaagtgtgtaaatgagctgggaccagaggcttctgaagctgtgaagaaactgctggaggcgctatcacacttggtgtgacatcaagataaagagcggaggtggatggggatggaagatgatgctcctatcctccctgcctgaaacctgttctaccaattatagatcaaatgccctaaaatgtagtgacccgtgaaaaggacaaataaagcaatgaataacaaaaaccaaaat

SEQ ID NO: 208780 - DNA, 815 bp, Homo Sapiens; identical to SEQ ID NO: 48702

SEQ ID NO: 208781 - DNA, 802 bp, Homo Sapiens
ggaccgtggtggtgactggatccaggaggtcgagagtcgttcttctctttgcacagacgtgactctgcagctctttaacggcgcccgctgctctcaacccagcttaccccacgtggtcccatggcggcggccgcgctaaggttccccgttcagggcacagtgacttttgaagacgtggctgtgaaatttacccaggaggaatggaatctccctaatagctgggactacaggcaaccaccaccactcctaccttttttgtatttttggtagagatggggtttcaccctgttggccaggaagttctcaatctcctgacctcgtgatctgcccgccttggcctctcaaagtgttgggattgcaggcgtgagccactgctcctggcttgaattttcttataatcccatgaaaccatcatcagagtcacaataatgaatttatctaatctatcacctttgtattcacctggagcctttataaagtttttctctatgcagacaaccattgatttactctgctgtataatactttccattttctagaattttctgactgatgtaataaagtgtttcctcttataatccctgggtgctctcctgcatcatgcttattttgatatcaatgtagacatgggttaatttgttgtatattgctgagaagtatagtctgccatgaaatgtcattatatattcattcatccgtttatggatatttgaagttgcctgcttgtgttttgtgttttgagggggagtctcacctctgtccagccttaggcgaaaaattaaacgcctgtctcaaaaaaatt

SEQ ID NO: 208782 - DNA, 742 bp, Homo Sapiens
  misc_feature (668)..(668): n is a, c, g, or t
gcttcaaggcaaagaggaatgctgggactgggaagaggcaggacatggcatccctcagttcttggcattaccctcacaacctctgttaatcaggatgggtgaagttatgtagcagtaacaaataatgtcaaaatctcaatggctaaaacacagaattttctttcttacactgtacgtgcacgatgggggaaaggggttctgcccatcatagtcactcttggactataggtgttggagcagccaccaaccaggacattgccagccgctgtaccagagagaaaagcgagtcctcaagtggctagcattaacaaataaattcttagccagagagagacacacattacttcagctcacaactcactggcttgagctaaccagaagtcccagccacctacaaggaggccaggatgtgcagtcctaccttaggcccagtagacagagagccgcaggcattcagtgagtagcccacaaggaggctttcatctgctggggtcatgatggattcgtatcttccccctctagttgggaaactaaagcaccagttacagaaacctgaaatatatcgattttccattcatttaacaaaatatttatttaagcactgctgtgagtaaggccatgctggtggttgtagatacaatggtgaccagatacagtccttccttcanagagctcccagtctaatggagaagggaacaaacctatacagtgtgacaagagcttcacagggaggaacccagga

SEQ ID NO: 208783 - DNA, 682 bp, Homo Sapiens; identical to SEQ ID NO: 40621

SEQ ID NO: 208784 - DNA, 1000 bp, Homo Sapiens
  misc_feature (40)..(40): n is a, c, g, or t
  misc_feature (993)..(993): n is a, c, g, or t
  misc_feature (999)..(999): n is a, c, g, or t
gttctaacaccaataattagctttttataaagtgtttgtncaatttaaattgtattttcaaggaaggcaaagatcatgatgccctgtaggccttgagctaaaagatttaaaattcttaccacaaatagcttatgaatatacaaatgccgttcacttagacaagataaataggccttctcttgtctctctttaaaatatcatgggctaaattagtttccaaagaaaatattgtaggatgatcttgagtcgtattagaaatctatttcttaatccaaatctccaactctacctcagggcacggagctgtaattgtgagcatgggtcttgggatgaacgctgcttctttcatattaatctgtgagttccaagtcattctcagtattgaatgtgaccataggctacccaagtggcagttggccctactcgatgcaagctttgtgtgacttttaattgctgctacaaggtaaagaaaaggtgtattctttttaaaactagcaaatacttgaagctcaaaatctctgtatgctccaatttcacaaagcacttttgagtgctttgttcaccctagttaaaagttggttcgttggtttcaaaataagtgagtagcccttttcttgtaaaccacagcagtaaacatttgtgccctgtttaataaaggtagctcaaagcatcgatggctctgagaggtagcgaattctctagtggttttagaatatgtccgtgaaaatatctgttgctagaacccatcacctctcttaatttcataagtaaaattaaattagcacctggctatgagagtgtattattttaaaaagcttctctggtgcaagcatgtttgatgtatgtttttaaaagtctttcgtttttaatttctaatgctttaggatgttagctggacataaaatgccattgatacttaagattgccacatcctaagtgtttaaactgtgacgagtaagggcatttaaagacaacttcagctagacaccgatnatactnc

SEQ ID NO: 208785 - DNA, 732 bp, Homo Sapiens
  misc_feature (562)..(562): n is a, c, g, or t
  misc_feature (567)..(567): n is a, c, g, or t
  misc_feature (570)..(570): n is a, c, g, or t
  misc_feature (584)..(584): n is a, c, g, or t
  misc_feature (607)..(607): n is a, c, g, or t
  misc_feature (617)..(618): n is a, c, g, or t
  misc_feature (628)..(629): n is a, c, g, or t
  misc_feature (641)..(641): n is a, c, g, or t
  misc_feature (658)..(659): n is a, c, g, or t
  misc_feature (695)..(695): n is a, c, g, or t
tttaccactgtagaaaatacctgggtaaagagtaaaaactaaaactttgtttcgtaacacttttaaatatttaagttttcacctgagaatataaagaaagataatcaattgggagacacgatgcagtgtctgtgcagaatacacagcttttaacttggtcatacctctcccccaggatcataaggcagcaaatagtgttaggtagtagatgatgctacctgggttcagttcccattgctttgaaccttgaatattaagaaatccccataagggctggccacggtggctcatgcctataaccccagcactttgggaggccaaggctggcggaccacttgcggccaggggttcgagaccatggccaacatggtgaaacccatctctactaaaaacacaaaaattagccaggcatggtggcgtgcacctgtttaatcccagctactcaggaggctggggcaggagaatcacttgaacctgggagaaatccttgtaaggaagtgtttgtgcacaattacaggttggtaaaagtggtttctaacacagtatctcttcttttaggtgnacagnggnatcacacttacaanatgtggggggattgtggtgttgncttgtgacanntctcaaattnnccagatattctnctacaggatgtatgtgnncatggtcttactgggagccactcacggattaatatntctccctgtctcactcagacacatagggacatcagta

SEQ ID NO: 208786 - DNA, 812 bp, Homo Sapiens
ggggggagaagggtcggggcggcaattgctgattttcatcacacacacacacatatatgtagtaggacggacagatattaaaagagggattacagacacagtgtacattttagaagtgtaaaacaaggggatttccccagcttggtttcttcccagttcatcctcactttgtgttcctttcctggcttttcagcatggtcatttagccctgctttagcttggtgtcatcgcaaacttagtgggcctgcccccctgtcatgtggaatatgaaaaggggaatatggtatagtgtaaagaacactggactaggaattggaagatggggtgggtcaaatgtgataatatgggtacaataactgaatattatgaagtgctacacagacataccacattcaggcgacttacttaattggaatttgaagctggtctctggcttccattcaagaagcaaaactgtctttgaggagaagttggcatttttctgggtgagttacctgcccttttccaagggattttttttgagctgggagaatacgcctgtggtactaaagaactttgccaggcattatggaatttttccctgtctgccaggccagagttcctgctctgtgtccagaaggatgttctttctaatgtggtctgttccataacaggatccacagctgaagttatacttggcaaaaatcaatgcagatgtgagggctgtgtggtatcacctttttttaagctttatctcttgggcagtcaaagggactgaggctggttgctcttcaccccatcgtgtttgacataacctcctggattctattatg

SEQ ID NO: 208787 - DNA, 675 bp, Homo Sapiens
gactcacagctggaagttagaaaagcctcgatttcatctttggagaggccaaatggtcttagcctcagtctctgtctctaaatattccaccataaaacagctgagttatttatgaattagaggctatagctcacattttcaatcctctatttctttttttaaatataactttctactctgatgagagaatgtggttttaatctctctctcacattttgatgatttagacagactccccctcttcctcctagtcaataaacccattgatgatctatttcccagcttatccccaagaaaacttttgaaaggaaagagtagacccaaagatgttattttctgctgtttgaattttgtctccccacccccaacttggctagtaataaacacttactgaagaagaagcaataagagaaagatatttgtaatctctccagcccatgatctcggttttcttacactgtgatcttaaaagttaccaaaccaaagtcattttcagtttgaggcaaccaaacctttctactgctgttgacatcttcttattacagcaacaccattctaggagtttcctgagctctccactggagtcctctttctgtcgcgggtcagaaattgtccctagatgaatgagaaaattatttttttaatttaagtcctaaatatagttaaaataaataa

SEQ ID NO: 208788 - DNA, 838 bp, Homo Sapiens; identical to SEQ ID NO: 45115

SEQ ID NO: 208789 - DNA, 834 bp, Homo Sapiens; identical to SEQ ID NO: 50454

SEQ ID NO: 208790 - DNA, 815 bp, Homo Sapiens; identical to SEQ ID NO: 48708

SEQ ID NO: 208791 - DNA, 766 bp, Homo Sapiens; identical to SEQ ID NO: 54914

SEQ ID NO: 208792 - DNA, 664 bp, Homo Sapiens
gactccgccttccacgtgcacccactgcctcttcccttctcgcttgggaactctagtctcgcctcgggttgcaatggaccccaactgctcctgtgccgctggtgtctcctgcacctgcgccagctcctgcaagtgcaaagagtgcaaatgcacctcctgcaagaagagctgctgctcctgctgccctgtgggctgtgccaagtgtgcccagggctgcatctgcaaaggggcatcggagaagtgcagctgctgcgcctgatgtcgggacagccctgctcccaagtacaaatagagtgacccgtaaaatccaggattttttgttttttgctacaatcttgacccctttgctacattcctttttttctgtgaaatatgtgaataataattaaacacttagaccaaaaaaaaaaaaaaaaaaaaaaaaaaaacactttttgggcgcgcattaggcctttgagaaaaaaagttttttaaaacactttgcgtttgggggcggggccccagttgggtaaggtgaaaagtgtggcatagaggggttcccctagggaaaaatcggggtcaagaaaaaaggggcggggatttttcaccaatttaaaaaccgcgcgggggaaaacgcggggtttttgcaacaatttcagatgggggttccgggggcattaggggc

SEQ ID NO: 208793 - DNA, 542 bp, Homo Sapiens
gaggctccaacatcctccccctgtcaagatgtggcacctcaaactttgtgcagtcctcatgatcttcctgttgctgttgggccagatagatggctccccaataccagaagtgagttcggcaaagagaaggccacggagaatgaccccattttggagaggggtttccctcaggcctattggagcctcctgccgggatgattctgagtgtatcacaaggctatgcagaaaaagacgctgttccttaagtgtggcccaggaatgatgtacataccagggaaagaaaggacagcagtcacctccgacaatgctccgttctatggaatattgattaactgcattttggctggagacacccaagtgaagcaatcttgtatttttaatatttaaaggcagatgtacgctttaaattggtctccatttcttcttagaatgttgatatatggataagcataactaaacttgtcaatttagagtttatttttctatggatacctattaaatggtcccaaaaaaaacacaacgaaacacacagtaccaaccat

SEQ ID NO: 208794 - DNA, 595 bp, Homo Sapiens; identical to SEQ ID NO: 48855

SEQ ID NO: 208795 - DNA, 851 bp, Homo Sapiens; identical to SEQ ID NO: 55828
  misc_feature (733)..(733): n is a, c, g, or t

SEQ ID NO: 208796 - DNA, 910 bp, Homo Sapiens; identical to SEQ ID NO: 44629

SEQ ID NO: 208797 - DNA, 697 bp, Homo Sapiens
gtagtggtggtggagatgggtgtcggggttggggtctgtgtgccggtgggtgttggggttggggtcaccgtaatggtggtggtgatgggtgtcgatgttggggtctgtgtgccagtgggggcgcggttgagtatggggtggggcgcagtgctgaacagggcacaggaggaggaagcgaacagggaccctttggctcccagaacatgaccagctggggcttttccctgtagacaggaggatggatgtgtctttggggaatctgagtagcccaagagaaaagacctaaaattaatgacatcaggaggtccccagtcagcagacccagctggatcccttgctaacgaagcccgtcattaataaccccctcccagtgttcaaggcatcaagctttaaaaatccccatcccttaaatatgagcagataaccaagggcatctgaagaaaacctctgctacaggagattgagaccagaatacacactgggaaaccagagagcgtgcaggaaggagccttagaaagcaggctgtcattaatgtccacgcggaggtgagcgaaaatatcggaacatgaggcaagaacaggaagctctaaaaaaaagcaccaaaaggagtattcgaatatccaaaaaagagaactctcggatgttcacaacccttaaaggcgaaaatagaaaatcagttaagtgggttgaaagatta

SEQ ID NO: 208798 - DNA, 839 bp, Homo Sapiens
  misc_feature (416)..(416): n is a, c, g, or t
gggctgaggcagtagccacaatcagcaaccctggccaccccagcaaaagagtggttatgcatgttcatgtgttctgaggacaaattccactgtctgcagctgccatcactgtgatatccccaaccccatcccaagccacctgcctattgctgctccctcttattgccactctgccctccccattaacagggccacagtacagccactgttgcctccacgtgagcattcagccagaggcctgaagattaccctccccctgcctacaagagccatcacctgcacatactacaggggcctgaaggcagtacttcccagcctggatcaatcccctaccttcgtacctgagcacaccatccaagggcctggggattgctcagcctagtccactgcttttgacacctgagcactgctcccanggtctgagtttgggctttctcaacctgctgctatcaacacatctggcacccacccacatgtgccacttgtgggcctggggactgatatgcccagcctgtcacagccaccaccaacaacagagcagacctcttcggcccaagggggttgcctcaccactgctactgatatcacccacaccatgcccactgcccagggctcaagagcgtaccaactgctggccaatgctgcattcctggtgtctgagcaagccattcggaggcccaataattggcttgcccaggccactgacaccagtgccaagtataacaccacccttgaaaccaagacacgactttgtcagcccaattgctggcaccactgggaacctaacgattgggctacttgaaatacaatcccaaagaacttgcctccattaataactg

SEQ ID NO: 208799 - DNA, 789 bp, Homo Sapiens
  misc_feature (437)..(437): n is a, c, g, or t
caatgaggggcagagaattatggtcatttttgaaatcagtctacctcagtcaacaaaagcaggttcttttaaaacacttttgaagacagatcaagagaaaggaagatacaggtaaccagtcaagaataaaaaaatgagacatcgtttcagatcttatggtattaaaaataaattaggcatctattttaaatcaacaaatttgaaaatttagacaaaatggatacaacttaaaaattgacatacgaaggaatagaaagtctgaatccataatttaaaactttctgtagtgaaatctctaggctcaggtagcttcaccagtgaattttattcattatttaaggaagaaataacagccatatacaagcctatctggagagtggaaaaaggaggaatacattccaacatgttttgctaccagaataaccttgataccaaanactgagacgtgtattatgagaaagaaaaattgtgggccagttctatttatgaatggacatttcttaaaaaaaaaaatcaccagaatgccaggaaacaattgtgtcaagtggatttgcattaaatgggtttaacatttgaagtcgaaatggaatttgaaattaaatttgaagttgaagtgggtcaacatttgcagttgaaatccactgtaataacagaattaaggagaaatgttgttcaaatagataggtggaaaaactgatactctagatatccacttgtagcttgagaactcttaggcaataaaaaaaaaaaacaaaaaaaaaaatttgggcggccgggcgaaaaatttaa

SEQ ID NO: 208800 - DNA, 732 bp, Homo Sapiens
tggccaaagataagtcaccagaatatttgcagaaaaaagttataatggccaaagaatggaacaacttaaatacacaggggatggtaaatccatacaataaaatactgtacacaagaaagaaaacataagtggcactctacacactgctatgaaagcagatcaatataaaagcagaaaaaagccaagtatggaagtgtagactaaatataaaatactcaccggaggccaggcacagtggctcacgcctgtaatcctagcactttcggaggccgaggtgggtggatcacttgaggtcagggtcttcaagacagggtcttcctatattacccaggctgtccttgaactcctgcactcaaatgatcctcccacctcagcctctcaaatagcagggactatagatgcacagcaccatgcctggcttccaaaatggatgaatcttatttcactatgctaagtgaaataagccagtcacaggacaaataatgcatgatcccactatatgagatatctgtaatagtcaaactcatagaaacaggtagaagggtggttgctaggggccagggaaatggagagttgttcaacaggtataaagcttcagttatgcaagacaagtaaggtctaaagatctgttgtacaacatgggtgcctggaaattaaccaatactatatcgtgcactttaaagatttgttaagagggtagggtcttgagttaagtgttcttaccaagaaaga

SEQ ID NO: 208801 - DNA, 577 bp, Homo Sapiens
ggtttcatcgtgttggccaagctggtctcgaacccctgacctcaggtgatctacccacctcggcctcccaaagtgctgggattacaggcgtgacccactgtgcctggccagttttgaattttttaacttaaaaaaattgcaacttttataatattttatgttttataatgaaaaaatgtaatcctattgaatgttcctctgagcatagctttagctatattacttaaattttgatgagtaatatttttatgtttatatatttaaaaacccctgcagttgcagtttttattttttcaacaagtatttaagcacctgctccatctagacattctgccaagtgctgaggacacaactatgtacaagacaaggtctcttgccttcatccagttacagtctgtcaatatagacaaaccaacgaataaagaattttcagatttcgacaagtgtctaggaagtaaataaataatagaaggtgctaattggatgatctgagactgtctctctgaggatgtcatgtttaagttgattggtggtaccaaggtgtgtatgggagtttctttagctttcccaatctatc

SEQ ID NO: 208802 - DNA, 843 bp, Homo Sapiens; identical to SEQ ID NO: 44429

SEQ ID NO: 208803 - DNA, 705 bp, Homo Sapiens
tgctaaaatctcttcactccctaacctgggtcatagtgtataaaaattattattctagaaaacatttaatgagcatttactatgttctagagactgtctcaggttcttcacttatgttagtccactgaatcctctaatagccctatgggatatatgctgttatgatggctattttatagatgaagaaactgagaaacaaaggggtgaagtaacttgcccaagcttctgcagctaggaaatcgacattggttgatcccatgcagtctggcactggagccggtgcccttagccaccatgctgactgactccacaggacacatgagccacatttccatcagtcgagaagacaaaggatcagaataggactccagtgctgctatgtacaatcacagtttctctgattaaaaattgtggaagaccatcccaacggctgcaataagcatgaggtcaaatgcctcccatttaagatcccctactgatatgaccttgtacctggattcacagtgagcaacaccacagccaggccaatctccgagcttttgcttgcatctatttcttgctggttcccaaaggcatctccacatggatcagtgcctctaaacacatcctacccaaaagttgatgcaatcacttctctcccagctccattagcagaggttgaagtcctagtaagaattactcatatgtggagatattaagtcctag

SEQ ID NO: 208804 - DNA, 1000 bp, Homo Sapiens
  misc_feature (160)..(160): n is a, c, g, or t
taccatctttttgtctctattatgatatctattatataagtcagaaggagaaatgacacaaatgccagtataccagttcaagataggatcttggttgatttagctaaaatttaccctacttattggtgcaatttttaataatagaaaaccattcctcatngcttggaatttttatctgcactttccatttgaatattatgttagttgttgaacaccaggtttactctgcaggacaccaagcaaagctttagaaatttctgccatcattaaaccctgaacagactgataagcagcaaaatggaatcagtttaaacaaaaaaaaaaaatctggccaacaaaaaaagtccaggaccagatgggtattcacagctggaattctaccaaactttaaagaagaatgggtaccaattccaaaagatggagaaagagggaatcctccctaaatcattctatgaagccagtatcactctgataccaaaaccgggaacagaccttttaaaacaaaaattaccaagaaatactagatacgtaacatttcaaagaaaattacggaccaatatccctgtgtgacatagattcggaaaagcttcagggaacctagttagtgaatcagggggctataaagacattcccaggatcaagtgggctcaacccagggaccaagggtgattactacagcagtcaaaaaggaacaatgcactaaaagaattcgacaaacatagacgctcaaagacaacaaagagaaaaataaagtgtggggcgcggcccgaaaacatcaacaaagatgggggcgggcaccgagtagaaaaggcacgaaggtccaaaacgcgctgtgaaaggctggtgtgtccccaaaaaacggaggagagggtgaacacacagagtgagtcaggatacaaagacgagccaaacacaggacagaatagaagtgaaggcgaggagacagaggagacgaacagtacgagcaggaaagaagatataagacgacgccatcaaaacg

SEQ ID NO: 208805 - DNA, 674 bp, Homo Sapiens; identical to SEQ ID NO: 39960

SEQ ID NO: 208806 - DNA, 561 bp, Homo Sapiens
ctaggagtgtcttcactgacctatgtaatggttgatgctgactgtccactgggacctcaactggagctgtcttccggagcacctgtgtgtagcctttgcatgtgacctggacttcctcacacatggtggtcacttcttacatgatggtcaaactgcttagatggcagcttaggctccaaaagctagtgtcatagtaaacaagatgcattgcctttaatgactcatctcaaaactgacaaagctatcacatctgccgtactttatggattagaacaataacaagttcactcagattcaaggggagaaaaattaagccctgacacttaattgtggaggagcaaggtcacagtgtacaagagtatatgcaatgggtgatgctgtacagttatatttggaaagtacagcctgggcacagtggctcacacctgtaatcctagtactttgggagagcaaggtgggaggatcacttgagcccaggagtttgagaccagcctgggcaacatattgggacctcgtctctacgcataatttaaaaattagccaggtgtggtggtgtgtgcc

SEQ ID NO: 208807 - DNA, 840 bp, Homo Sapiens; identical to SEQ ID NO: 52044
  misc_feature (550)..(550): n is a, c, g, or t

SEQ ID NO: 208808 - DNA, 867 bp, Homo Sapiens; identical to SEQ ID NO: 48198

SEQ ID NO: 208809 - DNA, 707 bp, Homo Sapiens
gtcctgtctctttgtttccttagggagtagaacctgtcctttttctcatctttcatttttttgacgtgtcctttctaagagaaggctctctgccgcctgttctgggtgataagtgatattttcatctaatcgttatgtggttgggatgatcatggtgaaatactaggaagacatactctgttgatggactttttctctccaaataatcccaaatagattattttctagtgaatggtttatatctttctcgtcacaaaaatgttcctttgatttctagcacaaggtacagcaggatgcaaatgattctcagataaaatgatgttgacagtatttccttaacaatttatgtaaaactatgcataattttcattctaacttttgacatttttctccataaataaaagtaatgcctgatgtttagttaaagtagatccacctttgcttgattttattagtcttgttctatcctatttctttttaatacactgtttagacttgccaacaactcttaactgagaatctcttttccttcctaggctaagtaattgtgagtgggggaggaagaacattaagagcacataatctaaagactttgttccatattgtcgaagcctaagaatatccgtgtgtccttctgatgtactgacgctttgccggtaccacaccatcttggattaccctaagggtatgtactaagacttaaaagt

SEQ ID NO: 208810 - DNA, 730 bp, Homo Sapiens; identical to SEQ ID NO: 53473

SEQ ID NO: 208811 - DNA, 695 bp, Homo Sapiens; identical to SEQ ID NO: 53811
  misc_feature (327)..(327): n is a, c, g, or t

SEQ ID NO: 208812 - DNA, 794 bp, Homo Sapiens; identical to SEQ ID NO: 41278

SEQ ID NO: 208813 - DNA, 696 bp, Homo Sapiens; identical to SEQ ID NO: 44079

SEQ ID NO: 208814 - DNA, 554 bp, Homo Sapiens; identical to SEQ ID NO: 54692

SEQ ID NO: 208815 - DNA, 812 bp, Homo Sapiens
agctgttgatgggatgattgaagaaacagctatgagaggattggctcccatcttttgttactcttgggacatcctgtcatctgagaatgaacaaagaccaattttttgtgtgtgaagcttaagggtcatatgtttgcttgtattttttaatgctaatcttgtgaaaataattgacaggcgaaagaaaactctatttagatgcatattactgtacatgggactatgcttttctcaaagccccattaactgcttcctataattttgatagtgggaccacatacgtaaaaatctctcatttgtgtggagtcatttctgatttcaggggagatccttgtgtttatcagaaagggcagaagtaggggaagaataatttggtatccttatctagtgtttgattgtcaatgctggagaaaaatatctgtaagagtgtttatacagtacacttcagttatcttgatctccctttcctatatgatgatttgcttaaatatccatattaagtaagtctcaaggtagggtaggcagcctgagagtctagaggcctttagttataaaggaatctagccagtgaacataattcttattactagactgccacaaggaagaaattaacttaccctgtatatcagggtacaaaaaattcagtgatgtgcctaaataagttataaagatttaggccaatcagaagctaacagcagtttcaggtagaggtgcatgcctaatgttagttagtgtaaaattccatttacttgattcttctgatccactgaaataaaagctatataagattcaactctgtgaaaaaaaaaaac

SEQ ID NO: 208816 - DNA, 453 bp, Homo Sapiens
acctctgcagttgaagtgattctcatgcctcggcttcctgagtagctggaattatggcacgcaccgccacgcctggctaatttttgtattttcagtggagatggggtttcaccatgttggccaggctggtcttgaactcctgacctcaaatgatctgcctgtaatccaaagtgctgggattacaggtgtcagccaccgcacctgtcctgacacgtgcatttaaagcaagaaacacacacttccaggacatagggctctgtcagcaataactgtcatctttgtatttgcagagatgtaaatatataagaaaccggctgggcacggtggctcacactggtaatcttagcactgtggaagactgaggggggcagattgcttgaagtcccagagtttgagaccagcctaggcaatggagcgaaaccctgtctctactaaaaatttaaaatattggcc

SEQ ID NO: 208817 - DNA, 484 bp, Homo Sapiens
ctgaccctaaggaaatagactgcagcaccaatgggccaactttggggcgatcatcttgcccagaaacatcatgttgaaactcttggtcagaggttggatgaaagctgacagggtccatccaggagcaagtttgagccttgccagttccattttgggtgctgagtggagtggcgactatagcaaacctgtgatctctggctgctgctcagaagaaacaagagggagggatgaataatgtaaaactctggatcaatattctaattctgagcctctattggaatcagctagcaaccacatatcagcttggtttcaacagtttcccagttcatgctgctgagaagttcagagtcaaacctgaatctcacctctgcaaagagcacaggactccatggcaaacgttgtatatacgcaagtcatccctggcaccacattgatttactgcaccaggctttcttcattgtgatgatgttctctctcttttcta

SEQ ID NO: 208818 - DNA, 597 bp, Homo Sapiens; identical to SEQ ID NO: 44238

SEQ ID NO: 208819 - DNA, 784 bp, Homo Sapiens
tggggctgagaggcacacaggaggcagtttgtaaaaaacctatgctatgttaagggatttagattttatcctgaaattaatgatgagcccttggagagctttaaccacagggctgtgaaaccacagagacagcagtgtcgggcacgaagaaatgagtgtcactttctatggctgaatagcaaattactccaaatttaaagtcttaaacagtaaacattatctcccagtttctgtggctcaggaattcagaggcaacttagctgggtggttctggctgaggtttctcatgaggttgtagataagatagtgaccagagtggcagttatctaaaggatgtactgaagctggagaatttgtttctaaggtgactcactctaatggttgggaaggtactgctggctgtcagcaggagagctcagttccttgctacaggaccccccataggacaacttgagcctcctcacaacatgacagctggcttagtaatccaagacagcaaagtgacattaactttggaagtcacatgccaccttgtcattcccatatatccccagtgctaacacagctcagccctgctcagtgcaggagggtcctacacaaggatgtacatacaaggaggtggggatcatggggttatcttggaggctggttttctgggatgggaggcttacatggtgatgcctgtgaccttggaaggtggaaggagaatgatgggcgtacagaggagtgaagaaaggctgcgaggaatagaagatgtgggagaaggaggttaggccaagacaaa

SEQ ID NO: 208820 - DNA, 703 bp, Homo Sapiens; identical to SEQ ID NO: 40010

SEQ ID NO: 208821 - DNA, 713 bp, Homo Sapiens; identical to SEQ ID NO: 40053
  misc_feature (486)..(486): n is a, c, g, or t

SEQ ID NO: 208822 - DNA, 795 bp, Homo Sapiens
ccgccttgtaaaaaagagaaaaaaagacaaaataaaatccccatcaacccgtcaagccagctctagagagagaaataaacctcttgacattgtccttttccaaatacctggtaaagtcggccagaagataaataattgagccattgcatttactggattgtggtgttgcttaattgcataggacggaatgaaccaattgagagtgggagttttctgtctcagagccaagatcttgggtaaatgcagaggagagggaaacaaagacaggctggccttgaaaaaaccatgtgtgcaaactttacatgcatttggggggtgtggttgcactgaagttaacaagattcaaaccgtcgcccaagttggtatttccatgtttggtacacatcactctgtgccatatcaggtcgttgttaagtgtggtgacaaaatcagtggttagtcatttttttaattaaaaatgtgtatagtgtgtacctgctggtcttactgtatgtgcaactaaaggtttacatagtctgtgtatgggttgtaaatttttggctggctgtgctgataaagcattgggcttgaataaagcaaagcagaaaatcatctcaatcttttatatgtggatttagactggtgttaggacttggttcagccagttttctatcttattttatattaaactatgtctgtgttctcttgagtcagcacatttatttccttattacctgttccagacaggagtgctaagccagttttcgtccagtttgcaacagggcgatggggaaaccagtctgaattttaacaaag

SEQ ID NO: 208823 - DNA, 648 bp, Homo Sapiens; identical to SEQ ID NO: 42549

SEQ ID NO: 208824 - DNA, 710 bp, Homo Sapiens
gttcacgctcagtctcctgcctcagtctcctgagtagctgggactacaggcgcccgccaccaagcccggctaattttttgtgttttatttagtagagacgggtttcaccgtgttagcgaggatggtctcaatctcctgacctcacaatccacctgcctcggcatcccaaagtgatgggattacaggcgtgagccaccatgcccagagataaatgatattcttttaaaaaattatactctgttgctggcctatagaaaaacagctgattttcatctattgatttatgtccagagacttagcaaaccctcttttttcttctaatatctgaagactattttaaatttcctatgagtatattttacgtgatacatcatttcttcctttccaattcctatgccgtttatttgcttttcttaccgaatggttaggattgtcagtacaagtgttgaattaaggtggtaattgtaggtaaatgtgtttgttctcaatactgggagaaagtttaaaatatcttgtttttgagtcttggttgaatttttttcttaaattttaaaaggatgttgaacttttatgaagacatttgtaccgcatctaccaaaatgatgtattagttacctattgctgcataacaaattacctaaacatttgttggtgaggatatgaagaactgggtatcttcaaatgctgctggtaggaatgtgaaatggtgt

SEQ ID NO: 208825 - DNA, 581 bp, Homo Sapiens; identical to SEQ ID NO: 58083
  misc_feature (162)..(162): n is a, c, g, or t

SEQ ID NO: 208826 - DNA, 879 bp, Homo Sapiens; identical to SEQ ID NO: 40855

SEQ ID NO: 208827 - DNA, 879 bp, Homo Sapiens
atgatgtgcaggtattacattgctttttacatgtggaaaagtgagcctgcatttatttttaaatgcagttattaaaacatttttgtattccccatcaatgaaaattttcagtgtgaacaaatggtgaatcataagacagttcagtgcttattttctgtaggttttagcaaaaaaatttataaaccacaaaatatttatacatcaggatggtaaatttacatcataaagattgcagatttaatattttccattgtctctgttctgagtgccatgcttgtaacattgataggaggtggacactaggcaactggtattagaagttcatttttttactgaaaaattcaggtacattagccatttgttattttatagtgaaccgtttcaatgtttgtttattgttatttgttggcaaaataaaagtgccttaagttaaaagtttgttttgagatccattacactaaatcagtatcatcagttcataatgcatttatttacaagtccttttattttgcatgttcattgtaaatttaatactgtaaatgtattcaaattcatttacatgcctatggctgcctttgattaaacttcttccaaaaaatcaaaatcacacacacaacataaaaaaacacctaccacactcaccaaaacaaaaaaaaaaatattacaacacaaaaccacacaaaaacatttacaaccattttatcaacgcgcggccacagacaagagacgataactgcaaagcgcccaacgaacaaatggagaccaaaagcggggtagacttagacaaaatagacgagcgggagacagcgggttgtagagaaaacacagaagaactggaggtaagagggatcaaagcggtgactaaggaaataatatcgg

SEQ ID NO: 208828 - DNA, 596 bp, Homo Sapiens
ctcctcacctcaggtgatccacctgcctcggccacccaaagtgcagggattacaggtgtgagccaccatgcccagctgtaaaagtaagatttaatagtgcgatagtcctgctagatcaatttgttctgcatggaaagacggctagaagtcatatcaattcatctaaagccgaagtgtttattttagaaaatttctcttatactgtatttgctaataaaccaacaatttactaaggcacatgtggagataggagatacgccctcatgttccaccaaagttatcttgctgggattcggaagtatttctaaattctatgggtaattctttgggtaatgtagatgatctgtggttgcttcgtcagcaatgtgttattactaacaataatattttctaacttctgcttcataagttttgcagatgaaagttaacaaaagtcagcatctgtgctgcagaatctcaggattgcaggcagatacttatggctcctctgcggggtggagagccttctcttcaagcttctctcttggttgggttcctcagctcttaggaagcaatgtcaccggtactcctgcatcagttacatcatcaaatgcgac

SEQ ID NO: 208829 - DNA, 653 bp, Homo Sapiens; identical to SEQ ID NO: 58257

SEQ ID NO: 208830 - DNA, 775 bp, Homo Sapiens
ggtcctgaaacaggatactcattacgtcgtcatgtggacaggacttctgaaggtgtcttcggaatagaaagtcacaccattataagaaacattaccctaatgaggacgcccctaaatcgggtactagttgcagctctcgctgttcaagttccagacaggattctgagagtgcaaggccagaatctgaaacagaagatgtgttatgggaagacttgttacattgtgcagaatgccattcatcttgtaccagtgagacagatgtggaaaatcatcagattaatccatgtgtgaaaaaagaatatagagatgacccttttcatcagagtcatttgccctggctccatagttcccacccaggattagaaaaaataagtgctatagtatgggaaggtaatgattgtaagaaagcagacatgtctgtacttgaaatcagtggaatgataatgaacagagtgaacagccatataccaggaataggataccagattttggaaatgcagtctctctcatactgggtttaactccattgttttccgactttctcaagctacagacttggaacaactcacagcacattctgcttcagaactttatgtgatgcattggtcctaatgacgatgtcatagtcctttctatggttataataagtctgtggttcgcgtgtctcttgtgtggattttccttttttgctccgtgtagcaggaaagaacttattaaacagcgatactttctgcaaaactcttggacaattaacaatctgcaaggagggtccgaa

SEQ ID NO: 208831 - DNA, 816 bp, Homo Sapiens
cttcagaagcttacagtcagcaaggaacagaaagccaaataaagtaggaaagggtaagatgttcaacgctgggcgcagtggctcatgcccataatctcagcaccgtaggaggctgaggaaagaggatcacttgagcctagaattttgagaccagcctgggcaacatagtaagacttcgtttctataaataattaaaaaaattggccagacgtggtggcgtgtgcctgtgatcccggccacttgagaggctgaggtagaatcgtttgagcccgggcagttgtgactgcagtgatccctgatcatgctactgtactccagcctgggtgacagagtgagaccctgtctcaggacaaaaaaaaaaaaaaaacaaaaaaacaaaaacaatttggggcacgcactgggccccaaaaaacttttaaaaaccatttggtggggccgcgggggccaagtagggtaacggaacaagggtgcaacaaggcagtgtccacagggaaaactccggggacacaacacacaggggatggagcttcccacccagcttaaaaaaacccgcgcggggaaccgaaggcgctccgacaacaacgccagaaggggactcaggagcgacaacagaggaaaaccaaatcacaaagaggaaacacacaaaggagagaccgccacaataacacaattaaaccccgcgagaggctgggaaagacaagcacaagaagacagagcagaaagaacaacgaacaaaagaccaaaaagaaacacaacagagacacagaaaaaaaaagaagaaaaagaagacgacgacaacagcagaagcaaaaaaaa

SEQ ID NO: 208832 - DNA, 608 bp, Homo Sapiens
  misc_feature (330)..(330): n is a, c, g, or t
tcatgctaaagaaaaagagtcaaacagacgtattactggaggggcaatgcaactctcttttacacagctaactatagattattatcctgtatcataaagcaggagatagttgtaatcattggatgtattttagtgatgcaaccaagacaaaaaatggatgggccaatgagttattgcatgaatttgagtgcaacgttgagatgcttaaacaggctgtgaaggatcataatgtaggttcacctcctaaatccccaacacatgcctctccccagcacacacaaacagagaaaggactaccctctgaaagggacatgcagaacgaccttcagntattgatctcaacaatcaaaagctaagcgtaatgtctagttctgttgtggtatagacgttgcagattcgcaatgagtagtaccaggtctctacagcggaacaatgtcgttcttcccccgaaaagcatgatttgctgcaagtaaaaagatccctatatcttccacaagaaaatgtcacgctgtctatatagaattcacaggaactattagctatccagatggaaacggacttttccagctgcctgtcctaagcagatgagagaactcaagaatagatgc

SEQ ID NO: 208833 - DNA, 900 bp, Homo Sapiens
tagtctcaatggaatctaaatactgccttgtgagttctgtgaaaaaatttaatatagcataacagacagaaatgattgtcttgtactttctgaaataagtgatactgcttcttcctccacattagtgaaaaaaagactgaggaaggggcttttataagcaaaaccatttatacatttgaacactctaggagttgtcattttaaaattagttctcaaataatgagatacaactgtttattatataatcaaaacactacatgaaaacaggaaaactgttaaaatagtactataactgttacttgtatttgattattataaactcctgggaaaatgggataaatactgtattaaaaagaagatatcttcccactcagtaccaaaaacttccagatgtaagtaaaaatttaagtgtaaaacataaaaccataaaagtagtataaaaaatacgtgaagtaaatatacgaatattagaatgattcccatttctagcaggtaccaaaaaacacacaccacaacacaaacaacaacaaaaaattgctcgcgcgcagccgcggcgccctccacaaaacatttttcaagcacacaccccagcatagggacccaggtgacacccagaacgagcacaacggacacacagcgggcaacacacgcggtccaccaaaagaacaccccagagaacaacaaacaagcgaccagcggacgaactagctgaccgcacaactacacagaaacgccgcaggcgggcgaaaaacaccagcaacgtgtctccagacacacacaccacagaaaaggagccactaatgaggacaccaacacacagagccaccaacaaagcaaggaggagatacaagacgacacacgagaactacaaaagtacaccccgccaggacggtgagacgc

SEQ ID NO: 208834 - DNA, 652 bp, Homo Sapiens; identical to SEQ ID NO: 40669

SEQ ID NO: 208835 - DNA, 764 bp, Homo Sapiens
gaatgacacaatggggagatatccgatgaatatcatggaacatctgtgaatggatcacaactatgcctgatgtgaatcattcctccctcaaaaattctaaagtttaatagttaaaaaattccaaactgttgtcgtcacataaacttcgttgtttggcttattttaggggttgggagggaaggaatacaatacatactctaggacatttgccagtaagttgtttgactatgtttaagacccctaagtttaggaaaacataaaaaatggttgcagaaggtgatcagcaagagccctgggtcagtgcaagcaataaaaaagactaactgctcaccactgtcatggaagctacaggatttaagtgtcatgagcttggtggatttaatagtttgccctgtcagtctttaaatttaaagggcttagttaaaggtaggtgtgcataacatgataacggaggcactcccacctgcagaatttctatgatttaggggaacttgggggaagcatttggtgtgtagctctttaggtgacagtttctttcactgaatgatcctgtttcacatatatttccctaatttgtgatcacactgtttttttagggcattattacttgaaacaactggtaaaaacacacaacaacagacaagaagaaaacattgtgtgtggcggataggggcctcgaaaaaatttttagaaacccaatcgcgtttggggcggggggcccattgggttaaggtgaacgggccacacgggggttcccaggagga

SEQ ID NO: 208836 - DNA, 755 bp, Homo Sapiens; identical to SEQ ID NO: 52474

SEQ ID NO: 208837 - DNA, 667 bp, Homo Sapiens; identical to SEQ ID NO: 40864

SEQ ID NO: 208838 - DNA, 450 bp, Homo Sapiens
  misc_feature (16)..(16): n is a, c, g, or t
  misc_feature (18)..(18): n is a, c, g, or t
  misc_feature (24)..(24): n is a, c, g, or t
  misc_feature (38)..(38): n is a, c, g, or t
ttcgggtacttgtggnanattttngatgagcttccaanatgaggcaaactgaattgagtcaacttctgaagataaaacctgaagaagttactgggagctgctattttatattatgactgctttttaagaaatttttgtttatggatctgataaaatctagatctctaatatttttaagcccaagccccttggacactgcagctcttttcagtttttgcttatacacaattcattctttgcagctaattaagccgaagaagcctgggaatcaagtttgaaacaaagattaataaagttctttgcctagtatacagttttatttttttatttcattgacaccgatctgtacacagtaaaaaaaattgcttatagaaagctaatcatggcatgtaatatggctgataacctttggaatttgattaaagatttaaaatcacaaaaaaaaaaaaa

SEQ ID NO: 208839 - DNA, 868 bp, Homo Sapiens
  misc_feature (807)..(807): n is a, c, g, or t
ctgccgatcgtgttttattatatggcttattacaaaagaaaaagtcttttgccttattttagggcttccatgtaaaacctagttaaaatacaaaaagtaaattagagaaaaattctgcttaggtagtgaaaattgatagcaacttataagctgtatccttaaaaacctagtcacagatatagaattacgtaaagataaaatgataagcctacttattggcaagaaacaggttaggccacttaagcagcatgtttctaccactatacaaatacatcggcaggtccaaacattaaaccaccattcgattgacaaccttttatttttcaacttaggtaacagtccaaaatcagtgtagactggcgaaaaactaggcaaaaacagcaaaaagtgcagtttaatttagcaaaggctcaagacagtatgtggaaggaaggtgagatttccctcctactgcggcaaggcaagcggcagttactgcccgacagtaacgatggtgtgcgcacccccgatgagaatgctgctgcaacacagactgggacgccgcctcccccattagacctgccagctcattcgtgaaaatctaccaggaacacatcaatgaaaaaaatatgtcaaatatgagttctgtggtataagcaataaattcaccaaattcaactcaaatttgaaatttaagggtagcctggacaatttcctactttttatatatagaaattttagatgggaaatcgttccacataccgtaaacaggctacagaagaatttcaatatcaataaaaagcctgtacaccgcacgtatgactccgnttatttttccgagttagactcaagtgttatacactaactgattccgggttgggatttgcat

SEQ ID NO: 208840 - DNA, 888 bp, Homo Sapiens
tttcagaaacacggacacagcacccatggataacaccttcttaatggtcaaaccaaatggtcctggttttactgggggcggatttcctctcaggtcaaccaaaatgacgttctaacctgaagctgctggctgtttccagttgaacaactcatgaaatctgctctgggacattttgggggaatctcaaagtccttggatcatagaactgagtgctgagaatccaggatggaaagaaatgcagaactatcatagtcacatacatataagagggatggtgttttgtctggttcacgttgatattaacagatcataattctctctgttcagttaggctgacctattgcatgaagcaaatcttttgttgctaccccattgattgaaatgtactagaccttaatttctttattacagacattggtgtacttgaaggtcttatatttaaaagtatttttgaaattgcattgcgcccctctcaccttattaacaataatctatcttaattattcctcattaacaagtcattgcctgagatgagacagaaggacaccttcttaagaatttaaaagcgccttgagaatgacttcctatatggaaattccttttcacgccccgaatggcaaactctcttcccagagaaaccctctcaatacctctttataaacactacaaaaaaaccaaacgcgctcctctgtctcaacggcgaccttctggagcccccccttcacggggctcattaatgacccccccctccacccctgtgttggtattacgctacggcatcgactagcaccttatggccgatcacccttccccgcccccggtctcctcaagccctctctcccacgccctccgccctgccctccattctccccccttcctccccccccc

SEQ ID NO: 208841 - DNA, 770 bp, Homo Sapiens; identical to SEQ ID NO: 40501
  misc_feature (424)..(424): n is a, c, g, or t
  misc_feature (533)..(533): n is a, c, g, or t

SEQ ID NO: 208842 - DNA, 785 bp, Homo Sapiens
  misc_feature (1)..(1): n is a, c, g, or t
  misc_feature (661)..(661): n is a, c, g, or t
ncctaggtttcaccacagccagtccttcagagcccagcagaaaagattacgagacctaccagccatttcagaattccacaagaaattacgatgagtccttcttcgaggaccaggtccaccatcgccctcccgccagcgagtacaccatgcacctgggtctcaagtccaccggcaactacgttgacttctactcagctgcccgtccctacagtgaactgaactatgaaacgagccactacccggcctcccccgactcctgggtgtgaggagcatggcacaggcgctccgggaacagtgcatgtgcatgcataccacaagacatttctttctgttttgtttttttctcctgcaaatttagtttgttaaagcctgttccataggaaggctgtgataaccagtaaggaaatattaagagctattttagaaagctaaatgaatcgcaagttaacttggaaatcagtagaaagctaaagtgatcctaaatatgacagtgggcagcacctttctagcgtgagctgtagagtaacgagaagtgctttatactgaacgtggttgatgggaggagagacgaggcattcgggccggtggggcgtaagggttatcgttaagcacaagacacagaatagtttacacactgtgtgggggacggcttctcacgctntgtttactctcttcatccgttgtgactctaggcttcaggttgcattggggttcctctgtacagcaagatgtttcttgccttttgttaatgcattgttgtaaagtatttgatggacattacagat

SEQ ID NO: 208843 - DNA, 803 bp, Homo Sapiens; identical to SEQ ID NO: 48686
  misc_feature (1)..(1): n is a, c, g, or t

SEQ ID NO: 208844 - DNA, 826 bp, Homo Sapiens
  misc_feature (647)..(647): n is a, c, g, or t
cttgagggaaacttgcaacccttgcctacaaccagactgacagcataatttcttaggaatcaagaatcaatacagggttatttctttagattaaaccttaaaagcccccttggaggctgaagaagcagaggatagccatgcatacacttgaacgtgaaaaatggtcctctttcattggagaggtcttcctcttcagctaaaccgacagagtggtgaaaagaagaagggaccccttgttgaccaaaataatccagacaaatcaaatcggccctttccagcaaggagtggaacagcccaagggtggctagatcacatcttctgctcacaccaccactgagcaaccctctccaggactgccacctatgcataggtcatgccctgtgcaagagcacataaagtgggagctgaagtcctgcccaggctccattcaccaagcagagcttatgttgttgtgtgtctgtgtctacccagaggatgtgggtcctttttaaaatgtgcaccaatgcatcttgtatgagctggcaccagctcggaccatcccaccctcataccctggtcctatccagggttatattccctactttagaagattaattatttttatgaacgtatttagttaattgtaaaaaatgaaatatatgacacanaattgaattaatttcagaggtaaaggtcagaatattaccatgtatgtgaattatgtttgattgatatggatatatcaagagagttatatgatttacatttttggggatcagaggtgaggacaattaactttgtaaatgttggaataaaatattttgagtttggaataaaaaaaaaaaaa

SEQ ID NO: 208845 - DNA, 778 bp, Homo Sapiens
  misc_feature (538)..(538): n is a, c, g, or t
  misc_feature (778)..(778): n is a, c, g, or t
atggaggaattggttgagggcgttcgctgggcctttattgacatgctagagaaagaaaatgagtggatggatgcaggaacgaaaaggaaagccaaagaaaaggcgagagctgttttggcaaaagttggctatccagagtttataatgaatgatactcatgttaatgaagacctcaaagctatcaagttttcagaagccgactactttggcaacgtcctacaaactcgcaagtatttagcacagtctgatttcttctggctaagaaaagccgttccaaaaacagagtggtttacaaatccgacgactgtcaatgccttctacagtgcatccaccaaccagatccgatttccagcaggagagctccagaagcctttcttttggggaacagaatatcctcgatctctgagttatggtgctataggagtaattgtcggacatgaatttacacatggatttgataataatggtagaaaatatgataaaaatggaaacctggatccttggtggtctactgaatcagaagaaaagtttaaggaanaaacaaaatgcatgattaaccagtatagcaactattattggaagaaagctggcttaaatgtcaagggggaagaggaccctgggagaaatattgctgataatggaggcctgcgggaggcttttagggcttacaggaaatggattaatgacagaaagcagggacttgaggagcctcttctaccagcatcacattcaccacaaccagctcttcttctgagttatgctcatgtgaggtgcaatn

SEQ ID NO: 208846 - DNA, 588 bp, Homo Sapiens
aattattatactttaagaaaaaagatccactcagatcctatgctctccattaccactcccagatttggcggggttttggggcatgctgcagttgtccatagaaaatattagtatgaaatttgatgaacttcatcagttaaaggccaataattggaaacagatggatcctcttgacaagaaggtagaacaatgtagattttgtatggttcatttaaaaacctgcacaaacactggacagtctaaataggcttctgcattcagtcctgctgtttacaatgtgaaatggagctgatatcatattaatttcattgtaatgacaatgtttacatagtaatcatttgggatattatctgtaatatgtttcaggcatatttttaaagaaaaacttgtctttgtgaattggaaaatgggaatgtggctttttttgttaattaaactttaagttaaaccattttagtcactggaaggaactgcctccattctggtttttaaactaaaataaatgacatcttcagtgcctgaatgcttaataaaaacaaatacaaaagcagaccatgcaatacaaccaaaaggctcccttggcctcat

SEQ ID NO: 208847 - DNA, 923 bp, Homo Sapiens
tcgttggcaacttgggaccacattttcagaggtaaatctttattcaaaatcagtatttaatgtattaaagacttagacataagaggctgaatttccctttgttcacacaaagtctcaaacttattgttgcaatatgcttttggattttttaaaagacatcactgttacgtctaataggtgctaaccgcctctttaagaatggaatttctggtgactcagacatccatttgctgctcatttctgcattaatactgtttcatacatttattttattttcatactatttttctgtatatgagaaagaaaaagactcaaatataaaatgtacaacaagtggaacaagcagtgattggctgacaccccacggccaagggcaggctccagcttgtttctgagtataaaggtcatcacagtatggtgcatactggagcatcatattaagagtggaatttagccaaaccccttatttgtatggatgtatacgcctctttggcattcgataggcttggtctttctttcctcttgaaggcagatatcggtatcttgcctttttatcgcatgaacagtgagcatacctgacatttgttcctccagggaaatggcttctagagccattgacgatttcttggtctcttacttttcttggcattggcagtttttgatcacggcctctttaaagaatccatacacctaacttacgaattgttacgataattctactcccctgatcttttataataaatgttggtatcgacaaagttcctgattcattatgtctttgctctttcgcgagctgtttatgctatattactttccccgtgaccgtcgatctatttttatatatccttggctaatgaaatctcacttcctatttatcctccgatgttgtttacactgggcattaataatctcctgcctttttg

SEQ ID NO: 208848 - DNA, 721 bp, Homo Sapiens; identical to SEQ ID NO: 51927

SEQ ID NO: 208849 - DNA, 636 bp, Homo Sapiens
  misc_feature (530)..(530): n is a, c, g, or t
  misc_feature (548)..(548): n is a, c, g, or t
  misc_feature (556)..(556): n is a, c, g, or t
  misc_feature (586)..(586): n is a, c, g, or t
  misc_feature (599)..(599): n is a, c, g, or t
  misc_feature (603)..(603): n is a, c, g, or t
  misc_feature (628)..(628): n is a, c, g, or t
attgtaccattccttcatcaacaaagaaacagaaaactataattatcatgttggaattcattgctaatttgccaccggagctgaaggcagccctatctgagagacaaccatcattaccagagctacagcagtatgtacctgcattaaaggattccaatcttagctttgaagaatttaagaaacttattcgcaataggcaaagtgaagccgcagacagcaatccttcagaattaaaatacttaggcttggatactcattctcaaaaaaagagacgaccctacgtggcactgtttgagaaatgttgcctaattggttgtaccaaaaggtctcttgctaaatattgctgggatgaagctaattgtgcacatcttgtctaattttcacacatagtcttgatgacatttcactgatgcttctgtcaggtcccactaattattagaatataagaaatctttattaatgtttagatttttcatttggtgtgtaggaaaatattctttgtatgattgtagtttctgtaaatgacactntctatgctgaagtctttntgtctttntattaacagtataattgtgttgattctttntaatgctgctacnttanaattacaataaaactctggcctcgntgggctca

SEQ ID NO: 208850 - DNA, 771 bp, Homo Sapiens
ctagggtctacgctccgtcacccattctggaatgcagcggcgtgatcacagtacactgcagcctctacttgttaagcaccatggtggttgacaagaacaagcgccttacgaaaggtggcaaaaagggagccaagaagaaagtggttgatccattttctaagaaagattagtacgatgtgaacgcacctgctatgttcaatataagaaatattggaaagacgctcgtcaccaggacccaaggaaccaaaattgcatctgatggtcgtgtgtttgaagtgagtcttgctgatttgtagaatgatgaagttgcatttagaaagttcaagctgattactgaagatgttcagggtaaaaactgcctgactaacttccatggcgtggatcttaccagtgacaaaatgtgttccatggtcaaaaaatggcagacaatgattgaagctcacgttgatgtcaagactaccgatggttacttgcttcgtctgttctgtgttggttttactaaaaaacgcaacaatcagatacggaagacctcttatgctcagcaccagcaggtcctgagaaatccggaagaccttttatgctcagtaccagccaaatccggaaaaagatgatggaaatcatgacccgagaggtgcagacaaatgacttgaaagaagtggtcaataaattgattccagacagcattggtaaagacgtagaaaaggcttggcaatttatttatcctcaccaatgatgtcttcgttagaaagtaaaaatgctgaagaagcccag

SEQ ID NO: 208851 - DNA, 840 bp, Homo Sapiens; identical to SEQ ID NO: 40356
  misc_feature (42)..(42): n is a, c, g, or t
  misc_feature (58)..(58): n is a, c, g, or t
  misc_feature (819)..(819): n is a, c, g, or t

SEQ ID NO: 208852 - DNA, 700 bp, Homo Sapiens
  misc_feature (654)..(654): n is a, c, g, or t
ctttgcgatccccttttattgttctaggtggttatcaaaattaacatatggctcagaatatcatcctggagtcttgaccgatgacagcgaaattatttgtcagcctggaaattttcatgtcctaaacatataccagttatgggagtgttcatgatttaagaatcataggtattctatgaatttttggctgctcttaaacatttgtcaataaactaatgttggttgggacctacaataaagtgtagtttagatattgatataccactcatacataatacaaatggggacttttaatgacagtcagaaaaacgagaatgattcacattaatttcgagccttctatgtgtcctgcatcacccagtaggtatttcacatatgctatatgttttttattacaaaaataacactgcagagagcccataactgttttccaggaatcctgaattttctctttagtgatgctacacatacttactttggacatcagcaatctaactgccggctttgcaaactcattcttcaagaggcaagtcattcttggtaacagcgtcctcaggaatgaagctcctgcagttgaggttcagtgaacgctgcgtcagggatctgcgcagcacgtgtggaacccaatgagagttcttgctgtgcaggcaccgngatgctcacatagtaaaaactcgagttcatcggggaaccccaggaa

SEQ ID NO: 208853 - DNA, 849 bp, Homo Sapiens
ctgccgatcgttttttattaagtgttcattgcatcgagacagttgggtgttgaggatggaatgcaagaggtgtagggaaacatgttttctgtctcccagaaatatgaaaggagatgggctgaaaacattaaatcaaaactaataatataataagagcttcagttctttgttacaaaatgtacgtgcttcaaaaaggcatatttttttaagactgagtctcactctcacccagactggagtgcagtggtgcaatctcagctcacttcaacatccgcctcccaggttcaagtgattctcctgcctcagcctcctgtgtagtgagattacaggcgagtccaccatgcctagctaatttgtgtatttttagtagagatggggtttcaaccatgtaggccaggcttgtcttgaactcctgacctcaggcgatccacccggctcagcctcccaaactgctaggattacaggcgtgagccactgtgcctgatcaaaaaaggcataattaaactatgaatattctttctaaacaatgggcaaagtcacagtggattaactttcacctatggtaataaatcaaattctagttctgacaaaggccccaccccacagggattacaatgacccaaaatatttactttgtggttctcattcagttctatagaattcttcttaatgtgcaaggaaacatctgataatacctttgggaaagtggccttattggtttacctaaaacttatagaaacctccagagaaacatgggattaaaaggtcttggtggacccacaaaaaatctttatttcataaaaaattgggaggaaatatgaaaatggtgttctttttaaaacttagggg

SEQ ID NO: 208854 - DNA, 759 bp, Homo Sapiens
aacatgatctcctatactgaagttggtcaattttaacagggaggtagaaatcaagagaaaaatataatcagccttaattttttgttctctatccaaacaagacacaaggggcctggtgtggagctacatatgaatgaagtaataatagtaatgacaacaacaacatccacagcctcttatccaaaggcagtaaggggtgttgtctgcatgcgtgagtgtgtgtgtgtatctcggtgatattcagtttttccggtagaccagtgccagccgtatgctggctggtatcaatcggatactgtggctttcccagagatggggtttggtgtaggcacgagggacgtggcgctgacgacggtgggggtggcagccttgcaggttcccacggtggcctggctcacacacacttgctgctgcccaaaaattttcgttacagatctgaccgtagatgaagacacgggagccattcctttataatgttgtgcaagaccgtttgctgagagggccacggtaggggaagtggcagttgcataacccctcctgtactctcagcattgtggctccaggcttcgagagctgttaggtgggttggaacagcttcaaggcgctatcggatattttaatttagagatgcctgtcctccatgggctgaatgtgtaaacaaggtgggttcctgacaaagattacttttaagagtagtggcctcgccgaaagaagacttactccaaaattcttggacaatacccacaggaagtctgttct

SEQ ID NO: 208855 - DNA, 563 bp, Homo Sapiens; identical to SEQ ID NO: 49031

SEQ ID NO: 208856 - DNA, 751 bp, Homo Sapiens; identical to SEQ ID NO: 45124

SEQ ID NO: 208857 - DNA, 652 bp, Homo Sapiens
  misc_feature (10)..(10): n is a, c, g, or t
  misc_feature (21)..(21): n is a, c, g, or t
  misc_feature (32)..(32): n is a, c, g, or t
  misc_feature (52)..(52): n is a, c, g, or t
acatctgtgnaaaaaacccanatatgcaaagnaaacacagctactcttaaanaaaaaaaagaaagagcatggtttcagaagaaagacttgaaaacactgtataggaacaataatccaccagcttctcatctttgtgtcaaaacaccaaaaaaggccccttcatctctaacaacccctggatctacactgaagtttggagctataagaaaaatgcgggaggaccgttgggctgtaattgctaaaatggatagaaaaaaaaaactaaaagaagctgaaaagttatttgtttaatttcagagaatcagtgtagttaaggagcctaataacgtgaaacttatagttaatattttgttcttatttgccagagccaaattttatctggaagttgagacttaaaaaatacttgcatgaatgatttgtgtttctttatatttttagcctaaatgttaactacatattgtctggaaacctgtcattgtattcagataattagatgattatatattgttgttactttttcttgtattcatgaaaactgtttttactaagttttcaaatttgtaaagttagcctttgaatgctaggaatgcattattgagggtcattctttattctttactattaaaatattttggatgcaaaaaaaaaaaaa

SEQ ID NO: 208858 - DNA, 617 bp, Homo Sapiens
  misc_feature (13)..(13): n is a, c, g, or t
  misc_feature (17)..(17): n is a, c, g, or t
  misc_feature (20)..(20): n is a, c, g, or t
  misc_feature (28)..(28): n is a, c, g, or t
  misc_feature (42)..(42): n is a, c, g, or t
tttccgaggcgtncctnctncccttttnacctcgggactcancgtcttcctcacagcacttccatgtcatctgccccgtgaaatcagcctaacgccgtttctcaatgacgtggatcgccctaggccaccgcaaccttccggaagctctctcagctcagttcccattctcccaccatctcttggttctccttctacctcaccggttgctagtcctccgcttcgcagctgaaaatgtgcccggggcctactgtgggcctagccaggcctgcttacgcagtgcggtttcccatgaatgatgcccagtcattatcacataacctgtggcaagccagcaagatggccctggtgacagcaaaagaaactgcactaggacctgaatgtagatctcagtcatgttccttactaacagcacgttttgcaaccatgcgttaaagaaacatctgactcacaacaaaattttaaagggtttatttgagtgaaaagcaatttatgaattggggaacacctgactgaaagagcgttagtattccagagacaaaacatcaagtgcaagtttttattgggaaaatgtagaagcacaataaagaaattattttgattggttaaaaaaaaaaaaa

SEQ ID NO: 208859 - DNA, 561 bp, Homo Sapiens; identical to SEQ ID NO: 48517

SEQ ID NO: 208860 - DNA, 841 bp, Homo Sapiens
aggccgcatactctttatttatttacttattttgagatggagtctcactctgtcacccaggctggagtgcagtgggacgatctgagctcgctgcaacttctgcccctcctccctccaggttcaagcaattctcctgcctcagcctcccaagtagctaggattacaggcacacgccaccttgcccagctaatttttgtatttttagtacagacagggttttgccatgttggccaggctggtctcaaattcctgacctcaggtgatccacctgccttggcctcccaaagtgctgggattacaggcatgaaccaccacacctggtcttgttgaggattcttgcatctatgttcatcagggatactggcctatagattttttttcttgtgtccatatctagttttggtatcagggtaatgctgccctcacaggatgagtttgagaactggtatgagttcttctttaactgttcagtagaattcagcagtgaagccatcagggcctggacttttctttgatgggagactctatattactgatttaatctcattactcatagttggtcttttcaggttttctatttcttcttggtccaaatttggtaagttgtattctgttcaagaatttatccatttccatttgggttccaatttgttggcatataactggtacataatagtccataatgatcctttgtatttctgtggtattcggtaatgtcttataggccatgctgtttaaacaccctgtagggggggttaacaagaaagtactggtacttaattcgcaacattgtgtcatagcactggttgctttctatctaactgtgatatgcttattgcat

SEQ ID NO: 208861 - DNA, 704 bp, Homo Sapiens
  misc_feature (656)..(656): n is a, c, g, or t
  misc_feature (691)..(691): n is a, c, g, or t
cttggggctatctgtgtctccaaatccctgtctgtcgctgggagctccatctctcctgccccacccatcatgccagagactgcagcctcagacccccgggaggtgctggagccacagtgcagaggtggtgcccaactcagaggaccagggaccgggcgccgccttccagctcagtgaagcaagccctccccagagctcaggcctgcggttcagtggctgccctgaactttggcaagaagatctggagggggcccgcctgggcatcttctactaaatggcctcggcttccctctttccatccaggaatcagtcctgtagcttgggtgcctccttatttgttaattagtggcttttcatgttctcctttagccaaggctccctttttccaagtgatgtctttcagggaagcagtgtttgaaatagatagcgggtaccttccctggatggagtcagggcgggggcactgtcctccactgctagacacccccagaatgcctggcgctctgcagagcacagtctgagctgctctaagaaggggtctcctttaccctaaaggcagctgggcagggacaggtgggagaatgggtgtaggaggcaggccccaggctctgcttcttggtgacagttggccagagccctgtatgctttgatttttntgtacttaaaaagaaaaaacacacacacacaacanaaaaaaaaaaaaa

SEQ ID NO: 208862 - DNA, 794 bp, Homo Sapiens
cctagataatctctggaagagaatagaaaagaaagccgctctgagcgtacctacctttctactctggagagaagctcttttgacacagactgctccgtttaacagattccagctgctggcactgccttctgagttctttcacttccaaattcttatcgtcctgcagccccaccacagtcaatgactaagttcctctggactttcacatgggtcgtaatagacaacttcatcctgtttttctaaaaagacggagtctcgctctgtcttccaggctggagtgcagtggcacgatcttggctcactgaaacttccacctcacgggttcaagccattctcctgcctcagcctcccaagtagctgggattacaggcacgtgccaccacatcggactttgtatttttagtagagacagggtttagtatttttgtatttttagtagagatggggtttcaccatgttggtcagactggtctggaactcctgacctcaagtgatccgcccgcctcagcctcccaaagtgctgggattataggcgtgagccactgtgcccagccaaacactaagcatctctagatgatgggattggagtaataatcatttttctttctttggtttgctttgggctaacaatgaatatattattttgaataataaactactgaaaggaaactttaggaaattttcagatgttacagtttacaaaaagtaattgataatatgggcctgtatttccttaaatttattaacattgtaatctatatacttaatataaactttactttttaaagtctttt

SEQ ID NO: 208863 - DNA, 771 bp, Homo Sapiens
  misc_feature (732)..(732): n is a, c, g, or t
  misc_feature (737)..(737): n is a, c, g, or t
  misc_feature (771)..(771): n is a, c, g, or t
ctagacagaaacacttccacagtctctagtctctggacatttcttcagtaacttgaatgaatcagcaacttgaactgaaaactttggattccacctctgcttccactgggaggcatgctaagtgaaacactttggcagtgtagactggcctttgtcagaagtgggttactatgtagtcattaatgagtagacataaaaccaaagaagcattcagttcagaaaggagaaatagtccacaggagggaatggatcaccacagtacccacacacattgatccaaattccatgaatttcatgagattcaattctggaagctaggaaatattaacaatataatcactgaagcaatttgaagttggactgttgttttgaatggtgggttctcagtggcaaattacaatgataaaagtgaatttatagagttttagatttagactattcactaaatctaaatttagtagacacttactacaatataaggcaaaagaatgaatagaaatcagcatcagtaaaaatggaacaacttagtacatgttcctggtgagctctctctcccccaacccttcccagcccaacgagggcactgtccacagctagactgaggggatgcccagagatttctgtgtgctcccacgataccactcttctctgcctctccactgcccctggagtctccctgttccccatgcacaaactttctatgatttgcttattcccaagaaggaggcattnattanggttgttgaccttcactcctaataatcaccaggn

SEQ ID NO: 208864 - DNA, 684 bp, Homo Sapiens
  misc_feature (1)..(1): n is a, c, g, or t
nttcgggcgactctcgttttattttataatttttaattagtgacgttaaacatctttcctatcggccattttacatattttttccttatgagttgccttcacttatcttcagcaaaattatctattgagatatcttttttttcctgtaatttggaagtgctcttgatatgctgaaatgtctgcactgccacattttgccctatttgttcttcagtttggggtttgcttgcagttgtgcttatggcgttcactgtatggaagtgttgttgtttcatcaaaagcaaatctattgagtcttttttcttcatggctcctgccttcggtcataaactcttacaggtactacaatgaacactcgccactgtggttaccatggtgcagatgtcttttgtatccttccagaaaaccatttgaggagtgacttttgcaaaatgtaccagtctgccaaagtatgcagtcaggcagagtacttctgctattgaggtggccaagaaaggcaggggaagcaactcagactcttcaaacagggcaagagcgaggtctacacaaataaagaagtatgcggcaacctgcgttgtctagtggttataaaaatagtaacgtctgatggcctgaggtgagtttcaaatggaacatttctgttgtactgggcattcaaaacataggcagctgccaggaaaaggt

SEQ ID NO: 208865 - DNA, 793 bp, Homo Sapiens
  misc_feature (485)..(485): n is a, c, g, or t
  misc_feature (614)..(614): n is a, c, g, or t
cttttgaggaacaccaaagggcagagctaacagagaactcgggggataagagagaagaaaagaagaatggagagagaggtttgcccagaaggaaaacgaagagccagattgaaatctgactctggcttgagaacaggacgggtcccagagtctgaccactgccagaatccagtgtttcaagatggagttggtgaagcatccaagattttggatcctgggcctcagtgactctccatcacccaactaaaaagatgttctctgggacctctctcaggctgatgttcttctcatcaagctcccgaatgtgtctcgcactattggacactttttgggggtacacaggtcttctctcctcccctcctgcagaggcaccaaaactaagaccaaatgggggttctctagccgccaacttgaaacgctctgagacttctgtgtatttgatgcttcttcaagtcagctctgacgtggccaattccctgacctgngaaatatttacatagtactctagatcattccttcttcctagtaactgcaactttgttgcttctgtgtttgactcacagccaccttcccccatgcggaagtgagtgggtgtacgtgagggtgtgagtggngtatgtgcgtgggcgtgtgggcgtgaggtgtgtgtttaaatataatcacaccataatttattcagctatatggagtagtagactagaaagagaaactggtatttgctttaactacctgctgcttgtaagcgcttcctctgtaactcaggcgtaactgttatacattaaaagaaattaaa

SEQ ID NO: 208866 - DNA, 923 bp, Homo Sapiens; identical to SEQ ID NO: 45778
  misc_feature (825)..(825): n is a, c, g, or t

SEQ ID NO: 208867 - DNA, 665 bp, Homo Sapiens
gcttgccgatcacggtttatttgattgtctttcttataaaatacattaaaaatactgcttttaactgtaggcacacaattaaaacaaatgtaaacctatgtttaatttaaaatatattaaaatgatttaataaaggtcttttattattttacacatcaaatttcatgcaatcagtactccactgaaggagaaaagattatgaaaaaacaatgaaagcacaggtagaaaataaacaacacaaaagactaattctgattttttttctgtgtccttaataccctgtgctgtctttgacaacaaagatgccttacttatgtgattcagaggcccggaagtgaaaaaaatacaagtagttaatgaataatgcatatgttcatagcaatggtcaaattatactgtttcctaatggataccatttttctttatcgagtgggacactacagagtcggatgttaattgctcccacaaatacagttttactcttcacaataagcattaagacatgtccttggagctctgtgacttcatcatatactacaatttcattgtaagtggggtccgtacattttggaacagattttgttttcctcctacgaacttcactgggatatggtaaaagataaaattcaacatgtgcactgggcgcagagccatctgggagatgt

SEQ ID NO: 208868 - DNA, 552 bp, Homo Sapiens
  misc_feature (16)..(16): n is a, c, g, or t
cagtataatgtttcgnacgcaacaaaaaatcttcaacaatctagaattgttcagagccagaaattgaaaacaattaaacagttatatgagcagttcataaagagtatggaagagttggagaagaatcatgataatctacttactggtgcacaaaatgaatttaaaaaagaaatggctatgttgcaaaaaaaaattatgatggaaactcagcagcaagagatagcaagtgttcggaagtctcttcaatccatgttattctgatgactctttgaagaaagaacttgaacctaagtaatatgatacaattataacgttagctaagaagcatattgtaagtctttagaatagtttaattgtaacatctttaatcataaacctgtttcattgtaagacctccctttctgttaagtcaaatctaaatagttatgagttagttagcaactattcctaaagaatatgtattaagctttcagctctttagtaatgatagtgaatttttctctctaacactgtcaattaaataaagacgatttaatttcaaaaaaaaaaaaa

SEQ ID NO: 208869 - DNA, 622 bp, Homo Sapiens
gtagcgaacagcaagaggaccttgtgcatgaataatttgtttccatactacagagtgggtaataagcagattagtaaaaacaattctgcttcacttcaataacagcctcctccaactcattttttctcaacaaacttatttttccagcagaagaatcccagacttcttagagaacccagtgactttttgcaccttaaatctgtgaaatcctcatgttttcttctgccgtatccatagttcaaacaaagatgaggcaaagctagacgcattcctgaaggaacccaagaaattcctctctttctctctctggaatgaaatgaattctctagaccaccagttctaaccttcaaaaaccaaacctgattgtgagctgtccttcaaatactactgtagaccccagtgtttattcattaaattttttaaatatttgttttatttggaatcaaagtatttgtaattttagtatttgtattaatatcagggagaaatgtttaaatctgtctatgccatatgtgcctctggcttattgcccaattaattgtagcctcaggctaaactttggtttctgtctttaatttttgtcagaagaaatataactgatctcaaaacaaaaaaaaaaaaa

SEQ ID NO: 208870 - DNA, 769 bp, Homo Sapiens
atgattgaatcccggaagcgacttgccaagaagtgctggtgtttgtgggcctgttcgccttctgctggctccccaatcatgtcatctacctgtaccgctcctaccactactctgaggcggacacctcatgctccactttgtcaccagcatctgtgcccgcctcctggccttcaccaactcctgcgtgaaccccttgccctctacctgctgagcaagagtttcaggaaacagttcaacactcagctgctctgttgccagcctggcctgatcatccggtctcacagcactggaaggagtacaacctgcatgacctccctcaagagtaccaacccctccgtggccacctttagcctcatcaatggaaacatctgtcacgagcggtatgtctagattgacccttgattttgccccctgagggacggttctgctttatggctagacaggaacccttgcatccattgttgtgtctgtgccctccaaagagccttcagaatgctcctgagtggtgtaggtgggggtggggaggcccaaatgatggattaccattatattttgaaagaagccatcaagtcttaagtttttcatttcaacttgtgaacgtttcttctgatgcgaagccaaccttcccttttcagagaagggaaccagtggaaaattattttttaagccctcaagccctgttaaatggtcggtgcccaattttgtcatagaaactggttgaacacccaatttacctagcagaaaatcatacttgaatgcttacttggga

SEQ ID NO: 208871 - DNA, 522 bp, Homo Sapiens; identical to SEQ ID NO: 50809

SEQ ID NO: 208872 - DNA, 789 bp, Homo Sapiens; identical to SEQ ID NO: 44644
  misc_feature (668)..(668): n is a, c, g, or t
  misc_feature (771)..(771): n is a, c, g, or t

SEQ ID NO: 208873 - DNA, 856 bp, Homo Sapiens
ctttcaggaaacggatatgctagtctattctacaggacttacctgaagcagcatgatttgcacaaagtcgaccaacaaaagcatcaacttttcaacttcattatcttggccatccagttagtcatgtgtaactgagtattagatttcggatggagtcatcatggccaattataggacctaattgctctcagcaggcctgagaaatgagttgaaatgtgcagaactgtagaaactttagaggcaacagattttgcctccccgatcagtgtgtgcctgtttacagcactatctatctttctctctccaaatgtcactgagccctttagatgtttatattcaccacgagaagccagtcataaagataaaggaaatttgtgcattataaatgcaatatcactgttttaaacttgactgttttatattatttttgtgtgatcaagtgttccgcaagctattccaactttacaagagaaattgtgattatgttcttttcacctgtgggttataaaaaatgttgtattctgaagacccacaaaatatcaaagacattctgtagtttatacaccgtgttgcaaagtgttactgttctatttcaaagcttttaataaatataaaatttatttttatattaaaaaaaaacgtagtacctatatagaaatctacatatcccaaccattatattatcacttctacttcgttagttaccgtacctactgtcttttgttgatcctccgtcttccccctcgagggggtgatcaatattattacgcccatcatccaatttcgtaggtgccgtagccccttcccctgatgggaggggctataattcccttttccccaccgcagtgcgggcgtg

SEQ ID NO: 208874 - DNA, 582 bp, Homo Sapiens
  misc_feature (570)..(570): n is a, c, g, or t
aagaaattcatcgttgtctataatgaaaacaaatcaggcaatttacttacaatcttgtaactgaaaatacatacaaattctgtgcaatcacaccaagagggaaaattctgtaggggaaaaggacagtaatgactaagaaactccgaagcctcctgtgtaatattttaaaaataaaatgttttcattcaaatattttaaaaaataagccatctaattctgaagaaatcagtttctaaattacatttttcattgattcatcacaactcattttgcaaaatcatcagcatggaccacgccaatgaggagttaaatgcctacactgtatcttaacggtattgtaatattccaatcatttcatgaaactgatataaatgttctgtccagatcaaagaaattactttgtaactgaccaaaccagtgtgactgtctgctttaacccctaatttcttctggggctgcaggaacaacaaaaacaaaaatctatttgtattgactgctgaaaacaacacaattacaaagcactggtgcccaatttgggttctaataagtacctagtgttctcccagactnttacttgggaaa

SEQ ID NO: 208875 - DNA, 452 bp, Homo Sapiens
  misc_feature (401)..(401): n is a, c, g, or t
  misc_feature (415)..(415): n is a, c, g, or t
  misc_feature (421)..(421): n is a, c, g, or t
taaatcagattttattctttaaattgttcttttagaagctgaaattcagtatcaaaaatgtattgtcagtgcagaagcataggtgtatgagggtcttttattccaataaaagaccaatatttgcccacgtagtttccttagaaagagacagtttatcgtcgctgctgatgtcaactgttatgaacagaagacctttacattcaatttctgcttttaggattgacttccaaagttcctgacataacttatttatttgctgaggcataaatatttattaggagccatttatttaagcagtgagtgaaactatctggtcacctgcccttgcatctcaacaagctttgctcttttctaagactacaccaaatacctcctcccctcctcccccaaaattatatggncccaaacagaaagnctatgnaatgttgaagggtagaggtctaaaaaagtga

SEQ ID NO: 208876 - DNA, 454 bp, Homo Sapiens
aaggaagtgcctttcacctctcatcatgattctgtggcctccccagccatgtggaacttttttctcttgctgctaccatgtaagaagtgcctttcacctcgtgccatgattatgagacttccccagccatgtggaactgttaagtccaattaaacatctttttcttcttagtcccaggttgttctcattcgtggctggatcacaccagcaagaaggattttaaaggacaactccttggggccgtccaacactgaaaccgcctgaccgctgctgtctttgtgcttgcagaaaatcacggtgggcacaaaattttggacacgatttcgagagcgtgagagctactgttcacgaatccagggccagcctcgtgtctgtcttcctttaaagcacctggcttggtacctaaaatgttcctttttttttttttttgaaattcaataacttcatcagaaca

SEQ ID NO: 208877 - DNA, 566 bp, Homo Sapiens
taagagatttagagatgcccaggctggagtgcactggcacaatcacagctcactgcagtttggaactcctgggttcaagcgatccttccatctcagcctcccgagcaggtggaaccacagatgcacaccaccatgccctcgatatttttttcatatttagaagagttgaggtcttgccatgtttcccaggctgttcttgaattcctgggctcaagcaatcctccggccttggtgtcccaaagtgtggagattacagacatgagccatcacgcacagccagaaacacttaatgtaaagtaaaaatcattatttttcggtcggatgttctctgaaatttagtacatcatctgtaactctgtaaagcaggtcaatttttggtgaagaatatgttttaaaactaaattatcctggctagttttatccagaaaactagtcttcttaaaacagcacattccatgggtgtaaatgtttttttctacaactacagtttaaggtagactattgattacatttggttttgaaaattaaataggccaaagttatcttagacaccctcctatgggcat

SEQ ID NO: 208878 - DNA, 517 bp, Homo Sapiens
ctttttttctgagacacagtctcactctgtcaccaaggctaaagtgaagtgatccgatcttggcttgctgcaacctccgccttccgggctcaagtgatttttgtgcctcagcctcctgagtagctggaactacagacacacaccaccacacacggctaatttttgtatttttagtagagacagggtttcaccatgttggccaggctggtctcaaactcctgacctcaagtgatctgcctgcctcagcttcccaaagtactgagattacagaagcgagcaacctgtaacctagaaacctatgatagtattaacgaaataatatcatagctttctaggagtcttaaaacagattatgttttcatattcctgaccaaatgttaaatatagacaaaatgaaataagcactgctgggcaggatgaaaactaaatagccgatataaatagctgggtaaaacttagatatccaagtggtacttattaaacttttctaatctggttgggtgtgtgtgtgtgtgtg

SEQ ID NO: 208879 - DNA, 468 bp, Homo Sapiens
  misc_feature (33)..(33): n is a, c, g, or t
  misc_feature (52)..(52): n is a, c, g, or t
  misc_feature (144)..(144): n is a, c, g, or t
  misc_feature (183)..(184): n is a, c, g, or t
  misc_feature (200)..(200): n is a, c, g, or t
  misc_feature (224)..(224): n is a, c, g, or t
  misc_feature (233)..(234): n is a, c, g, or t
  misc_feature (331)..(331): n is a, c, g, or t
  misc_feature (384)..(384): n is a, c, g, or t
  misc_feature (391)..(391): n is a, c, g, or t
caagttaaaaacataaatattaacacacttaanacgtgttaccaggaattgntcttgacttacatatccacacaacactgaggctttactgcacctgcagcatcaacgacaacatacttatttggagtagtacacaaaactganagataaagtcacaatggccattagtgttttttttttttnnttagtttctacaagtnaaatattagtagggaccagttaanaacccagannatagagctaggagactcacctttgaactttaaggcaaactcatagggattgtacagtgtcaacacttgcttatgtgttgactgatcatctgcataanatatgagctccgtggggaacacgaaaacaggaagatttccttccactaactcnggttggnttttttgttgatgcattggcactgaatcccccttgctgcaggttccggttttacagccccaaaccaattgggacttc

SEQ ID NO: 208880 - DNA, 398 bp, Homo Sapiens
aattaatttagaaacggtctctctgtgtcatccaggcggcagtgcagtggagttatcatagctcactgcagccttgaactcgtaggctcaagtgatcctctacctcagcctcttgagtagctgggactacaggcatgtgtcaccacacctcgctaattttttcatatttttttgtagagacggggtctcacttcattgcccaggctgatcatgaactcctggcctcaatcagtgctcccggcttagcctcccaaagcactaggattacatgtgtgagccactgcacccggcctcctttttctattctacataaagtatctttgtatgggataaccatttcacgcagtattccatccaaaaaagagagaataatgtttttattgtctctttatttggac

SEQ ID NO: 208881 - DNA, 414 bp, Homo Sapiens
  misc_feature (414)..(414): n is a, c, g, or t
tgtagagacagggtcttaccatgtttcccaggctggtcttgaactcctggactcaagtgatctacccacctcagcctcctaaagtgctgggattacaggcatgaaccactgcacctgcccaaatgacctcattttaacttgattacctctgtaaagacgctatttccaaataaggtcacattcacctgtacaggggttaggacttgaaaatcttttgttgggggacacaatccaatccattaccaataccttcccccaaacctctcaggtgctcagagcctggatccccagctcctgtctgcctcctcacatgttgtctctcatctgtttccagccgagctctgggctggccatggtgaaatgtccaacccaagacttcaagactaacccctttctggccccaggagctgggcn

SEQ ID NO: 208882 - DNA, 382 bp, Homo Sapiens
ttatattttattaagctgaataacacaatatagtatttcctctatatgaccaacctgaaaatattatattccctgttactttgttaatctatatttatatttttaaaaaatttttttttcttttttatacaagagtcttgatctgttgctcagcctggagtgcagtggtgcgatcacagttcacggcggccttgatctctggggctcgagctatcctcccaccttagcctccaaagtagctgggaccacaggggtgtgccaccacatgtgacttttttttcttttttctttttttgtagaaatcggagtctcactgtgtttcccaagctgatctcaaactcctgggctcaagcaatcctcccacctcagcctgccaaagcgc

SEQ ID NO: 208883 - DNA, 432 bp, Homo Sapiens
atctggccaacaagagagttaaaaggaaatattttcctttcttgctattcagctgtgttctgcagacccctgctgggctccttcactttgttctatttggttatttccatactagggctttttagttgtagtggtcatactttccctgatgatatcattaaacttattcctttactacagatctgttagtttgaggagaaagcttcttgactagaaggattattacaattttctttcctagagacatccaggtattttttttttctttttctttttcctttttttaaggacagggtctcactctgtcacccaggctggggtacggtggcataatcacagctcactccaacctcatttactgggctcaagtgatcctcctgcctcagcctccccagtagctgggactgcagttgcacaccaccatgcccagca

SEQ ID NO: 208884 - DNA, 544 bp, Homo Sapiens; identical to SEQ ID NO: 58808
  misc_feature (499)..(499): n is a, c, g, or t
  misc_feature (529)..(529): n is a, c, g, or t
  misc_feature (538)..(538): n is a, c, g, or t

SEQ ID NO: 208885 - DNA, 472 bp, Homo Sapiens
gaacgatcttaaccccccaatttcatcaccctcaccgcaacctccgcctcccaggttcaagtgattctcctgcctccacctccctagtagctgggattacaggcatgtgccaccacagcacggggccttaattatacatttgaacttaagtgacattttattgaaaactaattgtggtgacgaggaatggtctaagcatatgattaggataattcatattcattatgaaaacttaggtgaaatacagacttggcatttagcttgtcaaatgtaaacatgttttctgctttctttgctaaaatcatatttccaatttcaagggaaaatgttaagaaccaaaatcatctttttcagctacccgcctgaaaaaattattgctatttttcttttcttttttttgagagtctcgctctgttgcccaggctggagtgcagtggtacgatcttgggctcactgcagccttgcctcccag

SEQ ID NO: 208886 - DNA, 449 bp, Homo Sapiens; identical to SEQ ID NO: 52218
  misc_feature (17)..(17): n is a, c, g, or t

SEQ ID NO: 208887 - DNA, 770 bp, Homo Sapiens
cgcgccatggaggccgccgggactatgcaggagccctcatcaggcccctgacatttatgggatcacagactaagcgagtcctgttcaccccgctcatgcatccagctcgccctttccgggtctccaaccatgacaggagcagccggcgtggggtgatggcaagcagcctgcaggagctcatcagcaagactctggatgccctcgtcatcgctaccggactggtcactctggtgctggaggaagatggcaccgtggtggacacagaagagttctttcagaccttgggagacaacacgcatttcatgatcttggaaaaaggacagaagtggatgccgggcagccagcacgtccccacttgctcgccgccgaagaggtcgggaatagcgagagtcaccttcgacttgtacaggctgaaccccaaggacttcatcggctgccttaacgtgaaggccaccatgtatgagatgtactccgtgtcctacgacatccggtgcacgggactcaagggcctgctgaggagtctgctgcggttcctgtcctactccgcccaggtgacgggacagtttctcatctatctgggcacatacatgctccgggtgctggatgacaaggaagagcggccatccctccggtcacaagccaagggcaggttcacgtgtggatagggatgcaggctgtcgccggctcttgagccaaacactgtgtctcgtcaggctcactgacgaatgtcgaagatgcttttatgttctgagtcacatgcacttggagcc

SEQ ID NO: 208888 - DNA, 1000 bp, Homo Sapiens
gcccatctctgttccatacattcttaccaggcactgagagtcatggggagtttaagactccatcccacatactccttttgaaactggtccagtgtacaacatccagtgaagagtataggatggcatagacttaccaactcaaagaatggaacggattctagaaacattatagtccaacctcctcaattcatcgttgatacacaaaggcccactaagctgtgtggttcactcagcatcacgtggctaatatgatatgaagccacactagcttgtcctcagctgtgccaagaatgagagctgccttctccaaacctaaaaccaacccatggcatcattaacacctctttaaaatccataggacagtgatccaaaacttattccctaaatcataaatatcttttcataaggagtttcctttgtaagggatttgaccatgccattaggaataaaattttaataacgagaatgtaagtttaaaccataaaatgaggagcttagggtggttcttaggcagaatctaactatgacattactgaaatgctcccacaaggccaaaaaaaaaacaaattcccttttagcatgaacctcccaaggggttgtcttattgaccctaaaagaagagctcacgataatggaggagcctttcttccacaggtcctcaacaagaccaaattccaatgagcttccacattgcagaccttgactttcaattcctggccgttggtctgttgttctcaagaattccaaaagaccctctttggtggtgggaccaacacatatgtaaggcaccgtgcaaccaggtttaatcgaagtgaccaagtgagggcatcacgaaagctttcttcacccccataatgggagggcagcacacaatagctgtcagacacctattggtgacgtcaccctgctacggacgggcaaaaaattcgcacacaatcgaagaacccacctcctgatagaagtttcccagacgctcgttagaatcgtgcccagataccca

SEQ ID NO: 208889 - DNA, 900 bp, Homo Sapiens; identical to SEQ ID NO: 45644

SEQ ID NO: 208890 - DNA, 969 bp, Homo Sapiens; identical to SEQ ID NO: 41180

SEQ ID NO: 208891 - DNA, 841 bp, Homo Sapiens; identical to SEQ ID NO: 55835

SEQ ID NO: 208892 - DNA, 924 bp, Homo Sapiens
ctcctgcctcagcctcccgagtagctgggattacaggaaggcaccaccatgcgtggctaattttgtatttttagtagagacaaggtttctccatgttggtcaggctggtctcgaactcccaacctcaggtgatccacccgcctcggcctcccaaagtgctgggattaccagcgtgagccactgcacctggtcaagtattatggttttttaatagtatgcacacatgggacaaaactcaactggtataaaagggtatgcaggagaaaaaaagcaaacttccctctctcccttttctgtccaccagccatcctgttctcctccctaaactcaattatggttgcctgttttttatataagttttccatgaatttataaatacatcacgtgcatatatcctgtcagtcaatattaagaaattactaggttattttgtgtttatgtgtgcactattagatttaatgagttatgctagttgttgcctcttatatccacattcagtcttcattgtctgttctgtaataatagatctgggccctgtaaatacctctcccatgacagtaagcacagagtgaaactttgtcaatcgagggtgctgctgacacactgaaggggcaagggctgcttttcctggttccattgtgctcctctaggcagacacctgaacacctgtgccatctgcaataccagctccttgtagcacatacactcgtgctctgcagcacctcgttctggctgcacacttcttgggccggtgcctaacttcagcagcacccaatgggtcagcagcgcacagtacccccacatgaaatggttcccttgacattgcacaagtccctttctctgaaaagtgcccaagcccagaaccttctccagttgcaatcccaggctcaagaaaccttggctttcaccagtgtttctctcaag

SEQ ID NO: 208893 - DNA, 449 bp, Homo Sapiens
  misc_feature (322)..(322): n is a, c, g, or t
tgtatgattccatttatatgacatgtccagaataggtcatctgtagagataagatgtagattagtggttgcctagggttggggtatagggggtgttatggactgaatgtttgtatcgcccccaaatttatacattgtttaacccccagtgtgactgtatttgaagacagggactggctgggcatggtgcctcacgcctgtaatccctgaactttgggaggtcaaggcaagcagatcacctgaccaagacatcccacagcaccagcctgtgtgtgtctcgccaggctcagagctgggaacctggaacccaggactggggtganctcagagacataactgtgactgtactgggagtcagtcttatgcccagagctaagcagaagcagggccagcccagaggagacgatgttaccgactcccaccccgtcctgtctagcgcttagagtacct

SEQ ID NO: 208894 - DNA, 787 bp, Homo Sapiens
ggacgggcgcctcctccgcgggcataaccagttagcctacgacggcaaggattacatcgccctgaacgaggacctgagctcctggaccgcggcggacaccgcggctcagatcacccagctcaagtgggaggcggcccgtgtggcggagcagctgagagcctacctggagggcgagtgcgtggagtggctccgcagatacctggagaacgggaaggagacgctgcagcgcgcggaccccccaaagacacacgtgacccaccaccccatctctgaccatgaggccaccctgaggtgctgggccctgggcttctaccctgcggagatcacactgacctggcagcgggatggcgaggaccaaactcaggacactgagcttgtggagaccagaccagcaggagatagaaccttccagaagtgggcagctgtggtggtgccttctggagaagagcagagatacacatgccatgtacagcatgagggtctgccgaagcccctcaccctgagatgggagccatcttcccagtccaccgtccccatcgtgggcattgttgctggcctggctgtcctagcagttgtggtcatcggagctgtggtcgctgctgtgatgtgtaggaaggaagagctcaggtggaaaaggagggagctactctcaggctgcgtgcagcgacagtgcccagggctctgatgtgtctctcaacagcttgaaaagcctgagacagctgtcttgtgagggaccgagatgcagggattcttcacgcctcccctttgtgacttcaagaagctctgg

SEQ ID NO: 208895 - DNA, 633 bp, Homo Sapiens
gctgagagctccgttcctcaccatggactggacctggaggatcctcttcttggtggcagcagccacaggagcccactcccaggtgcagctggtgcagtctggggctgaggtgaagaagcccggggcctcagtgaaggtctcctgcaaggcttctggatacaccttcaccggctactatatgcactgggtgcgacaggcccctggacaagggcttgagtggatgggacggatcaaccctaacagtggtggcacaaactatgcacagaagtttcagggcagggtcaccatgaccagggacacgtccatcaacacagcctacatggaactgagcaggctgagatctgacgacacggccgtgtattactgtgcgagagccctaactggggatgatgagggggatgcttttgatatctggggccaagggacaatggtcaccgtctcttcagcctccaccaagggcccatcggtcttccccctggcaccctcctccaagagcacctctgggggcacagcggccctgggctgcctggtcaaggactacttccccgaaccggtgacggtgtcgtggaactcaggcgccctgaccagcggcgtgcacaccttcccggctgtcctacagtcctcaggactcta

SEQ ID NO: 208896 - DNA, 832 bp, Homo Sapiens; identical to SEQ ID NO: 40671
  misc_feature (655)..(655): n is a, c, g, or t
  misc_feature (763)..(763): n is a, c, g, or t

SEQ ID NO: 208897 - DNA, 1000 bp, Homo Sapiens
gaagccctctgcttccacccccatgtgtctccggagcagggagatgagcacccgattgggaggaggaaacaaggtttccagccttggcttggccacgcacttgctgagtgcccttgagtaagtcacttcacttctctgggcttcagtttaccgtgggtaaagtggggtgaagtagaaggacctttccaactctgatttgacaactctggggcatggagctggggactgctcacaggaaagcccagctgactttccttggcttgcttctgagtgagggcagttgtgactgcagcagggaagctctcctgaacgccttgctctgggatgcagtaatgattacagagggctggggagcaggagcttgtgtctccacttcagaaaggagaggcctgaggctcggaaagggcaagtgacttacccaaagccatccagcattgttgtggcggggcacctgtcccttacccatagctgctctgaagggactgctgggtgggagttgctgcggtaccgtaggggaaagcagaagggtggcatgggctggaacaatccagaaagacttcccagagagccttgaaggatgagaaagatttggattagtacctctcaaagtggcttttgcaaaatactcaagctggaggcaggatatggtgaagaaaagtggttcttgggctgggttcagtgactcactcctgtaatcccagcacccaaggatctcttgaggccaggagttcaagaccagcttaaacagcatagtgagaccccatgtctacaataaaataaaataaaataagtaagctgggcactgtggctcataactgtagtcttagccactcgagaggctgagatgggaggatcattcaagtccaggagtttgaggttacagtgagctgtgattgtaccaatgcactgcagcctgggacagagtgaaaccctgttgaaaggaaggaagagagagagagagcggaaggaaggagagagagagaaaaaaaaaaaaaaaaaa

SEQ ID NO: 208898 - DNA, 1000 bp, Homo Sapiens
aaagaaaagattgattacttaaactccactcaagaacttctgttcatcaaaatacgtcataaggagtctgaaaagcctgtaatcctagcactttcggaggccaaggccggcagattgcttgagcccaggagttcgagaccagcctgggcaacatagcaagaccccgtctctaaaaaaatacaaacattagccaggtgtagtgttatgtgcctgtagtcctagcttcttgggaggctcaggttggaggattgcctgagcctggggaggtcgaggctgtagtgagctgtgattgcatcactgcactccagccccgttgacagagcaggacacagtctccaaaaaaagagactgaaaatataagctacaaagtgtgagaagatatttacaaaatatatacctaaaaaataattagaagtatctagagaattggtatgaatcatcaagttaaagacatcctaatagagaaatgggcaaaagatatagaaagatattttacagaagaagaagtacaaataatttataaacttacacaaagatgctcaatcccatttgtaattagaggcatataaaccaaaaccacaatgagagtggcaaaaatttaaaagtcacatcatcatcttcattgcttctgtacatggaagtacaaattggtatataccactttggtaacagttggtcagtacctaataaagttgaacttatttgtattctttaacctagtaattttactcctagaaaatatactttagagaaactattacacatgtttactaggatacatatacaggagtatttgtgacagcactgttcataatcttaaaaaagacaagaaacaatctaaatatacataggtagagtggatcattgaagtctggtatattcctaccatggattactatgcagcagtgaaaatggatgcaccaaggcatacactgaacaaaaggatgaatctcaaaaatacaatgttaagaaaaaaaaaaaaaaaaaaaaaaaaaaaaaa

SEQ ID NO: 208899 - DNA, 342 bp, Homo Sapiens
ttcctgcggtcgtgtacttgtatttttgatttaaccaaaacaattttgaatcggatgaattaccaaatttggttgggtcttgttcggctttctgtgctttttaatcagcctgggcgacaagagtgaaactccgtcgtcttctaactgtcctttggcccaggtttgcataaatccaacctctgatctatttgaaatcaacaaagaaagaaatgaaaacattagctggtatcagagattctcatgtctatagagtgacaataaatttccacaatccattagaaatcaaacctatcatttaaagaattcagatttcaaaaactacgaaacactggtgtacttcat

SEQ ID NO: 208900 - DNA, 430 bp, Homo Sapiens; identical to SEQ ID NO: 61564
  misc_feature (158)..(158): n is a, c, g, or t

SEQ ID NO: 208901 - DNA, 916 bp, Homo Sapiens; identical to SEQ ID NO: 45718

SEQ ID NO: 208902 - DNA, 876 bp, Homo Sapiens
acaaacaggaggtcggaaggaagcatgtgggggtagatctggaggtgacaagggagggatccttctgggataatgggtcttcagagactgtttcagtttagactccagtgaccccagaactagtgtgattggggttcttgtctccaggataaaaatggtaaagagttgtcagatgaggacataagagcagaagctgacactttcatgtttggaggccatgacaccacggccagtggcctctcctgggtcttgtacaacctcgcgaggcacccagaataccaagaacgctgccggcaggaggtgcaagagcttctgaaggaccgtgagcctaaagagattgaatgggacgacctggcccagttgcccttcctgaccatgtgcctgaaggagagcctgcggttgcatcccccaatccctacattcgcccgcggctgcacccaggacgtggtgctcccagacagccgagtcatccccaaagggaatgtctgtaacatcaacatcttcgcaatccatcacaacccctcagtctggccagaccctgaggtctatgaccccttccgcttcgaccccgaaaacgcccagaagaggtcacctatggcttttattcctttctcggcggggccaggaactgcatcgggcagaagttcgcgatggcagagatgaaggtggtcctggcgctcacgctgctgcgcttccgcatcctgcccgacacagggagccacgcaggacgccggagatggtcttgcgtgcggaggacggactttggctgcgagtagaaaccctgggctgaggcctgcaagtgacacaccactaactttgcattaactaccttgcaccaattaactttcagattccggtataaatctgtgtgggccc

SEQ ID NO: 208903 - DNA, 1000 bp, Homo Sapiens
gcaggccaaaattctagggattccatataaaaacaacgacctaagcatgtttgtgcttctgcccaacgacatcgatggcctggagaagataatagataaaataagtcctgagaaattggtagagtggactagtccagggcatatggaagaaagaaaggtgaatctgcacttgccccggtttgaggtggaggacggttacgatctagaggcggtcctggctgccatggggatgggcgatgccttcagtgagcacaaagccgactactcgggaatgtcgtcaggctccgggttgtacgcccagaagttcctgcacagttcctttgtggcagtaactgaggaaggcaccgaggctgcagctgccaccggcataggctttactgtcacatccgccccaggtcatgaaaatgttcactgcaatcatcccttcctgttcttcatcaggcacaatgaatccaacagcatcctcttcttcggcagattttcttctccttaagatgatcgttgccatggcattgctgcttttagcaaaaaacaactaccagtgttactcatatgattatgaaaactcgtccattcttttaaatgttgtctcacttgcatttccagtcttggcatcaaatccatgatttaatgactccaataatgtgtgtgtttataaaccatcctcgaaagtgaatgtccctttctttgtggcatgcggtaaggtgagtcaaacagactcatggataatctccccttgggttccttggaagtaaatgggatctgtgaatttgtgtgccacgaaaggggcagaaagattgcctcccggttagaagtctcaacatattaattatggggggagctacaaaatcggagaatcggacggtctataacgccagtaaaaattaacactagttattcacacaagtaatattacccccagcaatgttggacataacattttcgaagaattcggtgaaatagcagcaaaatatatgaacatgcggagaaaagaattata

SEQ ID NO: 208904 - DNA, 868 bp, Homo Sapiens
ctgctctgatttgcagagctttgaagacattttccccttgttgggaatcaatatgaaaacattgatgtcctgcaattatcaatgttacattgtctctggagtttttggccttgtttcaatgcaataaatcaagttgtagattgctggtggccttagcagagcaattatcactgcagcacataatatccagcttgctgccttattgtgattcagagacctagtcacaagcttgcttttgtctaagagccaacaactaaaaacccaagtttccatcaacagaaggaataaattgtggtatattcatacatggagtactatgcagccacataggagctaactactgctacatataatacggagtaatctcagacatgatgttgaacaaaagcagacaagcacaagtcaatatgtgtgcatttatttatatgaaattcaaaacagctactacaaatataggacataggaagaatgtctacctttggggaagggggcaaatattaactgagtagggacccaagggagccctctgaggtactggaaatgctctatatttttatatgagtggttacagggtataatcattggtcagggccaggctcatgcctgtaatcctagcacttgggaggccgaggcgggtggatcacctgaggtcaggagtttgagaccagcctgacaacatggaaaaaccggtctctactagaaaacacaaaacattagctggggtgtggtggagggcgcctgtaatccccagctactcaggaggctgagggcaggagaatcggttggaacccgggaaggcggcaggttggaagagagacagaagaaacccggcaactggtacccagcctggagacaaaggaaaatccaa

SEQ ID NO: 208905 - DNA, 551 bp, Homo Sapiens
gaaaggatctctgtactaaaagcctcccgtagaaatttggttgatcggattactgccctccgatgccttgaagcccaagtcagtacagggggcataattgatcctcttactggcaaaaagtaccgggtggccgaagctttgcatagaggcctggttgatgaggggtttgcccagcagctgcgacagtgtgaattagtaatcacagggattggccatcccatcactaacaaaatgatgtcagtggtggaagctgtgaatgcaaatattataaataaggaaatgggaatccgatgtttggaatttcagtacttgacaggagggttgatagagccacaggttcactctcggttatcaatagaagaggctctccaagtaggtattatagatgtcctcgttgccacaaaactcaaagatcaaaagtcatatgtcagaaatataatatgccctcagacaaaaagaaagttgacatataaagaagccttagaaaaaagctgattcttgatttccacacaggacttaaactgttagaagtatctgagcccctgatgacg

SEQ ID NO: 208906 - DNA, 736 bp, Homo Sapiens
ctatgatcatgaaggtataaggagtgtgtttctgaattcaattgatttgaatagatgaagtcctaggccttcattttttcttttctctggttcctctctgcagtctcctttcagcctgcttcaggaatgagcttgtggagccccggagagaaactccaaaacaatctgacgtcttctttagacattccaagcccccaaaccgatcagtgtacccatagagccctatctctatattttaagtgtgtgtgttgtatttccatgtgtatatgtgagtgtgtgtgtgtgtatgtgtgtgcgtgtgtatctagccctcataaacaggacttgaagacacttggctcagagacccaactgctcaaaggcacaaagccactattgagagaatcttttgaagggactcaaacctttacaagaaaggatgttttctgcagttcgactctgtgctggccagcgagcgcccagctcctgacactgctggagaggccccagccgcttggcgatgccagccaagctctgcagtcccagcggtgggacctagggaggcatggtctgccctctgcatcctctggagccagccgagcaggaggcctaggagggtcctctgagactccagacctgaggcgagaagggctgcttccctgaagctcccacagtcccatctgcttcaggccccgccttggctgtgttcttcctggccgctgggtccaatgctcaggtgctgcggcctggttccccg

SEQ ID NO: 208907 - DNA, 692 bp, Homo Sapiens; identical to SEQ ID NO: 40549

SEQ ID NO: 208908 - DNA, 634 bp, Homo Sapiens
agcggtgtgtgtgtgccagtttttcttgtctcaggtagatactcccactgtgtataaatagatctacagacttttcatacttacctcccgtattctgtttctgtggtaaaaatatgaagtgttttagttgtatgttgagtgattggttggtattatcaacactgttgtttgcagtctcattaaagcatgctcttaaggagtacatatggtcattaattgccaactgtagattccagtgatctggcccctgcctacctccttcctctctttttcattctctgtcatgcttctccactgttttccccaatgatgcactattttgacacactggccttgctattccttaagcaaatcacattcttcccaatccaaagactttgcacatgctgttgtctttcttagaatgcccttcccctaggcctgcatggcttgctacctcacttaattgtttgacacttcctttggttcattgagcttcaaggctcttaaaatgccactgacaatgagatctccctttaaaaaaaaaaaaaaatttctacttttcctcttaagaggcactttactctctccccactcttttcttcctcttcaaagctatttaaatttcctaggtttccatgcaaaaagctggaaa

SEQ ID NO: 208909 - DNA, 581 bp, Homo Sapiens; identical to SEQ ID NO: 40631

SEQ ID NO: 208910 - DNA, 850 bp, Homo Sapiens
agcggctaatttctagatatgagaaatataaaaataattaaaacaaaatccttgccttcaaacgaaatggctcggccaggcacggaggctcgtgcatgtaatcctagcactttgggaggctgagatgggaggatcacttgaggccaagagtttgagaccaacctgggtaacaaagtgagacctccctgtctctacaaaaaaaatcaaaaaattatctgatccttgtggcacacaactgtggtcccagctacaggggaggctgagacgcaaggatcacttgagcccagaagctcaaggctgcagtgagccaagttcacaccactgccatttcctcctgggcaacagagtgagaccctatcacaaaaaaaaagaaagaaaaaagagaaaatgactaaactgaaatggtcttagtcaagaaaattatatacagacttatttttagaatcatttcaacttatttccttcttacctggttcagaaacaagtttgtttcaacgggtgagagtagttttaaagaataagttttcctgatgggttaccaataaacagcaaacaaataaaggagggggaaaatatcacttgaggcttaacattgcaattaatttagaaatacgcacctcaatctcaagccagtttataactaccatagttttgagcaaaatttttcttctaatttctccaaaaactcactcatttcagtatttactcattgaccactggggtccctaatagaaaaggcgatattataatattcccttggacactggtgtactaaaggagacaaacgagagttaaccaccagctaaatgcaccttgatatttataacactccaaggtgaaattgcctggg

SEQ ID NO: 208911 - DNA, 476 bp, Homo Sapiens
agcggagtctgcggagagggagggcgaggggcggcggcgcaggggtgcacagaggcggacggcgaggcagatttcggagccgcggcgcttacctgatagtcgacagaggcgaggacgggagaggacagcggaggaggagaaggtgtctgtggtggcggcggcagaaggagtcagaacaaggacgggcctgtgatgtgtctgtctatgacgaggaggacaatgtcctaaggaatggagaggaagaaagtgaagggaaccaggtccctggattccatgtggaacagtagcccaggatgtgcgctatggactgttacaagagagagacatgatcttccttaaggcattgatttgtcatgagtctctttgttatagccacttaacgttaccttaatacacccacttcatggataagtaaaactgaggcttggagaagcccacattgacacagcaaaaaaaaaaaaaattctccaagcgct

SEQ ID NO: 208912 - DNA, 861 bp, Homo Sapiens
agcgtggttgttcatttgtcggacatagcaaaaaagaatttcatgatctctgtattttgttacattgacatcaggtgcttttgatgagaaacaacagtgaaatatcgtgttcataatagaaacgaaagtcaggtattgcagtaggaagtctttgtcagcttaatgctgaagccaagagtagcacaaggtaccacattcttgtgcccacgacaggcttttataatccttctgagttctctttgacatcaagccccacgttgttccccagtctcaatattctgttggaggcagccacgtaacaattagagttgaaacctgccccacgttgttccccagtctcaatatactgttggaggcagccacgtaacaattagagttgaaacctgccccacattgttccccagtctcaatattctgttggaggcagccacttaacaattagagttgaaacctgtctgccatcctttgtctcaatgtttgaggatgtatgcagtgtttttggcagcgattataggaatgcagttgtttatttggcctcagcagtttatttatggctgcaattaatatccctgatcatgggcttttaaacctaaaatagttcagatcctcccttgttcctcttaatgtctaaaagctttgattctgtaataagaataagtgttggagttgatacattagttacaccctttgtaagctttaaaaacctgaaattttaaggtttactcatggtgcttgtattgatactcatattgttcacattaagtagggtaacttttggtgttaaggtattatctcttctggaaacggtaatttggtaatcttaaactatattttttttaagcataagtcattcagttaaca

SEQ ID NO: 208913 - DNA, 748 bp, Homo Sapiens; identical to SEQ ID NO: 42771

SEQ ID NO: 208914 - DNA, 649 bp, Homo Sapiens; identical to SEQ ID NO: 45770

SEQ ID NO: 208915 - DNA, 507 bp, Homo Sapiens
  misc_feature (276)..(276): n is a, c, g, or t
agatgatgaaaatggaggcagagtggttaagtaatttgcttaagatcacccagctagtaagtgacagagctggtatttgaacctaggcattctagcttcagcagttgagctttttttttctttaggttggtatcaagttaacttaaatatgcgtagtggcaatttgtatttcttgtttgtttgactatatcctggttcatgtttgtttgtcaagatggttaaatgtatatccatattgtagtagaattttttttgattatttaaaaaaatgtttanggggctgagtttttcatcacaaccctctccttcctctcagaaatagtaactggtgcatgggctgtggtcgagggagcctgctgtgccatgtcagtcaaatctgggctgtcttcatgattcaacttggtgatgtgatgcaaccttgggcctgggttgaatggacagactgacattagaatctacactgagcacaccttaaaggggtgtgtgtgtgttaatgtagatgtacgg

SEQ ID NO: 208916 - DNA, 787 bp, Homo Sapiens
  misc_feature (612)..(612): n is a, c, g, or t
agcggattcggtcctcggctggcgggcaccatggtcggtggcgaggcggctgccgcagtggaggagctggtttcgggggtgcggcaggcggccgacttcgcggagcagttccgctcctactcagagagcgagaagcaatggaaggcccgcatggaattcatcctgcgccacctgcccgactaccgcgacccgcccgacggcagtggccgcctggaccagctgctctccctctccatggtctgggccaaccatctcttcctaggctgcagcccacggggtcctaagtaggaaccagcttcacctctctgctttccctcttatgaaaatggcagatgcctttttgtgaaggtctcaaagcccacttcatcctggctgcagcaccaaaaggacaaaggcccgcttttgaagtgcctgataaggcattcctttcacccctccatgaggaaggtggcaaatcttgagactccctattagagagcttcgattttcctgaaattgtgttaggaaaatagggtgacttggtttgatcttggtttctatacctattatggctgcctgactctggtcatttggcccctgcaggcctaagccacttggttttgcttcacatantggggtttattagaacagtacgtagggaagcaatgccagaggcacccgttccttttccctgccttctaggtgctcctgggaaatcctggttttccatggttaggcaaatgtcagagaattggggaaactcaataatgtctttgttagactaacattcaatgtatctaaaacaata

SEQ ID NO: 208917 - DNA, 613 bp, Homo Sapiens; identical to SEQ ID NO: 52360

SEQ ID NO: 208918 - DNA, 752 bp, Homo Sapiens
cacccccgtgccgggagcgcaccgctgccctcgcagccgccctcctgggggcagccgtcagaatggcctgccttcagccgagttggaaccggcctccctttaactcccaccgccgggcctagccatgcgaggggtgcgcgcaggccatgtcccccagctctctccggtcactgcctagtgtgcgggcgttggtggtgaggaccgagcgcagggtcccgtgtgggtgagcccttcagagtcccactgtgacaggggctttcagggagaacgggtccgcgggccctccccacctcccagcccagctctgctcctggacagcagagggctttctcccttttttcctcttaccacaaaagtaattcatactgtagaaaaatgggaaagtacagaaattacaacaaaatacgtatctccttgatccctccccagacgagttctttctactccgtaatgtgcatttggtgcatatgcactgatatatttttacgtggttagattcttactgtacacttttttcaccagttgtagaagtctgtccgtgttactacatgttctgcaacatgaattttaataaacgtgcagtattttatcctatggatatgcctttatatcttcaagttttatttatctacttccttaccattgactatttagggtgtttctaatgtgggactattaaaagcactacttttcctttgatgcagctatttcactactaggaattttccctacaggtatcctacaaggtacgg

SEQ ID NO: 208919 - DNA, 859 bp, Homo Sapiens
aagcggaagggttcatacacaatgtatcatgtaacatccccagtgggggctggggcagcaatctgtattaaacacaataatttcgcagcaagtcacatgacacatgattatttctactaagagattactagattataaacagcctcacatcagtttgttgggttagactgtgctgccaaattatcaaataattttgtattttcagagtgttaggacttcagaattacagataggggatcgtagatctatagtattcctatttgaatggctaaatggatttttcctaaggtcctagcatgtattatgaccaggaaaattgtaacatttaacacgagagcatttctaaataccattttcaacatcagtacgtgcctgactcggagaacaatgaaagagccgtccttcatgcccagggccagctgagatccgtcggggctgaaagctacactgcgaaccgcctcttccatgttacagcgggcgatcaaggcatgatcagccaggctccacagcctaggcacaagaacgaagtcaaaacaaaacaaaaccaacttcccatggtcatcggccagcccaaggcaagaagggctgctcaccacacaacagtaacaagaaaagacataggaacttcacaccagagccctttatcatggcctgtcagcgagtgtggaaaggtgtttagtgcatctttgggtcatttcatgatttgaaggaaaccagcaagaattatcacatgagagtaacatttccaaagcatttcgagattcacagaacaacaaaaactttaaggctgggcattgatggctcaacgcctgtcatcccagcactttgggagggcatggcaggaggacactcgagcccg

SEQ ID NO: 208920 - DNA, 784 bp, Homo Sapiens; identical to SEQ ID NO: 44516

SEQ ID NO: 208921 - DNA, 701 bp, Homo Sapiens; identical to SEQ ID NO: 40757

SEQ ID NO: 208922 - DNA, 666 bp, Homo Sapiens
  misc_feature (59)..(59): n is a, c, g, or t
  misc_feature (274)..(274): n is a, c, g, or t
  misc_feature (293)..(293): n is a, c, g, or t
  misc_feature (327)..(327): n is a, c, g, or t
  misc_feature (563)..(563): n is a, c, g, or t
agcggggaatcgtcagtgccctggctcagcgaccacccttcaggctccccaactcccgntggtcccgaactcccctcccccgcaccccatcctttcggatcccagttgctccaggaaaacatgcttgatcctgtcacaaacacatatagcacacatggaaccaccataggccctgctgacatggttttttgtgttttggacaatctcataagacttcgggtcttatagcacgaaccccttgaagtctgcgtgggtacacaccacagtagatttnggtgctttcccagccttcntggtataaagttacagcaagaagacgtgaaaggntgggaaaggagacctctgattccaaggactcgttcaaaagatgctgagaccgaggcttaagcttcagggcacctcggccccacctgctggccggagacggtagcgctgccccagccgctcagtgcttatggggctggcagagggatgggatggggctggctgggaagaagaggtcgctgaggccccgcctgggagctgcagagctggggcaaacctggggctctgggcaggtctgncccaggcagtatactgtggagaatgaaacttttctaaatgatcaataaaaaagccaaagtggagtcagctgtgcaaaaaaaaaaaaaaaattctcaagggctg

SEQ ID NO: 208923 - DNA, 458 bp, Homo Sapiens; identical to SEQ ID NO: 60349
  misc_feature (458)..(458): n is a, c, g, or t

SEQ ID NO: 208924 - DNA, 1000 bp, Homo Sapiens
actggattttgggattgtcagggtcacagaggaggcgaagcagcccctgcaattgaagaaccgtgggaaatatgagatcgcgttcaggtaactggaatcccatcagatgtaaggccatcaagtccgccgtgtggaggaatgtggggaaatatgagatcgtgttcaggtaacctgaatcccatagggtttgcggccgtcaagtccaccgtggggaatagcgtgtctgggaaacttatcagtcagtcaaggaaatcataagaaccgtctctgcttttttgcctcccttggcttcaaaagaatggaattccacctgctaaggaagcagagattctcacactgctctcaactctgcagcttaacagggccctttaagtggcccggatgtacctggccagttggaaccataggtgtctgggaatggaggaagagacttaggggaagaggccgggagggggagattctaggggtgagaagaggtcccagggtggagggagagactggagatgggcgacctggcctcaagctgtcctgccttctgccagctcttatctgctttacaaggagaccttcttcagcagatttcatgtgaagaaagggctttcctttttcattacattctaagaatcacgatattgtacaatccaaatagtagcttggtagaatagagctctggcttgtgctcatccccagagataaaaaatgaaacacagaggctgggtgtgatggctcatgcctgtaatcccagcactgtaggaggtgaaggcaggcagattgcttgagcccaggagttggagaccagcctgagcaaagtggcaagacccccctgcctctacaaaatacaaaaaaagttagctaggcgtggtggtcatatcacttgtagtcccatctacttgggagactggaatgggaggatcgcttgagcccagagaggtcaaggctgcagtgagccgtgatcgtgccactgcactccagcctcagcaacagagcgagaccctgtctc

SEQ ID NO: 208925 - DNA, 415 bp, Homo Sapiens
  misc_feature (280)..(280): n is a, c, g, or t
cctaatttcagtgacactatagtttgaagctagtttacaaacagaactcctgaaactgatttaggtaatctcttaatctgagtaactcaaaaaattaacacaagcctgatactaatatcgccctggacatcctgacagtgctcttccctactttcctcagtatcttaaatgtctctccaaaagaaatgtcacaacaggagcaacacacaatccaaaacaacactgtccacataagacgttaagctcaagaatgaggtctgactttaaacgacccttttcngatcaactccgccaggtctggagagggcccccaaaaagcaaaacccttaagtttccctatgggtcttctctccattcagaaagttacttagacgccaacggagatggcgaagaggcggggatcgtaggggaagga

SEQ ID NO: 208926 - DNA, 1000 bp, Homo Sapiens
atcaatttgatttttccctattgaagttaactttgatgacctggcttaagatattgtttgtcaggtttctacttttcttttccctttactggaaggaagtcactgtgcatagccacacttaagatttctaccccctcagagtggaggctcagcataaattatttgaatttctgcttgggagatttgtcctttctccctcatctgtttatttatccaagcatttatttatatcattattggcccagatatttacgtgatacttcactttataatccaatactactgctttttaaaatttgttgctcagattgttccagttttgaccattagaagctccttcttttagtttccctcttgggctgctgctgctttttttttttttttttttttccttccccagatggggtcttactctgtcacctaggctggagtgcagcggcatgatctcagctcactgcaacctccacctcctgggatgcaagcaacgctcccacctcagcctcttgaataacttggactacaggcatgttccatcacgcctggctaattttttgtacttttgatagagacagggtttcgctatgttgctcaggctggtcttgaactcctgagcttgggcggtccacctgccttggcctccaaggtgctgggattacaggtgtgagccaccgcgcctggcctcctgtgtttaacatatatactgttgttgtcattgtggggtctttttgtttgtttttaagcatttcctttctggcactacaagatgcttcaagttcatcttgtatatttcatgcccttgtcctagaatcagccttttctccaaggaccagggccatttttaatctaatttgaaaattacattctcgattgggactattaagtttgaagtagagaaaaattgaacattgactaactgctgttcattgcatgatcatgaagaatagatctttgtcatcctagcacttgtattgccaatttatgaagtaaaacaaatcatgtt

SEQ ID NO: 208927 - DNA, 430 bp, Homo Sapiens
  misc_feature (351)..(351): n is a, c, g, or t
tgtttttacttaaagctttggaaaaagaaattaagtaatactgtaattacttttgtgttttggtgttttcacttagttttttttaaaatatattctaccaaaataataactattttgtgccttgtgtacaaacttctcttgtgaccatttatattatggatctgagagctccttttaaatcatagccacagtttgagtataacaacttaatttaatccttggttccatctgagaaaaacaaaatgggcaagtgtgataaatgttaatatgcaaatacagaaaaacaacaatttatgtactaaaaatcaaaaggctttttgtgggattgtaataaagtacaatcccacaatngaaatgcacatccatactaacagcatccataccagtaccgttttcccccaaatagatactcagcccccagaaccgtgat

SEQ ID NO: 208928 - DNA, 437 bp, Homo Sapiens; identical to SEQ ID NO: 53099
  misc_feature (352)..(352): n is a, c, g, or t
  misc_feature (427)..(427): n is a, c, g, or t

SEQ ID NO: 208929 - DNA, 1000 bp, Homo Sapiens
gggggccggggctctctccccggtgagcagtctgactcaatgtggacagctggacaaaggctgtcttggcaagatgtgggaatgagcttctcccacggagtctcggcgtcccctgccccaggaggttgaggctagcagacaccccctgacgattcacagctgatttaatgctacgtgagtcctgagtagctcccctgggagaagaggctaagctggggcaatggggaagggggtgctattcttagagaaatctggaagaggtttgaggagtcacatgcatgtggacagctcaagactgtgtcccttcaccccatctcctggcttgctatgctcctacagtgtcactgccctgccctgccctgccagagggcagccatgaaagtgctttgaggtcatcagagtgcaaagtgccgtcggcagtaccctctggccaggggcagggcagggtgagtgtcagtgtgatgctgagctgtgctctggggaaccagcacgctggacactgatagtggggctggggcgccggagcgtctctctactgctgctttccttagcactgatcatgtccatccacagactgttcctgtcaggcatatcctgcatcacccttcacctttacagatgagggaactgagtgccagcgagtctggggcagtgctgggcctgaaggggctcggggcctgctgctctggggaagagtggtagcccagcagcaaagggggcgcctgtctggggactgagaaccattcattacacaccttctttggtccttggcgtgaaccgggagtccaactcagacctgtgttgcaacaactgaagagtgtggtgtattctacagggagcttcccgggttcaggcgttcatgttccctgaccaaaaggggtagctgccgtgtgtggccagcagggttagaggcccttacctaggcggctgctgttgactggttgcctgaccagttggcccttgcctttagccctactcctgaggtgggcccgggtgcccc

SEQ ID NO: 208930 - DNA, 559 bp, Homo Sapiens
ggtagacgccatgatggatgtgtctggtgtgggtttcccaagcaaggttccttggaagaagatgtctgcagaggagctggagaatcagtactgtcccagccgatgggttgtccgactgggagcagaggaagccttgaggacctactcacagataggaattgaaggcttgagaactcctgtgtgaattaaatcacgaccttctgatgaagccactccgatgagcctgtgaggcacattgtcttcacactgtgctggggcagggttgttggcaaacccccatggatggcagccggcaatggcctcacagtgacaaatgcgtctgccttttgacccagaattctacccctgagagtgcgtcctacagatgcttgcaagtggtatggtaatggatgtacaaagctattcacagcaggggtgtttgtggtagcatggcctgggagacagcccagatggctttcagcaaaggattggtggcaggtctgcagccctggggcttatcagacaccaaccctgctggcaccttgatcttggacttccagtttgcagaactgtgagaaaa

SEQ ID NO: 208931 - DNA, 808 bp, Homo Sapiens; identical to SEQ ID NO: 45487

SEQ ID NO: 208932 - DNA, 857 bp, Homo Sapiens
ctcagatgagagtgaggatgaagaagatgactaccagcaaaagcgcaaaggcgttgaagggctcatcgacatcgagaaccccaaccgggtggcacagacaaccaaaaaggtcacacaactggatctggacgggccaaaggagctttcgaggagagaacgagaagagattgagaagcagaaggcaaaagagcgttacatgaaaatgcacttggccgggaagacagagcaagccaaggctgacctggcccggctggccatcatccggaaacagcgggaggaggctgcccggaagaaggaagaggaaaggaaagcaaaagacgatgccacattgtcaggaaaacgaatgcagtcactctccctgaataagtaactgcgacccgtgggaggagatgccggggacctgggccgcgctgccaggacctctgctgtgtctcgcccaccctgtgccctggcgccgctgcaacagcccctcatggccaggagccccccatggcctggggcctcctcttcatcttggcacagaaattgtttgggggatgggggggggactgggggaggggtagctgctatctttgagacagaaagatgcaggacagcatttcatatgtaaccatttgaatgtttttgctgtttttagaattcagagcccttgctggggggtgcctgggagatggggtaagaagagctttcatttgtctggtagatagatagcatgtaagggggtggttgtcccaggaggcagctgctgacaggtttgtacacacagccccggactgtgttgcctgggtgctcattcagagaggggtatcatctgggagcctgtgccccctgggtcctcgagggtcaatggttgtcca

SEQ ID NO: 208933 - DNA, 699 bp, Homo Sapiens; identical to SEQ ID NO: 55109

SEQ ID NO: 208934 - DNA, 756 bp, Homo Sapiens
  misc_feature (529)..(529): n is a, c, g, or t
  misc_feature (687)..(687): n is a, c, g, or t
gggcccatagccgggcaagccctaggaggcagccgggcgtcgccggcccggcgccgtcacgctcgccctcggcgcagtgtccttttccaggcgggacggtgctgtcccggcctctctactacaccgcgcccttctatcccggctacacgaactatggctccttcggacaccttcatggccacccggggcccgggccaggccccacaaccggtccggggtctcatttcaatggattaaaccagaccgtgttgaaccgagcggacgctttggctaaagacccgaaaatgttgcggagccagtctcagctagacctgtgcaaagactctccctatgaattgaagaaaggtatgtccgacatttaacgcgggctgcgtcggtcccggacttttctaatttattaaaaacatggccttggcagttatttttccatcaccgagagagagagacagagagagaaaataaactacccctcctattcagaagtttatagtttatggagatggatgacataaaaatgtaaacatctccnaaacacaaaaaaatgtcttaaccaagcgaaaagaaaaattaacaaaggatctgtattaaatcttattctgtatatctaatgtagcattttggtatctaaatggataattcaatatctttgaagtaaattatgaaatcaagacacctggtacaggcatntaagtgtttttggtaatataaatatataccatttgtgtttcccccaaaagtgtttcatagttaaaaaac

SEQ ID NO: 208935 - DNA, 803 bp, Homo Sapiens; identical to SEQ ID NO: 46755

SEQ ID NO: 208936 - DNA, 846 bp, Homo Sapiens; identical to SEQ ID NO: 53629

SEQ ID NO: 208937 - DNA, 762 bp, Homo Sapiens; identical to SEQ ID NO: 49550

SEQ ID NO: 208938 - DNA, 860 bp, Homo Sapiens
gaaatgaatggaattcgccttctttgctgctattgcttatgtgttcctatttcaccatcttttgtaaataacagtgttgttgctgtcagggcacttctccctcactgggcacgtgcctttctgtgctgtggccagcccaccatcgcctgtcctcacctgccatccataccctagcagagccgtgctgctctgagggtgccgggtggggctccattcttaccctagcaaactcaccagaacaaagcccacctgcccaaccctgtccttgtctcatttctcagcttcccgaggctcccttccatacccacagaggcaggactgctagagccccactcatgagaatcacagtcatttcccagcttcctggggcttccttccatgcccgcagaacagagtcgggactgctagagccccactcatgagaatcacagtttccacagagaagaccagtctagcttggactgtgggttcctggttttgcagatgtagagtggtgaaggcctaaccgaggagaggaaacaggagtgtaacagagtctccattccaggaccagcatctcttccctccccttcaggggtttaccttcctgaacttctcagtgtatgaaacacagcagggctggggaactatacaacccagaggtgtgttgtttcaagtattttttagagcagtttcaggttcaaaattgagcagaggctgggcgcagtggcttacgcctgtaatcccaatgctttggaaggctgaggcaggctgactgcttgagcccaggagttcagactggcctaggcaatatggcgaaaccctgtctctactaaaaatacaaaattatctgggtgtggtggccacaactgtagtcccag

SEQ ID NO: 208939 - DNA, 788 bp, Homo Sapiens
aacttcgtcggctcactgcctcagttattctcccgcctcagcctcctgaatggctgggattacaggcgagtgctatcacgcctggctaatttttgtatttttagtagagatggggtttcgccatgttggtcaggctggtctcgaactcctgacctcaggtgatccacctgcctcgacctcccaaagtgttgggattacaggcgtgagccacctcgcccggcccttacttcattttggaatgccatgaaccataatatgttctagaaaagtggaaactgttattttccactttgtaacagtacagttacattcatctttttggtagtaaatcattgtactataaactgatgtctcagaagtaacattcacgtgtgtaacccccacatttcttttattgatgctaaaagtctacaaggatcacaaaggaacctatctacccatgtataagaactagaaaattatcaaggaggggcagtctaaattttttaaaaagctcgaaaataatggcacttgttttccctgtgccatgcgtttgtccccactacaagctacttgacattagactaccaaaactaccaaaggaagttattgttagacgaatttattttaaaactctgcatacacatcatttaaaatgagttaaaaacttaaaaagtgaactctgagctttggcaaagttgcaaaggtgatgcagcaaagttttctgtgtcattaaaactatgcctgaaactacaggattccttccgttggaatgaagttttcccttcagctccaagaattcagcctcc

SEQ ID NO: 208940 - DNA, 977 bp, Homo Sapiens
ccaaccaattccatcttagaacattgcattttaaaagcatttctgtggttctaagtttgcatcaagacagcctaagtttgcatctgcacaatctggatacccaaatccctctataatttccaaagacaaagacaatttttgctagttgtgaggtgtcagggggaagcagtgatgccctgcaaacagtctaatgggcccagggaaccctgtttctttctcaacctgaggttgcatccttgatctccaggaaaagagattagtgcttgcttaaccaggttcctagtaaatggtcagggatcttctatgcaataatgttgcaaaagttactgaagaggaaaaaaaaagcacaacggaggcttcttgcccatttacacttgcaatgttagattttgaaaacagggcccttcatagtcagcacccaagtcctgacttccagatgtaatgcaggctggttaacagcccttaataactacattgcaattccaaacgactccctgacagcttttctagacagggagtagaattaagtgtgcgggtgctcttaggctctccgaggcaataacaagctcagtttaaccatttcccttctgggttgactgctgagttatgcagattccagttcattaagccctgagtatagagtatgaggccaacatcttttctttagtaaaagccatgccattcgtctgcctttcccttttcctcctttatctgggcgactgtttttggaaactggggtaactccctgcaggcaggcagcaggagatatctccaagtcaggctggcatggtgggggtgctatcctctgtacaaaccatgaggaagatgaggcaaataagatcagagaaccttttgtgaaccaggcgatgaacccagttgtaccctgtgcttgtgtcctagtaaactgtacatctggaagctgtcaaagtcacagaacacaagaattctcagtggaaatctacagtgaaacatcaatg

SEQ ID NO: 208941 - DNA, 1000 bp, Homo Sapiens
gcatacaggagctggcagaaccctagaaagcagctgctctaatgctctcatctggttcagtgaagttatttaacacagcacttagaagggtctgtttctttccatgcagataccctcattagttataatacgttcagtctagcaggacagacaaacccgaagagacagttgagagctccaaagagggaagtcaacgaaagagaactgcttgaggattacagggaaggctaactaggaggaggtaatgccttagctgaagtatatggaggaacgcagagcgagttagatgcaatggagaaggcgaatacggggagtgggaacaggcaaacattccaaatcacaggtgacggcaacaggcaaagaggacaccgcagatcaagatataagatccatgatagagcccagtacgtacaaaagattgcaagagttccctgagagttttacgtacgctgatgcagaagcagaggatgcacaactatagtctgtcacaaagcatggaaatttacagcgagagcctaataagtaccatcgaatccagagcggtccatcatacgtgaagcgtacaaggtactcatccgcgaagtaaagacggtagcccaagaagctacgggcaccactaagtacagacaacacaacaacacctgaagatcaacaacaacaccacacccaaaacacgggatatcgggaaaaacagggcgacccagaaacgacagccagaagaatggaacacggaaacgcgccacgcccagtaaataagacacccacaacaaacgaaagagcgaagcggcaaacagcacaagaacaggtaccaaaaagaaaggaaggcacaacagaaaccatgaacacagacagccacagaactacagcaagaattacacgccgcccgaacagctcaatgtgggaacagacacaaaaaagcgccccacgtagacggggacacaaccgggactgatgagccacgacgtcggagagcacgcgccaaaagagaccaccaagaaaa

SEQ ID NO: 208942 - DNA, 970 bp, Homo Sapiens
attctagcactttgcgaggtctattgcaagtggatcacctgaaatcaggagttcaagaccagcccagccaacattgcaaaaccccatctctactaaaacatacaaaaattagccaggtatggtagctcaagcatgcttatcccagacactttgtggaggccaaggtgggcggatcacctgaggtcaggagtttatgagaccagcctggccaacatgacaaaaccccatctctactaagaaatacaaaatattagccgggcatggcggcacgcgcctgtaatcccggtctactcgggaggctgaggcaggaggattgcttgaacctgggaggcggaggttgcagtgagccaagattgtgacagtacactccagcctgggcgacagagtgacgactctgtttcaaataataataagtaaataataacagaactgattctaataacaattacgtctctctcaatattccatgaaaaatctcatcccaagtcctttggctagaaaaacatgctggccacacaaccagagggcgcaggccgcgttcccagcatccacccccaaggtgagtgacctgggagtggaatcctgcactcccacatttcctgggaaatggggcaaggaaacaagccttcacggtccgtcttggcctatgcagaggctgggtcgtggcctaaggaggagaggaaacgtttcaccagccccaggtgactcacagggccttcaccaacctgaatcacccgctgaacaaagctctgcctgcgttctgggcaactgaacgaggtcccaaccctgctccctggacttgccacaccatgtctctactttacaattctcgaagtgctgccttcctccagtgaaggccttctccagactccccccctgcctttctccctgggattccagcatcggtatctggtgggagaccatcgctcccgaaacaaggccttgtttcttttccctccctattcctggc

SEQ ID NO: 208943 - DNA, 807 bp, Homo Sapiens
gctcagctcactgcacctcgtatcccccgggtcagattcaagcaattctcctgcctcagcctcccgagtagctgagattataggcatgcaccaccatgcccagctaatttttgtatttttagtagagacggggtttcaccatgttgcccaggctggtcttgaactcctgacctcgtgatccactggtctcagcctcccaaagtcctaggattacaggcgtgagccaccacacccagcctgattgggctctttaaaattcactcctattttgtgctatttctccaagattagccactaattcattctctctttttccttttggtaggaggaacgattgtgacacacaaaagaaaggcctgagaggaggcagagcaggaagatacccgatctctgttgacttaggtttggctcttccacacacagtagcattgcccagactactgttaggccaagagactcaaagaagtactacaatgactcaactatttcagatttctaagacatcatagattttatgttgctcagtttttacacgtatactctgttgggtaccggaatcacgagtgatgctataaccagatggcaaatgttcatgaagttgactactccaagaaattactaacactaactgacattgactgggcacttacaaggtaacaggcaataaaccagcatgtcatactgatggcagcagcagcccgtctggagcaatcactgccatgagcgtgggctgcagtggaggaggagcagccggggctgcaacgactccaaggagcttgcgaacaggctggagccccaccccgatct

SEQ ID NO: 208944 - DNA, 720 bp, Homo Sapiens
  misc_feature (601)..(601): n is a, c, g, or t
ggcttccggacctcactcctcactcagatttctgtacatcacgtccctttatgtctataaatcttccaccatgtagctgtgctggagtctcaccaaatcttctgtgattctgggggctgcctgatttgtgaatcattcatttctcaattaagttcctttaaatttaattcagctgaagattttcttttaacagatggtgtcagaagtgggatctgtgggagcaggactgctagggcctccggagctataatgtggtgagcagtgttcctagggcttctaatgacccccaggagtgctgaagtacaagaaaggcacctgcaaggactgctctgtgatggcagcagtggcccatgtggagcagttgctacggagacactggctgcagtgaggaggagtggctggggctgtgcgctcctcgaagctggtgggagtcaggaaagggtgggagccccaccccttctaaattggcaggcaggagccccgccctcccaggcacagctgcagccatccagccatgactgcaaacccgggcatctttgcactctcagaggcccagcaagcccccctgccccgcaggctcagttgtacctggtcccaccanctggcgtctctccactcccagagcccactccaaccttcaggaattccccgaaaaaaggggtttttgggaaagggggccttggaaaaacccccaaaggggcaacaaggtccggaaacccg

SEQ ID NO: 208945 - DNA, 528 bp, Homo Sapiens
ggtccaggccgtggggagccgagacgcagccccctcccgtcgcccccaggcgcccgccccccactcaccagccagcagcgcgcagggcagcagcagccagtacaggaccgcgccgagcacgtgctggctccatggctggagggcccaggcccggcccatgacctgagcggactgccgcggcgctatggggcggtgcgggggccccggggccggcgcgccatggctgacccgcggggacccgcgcgccgcttctcctcttcctccttctccttcggccgccccgccgtgtgccgacgtcccgggcccgcgtctcgtctcaggcgaccgccctgcccctcggcgtgagcgcagctgctcggctcactggggccgagctgggccggacggcggtctcccgcgcctcctccggtccgcgggcctttataaggctcgtgctccgttgtagagcggactgcgcgagcgctcgagtggtagggggggtgctggcgcagtcgagtagtgcgggaacggccctgctggcggctgggg

SEQ ID NO: 208946 - DNA, 708 bp, Homo Sapiens; identical to SEQ ID NO: 40581

SEQ ID NO: 208947 - DNA, 394 bp, Homo Sapiens
  misc_feature (317)..(317): n is a, c, g, or t
cactaaccctcatggtagttagccatacttgggcaaattgcaatgaacgctcttggaattctatgtttttcctactgatcccacagaattcaggaaaaatattccctgggaaactttaatatagcttataaactggcagattgtattttccaaatccagatcgtattttccaacaatatcttctatcccatatgttctttgccaaagttaccatgccactcccttatcaaatggtagagtctattcctctccccttaaatctgggcagattcatgactgctttgaccaacagagtatggtagtaataatgctacgtngaattctgagaccaggcaacaaagacataagcctctgcctggtttctcttgggaatgttgcactctggggggaatat

SEQ ID NO: 208948 - DNA, 607 bp, Homo Sapiens
ggtccgcggggtgagaatgcccctgggagtgtaacatgactgccgccccatgtgtgtgagaggcgtcctctgggagagcatggatcctgaggtcccaggattgtcagctgacctctgtcctgtgtgcccagtggccccaggtgacgtgtcttcaagaagaggctgagctgcggtgcttgtaaggtctcagccttagatccaaggacagtccaaggaagtcctaagaccatggagttggtgatctgggatctgggtttgctgatatttctcaccgtgaatctcttggtggtgtttgtgggcacgagaggggcagagaatggagagtgaggctaccacatgaagcgtcaccagagctgctccctgctgcctgctcagagcaccccggatccactgttcaatctgcacaagattcggggtccagacatgggagacttcagctgcctcagaggaccgtggacagggaaggccagcctcgcatccctctgtccatgcctggaatgactttaataaccaagagttttatttttgaatttgtagctgtcgttcactttttacccacccattcaataaaccttacagaattgcaaaaaaaacagaacgaaagaaa

SEQ ID NO: 208949 - DNA, 781 bp, Homo Sapiens; identical to SEQ ID NO: 44583

SEQ ID NO: 208950 - DNA, 886 bp, Homo Sapiens; identical to SEQ ID NO: 47157
  misc_feature (886)..(886): n is a, c, g, or t

SEQ ID NO: 208951 - DNA, 664 bp, Homo Sapiens; identical to SEQ ID NO: 48748

SEQ ID NO: 208952 - DNA, 878 bp, Homo Sapiens; identical to SEQ ID NO: 54665
  misc_feature (467)..(467): n is a, c, g, or t

SEQ ID NO: 208953 - DNA, 729 bp, Homo Sapiens
ggacataggaaggaggagacgttcatttttactcctggtgttcgaatacaaccaatagatgaaacagtcactttattctctgtagctgcagattcctaatttatggcatgattacatgattccttgtctgtagaatgatcagcgatcatgctgaagttgatagactttgaggtcccctttgacccgaaagactgggacagcagatttcagttcaatatgaaaaaggattttctagctggcagatctgtccaacagaagaaatgtctgcccaggaagtagtgagcttacggctgttggcggtattcaagtagcggctgaatgctgttgattagggatgcggtagaagagaaggacaggaattaggccgacctccaaagtctcttccaatttagagggtcagttatttaatatatgacttgtcaaagccgaaagacacatagaataggggctttaccttcagtggcaagtatttgagtcaatatcatcaagtgtgttctttaaaaatgtttataaataggtcccagcatttttgagagacccttctgggcatcattttagaacaggatgaacaaaacaaaacaaaaaacaggtgaggtgcattgactcacgcctgtaatctcagcactttgagagactgaggtgggtggattgcttgagcccaggaattcaagactggcttgggcaacagagagagaacttgtcttatggcaaaaaaaaaagagaacagac

SEQ ID NO: 208954 - DNA, 1000 bp, Homo Sapiens
aatcttcatcatgacctgctcccctctcctcctcacccttctcattcactgcacagggtcctgggcccagtctgtgttgacgcagccgccctcagtgtctgcggccccaggacagaaggtcaccatctcctgctctggaagcagctccaacattgggaataattatgtatcctggtaccagcagctcccaggaacagaccccaaactcctcatctatgaaaataataagcgaccctcagggattcctgaccgattctctggctccaagtctggcacgtcagccaccctgggcatcaccggactccagactggggacgaggccgattattactgcggaacatgggatagcagcctgagtgcttgggtgttcggcggagggaccaagctgaccgtcctaggtcagcccaaggctgcccccatcggtacactctgttcccgaccctcctctgaggagcttcaagccaacaaggcacactggtgtgtctcataagtgacttctacccgggagccgtgacagtggcctggaaggcagatacgcagacccgtcaaggcagggagtggagaccaccacaacctccaaaacaaagcaacaacaagtacgcggacagcagctagctgagcctgacgcctgagcagggaaagtcacacagaagctacagctgccaggtccacgcatgaagggagcaccgtgggagaagaacagggcccctaccagaatgtacataggtactaaagcctcaccacacaacagggacgactagagctgcagggatcccagggaggggactctccaccccaagcccaagggcatcaaagccccttgtccccggcgctccaataaagcccgcgagaacaatcatcgtggccagcagcagaaagcaaagagacaactccagggcccacagcacgggggccggcaaaaagaggccagaagcggcacaaggcatcgcgaggaccagggcaagcggcacgcacaagggacaaatgcgagcccaacaag

SEQ ID NO: 208955 - DNA, 812 bp, Homo Sapiens
tttagtatcattttgtgtatattgttgaaatgctttttcatcaatagcagtcaacattttatcctttctttttatattcataatgttatttaagtgtcattgatgtactgtattgacttggggtttgcttatttgttacttaacatgtgtacatgcatgaaagcatttttcgttgttccctgatagttacatttcaaccttgggatttttccaaattacttaagatgtttaatgtcagttaaagatttttttaccctctttttgggaacatcaattttgtactgttatgcagtaaacatttataataatataatttcagtcatttcttaactgtcacatctattgaaaatggatatagatacaggttttaagtattttaagtatatattacttattttaattttctgactttactattttaagggccagagggttaatcacaaagagcaattatgtggtctccctgctacatgaaaccgtgtatactaacaagcgtacaattttcagttgattttttttaaccttttagtttcccagttttgaataattacatggtggattctgacaaaaaaaaaaacccccaacacactttttcggcccccttgcgctctggaaaaacgctcctaaaccaacgcgtggggcccggggccccatgggcccgtgacccctggcgccaacaccgcgccccgaggaacacccggcgccgacaacacgcccggttcccccataaaaaaccccggcggaccgcgcgcttcgcacatccaaaggctccacaccacaccggtcccacacgcgggccccggaaccgaaac

SEQ ID NO: 208956 - DNA, 775 bp, Homo Sapiens
agcggaggcgcggctggcgcggagtctgcgggtgcagagcaagcggccgcccgctgcctgccctggccggtggggacagcccgccctgccagggagacttggggcaccggagtcgctgcgaggttgcctctagtggcctgagggcggggcgggcgcggggcagctgctgagggcacagtcgcctcctggtcgcagggcccgcgacagaccccgattctccctcccgggacaccgggtgccagctgcggatatctctcgccgccgctgcaccccgcagcgacagaggggggcccccgggaaagaggggaaaaccagccgccgcccgggacgctggttctgcgggtggcttctgaaaatgcccccaagccccgaggagactgaggtgcctgaggcaaaggggtgccactttctgctccgtgtagtcccagtgtcaggggccttctgtgaaccgcgggagggacataagttagacaccgggaatacccacacctttgcatgtggctgcttcgtttctgtgcctgagccacttggcccttgctgtagcttcctactcgttttacaaagccctgcttgtgctcacctgcccggttggcgcccttgccaactacccggccaaccacgaatcacggccccaggctgtccacaggctacccacaggctacaccggctgcagctcctcttgcagcataccctgcatccggcgctgtaatgtgtgtgtgcctccccctgggctggggccccttgaaggctgcgggtcttccttaagtccgggggc

SEQ ID NO: 208957 - DNA, 568 bp, Homo Sapiens; identical to SEQ ID NO: 40873

SEQ ID NO: 208958 - DNA, 759 bp, Homo Sapiens
agcgggtctgtggccggaggctgatcagtgttctagaacagatcagacattttgtaatgatgcctgaaataaacactaaccacctcgacaagcaacaggttcaactcctggcagagatgtgtatccttattgatgaaaatgacaataaaattggagctgagaccaagaagaattgtcacctgaacgagaacattgagaaaggtgctgctttgaaacagtctttcttgtaaagcgatttgtgtaggcatttccgatttgctgagaagagcactctgttcaaggaagtgcagtcttcagtaataccgtattttctcgttggttccagttcgttaaatagtgtggtcattagcatctgctttgctgtcttcctgttacagcgatttctcttcacttcatgcctgttactcggcttcttcagagttattctggattcatagaagagggactagccctgacatacagcagcagcctagcctctaatatttctagagagtggagagaggcgggcaccatgcagggaagcgtgtgccttcaccactttccgagaactgaatgtccttgatagggaacttgactgccggaaaggggccaccagcatcaccatttccttcactcgacggccaacttccttgcccagtgcagagctcttcctcaccatagccatgcagagactatgcatgtggataaaaccatgggaaaaaagcaaaagcagcagcagttactaatgttattctgaactgcaggagagaattgcgcaat

SEQ ID NO: 208959 - DNA, 673 bp, Homo Sapiens
tcgggaccgtgtcacgacttcgactgcctctgccccagtggctatggtggcaagacctgtgagcttgtcttacctgtcccagaccccccaaccacagtggacacccctctagggcccacctcagctgtagtggtacctgccacggggccagccccccacagcgcaggggctggtctgctgcggatctcagtgaaggaggtggtgcggaggcaagaggctgggctaggtgagcctagcttggtggccctggtggtgtttggggccctcactgctgccctggttctggctactgtgttgctgaccctgagggcctggcgccggggtgtctgcccccctggaccctgttgctaccctgccccacactatgctccagcgtgccaggaccaggagtgtcaggttagcatgctgccagcagggctccccctgccacgtgacttgccccctgagcctggaaagaccacagcactgtgatggaggtgggggctttctggcccccttcctcacctcttccacccctcagactggagtggtccgttctcaccacccttcagcttgggtacacacacagaggagacctcagcctcacaccagaaatattatttttttaatacacagaatgtaacgatggaattttatcaacataaaactatgaaaatgcaaaaagacaacacca

SEQ ID NO: 208960 - DNA, 773 bp, Homo Sapiens; identical to SEQ ID NO: 40673
  misc_feature (596)..(596): n is a, c, g, or t

SEQ ID NO: 208961 - DNA, 686 bp, Homo Sapiens; identical to SEQ ID NO: 40890

SEQ ID NO: 208962 - DNA, 877 bp, Homo Sapiens; identical to SEQ ID NO: 40300

SEQ ID NO: 208963 - DNA, 605 bp, Homo Sapiens
  misc_feature (435)..(435): n is a, c, g, or t
  misc_feature (487)..(487): n is a, c, g, or t
  misc_feature (544)..(544): n is a, c, g, or t
  misc_feature (572)..(572): n is a, c, g, or t
  misc_feature (583)..(583): n is a, c, g, or t
  misc_feature (590)..(590): n is a, c, g, or t
  misc_feature (595)..(595): n is a, c, g, or t
  misc_feature (604)..(604): n is a, c, g, or t
ttttttgggtctttgagaagacagtgtcaattttattgctttttgaaatgctgtgtaaagtgtggtacttaacaatttgcacattgggcaatttccatctgtaagtttaaatatatgtgataagaaaaagtacatgcatattaggaatatataaaatttttcaaaatcatcatctttacattagaaatttctttacacaaacatcttaacttttaaaaaaagtagcaaatggctataatgctctaagactgcagaaaatccagctttctgtttaagcagcctttcactgagagacacgagtgatggcagatgaaggcctcttaagaatagactcaacagaaaatgacagtggttcattcaccgagagttttgttccaacttgtttggctacaaaaaggtcttttgcacatctatctattgtaaatgtgtacttcnggttgtccttaactaaacactctctgtgtttcctaggggtctcttcaaaggncctctttgacaaatggtgttttcaactcaggacccgatttgtcagtaagtgtttgcnggaataatgagtggaatggattatgtcnaagtggcaganggtgccnggtgnttccttgcng

SEQ ID NO: 208964 - DNA, 424 bp, Homo Sapiens
  misc_feature (339)..(339): n is a, c, g, or t
cattattataagctgaatttttattttactaaattatctatgtcaaaaaaattctgtgcctggcgtggaatttcactccatcaagtgttacaatgattttttcattttcattacaagcaggagaatgaatgtaggacaagtgttaggaaacatgggcaataaattagaatataatttacaaaagcaaaaaaattaacagtgtaccacattattactgagtataaaataataagcaacaactaatcacaataatacaaaggtaatttcgttctgtgttactgaggatacctatgtgacattcattcaaacaaaaaagttcctaatgaaatggactatttnggaaatcatatgtatctcacggggtttaatcattagggtacatttaccgttccttttttagtaggactttatcccagtggcagat

SEQ ID NO: 208965 - DNA, 608 bp, Homo Sapiens
  misc_feature (592)..(592): n is a, c, g, or t
  misc_feature (603)..(603): n is a, c, g, or t
taaatgaaagacttttaagtatgtaagcaactatataataaaaggtttccaaacgcagcctgtaagaaatcaggcaaattttactataagcaataaaccattccgagctttccagacagtgtaccagtagctgtaccagtgggcaataacctttaaccaaacaaaaacaaacaaacaaacaaacaaaagcactttgcaatttgttgctgcaaaatggggagaaaaaaagagtatataaacttgatggaatcacaactgtcaatataatttaagggaaaataaagtcgataaggttgatggtgtctattgtttggaaagtccgaattccggctatttggcttggggctctaagagaccacacccactgaataaacaaaactctgcagagtctagctatccgccaacagggggtgccgtccaaattcatggcaaataaagggcatttgggtgctcaccattcacaacaggcgggcatttatgtgggatgaagtacaatttcctcagcaagctcagccaaaactccttaagggggcaatatgactccgcattttaagaaaatagaaaccggaaccccaaatccctaaaaagtatntgaagcccgcnttagc

SEQ ID NO: 208966 - DNA, 563 bp, Homo Sapiens; identical to SEQ ID NO: 40543
  misc_feature (492)..(492): n is a, c, g, or t
  misc_feature (548)..(548): n is a, c, g, or t
  misc_feature (563)..(563): n is a, c, g, or t

SEQ ID NO: 208967 - DNA, 622 bp, Homo Sapiens
  misc_feature (75)..(75): n is a, c, g, or t
  misc_feature (345)..(345): n is a, c, g, or t
  misc_feature (403)..(403): n is a, c, g, or t
  misc_feature (541)..(541): n is a, c, g, or t
  misc_feature (588)..(588): n is a, c, g, or t
  misc_feature (618)..(618): n is a, c, g, or t
gttttcaccttcaacctatccttcctgaagcccaaacttttaaagaatttacttccagacctggccttcagctanatatgattagggtgtttttctgagtgtctgtcaaattatgctggctaatttcaatgagaaaagattttagagtcacagtgaacccatccataaaaggactaaaagctctctctggtccctgagatccacaacccctgagagaagccagaactacaaatgcatcgtctagactttgaagaagcaaggtatgattcttaatatagcccacccatcgctaagtcaagcctagactctaatatttttctataacaggagaagcctccctgactnggagactagagtctcacatcttctgccaccacatgaatagactaaaaagaaaggagantcccacatcaggccaagtggtgacctgtggctatttcagctcagaatgtcagcctctgaagcatcaggtttgaatgactttggtgtcatgggattctgtccattgtccgtttgagtctgctgacatgcttcctctggnaagtgcagtttggcatggatgagtcagtgggttttttattttggggnggtttttaaaaataaaaatgaattgcttgngaaa

SEQ ID NO: 208968 - DNA, 449 bp, Homo Sapiens; identical to SEQ ID NO: 40614

SEQ ID NO: 208969 - DNA, 425 bp, Homo Sapiens
  misc_feature (24)..(24): n is a, c, g, or t
cgaatggacatcagcccgggcgangttgttaaattattgctgtaatttgaaaaatgagtgtgtcagagtatcagggaagctcaagaatctggccagagctgtcatttagagaggcagaagtggacgtccttgggtgctgagggccctcaggactctcctggcccacaccagtgcctccccacataggcactagttggacaacaagtggaaagatgtggccttccctgctcccttttttttttttttttttaaacttatggtaaaatacgtataacaaaatttaccatctgaatcatttctaacgtgcacactttcagtagtgttaagtacattcggctcgggtgcggtggttcacgcctgtaatcccagcactttgggaggccgaggtgggcagatcacaaggtcaggagatcgagaccctcctg

SEQ ID NO: 208970 - DNA, 1000 bp, Homo Sapiens
accttcaaagccatattttgtcacttctagtggtccttggatgggggtgattttgcccctacgagaacatttggcaatgtctggaggtatttttggtgtcacagctttatggggaaagcggggaggagggacagtgctactgtaggcttccagcaagcagaggctagggatgctgctcaacgtcctacaacacaggggacagaacctcacaacaaagaattgctgccccgacttgaaagccactgatcgaaagggtgaacttgactggaacattgaggtgccctgtgagtcagggcagttagtatctgggggatgctggctgagcctgccaagtgtctattgaaaagttgctggaggtgaaggatcatgtctttgggacctaaagagtgagatatttggactcagtttctgcctccaccgttcccctaactttatttggatcttcccacagccccaagacgttcagtacacattttatctcgtcctagatcaccttcttttttagtatgtagagattttgaggggaaaggtaaataggagactctttctcaacagaggtaggataagatttatcttaatcccaattaaacaatagtgaagacccaaaagaaaaaagttggaaacctaagcttttcacttaatagcaatgaagaatcaatttattgaacaaaaattaagtcttaaaggaggagaataggcagggcatggtggctcgcgcctgtggtcccagcactttgggaggctaaggcgaatggatcacttgaggacaggagttcgggaccagcctggccaacatagggaaacccccctctctactaaataaataaataaatacaaaagattggcagggtgtggtgccatcgcctgtaatcccagctacttgggaggctgaggcgtgagaattgcttgaacctgggaggtggaggttgcagtgagctgagatcgtgccactgtactccagcctgggtgacagagcaagactctgtcaaaaaaaaaaaaa

SEQ ID NO: 208971 - DNA, 424 bp, Homo Sapiens; identical to SEQ ID NO: 58277
  misc_feature (350)..(350): n is a, c, g, or t
  misc_feature (424)..(424): n is a, c, g, or t

SEQ ID NO: 208972 - DNA, 1000 bp, Homo Sapiens
gcagcaggtgtgcctgtttttgacttttcagtaaatatgttgtttgtgcacatatctacatggtggagaccatattcattatttcatcttccaaataatgggaaaaatataaaagtgaatcagtgtgctttgggaattcagtgaaatcatgttaactcatatagagggggccttagtttatctcttctttactgaattaattagttttggaaattcttttaccattaaaaaaaattaaggaccatacagagaatgatttaagaaaaaacaagtcacttaaaaatcatcacctatttataaactgtattaattacacataatgcttacttgattcaatgaggtttctctaaagacttctgcttaataaatatgctgacttcatttaaattagtttagactattgtaggaatggaaggaaatgattatatttactagaattagtgagatcagaaagcatatcagaatgttgatgatatcaaggagacaatctacagagttcttgcctctgtggatggaacctcagggtgtaatcatcggtttcaattaaccttcagttttcccataattttgggaaattactgtgtgcatttagtcacttcaagtaacactgaattttaacaacttgaagcttgtcagaaacgtcaactcctctaaagaggtaaacatacattccggggagaaccaagccaagtgccgacacaggagaggagggaaatccaaaaggcaatctgaggacaccaacggtgtacaacagattacatggtggaccctatcaaagattacgggcaagacaccggcacccgtgcaaactgggacagccaccaaggtgcagaatatccctgggcataaccaccgggcatcatacagctgacaagcaggcgctcgggctcctaacaatacactgctacaccgacgaccacaaagcggaacggacgtaccacgcaagtaagacgagggaaataccccacaaacaaagcgacagcctaacaacgcagaacgc

SEQ ID NO: 208973 - DNA, 783 bp, Homo Sapiens
gactcaggctgggccagaggagcctgtgcatcagaggacagtgggatccacttcacattcatgtagctatgcagcagatgcaatatgacctctagggacagaattacactggccaatcggacattgtcactatcatctttgccccactcccagccctttccagggtccacagcaaagtgcaagggcagcagcttatactctgaatctgtaagtgggatcacagcttgttccttggtattctccttctgctccatggacacgagtgcagaaaagtgggcctgatcataggcgagcaccagaggggagcggtgacactggctggctgggacctccaaaggcagatagattcctccaaagggaataggggcaaatgcttcccctccggagtccctcagcatggtgtctgccacgacgactatgggcctcctaagcacatgagcaaggacaaagacgtgaaactcttcaaggctctcatatacaggctcctcagaactctccagcccaccacagttggctccattggtacctagatgcattcgggggttcacttgaggcaagcttgatcagttcatagccacatccttctgccattcatcttctgtgtataccagccctgaactcttgtattctagctgtgtcatgctggcaccatccagcgcctttacaacgcttccttctcaaatcccttactccatcagtgcatacaaagctttccgaagcatcaagtcccgatcatgggaaacccgccattcctgtggaaaaaagcatatggtaagatacctc

SEQ ID NO: 208974 - DNA, 747 bp, Homo Sapiens
  misc_feature (642)..(642): n is a, c, g, or t
tacgcctgcagtaccggtccggaattcccgggtcgacccacgcgtccgccctcctcctttccacacctgcaaactcttttacttgggctgaatatttagtgtaattacatctcagctttgagggctcctgtggcaaattcccggattaaaaggttccctggttgtgaaaatacatgagataaatcatgaaggccactatcatcctccttctgcttgcacaagtttcctgggctggaccgtttcaacagagaggcttatttgactttatgctagaagatgaggcttctgggataggcccagaagttcctgatgaccgcgacttcgagccctccctaggcccagtgtgccccttccgctgtcaatgccatcttcgagtggtccagtgttctgatttgggtctggacaaagtgccaaaggatcttccccctgacacaactctgctagacctgcaaaacaacaaaataaccgaaatcaaagatggagactttaagaacctgaagaaccttcacgtattgattcttgtcaacaataaaattagcaaagttagtcctggagcatttacacctttggtgaagttggaacgactttatctgtccaagaatcagctgaaggaattgctcagaaaatgcccaaactcttcangagctgcgtgcccatgagaatgagatcaccaaagtgcgaaaaagtactttcaatggactgaaccagatgattgtcatagaactgggcaccaatccgttgaagagc

SEQ ID NO: 208975 - DNA, 681 bp, Homo Sapiens; identical to SEQ ID NO: 40019
  misc_feature (600)..(600): n is a, c, g, or t
  misc_feature (664)..(664): n is a, c, g, or t

SEQ ID NO: 208976 - DNA, 713 bp, Homo Sapiens; identical to SEQ ID NO: 45245
  misc_feature (708)..(708): n is a, c, g, or t

SEQ ID NO: 208977 - DNA, 733 bp, Homo Sapiens; identical to SEQ ID NO: 53694

SEQ ID NO: 208978 - DNA, 587 bp, Homo Sapiens; identical to SEQ ID NO: 58077
  misc_feature (458)..(458): n is a, c, g, or t
  misc_feature (461)..(461): n is a, c, g, or t
  misc_feature (463)..(463): n is a, c, g, or t

SEQ ID NO: 208979 - DNA, 660 bp, Homo Sapiens
ggcacgagtaagatggtctctgttgcccaggctggagtacagtggcatgatcatgattcactgcagccttgacctccaaggctcaagtgatcctcccacctcagcctcccgagcagctgggaccacaggcgcgcattaccatgcctggccaactttttaaaaattttttgtagagatggggtttcaccatgttgcccaggctggtctaggcctttgtaattttttaataacactacatgttaaattggttgcatttacttttgaactcttaatcttttgcttgttctgttctaccagtgtcttgacagttaatcatgatctttgcacagtagatgcagaactagttctgaagttttgctgcctgttaattaccatttggatgctttaaaaccctacaggtgattccaatgtgcagccaaggttgagaccactgtcttaagatttcagcaaccaatttctcacccagaatgctacagtaaatgaaacacttaactctttggacatatgctggacttggttaactttggtgtcattccaagtattctgttctagtgccaactgctcaggagttatttaagttgcctctgctgttaggctgtctgtgcttattatcaagattacttctaaagttcttactaagagaactgagaaagttctaaa

SEQ ID NO: 208980 - DNA, 538 bp, Homo Sapiens
gcacgagattaccctaagtttattttgtgtcagttacagcatgatggggatgccaatcacagagctctccttgcaggtaggttagcatttctattctaggtccccatattcaaaagcgttcataacttggtcataaaaactaatcatggaatgaatcttggcatataaaagtcatttctcagaagattaaaaaaatacaaattagaaaaaaagccccaagtgctttgccattctgatgttacccacaggccccaaaatgaattagcaagtcagcaagtccttttcacttatttttttctttctccaagaaaactgtgtacttcagggcctttgggtcagtttttaagctgacttgtctggaaaaggttatcacttggagggaaagaagttcttttccagcctggacaatatagttgagactcggtctctataaaaaatttaaaaagacaaatcagccaggcatggtggctcacacctgcagttccagctactcggaaggctgaggtgggaggatgacttgagctcaggagctcgtgcc

SEQ ID NO: 208981 - DNA, 409 bp, Homo Sapiens
tcgttttttttttttttttttttttttttttttatggtgttgataccattcaattccattcgatgataattccattcgattctatgcgatgattccattcctttccatgagaagatgattccattcgagaccattcgatgattgcattcaattcattcgatgacgattccattcaattcttttcaatgattccattagattccatttgatgatgattccattcgattccatttgatgatgattccatgcgattccattagatgatgacccctttcatttccattcaatgaggattccattcggttccatttgatgatgattcctttggattccatttgatgacaattccattcaataccaattgatgatggttatttttgattccatttgatgatgattacattcgatt

SEQ ID NO: 208982 - DNA, 577 bp, Homo Sapiens
tttttttttttttttttttttttttttttttaaaggaagcagctaaacctcaatcctaagcattttcaatgtgagaaatctaaatatttgattttctagtgaaacatacttaaactaaactatgtaagttcaaatttgtgcttttatacttttgtattgttcacttagtgcttttgtagtaaggggatgagttaccaagaactcacagactgcccaaaatatgacgactgtgcattcatataaaaaaagttcagtgagtctgaaatgagccatgggtgtatcttgataataaagtgctatttggcaaagtagaagtatggcaggcctataaaaaaattcccattttcctaatggtataaaaaaaatccaacacagagccacagatggttatctgataggtaaacacttatgacctcttaacactcccaagtttgtgtcaaatataatgtacctcttcgtttattccaaaaggagtgtacgtatatatctatatgaaaatttggggagaagcacatgggaaggaagcagacaggtaagtttgtccttcctatggagtgcacaggggttgaggggaact

SEQ ID NO: 208983 - DNA, 534 bp, Homo Sapiens
ggggacataaatatgcatatgatttgtttaaaaatttggattgtaaataaaggtttatctacctatgtgattcagttaaatttttagtgttagtggtgtgaattttgtgacactgggagaaagtttgcatatcaggtatgaccttagaaagtaacaaatagatttgtgcattacatcaagcatgtggaatgatagatttgtccttctgttcatgagaggtcatttacaaatttataaggagctaaactgactaagtacttggaaatctgtacttgtaagctaatcacatttacccaaacctgatttagaaatatagaggtgcttttaggaattgtttgaattttaaaaaatcatctccatttcaaatacaacttatgaattttgatatcctgttgtataatactagaaatatagagatgcagtatgcttcgtgtctttctaggaaattcagttcatgaagataagaagtttcttgacaaatacatgccccagttcatgaaacatcttcattatagaataattgatgtgagcact

SEQ ID NO: 208984 - DNA, 375 bp, Homo Sapiens
gatctgcgtgctgggtatgttcattgctactggggtgtcattgcttctaggccttttcaactgacagggtcagtaatggagtaaaactcattgtaatcgtgtaacttatgtgggttaagaaattgaactttgctagtaccccagaagctcctttatgtcccctcctgattttaacgcttaatcaccttcatcctcagttttatggtaatcacttgtctttgcagttttagtctgtaaccatgcatccctaaataaatgtttagattgcctattttaaaaatttaatataattggttcaatgtgtgcatttcatgtatgacttcttttatgtctgtgatgttcatcagagttgtttcatttgtagttattttaata

SEQ ID NO: 208985 - DNA, 590 bp, Homo Sapiens; identical to SEQ ID NO: 61435

SEQ ID NO: 208986 - DNA, 620 bp, Homo Sapiens; identical to SEQ ID NO: 61480
  misc_feature (494)..(494): n is a, c, g, or t
  misc_feature (544)..(544): n is a, c, g, or t
  misc_feature (588)..(588): n is a, c, g, or t

SEQ ID NO: 208987 - DNA, 504 bp, Homo Sapiens
  misc_feature (9)..(9): n is a, c, g, or t
gctgggtgntctagaggatcccgtgtggtggtgtgcgctgtaatcccagccactcaagaagctgaggcaggagaagcgcttgaacctgggaggcggaggttgtagtcagccgagatcgtgccattgcactccagcctggcaacagagcaagactcaaaataaataaataaaataaaataaaataaaatgagtcaggaatgatgttggtgttgaggttggcatacgtatcaaggacagtaactaccatgactcccgaagtgttgccaaaacctcagatgtgtggccttctggccaagcgtctgcgatttcaatgtttggagcattcatggtgtccctgggggttgcagctttgtatgagtttggtgtgggtgatccaagaaagaaggcatatgcagatttctgcagaaattatgagattttgagcagatgaggaaggctggtatctttcagtttaaagtaatcttggaatataaagaatttcttcaggttgaattacccagaagt

SEQ ID NO: 208988 - DNA, 574 bp, Homo Sapiens; identical to SEQ ID NO: 60599
  misc_feature (427)..(427): n is a, c, g, or t
  misc_feature (443)..(443): n is a, c, g, or t
  misc_feature (468)..(468): n is a, c, g, or t
  misc_feature (473)..(473): n is a, c, g, or t
  misc_feature (483)..(483): n is a, c, g, or t
  misc_feature (493)..(493): n is a, c, g, or t
  misc_feature (518)..(518): n is a, c, g, or t
  misc_feature (561)..(561): n is a, c, g, or t
  misc_feature (567)..(567): n is a, c, g, or t

SEQ ID NO: 208989 - DNA, 459 bp, Homo Sapiens
tgatctagaggatcctatgagatactaatgttgtctacattgcttttgaggaagtgttgatctatgcctatgatataaatgtatatttctttctaaaagaatgtcctaaggagaccttgaatctaaaagctctggatacaaattttctgctttgaaaagagctttcttccttcaagaatgaactggtggggcatggtagctcacacttgtaatcccagcactttggaagaggcattcacaggcagatcacttgaggtcaggagcttgagaccagcctggccaacatgggaatcccatctctactaaaaatactaaaattagccagacatggtggtgggcgcctgtaatctcagatacttgggaggctgaggcaggagaactgcttgaactgaggaggcagaggctgcagtgaggagagatcgtgccattgcactccagcctgagtggggataccagggg

SEQ ID NO: 208990 - DNA, 556 bp, Homo Sapiens; identical to SEQ ID NO: 39279

SEQ ID NO: 208991 - DNA, 440 bp, Homo Sapiens
  misc_feature (7)..(7): n is a, c, g, or t
  misc_feature (282)..(282): n is a, c, g, or t
tctaganatcctccgggtgctgatgtgtatgtgtgtgtgcgtgcgtgcatctgtgtgtgtgtgcgcgtgtgccatgtggtgcgaactagtgtgatttgacatatacatgtcccgtccgtccatgtttggacatggtggcagatggggggtggttgggagggctaagcaggcaatgaagcctaggtgtgcaggctcaggcccagagagtgatccaccttccccagtcggttcaggccctgatcaaagacttccaggggaccccgactttcacctacaaagcgngccatatcttcttcaccgacaactggcccgagcccctgttcagtgagctaggccgctctcgtctggcaaaggtggtgaagacgttgaaggagattcaccttgccttcctcccctacgaggcccaggtgttctccctcgatgctccccacaggaactac

SEQ ID NO: 208992 - DNA, 509 bp, Homo Sapiens; identical to SEQ ID NO: 40832

SEQ ID NO: 208993 - DNA, 615 bp, Homo Sapiens
tcggaattaaccagacaaatcgctccaccaactaagaacggcatgcaccaccacccacggaatcgagaaagagctatcaatctgtcaatcctgtccgtgtccgggccgggtgaggtttcccgtgttgaccaggctggtcttgaactcctgacctcgggtgatccgcccgcctcggcctcccaacgtgctgggattacaggcatgagccactgagcccggccccctgactgtcttaattaaaatgaatgaatgcttccaatgaaaacataatgatgacaatactaaaattataaactacataaatagtccaaatgtggtctcagttcgtaatgatttaaatatcagttcagaacaaaaagcaaacacttgattcaaatagtacttcattagttgctttcatataaaatttcatgtaatacaaatgactatctcataattatctggtaatacgtaaattaaaggaaaagataaccttgacatcttgaaatgaaacaggatcttgtccatggattttcattagttcctgtatggcctgtatttaatagaaataaatctgtaaataaaaaatgaaatacacaacatccctcttttggcctagaagccctttctacttat

SEQ ID NO: 208994 - DNA, 296 bp, Homo Sapiens; identical to SEQ ID NO: 48808

SEQ ID NO: 208995 - DNA, 340 bp, Homo Sapiens
aaataacggtatttaatttcagatagtaatagttaaagctgaaaatatttacaggctaggcacagtggctcacacctgtaagcccagcactttgggaggctgaggtgggaagatcgctggaacccaggagttcaagaccagcctgggcatgatagtgagaacccatatctaaaaaaagaaaaaaaaattagctgggcacagtggcatgcacctatatagtctgagctacgtgggaggctdaggccagaaggattgctcgagcctgggaggtccaggcttttggtaagctgttattgaggtgctgcactctagcctgggtaatggagcaaaaccctttttc

SEQ ID NO: 208996 - DNA, 394 bp, Homo Sapiens
cagcgcactagcctcatctgacaagttactaacaccccagaatgagtgtgcataatgtgtcaattctcccaatttttatgttttaaagcatgactctgagagaaagcaaaggagtgaacttctaatgctgtaatttcagactcacatggttgcgcacatggatggtgtgtctgtggggtgttgggtagggccaggtgattgtttagaggtcagaagtccaggccggcgcggcggcttatgcccctaatcccagcactttgggaagctgaggcgggcggatcacttgaggtcaggagttcgagaccagcctggccaacatggtgaaaccccgtctctactaaaaatacaaaaatcaggtgggtgtggtggcacatgccggtaatcccagctactc

SEQ ID NO: 208997 - DNA, 292 bp, Homo Sapiens
gcatctgaaaaagctgtggaaggctctggataaggaccagtacctgcccaggaaactggtgagtcttattctgtctctaatgcagattttgttgaatagagcattgcttagcaacgttagggcagtgactgtggaaatggtggcacacctgtgtggtaggtttgtacacagccgttttcaatgatatttaaaaagcttttcttcataaatggaaattcaccatcttgttacctagaaagcaggatacaaaattacatgacacatagtaatctctaaggtgcaaaacacacgt

SEQ ID NO: 208998 - DNA, 433 bp, Homo Sapiens
gcaggagagagaactggatgctgccttctcaatgggagaagccaagaaacgcagatgccgatgcttaatcaactccgtctctccctctagtgactcggggatagctgccctgatgccaaggcgattgtcttctggaagcagccacgccgtgtgaggttcctcatcactgccctgcatctccctgcgagctctcggggataattgcaaaatcacgtttgattccaggggagcagaaagcagcaggagccgtgaattctccaactcttaactggtcctcgactggagccacttttccctgcccacccatccctgtggcggattcattacagttatccaaagccggttttaactttgctccccctggctcagaagtctgtcagtgggtcctgagcggcttcaccattcaagtttattcctatcagcctggaataca

SEQ ID NO: 208999 - DNA, 324 bp, Homo Sapiens
  misc_feature (231)..(231): n is a, c, g, or t
gaaaatctctgtgttctgctctgaccaaggctgaataaatcccgtgaccacttctcatcctcacccttgtcacccagttgaggagccgactgccccctgcctggctgggcctgaagatgggaggaactggccctgccctcttggacttggctgggagatgtgtggacccccagctccaggggagggactgatgagaccagggtcctggggggtgcacgggatgtggggatnggacgatcacaaggaggaagatagagccaggctggagacaccaggacttggggcaggggcaggcgtttctgccgtttcggcactgacagtccg

SEQ ID NO: 209000 - DNA, 579 bp, Homo Sapiens
ccggggtcagagacggaggcagccagctcttctggggttgtttacgcccatccttgcgttggtctgcggcgtttccccagcagacaccactgtgggctactctaatgacttctctttcctcctcgaacaacttctggagaagtcgcaccgttgcagagtggtgccgctacacattgatcatctaaccttacctgggtcctcagctatagggccgtctgtctcgagtcagctgtcacttaaaagcttcaccattttctctggtttgacttgctgaaaaaaaaaaagaaacattaaaaaatttcactattttcttaaaatagtttaccttatcacaccctctcatgttcactggatgactatcctttcttcctggtgaaagcagaaaccctcagtttctcatcttgcacctacagactcatctgcaatccttacctccttgggaaaaaagacgtctctctttccatgtgagtatcagtcatccccctgtgccatttcattttctggttttcagtccaccctgccttttctccgcaaagttttcacttctgtgtctttagcctttcctctaatggatgtacg

SEQ ID NO: 209001 - DNA, 341 bp, Homo Sapiens
  misc_feature (1)..(1): n is a, c, g, or t
ngactctataggatccccctccataatgtgtgcccaccagggagcccgagagggggatgctgttaaagaatgccgtggagaagtccctgtcatcaagtgagaacaaaagtcagccttgaaagtcaggtgccacatccagactgtatacatctattcttaacattcaaactttagtgagcaaagtccaaaattaattaatactgctaccttccttcaagaaacaaataaaaaatgggctgagcacagtggttcacacctgtaatcccagcactctgggagatccaaggcaggaggaccacttgaggccaacagacaggcctgggcacacattatggaggggt

SEQ ID NO: 209002 - DNA, 365 bp, Homo Sapiens
  misc_feature (47)..(47): n is a, c, g, or t
  misc_feature (184)..(184): n is a, c, g, or t
  misc_feature (331)..(331): n is a, c, g, or t
  misc_feature (342)..(342): n is a, c, g, or t
ccattggtacttacatagctctccaaacagatttcaaactcactaanagtagtgactatgcagtcacttctgcatgcagggggtaaatctaagacaataaacactgacacagagaatcaaatgtcaaaatgggctgttcaagcagattttaagaattcacagaaatagaatagtatcgtaggantggttaggaaggtagtttgtttgtttttgtagaggtgagacaggctgggtttcaaagggcaggtaagttttggatatatagtaaggatgtattgtcagaaatcagtgcctgtaaatcaggctcatgcctgtaatcccagctataaancttgacttttncccacaaggacacttatttattt

SEQ ID NO: 209003 - DNA, 487 bp, Homo Sapiens
  misc_feature (458)..(458): n is a, c, g, or t
  misc_feature (464)..(464): n is a, c, g, or t
  misc_feature (470)..(470): n is a, c, g, or t
  misc_feature (476)..(476): n is a, c, g, or t
taagggcaattggtttctttcctctgcttcttgctatatagacggatggctctacttctaaaaacttggtactcgtggcatccagagaaaagacactgctatgttatataggtccaactgagaaacaaatgcagaacatcagttttaagaagatagaatctcctagggaaaacttacctctccaaatcgttccatgttttgtgtttttgaaagatttccaccaatagacatatcatctaggccagaaagaattttattaatacttccttcactggatggtcgatttttcagtttggatcggaaaatgtctccttgggacccacaaccgatgcttgtttttcttccaggaagtgctgctgggggtcctataaatagagccctggcccggcataattcctaaatccaagcaattatttcagcatgtgtaaaacctggtaggtggtttcattacctaaacngggctntcaatngtcccnggttctttcct

SEQ ID NO: 209004 - DNA, 447 bp, Homo Sapiens
  misc_feature (433)..(433): n is a, c, g, or t
tggaaaagaagtaatattatttaacaattttctgacttaaatatcttcacataacaaaagttttcatatcaccgtcaatattacttatatacatatgccaaaagtgaacaacaacaacaaaaaaatcaaaagatgccctttcaaaataacagaaaatgtctatttctttaggaatctgaaatgagctcctctcttaatatacaaagtccatacaatatttataataaaactactctcttctgaaaccaaggaggcaacgagagaaaataaaggcaattatttttcaggaaaaaaaaataaaacccagctttatatgacaatgaaaagatatccatttatgaataaaatggattacaatactgatctgaagtgctcgtggggaggtgaactgaccgctctttctgcaattaggactaggtacttatatttaccnaatatactgttcag

SEQ ID NO: 209005 - DNA, 700 bp, Homo Sapiens
  misc_feature (586)..(586): n is a, c, g, or t
  misc_feature (632)..(632): n is a, c, g, or t
  misc_feature (671)..(671): n is a, c, g, or t
  misc_feature (686)..(686): n is a, c, g, or t
  misc_feature (695)..(695): n is a, c, g, or t
gtgagaatacactccagaggcatttccatgtaggaatgcaatccagagtttatggaacagaacctgattattcttgtgtgaaaagtctgagcatctagagtttccctttggaccgtcaagaagtaaataaaattgttgctttcaaaggcatgggacatacttaatggggtaagaatctctgaactcaggtaaaacatcaatgtaggactggtccgtcaaaaacataaaaccatctttcgtttcctttagccttctcactgatatcgaatgcaatggatgatctgggaaataagaagaatttatggtattgcctacaaagaagttgatgaaccggtcctttacagatgaaaggactttggctcccagggcgctcaccacacagtcaggacactggctgggctcttctatctgtggggagaatatgcagtgaacctccgactgtatgtcagcagtatgattgtggggaaagacatgtcgctggcaggtccctctgttgacgctgccacagctaatgagttgatcatcatagtaggtgtcgacaactagagccatgttgatgttatctttccaacacctcctgataaantggctttgctgctgcagtcctgacatggggaaacatctgggtgtcngcacaggccagtttgtactcagcacctctgaaggcttcncattaaaaataatgngttagtggncaagt

SEQ ID NO: 209006 - DNA, 498 bp, Homo Sapiens
  misc_feature (469)..(469): n is a, c, g, or t
  misc_feature (483)..(483): n is a, c, g, or t
agacgagtcttgctcagttgcccaggctggagtgcagtgtgcggtcacagtcacagcagcctcgacctcctgggctcaagcaatcctctctacctcagcttctggagtagctgggagcacagtcaccaagcccagggctaatttttatagagatgaggttttgccatgttgcccaggctcaaatcactcttaaagagtaatgatttctcatccttatgacacacagaagaatttgaccaagattctcggaggttgccaaatcattcctggcaaaagcaggagtatcaaaggaaatgtcaccgatttggacacataaattctgacaactttaaaaataagtcaaatttcaattagaatacagactttaacagaagaaagatacacaggcatcagttataaatggagggaactaaggcctgaaaaagctttattttatatagaaattgccaaagttttagtcttgaagcanaaagaaaaagaaanagaaaatgaagacca

SEQ ID NO: 209007 - DNA, 560 bp, Homo Sapiens
tttaagtgatcccctgcgcttgtactcccgtgtagctgggcctgcaggcatatcccattgcgcctggcacattacatttatttttaagagttgcagagtatttcttcataatatgggtaataatctgtttaaataattcactattttgggcattcatgttgatttcaacttttgcaattatacacaaagctgtgatgcttgcaggtatatctttgggaatgtctataacttttagaattaaattctttagaagaaaaatttctggtcaagggtatggcagagactactaggtatccaccaaattctgttttctccttcctacacatatggctgccctaccgatcaacatttcccagccttccatgcagataggtggtgtgcccatgtgactacatttttaccaataggatattagtggaagagatgcatgccatttctaggccagatccttacaacactggtcataactcctctgtgttatttttcctcttcttgccagctggaacttggtagtggtggtgactcagttttgacctcgcacatgactatgtaatgcctcc

SEQ ID NO: 209008 - DNA, 568 bp, Homo Sapiens; identical to SEQ ID NO: 45757

SEQ ID NO: 209009 - DNA, 781 bp, Homo Sapiens; identical to SEQ ID NO: 58025

SEQ ID NO: 209010 - DNA, 550 bp, Homo Sapiens; identical to SEQ ID NO: 51933

SEQ ID NO: 209011 - DNA, 730 bp, Homo Sapiens; identical to SEQ ID NO: 53234

SEQ ID NO: 209012 - DNA, 695 bp, Homo Sapiens; identical to SEQ ID NO: 43853

SEQ ID NO: 209013 - DNA, 324 bp, Homo Sapiens; identical to SEQ ID NO: 40692
  misc_feature (302)..(302): n is a, c, g, or t

SEQ ID NO: 209014 - DNA, 696 bp, Homo Sapiens; identical to SEQ ID NO: 46952
  misc_feature (473)..(473): n is a, c, g, or t
  misc_feature (566)..(566): n is a, c, g, or t

SEQ ID NO: 209015 - DNA, 1000 bp, Homo Sapiens
agaatgtccagctttgatgcttccttgcctgatatgaataatctgcagatttctgagggttcaaaggcctgaagctgttcgtgaggaggaggacaccaccgtgcatgaggatgatctttctagttccatcaatgaactcccagcagcttttgaatgcagcgacagctttagcctggacatgactgagggggaagaaaaaggcaatcgggcactggaccagtttaccctggcgagctttggagaaggtgacaggggagtctctccccctccctcgcccttcttctcagccatccttgccgcctttcagcccgcagcctgtgacgatgccgaggaggcctggcgcagccacatcaaccagcttatgtgtgactcagatggctcctgtgctgtgtatacatttcatgtgttctcctccttgtttaagaatattcagaaaaggttctgcttcctaacctgtgatgcagccagttaccttggagataacctccggggaatcggatccaaatttgtcagctcttcccagatgctcacctcctgctctgctggacaagctcaagttcagtgtgttagaactgcaagaatatttggatacctacaacaacaggaaagaggccacactctcttggcttgcaaattgtaaggcaacatttgcagggggatcaagagatggagtaattacctgtcaaccaggggactccgaagaaaaggtaataaaagcctgttagaatgggtctcttgtgtgctctaacattgtgtattagttttggtctacccaagaagcctggaacttgagaaaagaagaggcggaatgagtcaccccaaacatttacatgaaaccaacagagtaagacagaatgccttccagcatgactgtgtgttgatgggatttgtggggaggtttcttcgttttggaaaagtagaggtataaaataaccttttttgctggatactgtctaactatactaataatttcctaataaatttattcttaattcagaaa

SEQ ID NO: 209016 - DNA, 496 bp, Homo Sapiens
cctaacgctgacagaaccccacctatagcagcataaagtgcctctactctcagtctttttaacgacttgaaacacagtaagaaacactgacctggtttgacattaaggattttgggtctggaggactcaggagaggaaagtgctggggctgcttcccagtgtcaccactggtgttgggaaccctgcatgtaaacatggtcggactcaatcctcaactgctggcagtcagccttctcaaccatacctcagggccaagtgaaactaaacattttagctttttcaacactccaaacctacgcgggcataaactcgagaatcttctgccatttactttgtttttctattcagacttctgagtttctcatacatacattggttggttttcctcccaattcagaaagggtaactgggtaggtttcacatgtatctttccaacatgtcacgaaaggctggattaaagatgtgagacgcgtgatattcatcctaatgcagctag

SEQ ID NO: 209017 - DNA, 747 bp, Homo Sapiens; identical to SEQ ID NO: 50376
  misc_feature (719)..(719): n is a, c, g, or t

SEQ ID NO: 209018 - DNA, 775 bp, Homo Sapiens
tgtctcccagtggaatgttcactgacgtcttttcttggtagccatcatcgaaactaatggggggacagacttgatagccaaggtcccttctggtccagttttctgatttagggttctctcaagattaataaaggaagatggggaaatttgactcattaatgagctcgctaacctacgatctggtgataattttgtgtgcacagcccaaggaccacgaggctttctgcactttctgcacccccttccaaagtgaccacaaaatttcaaagggactcatacaatttgagaaaaaacagtcaacctgatttgagaaattaaccagtatggctaactatatcacagaaaatgggattgagttaaaactattttattttaaatatacattttaaagcagttcttttttttgttaatttgtttattatacacacacttcaagagaatatgcacagtctaggccgggcacggtggctcacgcctgtaatcccagcactttgggaggccgaggcatgtggatcacctgaggtcaggagtttgagaccagctagacaacatggtgaaaccttgtctctatgaaaaataccacaatttgctcgggagctggtggtgcatgcctgtgaatccccaggtacttggaagctctgaggccgagcaattgtcttgaacctaagaagtgggagttgcacgtgagcttaaaattggccccattggcacttcccagctcgttccacaaaaagtgaaactcccatttcaaggaaacaaacaacaacacaacaag

SEQ ID NO: 209019 - DNA, 666 bp, Homo Sapiens; identical to SEQ ID NO: 48385

SEQ ID NO: 209020 - DNA, 740 bp, Homo Sapiens
atttttttttaagtacctttggtgtattttcaaatatttcgtatctcttaaaaaaatggtattacctcagtttctaataatttctgggtttagtagtgttgacaattaaaaatggtatacattaaaatttataagtttgccttcagggtaacttccagtgtcacaatgagcagttctgtaagtgggtgcctctcagcacatttctatgaatatattatgtagataggctgtattgattttggtagcattgacaccttcttaggcaattagttgaagaaaactgcaaaatattttcttatgtaatagctgtatagagcaatagcaatcaaagcatgagaaggcactaacgctgggatgaaagatgagattcagaggtgactgagaatcatgtgagtgatggctgtatattttgtgtaaaatatatgtgtgaaaatgaactaagagtgagttactcagcactctcaagaattatgcagattctgcatttttcttatgccgtgtgcctaaaaacctacttgatatttattgtggtttcaagattattcatagtatatttatacaatatacttgcaatgcatttaagtacttaaagtactaatttgaaaacttgaagcaagatggcattttaattaatatatttctgttttgcttctgttttatgcaaatataaatcattttaagtgattgtagaattgtaatgcattacattttaatctacaaataagcaaagtttaacaatg

SEQ ID NO: 209021 - DNA, 414 bp, Homo Sapiens
  misc_feature (163)..(163): n is a, c, g, or t
  misc_feature (320)..(320): n is a, c, g, or t
  misc_feature (377)..(377): n is a, c, g, or t
aatgaaccaaaaaatttatgttgggtggtgggatgaaattaaagaataagtcaactgacttcacaaaactgctgagcagaggagccactatttacagcaagcagctcttcccaccaagtctcacacatacaccaacatttactggggccaccatcttattaanaatctacccatgcatacagcattccttgaacaaagtgggacctaaccctgaaaggcacccaaatattacccacgttacactctctatgggagggctttatccactaagccctttcctcaaagaaagaaaaatacgtccaatttctcagactaaaganaccaggtcaagtcaacaggagaagagaaaggaaaggcaaaaagatccaaccctgatngcacaaggaatgacttcacatttagaccgatgataaa

SEQ ID NO: 209022 - DNA, 478 bp, Homo Sapiens
  misc_feature (395)..(395): n is a, c, g, or t
  misc_feature (459)..(459): n is a, c, g, or t
ttataaaataataaaatttattcagcctcacaattactttgtgaactggaaataacaatgagttgtcattttatccaaatctaaaaaaaaacatacatacagtatcaagttctggttaaagtagtagatgaactttacgtggtacataagagtatctatacagtttgtgggctgcatcttgctagaatatattacattataaaatgcaccatttatttactctgcgatcaaacccccaacttgccccaagtggaggaaccctcagacatttgcagaggagtcagtgtgctaagtaagcagcattctttacaaatctatgaacatcaaggtctccttggaacagatgctctgtgaacaatttataaaactccctcctgttagacacttaggttgantccatttttaaatcaattactgaataaaacacactccatcgtgtggatgaaatgctaccttaanttgtcaaagctatcatttt

SEQ ID NO: 209023 - DNA, 242 bp, Homo Sapiens
ccaggtgtagttatctttaataggaaatgttgatggtccccagaggatatattgagatagagtgattaaaggcttcccatgagagggcagcccagcagaaaccagacgtcctagttgtgctgacaggaagtagaaaccatgccggtcagggaacaggatagagcgggagattgattgcatggtgagttgtccatttatcagtataattcctgcagacatatggactagataggtgacccccc

SEQ ID NO: 209024 - DNA, 434 bp, Homo Sapiens
gtagatacgaggtttcaccatgttgtccaggctggaaaagtaaattgactttaaaaaaaagtaaactggttaatatttaaactactgcttgaaaagaaatgtaatacactactctcattaataaaccaacttttaaaactttttatatacctacaaagtgactttaattttgtaaaatgtactaagtattgtttgcttacattccccctccccacattttcttttccctatgaaattcctcccaaacctttctccccatagcttcaaaattttaggaaatattacatcgtgactgaaacatgccttttcacttgtcttactaacatggaaaagccaacttactccttgacttttcatcatggcagcagtttacttattttaggttttctggcagtcagaccacacatacaatggcaatttcttcctcacactta

SEQ ID NO: 209025 - DNA, 468 bp, Homo Sapiens
  misc_feature (62)..(62): n is a, c, g, or t
  misc_feature (296)..(296): n is a, c, g, or t
  misc_feature (375)..(375): n is a, c, g, or t
  misc_feature (380)..(380): n is a, c, g, or t
  misc_feature (389)..(389): n is a, c, g, or t
  misc_feature (452)..(452): n is a, c, g, or t
ttttggaaaagaaatattcctaataattcatttaatcatctaggagagtgggttgaagtttngtaaaatttaatttcttcattatagactgtattattttaataaaagcttttctttggtgtcacccattgtgtgcagcactgagctggggccctggagctctcactattgtccatctggccgcaccactttcagcactgctttcaatgaactgtaacagaatactgatgactcagcatttctgctgctgacaggaagtccttgagcgagtctctttgtaggttcctccaagaaanggatgctcaggcactccttgggtgaacagctgcaggccatggagaggacaaccgggttgcaagtagtaagtttgcactngggcnatcccagangctagaacaaggggaacaggtcagcccctagagtcccagaggttcacagacttgggcaggtcnaggcgttaaatgcagc

SEQ ID NO: 209026 - DNA, 625 bp, Homo Sapiens
tgtctgagggaacaacccagagcgtataccgcatattacccggtaaagctgcagagaagacttgagacttgtaagattggacctggctgcagtcccgtggtcagtaacatctgcaacattatacagccagcagatcagctcttccagctgacagcaaaatgtctgtcccgactccacgactctgtacctccctctgccaaagcaatgaaaaccacagcctggtgtgacatcaaaaatgacaggctgagaaaacccagccttgcaggtaggaatggagcagcccagaagaggcgtgcctgccatggaaaccaattcttggatcagcaccattactaactagaatcagcatcttggagccagatacgtccatgtttctcttcacacattgcaccagtgattcttttccctgttctcctcctttcctgggaagctgcccttcaacatctgggtctgagaatggccaccggtccaacctgtgtcagccgagcggggagggcaagatactcgtcatcactttccacttcctcttctgatttccacctagactctgtgcaggtagggcgccgggcactctggctggtcctcttctccctctctggcctgggcgagggccaccctctgtccc

SEQ ID NO: 209027 - DNA, 792 bp, Homo Sapiens; identical to SEQ ID NO: 49893

SEQ ID NO: 209028 - DNA, 604 bp, Homo Sapiens; identical to SEQ ID NO: 45609

SEQ ID NO: 209029 - DNA, 749 bp, Homo Sapiens; identical to SEQ ID NO: 55040

SEQ ID NO: 209030 - DNA, 850 bp, Homo Sapiens
ccccatatattaactatcccagttagttgttttggaagatgccatgcccaaatgtggaggtgactcagagcttggaaactcagaagctctaaggtgagcctccagacagggaaagtctgcaacatggtgactgagagggtagtagaaattcacttgctatttaactctctcttgagatttattcttggaggacagagcaaaagtccactcttcagcagctctcctagggtcattccttcacaacgtatattccgtttccagttctttgcgttccttccttttccttcgacttcaaattcatttggtgttaaccaagttccatcctcattccgaatgcacttcactgaggatccgtgtttcattttcttcttatataaaatccctttcgcctcaccacaggtcacggggagcttagaacagtgaaaatccacagtgtcacttttgggttttcctcttcggtgaatatttttctgaaatctcctttttgagcttgaacagatatctttctcctttttcttttctttcgatctggactttcgggcacatttagttcttgccttttggaccctcatcatgacctctgagttccaggttgagtcgtctttcctttgagtcaccttatccaccacttggagcttctcttggatgccatgcccaggtgaggctgccccttgtgtgacccttcgtggtgtactaggcgtcttctgggacctctttccttcattcatttctgaagtgccatcaatgatctcctctgatctcgactttcgggcacattcagttctcgccttttgggcccttgtctctaccgtggagttacaagttgagtcatctttcttttgaggaaccg

SEQ ID NO: 209031 - DNA, 480 bp, Homo Sapiens
aaatgttcacatatgctagtgcagttttacacttggtcctgctctgcaaaggtagctgcctttccatgccacttctctcttctacaaccaagggaaacataaggaaggaagatggaggatggagtgagaaagatataataaagacagacactccagaccaggaatcagaaaactttttctgtaaagggccagagagtaagtattttaggttttgtgggccatatggtctctgtggcaattacttaactctgccatcatagcacgaaagcagctacagacaatatgtacgcaagagaacatggctgtcttctagcagagctctatttacaaaaacaggcagtgggccacatgtggctcacagactagtttgccaacctattctagacctgtagcgtctctagaaagtgtgtgtgtgagcatgtggtagttgcaggaagagtgtcctctgacttctcagtaattcctcaaggccaagctcac

SEQ ID NO: 209032 - DNA, 641 bp, Homo Sapiens
  misc_feature (550)..(550): n is a, c, g, or t
  misc_feature (583)..(583): n is a, c, g, or t
  misc_feature (621)..(621): n is a, c, g, or t
  misc_feature (630)..(630): n is a, c, g, or t
  misc_feature (641)..(641): n is a, c, g, or t
tcctatttagaaatgcaaagctctgctcaaaaaggggggtgccaggattgtaggatgggtcagagacttcggaagctagactgggaggctgttatatgtacttttaattttctcttgaccaattaacctcacgtgacttctaaattttctaccatatgcagagagaagacagcaaggcatacaaatgatctgcaaacattattgagcacctactatgtgccaactattgttttaggctctggggacataagaatgaataaccctgagaaggtggccatagtaatgtttgtgccatatcaccgctatcttgtggtttattttatgtttctgctatgctagatagggaggggagcgggaagacagagctatgtcttgattatcttggtatctgcagtatgtagtccagctcaacaggcatttgttgaatgactgaatgactatttacagagggcacactatgggccaggaacctgtctggggtcctagatatggccatgaaccagatggatgcagcccctgccttcttggagctcatatttggcaggggtcnccaagatatatgctgcacagtacatgatgagcncaaggagtgttccctagagaagtcctggatgtttgccncaaagtccncatcagtgtgn

SEQ ID NO: 209033 - DNA, 436 bp, Homo Sapiens
  misc_feature (14)..(14): n is a, c, g, or t
  misc_feature (18)..(18): n is a, c, g, or t
  misc_feature (21)..(21): n is a, c, g, or t
  misc_feature (428)..(428): n is a, c, g, or t
  misc_feature (434)..(434): n is a, c, g, or t
ctggtttttgtttntatnttnctgttgtctttcgaatttgtctctcttattttgtgattctagtaatcctaaaagatttggggggcgggttactataagtgcatttttataatggggattttctgcttaactgcccactgattcttacatgggaaaggtgcaaagacagtggtactgctccctgtttcgttaggcagggaaataggtaagatgaacagctaggaaaggtacctcagccacctgtcttctgggttttactaccataccttgactctgcccaaagcactgtttctgcttggagacagacacctcgatcactgctgcctcttcctttggaagaggtattgggaatagaaacaggaataaactagcctggcttctctccctacttatatccttgtgcatagtctggagctcctctgtgtttnactccntt

SEQ ID NO: 209034 - DNA, 440 bp, Homo Sapiens
  misc_feature (440)..(440): n is a, c, g, or t
tttttttttacagagtaagacgcttataatatgtgaagttctgtccacagttacctgagatgttagggttagttgagcttaaaatagatacttccaattagaagcagccaaatataattttttatgtgagaaaataactgcaatgctagtatgaccctttattttcctagggctaaagtcagaaaacagaaacaaatataaaagtatcacattcatgtcaatggcttagtgaagacaggaccttattatcctttaaatgctgcttaaaatgctcccagactcgcccgtttatctgctcctcttccagcagagtgtctgggcacaaaatgggctgttccttcaatctctgccaatccccatccacatctttcaactggcaggaatttccctaattaaatgctacctgcagtatttttatcacactctcaatcatcactggn

SEQ ID NO: 209035 - DNA, 447 bp, Homo Sapiens
taaaaggcaaagttaataagaattgttccatgccttagtttcttgtcaccaagcaattcaagtatttttgcgagctctaatgtaaaaacatctttaatacaaatgtgttaagggaggaaaccttcacgaaacaataaatggtaaggaaaaaaaagatcccgtgaggatttattttccaacctccgaaagtctcagggtgttcccgggcaggaaatgagcctcataaggaaagcaagtgttgagctggcctaatgacacctccacattaccgtcattaggacgctgaaaccgggacacaagatgcgtagagcagaatcattgagcaaggcgtgtccgggacaggatctagtgccgaacccagtgaggctccctcttgccagctatgtgtctctaggaaaattaacttcccactctgaaccaccatgttctcatttgtcaatgagctgg

SEQ ID NO: 209036 - DNA, 430 bp, Homo Sapiens
  misc_feature (349)..(349): n is a, c, g, or t
  misc_feature (405)..(405): n is a, c, g, or t
tactgacaacacgtcatgagataacatcttttgtttaaaataacttaatacactagaaaaaaatatgtcaaatataaataattttgttttcatggagaacaaatagttacaaagctcaaccgcataccaaagttcagttagaagagcttttcctctttcttgtaaattagaaggtaaaacaaaaacaaaaacaaaaccccacaaacttaggcttgctagcgaattgggatacagactggcttagtccaaggtatcccagtttaaatagctacatgaattgaaacaaacaaccaaaagaaaaaaaaaaaacaaaaaagaaacaaacaaaaaaaaaaaggttacttgaatngatacacctttgtgagatagaatggcaaatcgttgaaagtcagtccacacattatngtcaaaataaactttgttcgtgtgt

SEQ ID NO: 209037 - DNA, 477 bp, Homo Sapiens
  misc_feature (265)..(265): n is a, c, g, or t
  misc_feature (399)..(399): n is a, c, g, or t
gttctccagtgccaaaattggactgctgagactccttagttggaaaaggaaatttggaaggttctgttttgcatggtgtatgaatagccgttagagggggaggccatgaatgcgtcatctcttttaggatttcatccacacagctcacatcaccagaagctgatgcatccagtggttgggaaggtattttcagcttggtgagatgtgctttgctgctgggcttcagctcagtcatgctgttgccatgggattggctgctgtagtngctcagaggacagcttttggttccatggactcctgtccgtccatggggccgcacatagggcagtgggtttctgtaacattgaattgggacttttggacatccaatgaggggttgggaaaggattggagtttgangttgctggccccacttgaaaaaaaggtaacaccgggaaggagaatcccagttttgcatcagggtcccgaggtgatttt

SEQ ID NO: 209038 - DNA, 414 bp, Homo Sapiens
  misc_feature (406)..(406): n is a, c, g, or t
tttttttatttttaatgtttttaatctttaaagttttgtatattgacagtcctttaaaaaaagtacactatcatactgtacatgggatctttacatacttttagcatgagcggtaatcttttaaggttctcttaactctaggaattgtggttggccagcatgttatcttgaccagacacttctgaaaatctgctttgtgtgtcttaagttggcaatgtcattgttccagaccagcatgaatcctggtctccagtccacacctctgccggacagaggtccatgccagtgataccatgactgggaagccaccactgagcccatgtcctcagtcttccctcaggccttcagtgtgtgtcactgagtggacctctgtgacatctcgtcttcctcaggccttcagtgtgtncccgtgcc

SEQ ID NO: 209039 - DNA, 460 bp, Homo Sapiens; identical to SEQ ID NO: 59519
  misc_feature (412)..(412): n is a, c, g, or t
  misc_feature (417)..(417): n is a, c, g, or t
  misc_feature (430)..(430): n is a, c, g, or t

SEQ ID NO: 209040 - DNA, 353 bp, Homo Sapiens
  misc_feature (23)..(23): n is a, c, g, or t
ttcatgattgtaatgattatttngggatggaagggctaggggattcaggttgtgtttctttttaggtgatgagaaggttttaaagttgattgtggtaatagtttcatgactgtgaacatgctaaagggcatcgaattatatactttagtaagtgaactatatggtactgaggcaggatatgatagtcaaggagatgaccacgtccttgggacatgggcaaccacactgtcaacagcacaatgagccctgtaaccatgttcattggggacatagcaaccgcaccaacaacacaacaaacctcagcactcacattgtaatcaagctcatccaagcagaactaccttcactgggga

SEQ ID NO: 209041 - DNA, 487 bp, Homo Sapiens
  misc_feature (63)..(63): n is a, c, g, or t
acgagactaaaaaaaaagagagacagactgtctcttagttttaattaattgttgaaagaatanagaggggccatatttctactgaaagaaaggagaagttggggaatgggaatattctgaaccggaatgaaaaagtgaatgaaaggtaatctttagattcagtctctttgccctagtctttaaaagtttctgttgggggttatttgccctagtctttaaaagtttctgttgggggttacaaagtttgaaatctgtcttaaggagggatgtattactcaaaataaattgcctctatcattcagtgtgatatgatggacttggaaggggcaggattagaggaggtgagggataaaaatctacatattgtgtacagtgtatactactccagtgatagatgcactaaaatctcagccttcaccacagttcatgcatgtaaccaaaaccactgctaccccaaaagctgctgaaataaaaagcaccaccacca

SEQ ID NO: 209042 - DNA, 485 bp, Homo Sapiens
aactatgcaagtctcattacatttaaaacccttttttaaacttggtcccttttctgtgccaactttatgtttgtttttgttcttgtttttgtttgagatggagtctcgctctgttgcccaggctggagtgcggtggcgcgatctcagctcaccccaacctctgcctcctgggttcaagtgattctcctgccttagcctcctgagtagctgggactacaggcgtgcaccaccacgcctggataattttttttgtaattttagtagagatggggtttcaccatattggtctgaaactcctgacctcgtgatctgcccgccttggcctcccaaagtgctggcattacaggtatgagccactgtgcctggcccctattttttattttctgagatgaagtctcgctctgttgcccaggctggagcgcactagcatgatctcagctcaatgcaacctccgcctccaaggttaaagcaattcttctgcctca

SEQ ID NO: 209043 - DNA, 948 bp, Homo Sapiens; identical to SEQ ID NO: 47690
  misc_feature (751)..(751): n is a, c, g, or t
  misc_feature (948)..(948): n is a, c, g, or t

SEQ ID NO: 209044 - DNA, 437 bp, Homo Sapiens
  misc_feature (2)..(2): n is a, c, g, or t
angtagttgcattaaataactaaattcccattgtgattaattgaaattttgtctttaagcagagagttatttgtgactataagctttgtgcttagagaatgtatgtgtttttatctgtcagtatgggaggatataaactgcatcattagtgaaattattggttgtgtaatcctttgtgaaatataattctaggtatttgatagggtattgagtgtattttgtgtgtgtgtggatgtgtgttttggggtacggggagaggcgatgctattggccatcactaccaaccagggtttcaaaaagtattacctaagtaatttcttttatcactatctcaactgaggaagaaaaggctcaccacaagtggtgtgaaggctttgggtacttagttctaaatttttttatggtaacatatacatagccacatttacagttttaac

SEQ ID NO: 209045 - DNA, 621 bp, Homo Sapiens
  misc_feature (544)..(544): n is a, c, g, or t
  misc_feature (562)..(562): n is a, c, g, or t
  misc_feature (567)..(567): n is a, c, g, or t
  misc_feature (601)..(601): n is a, c, g, or t
  misc_feature (614)..(614): n is a, c, g, or t
tgaatttcaaatgcagtttattgcagcaaaacaaggaaatggggagtttaagacctctccacaaaagaaaaacaacttgcttacaccttatgtacaaaaccaaaacagcacagagataagatgctaaggagctgtccacaccctgggtctaactggtcctactctggctggcttaaggaggtgctttgaaatgtcatgtgggtggtggtcactgctgaactgtttctcagggaaagaacaaagcagggtcatagccaggggactgagattgccactgatctgaaaacttcattgggaaacagcagaaaagaaagagctgggggaataggatgagctagtgtaactaaccatagctcttttctccggtaaggctgggacaaatcgacctcggtcttgccaagcatatttgttagtgatgctgggggagaactagagctaatgaaacagagggcatctctttatctggttactccggaataagtggtagaaacaaacctcacgctggaactgccaccagaggacttgacacccccagagctggatnccggctcctatggagccncagantcctcgtgccgatcttggctcgaggccaattccnatagtgagcggantaaaccg

SEQ ID NO: 209046 - DNA, 1000 bp, Homo Sapiens
gtgctgggattacaggagtgagccaccatgcccggccttacttttattttatttatttttatttatttattttttctttgagacagtcttactgtcgcccaggctggagtacagtggtgtgatctcagctcactgcaacctccacctcccgggttcaagtgattctcctgcctcagcctcccgagtagctgggattacaggcacgtgccaccacacccggctaattttttatttttagtagagatggggttcaccatgttggccaggctggtctcgaactcctgacctcaggtgatccgcccgcctcggtcttccaaagtgctgggattacaggcatgaaccaccgcgcctggccttacttttaattttaattacgtaaatcaggacttcatctttatataatgttcacatattacaaaggtacatttcagcctactccctccctttcttgtcatttttttttaatgaaaaaaagttgttttttttttttatgagagatgaggtcttactgtatggcccaggctggacttgagctcctggtctcaagccatcctcctacctcagcctcccgagtcgctgggcctttctttctatttaaatttatatttacagggttttgttttgtttgttttttaatcatcaatcaaattttaatgtccatttatttatactttgtgtctttcctggagagctgttcacaagagtatggaggccttccttattcagtgtgactggtgcctggtgttcctagtgtggagatactatgatttgttatctacagtgattaaatctagattgtttccagtttttcactattgaaagttgtgacctgaagctggttgtggcaatgtgtgcctgtagtcccagctacatgagaggctaaggtgggaggattgcttgagctcaggaaatcaaggctgcagtgagccatgatcatgccactgcactccagcctgggcaacagagtgagacttcgtatctaaaaaaagaaaaaaaaaaa

SEQ ID NO: 209047 - DNA, 557 bp, Homo Sapiens
  misc_feature (52)..(52): n is a, c, g, or t
ggatgttccaggtagcctgctgtagtttgacttccagtcactgttgtctttnacattataatttgtatatttcttgtgatagaagggatgatgcaaatatgtaattaaagtgtcaccagatttctgttaaaaccaaggttgaaataaaaagcctaacattggtaagctacattgttttctcattttagaatgattcagagatttcagatagacattttttaaactttaatgcttagctagaatctacattctgaggaaaactctaaaaaacttaaaaatttttagggaatttttatttttcaaatcataattttaaaatgatagataccattttgtgataacaacaattcagaaaacaattttctatcctcttagttgaaagaatgtaggtacagtttggatacttgtactttaattttagagtaaacatctgcattatactcttatagataatagaattatttagttaagaaattctttacagtaaatgagataatgtgtgaaaaagtattttgtaaatgctgaggattctacaaatgatagttgttattttcatg

SEQ ID NO: 209048 - DNA, 562 bp, Homo Sapiens
ttttttgcagttggatgggtaagtcagagaggtcactccctggggtctaattctcttatttcaaagacaaggaagtaggaaacttcatgttgacttcagatgtgagctagtatagctttatgattaataaatccatgatttcctttcagtgacttagctagggctcaaagaggagggaaggtgatggactgcaacttcaaaatcacaacagaagctacaacagtgagtgatctagccaagcccaaagtgccctgaggtcactggtagactagttacatccagtacgacagtcatggtgcaggcagagaactggagttgttttctcaagggagacaagggagaaagggagaggtgggagaaaggtgcacaagggtttgtcttaaacagatagagagcaccagaactagaatgtaagagatgacctaggggaaataacagccctcccatcttacctctgaccagtctccagatttccactgtggacaagggaactcactgcacctctgaatggtaactttctcttgaatgtgtgcatttgctgtcatccagtacatcatttcgg

SEQ ID NO: 209049 - DNA, 702 bp, Homo Sapiens; identical to SEQ ID NO: 48108

SEQ ID NO: 209050 - DNA, 684 bp, Homo Sapiens; identical to SEQ ID NO: 54271
  misc_feature (676)..(676): n is a, c, g, or t

SEQ ID NO: 209051 - DNA, 457 bp, Homo Sapiens
gagattgttctcatttccaaaatcgtcagacaccgatttctctgcgcttttcttgcctggtgtcaggacagggaaaagctatgcaggagacatggcctctagctctgttcaactgtcaattctgctggggaccctagataaatctgttaacctctctgccctcagtttccccatctttaactcgagagtgtagatctaaatgctagaagagtactaagggactcttccagccactttttggcagggatcagacttcggagagtgaactcagggagcaaagaggtgaaactggagcagtgtgagggttaaagggaaggcggctggcggtgccgagcaggggagcacgtcgggggtacagcaccagggctggaggaatcggctggcccacaggtgggcgacctgggaccctctatgtcaggtggtacatgctgtagcccacatgggccgtgtagagtcc

SEQ ID NO: 209052 - DNA, 405 bp, Homo Sapiens
  misc_feature (307)..(307): n is a, c, g, or t
ggggcgtgtttttaagtagtaagatagattcttcaatacattcatattccctctcatcatgtaagagtaaatagaatcaaggatatgctactataggcccatacaagataacagagggatgctatgcgttttttgtagtatctgttcaggttgtgcccgtaagaaggtaaatgtacgggcagatcacctgaggtcaagagttaaagaccagcctggccaacatggcaaaaccctgtctctgctaattttacacaaattagccgggtttggtgatgggcacctgtaatcccagctactcgggaggctnaggcaggagaatcacttgaacctgggaggcagaggttgcagtgagccaagattgggccactgcactccagccctgggcgacaagagactcgtctcaag

SEQ ID NO: 209053 - DNA, 559 bp, Homo Sapiens
attacagaaactctgtagaggctgaactgttgatgttcaggtggactacatgaagataacatgcttaaaaatggaaagcagaaagtaactgcagtgatgaacattttggtccaaattcttgttttaaatcttacacctgaaagtaaaacattgggatcacttttccctgtctaaactccaggatacagtatccaatttatccaaacagaactgtggtgtcaatgtgtaattaattgtgtaaaatagccttcccaagtttctttttccctggaaaataaaaaaggtaatagaacttgtagtttatttaaaccccatgtcatgaggaggtactagttccaagcaacaaactccttaatttgctctaatagataggtatggtttaatctttccattgtgtcttttcatttaattttcctgaagcttgcaggatagattgaaatgttataggtttgtttggagtaaccaaacagtatgcaaattaagaaaaagccagagaacctagaaaacatccagtggattacagaatttcttccccatattcactccctcacttttacaa

SEQ ID NO: 209054 - DNA, 645 bp, Homo Sapiens; identical to SEQ ID NO: 42935

SEQ ID NO: 209055 - DNA, 622 bp, Homo Sapiens
  misc_feature (580)..(580): n is a, c, g, or t
  misc_feature (591)..(591): n is a, c, g, or t
gattattgaagtgcatttaatattgtgagaggtctttgaaaaccccatcttgagcagcttgattatatatcagatttcagtctatcttggttaagatcatttggtaacatttgtatgtcaaatacatagtgaatatatctatagatctcctcagccttctgatgagttacttgtgcatacatggagatttcttgaagtgagctgttagccatccttttcacagatgaaaactggtgacacatatttaatgcagttatataacttatattgggaatacttaaataaaactggagtgcctcacttttattactattcaccactgttggaacatgaataccaacattctttctttgttccactaaagacagttcctttagcaaatctgcggtttcttcttggcaggaactgaaaagaattcggattccagcgccaattaaggtagtcagcaggctgtcatagctctttgttctcctaaacatccttgatgtgtctcctgtttttctctgtccttttccacaatcacacatattctttcaaacatactctgcaggtgtggactgctcaatgacttgtcctatgncactattacanccagatgagacccccttccacaccatgggat

SEQ ID NO: 209056 - DNA, 563 bp, Homo Sapiens
  misc_feature (334)..(334): n is a, c, g, or t
  misc_feature (485)..(485): n is a, c, g, or t
gtaccaaatgactctggcgcgacccggaaacgcagttacaaatgagaataatttaaattctccgataattacagtatttacaacagcaggggagggagtcacctagtgcccctcttccaggctggacagatgcccactcacctcacgaccggtagggccccaggctctaggcagttatggattctcctggcatgagcaggtagaggtggtgggatggcctgttttacgcagtgtcctaactttggcccaccaccccgccctacaatgctgtgaggtctctggagctttttctgacctgtgggccctccctctccttgcgctgaactgccattgncccttggagtgttctgtacagtccagctgcacttagggcaggagggacctcccccacccagcttcccctgagactggccccaagaccagaaatgagtcagtgcagaggccggtgcactccaggacagtgagcaaaggggaggagagaagtncagggcactataggttgcgctgtgttgaaccagtatcaatcactatcgtggtctcactgctctgctcgccttgaactt

SEQ ID NO: 209057 - DNA, 547 bp, Homo Sapiens
  misc_feature (439)..(439): n is a, c, g, or t
  misc_feature (536)..(536): n is a, c, g, or t
ggaggggggtttgccaaatcccgctgcaaaacgggactgccctggagggtgctagggacagatgggcccctagcctccgctgcccacactgctggcacactgggggctgctccagtccccgccctgcctggggacactgtggctgcactaaactgcacctgtgctatgagacagacccaccactgcacgtgtgaaaatgagcaggcaagccaggcaggacctgaggccaagatcggtgagcttaacattcaacctgtaagaatcctgacgttggccagggactgcaatctgaacacctgacttgtcaggaacgtgctcatgacagcacttgggagcatgtagaaagcgcgggcttctccacggctaagaaaacagccttaggaagcctctgcttccttccctgctgcctgctccccactccaggcccacgcagacctantgtgaagtactgctgtactcctgctcaagcttctgcgccgccttaaactgtctttggaatgcctctgagtcaccttgtccctcaagtagatgggtcntctgtccttga

SEQ ID NO: 209058 - DNA, 471 bp, Homo Sapiens; identical to SEQ ID NO: 59956
  misc_feature (103)..(103): n is a, c, g, or t
  misc_feature (109)..(110): n is a, c, g, or t
  misc_feature (168)..(168): n is a, c, g, or t
  misc_feature (178)..(178): n is a, c, g, or t
  misc_feature (195)..(195): n is a, c, g, or t
  misc_feature (198)..(198): n is a, c, g, or t
  misc_feature (209)..(209): n is a, c, g, or t
  misc_feature (213)..(213): n is a, c, g, or t
  misc_feature (217)..(217): n is a, c, g, or t
  misc_feature (230)..(231): n is a, c, g, or t
  misc_feature (236)..(236): n is a, c, g, or t
  misc_feature (244)..(244): n is a, c, g, or t
  misc_feature (251)..(251): n is a, c, g, or t
  misc_feature (254)..(254): n is a, c, g, or t
  misc_feature (257)..(257): n is a, c, g, or t
  misc_feature (260)..(260): n is a, c, g, or t
  misc_feature (263)..(263): n is a, c, g, or t
  misc_feature (272)..(272): n is a, c, g, or t
  misc_feature (277)..(277): n is a, c, g, or t
  misc_feature (294)..(294): n is a, c, g, or t
  misc_feature (298)..(298): n is a, c, g, or t
  misc_feature (300)..(300): n is a, c, g, or t
  misc_feature (304)..(304): n is a, c, g, or t
  misc_feature (312)..(312): n is a, c, g, or t
  misc_feature (319)..(319): n is a, c, g, or t
  misc_feature (332)..(332): n is a, c, g, or t
  misc_feature (394)..(394): n is a, c, g, or t
  misc_feature (415)..(415): n is a, c, g, or t
  misc_feature (422)..(422): n is a, c, g, or t
  misc_feature (430)..(430): n is a, c, g, or t
  misc_feature (467)..(467): n is a, c, g, or t

SEQ ID NO: 209059 - DNA, 842 bp, Homo Sapiens; identical to SEQ ID NO: 54347

SEQ ID NO: 209060 - DNA, 540 bp, Homo Sapiens; identical to SEQ ID NO: 60381
  misc_feature (27)..(27): n is a, c, g, or t
  misc_feature (29)..(29): n is a, c, g, or t
  misc_feature (38)..(38): n is a, c, g, or t
  misc_feature (51)..(51): n is a, c, g, or t
  misc_feature (95)..(95): n is a, c, g, or t
  misc_feature (109)..(109): n is a, c, g, or t
  misc_feature (117)..(117): n is a, c, g, or t
  misc_feature (156)..(156): n is a, c, g, or t
  misc_feature (183)..(183): n is a, c, g, or t
  misc_feature (205)..(205): n is a, c, g, or t
  misc_feature (521)..(521): n is a, c, g, or t
  misc_feature (529)..(529): n is a, c, g, or t

SEQ ID NO: 209061 - DNA, 640 bp, Homo Sapiens
agcggatgcgaacagacagtgagtggaggacaccagcaaagtaataaggaatgtttcaaaaggatatgatgaactgaggcttatcgagtcagggagcagaaagctgaaataagaccgctaagctctaaacaaatccgttaaagcttcacagggcagagccagaacaaaaatagtatactcaatgtatagtcggaaagcagccgaagaagtgaagcgagaactgataaagttaaaagtgaactattacattctagaagagtcatggtgtgtaagaagatccaagcctggttgcagtatgcctgaaatttgggatgtagaagatcctgccaatgctgggaaaactcccttatgtaacctcttggtgaaggattccaaacctcacttcaccactgtattccagaacagtgtctacaaagtcctagaagttgtaaaagaatgactgctacatgacctgctgcctacggagaactacatctgtaatggttttaatgttttgctaagtcatgtgttgttcatatcccaaaaacttttataggtaactgttttcaaatagaaaacgttttatttggtcaatttgaatgtcattctaattataaaatgacttacaccttcaaaaaaaaaaaaaaaattctccagcgct

SEQ ID NO: 209062 - DNA, 686 bp, Homo Sapiens
agcggcactggctgctctgaaaagccatctttgcattgttcctcatccgcctccttgctcgccgcagccgcctccgccgcgcgcctcctccgccgccgcggactccggcagctttatcgccagagtccctgaactctcgctttctttttaatcccctgcatcggatcaccggcgtgccccaccatgtcagacgcagccgtagacaccagctccgaaatcaccaccaaggacttaaaggagaagaaggaagttgtggaagaggcagaaacatggaagagacgcccctgctaacgggaatgctaatgaggaaaatggggagcaggaggctgacaatgaggtagacgaagaacgaggaagaaggtggggaggaagaggaggaggaagaagaaggtgatggtgaggaagaggatggagatgaagatgaggaagctgagtcagctacgggcaagcgggcagctgaagatgatgaggatgacgatgtcgataccaagaagcagaagaccgacgaggatgactagacagcaaaaaaggaaaagttaaactaaaaaaaaaaaggccgccgtgacctattcaccctccacttcccgtctcagaatctaaacgtggtcaccttcgagtagagaggcccgcccgcccaccgtgggcagtgccacccgcagatgacacgcgctctccgacaccaaaca

SEQ ID NO: 209063 - DNA, 675 bp, Homo Sapiens
  misc_feature (618)..(618): n is a, c, g, or t
  misc_feature (641)..(641): n is a, c, g, or t
  misc_feature (652)..(652): n is a, c, g, or t
  misc_feature (662)..(662): n is a, c, g, or t
caaacaaaagctgccacatgtttattaagacattactggctcttaagcacagctggatctataaatcattttccatatattatcacatattcaggaaagtttctgagatgatatatcaagacaggcttctcttgtgactcaactggacttcaaatagtctctttagaagtctgagtaatggtgcaacctatacatcagggccttgccttttcattccccaaggcaaagtatccacttctcggagaaaaatccatggtatgaacatgagaaatattcttatttttaatgactgggaagtttgaaaatactgtacaggaaggaagatgaaccaatctgactgcttctttcattttttctgaagcaattgccaagatttctgtagtaggattgaaggtcagagaagtaacacctgtaaccaagttcattatagcttttattggctttgggtttgtttcttggagacaagaatcttgattgtatatatttaccactccacaattagaaccacaagcaacatactgtccattcctagatgtggcaatgcttaatccatataaactgccttcatcaacaaactgttaaggacttccttgagtcacatccaacataactctccanccccgaaaggggaacttctacancgaggatgtgngcgacctccntaattcagtccac

SEQ ID NO: 209064 - DNA, 675 bp, Homo Sapiens
  misc_feature (79)..(79): n is a, c, g, or t
  misc_feature (553)..(553): n is a, c, g, or t
  misc_feature (582)..(582): n is a, c, g, or t
  misc_feature (596)..(596): n is a, c, g, or t
  misc_feature (608)..(608): n is a, c, g, or t
  misc_feature (627)..(627): n is a, c, g, or t
  misc_feature (636)..(636): n is a, c, g, or t
  misc_feature (647)..(647): n is a, c, g, or t
  misc_feature (656)..(656): n is a, c, g, or t
  misc_feature (661)..(661): n is a, c, g, or t
gggggacagagtctagctctgtcgccaggttggagtacagtggcgcaatctccactcactgcaacctccgccctccggntcaacagattctcctgcctcagcctcctgagtagtcgggaccacaggtgtgcaccaccacgcccagctaatttttgtatttctagtagagacggggtttcaccatgttggccaggatggtctcgatctcttgaccttgtgatccacccacctcagtctcccaaagtgctgggattacaggcgtgattcaccacacctggccagtgtcattttctactgatgcaggttggaagcctcatgctgttccacctgccccggaagctttccctaatttcacagccctgtctcacccatcctcatggatccagttcaagaaccatctcatccatgaagcccatcagcccttggagatcttgttcataacctccacattgtcaatgcccagcaagtgtcctaaaaacagcaagttctcaaaactataggcattagttactaaaaacaggctgctgtgtgggaatcgcacataggaagaagntccttattcagggataaagagccactggnttctcccaacaaanagcttgctgggncccggttaattttagacantcccctttncaaagggggtnccaaggggngcaanttggttgatgaaaa

SEQ ID NO: 209065 - DNA, 1000 bp, Homo Sapiens
aagatctaatgccaactaagaagataattatttctgaaatatttagttgaagataactttctttcttaagacattactgttgttatgatgcacaagtcaaagaacatgtggcatttccaaagagtattaaatgcatgttacttttttataaaaataagataaatgagattaatggggcttggaactgcaatcttggtaaataaagttactgtatgtctttcacgagtgtgtgacatgaggattgaatagacagaattgcttgttagaaagaggaactaatttttgtatctattacaaattatatttgtaattcttccctaattataaattatcatgattatttttatttgggaaataccaaaaaatcataaataactaatctaaacttacagaatcctatcatccaaaaatggccattaatgacagtttgatagatttattgcagtttttttgtatccatttatctttcttgttcattttttcttctttcctaacaaattgaagtaatgccataaattctgtttcatactttgctttatgtacccttacagcatgaacatttttcatatctttattgcccaaacataattttaatgtatattaaatagttcatcatttgaatgatctatactttatatactttatatttctcaaaataattaaattgtccaaattttggcacatttagattattcaaatttttgaacgtagggaactcactgataaatataattatacataaaccctagaccacatctctcgtgatattattagtatagattcctagaagtagagttgctatgtcaaaagtatgaagatttattttctattttcatctttaatcggattttcattataaaaaaacaaggccaggtgtggtggcttatgcctgtaatcccaacactttgggaggctgaggcaggaggatcacctgaacccaggagtttgagaacagcccacgcgacatggcaaagccttatttctataaaaaaaaaaaaaa

SEQ ID NO: 209066 - DNA, 839 bp, Homo Sapiens
agtcgccgtcaccccgggaagtttgtgccatccacgttctcctccaggatggtctccacgcgcctccgctgccggggagagaggctggggtccggcgtgtgcggaggcgggcagggcccctcccctttccccgcccctaccggggcttgtctgcacctcttggcggtccaggggtccgggatccgcgcgggcttcagctgcggcggcaggaacagctccagccggatggcggcgcgcgcggacttctgccgctggatgagcagcgcgatctcctcggcccgcatgcgggtgtagcgcagccgcagggcgcggactcgcccgcgggcctccgctgccttgaggacgccgaggagccggttctggcgctcggcgggcagctcgagcgactgcgtccacgggcgcgggtcgggcatgcggtaccccggttccaccgacccgcacgggaaggtggaggccgccgcgcccacgtcctccagcaggtcgccgaagagcagatggcggtggcgctgcgcagggagcatggccgccagtccctgcggcgtcagggcccagcccggcttggggggctctgtcgcgggcgcccccttggcacgctcctcaccctgcgccgtgcctggcgcgctcttcccgcttcgctcccgcgggcccttgcgcccgccctccttcgctggcggcggcatcctcccgccctgcggacgggaggaagggcgttccgtcggtgccggggctggcaccgggcctgcccgccccctcggcagggccccaacgtgcgccccagctcccgccgctgggctctccgcagtcggttatgagttccgcacatccgcgaattccggacg

SEQ ID NO: 209067 - DNA, 386 bp, Homo Sapiens
tttttttttttttttttttttttgagactgagtcttgctctgttgcccaggctggatggagtgcagtggtgtggtctcagctaactgcaacctccactttccgggttcaagcaattctgcctcagcctctggagtagcgggaactacaggcatgcaccaccacgcctgggtaattttttgtatttctagtagatacggggtttcaccatgttggccaggctggtctcgaactcctggcctcatgcgatccgcccgcctcggtctcccaaagtgctgggattacaggtttgagccaccatgcctggtcaaggattacagaattaatattaaagacaaaattttccttacccaaatattttaaaacaaaatatcaccccccctcgtgc

SEQ ID NO: 209068 - DNA, 576 bp, Homo Sapiens
tttttttttttttctttgagacaggtctcactctgttgcataggctggggtacagtagcacgatcacagttcactgaagcgtcgacctcctgggctcaagcaatcctcccagatcagccttgcaagtagctggcacatgccaacatgcccagataacttcttaatttctgatacagactgggtctcactatgatgcccatgctaagatttcttttttaaatgctagaaatggatgttgaagttaatatccctttcagtatttatggaaaggatcatatgttctttttttaatatggtagtattgaattaacagatttcctcattttgaaccatctttatacttccaatacgaccctctcttgtgcatagtccattattcaaagtgctcgcagacactatatgttaaaattttacactaaaatttaacattaatattcctacatataattctatagttttatgaaagctgtcagcaattaaaaaatatttaactttcacttttgagataattgtaaattcacatggagttgtatgaaaaaaggagagaccccatatacccttcacccagtttccctc

SEQ ID NO: 209069 - DNA, 623 bp, Homo Sapiens
tttttttttttttttttgtatcacagtgtttagcagcctgctatatggtaaatgtcagtaaatgttccacaaactgaatggaattgagctctggaatctagaccatcttttccatacccatcactcctgtcttagttgaagtccttatttcccatttgaagcaatgcaaaggatttcctaactctaatctctcttttcttcacaccatcctttaaacagccgacagaatggtcatcctaaagcacatatatcctatcttacatatcctagattcggaacctctctgggcttctcaccatataagaagaaagtctaacctccttagcaaggtgcataggtcttcaatgggctccacctcacttctctatatatacctatactcttgctacactaaacttctttcttactgttgctggaacaagttcaacgctttcaaacctccctgactttgcatatgcagttcattctgtcaggaatgcccttctctcttatgcctgggatattctcattcattccatatgacctatttcataagtcactccttaatgaagcctttcttagatatccactggggcaatcagctgcttgctcctgtttccacagcacattgttcacactcgtgc

SEQ ID NO: 209070 - DNA, 584 bp, Homo Sapiens
tcttgaagatgtcaatacattaatttttgaggatatatacaacaagaggtcttcaataaacccagaaatgcagacagcactgatatttacatacccatacatagcatcttttgtgatttagcatgctattattgttttctgctcctaggcattctagaaaggttattttcatgtctggatttctgatttagtttcaagatgtaaaaatcctacatagtcagacaacctgctttggctatatcatcagaaatggcttaaaagcaaaaatgacattccagttattccacacacaaatccctgatgttaacatccctagcctaaaaatagccatttggaaggaaagccctatttcaaagcaaaggaaatgtgagtaagacaatatctggtcctggaaatgtcagactcaaaattgagttctttagatgggaatcgattctaaaataacatctctgatttgttatataacaaaacacaatggctttataaactttatataaacattatcaatttctgatggttttctcttaaaagggtagctctgaagtaattattctctctttaaactgtatttactgagctcgtgc

SEQ ID NO: 209071 - DNA, 639 bp, Homo Sapiens
accgggccccccctcgagtttttttttttttttttttttttttgaggtttgttttttgagcagcagcctttatattagttttccaatcttcattctacccctgactcacaacagggctaaagtgatcttaagttttgtatcataatttttatccttgtaaaaatttttttaccttttgatttatgagatccttgaggacacaatgacattttcttactcatttttatattttctgtagtcctgcagaatgcttgcagacatcttaaagtaacacttaagaaagtctttataaactctcaagaaatgggacaaacataagttgtgctggcaggttggtaacaatagctaccatttattggcacttattatatgccagttttaggtatttcataaaattttctcatttactcctcacaaaaaaaaggggggcattgttatgtctattttatagaagaagaaactgagactgggaagtgaagaaacttgctcaaggacgtaagatgaagaaggtgtaaggtgaaatctgtctattccatagcccggcagttaacttccatgctcagctgtttctttgtaatagttgctctcttcacttgaattcacattctttcccttctacatcagaggaaaataaaccct

SEQ ID NO: 209072 - DNA, 516 bp, Homo Sapiens
tttttttttttttttttgttgttcttgtttttttttttttttttgcactgaatgggtaaggaacatgtattttacccactagaattttttttaaaagcttatatctccaagattctaaaattctgtagctgtcacatgacaaaagcactgctttagaactataatctgaatagctaataatcaaattaaaaggtacttcttattttgtcaagtgagagagcattagaaagggaatacactgaaggagactggtctgcaggctacgccatgagaatcaggtatggaatatggacatatattgacataaatgtgatccaaatgcatggaactaataaatttaaaatgttttaaggaagagtcaacaagtcttgttcactaactgaaacaaagaactgacatctagaaaagccacaatagccacctctcacctcagatttaggtttaaatcctatctgacagtaactagctgttgaaaatatttattatctttgggccatagtttctttaacctcgtgc

SEQ ID NO: 209073 - DNA, 406 bp, Homo Sapiens
ccgttccatgccccatctgcacccgtcctaactggacacgaggccactggcttgcccttgaaaactctgggggagagccgatgcgagcacagcgtggaccacctcatttccaggtaccgggaacgattaattttctttttgatatgaggggggatctgcctccttggaattctacacgttattcttacttttggcctctggagcaacatagaataaacctgtattccggctgacagcgttgtcagttcttgaaaattgccacatggctctggctgggtttccttcaccaagccaaatcccctgagtctttcagacattcaccctcatcagactggggctcgggctatcacccgttcagttcctcaggatatattccaattcgtcagtgggactttttttctcgtgc

SEQ ID NO: 209074 - DNA, 668 bp, Homo Sapiens
ttttttttagcattagtgtaatttttttattaataaaacgaacccatagggttcaaacaagcatacaaagtaattttttttcctgtgggttaaattgttacatttttaataataaaaataagaaagctttcatagttaacttaccaaaaacataacgcttgcctattgtttcttactgtgcaaaacaaaaacaaagttttgcccacagaaggattttgtgcaccaaaacatgcacattttcaatttcaaaatttctgcatcaaaatgaaaattccaaggccacgtttttgttttttcaaactaaagaagagcaagaggggaatcaccaagcaaataacagcagctacatttttaatcttcattcccaggtattttctgtttcaatgtagaattctccacattcataaaatgatatcttcaacctactgcttacagtcagatatgccagtatcagttcaataaggcaagtcacaccttttagctattctcttaagtcctacagagatagtttcacttcaatttcacagggacacttcatgatttatctaataaaggtgataagacaatcctagtgaaggattcctttaagttgttgcttttctagatggaaccaaataattaaactttctcttctccatactggagtttgtttctttcattatgtttta

SEQ ID NO: 209075 - DNA, 618 bp, Homo Sapiens
tttttttttttcctttttttttttttgctaattttacattttatttccaactattgcagtaacaagatgccggtagtattctgcactgaaagtggcaaccttttaaagtaaacaaggttgcaaattttagtattccaacaatattttgacctatggagattttgataggaaagaattattacaatcagttttataatactacagacttatgtttcctccatatctaggaataaaaatatccaccctccctcaatgattcatcatgtacacatctctactctttacaagcactatccttccagttgtactatgaggggaaatccctctcactcctgggtttttctacagtatacagaaatagcagtcactttagcagtaatgtacaatactattcaatctttagttgaaaaataaagaagtggattgccctatttatgtcctgatagtaaaaagacacacaccattgaaacataaaacgagtcaacaaacttctatttttattgacaggagtccaaaatgaatacaaaaaaagcttcctttgcatgttatacttactttccttaaaaagctcctgatagagtcaagtagactgaaaactaaggatgtagttcagctttt

SEQ ID NO: 209076 - DNA, 345 bp, Homo Sapiens
aaaacattttattactataattgatattttacttataatttttggcaacattaataaaataataaatttcacctgaaagaacaagcgagcaaaatagacaaggaaattcacaaagggcaataacaaaatagtaatcttgacatattcaatatatttgtaaacaaaacaaagtgacattgccttaaaaatatatagaggtatcaatagaaaaacagagaaagctcctgaaagaactcactatattaattttcatttggttgcaggcacagaaattgactcaagctagctcaattctaagacagaagcaaagcactttactctctccccactcttttcttctcgtgc

SEQ ID NO: 209077 - DNA, 592 bp, Homo Sapiens
tttttttttttttttttttgagacggagtctcgctctgtcacccaagctggagtgcaacggcgccatctcggctcactgcaacctcctccccccgggctcaagcgattttcctgcctcagcctccagagtagctggggttacaggcacgtcccaccacacccggctgatttctgcatttttagcagagacggggtttcaccatgctggccaggctggtctcaaactcctgacctcaggagatccacccgcctcagctgggcccagccccttttctctcaatttaaaaactgctttaaaaactgcaaatcaagtattgggttaataccactttactattattaactgattcctctaatattccagaaagagcacaagattttttccatttttgatagctgcctattgtcagttttaactggagctgaaaaacagaagacttaaataaactgaaagccatcatcgagttttaaaaagggacactgaaataatccttcttgaagatattttctttaacagccacttatttctaccctgcaaaaagcttgaaatataaaattagtatttaaagcaccatacaaaataaaaaaacca

SEQ ID NO: 209078 - DNA, 649 bp, Homo Sapiens
tttttttttttttttttttgttggaaaacagagagaacttgtaataatgaaaaaaggacagagtttagtgaccaatcacttattttctttaaaaacacataaccacattaactttttgctttatacaaccatctagaaactataaaacagtaccacattgtgcatttaacctacttatcaagaagggaacttcataagtcataagaattctacccatataggaaggaaaaaggagacagctaatagcatagtcacagatacaacatgagtccaagcaagcatcaattcttcgacatcaccttttccatttaccagagtggagactgagaaagagagtgagggagaaaaaagagggaaggaagcacccacagaggactaatcacaatccatagttacttttgacaactatagctcagggtttcatagaatagtatcatttgaccaacacagtgtggtggagggagaggggtgaaggaaacacaaatagaaggagagagtttgaacagaaaaatacaattttccccctattcccctcctaaatactcttcattgatacaagcttctgtgctaatccagaaaatggcaagaaattaatcttcacaacgtgattaagagttctgttctttttgtaattgaaatgtgctcgtgc

SEQ ID NO: 209079 - DNA, 544 bp, Homo Sapiens
tttttttttttttttttatataataacatgtttattttgcacttcataaatgcttacagataaaaatattcaacagtacctaacgacaggtcaaaatatagggtgcaaatacagcagtgccttttaagttgaagttgcagttttcttattgtttatacttgaaaacatccagcaaatgaattttaaataatcctaagaactctgaatctgaggtaaagagtgcccaaaatataaatttcagtcctattcacaagtatctaagtaaattttacagagaagacctcaatgtctcttctcacgccaagctaatttttctaatgattctgtgctgtccagtttgacaccccaaaagatcttcctgagtttaaagagcattcctgttcctaattttccttttattagacagtaacttttgtcttgtctcatcctttggataacgtcactaatggctccatgctgtgtacactgtgaaccagttcctcatgtgaggattgcagaaggtttctgcctgatggaggttgctgaattggatttggactcgtgc

SEQ ID NO: 209080 - DNA, 533 bp, Homo Sapiens
tttttttttttttttttgagatggagttttgctcttgttgcccaggctagagagcaatggtgcaatctcggctgactgcaacctccgtctccggggttcaagcaattcttctgcttcagcctcctgaacagctgggattacaggcgtgcgccatcatgcccagctaattttgtatttttagtagagatgggtttatacatttttaaagaatggacaatgatgcagatgatttgtgagcattttgatgagaaagtggtgattagaaggatacagcataaatttaattgtaaacatgcttatctagctaacctaatctgtttctgtagaattactggcatgggagattggatagatgcctaacctatctcaattttaagtaatgtgagcaagtctttaaggtatacataatgataaaatggagaaacatgaccagatgatgatggtcatgtaggtaattagatggatttgtaggtggttgaaattgtatctaagcatagcaatctggcctctgtctactctccaacagctcgtgc

SEQ ID NO: 209081 - DNA, 674 bp, Homo Sapiens
taccctaatgctatataagaattgccttatattaagtaaatattcaggaatagagacagccctaagaactgggtcatgtcactagccctcttcagttgcagttcacggatcctccaccttgacaataaccatgattctatccatttctcctcccttgtctgctgctaccaccaactcctcagcacctcctctatacatgcattgcaagctttctcctttctcataactttggtatgctgaagatttatactggcctttctctatgaatcctttcagcttcaacttcagctctgtattgcacatgggaactcttgaaaagacaatctgatcctgtccctctcaggggagaaacttttgggccacagcttttttctcagctatagcaaggaaagcagatagggaaaagaggtgagttggtcactatgtgcagaatatggccaatcagagaagttctgctaaaggagcaagcaggtgtggcagttgctgagatttgcctatagcagttatttacttacatgtctatgtctcctaattttaagctttttgaggtcaggtgccatgtttcaggtattcttcaatgcttagtgcccagcacattgcttggtacatagtaggttctcaatacattttactgaatgaatgaatgaattgatgaatggctatcttggctccca

SEQ ID NO: 209082 - DNA, 415 bp, Homo Sapiens; identical to SEQ ID NO: 48452

SEQ ID NO: 209083 - DNA, 674 bp, Homo Sapiens
tttttttttttttttttacattttagatttattttattatttttaatgaactatgtttaacattttacaaatcttcaggttgttacagttttcagcagtaaatatagtagtaacagcaataaatacaccgaaatatgagatttctctgaaagaatacaaaaaatagaaacacctggaaacaagaaggcaaaatgtcaattctagatctgaaatagaaattaatacagctgaattcctttacaatgctcgtacatgggaaaatgagaaactcatgcgccttataaatgaatgtgtgactttgagcttcacctttttaggaagttttgagggacatcatttgacccacagatctctaaaaccctataatacgtattgataccagaggattcaaacacatagtggtctgaaaatgattgccaaagcaaagaagtgctttcattcctcaacatttgtaatctctgtggtatattatgtattataaaagggcataatccctatagaactgaaagggcataatccctatacaactgcataaagtcataaaaattgatttataaagtctcaagatcataatatgtattcaaaaatacatacagctgtgctttagtaaatgaatccatcagttagtcaagagatagttttgcctttaatatatatccaaagtatatacaaag

SEQ ID NO: 209084 - DNA, 558 bp, Homo Sapiens
tttttttgtatttttagtagagatggggcttcacgatgttggccggggtggtctcgaactcctgacatctaatgatctacccactttggtctcccaaagtgctgagattacaggcgtgagtgaccacccctggccagattaagttaatttcaattgttttgcagtcgcttgtactagaaagtgctataatgcagatatttgggacacggtgtttagagaacttcctgactacctggatgtgagaagtgaggtaaaaagagccatgaatgatgtccaagtttctagcttaggtagctaggtgaaatgcggagtcaatcactaagggatgaaactggtggttgggggctaggaaagatgattatgtacagatttgaacatggtgattttcatttgtggtagaggacattcaaataaagatgtctaggatgcaactagaaatatgagttaaacctgttagagatctgggctggagataactgatacgggactcagcagatagaaaatgaggccatgggagcagcatatagtatcagtggagcatgtggaataaaactctga

SEQ ID NO: 209085 - DNA, 701 bp, Homo Sapiens
ttttttttttttctttgagatggagtctcactctatcacccaggctggggtgtagtggtgtgatcttggctcactgcaacctctgcctcctgggttcaagcaattctccttgcctcagcctcctgaatagctggggttacaggcgcctgctaccatgcctaatttttgtatttttagtagagatggggtttcaccatgttgatcaggctggttttgaaatcctgacctcaaatgatctgcctgcctcggcctcccaaagtgctaggattacaggcatgagccaccgtgcccagccccatttgtttttttttcaagccaggcttcatccagaaaaaagaatctgtatcatccttgcttcatctatagaaatataatataaataaatttagcaagtgatatttcctcaaacttgtttcctctttcctcctattatctctactccgatttccttctactgtgctttttctattttcttaaatatttatgaatctcattgtttctttctctcaactgtatgttttaaagtttcatctagttttaaagatctcaccattgttactcccatttcatttttcttatttgctctatttaccagtgatggatatttagctaggctatctccaaatccccactactacaaactatgcagctacaaagattatatcctcaaagatctgtttaaaaattcctctgagtgctgg

SEQ ID NO: 209086 - DNA, 599 bp, Homo Sapiens; identical to SEQ ID NO: 45297

SEQ ID NO: 209087 - DNA, 571 bp, Homo Sapiens
gcacgagcttatttgaccttggcgccttttttaaaccaccctacaaaaggaatggaacagataagaagatgttgagattagactgtgctgccatgcggccgccgcaggacacttttcatatccctgtttctcaggctgtagatgaaggggttcagcatgggggtgaccaccatgtacatcactgaggccactgcaccctttctcggggaagatgacacatctgaaccgaggtaccctccaatgcctgttccataaaatcagcaaacaactgacaggtgagacccacaggtggagaaggtttatacttcccacctgatgatgaaaccctcagaatggaggaaacaattttacagtaagagaaaagggtccccaagatgggaagaaaaccaaatatggcagcagggaaatactgatgttcctggtgaaggtgtcacaacatgcaagatgggagagttgagaaggttcccagaagaaattaggaatttccacatccttgaagcaggtcatttgtaaggcaatcaagttgtgcagctgggagtctgaaagactgagaaaaaaaaaaaaaaaaaac

SEQ ID NO: 209088 - DNA, 708 bp, Homo Sapiens
accgggccccccctcgagtttttttttttttttttttttggtgcaagtttggctttggagcttctcagtccaacagctgagctggttgtcagtggttgtcatataaaatccaattttcgtcccacgtcacaatccgactgagaaatggttcattgttgttgcacagaataagagaagatgcttccaaacaacaatttatttttgcttggctcatgaggcacctacttattgagttttttcacctttccgatttgcttcaaatgtagaaagaccatagaatggtcaatgttgaattgttcagcaacttctcgtgtagttgtaagagaatcagctttgattattgttcttgagtagtcgctgtcaacttccaatggtcagccactatgctcctcatcttcaagtccctcgtctcctttgcaaagcttcgtgaaccaccaccgcactgtacgttcattagcagttcctgggccaaatgcattgttgatattgcaagttgtctccactgctttacgacccattttgaactcgaataagaaagtcactcaaattcgctttttgtctgacatcatttccatagtctaaaataaacataaacagcaagtaataagtcattagcaaaaacgcataaagcgagaaatgcgcattaaaatgatatataacataaccacatttatttaagaatgtataccaatatcaaatggcaaattc

SEQ ID NO: 209089 - DNA, 560 bp, Homo Sapiens
gggccccccctcgagtttttttttttttttttttttagtagaggtgagatctcattatattgcccaaagtggtgttgaactcctggcctcaagcagtcctcccacctcagacacccagagccaaataatgcttcttgaagagtacttttgatcggtagggttcaaatattccttggcttaaaattattttctattataattttgatttctgttttttcctagcattttattaagggatataaatagtctatagatttggtatctattctctacctctgaatcttccatcatctctttcaaaacatctctgaaaactggaatgcattttataattgatgacaccttactatggtcaggcagctgtcatgacacagctgtcaatgcctgcacaggagcgatttgttaaagaatgagctcactgaaaaactcttgggactgagttgcttttcctgatgaaattttcattttcgtgatattggttaacatcatgaaagtgacagtatcaaacgtgcacgatgtaatcagcagcttggagattaatcccagagacatactcgtgc

SEQ ID NO: 209090 - DNA, 482 bp, Homo Sapiens
accgggccccccctcgagttttttttttttttttttactctcttaacccaaataatttattactcaggagtgaatatttttaaaattatgtagacattgcgattatagtacttagtcttttcctaacaaaaagacaaccattctcaagtatcttattacagttattcattgattaacaattaattgaacagcttctatgttatagtccctaggcatatggcaatgaactagattgttatacaaagtccctgctgccatggagattacattctacaggagtggacatagacaataaatgaataaacaaataaataaatgagataatttcagataatgataaagccttgaagcccaggtgatagacaaaaagtgacaatggatgtgggtgtagttttttaaacatttttcttcttaaatttggtttaaatgtaaacatttaccaaagtgataaatatctgcagtttagtcagatagtctcgtgc

SEQ ID NO: 209091 - DNA, 623 bp, Homo Sapiens
gcacgaggggtcacttacatggctggcagtgcatattggctgctgagtgtgatgcctatctgacctctccatgttacctggagtgctcacaacgtggtagtttgtcccaagacacacaggcaaatactacaaagcttcttaggacctagccttggaggtcctagaatacgacttctgctgcatcctattggaaaagcaagtcattgtgaccagcacagattcaagaaatgggagattcgactctacctgtcaatgtaaacagcagcatgtgcatgcagggaggaaagaaattgagggcatcatcttgaagactatcatatcacaccattattccaactagtgaacattatgttttagatgggtagtactagctactcatctgtcccccagaaacccaagctaagcatggacatattgaagagaatgtcagcaccattaaaaaaactctagaaaaatcacatgtcatgactgaggttaattcagtctgtcaattacatcagtataattgccttcttgtaaccctaagtatggtgaagcagaattgaattctacaaaagtctttcatctgttttcctatggaataattaacaaacccaataaatgtataaatagcatgaaaaaaa

SEQ ID NO: 209092 - DNA, 1000 bp, Homo Sapiens
gtgtgagttactcagtgtaaaaatagacattctcctccatttcataacttgagcactagaattctaaagaccaaaaattaaagcactcaaaaagaattcctggctgggtgcggttggctcatgcctgtaatcctagcactttgggaggccgaggcaggcagattgcctgaactcaggagttcaagaccagcctggacaacacggcgaaaccccgtctctactaaaattcaaaaaattagccaggcatggcaacgtgtacctgtaatcccagctactagggaggctgaggcaggaaaattgcttgaaccgctcagacagagcaagactccgtctttaaaataaataaataaataaataaataaataaataaataaataaaaataaagaaacaaaaagacaaagcaacagaaaagaagaagaaacagaaaacaaaagaaaacaaaaacaacaaaaagacagaggggggggggccgcaaaaaaaatgtaccccgaggggagccgccgcaacctgtccggccacccacgtctttcttgtggacaagaagggcggccccacaaaagggggcgccggtaataaatatacgccagacacgggcggccgcgcgttaaaaacacacgggctgcggtaggggggggaacaacaccggccgaccgctggcggactccttttgggaagaggagccccccaacctcgtcgggcggggagaacaaatttgggggcaccacctcacactccaaggagaatttacacccgcccggcggcacaaattaaccatacacgatgctattactcggcgtcaaccacacgccagaataaatcgctcgagcgagaaaaatttcgtgctaacgagtcgtagtgtgaacacattcttcccccgccgtttgtaacttacctgacgacaccgaacgatgtatgccgggcccgatcaaccgaaaacagcgactcatccagcaggtatatgactagaatgcgaggaaaccccgccaacgaatggagctc

SEQ ID NO: 209093 - DNA, 878 bp, Homo Sapiens; identical to SEQ ID NO: 49032

SEQ ID NO: 209094 - DNA, 617 bp, Homo Sapiens
ggccctggctcccaaggcaggagccccgtgtgtcttggcgcccggcttcctctccaattaggggcaagatcaatctcacagctcagagactctcccactccggcatccgcagcagggcccccgggggaggtgggggtgcggcggggtgcagtggcgcgggcaggggtacacatttgcgggaggggccttgacttcttcggcctcaactccctgctctcagcctcatctcccctggggggcagccccttttgacacacttgcccacactcagacgtcaatctgggggacctgacctcacagggtcaccaggccccaggggcaacgtcctggcctggttctggggaggaccgatcctcaagcatctccaggagactggcaggggtggggtgggccccccaggagaagcccacagaggcagccggggaggcgtgtggggaggaagctggcctgtcccttccttgatcttgggatgcattttgtccgcttgtcctttgatttggaaatgcacaaggtgatcatttattccaaaaagtgagtccggggaaggggcagtcctcacgctgccgggacccagccccacccggcccacacctcacacagcggctcccgggcccccg

SEQ ID NO: 209095 - DNA, 642 bp, Homo Sapiens
ttataaaaaggacctggagattatgctcctgaaatacagacatgaatttttataaaaaggatattgatttcttgctataaaaagagactgaaaggtgtcagacctgaaaacaaattctcacagtgttttcagtgttggctgttaacaaggcattcaatagaacagagatagatggataccatacagttcatgtaatcatgtggtatgttcagacagccttctagaggaatcaggtatatgaagtcccttactccaaactattatcaattgcttattgattccaaattgcctcagtggagagattgaccaggaattcactgtgctttataaactcttcggaaatgtctgcagtattttccaagttctgtctattctcttagctaacccagacagcaggatcctaagcatctggtgtcacaattataagtagtaggttcatttctaccccattgacagccagaatcggtgctggacaactagacccgggcctcagatcaggagtgaagacgtgacggctggcgagctgcctcgcgtgtccttccaaggtacctccacctatgcctggagcatccaagagaactaagagcacttgtagtctgtcaatgcttggaatctggccaagtgaggtctcttagtttcgcc

SEQ ID NO: 209096 - DNA, 428 bp, Homo Sapiens
  misc_feature (15)..(15): n is a, c, g, or t
attggcccgtgcttntactcccggctccagcaatactcctgccttggcctcccaaagtactgggattgcaggcatgagctaccctcctctagtatttctgtagcttgagtgaacttctgctgttctaggtacccacagttcaccatctgcctccccacctgtctgcgagacccttgaaggcagggacgtgactttcctctatcttccccaggctcagttatagagccagctgtgggcagctgcttgggaggcgctggttaagctgaatggaggaaccagtggagctgagatgcccgtgcccgcagccaccagaccctggctgactctctccaaggttattacctggaggccatggagtggaaccagatgaactcatggtggtcctcatttccgaactgttccagcacacactcggcttgggccagccg

SEQ ID NO: 209097 - DNA, 1000 bp, Homo Sapiens
gccatattctatatgcatatttattatgcatcattgtaatttaagatatatttggatgtaggctgtataaatgcttttaattgttctgtgaatagatccttagctttagtttcacctgaatcttgtgcaaaacacagctaaataattgaattgtattatagacattatgaggtaattgatcttttaaatgtaaggagtaagattgatctataataatgtgctggggaaaacatttatagatatgtacatcatggttactttttgtcctttcaaatggactttttatttctatttatggagagactgtaactactgcttttaatgtctttttaaagcagctatttaccagcttgaaaatatcatgcatttaaaatagaaactatctggggagtctaattactattgttcctatttgagccagttgtctttcagtaaagctatagaatctctcaaagaagtaaatagaaatactacttcttaaatgtcataggaagcatatccactttgtttctattagtactttaagatctataagaccttattactaaaaagtagaggaatataaagaattcatcaatttctgtatatgggctttaacctaattttccaggttatgcgacttataaagcactgtgaccaaacttccagagacagtaaaaaaaaaggaacaagttttaccccccttcagaaggtattgtcatgctacctggtgacttattttccaaaatctctctcttcaatctgctataaatccctcctttatcttgctttcctttaaaggctttaatatatttaaattccttcccttgggtttccctctcgtttagaacaggttactactggagccctatttgttcgaaaagttccactcgcgagaggtatacctgtgcctgttctttccggcaaccttacggtggaggccgttgagaaagggtttgaaggtatggcgtttgacccgggaaagtaccttatgcattttaaccctggtccccagataatt

SEQ ID NO: 209098 - DNA, 744 bp, Homo Sapiens
agcggggatgagatctctgaatatcctaagccaagtgcaggccataggagaaagcagtgaaaaagaaacactgtgacaagcaaggaagaaacttcagaccaagttgacaggcagcccttcagtttactgactgccgcttcttacctgccaacgccaagcacaaagctgcctgcagagccagcctctatctgtggtccttgtgccaattatcactgccccactcatgccgcaggatataaagcagagtgacagggtcacaggactgccagaggaatacaggtaggggctgcagagtatgcggattactgccaagtgatcaactatacaaaggaagtcccatgttacgacactaactcatatttttctactattagcattagtccctggtatataaaatttccatatattggctgaactgaagtgggatccctgtaggtaactctggttatatttaacaaaaataagatgtagaacctgtttgaggggcaaatgaaggaaaacatcctcgtgggaagtccaactggactaagaaccctggactctagcactgttttcaccttgcccttgggggttcttggtattatcactaccgtgactctactgcctgttggagaggggtggtcctcttccactttgtcactctgatccaaagcatgaaagattcttcctctattctccatagaacaaaataaaatttacttatgtccaacagaaaaaaaaaaaaaaaatctctcccaggcgctg

SEQ ID NO: 209099 - DNA, 936 bp, Homo Sapiens
agcgggtggttactacgggctcctctttcatccgggctctactggtgaaaataactgcagacggctggtaaaaagttggaatagctttcgttaagcgtcggatgtgtagagtgctgagttaggggctggactagagacgttgggacatctcccgggaacagcagcctggaggggaaaaatctcctgacctaagtggtcattcggccttggcgcttggacacgggagtgcggcgacagccatatgtccatccatcttggcacttttccgtcctctgcctttgaagatgggtgtgcccggcaggctgtgaaagataaacattagagggttgtttagaagacttttttgacctgagcccatgaggtgcataccctttgtttggcggagaaaccagtggcttctgaagatcagggacgggccacaagtgcgaggcattgcagacatttcgaacccagacttccagcctggagacatccacacgcttccagtttcttgcactggtacttcattctgtcattatgattgccaccactcgtaactgagagttgcgtgccctcaagtttgagtgtctgcagggtacctttgagctttcttagctgtgtagtgagtggggggaatggagaaaatgaaggacagatgactgattgtagtttttcatttggacactgtccttgccgcacaagcaacagcagcttgaacctctttgaacaagagtcgagaagttcttttaacagctaattacccactagttaaactttgatcataactggggctggttcttcctcctccattgtcaatggtaatacgggtcctgacaaaagttaattcgctgggcgtggtggctcacccctgtactcccaggcattggggggtgaagcggggtgggttcaccctgaagttcggaattccgaaccacgctggcaacttggtgaaacccg

SEQ ID NO: 209100 - DNA, 617 bp, Homo Sapiens; identical to SEQ ID NO: 60363
  misc_feature (490)..(490): n is a, c, g, or t
  misc_feature (559)..(559): n is a, c, g, or t
  misc_feature (589)..(589): n is a, c, g, or t
  misc_feature (613)..(613): n is a, c, g, or t

SEQ ID NO: 209101 - DNA, 458 bp, Homo Sapiens
  misc_feature (322)..(322): n is a, c, g, or t
  misc_feature (397)..(397): n is a, c, g, or t
taatctcttcttccttccctgggttccaacgcctaagctgctttgatattctgggtggcataatgaagtggcccctcccccagatgttaccagtcaccaaccatgacccttccctgcaaggcagatgggacccttctgattctcttacggtgggggggtttgaggtgggggggcacacaaaaaccaacaaccagcaaaggggaaccactacagctctccctactcttcagacaaaattcagtctcagtaacctgtcctgtcaccccaccctgctctcagcccccacggccatgcttcttaaagaccctcggcctcgtgaagnaccatttcagtgtccggcagacggcaggctttcagcacacgatggctgaatacttacgaatggggcatttatagnacttccttcagccttccacatgtacacatatacatcaggcaagattaagcttgcagggaaa

SEQ ID NO: 209102 - DNA, 929 bp, Homo Sapiens
agcggagatgaagcttatgtgccacctgagggagagtcttattaccttataaacccagtgggagggagaaagccaggcgtagacctcatcaccatcccaaagcagagcccattctcaagctttctgtaaggcagggcagcaggaaatttaatcggagttatcgagaaccagccatgtgtaacttttgtgcaggtgggaaaacagaaaagcataagggaaagaaactagtttttgttctaaaaaattatctaatcttcatagctaccgactgaagtagatattattatccctatttagcagacaaaaaaaaaaaggagatttagagaaattaagtggtctaccaaaatctacatatatctagtaaataaatgtaagaaataagattggaattccgatctggactccaaaacccaggtggcttttcgctggcatcatgatacatctcaataatactggctaattcaaaactggccttatccaggattctatcacaatataccatataactgtataaatagggtatacagtatcttaaaatcagcagttcttaaacctttcggtctgaagatctctttatactcttaaaatttatgtgaggaccccaaagagttccggccatgtgggttatatctgtcaattttttaccacatttagattaaaaccaccttttaaaaacttgaaatatatcagcacacatctattagctgtcagagcgatgatatcgcttttcatgtgcctgggaaactcctaatggtatacttcacgaacgactaggatggtcgaaggttataggctgcgtgccctgggtcacacctggtctcccagcccttgggcagaccgaggccggaggcttcttgagcgcagggcgtccgaaccggctaggcaccctccacgacctgtctctccgagcctgccacccacctctccag

SEQ ID NO: 209103 - DNA, 869 bp, Homo Sapiens
agcggacttggtcccagccgataaatctggggcagcgcgcggtaggagctgcgggcggccaggccccttcctgcgtccgcacctggccccgcgcgcccctctcgggcgtccggcttccggcgtcctggcggctcgggtggcggcggttcgggcggccgcctggctgctcctcggggcggcgacggggctcacgcgcgggcccgccacggccttcaccgccgcgcgctctgacgccggcataagggccatgtgttctgaaattattttgaggcaagaagttttgaaagatggtttccacagagaccttttaatcaaagtgaagtttggggaaagcattgaggacttgcacacgtgccgtctcttaattaaacaggacattcctgcaggactttatgtggatccgtatgagttggcttcattacgagagagaaacataacagaggcagtgatggtttcagaaaattttgatatagaggcccctaactatttgtccaaggagtctgaagttctcatttatgccagacgagattcacagtgcattgactgttttcaagcctttttgcctgtgcactgccgctatcatcggcccgcacagtgaagatggagaagcctcggattgtggtccaataacccagacttgttgactgtcttgtgaccaagagttcccgattttgaaatgctgggctcactcagaagtggcagccccttgtgctttggatcatggaggatatattgccaagggaaccagatgaagtataaatccagtatattaagaaatgcgattctaccagttcccagggggactgactgtacattactctctaatatggttctgggaactccgctccattacaatcgctggggtctaa

SEQ ID NO: 209104 - DNA, 741 bp, Homo Sapiens
agcggtagggtgtcttaaattataactacacaaaattaacacactaactctgtcacttatttacaccaataaaagtctgtttccaaacaagaaagctgcactgggtatatgtatatgggtgtttatgtgatttagatgactggcatatttttaaaaactgtccaaaggagtttgaagtcataattttaatgtagcaggaaaagataaagtcattctcccatatttccttaatgttcagatgctatgtgttgtatgacatgatgtatataatgtaagttactaaaactttttttggaagagaaaaagctagagtagcagatatgcacactaaaaggcaaaaatctggttttacaagttttttaataaaaaaggtggcaagatgaacgtttttttaacttggaactaaatttaagcttaacttttacagcaatctttagaaaattttgctatatggtctttcttgaagattatttgtaattttgtataattgatttagaaattcccatcaaattttaaaattcagagttctagataaaaccatcaattatctgaaatcctttctcagtcaagactgcccatgaagcccaagtgccttatttgatcctataagcttcactgaaaatcagcagagtctttattaatttataaatgatgggcatgattaactggtctcaagttgctcacaattctgaaccttgaaatcactgaataccaaaaaaaaaaaaaaacttctccagcgct

SEQ ID NO: 209105 - DNA, 721 bp, Homo Sapiens; identical to SEQ ID NO: 49301

SEQ ID NO: 209106 - DNA, 769 bp, Homo Sapiens
agcgggggtaccacactttctttatccagtccgctgttgatgggcacgtgggttgattccatgtctttgctactgtaaatagttctgtgatgaacatacaagtgcaggcatcttttcatagaatgattttttttttcccttttggtagatacccagtaatgggattgctgggttgaagggtaattctatttttagcaaactagaaatatttaatgaagtacatgaatgagtgtcttcagaattgtacacagtgagatcaaatattttaataatgagcttgttatgttgaattctattctgaccatcattcactgagattttcttttctttcttttttaaagagacagagtttcgctatgttgcccaggctggtctcagaccccttgcctcaaataatcttcccaccttgggcctcccaaggtgctgggattgcaggtgtgagccaccacacctggcccagattttctttaatatttgtctaatatctttccatctccctatattcaagcttcatgtaattttatttcctggtaattctctgagcatagagctggatttgctagttttaattttatgactcaacatgagagtttctatttttcatagaaaagttgaatctgggcctgtttcttaattttcttcttggtctttttaaatttacattaggactatgaagtcttaattgaccagccattaacatatatgggtaatatggtcgcatgatgtctcaatcagtgaatggacctgcttgtccgaatggtggccccta

SEQ ID NO: 209107 - DNA, 814 bp, Homo Sapiens
agcgggttagaagatcatgctcttacctaaagatagaaggaagcaaaatgaacatggaactacattgccctgccttttctcctgtcaaatatggcatcaggctgagcagtggcttttcctgatattccccttattcaaaacatagctttgtcttgctttcagcatttttcactttcctcagatcattatggattctgactttaatccgtaagaattatacttttatatacaagtaggttatatacctctacccatcttttctaagctttctttgcaaatctagtcccatcagattctccctgtgtaacaaccaacttctttagatttcctctaattttcttttctttatagatttatttattattgcatagtcaaaatgtcatgttttagcatcttctgtggcctgtgaatcactgctctctataaccatgggaccactcccacccatccttttcccgatctttttttggatagttgttttcttaaaaaatctggaagcaggctgggtgcggtggctcacacctgtaatcccagcactttgggaggctgaggctggtggatcacgaggtcaggcattcaagaccagcctgaccaacatggtaaaaccctgtctctactaaaaatacaaaaattagccgggtgtgatggtgtgtgcctgtaatcccagctatttgggaaactgagataggagaatcgcttgaacttgggaggcagaggttgcagttgagcccgaggtcgcaccacttgccctccagagctgaagcgaacgcagcgagactcccgtctccaaaaaaaaaaaaaaactctccaggcg

SEQ ID NO: 209108 - DNA, 768 bp, Homo Sapiens
agcgggtgtaggtcttcacttctctgcgtcctgtgctgataaagactcgccgctgtgaccctgttacctgcaagaacttggaggttcacagctaagacgccaggaccccctggaagcctagaaatgttatgtgttctcattttgcccaagatgtttggccagagcacagcataaaagattctttccaaaaagtgatactgagaacatatggaaaatatggacatgagaatttacagctaagaaaagaccataaaagtgtggatgcatgtaaggtgtacaaaggaggttataatggacttaaccagtgtttgacaactactgacagcaagatatttcagtgtgataaatatgtgaaagtctttcataaatttccaaatgtaaatagaaataagataagacatactggaaagaaacctttcaaatgtaaaaaccgtggcaaatcatttgcatgctttcacgattaactcaacataagaaaattcatactagagagtattcttacaaatgtgaagaatgtggtaaagcctttaactggtcctcaacccttactaaacataagataattcatactggagaaaaaccctacaaatgtgaagaatgtggcaaagcttttaaccggtcctcaaatcttactaaacataaaataattcatactgagagagaaaccctacaaatgtgaagaatgtggcaagcttttaaccggtcctcaacccttactaaacattaaagaattcataccgaaagagaaaccctacaaatgtgaagcag

SEQ ID NO: 209109 - DNA, 840 bp, Homo Sapiens
agcggagtgtatactggaaaaaaaatccctcttcaatggggttgaccccattcttgcttctcctcactcctcaataaaagaaaaccagcattaattagaggaaaaatgttaacaggttaagattaaaaaaaaaaaagcttaggccgggtgtagtggctcacacctgtaatcccagcaattgggaggccaaggtgggcggatcacttgaggtcaggagtttgagaccagcctggccaacatggtgaaacactgtctctactaaaaatacaaaaaattagttgggcatcatggcaggcgcctgtaatcccagctactcagtaggctgaggcacaagaatcgcttgaacgcaggaggcagaggttgcagtgagccgagatcacacccctgcattctagcctgggtgacagagcaagactctgtctcaaaaagaaacaacaacaacaaaaataatttaaaacccaaatgttcaatcaagggatgggaaaatactgaaagcattaaaagttgaaaggttcacgcctgtaatctcagcactttgggaggctgaagcaggaggatcgcctgagtccaggaatttgagaccagcctgggcaacaaagcgagaccctgtctctacaaaaaatatttataaataaaaaattagccagacatcgtagcacgcacttataaatcccagctacttgggaaggctgcagttggaggatccacttggggcccaggagataagggctggagtgagccatgattgcaccactgcaactccggcctgggtgacagagcgagaacctggttcaaaagaatacatactcatatcccaaaaaaaaaaaaacacccccagct

SEQ ID NO: 209110 - DNA, 713 bp, Homo Sapiens
agcgtggtgtattttaattcatttgcaattcctgtgtatgcaaacctgataaattctgtaaatgcttatagtatgtgtgctataacttcaaagtagatgtactgcgaccctcatgcaagctgatttttatcattatatatataaatatatacttaagaatatctgtgtgttgggccaatgaccaactttttttgacgaagcatttgtttttcgttgataattcatacactgcgtgaattttgtaattcattgtttccttccacaggtttgacagctgcagatggtctctattgtcctctgcttcattctggaaagtgcatattcaaaattgtatcagtctctgatcgatgaattaattttgttatgtctgtgctaagttggaatttactatgttcctttatacatggtgtttattgaggtttgagagtctcttgactgtgaagaatgtacactgtctggttttgacagctatttctgtattattatcattataatcttgtcaaatagaaatgttgcttctagaaaatttgcctaggaggcgaatgtggggaaggtgaagcactcaccataattccctaaattcatgttagaacatttcttgctatggttaaaaatgctgcttcctttgacctttatgaatttctgtacctttgtcattctgttacctttgtcattctgttatttgcgctaattataattttaatgtctcctaa

SEQ ID NO: 209111 - DNA, 729 bp, Homo Sapiens; identical to SEQ ID NO: 40681

SEQ ID NO: 209112 - DNA, 167 bp, Homo Sapiens
ggccggcggggacggggaaaacggagactgtcaaagatctagcaaaatccttaggcaaacattgtgtggtcttcaactgttttgaggatttggattataagatagtgagaaaatttttctttggactagttcagtcaggcgccttgggctgcttcgacgaatttaac

SEQ ID NO: 209113 - DNA, 856 bp, Homo Sapiens
agcggtgaatagctgaaagctctttaggaaaacaagtgtgcccactctcaccatttcttttcaacaaagtgatggaaatcctagccagaacaattagacaagtaaaagaaaaagcatccacattggaaaggaagaaattattttttttctgtttgtagatacatgatcttatattttaaaaagactttaccaataaactgtttgaaataataaattaattcagtaatgttgcatgaccccaaatcactatttttaaaacattccatgtacttttgaacaaagttatattatctgatattagggtgcagaattttatgaatgcctattaaattaaattgcttacatggtttaaatcttctatatttttactgctaagtacgaagcagaacaataattgaaataactgtatcaaaaccacccaaaatgatgtttgtctactggtcactatacttctatgaattttgtaaatacattcgagaatttatttcatgaaatttcatagttgttattttgacctagtaaattgtactttttaatcatatattttgtatgtataattcaaaatcaattcaagaaaagagagaaaaaacataaaactcaatatttatatatacttaaaaatacatatttaaaaatcttggttaatagatattgtcagttatgaaagggagatggaacaacaagaagtctattttaaccaatgaagacagtttaactaaaaaataaacaggaatggtacctcattcaaactagtaattgccataaattgaaggataaggactcaactccttgaaactatgtacctaaggccaagagaaaaaaagaggctgggcgctgtggttcacacctgtaatcc

SEQ ID NO: 209114 - DNA, 656 bp, Homo Sapiens
agcggtataaaagcttttgagggggacttatctgttgccccagaaatggtaatcaagactcaccaatgccaaaaatggatgctcagtttcccctccttataaagaaagttaatgataccctaataggacacagacaagacccttttataattatccattacctaacaccctctgcctgttctagatgaagagaggacaggggagaaaatcaactgttatcagtgtcctttgggctttcaaggagttccgtggttggtggccactccctcttctactaggggtgggactgttctagggcaatgtcttggagagattgagaagtcctgcaagaagagaagactgacacctgattcctcaaatgaatacttctttaattgcaggtgcattttggcattgtcccttgagaaagaattcttgaagatgaggggtttaactaaatctagagatgatggctacatttctggagctttctggagatggaagtcttgctaatagaaagtcttgctaaagatctatggaattgtgtgtcttaaaaaataatggtagggctgggcacggtggctcacgcctgtaatcccagcactttgggagggtgaggcagaaggatcacctgaaggtcaggaattcaagaccagcctgtcaacatggtgaaaccc

SEQ ID NO: 209115 - DNA, 462 bp, Homo Sapiens
  misc_feature (370)..(370): n is a, c, g, or t
aaagactttaatggcaatgattaatgtaagttttcttcctcctcccttcccttgaacacagcctcggcatcttctaagcttcagtgtttctatggctatcagagtacatatgcgagataaaacctattccacatcgctgggttaggctgtaacaagttctgggagatactgatgtaggattaagctacaactaggcattggaaacagccaattggtagctcttaagatcttggagagaatggaatcgattcctaatgtgggaacagcaaattctactccctaaaatgaaaggggctaatggaagccttatgataagagttcttcccaaattttcctcactagagcaaagtatttgtcttaggcatgtgtngtaattgttgcatgacagcatcaagatatcccatgtggggggctgtgtgagaaatcactatgcagggtgcgctcaatgtttccccttgttgt

SEQ ID NO: 209116 - DNA, 452 bp, Homo Sapiens
  misc_feature (325)..(325): n is a, c, g, or t
tattttattagagacatggttttaccctgttgaacaggctggtctcaaacccccgagctcaggcaatctgcccacttcagcctcccaaagtgctaggattacaggcgtgacaccagtgtccagcctagttttgatttataaagtcctcaataatttaatgttcagaactaacaggattcaagattgttaaaaaaaaaaaaaaggctcaaaatattatggccataaatttttataacttctggatacctgctattagatctattgatatactttatttctaaaacggtctttacaggattgcttacaaatgcttcctttccttgtnattagccctatatgcagaatcaaattccctctagcaaaatgttccattaatctgtaatgccagacttacgaagaaggtacagaaagacttgtcagggctcccctgactttctccctccccatacatt

SEQ ID NO: 209117 - DNA, 758 bp, Homo Sapiens
agcgtaggagacaggacattcctgtactaaggtggcacagagctgtcctttgcaacattctcataaaattgggcacagagttcgcattggcgcaatatttatgggagtgggagggatggggaaaataaacttaactctacaaaagcaaactctaatgcatgcaagaatcattaggttggcaggtatatgcataagtgaaaaatctggaagtgtaatggtagaacataaaacttgtattgcttctgtttcagtgcaaaaatgtactagccaatacgcttaagtgtgtggcccatgaattgaacaatttaaccttgaagtctatatccgtgatattatgtcgatttttaactgaggggaaattaactagtccagcctaaaatgcttcttttaatctgcattctgtttcctcttctagttgtgccattactagtgatcatgtttttttcccccctttaatgaaaacaataaacatctatttgagacaattaaaatccttctgggggcactggaagcacaatacggtgaccaatcttgctttcattctttttttctttttaatttgaaccatgattttgctagaaatagaaggcccagtggtggaactatcaccagggaaggaaactgacaacgtgtgaaagttagaggcaaatacataggtgtagcttggagtgctggtatctaatataccattgtattcactaactaactcaaataaacacatttaatcttgcaaaaaaagaacaaaactctccagagct

SEQ ID NO: 209118 - DNA, 763 bp, Homo Sapiens; identical to SEQ ID NO: 46769

SEQ ID NO: 209119 - DNA, 522 bp, Homo Sapiens
ttttttttttttttttaacagtcataaccttttatttcatgtcataaaatggtgacacttacttgtgttaaaaaaatttaataacaatgtaatcattatatctctgcaatcagctgaagttctaagaaaaaatgacaatgttgaaagttgtatcatcattattataaactttcatgttcagtatatgtaaactccaaagccaatttcaaaagacatttttgtgaaataccattctttaaaaaaaaggatattatatataactgtatgaatgttaaatgttttacagtaccgatttgctacattttatgtatgctgtaaaacaaataccattttaaagtatattggaattcgtaactaaagtaataaataaatgcttgaaatatacccagtagaaacttatttttattatccaatccttttgataagaaatgcctctagtgttatgtacaaacttgatcttctttgaaatgtgttgtccactgcttttctgtttctgtcacagtagctataaacagctgttta

SEQ ID NO: 209120 - DNA, 605 bp, Homo Sapiens
tttttttttttttttttactttgaaaggaaagtttattatttcccaatgttctttacattttcatttggaaatatcattcctgacagaaatagatacattataccttcgaaagcagaaagatcttaattaattaaaacagtttacatttaccttagcattaggtctggctggctaatttcaaaggattaaaaattgcacctatttgggccaactggggtcctgaataattatccagggtaaaagtataatatttcatactttatacattttgcttcatcacacatttactttccacacagtgttcaacttcacatttaaaaagcaaattagtctttaattccctaatgaatataatagtcttgatttgattgaagtttcaaatggaaaataaaactatgcggagttttcaataactgcttagcccaataaatgttgccaatagaagtttaaacacttgtttaaacagtttgcaaagtattatttcctttattctcttcaaaacaacacagacacacataaagtcacacattacaggcatctgaactggtaaaatgttacagattagtggcatgcaggtattttacatttttaagtgcaatgaaaa

SEQ ID NO: 209121 - DNA, 596 bp, Homo Sapiens; identical to SEQ ID NO: 46012

SEQ ID NO: 209122 - DNA, 542 bp, Homo Sapiens
cagtacaaaaccaatttattttacattccatcgtgggcgatgggagaagctaaataataatttagcatgcatacgtagacgtttctttttatatataaatacaatatacaaaaataaagacagtacagttttgagatttccagcagtttgaacgctcgtgacataatccccccgaccccagagacgtaagcataaacccttttttctttttccaaatactctgcagaatggcggctccagaggcggtttcaagtttcataagtcaggtaacactgtgggtttccgccttctcggacgcggggaaaggggagacaggaggcttccccttgcgcggggtgggtcggttcttctcacacgcactcgcgcctcccccaacaccaaccaaaattaattttaaaagaaccagagttcaagtttcagccccctgggtctccctctcgctgtttcttgaagagcaggtgaggcgcccttgcttaaaagggaagcgcccaggaccggaggccgcggccgaatccctccagccccggcctgggcgaggggtc

SEQ ID NO: 209123 - DNA, 466 bp, Homo Sapiens; identical to SEQ ID NO: 59805

SEQ ID NO: 209124 - DNA, 451 bp, Homo Sapiens; identical to SEQ ID NO: 46898

SEQ ID NO: 209125 - DNA, 469 bp, Homo Sapiens; identical to SEQ ID NO: 55667

SEQ ID NO: 209126 - DNA, 1000 bp, Homo Sapiens
gtttatttcttataaactatatggccttctaatattaaaacaatctgtacacattaaggacactgagtaaacattcatcatgctttttgtaatgaatgttttacttattaatcattcatccttatcttccttccctaccaaatcagagtttctacctgattttgacttccccctctccgccttctaggatgtgctttcagcacagtctttggtggctgctgtgcattctgacccccctctctcctccctcacactgactgtaagtagaagagcagcaaaatgtcgccgtatttaccaggaggcaggggctgtgtgactgggccaacctcagccctccttaccttgcacagccatgctggatgacctggctcctgacgcacacctgggccatggctgccccactctcaagctttctccatctatgagtccctgcagcttcactaccctggctggccacccaactctaactgcttcttcagccttcttcatgagcttttgctcctcttcctacctccttgaccaatcggcacccacctctgcctgcaagctctcatcatgcctatgactgcacagatcacaggggcagggctcatttgggaatcgtttgtccatctctcttattaggtcataaactcctgagggcaagaactgtgtcctgttcatgactcaacagtagacagtcaattaatgcaatcaacctcactgattatatgaactcaaaaagttacgctagactctgccttctctgttcgtccctgtgtcactgattgagtctactccactgactgactatcgcgcccaggcagaaaaccctcagttcctcctttctagcggacaatattcatcccaagtgcaaagaatttcagtaagaacatttaacatagcctgaatcagacctatgaatactttttattccaaaccttcaggaaagttaaacttcctgcctcctgaagccaccctgcttcctgaagcaccatctcatctgtgatctggtccaagg

SEQ ID NO: 209127 - DNA, 782 bp, Homo Sapiens
gattttcacatttttatatcttatatatgggaaaagccaaattaaattgaattcagattaattccagcattagactaaatgagcaaacttaagtaaatgtacaaactaggtaagtataaaaccacaggttaacaatattggagtacttttagaattacattaaaactgtcttaaatgtcctatcccaaatctaaaaaaaaagaaaatggcaggctgagataatacagaattttaaaatgcactttgtaccagtgtctatatggaaagaagtagatgctgaatacctcaagatgccaagggaacaagcaacattgggaagttgtcacaacatgctcaaagacaaactacaattgtctgctagctatttcttcagaactggaactaatacgactatccttttctgttttatactttgattagaatgttatttcctcgcttacttaaaatgtacttcaactttttaacaactgatacaataacttcataaaagtataacactaggttgaaaccttaaggaaaaattgaaattgttaatgctttcgatcttttgggaggccagtacacagacaaataaatttcttctttttatgatacaaaatgactttgtattcaatcagaagcatatacttatgttcatttcgggtctgttataattctctcattgtaaccaaattattttaacaatcgtatagtataaaaagttacccatggctattaagtgaccaaaagcgtacttttattacaactccagttgttagatcgcttctcagaatgctaactgt

SEQ ID NO: 209128 - DNA, 779 bp, Homo Sapiens
agaaatttgtggtgcaccaggtgttggaaaaacacaattatgtatgcagttggcagtagatgtgcagataccagaatgttttggaggagtggcaggtgaagcagtttttattgatacagagggaagttttatggttgatagagtggtagaccttgctactgcctgcattcagcaccttcagcttatagcagaaaaacacaagggagaggaacaccgaaaagctttggaggatttcactcttgataatattctttctcatatttattattttcgctgtcgtgactacacagagttactggcacaagtttatcttcttccagatttcctttcagaacactcaaaggttcgactagtgatagtggatggtattgcttttccatttcgtcatgacctagatgacctgtctcttcgtactcggttattaaatggcctagcccagcaaatgatcagccttgcaaataatcacagattagctgtaattttaaccaatcagatgacaacaaagattgatagaaatcaggccttgcttgttcctgcattaggggaaagttggggacatgctgctacaatacggctaatctttcattgggaccgaaagcaaagcaggttggcaacattgtacaagtcacccagccagaaggaatgcacagtactgtttcaaatcaaacctcagggatttagagatactgttgttacttctgcatgttcattgcaaacagaaggttccttgagcacccggaaacggtcacgagacccagaggaagaattataacccagaa

SEQ ID NO: 209129 - DNA, 773 bp, Homo Sapiens
caggagggcctgatcagcagtggccaacagtatccagtgcaacaccagaaccagaggcaggagaagtgtcccctccagtcggtgcgggtgtcaacagcaacagctggacctttaaatacggaccaggcaaccccaaacaatccggtcccggtgagttgcccgacaaattcattatcccaggatctcctgcaatcatctccatccggcaggagcctactaacagccaaattgacaaaagtgacttcataaccttcggcaaaaaggaggagaccaagaaaaagaagaaaaagaagaagggtaacaagacccaggagaaaaaagagaaagggaacagcacgactgacaacagtgaccagtgaggtcctcaaatggaaacaagccacttagccagtttttgtaataatggcaaatctctcccatgtagcaattccctgctcctttttcctatctacatgagccctcttagagacctcagaaatctgcagaaagttccctgtgtctgtctagaacgcatttaacaggttttgtcgtaaaagctttactaagtctggtgttaactctttctctccactctggcttgttttcagaacctaaaaagcagacccaagtttcctttctcctccgccgcaaaggagaggcttcccagccccgccagtgagaggttggactctctgcccctgtgctccggggatcctgtcttgatgacacttgcaggtcaggctgaaaagttttgagattgagcagcttgggagttgtggccactgggtatgctc

SEQ ID NO: 209130 - DNA, 871 bp, Homo Sapiens; identical to SEQ ID NO: 48134

SEQ ID NO: 209131 - DNA, 829 bp, Homo Sapiens; identical to SEQ ID NO: 53153
  misc_feature (698)..(698): n is a, c, g, or t

SEQ ID NO: 209132 - DNA, 766 bp, Homo Sapiens; identical to SEQ ID NO: 53670

SEQ ID NO: 209133 - DNA, 763 bp, Homo Sapiens
atccttgagtaatagaattttgttttagatttatttgaacatttaccatcacaattaaattttaggtcaacaaccagccttgagaaatccaaataccaatttgactataaatatagtaatacgtttaactgcaataactatagctataagtgcgtaccaaaccatgttttttccaaatgaccttaatttcttggcactacccatgttggatacctcatttgcttccccaaagactgtgcccaaaatttctgttgtttctacaatgattctgcctgccaacaaagtctgaaaatctctcaagtttgttataaaaacagcacagttagaacatgatgacattcctggagggaaaaataagtccacttatttgtttctaaaatgcctgtatcccaagcaactagaacacatagttggctatacttaatgaggagtcaagacaaaccattcaattcttctaaaaaagtaagaaagtattcaaagcaccagagtcacaatgttgagctcaggtgcaattttctattcactttacttccagcatggtcgggttaagagtggactacatagcttgaagcggatttcgttgagattcgttgtaattgaatcaacaactgaatgagcatgcctaagtagtggctccagagagtctgctttcagattttcttgccagctttgacccaagattaccctgggtctgcgagttttatcacctgctttatcatttgattacaagtatagtataactgtatttccttgtgggatagac

SEQ ID NO: 209134 - DNA, 785 bp, Homo Sapiens
gtgcactgctttgcaggcatctctcgcagcaccacgattgtgacagcgtatgtgatgactgtgacggggctaggctggcgggacgtgcttgaagccatcaaggccaccaggcccatcgccaaccccaacccaggctttaggcagcagcttgaagagtttggctgggccagttcccagaagcttcgccggcagctggaggagcgcttcggcgagagccccttccgcgacgaggaggagttgcgcgcgctgctgccgctgtgcaagcgctgccggcagggctccgcgacctcggcctcctccgccgggccgcactcagcagcctccgagggaaccgtgcagcgcctggtgccgcgcacgccccgggaagcccaccggccgctgccgctgctggcgcgcgtcaagcagactttctcttgcctcccccggtgtctgtcccgcaagggcggcaagtgaggatgcagtccagccgtggctccccacttccgactggctcccttcgggggctgtctgcgccttccacgccccccaggacgggccagaggctgggggagccccgggggcggcctgaacccttgcctcccgcgcccgccctgctcgtccgcgtctgcagtcagcgtccccaacctgtgcagtctctgtgtccggggccggcctgctgcagccacctggtgccttagtccttgggcttgggggagggggcccacccttaaagggcggcgggcagggcacggagggagagtggagggtttgacgggctggagggtattaaagagacaccagaagaa

SEQ ID NO: 209135 - DNA, 663 bp, Homo Sapiens; identical to SEQ ID NO: 1134

SEQ ID NO: 209136 - DNA, 812 bp, Homo Sapiens
gaacacgctcaggaggtgtatagtgttgattggagccaaaccagaggtgaacagcttgtggtgtctggctcatgggatcaaactgtcaaattgtgggatccaactgttggaaagtctctgtgcacctttagaggccatgaaagtattatttatagcacaatctggtctccccacatccctggttgttttgcttcagcctcaggtgatcagactctgagaatatgggatgtgaaggcagcaggagtaagaatcgtgattcctgcacatcaggcagaaatcttgagttgtgactggtgtaaatacaatgagaatttgctggtgaccggggcggttgactgtagtttgagaggctgggacttaaggaatgtacgacaaccagtgtttgaacttcttggtcatacctatgctattaggagggtgaaattttcaccatttcatgcttctgtgctggcctcttgctcgtatgattttactgtaagattctggaacttttcaaagcctgactctcttcttgaaacagtggagcatcatacagagtttacttgtggtttagacttcagtcttcagagccccactcaggtggctgactgttcttgggatgaaacaataaagatctatgaccctgcttgtcttactattcctgcttgagatacactactttggtcagaaacagaggatgttggctgaagaactgcctaacagcaaataaattaactatggaaaacatagacattatgctttatatgctattcaagatttcaaatctttccaatttaccctggaatcagtttgagggagctgataagacttta

SEQ ID NO: 209137 - DNA, 922 bp, Homo Sapiens
gaagcgcaatataggttacaaatgctgctgccaactgtcctggccaaatgactctgcatcacaaacctttccttgcatgtggaggggatggatttactcagtccaactttgatggctgcatcacttctgccctatgtgttctggaagctttaaagaattatatttagtgcctatatccttattctctacatgtgtattgggtttttattttcacaattttctgttattgattattttgttttctattttgctaagaaaaattactggaaaattgttcttcacttattatcatttttcatgtggagtataaaatcaattttgtaattttgatagttacaacccatgctagaatggaaattcctcacaccttgcaccttccctacttttctgaattgctatgactactccttgttggagaaaagtggtacttaaaaaataacaaacgactctctcaaaaaaattacattaaatcacaataacagtttgtatgccaaaaacttgattatccttatgaaaatttcaattctgaataaagaataatcacattatcaaagccccaaaaaaaaaaaaaaaaaaaaaaaaacataaaaacaaggaggaacacaacaaaaaagacacctaaaataaagaggaggggggacgcaccgtaaaaaaattgacccccggggggcccccaccatgaaaaagcgcaccaaccaagctagtttgggaaaacagagagggaggcaccaatagaaggagcgagcgacacaaaaaccgccgcagcgggcaggcagccgccgaaaaaaaacgcggccgacgggagagaaaacgaagctcagctggccagatcgcttgagaagaacgcccaacactcgcgggggggggacaaaaaatggaggaacaaacacccacaaggaaaagccacccggaggaacatagt

SEQ ID NO: 209138 - DNA, 496 bp, Homo Sapiens; identical to SEQ ID NO: 46856

SEQ ID NO: 209139 - DNA, 669 bp, Homo Sapiens; identical to SEQ ID NO: 50948

SEQ ID NO: 209140 - DNA, 899 bp, Homo Sapiens
ggggctgccgcccgtgtgctcggcgcgctctcgggagccgcccgcccgctggtcccggagccttccgggagtgaagcggtgccggcagcgtccaggccgcgctctcgggcaccctcacctgccggcgcccggccgcttacccggcatgggcgtgcgcagggtagggtgctggtgacctggggggacctggaggcagacgggcgagaactcggcctgtcctgctgccgcaggcacagccgctgggagcgcctcgagaccccgctgcggggcgccggctccatggctgaccgggctcggggagccggtctatggactttccgaagacgagcccgggagtccatgatgcatgtcacgtctgggtcgcgcggctggagacccgggactgcggagaagccggatcgtttccccctggaactttctctctcatgattgtgtggatcagcaggcgctcagaagcctgtgcgtgcttatcccggcgggaatgggggacacgctgcgtgtgtccctcccctcgttttgcaaagtctacggccaggattgtggattccggagcctcggtgggggaggtgttcaaggctggtggcaggtgctccttggaaacttggggaggaagcttgcagccctgccattttttcctcccgaggattcaaagcccggcacctccggggtgggtggggagaggaaagcttaattgatctctttaattattagagcgactgaataagtccacgcctcccaggccggtcggtttcactggacaagggcttttgtctttaccttcacctctcttctttccgtgtcttccattccccccttttgaaacagtccttgctaaattaactgcctagtcctctctcgaccgagccacgctcgggtcctatgggattgttggtctgcca

SEQ ID NO: 209141 - DNA, 713 bp, Homo Sapiens
gatgtttctttaatctttagataggaagagaaagaagaagccatctttagttgtatatttgccaaaagtgacttcaaaaataaataaatggttttggacatttagattttaaatttaaatttttttaaggaaaaattattttctaaatagaaaattaagcatgtagcatattgccaggcatttataggccccacaggtgcacattcactgcactgtgaggttaatcaggttcttggaactcccctccagtgccactcggcagtgattttagcagaagagtcactctacgggaatgtttgagtgccacgtgacgtccagagtgacgttctacatgacactcaacattttttgagccacctcataatttgagccgtgttgagagttaatagattgtttttgtgcaaagaattcgcaggtgaaatatgctatatgtattactgcagttttgtgggaagttgattatgacacagcagagactagatcacagagggaaccagataattctagaaatactagtcttagttatttagtgtttatagaatgagtgatattttgaataaggggtaattttggataattgaagccactggttttttaaccaatgttatgtatcagaatcacctcacaaagcttctgaaaaatacaccacaaagtgtggctcacactttgggaggccgaggctggaggatcacttgaacccaggagtttatgac

SEQ ID NO: 209142 - DNA, 651 bp, Homo Sapiens; identical to SEQ ID NO: 50335

SEQ ID NO: 209143 - DNA, 968 bp, Homo Sapiens
ggctggtctggtccggaaggtccttaggatgacagtttctacctgtatcacccaaggtgcagtttgatgtagtagtgtcagctttttccttaagtgaactgcccagcaaggctgaccgcactgaggtagttcaaaccttatggcgtaagacagctcatttcctggtactggtggagaatggaacaaaagctgggcacagccttctcatggatgccagggatctggtccttaagggaaaagagaagtcacctttggaccctcgacctggttttgtctttgccccgtgtccccatgaactcccttgtccccagttgaccaacctggcctgtagcttctcacaggcgtaccatcccatccccttcagctggaacaagaaaccaaaggaagaaaagttctctatggtgatccttgctcgggggtctccagaggaggctcatcgctggccccgtatcactcagcctgtccttaaacggcctcgccatgtgcattgtcacttgtgctgtccagatgggcacatgcagcatgctgtgctcacagcccgccggcacggcaggtatggggggtgtgaccaaaatcagtgggatgtggcaggaagctgcagcccacgccagcatctgtttccacagggatttgtatcgttgtgcccgtgtcagctcctggggagatcttttacctgtgcttactccgtctgcgtttcctccatctacggctcaggatccctctgagagttgatgacggatgtgttaccaacgtattttcttctatcgtgccctgccagggctgaagctgcctggtatccaggagggggaatgctggtatccccattttgtctgcgcttcgtccgacgactttctaactaactaccatcattcacattttgaagaatggaccactaacccacacccccactcccccacaacgcacgcgggggcccccaaagaatccccccggggcccctttcccaccca

SEQ ID NO: 209144 - DNA, 745 bp, Homo Sapiens; identical to SEQ ID NO: 40884
  misc_feature (727)..(727): n is a, c, g, or t
  misc_feature (745)..(745): n is a, c, g, or t

SEQ ID NO: 209145 - DNA, 729 bp, Homo Sapiens; identical to SEQ ID NO: 48339

SEQ ID NO: 209146 - DNA, 670 bp, Homo Sapiens
cgcgaccgcctcagtcacttcgcccagagacccggacctggtccgctggggagcaggcggccataaaccccctctctcccggttccctgacgccgcggcaggagctgttacaaacaccctgcggttggtctccgatgcccttcagtgaggtggggacgcctggaccctggtgagcgaaccccaagccaccccccacccaactcagtgtcttcgccggcccccggcccgtacgcctgtctggtcgccatggctgaaaacacagagggggatctgaactccaacctgccccacgccccctaccacaccggggaccctcagctggacacggccatcgggcagtggctccgctgggataaggtgggtacctggtcagcccggcaaacgccgtcgcctcccccacacagtctgctctttcctgtgcccacccagcgccccgcgggctgcagaggagatggctcgggacaccgagcggggggcagcggagcagggcgttgccaacccacttatgcgtggggttgctccttcggactgccagagccgggcggcaacatctgcatcgcttccttctgcagtgctctcaattgtaacctcccttcctcttctttaccctctttcctttcaagtgctgtcttccctctttcttcaaaaaaaaaagtaaaaaaaaaaaggg

SEQ ID NO: 209147 - DNA, 826 bp, Homo Sapiens
  misc_feature (216)..(216): n is a, c, g, or t
ctggactgaagccggggcagtcccaagccggaagtcccctgcagacgtgttccagactggcaagacaggtgccactacaggagagcttctccaaaggctgagggacatttccacagtcaagagcctcttgccaagcgacaacaggaggccatgcgggagcctcggtccacacattccaggtggaggaagagatagtgtcgtgagctggaggaacantgggaaggaagcccgcggggagagaggaggagagaagtggccagggcttgtggactctctgcctgcttcctggaccggggccttggtcccagacagctggacccatttgccaggattggcacaagctccctggtgagggagcctcgtccaaggcagttctgtgtcctcgcactgcccagggaagccctcggcctccagactgcggagcagcctccagtgctggctgctggcccacagctctgctggaagaactgcatggggagtacattcatctggaggctgcgtcctgaggagtgtcctgtctgctgggctacaaaccaggagcaaccgtgcagccacgaacacgcatgcctcagccagccctggaggctggatggctcccctgaggctggcatcctggctggctgtgtcctctccagctttccctccccagagttcttgcaccctcattccctcgggaccctcccagtgagaagggcctgctctgcttttcctgtctgtatataacttatttgcctaagaactttgagaatcccaattatttattttaagtgtattttttagaaccctctatttacctgcgaacttgtgtttataattaatggaggaa

SEQ ID NO: 209148 - DNA, 525 bp, Homo Sapiens
  misc_feature (440)..(440): n is a, c, g, or t
gtaagcaacaggacatatccagcctcggacatgtctgtatgatccaaggtacccaaagtcagacagagtaaactcaagcctggcactggctttctgccgcttcatgtgctttggaaaaagcaggagaagcaatagcagcaggagtccccagcagctggagccgcaagaatgaactgcaaagagggaactgacagcagctgcggctgcaggggcaacgacgagaagaagatgttgaagtgtgtggtggtgggggacggtgccgtggggaaaacctgcctgctgatgagctacgccaacgacgccttcccagaggaatacgtgcccactgtgtttgaccactatgcagtgggcacgtattcctctgggacgggtcgttgggtaactgatcagcaggaggttaggccgaagggcacgggtccgcagaggacaaatacgtggtnaacatgatgtatcggactacggttatgtcgatcttggtgcatcgggtcgtggatccgtgcctccttggaccatagtggttgacag

SEQ ID NO: 209149 - DNA, 457 bp, Homo Sapiens
  misc_feature (10)..(10): n is a, c, g, or t
tactacaacntgccttcattttaagtcagtgagatgccatcagtgagatggcagtaaaatgttttccttttgtcaataaaaacagccatttactgccttctcgaaggctccaatctgctattttcctggtttctcattttgagggcaataggaaatgcaacaaactccaggactgctgctcccagtcaatgcccttttaattgaaataaggctgccccaccagctaagccagcttccaacacagcccggccctgccttcctggatttcctggcaaagccaaggccttctcacaccgcactcagggtgatctgagcagaccacaggctgttcatcccattgggttaaaaaagtacttgggagacttagttgcagtaaaggtcttaggttttgttggggttttttttggtggggaaagtgaagggcatctgcacctgaaatggaaataccaggaaagcc

SEQ ID NO: 209150 - DNA, 379 bp, Homo Sapiens
cttatttgcaaaaaaaaaaaatgtatcaaagagaagaacaatccaaacctaaagcaaacagaagggtggaaataataaagattagagcagaaattaatgaaataggtaatagaaaagatgtaagaagacagacaaaactgaaagttggtcctttgaaaaaaaaaatcaacaaaatgacaaaccttcagaccagccaagaaaaaagagagaaggctgaaatttctgaaagcaagcatgaaagagggaaaacaagagactattatgagtaactatgtgctaatacctgaggtaacttagatgaaattgacagattgctagaaagacataaactaccacttctaatcagtgttatagttgagattctatccagggcaatagg

SEQ ID NO: 209151 - DNA, 574 bp, Homo Sapiens
tacaaaaaacaattgttatttgtgtacttttaaaacctcacagtaatattttcacactaccttcttggctgaaagttcacactcggaattccagagcagtccatggccaggcccactgggctccccttgctctctccttggctttggtaaccactggccccagggactcagcctgctttcctatccatcccctcagtagctgtcaccatgcaggttaccccttctgtttcttctaccactaactccatgtctgactgcaagtgaaaggaacagaagcccaaacctttgggttttaaggagtttattgctaatctgtaaaacagaaagagacaggagataagcatgacaaaatatagggaagaaatgacttttgcctaaacttccaaactgtgtacaattgaagcctctgctttatagctcttagcacacctctcaaataagaaggcagtactgggaaggctctgaacctgtggcagaaccactgatagctgtggagctattccaaggagtctgggaatcagggggattatcaagatcattgttagaataaattaatcttactgtatatatagca

SEQ ID NO: 209152 - DNA, 1000 bp, Homo Sapiens
ggctactgtttccacctcacgtcgccgcccctttgcttatggactcttgcagagttggattgagctcggactgtgtgacatagtggttgttgcagaagccccagggccactttctgactagtaccttgggcacctgacgtcatccctttgagtctcagtgtcctcttctgtaaagtgagggcgctttacctgaggggattgctgtaaggttggaatgaacctgcatgtgtgagtcatgtgggaagggaacagtcaatggggcctggggttctcttggagagctggtaaccagcctcgtccctgaggcaacagccagagggcgcctgtagtttccccacgcatggctgttagcagggcctctgcaggatctcctgtgggaggtccctacttctcactacaatctttagggcctttggaggatttcctatggaaggtccccacttctcaccacaacattctgggttaaaatgtccttggtaggaagatggggctgaagctagattttcttgcttgcattacaagcttctgaaccaaggacttcaatgtcacctggacttggattcacatcccagctccttcccttcctagctttaagactgtgtaaccttgggcaaatcccttaaccgctttaagccttaactgtttcatctgtaaaatgggactaacagtacctaccttccacaagcgtcaagaattaaatcaggcctggcgcggtggctcacgcctgtaataccaacaatttgggaggccgaggcaggcggatcacaaggtcgggagatcgagaccgtcctggctaacacggtgaaacaccgtctctactaaaaatgcaaaaattagctgggcgtggcggcgtgcgcctgtggtctcagctgctggggaggctgaggcaggagaatggcgtgaacccgggaggcggagcttgcagtgagccaagatcgtgccactgcattccagcctgggcgacagagcgagactccatctcaaaaaaaaaaaaaaaaaa

SEQ ID NO: 209153 - DNA, 594 bp, Homo Sapiens
cggcggactactggccatggagccgcgcacaggggacgccgcggaccctagggggagcagaggaggccgcggccctccccgctcgcgggccctagcgcccggcagctcctggcgcggttggacgcgcgccccctggcggcgcgagctgcggtcgacgtggcagcgctggtacgcagggcgggcgccacattgcgcctgcgccggaaggaggctgttagcgtgctggactctgcggacatagaggtcacagacagtcgcctgcctcatgccactattgtggatcaccggccccaggtcggggacctcgtgctccacatcaacggagagtcaacgcagggcctcacccatgcccaggccgtggagcggatccgagctggaggcccccagctccacctggttattcgtcggcctctggagacccaccctggcaagcctcgaggggtgggagagccccgaaaaggagttgatcgcagcccagatcctggagggccggaggtaacggggtctcgcagcagcagcacttccctagttcagcaccctccatcccggacgacgctcaagaagacccgtggcagcccggagcctagtccagag

SEQ ID NO: 209154 - DNA, 744 bp, Homo Sapiens; identical to SEQ ID NO: 40285

SEQ ID NO: 209155 - DNA, 800 bp, Homo Sapiens
catgtagccaccttatcctgcacaggtctgtggcaggccgtgagacggtgaccagagaagcagtcagcactcacggcccctgccctttcagagtttacgcttgcttggaagcctccagaatggggataagcacaagacatttatgctgggcttcatccaggaagctctggtggaaggaagagaaagcagcccacacagcaaggttcaggagaagattcccatgaaggacaactggggttcagccccatccagcagatgacacggagccggcctcggaggtgtcctcaccgtgggacactggcatctgagctacctcagggcgtagccggccgatgttcccagcctccccctgggcacagccagcccaggccaagtggtctagccccggcccccactcagcatggcccaaaaaaggagcaaaaagcagaaagctcaaggaccctcagaatcaagttttgcagaaagacacaaagctcaagaacagaggtgcaactaagggaacacaccctgtaagactgcctcccagacacaccactgcagccagtgaattgcactgtttagactttgacttcagggtcagggtgagctgatgagactggccccttgatgaagtaagaaggccaccaaggagtgagagcggctgagtttgagccctgcctctgccgtctgcaactctctcatcttgagcaggtccagccccaagtgtgggcctcagaatctcccatccttgaggatgagagcaatcaaatccagctccactcttgcagcccacggcttcccctgcaactgattggccatcg

SEQ ID NO: 209156 - DNA, 585 bp, Homo Sapiens
aatctgataaattgtgtaacctagtctcttctctacatggtgatgcatttcagcaattataaattaatataaatgaccaaaagtaacttaaaagcatgagatattgctatttcattcattgggcacatatcaaattataattttgattttaaatggtcacccatgtatttgttgccaagcaagtaaaaaaataccctaacaaacctgatgtgggtgggaggggcatgtcagtaagtggtgtgttcaatgtgtatgtttcatatgggccctttccaggagtttgcaaaccttgtcatacccatatgcaaaactgtgtttccttgcattaaaccagtgaagtttgggttctcttttgtgctatcaatcagttgtaaaatcagagcttcttatatattctactggaataactgcatcttccactcagtcactacaaaaaagcatagtttcagtttgcatgaatttttttttttttcttcaagggtggtgcagataaggatccatttcggggatagaatggtatttttaaagtcatttttttttcttgaaatggatatgtacaaataaaataacgggcaagacaggaaa

SEQ ID NO: 209157 - DNA, 756 bp, Homo Sapiens; identical to SEQ ID NO: 45997
  misc_feature (756)..(756): n is a, c, g, or t

SEQ ID NO: 209158 - DNA, 828 bp, Homo Sapiens
ctcctcctggtgtctttcgtcctctcctccggcgggctcctgggttttgtgatcctcctcaggaaccaagtcacactcatcggcttcaccctaatgttttggtgcgaattcactgcctccttcctcctcttcctgaacgccatcagcggccttcacatcaacagcatcacccatccctgggaatgaccgtggaaattttaggccccctccaggacatcagattccacaagaaaatatggtcaaaatgggacttttccagcatgtggcctctggtggggctgggttggacaagggccttgaaacggctgcctgtttgccgataacttgtgggtggtcagccagaaatggccggggggcctctgcacctggtctgcagggccagaggccaggagggtgcctcagtgccaccaactgcacaggcttagccagatgttgattttagaggaagaaaaaaacattttaaaactccttcttgaattttcttccctggactggaatacagttggaagcacaggggtaactggtacctgagctagctgcacagccaaggatagttcatgcctgtttcattgacacatgctgggataggggctgcagaatccctggggctcccagggttgttaagaatggatcattcttccagctaagggtccaatcagtgcctattcttccaccagctcaaagggccttcgtatgtatgtccctggcttcagctttggtcatgccaaagaggcagagttcaggattccctcagaatgccctgcacacagtaggtttccaaaccatttgactcggttttgcctcccctgccgttgtttaaacttacaa

SEQ ID NO: 209159 - DNA, 627 bp, Homo Sapiens; identical to SEQ ID NO: 52757

SEQ ID NO: 209160 - DNA, 739 bp, Homo Sapiens
tgtaatttggggaacaagcagggcctggagctatctccatcttcagctccagagtccttggtttctgtctgagaacaaatggcacagcatccctgccaggatcaggaacaaaaggtagaaatgacctccaagcagcagagaagcacatccatagaagagacaatgagaccacaggaaaaacaggtaaccatcactgaaaccctgtgggaccaggtgctgacagtttttaaggatatacaaaaggagctgcaggaagatgctcggattcgagggatgagcaactgctccatgacacccatgacatcagcacccaggactggaagcataaggcctccagattccttgatgaccccaaagttgagaagattgcagttcagctctggagagcagccatcaggaggccgtatccacaacctgaagacacagctcttcagtcaatcagcttactaccctggaccctaactctacaatcaaggaagaaggacatctctgcttccgccagcacagcttcagttggggaagatattagcagacatcatcactgaacccagaagagagggtggtgcccatgagtggagatgccagggtctatggctgaaactgggaacttggaaatcaagtgagacccaagcaaggaaaccaactgccaaagcaaggaaaccagcttggtttggcaaacagctgatgaaataaatgtgaccgtaggaaccaaataaactcccaaaaacaaaaaaaaagg

SEQ ID NO: 209161 - DNA, 862 bp, Homo Sapiens
cgtcaccccatcgagaagcgcggctggcctggcctgggtggctgggcgtctgcaccccgagagagctcccccgcgcgcgggcgcctggcccgggcaggtgggtgcggagcggctctgggggccccagtccccggcagctcttgtcccgcgcgtggtttttgtgaagacactgtgggcgggatgggcgcagggtttcggtagccttggaactctcgccaaagaaaatcgcgggcgccggtgcctcagccgtcctgcctgagagactcgcctccgagaggaggaagggacagaccaaagcagtaaatcggccatcctgcagaggagccgccttctgctgtctgtgggtacagccagaactcccatacgcgggcgctgaagtgccaaaccttcgtgcgtgttctctagtaattaggtgcattgttttcgaaaggcacataacaggaaagtgggctaactcccaaataagggccagaaaaaaaaatatacacaaagaaaaaaaaaacaacaaaaaagacataatatagaacaaaggcgacgaaaaacaccacaatagactcaaagatgtgaacgagggaaaaccaggagaaacaaaagaaaccacgatgcacaaacaaaaagagaaaataagaaatagaaaaaaggcaataaaaaaacagatgggaacagacaaagaaaacagtgcacaagattaatagaagaacactgggaaaaaaccgtgacaaaacacgtatgataaaacgatgagaaaaaaagatgaaaggagaaacaaacaaaaaaaaagataaaggaaagtaagaagaccaaaaaagaggacaaacaaaaaaccaatagagaaaatttagaagaggacaaaaacagagca

SEQ ID NO: 209162 - DNA, 730 bp, Homo Sapiens
gttcacaggcacagaatgagacctgagggaggaccccggcgtcggcggcaggaaaggcccccgccagtgctgcctgcggcgcgccgcatcacttataaggaagaggaggacttgacactccagccccgttcctgcctccagtgctcctgagtccctagtaggcctccaggagggcaaaagcaccgagcagggtaaccacgaccagcttaaagaactgtattcggctgggaacttgacggtgctggctactgaccccctgctccaccaggacccagtacagttagactttcacttccgccttacctcccagacctctgcccattggcacggccttctctgtgaccgtcgactcttcctggatatcccatatcaggccttggatcaaggcaaccgggaaagtttgactgcaaccctggagtacgtggaagagaagacaaatgtggactctgtgtttgtgaacttccagaatgatcggaacgacagaggtgccctgctgcgggccttcagctacatgggctttgaggtggtcagaccagatcaccctgccctccctcccttggacaatgtcatctttatggtgtatccccttgaaagggatgttggccacctgcccagtgagcctccttgaacatgcttattccaacgctttgaggggctggaagccttgacacatggaatcaggggcccgggatgtgattcaggacactttccatcctaggaataaagggta

SEQ ID NO: 209163 - DNA, 866 bp, Homo Sapiens; identical to SEQ ID NO: 41561

SEQ ID NO: 209164 - DNA, 555 bp, Homo Sapiens; identical to SEQ ID NO: 40026

SEQ ID NO: 209165 - DNA, 872 bp, Homo Sapiens
ctgacccacttccgttacttgctgcggaggaccgtgggcagccaggtcggtgagggatcccaaaatggctgggcgaaaacttgctcctaaaaaccattgactgggtagcttttgcagagatcataccccagaaccaaaaggccattgctagttccctgaaatcctggaatgagaccctcacctccaggttggctgctttacctgagaatccaccagctatcgactgggcttactacaaggccaatgtggccaaggctggcttggtggatgactttgagaagaaggtgaaatcttgtgctgagtgggtgtctctctcaaaggccaggattgtagaatatgagaaagagatggagaagatgaagaacttaattccatttgatcagatgaccattgaggacttgaatgaagctttcccagaaaccaaattagacaagaaaaagtatccctattggcctcaccaaccaattgagaatttataaaattgagtccaggaggaagctctggcccttgtattacacattctggacattaaaaataataattatacaaaacaaaaaaaaaacatacaataacaaagacaagaaaacaaaaagggggcacgacgcccaacgaaagaaccaccacgaaagaaaggggcaccacgaagacaaagcgacccagaaacaccacgcagtaaaagcaggaacaccgggggcggcccccaatgccaagtaggcaccacgctaagcagacacacaagactaggaggccagacgccactcgcagacacggggacgacaggcgggcaccacccgtgcggcaccgggagcacactaacgggcggcgcacccacgcgctaacgacgcgaggacgaaaccagggggacgaagaca

SEQ ID NO: 209166 - DNA, 776 bp, Homo Sapiens; identical to SEQ ID NO: 44807

SEQ ID NO: 209167 - DNA, 766 bp, Homo Sapiens
cgagcgttttgtccacctgccaggtgtacaggagtgggttgggggcaccacgcagagcatcttgtacctcgcgcacacctgctggtactggagctggcttgcgtttccctgtgccacacgcagatcctgcactgtactgtccagtcaactgacttcagcaaagatgtctgggttcagcagcgagttgctgtgtgaggccaccataatggaggtgatatcggcctcagtgctcatcctggaggtggagaagtggtcagagtcctctgtggtgaaatggccctacaccaaagtgggagacattcagaatcgaggcgaaattggcctcagtgctcctcttggaggcagagaagcagtaggagtcggtggtgaaatggccctgtgtgaatgtggaagaccagcagattggaggtggaattggcctcagtgcttgtcctggaggtggagaagcggtcagagtccttggtggtgaagtggccctgcacaaaacgttgctcccccttggccggtgaaagaataaaagaaagctggccacttgcatttccgtttcagtttatagaatacatgttttggaaatagtatcttctagatctgtctttttctcttctgatttaacttagtaaagctaagttttatctcttaaaaaaaaaacagagagaaggagaaagaaagaaagagaaaagagaaaaaaaagaaaaaaaataaagagagaaaagagaaagagagaaaggaagaaaagaaagggggggagagaggagaagagaagagg

SEQ ID NO: 209168 - DNA, 696 bp, Homo Sapiens
caaagtcgaaacaaaatgaatcagtacactcaggttccgtattgcaactttgtcatcacctgcggtctcctgacctgcagtaagcaggggccatggagagtgccaagcagcattctgtctgggagggctttgagcactttaaagatacagttttattttacatttcccaccatcctcataacctggcttaggccacaggcaccctgctagctttaagccggacagacctgtcacttgctaagtgtgtggtctctgagcctcagctgatctttctgggaaggcaggaatggtaaggagactcctgacttcaggggtcattgtaagtgctagaaatacataaagtgcaggccgggcgcggtggctcacgcctgtaatcccagcactttgggaggccgaggcgagcagatcacgaggtcaggagatcgagaccatcctggctaacacggtgaaaccccgtctctactaaaaatacaaaaaaaattagccgggtgtggtggcgggcgcctgtagtcccagctactcaggaggttgaggcaggagaatggcgtgaacccaggaggcggggcttgcagtgaaccgagatcgcgccactgcactccagcctgggtgacagagggagactccgtctcaaaaaaaaagaaagaaagaaatacataaagtacctagcaccggtctggatattgttaacattcctta

SEQ ID NO: 209169 - DNA, 725 bp, Homo Sapiens
aaataaagaagggtactgtggacagagtatagtgaggagggcttgggtaagggaccaggctatgaaccctttaggtcatggtaaggagtttggattttattcagataatgatcagaagcctcagagggtttgagcaaaggtctgacaggacccgacatccgttttaaggtattttctctggctcctgtgtggacaatagattgtcacctcttccagcgggagaggtggagatgatgggcatagtctggggtgatagtggtagatttgctcttgttcctagtgtaatccttgaaattagtggtgaaactggctgtggatggctcttgcgttggaaggcctggaagtgtgaattacatacatgagaactccaggcatgacattcttcgggtgggaactgttgtcgcctgctctatcttgccagcttctctgtaccaaagttctttggaaactttgagcctctctgaccttttgacccttatgtgcatgtgggagtcctggtctgtgatcccttgacttgattcagggggccccttagctccatctgtgttccctggagtcagcactgtgccaccccccgccaattcttttctgtcatgggcagaactgcagaggctgcatccttggggagctcagaagctctccaaggcgctgagtggaggtgccacctgtatcttttgtttccgcttctggagacccttttgtcccttgctttttgggcctgatca

SEQ ID NO: 209170 - DNA, 735 bp, Homo Sapiens; identical to SEQ ID NO: 50298

SEQ ID NO: 209171 - DNA, 841 bp, Homo Sapiens
gtaataaagcaatatactgcctctggactcttacagcaataataaaagaaatctttaaagattcatgttcacagaaaacagaaattctaaagcagttcctgactcatttcgacaccatttttgaagtgttttacaattccttattctctcagcattttgaaaactgccgggatacttctaaaatagtaaacatcctgatgtgtttcctggatttgcttgagcttctcatcgcctccagaatccacctgaagttacatttcacttgccagaggattttatttttgaaaccatcttgcatgctagaagttattacctggcctattcaggcttttgttaaaaggaaggtcatcatattcctcaaaaagtgccttctctgtaaagtgggtgaagacctctgtcgtggatctgtgcctgccttaatgccgccagaccatcatgtagcggtggacatgctggctttagctaatgctgttttgcaagctgtgaattcggggttgttgaagacactgtctgtttatgaaaaacattccttttttggaggtgatgaagttcaacctgaatgtgaacttatcactagtccagatcatgtgatccttagagcagcaagcttagttataatgaaatccttagaaatcaagtttcaaaattattcttcagcaagtgaaatgaaagttgacttacagaggttcatgtctgagttactgaccttcttaaagcctcatcttcagccctctctgcaattacacaatccgtgcaaatggctgtctcgggttacatagaacaagacgatgacatgctggaggcctgcaaggcatcactgggcatctacttaacattgacc

SEQ ID NO: 209172 - DNA, 661 bp, Homo Sapiens
gaacatgcgatatacacagcagactagccatgggcacaagagcagcctccactgggaagtctaagagtccatgccagacctggggggaagggctctgaaggagaacccagttgacttgcctgccacagagcaaaaggagaattgcttggattgctacatggaccccctgagactatcattattacctcctagggccaggaagccagtgtgtcctccgtctctgtgcagctccgtcattaccataggggacttggttttagactctgatgaggaagaaaatggccaggggaaggaaaggaatctctggaaaactatcagaagacaaagtttgacaccttgatacccactctctgtgaatacctacccccttctggccacggtgccatacctgtttcttcctgtgactgtagagacagttctagacctttgtgatagaactaaaatgctctctgtactctagtctcctgcctcctcagctctgcaagtagtttagtaggaatgaagtggaagtccaggcttggattgcctaactacactgctaaaaatatttgtaatccttaataattaaactttggatttgttaaaaaaaaaaaaaaaaaaaaaaaaaaaaaaaaaaagaaaaaaaaaaaaaaaaaaaaaaaagggggggggggaaaaaaac

SEQ ID NO: 209173 - DNA, 803 bp, Homo Sapiens
ggcgcacctaccgcacgctgctgcagctcaccaggatgtaccccggcctgcaggtgtacaccttcacggagcgcatgatggcctactgcgaccagatcttccaggacgagacgggcaagaaccggaggcagtcgggctccttcctcagcaccggctggttcaccatgatcctcgcgctggagctgtgtgaggagatcgtggtctatgggatggtcagcgacagctactgcagggagaagagccacccctcagtgccttaccactactttgagaagggccggctagatgagtgtcagatgtacctggcacacgagcaggcgccccgaagcgcccaccgcttcatcactgagaaggcggtcttctcccgctgggccaagaagaggcccatcgtgttcgcccatccgtcctggaggactgagtagcttccgtcgtcctgccagccgccatgccgttgcgaggcctccgggatgtcccatcccaagccatcacactccacaaaaacatttaatttatggatcctgcctcctgccacgtgctgggtggacctaaggttccttcccaccccattctggcgacacttggagccatctcaggcctccactccctgagtaattcatggcatttgggggctcaccccacctccaggtctgtcaagtggcctttgtccctgtgggctgatggcccccaactcaccagcatcatgaccttgtgccagtcctgggtcctcccctccccagccgccctaccaccttttggtgccacactttctcaggctggccgccctggtttggggcagcgagagc

SEQ ID NO: 209174 - DNA, 727 bp, Homo Sapiens
ctgagccatcattccttccaggtgagcctctcgggaggcctacctgctggagcacagtcacgatgggggaccagttcatctatgctgagctgcgagtggcctggcggcgagccccctgtccctgctgggctggcttgacgaacagcagcaggccctgggcgggcgagcgagctcctcggatggccgttcacctcctgcaggcccaagaagatctggctggcagagagttcacctgccgtgggcactcacctgctcaggaccccttgaccccgcactgcgcacctccagctggggagcaaagggcgaccaatcagaggggttccagagaatgatgctcgaggcaccggcaggccttgaaacacgcaacgcaccagcccaggttttggatcctgcgacaagaagaccacggagttctccagtgaatgtcaccatcacagtgactgcaacagcataaggcccaaagaggaagatgcaaataggcttagggagggcaggtgggatttgggaagagcccgttctgtcagactttggtcataaaaccaacgtagctaagacaccaactagcacttgcacgttaatacgccagtcttcacaaactggtacaaggcccagggtgcagatgtccctaagtgacatggttacaagagaagccctggaccagcttgtggaagacagaggtggcaggacaaggcaagaggagcgcacaaggggagacagggatctctgg

SEQ ID NO: 209175 - DNA, 684 bp, Homo Sapiens; identical to SEQ ID NO: 44884

SEQ ID NO: 209176 - DNA, 988 bp, Homo Sapiens; identical to SEQ ID NO: 40186

SEQ ID NO: 209177 - DNA, 903 bp, Homo Sapiens
aggctgtactggtcccgaagcgttagataggatgtggaaagcggttcctgcttgcatctctggggcagaggcctccaccagcaggctctcctccattcctccagtcctggcggaagcaaggccctcctaggcagctggtggataacagaggagggtcctaagagcaccacaggaagaacccttggctgggccaggacttggacgttgaggtgtcccgcatgagatgtctgcagaatgagacttacagtgcgctgagccctggcaaaagtgaggacgttgtgcttcgatggagccaggagttcagcaccttgactctaggccagttcggatgagctggcgtctattctgcccacaccccagcccaacctgcccacgttctctattgttttgagaccccattgctttcaggctgccccttctgggtctgttactcggcccctactcacatttccttgggttggagcaacagtcccagagagggccacggtgggagctgcgccctccttaaaagatgactttacataaaatgttgatcttcaaaaaaaaccaacaaagacaaaaaaagagacatagaaaacataaacagaaaagaataacaagagacacaaaaacaacaaagcacaaagagtaagaagacagaaaaaacaagaggggggggccgcaaaagaaaatactaccgtaggagcgggactaacgttgtgcgtgcagacaccacagacgagtgtagagagaagagcggtggcgccacactaagagagggagtacatttatactcgcgcgtagaggggagtacatggtataaaaccgcgagcgcgagatgaaaaaagcgatccgcaagggtgtgaattgtggaagggaaacacacaaacaggggggcgaggaacaacattggcggaaaacgat

SEQ ID NO: 209178 - DNA, 902 bp, Homo Sapiens
tgttgcccacacgccccaggcgcgctggattggcggagcatggcccaggaggagggtgggagcctgcccgaggtgcgggcgcgggtcagggccgcgcatggcatccccgacctggcccaaaagctccatttctatgaccgctgggctccggactacgaccaggatgtggccaccctgctgtaccgtgcgccccgcctcgcagtggactgcctcacacaagcccttccaggcccgccccacagtgccctgatcctggacgtggcctgtggcacaggcctagtggctgccgagctgcgggctccaggcttcctccagctgcatggggtggatgggagcccaggatgctggaacaggcccgggcccccggcctctatcagcgcctcagcctctgcaccctgggccaggagcctctgcccagcccggaagggaccttcgacgcggtgctgatagtcggtgccctcagtgacggccaggtgccctgcaatgcgatacctgagctacatgtcaccaagccaggtgggctggtgtgtctgaccaccaggaccaactggtccaaccttcaatacaaggaggctctggaggccaccctggacaggctggagcaggctgggatgtgggaaggcctggtggcctggcctgtggaccgcctgtggaccgctgggagctggctactccgagctggtggtggtatccggccatctctgccaagggatggcttcatctccggcatttgtctacctcgtaccgaaaagtggaaggcgacccaggttgaagaaagtgagatccagaccccaggcccccagctggcccctgaactccaatgtggccttagcctggggccatctgctgggcctcttcttgctcccctgttaaaatgggacctccgaacaaccttgccctta

SEQ ID NO: 209179 - DNA, 870 bp, Homo Sapiens
gcgccctttgccgctctggatccagctagaggcttgtcatggttcccacatggctaagtgctcgggttcgtcctaattgagctgaacactagtcactgggttccacagttctcttccatgacccacggcttctaatagaactatagcactcaccacagggcccaaggttccattccttggaatccgtgaggcgaagaaccccaggtcagagaacaaaagtcttgccgccatcttgggagcagcccatcccatcttgggagtggcctgccaccatcttgggagctctaagaacaaagacctgctggtaacagctggataagcccaactgctttgtagctgcctgtgtgtggcaaacaactaacactccttaggcctcaattttttaatttataaaatgaaagcagtaaatatcacatcatataagtgttgagtatttatgagaattaaaaggaataatcgccataaaaggcctgatactggcaataatatatttgacaaatatgagtttctctttttccctttattctactttacggcaactcctacctcctattctctttcttttgctactaagcagacatctgggttgttgttgtttcatcagggagaggttctaaatgttgtatcctttaaccctcaaagcatcatctattctcttagagggtaaagggcagagatgttatccctggtggtttctaaccttggagaaggtcagaaatgtcacgagctctctatagatcctcttatcagcttctcttacacaatccttggttctgtgtgtggtgaaactggattgggggaaactccgatcagtagaacccaaatgttgaagcacctggtgaatagagaaatacggatgcggttcccaca

SEQ ID NO: 209180 - DNA, 933 bp, Homo Sapiens; identical to SEQ ID NO: 40570

SEQ ID NO: 209181 - DNA, 709 bp, Homo Sapiens; identical to SEQ ID NO: 42919

SEQ ID NO: 209182 - DNA, 577 bp, Homo Sapiens
ggtgaccacgtgctccggctggtgcagcagcaggaagagcaggaagtcggagatgagcgcgtgggcttcggggtgctgcctgcagatagctggcgtggccgagccggagctcctcctggcaggggacagagccctgagcctcagccggacgggaccccacgacgccccaggagcccccagccgctcgctccaaggagagctaaggggctctggagccttctagcccctacgggtgtgcatttcaatcaggtgcctggagtgcaacacaacatgtgagagtgagaatcttcccagaccgcctgctatggactgaattgtctctctaacccccagtgtggtggtatttggagaaaggccatgtgaggacacattgagaaggcacttgtctgcaagctaggaagacagccctcaccagaaaccaaccctgatggcaccatgatcttggacttcctgccttccagcaaatatatttctcttgaagccaaaagaaaaaagaaaaagagaaaaaaagaagagaaaaaggaaagaaaaagagaagagaaaagaaaaggaggggggaggaaagaagagaagaggg

SEQ ID NO: 209183 - DNA, 448 bp, Homo Sapiens
cctactactactaaattcgcggccgcgtcgacgtttttataaaagtatcataaatttagagataaaatggaggggacccagctttctttacaatgtggatctacctcagttaaacagttgggtgctattactaagtctgtcaaattaaattggaaaaagtaaccaaacagtgagatacaactccacatgaaacttgaaattgtaatttccgtttatttaatgatatttttatttatttgtgccttttatgttgaaccccaatgcattgaaaaaattcagtatgaaacagtacatattttatttatattacaggtgggagaaaagtccaattggtcatggaatttgatagacttttccccagccaactgctacagtgtattataatcccgactgcccccctgtgaaaaaaaaaaaaaaagtcgacgcggccgcgaatttagtagtagta

SEQ ID NO: 209184 - DNA, 1000 bp, Homo Sapiens
aaaacaattatcagccaagaatttgtatccagtgaaactaatcttcataaatgaaggaaaaatggtattttttagacaaacaaatgctgaaagaattcgccactaccaagccagcactacaagaacagctaaaaggagctctaaatcttgaaacaaatcctggaaacacatgaaaacagaacccctttagagcataaatctcataggacctataaaacaaaaaggcaatataaaaaaaaaaccctcaaaaaacaaaaaaaccaaggtatacagggaacaaatagtatgatgaatgaaatggtaactcccatctcaatactaatgttgaatgtaaatggcctaaatgctccccttaaaagatacagaattgcagaatggataagaactcaccaaccatctgctgccttcaagagactcacctaacacataaggactcacataaacttaaagggatggaaaaagacattccatgcaaatggacaccaaaagtgagcaagagtagctattcctatatcagacagaacaaactttaaagcaacagcagttaaaaaagacaaagagggacattatataaatgataaaatgtcttgttcaacaggaaaatattacaatcctaaatatatatgcacctaacactggaagtccctaatttataaaacaattactaatagacttaagaaatgagatagcaacacaataatagttggggacttcagtactccactgacagcactagacaggtcatcaagacagaaattcaacaaagaaacaatcagtgtaaactataccctggaacaaatggatttgacagatttatacagaacattctacccaacaaccacagaatatacattttattcaacagcacatggaactttctccaagatagaccatataataggccataaaatgagtctcaataaatttaagaaaaacactctctcagaccatagtggaataaaactagaaatcaactccaaaaggaaccaccttcaaaacc

SEQ ID NO: 209185 - DNA, 532 bp, Homo Sapiens
ttgattgatttaaaatatattcaccctccaactgttatctgttacattttttaactttttattttcttattacttcatagtggcagtatgttgttgactcagtcaccatatcagtaatagtgactctatctctccaatgtccttggacttagcaaaatttactcgttctccatttatgcgtggtcccatggccatgaatggcttgactgggttcctgttaagtctccttatgctagtctcttttcagtcttgaaagtcttagccctgcctctgaagaattaatgtggatcctttcacagctttcacctaggtcatgaggtttaaattgttggagaggcccactgtgatatgattgtaagagtcaccatgccatttttacaaccttgagttataagtttcttgtaggtgcttcactagcctcatgatatgccttgccagaagtagcgcctgagatggagatttgggtgcaggtgatttattgacgatgtggttcttcaggaaaaatactttctattcacattttcctcgtgcc

SEQ ID NO: 209186 - DNA, 427 bp, Homo Sapiens
  misc_feature (163)..(163): n is a, c, g, or t
tttttttttgcaggaacagtggtttattgaccaggcaggcctccccagcccggccactgctccccaagggctcgggctgtgtgggctggccttggcagaaggtggacaatcctctaggtccaaggacatgggggtcacagaggtgggggccttggcacacatntcgaggagagttcccaaaagtttccagtggctgtcccaggcaggtatcaggttcggcccacacctgagtgcccatactctgggcagggctgggaggcacctgacctcacctccaagcaagctctgcaaagtgtggggtgaaaaaaggtgaatctgtgttgaggatggggttggctgcagctgtggtgatggcctgggcgggggcggggggtgctggaggctgagggtgtgctggcgggtgctaggcagggcgatggaagaggtt

SEQ ID NO: 209187 - DNA, 814 bp, Homo Sapiens; identical to SEQ ID NO: 40291
  misc_feature (568)..(568): n is a, c, g, or t
  misc_feature (808)..(808): n is a, c, g, or t

SEQ ID NO: 209188 - DNA, 818 bp, Homo Sapiens
taggatccagcatcttgttacataggtctatgaactgaagttctctaaagcctttgaatcataactggtgccccattcttagttgtcatgattaccgtatggttctgtagacaatcacagaagatcgggcccaacatttattgtcctcaggacatgtttgcagatttactgttaaatcctgttgtcagttcatttttcttaatatgaatgaggaacatatattatttttcatttatgttaagaaatgatcccattaaataaagccaaataaaatctagagactgcgctgtacgtttcttaccccttcctttcctgttactgtagatgattagggcctaactgtaaatacagatggctctgactatgcctggctccggagttattcccaccccggttctctccccccttggctggtttgtcagggaacacttaaccccttcattgtaatgccttgtttggggagtgctttctctagtccaggggagatgtttgtgtcatttctaatgaattttgaaagtgttttgtgatgagaacactgcagcactgtggtttctctaagtggttatttgaacactcctggtaacgacctataccacttagaatagttggagtacagctcagtttgtttaagaacttcctatatgagaaatacttaggtcgggatgcatggggtagggtcccgctaactaagcagtgagcaagaaacatcaatatttggagccagacttttatatctaagagttcagttcttttctgaagcctgggctactagttgagctcacaccctctttacagtgggggtataatgctttacactg

SEQ ID NO: 209189 - DNA, 719 bp, Homo Sapiens
ctaggcatggtctggttgcttggaactggggcctggggcacttgggaggaggggggagcggagagtttgatggagggcagcccccactaaagcatcgtgtgcagtgggtcctgcgtctgccagcaccgggactgccagctgctgtgcctgcctgccaggaacctgtgggtttttctgtaaatttagacactgcattttaggactgagggagggttattttaaggttgttctttgagccataaattgcctctttgccccacagctggggaaagtgctggtcccactgacgtggcctcctctacgttgaaaaaaaaaaaactacttacctcttcctggaagcctctgaggttttagccaaatttctgggagtgccagctctatattttgatttgtatttttaaagggggttaacctgctgagtttctggcatgttctgccctttactcgtctcgacatttagcaagtcttttcttaaggggtgagttccccattctgctagcggaaaacagtgaaacctgcattcgagggccatgcttgaagctcttttccagcatgaggaaacggaggcccggagaggtagcggcagggtggtggagtagggtcgtaagccttgctctgtctgcctccaagggtccctgaaccccattggaagggagtggtagctttctacaatgacccacctgttgtgtgctttggaaggctaggagagcctcctccct

SEQ ID NO: 209190 - DNA, 794 bp, Homo Sapiens; identical to SEQ ID NO: 53491

SEQ ID NO: 209191 - DNA, 842 bp, Homo Sapiens; identical to SEQ ID NO: 46124

SEQ ID NO: 209192 - DNA, 865 bp, Homo Sapiens; identical to SEQ ID NO: 40738

SEQ ID NO: 209193 - DNA, 399 bp, Homo Sapiens
ttctgcatgtctggggaggcctcaggaaacttacagtcatggcagaagatgaaggggaagtgaggcacatcttacatgatggcaggagagagagtgtccaggagaaacagccacttttagaactatcagaactcatgagaactccctcactatcatgagaatagtgtgggagaaactgtgcccacgccaatcacctcctaccaggtccctccctcaacacatggagattacagttcgacatgagatttgggtagggacacagagccaaaccatatcaaatggccaggttaattggtaaatgtccgtatcttctgactgctccactggactgactgttctcctatgtctccctctcctggatctccctattccctgagacacaacaatattgaaattttt

SEQ ID NO: 209194 - DNA, 1000 bp, Homo Sapiens
tgcaccatgtcacatgtaaaatgaccatcatcaacaccaaagcaggaaaaggggtgaagccaaaagctgagcaggttggactggttatgtggctgatacatagtgtcttgccgctgccaagattttcatcccagctccttgatgctctgccaagatttcaaggtgaagatcccagcggaggaatgaggaactctgcacgataagttggagcatgcctgcagaggccacaggcagtgcggccatacccgcaaggctgagttggcagttttggggtgcaagaacaaacctcaacttctagcctgcaggactagcccaggctggagaatctgaaagccatgctgggagagatctaacccagaggcctttgatattggcttctagtcaagttcaagtccagtactttctcctccattcactgcagtagttcctgaggtctggcttccatcatgagatggggagtgaccaaagaaaatggcatctatactggcctcctgggggctgccacctgcagcaatctcccctagacacaaatgtgtagggcgcgtgcagcttctcaatcttcagacatacctccagggcaaaggaagggaaagaaaaaggaatgtctttcctagtcaaggaagtagaagtagagggttttgtgtgtgtgtgcttcctttttttaaatcttcattgattcatgtaatgaaaagcaaaggagtctctagcccagaggttctcaactacaggcaaatttgtccctcagggccatctggcaatatctggagacatttttgattgatgaaagtggatacggcatgttatgaatccagtcggtagaggtcagggaggctactgaacatccaaaatgggccaggtgcagtggctcacacctgtaatcccagcactttgggggaggctgaggcgggaggatcacttgaggccaggatttcaagaacagccggagccacacagcaagaccctatttctgcaaaaaaaaaaaaaaaaaaaaaaaaaaaaa

SEQ ID NO: 209195 - DNA, 701 bp, Homo Sapiens
ctcatcgacattggttcaggccccaccgtgtaccagctgctcagtgcctgcagccactttgaggacatcaccatgacagatttcctggaggtcaaccgccaggagctggggcgctggctgcaggaggagccgggggccttcaactggagcatgtacagccaacatgcctgcctcattgagggcaagggggaatgctggcaggataaggagcgccagctgcgagccagggtgaaacgggtcctgcccatcgacgtgcaccagccccagcccctgggtgctgggagcccagctcccctgcctgctgacgccctggtctctgccttctgcttggaggctgtgagcccagatcttgccagctttcagcgggccctggaccacatcaccacgctgctgaggcctggggggcacctcctcctcatcggggccctggaggagtcgtggtacctggctggggaggccaggctgacggtggtgccagtgtctgaggaggaggtgagggaggccctggtgcgtagtggctacaaggtccgggacctccgcacctatatcatgcctgcccaccttcagacaggcgtagatgatgtcaagggcgtcttcttcgcctgggctcagaaggttgggctgtgagggctgtacctggtgccctgtggcccccacccacctggattccctgttctttgaagtgtcacctaatacagaaa

SEQ ID NO: 209196 - DNA, 736 bp, Homo Sapiens
cgcccatgcagcccagcgcgttgtgggctcccgccggggtcccccgcggctgtcgccgccgcctacgccgctgcctccgccttcctgccccgcgtcgggccgggcgccacctcccccctgcctccctctccgctgtggtcatttaggaaatcgtaaatcatgtgaagatgggactcttggtatttgtgcgcaatctgctgctagccctctgcctctttctggtactgggatttttgtattattctgcgtggaagctacacttactccagtgggaggaggactccaattcagtggttctttcctttgactccgctggacaaacactaggctcagagtatgatcggttgggcttcctcctgaatctggactctaaactgcctgctgaattagccaccaagtacgcaaacttttcagagggagcttgcaagcctggctatgcttcagccttgatgacggccatcttcccccggttctccaagccagcacccatgttcctggatgactcctttcgcaagtgggctagaatccgggagttcgtgccgccttttgggatcaaaggtcaagacaatctgatcaaagccatcttgtcagtcaccaaagagtaccgcctgacccctgccttggacagcctccgctgccgccgctgcatcatcgtgggcaatggaggcgttcttgccaacaagtctctggggtcacgaattgacgactatgacattgtggtgaggtgagctcccca

SEQ ID NO: 209197 - DNA, 398 bp, Homo Sapiens
  misc_feature (374)..(374): n is a, c, g, or t
  misc_feature (385)..(385): n is a, c, g, or t
gatcaaaaccaaactgttcaatgtgacagtctgaaaattatatactctacttcattcatgttacacttttttctactccttacctgcttttactaatgcatttatccccaagaaaacatccaacaatatgggactaatttggaacaatatccagcaattggtatttaaataatttactggttacaaaacaatattatgaccagactccattttagaaaaaattaaatctgcatcgaaaagggccttaaaaaatagatttctaaaatcaaaatcatggttggctcatgggtgggattattagtgttccttatagtagtttgtctggatgtactttctgattctcctgtaataagcatgcattgcttttgtaatgngggaataatanaccaataaaaagg

SEQ ID NO: 209198 - DNA, 543 bp, Homo Sapiens
  misc_feature (429)..(429): n is a, c, g, or t
  misc_feature (489)..(489): n is a, c, g, or t
  misc_feature (501)..(501): n is a, c, g, or t
  misc_feature (528)..(528): n is a, c, g, or t
  misc_feature (539)..(539): n is a, c, g, or t
tttaacaatttatagtccttttaatagtttttttttttttttcataatactactgaggggaattgttagatgtattatgtaaggcattcttaatttagttattaaagttacatttttaatatttttaaaccttttgtaaatgctggcttaattagaaaatgtttacagaaaagtaaaaaaattctagtaatatgggaaatccttgtaagcagcatggtttcagaaaaatctcaagatgatttatttcaccaaatgagtattttttaaaactaggaactccccaaccaaaaacacagacttgaataatatttgtgttattacctttattgtacattgagcaagcacccttgtatagaggaaatgcctctttcctcatctataatatctatagtatttagggcctggatgtaagagtgtttttattttacnaatagttaatgtattaaatattaagttagtttccctgatttcccttatttggttggcgancatacggggagnaattggaaaggcctatttccaaagaanctatggcactntttt

SEQ ID NO: 209199 - DNA, 392 bp, Homo Sapiens
agaagaaatgtgaattgctttggcaatcgtcagtttggccgagtattagtaatatgattgggctaaaatttgatgtcaacatgcaacatgatttattatatgagtacactccagtgacttttcctacaggaaaaaaaagcattattgtttgcaatctaataataagataaaataaagttagtatattaccttgatcaatagttttcagttttaatgagattttgcattcttgatcaagctcactaaattcagaacaaataataggaactgtgctttctatcctcaggtagtattctttcccatcctctgatatagtgctcaattcaggctgtagcttaatgcctgcaaaaaattcttggctttcgatgggctacactttggtacatgaggat

SEQ ID NO: 209200 - DNA, 425 bp, Homo Sapiens
  misc_feature (393)..(393): n is a, c, g, or t
  misc_feature (410)..(410): n is a, c, g, or t
  misc_feature (425)..(425): n is a, c, g, or t
ttttgagacagggttcgcgttgtcacccaagctgaggtgcagtggcgcaaacacagctgactgcagcttcgactttccaagctcaagcaatcctccttcctcagcgcccccaacaagtagctgggaccacaggcctacaccaacacacccagctaatttttgtattttttgtagagatggggtttcacccctgttggccaggctgatctcaaactcctgagctcaagcaatccacttgccttggtctcccgaagttctgggatgagccattgtgtgcggcatcgagccatttgtgcacggccggtccgttgctaaatggtattctaaaaatacaaattctaagaaaaagggtagcagtgggggagatagtctaaaaaatttttaacatttggncaatttcttaaatctgntcaggccctctaggn

SEQ ID NO: 209201 - DNA, 433 bp, Homo Sapiens
gcaacataaacacttaagcatttagtgataaaatattaaaagctagaggctccagatccaatgagtacaagttgctgatatagcatcatataccaaggaaaggtgtcaagcatgctaaaatatgtctgtagcttagacattaggggccctactcttcccctaatatgcttgccttgttcctactgtccacagttaaatgcacacatcagcactaaaatgcatccccttaaaatctagggaggaaattcaacacatctatgtcaatgaacaaagtaattgtcacatttattcactacaaacaacagatctagacactgtttttaattataacattaattgatcttttgtaatcactaattagaatggataacatcacatttagttactttccttagccagagtgaacttccagttgctgggaaaatggcatcag

SEQ ID NO: 209202 - DNA, 447 bp, Homo Sapiens
  misc_feature (150)..(150): n is a, c, g, or t
  misc_feature (444)..(444): n is a, c, g, or t
gtgcaatggccctcagcttcccaaagtagctggaactacagtcacatgccaccatgcctggctgattatttttatttaagtagagataaggtcaactatgttgcccaggctggtctcgaactcaaactcaagcaattctacctgccttgnctcccaaagtgctggaattgtaggtgtgagtcaccgcgcctggccctggcagaaacgttttctttttcatctttgtatgcaatcatctctgtatcccctacatgccacttgatcaacatttgctgaatgggaatggatttggttccaggtttcagtgtaggatgatactgttggggaaggatctttgtagtttcatgtcaagatggccacccaatacataagttcctatttttcacttcaggaagaaaatgtgcggtaaggctgggaacagctatcttccttcatagactttcnagt

SEQ ID NO: 209203 - DNA, 424 bp, Homo Sapiens
tttttttttaatatgttgcaatttattgagtgtttactatatgacagatatttagtccacatataatctcatttagttgacaccaaactctatgaggttggtacaattatatttcacagaagatgtaagtgagtcttagaaaggcagagtaacttgccctaggttgtgaacttaaataaattcagacccaagacttggccctaagttatttgatcccaaagtctaggagtgtcattattacctcaatctgtgagctaaggataaacaagccacataaatgtgaagttttatttttcctacggcattaccctagaaaaattatttcatcttgccaatgaacaaaaagatacatgagaaaaacctatatccttgtaagttaatacttaaacattttcagaaaccatttattttgtatgagctggta

SEQ ID NO: 209204 - DNA, 528 bp, Homo Sapiens
ttttttattcaagatgtacttttaattgccaatatttttatgtatttacaagaaatattctgtaaagggtaaataaatgtacaagagagcacaaaacagaacagaaagaatactcatgcatttatacactgaagctgtaacagcatcataatggcctgggagtgttcacgcagttccctaagtggctaaattacacccaggagattctcattcagcaatataagctgttagtgctttcacacgttttgggaaatgcatccattgccccattccaagcttaattggtataataaatgtcaattaaagctcctttaagatttcaaactgcaaaactcaagtgaaactacttatgtagagactcatataagactcctctactaaaaggctctcccaaaagagacacagtatatttacatttaccatgggtacagggatacacgtcattcgcataggaaataacattatttctcccccccaccgcccgctatactaaatgtattttttttttttagtttttgagacggagtc

SEQ ID NO: 209205 - DNA, 474 bp, Homo Sapiens
ttttttttttctccagatgtcctttatttatattcgtattcataagaactcatactacttctggtctttttagtagctcttttagggctgtagccacagaacggtcattctagtgattctgagcagggtggagaggagtgcagcatccctgggcgggtgggtcagtgaagacacgcccagctcacctgatattctgtgactggttgcagaacacaagtccctctcgaaattgtttaggtttgtggggagatatcgcggctggctggggctggactacgtggcggcgctggaagggatgtcgtctcagcagtgctcgggcgcaggtaggacaggcccgccctgccgcctcccctggtgctattcagaccccttcaccccagaaccctgagggagcggggggcgctgcgggtccggggaggcgggtggaggcccgttcgcagcagtccaggtggggtgtcccgggaggattttggc

SEQ ID NO: 209206 - DNA, 586 bp, Homo Sapiens
tttttaaatcttaaggatgctattgaagggttttttgataaagtagccaacagcaccaaaaaataacagaatggatttcctaatgaaatcaggcacaggtctccctcatgtgacccctccaaggcaggcagtcttttccgtcttcctcgctcgcttttcttctttcctggaacagatgcatagtgatgtgctggtggagagcccactcgctcccgtctcctcgttccacctatggttaggaaacaacgtccgccttcagctgccacaaccgcccagagaaacaaaacgggggtgccccggcttcccagatcacaagctcatctggcacacggcagaagacgacagccaaagcaaagccatttcaagtttcgtgtgtgtgtgtgtgtgtgcgcgtgtgtctcctatcccttctaaaaaatctgctcacatgactgatggtttttaaatttgttctccaaacttcaccctcttcaaaaatgggttaaaaagcctttttccccccaacagttacaaaaaaaaaaaaaatcaaaacaaaaaaaaaaggcttttgtcagccatggggcaatacaaattaatacagcccctc

SEQ ID NO: 209207 - DNA, 590 bp, Homo Sapiens; identical to SEQ ID NO: 61974
  misc_feature (450)..(450): n is a, c, g, or t
  misc_feature (515)..(515): n is a, c, g, or t
  misc_feature (547)..(547): n is a, c, g, or t
  misc_feature (558)..(558): n is a, c, g, or t
  misc_feature (570)..(570): n is a, c, g, or t
  misc_feature (581)..(581): n is a, c, g, or t

SEQ ID NO: 209208 - DNA, 544 bp, Homo Sapiens; identical to SEQ ID NO: 44768
  misc_feature (1)..(1): n is a, c, g, or t
  misc_feature (372)..(372): n is a, c, g, or t
  misc_feature (434)..(434): n is a, c, g, or t
  misc_feature (443)..(443): n is a, c, g, or t
  misc_feature (450)..(450): n is a, c, g, or t

SEQ ID NO: 209209 - DNA, 542 bp, Homo Sapiens
  misc_feature (39)..(39): n is a, c, g, or t
  misc_feature (354)..(354): n is a, c, g, or t
  misc_feature (368)..(368): n is a, c, g, or t
  misc_feature (419)..(419): n is a, c, g, or t
tttagagtaaatacatttattcatgggagcagagatgcngaacgagccgggtgacacgggcctcccatgggtgggtgcttggtcagagggaaacgcctcaccaaggctggaattggtctgggtggactgaggcacgaaaggatcggtaaggaactaggttctcttccaaggatggtgtccgggagggcgcatattttgggcaattggaaggctgccctgcacaagccgactgctggacgctgctgtcttgcccttgcccaagggtctgggatgaccagcaagctctgggtgtctggggaggcaactgccgcaaggaattcacaatgaatccccaagacaggcctctcacctgtntcccctgttttatngtttgtttttgatacggagtctcgctctgtcgcccaggctggagtgcagtngcgcaatattggctcactgcaacctctgcctcccggattcaagcgattctctgcctcagccctcccaagtagctgggactacaggtgcccgctatcacgcccggctaattttggtatttttat

SEQ ID NO: 209210 - DNA, 926 bp, Homo Sapiens
ggacggtcccatctttcccaccctcttggttgccgctggccacacgccctccgctggcggcgacttctcagctccgtgcgcccgggctggacagtgagcctcgagaggagacgcgggcggctagagccggagtggggcgagccgcggaacccggccgggagccgcgcgaggcgattgccatcacgaaagccaaagtggatttctccagtgtggtgtgcctgcccccttccgtcattgctgtgaatgggctggacggaggaggggccggcgaaaatgatgatgaaccagtgctcgtgtccttatctgcggcacccagtccccagagtgaagctgttgccaatgaactgcaggagctctccttgcagcccgagctgaccctaggcctccaccctggcaggaatcccaatttgcctccacttagtgagcggaagaatgaaaaatgtctcaaattgggtataacaaatcagcgtgattgcctttcacctccactttggagtgctttgagccagtttggacacaaggaggttggagttaaaatgactcctgaaggaagtaagcaagcatgagaagagagggcagcactggtaggtaacgctaaaacaacatcgccttcatctcttcaaccctgatctctttccaagaagtgagctgactaaatgaaatattacacaaaaccctccaaggtttgagaagagttctagagggtagtctctaagtgagaaggaccatctctatagggtggccctgagtttatcctcaaatttcctttctacgccatgtacccaatcctcactccatttttcggggtccaccaaagcctaaactcaggggtagattcccattgacaattctgcttcacaggtggaacccatctttttatggttcccttaagcacaggattaaataactttatttaaaagagatcg

SEQ ID NO: 209211 - DNA, 824 bp, Homo Sapiens; identical to SEQ ID NO: 53553

SEQ ID NO: 209212 - DNA, 921 bp, Homo Sapiens; identical to SEQ ID NO: 50155

SEQ ID NO: 209213 - DNA, 914 bp, Homo Sapiens; identical to SEQ ID NO: 40166

SEQ ID NO: 209214 - DNA, 714 bp, Homo Sapiens; identical to SEQ ID NO: 47025

SEQ ID NO: 209215 - DNA, 585 bp, Homo Sapiens
gccagataaagtaagagttaaccctgcacctcaggtgtgatagtggggtcagtggtatgtgatccaggctggggagccagaggggagcaggtgccaactccacatccttctcctgtttctaggccctctcctcccttgtcggtttttggcggggaagctcagccttcgctgtggagggacgagagcacagagctcttcctcctggtggcctctgacccctgacggcctgtggcatcctccctagtcccctctgcccatccatccctctgttccaattctccactgctcccagcatgatctggggcatcttggcttctggtttcttttattattattattattattaattattgtattcctgtccttcacttttttcctccttagttcctgaaagtaaacaaaacaaaacaaaaacaaaaaaacaaacaacactttggttcctgatggctttctgaacccagccctgaccttgttgtttcacagctgacggctgagatgaggttagaatgactgggcccggctgaacattccaaattggatttcaccatctgctgagaaagtttaaggaaggcaaagcttgccagg

SEQ ID NO: 209216 - DNA, 421 bp, Homo Sapiens
agcacggcatccgcctgctggaggcccagatcgccacgggcggcgtcatcgaccccgtgcacagccaccgcgtgcccgtggacgtggcctaccggcgcggctacttcgacgaggagatgaaccgcgtcctggccgaccccagcgacgacaccaagggcttcttcgaccccaacacgcacgagaacctcacgtacctgcagcttctgcagagggccaccctggaccctgagacggggctcctatttctttctctctctctacagtgactgggcttcctccgtgcagttttctgcaactctggagaagttgaggcatacttgtgtgtctgggttgtttttttttttttttttttttttgtcattctttaattttggtgttttacccattcgttatctgtggaaaacgttttaagttgtcatgt

SEQ ID NO: 209217 - DNA, 579 bp, Homo Sapiens
tcaaaggcagagaccccatggggctccaaagagctgcagtctccttcccaaggttttctggatataaatttgcatggtatagtcataatagcttttgagctttttatatgcatttggcaccaagactgggatccacaactttgtagacactgcgatgaagttaacatattagctatactataaatagtgtttgtaactacacacacacacacacacacacacacaaatacatacatatattctgtaaaaacaaaaaaaaactttttaagatccttgggtatgtgtttgctttactccatttcagaagaaaattacttttcttctaacaaaattattttatagcttctccatttttaaaacttgtgagagcattgagaagagaactctgactgtgttaacagaagagagttgaattggagtctctgttgtgttaaaatgacctctcgttactccacagtagttatttgagccagtgactgagtcgcgttgaggaattctgaacccggacctctgacgttgttgggaggtggctgttacccacacccagacctcttgagtaaggacagaaacgttatcatt

SEQ ID NO: 209218 - DNA, 546 bp, Homo Sapiens
tttcatttagtaatttttacttccaccttagagaaacagtatcagctaaactattaacaagggtgttcctgacagaccattctgagcatatatgggtaatgtggctcggatctaatccctgtaggcagatggtgcctctccaagcaagatctgcctctactcagcctctgaggcatattaaacacagatggaaatatatgctattaacgtaggccctggagttagataccagtaggatgattagttctgtcttcagccaatcagtttactcattttgccgcttcatagactcacagggccttccttctgtcctagggaaatgatgttatagaggaagaggatggatcacccacgcaggaaggtggtaaaagatctggtcctttacttcctttagttatctttctttcctgggtattctttaaggggtaaagaaaagggtaccggtatgacgtggtggcgctgctcagttgtatggggctgttagaggaaagatcgtcttcttaatggtacatcaaagcaagcagagcattgatgatctctatgacc

SEQ ID NO: 209219 - DNA, 586 bp, Homo Sapiens
ttttttattttaaaagtgcacatattttattgaaagatatccagtttcagctttgaagatataggctcaaagtctgttcttggctcttccagaaattctgcttctagagtgttcataatttcaaccaaaacttagaaagtttttctaaatcagacttttcaacctgctgaacagaactcatgtctatacttcgatgtttattttggcagcatttgtctctgtgaagcatatcaaaatcactcaaacatcaaaactgctgatctgatagaatgatttattttcccattacaggtaagtcatgaatggcttgttctgaggtatgtttctgagctatgaaggacacctactagaaagctccacacttgaagggttctcttaaggtggtaacattttatggctggacagtctctgcaggtaccagattccccgttgtatccaactgcatacatttacacgtgcatgcagacacagggcactctgcatggtccctgaaccaactaagcatatgtccagcatgtccaccgtgcctgcaattatgacaccatgtaaaccagttggtaaattgggctaattttttggccttgct

SEQ ID NO: 209220 - DNA, 1000 bp, Homo Sapiens
tatgaaatggtatcctcttaatgtgacatgcacactattttctgttctgttgcagcccttataagatcctagttgtgaccgtttcaattaatttcatgacccactaaaggattgtgaacaagagtttgaaatattacagagctttagaagaactggtaatgttttgtaccttctttttctcccgttatgtagtttcagttttctagaagatggaaatgtaattcaacttggggacctaaaccctgccagcctaccccacccctggcctggcctgcttttctgaaattcccattgacattatagaattgacccagtctgactggaagccttcaagttaggagataactgttctaaagcctttcagcccagagccagagagggttcagaaaaaaagtaggaatgttggggggaggggggagggatagcattaggagatatacctaatgttaaatgaagagttaatgggtgtagcacaccaacatggcacatgtatacatatgtaacaaacctgcatgttgggcacatgtaccctaaaacttaaagtgtaataaaaagaaaaaaaaaaaaagaaaaaattaggaatgtaccaaattgagcatttgctattgtttgagtggctgcattttaacttcctgtcctatgttaatttattactgagttaggactcagaaatgatgcatcacatctaaattatgaatgttgccaggtggggtggctcacgcctgtaatcccagcactttggggggttgaggcgggtggatcacctgaggtcaggagtttgagaccagcctggccaacatgttgaaaccctgtctctactaaaaatacaaaaattagctgggtgtgttggtgggcacctgtaatcccagctacccgggagactaaggcaggagaatcgcttgaacccaggaggcggaagttgcagtgagccgagattgtaccactgcactccagcctgggcaacagagcgagactccatctcaaaaaaaaaaaaaaaaag

SEQ ID NO: 209221 - DNA, 1000 bp, Homo Sapiens
cccacagctggagccacagcccccacagccggagccacagcctctggagcagccacagcagcccatggttctggtggattgagggtggagcaggtagaggagcaggtgagagggaggtgcaggtgtggagctccctgagcctgggctctttatatacctgtccagatgtcaggcatgacacagggtccctttcttgtgactgtttacactatttttccagagctctatttttttcctctttgctagtgacttccttctggctcagttgagcatctactttctttgttttctaaatttgtctttttccccatttgttttggcccctacaattaaaacctcagctccaggctgtctggttcttcctgcaaagctccagggtgctggtcacctgctctctgctgaccacatgtgaccaatgggcaacagcctctgcccacgtgctctcatctttcctgtgttgactccctcaataatattaattttacatttttagatttcaaaattatccacgatctttatactcatgccagtctcagctttccgggtgtgttagaccattctttgcattgctctaaagaaatacttgaggctgggtaatttataaaggaaagaggttagaatggctcatggttctgcaggctgcacaagcatggcacccacctctgctcagcttctggggaggccctcagggagttttcctcacggtggaaggcgaagcaggaacaggcacaccacatggtgagagtgggagcaaggggtgaggaggagccacacacttgtgaacaaccagatctgagtgaacacactcatcgccaagggggtggcactaagtcactcatgagggatccacccccatgacccagacacctccctgcaggcccctccttcaacactggccaacaactatatgaaaaaatgctccacatcactaactattcggggaatgtaaatcgaaaccaccacgagataccatctcatatcagtcagaatggcttttgat

SEQ ID NO: 209222 - DNA, 1000 bp, Homo Sapiens
ttcgtacaggcttttatacaacaagaagcattcctcttgagcaacgtggatatcctctgaatcaagtagctttgattaaataaaggtcattagcaacagacacacgtgcaagccattgcttttccttttgctttgctcttctctctttatcctcctcacaacatcttaatgagcttttaatcctccatttatatgttatgtttatgtacagaaatttatcttgtagtcctgaccttggcaggcaacccacattttatatgcacattcaggggtgggaaggattcaagtttgctacccaacctagttaggcacacagccggtacctccctgctgtcccttagagtgacagccagggaacaatgggcttaattaacctatttcacattcagaatatatttccagatagcctttggacctggcagaccgccaaggatgtactcatttctgctgctgctgctgttaatgatgaagtgagtttttaaccatgaacagttatgagtcctctgataacatttcagtggtaaaattcctttgagcttttcatttattttaataatgattctgtaaaaggaataaagtccaggtttgctggccaaaagcaagtgatgtcatgtgtacacctagtctgtttaggtcagagatacacttaacatcaaatgtcagaaaaatgagcacaagccaactgtttgttggtattatgtattaactttccattttgtaggctcttgtttctcactaattttaatgtgctaattaatttactagtttatcaagtttttaaagagctgtttcagcctgaaaaacatagcaaaaccctatctctatagaaaattagccagacatggggccgtgtgcccgtagtcccagttactgggaaaactgaggcaagagcatcacttgagtccaggagttcgaggatgtagtgaactttgattgtactactgtgctccagcctgggccaaagagtgaggctccatcaaagaaaaaaaaaagaaaaagg

SEQ ID NO: 209223 - DNA, 1000 bp, Homo Sapiens
accgagttctgcttgtgctccatgagcttccggaaagatggctgcttggataacacctttcctcctgcacactctacgattgccttcatagtggaaagacttgggcagattccagtaaagaaaagttctctagagatgtgctgtggttcacaggaggaagacctccagtggcaatgtccaagaaggaagccaagagtgtaccttaaagagtggagaaacgtgtgcccgttttaaggattcttccaagctgaaagagaaaagtacttctgcctcagcatctcggagaatgtagttctgctcatctggaaaacagaacagcacatactctgaaaagtgtggacacgtgaagtgtggcaagtgtgacccacaaaattctcgcccatattcagcgtatggaccagtttgctgactgctgggcaggagcaaccacatcatgacagaaatgcagggatctgttcaccaacggccagaaatacaaaatcaatccctgagtcaaccagcagatagaaaggctgctttttaggtgaaaggagaaaaagaatgtctaaaatttggaaaaacaaaaaatgatgaattaaaaaaggatcaaaaaaagtactgttacacatgagatggtatatttgaagtgttactttcaaagctgatatgccttctgaagaacttgtgtgagatcaccaagaatagttaatgtttatgatagagaaaacaccaccgggcgcggtggctcacgcctataatcccagcactttgggaggccgaggtgggcggatctcttgaggtcaggagttcaagaccagcctggccaacatggtgaaaccctgtctctactaaaaaatacaaaaaaatttagccaggcgtcgtcgtggtgggcgcctgcagtcccagctactagggaggctgaggcaggagaatggcttgaacccaggaggcagaggttgtagtaagccaatggcaccactctactccagcctgagcaacagactgggtgagactctgtctt

SEQ ID NO: 209224 - DNA, 1000 bp, Homo Sapiens
tatttcaaaaagaattgtagttatgtgtggcaatttttcataaatacctgatacaaatcaagatctaccatggtaagtgtgctccagagatacccttcttgaccaaaacaaagcagggcagggattgggaggccttttgggctgggctccaggacacaatgactagaagatgatgcaaagtgcatgacagagtagagagctacacagtttacacatattagactctgcacatattagagtctacacatattagactctgcaaaagtagttcttaaatgttagctcacatgcaccccagtcacgttactgagcagattcctgggctccagtcctgggtgattcttgcaggtggtccattgaccagattaggagaatcatcatccaaggtctcaaagccaaatttaggacgcagagagaaagaatcctaagtggttgaatgggaaactgattctcctcttgagcacaccttagattcaaataattgattggagaagatcattccatacaaaaatcttctgacctgcagagtttctacaaaaagtcttgagaaagaaaaagaaaaacatatatttttggaaaagattgaatttaattataattttgcaaattatactgtgggaaaggtcaacaaaaacaagcgtattgcggatgatcttataaaaagaaccttttgtaaagtaaacaattaccttctgatttgtctactctgaacccttgatgtttatttaaattggatgttctcatagcaggacacacctgatacctggcttgtctaaacacttagaaagtcaaattgtctagttatcaaagcccaggcttattttctaaataagtatggatggtctttcaggagtcatttcacagtgatgtgcagagagaaaaacaatacaaacaaacaaacaaacaaacaaaaaacaaatcattgttcctaagtgtgttttccagcctatgtctaactttctagcagataatggcaataaaaatgtttgggtccaacatt

SEQ ID NO: 209225 - DNA, 1000 bp, Homo Sapiens
ttattttggggtaaaacattttgattttcttccttgttatgccacagtcagattggaaagtcagtcatgatatacagggtcagataaaatccgtctgatgagaatgtatggttggtagggcatgactccccagacgccttagataggaatctgggcaagataaaaaatcggagcttagtcctcaagggaaggggcagcagcgctgttggcgggctcaccaagcatcagtactggatcaccaggcttgggagagtaggggtgtcaaggccccaagagcagggagggccttggccccactaggggggcatcagaaagcagggagcacttgtagttcaccatgattcccctcaaagccctgggccagcctcctgcagggaaggcgggcaggaagtcttccccataggggcaggcttgcttttttggccagccatcctcttcatatgaaaaacagcatcttgtcatttctagatgtttctactttggttgactctttaatttttctgcagttaaaagccttaaaacagcaaggaagcaggggacaggaggggagcccagatctctcccaaagaaaaggagaaagactgaatccttgaggcctgccgtacaaaggagtggtgggttggaggagggtaggcagagactagggtggtctgggactttaagtacaaggccccgtggatttcattggggggcaagccatgtgcaacagggaagctcaggaaccggggggtttcgcacagaggtctggtgctgtgaggtacagggaaagaattagtggatctggaccagtggaacattggtttagtgtaatctctgatttgtgttgagtgaatttgagtatagtccaaccaccacccccctaccccaactaaaccatgtgcccctcaggagctgggactcttctattttctattccttatagcaggctcagtgcctgacacactacgttgaattttattttaaacatttcatttacattaaatggtatatttgcaagttc

SEQ ID NO: 209226 - DNA, 1000 bp, Homo Sapiens
agtgtagcgaagagtaacagagcagtattgctgccagcatatctcgccaccagccacagggcggttttctcctatctcagaatagaacgaatggtcggctttacaccgagacattccattcccagggacaagcaggagacagaagccttcctcttatctcagctgcaaagagtcctctctccttcactgctcctccttagcacagacctttttacgggtgtggagctgggggatggtaaggtctttccctccccacgaggccatatctcaggctgtctcagtgcggggaaaccttggacaactcccaggctttcttgggcagaggtccctgcggctttccgcagtgcactgtgtccctgattaatcgagaacggagaatggcgatgacttttaccaagcacactgcctgcaaacaaattgttcacaaggcacatcctgcacagccctgaacctattaaaccttgattcaacacagcacatgtttctgtgagcacaggtttctgttaaaattacaggttgacagcatctcaaagcagaaacagtgtttcttagtacagatcaaaatggagttttctacatagacacagtaacaatctcatctctgacccctctctctctgtggacactctcccaggctctgcaggttgaaaggagtttccctctgtctgttcatggccacctggtagacatgggagaccctgtcttcccactccgccccgagtttcctgagggcaggagatgggtctctctcactctgtggtcaggcaggaggagtgcagaccgtaaccctgtctttctgacccagtgccctaacctgtcagcatgaaccacaccacaggtgcccagacatcagagtttcacagacagaaatagtttccccagagttttggggcttttttaggctcaactatcatgcattattattctttcataaaaaaagggtcattttcccagcctgggcaacatggtgaaacccagtctctacaaaaaaaaaaaaacc

SEQ ID NO: 209227 - DNA, 1000 bp, Homo Sapiens
  misc_feature (220)..(220): n is a, c, g, or t
tgagtaaagtacctgctttcgtagaatattttagctgaaaataattggaaggtatacctcccagtgttaaactctcctataaacattttcttcttacaaattggtatttctgaaccactatctcttattcctgtgtttgagtagatacaattaagtttcatactaaaataaattttcttcacatcattactaaagcattcagttatttcaaaaatatagnacattactatactgatgaataatggaagaagtttgtctgttgattcaacatattcaagagtaggatagtttttctcctgaataaaactacaaaatcaatagtggatttacttacttgacctcaaagagataagacattttgtctatgaaatagtttatagttttttgtttgtttgttaaacaaaaatgaagggaaataaaccaataaagcagaaggcatggattgaggaagcaatctgggaaaggttgtgaaaagaattgccagagtcttggtcaaggggaatcctagcaagccaccctgcagaggtcgcaggaggatggaagaactcttgggaggaagctctctaactggagggctatcatttacaaagccatgatactataaacactgagtattgagttaacaaaaaattgtaagactagtgtgttgagaagttagagtatggaaaaaaggggaaaagggacagtttgggatgaggtagggaggcagatttattcatggaagcttttctatacagcaagaattatgagccatacctttcagatagttctgtgggttggcagccctcatcacctggcacctttggcactgccttgatagctgcctctcacccaagttagagaaagaggattgaagacaggaagaaagcaagcttatgtgcttgatactttatcctaactaggtatattcttatttccgccctttttacttgaggcacagatacaccatcatctgcactttctgtgcctaacttatcttaacaaaaaaaaaaaaaaaaaa

SEQ ID NO: 209228 - DNA, 840 bp, Homo Sapiens
ccgaagttcaagcgatttttctgcctcagcttcctgagtagctggggctacaggcatgcaccaccatgcctggctattttttgtatttttagtagagacagggtttcgccatgttggccaggctggtctcgaactcctgacctcagttgatccacccacctcggcctcccaagaatgttgggcatttcgggctgtgagccactgcgtccagtcctgggttgttatgttttatcatcaccccagcacagtacgaggaggctaacacgaaatcctgtctctgggcccaggagctgcaggaccagggtgagtaccacgtgatgctctgaaacttaagactggcgacccatggggtggcagaggccacagctggtggggaccacggagtgccttgtgtctgccgctcagccctcctgccctgtcagcacacgttcctggcagggccacgcgctcccgcaacgcgtcccccgagtccctgtacggtgcagcttccgcctgctgccgcgcctgtcctaacgagggacacactactcatcctcctcctacagaaactggcgtggtcaccagtggtctgggcagaagctcatcaccccagcctgatcgtaaataggggccaccattgtgacctaccacggatattcacccatcagaccagcgacaatttacacatctgagaacgctgtgtgccgctcacgcttccaggtaacgggcagggttacatttcacgatcctcagcggtaggagctgtataccagtttggcaggtacggaaagcacgatcactgaatgagggacagtgtctggggttggagcgatcgcccttgtctgatggcgtgcgcagaaa

SEQ ID NO: 209229 - DNA, 1000 bp, Homo Sapiens
ctaatttttctattttatgtagagacgggatttcaccatgttggccaggctggtcttgaactcctgacgtcgggtgatccacctgcctcagcctcccaaagtgctgggattatatgcgtgagtcactgcgcctggccaattttcatatttttagtagagacggggttttaccatgttggccacgctggtctcgaactcttgcatctcaagtgatctacccacctcagcctccaaagttctgggattataggtgtgagccaccatgcccggccccacttttttgtttcttttccacgacggggtttccactctctttttcgcccgggcttgcattgcaggtggttgcagtctcacgtgcagccctcaaccttcccaggcctctggctaatcctctgtgcctcagccttcaccaaagccgtttgggacatagcagctctgtgaacccacgcgaggcccggttccctcctttcctcccatctttaaaccagtttaaacgagctctcgtattattccgacctctttcaagacccccgcaatatttttcacgcaaaactccttatagcactggcgccatagcggtgaacactcttgccccaggtgtggcacccacaagtctactcctcctgaatcggttctcccccaacgagagcgtgattggagtttagagcgagacgccttattcgccgaagaatatagacaccctctagacttcgccccaatgagtgggccggcggcgggtgggtctccacccccattgatgaggccctagaaggttcccgcgttgacaccccccgtctctcatagtggcccgtacggtgatttacccccactgttctgtgtcgtaagagggatgacccctgtgtggattaagcctccagcccacgagatgtccccgtgtgtggcgccatgatgttgtgtccccaacaaattgcgtgtgtttgttgtcagttaaggaaaacccccccaggagggtttgtgcaaatttggggggacacaccgt

SEQ ID NO: 209230 - DNA, 545 bp, Homo Sapiens
  misc_feature (32)..(32): n is a, c, g, or t
ttttttttaacataaaaaaataaatttatttntgagtctgaaatactgaagaacaagcatacagataaatagtacaaagaacaaaaattagaacatgagtaatgacttaagacacaggcatttttctagctattgcatacagacacatttttacacacaaacatattttttaaagacatctctccaacattctcaaaaggcaagagctgtatttgtgacatttgtaataaatgcaacagcttttgaaacatccagtttctttcctaagtcatttgattaaaattcacacaagtgatgattacctattccattttctgaaaatacgacatacagtcatgtttcgatcaacaattgaccacatatgacagagatcctataagattataatggaactgaaaaattcctatcacctagtgatgccacagccattgttacattgtagcacaatgtattatctgttctatgtttagattacacagataccattgtgttacagttgcctacagtattcaatacagtaccatgctgtacaggtctgtagccca

SEQ ID NO: 209231 - DNA, 587 bp, Homo Sapiens
  misc_feature (510)..(510): n is a, c, g, or t
  misc_feature (529)..(529): n is a, c, g, or t
  misc_feature (553)..(553): n is a, c, g, or t
agaccattaccattttatttgtattaagaattatttaaaataagtataatatatatatttcactgagcctaagttgagcaggctaaaagttgatacattgagtatgtagctacaactgtaacaaaactgacatatgttcttgaactttcatacaatcgtgaccacaattcagttgctggatttcacactctccttaggtttatacaaactgaaggacaggagatgaatagtatagaaattgctacaactttttgaatttcaactatgtttacacacagaaaagatacaaaaatacatgtataaaattgcaggtagtatctatttggaatgctgaggcagtccaggttgctggtggaggttagtagggaatcctagttgtttaaaaggcaaaatggatgcctgactaattaaattaagtatatatgaagatttgtgttttaaagttttttagtggggaaaaatactttttaccactaattggcttcagaaattgagttgcgtaagtggccnaggagctaaaaatcattcnaaaattttaattacccatgaggangaacccgtttttaacatctttggaggaaattcca

SEQ ID NO: 209232 - DNA, 392 bp, Homo Sapiens
  misc_feature (9)..(9): n is a, c, g, or t
  misc_feature (341)..(341): n is a, c, g, or t
  misc_feature (355)..(355): n is a, c, g, or t
aggagcatnttattgcttgtaaattacatctcaaaaaacccacttcacacacgttaactggaaatatcttcaaatgaacggccgtgagcgtggttattttggtaaccagagaaggctaaaaattaaaactgtgaaaattaaaactgagcagggaaggcagttttgtggtctcatattatttgccctcaacaaaattcttttgcccgtggccaacatggtgaaaccccgtctctaccaaaagtacaaagattagctgggtgtggtggcgggcgcccgtaatctcagctactcagcaggctgaggctggagaatctattgaacccgggaggaaggaggttgcngtgagccaagtttncaccattgcactccagcctgggcaacaagagcgaaac

SEQ ID NO: 209233 - DNA, 1000 bp, Homo Sapiens
atgttgagacccagcttctaccctctgtaataaggaccataatattgctaatatttatggcatgtttatacagactaggcattttttgaggtgctgtacgtatgttatctctttttgttctgtcagcagccttatgaagtaggtaatattattgctcttttacatttggagaaactgaggtacagagaagttaagattcttacttgctttaggtccctcagatggtaagtggtgtgactaatatttagacccagaacctgcactttgaacccactctgctctgtgcctctggtagaaaacagccaccttttacatgagcactcactgggccctctcaagttgaaatgtgtgttattcacagcagtcttctcattttgccctcacagccacccatcaaagtgaataggaaaagtaacttcatggtagcaaagaggtagtgggcctttcctaggaaatagggctggcctaggggcacaaacttggtattagactgggaaaaagaaaggagaagttcagtttcttgattcaatcctcatgtatatgaagttgaatgagaaaagactgcagaatcaaatgctgaattatgctttaacaattaaggagagctcaatgttagttgtagggtatgggaattgatttttgaaagactgatttatttattaaaaaatattggccgggtgtggtggctcacgcctttaatcctagcactttgtgaggctgaggcgggcggattgcctgagctcaggagtttgagaccagcctgggcaacatgatgaaaccctgtctctactaaaatacaaaaaaattagctgggtgtggtggcgtgcgcctgtagtcccagctacttgggaggctgaggcaggagaattgcttgaacccaggaggtggaggttgcagtgagctgagatcgtgccaccgtactccagtctgggcgacagagcgagactctgtctcaaaaaaaaaaaaaaaaaaaaaaaaaaaaaaaaaaaaaaaaaaaaaa

SEQ ID NO: 209234 - DNA, 1000 bp, Homo Sapiens
gctggctgctgccgcacgcgagaacctctcgcttccctgtcaccaggtcctcgcggaggaaggggagggacgaggcgcggcttttcctgtgccgcctgcccggttcgacctgcgcggcctgcggcttcttgggaactctagggccgcggccgggcctggctctgccggcggcctgttgggagctggatcggagcggtttggaacgacaagcccgacaaagagacttttaaaaaaccatggcagatgtggacccagatacattgctggaatggctacagatgggacagggagatgaaagggacatgcaactaatagcccttgaacagctatgcatgctgcttttgatgtctgacaacgtggatcgttgttttgaaacgctttattcatatatagtatgatgtaatttttaagagactggggcctcactatgttgcccagtctggcctcgagctcctgggttcaagcgattctcctgcctcggcctcttcagtagctgggactataggctgtgccaccacacctggctttataatgtaattttaaggaaatgaacctaaagttaagtcagatatgatttactatatgaagatacaagagtatttcaagttgaaggggttagccgtgtttggggtagtgtaccagtaacctccaaaaactagacatttggtttaattttgtgactgttttgtttttaaacattagtttgcttttcattctatagccagattttcttgttgttacaagggaaaattgtcctggttccttcttgaaactagtgagggaggcatagtgagatggaaagaatgggctgtggcatcagagacttgggttcagattcttggtctgttgtgttcattagcctctgagagccttactttcttcccctgtaaaatggcagtagtctttttttcttttctgttttttcatatgaagtcttgcgctccagcctcggtgacagagtgagaccgtgcctccaaaaaaaaaaaaaaaaaaaaaaaaa

SEQ ID NO: 209235 - DNA, 501 bp, Homo Sapiens
  misc_feature (460)..(460): n is a, c, g, or t
  misc_feature (471)..(471): n is a, c, g, or t
  misc_feature (478)..(478): n is a, c, g, or t
aaacacaaggaaatacgtcagcagatcctggatgaaaagcccaagggggaaggttcctcctcattcttgtcggaaacttgccatgaggatccctctgtttcccccaactttactccccccaaccctcaagctctcaagtggtgaccaccggtccttccggccagctgcaggtggagctggagcaagaataccaagacaaattcaaaagactgcccctcgagattttggaattcgtgcaggaagccatgaaaggaaagatcagtgaagacagcaatcacggttctgcccctctctccctgtcctcaagaccctggaaaagtgaaccacaagactccctccagtgaggagctgggaggagacatcccaggaaaagaatttgaatactcctctgtgaatgctcctgccaggccttcagaaattgcatggccactccagcgtcatcggactctctcttattacnaagatcactgnccaggancatcttccgagaagcattcctta

SEQ ID NO: 209236 - DNA, 569 bp, Homo Sapiens
  misc_feature (57)..(57): n is a, c, g, or t
  misc_feature (59)..(59): n is a, c, g, or t
  misc_feature (65)..(65): n is a, c, g, or t
  misc_feature (69)..(69): n is a, c, g, or t
  misc_feature (73)..(73): n is a, c, g, or t
  misc_feature (82)..(82): n is a, c, g, or t
  misc_feature (86)..(87): n is a, c, g, or t
  misc_feature (236)..(236): n is a, c, g, or t
  misc_feature (238)..(238): n is a, c, g, or t
  misc_feature (241)..(241): n is a, c, g, or t
  misc_feature (440)..(440): n is a, c, g, or t
  misc_feature (492)..(492): n is a, c, g, or t
  misc_feature (530)..(530): n is a, c, g, or t
  misc_feature (558)..(558): n is a, c, g, or t
tagagatggggtatcaccatgttgcccagggttggtctcgagctcctggcctcaagnantcttcncgcntcgncctcccaanttgnngggattacaggtgtacgccaccgtgtctggctgatttctctcatttctaatgctagggcagacagacagcactgactacgactgtggagttcagtcttcattattctaaatgacccagcaatctattgcctagataccatatccactcncngtnacagatccatgaagaagcacttctaccagaaagttacattgaaatttgtagataacttgttattttgacattttttatcataattaatgtgggggcccaaacttctgagggtaacagtaattcagccaagccactgagtagatgatatacaaaaagagacaaatgaaaatggactgcgtgaaacattcagattccaagncagcagaaacacaaggacaaggaaggagtaaaggtgttacacacaaagaggncaagcaggggttactcagaaatcgggtcttcctgccancagtttttaatgtcaccgttcagatgcncagttaaactt

SEQ ID NO: 209237 - DNA, 433 bp, Homo Sapiens
  misc_feature (95)..(95): n is a, c, g, or t
aggtacaaatttacgctcccttctatgaatagagagggctatttgtttcattcaaagacaagacattgttagaaatgagtggcacacctcttcancccatccccttcctccatggaggtaaaaagatcctattagttctcataattgattctgagggctgcagcgtgcctcatttagccgtccctgctcggttcacgccaaggatgtaattcatgcacacattggacgtccaacatggctgacgcgccttggacacacagcctcggcgctgcatcattttttaatcagctatctgaggaatatttatctgatcaacaaagagtgttgtcaggaggagaccagaggtgacattaataagcctgtggtttcctggtacaatgatggaggaagagtttggaataaaacctgctcgtttgagcatgccagcagacta

SEQ ID NO: 209238 - DNA, 457 bp, Homo Sapiens; identical to SEQ ID NO: 36115

SEQ ID NO: 209239 - DNA, 1000 bp, Homo Sapiens
taagtaaactctacaaggactctcatctccctcagagtaaaggtcacagttgttacaaggccctacgtaatgtggccctcaccaccactccattacctttttcttatctactatttgctaactttgctttgtcctcttttctgttctgaaacaggctaggcatggtcctgcctcaaggcctttgcaccacctactctgtctgcttggattgttcttcccacagatttcttgctcccttcttccttcatgaagaaatgtcatgaaatgtccttccttcatgaaatgtcaccttctcatttgaggccttctgtagtaccccaaagaatggtccccaaagatgtccacatccttatgcccagaacctgtgaatgtgttatcttaatggcaaaagtgactttgcaaatgtgattatatttaaggatcttaaggaggagattatcctggattatccaggagggcccaatgtaatcacaagggcccttataagtgaaagggggaggcaacagagagaaggagatgtcataatgaaaacagatccaagtgatgagattgctggctggggtggaggtggaggggggtacaatccaaggaatgcaagaagcctctaaaagctaggaaatgtcaggacacaaattctcccctagaacctgaggaagaaacccaggtttatggacactgattttaacccaataagtcccttttctgactgctgacctccaaaactgtaagataataaatttgtgttattttaagccaactgagtttgagataatttagttatggcagcaataggaaactagcacaccttcctagccatcctatctaaaatggcaacccatgtccttcctggcacttcctatctcccttccatgttttttttaaatcatatatacaatatattttactgttttacctattgtcttttccaccagaaagtaaactccacgtaaataaggaaaaaaaaaaaaaaaaaaaaaaaaaaaaaaaaaaaaaaaaaaaa

SEQ ID NO: 209240 - DNA, 1000 bp, Homo Sapiens
ttgccaacagtccaattatacacttttagttattttatttgtttgtttattttgagttggagtttcactgttgttgcccaggctggagtgcaatggcgcgatcttggctcactgcaatctccatctcccgggttcaagcgattctcctgcctcagcctcctgagtagctgggactacagctgccatgcctggctaatttttgtatttttagtagagacgaggtttcaccatgttggccaggctggtctcgaattcctgacctcaggtgacccacccacctggcctcccagggtgctgggattacaggcgcgagccaccgcgcccagttgcttttagttactttaaaatgtacgattaaattatgatcgactatagtcaccctgttgtgctgtcaaatactaggccttattcattgattctatttttttgtagccattagccgtcgctacctccctgcattgttgcattttggcctcttatgtgtaagtcccgtttgttctccagaatgctgcttttaacacccagcccgttccatctctctctcttctgccttgggtgtcatgctgtctcttcctcagatttctcctggggtgcaggtgctcccctgcgaaccactgctgtgcacaaagtgattttgtgctcaggcaggtggatcgcttgagcccaggagtttgaaaccaccctgggcaatacagtgagaccccatctctacaaaaaaaatggctgttgtgcagtttgggatgagagttggttgcccccgcggtcctcccttcccccaaccccacctgccctccttgctcagcaacaagggacccccttcactggactatgaagcctgagggttgtctaaatcaatccttggccaggcgcagtggctcatgcctgtaatcccaacactttgggaggccaaggcgggtgcatcacctgaggtcaggagttcgagaccagcctggccaaggctctgagagcagcgagactccttctcaaaaaaaaaaaaaaa

SEQ ID NO: 209241 - DNA, 592 bp, Homo Sapiens
ttgttggtactggtaatccctatcttctgaataaaatcttgacttctattttgaggcctgggctctgctggaaccagaaagctgaaagggaccttggagagccctattcattgctttcaccgaacagaagttcattactttatctatcacatactcttgttgcatgaccaaatgaccttagtccaatctccttcctttttaaaggaggaaactaaggtcctgagaggctgagatgctctctgatcctagtctgttttaacctcatggctacttagcagctcacaaacaaccagagtcaggtgaaataacaggcactctcaacataattagagcaaagatcacacattcagaaacaagaaatgaggggtttgctacacacaaaaagatgacttaaaatgtaaggtatctaagggatgagctaagttaaaagagaactcctagcaattatttctgaggatgcaaggaggattggtaaggttaggaaagggtgactgtagcttttagtaggcccagatttctcaagttcaaaagctgctgtaatttggtctgttctcttgtaccgagggcctgaaaggcaacaatgtggagtgta

SEQ ID NO: 209242 - DNA, 583 bp, Homo Sapiens
tagctttttaaatagacttttactgtgaaatataataaaagatttggaaatgatttttaaaatttcaattacagtgttaacaattcaattatctttatgagagaaagcaccacattacaaaaatacaaagaaggactctaaaatgcacatgctaaaatgacttaatagtaattacattagcaaatcatgaaattcagaacctttttctaattacagatctaaatcaggggtctcaaacttagaggtcttcagggctgagcaggaactacaaagtagagaagttgtctgatataagagggaagtccagtaggctgtggcaaactggggaacacacacccaatcaaaagacttttcaaattcaaacatttttgaaacattatgtacatctaataaaataactgtgggtcaaactggcctatgtgaactaccagtttacagatctggtctaaatgaatttctaatattttatgtagtacctaaatcctcaaaatggcagataaatggcagaccgcacttctttgagattatatatatatatatatatatatatgcatatgtgtgtatatataatacatatatatac

SEQ ID NO: 209243 - DNA, 541 bp, Homo Sapiens
tttttttttaaggttttatattatttttatttttcttttcttttttttttatggcttggatgacactttattttcagatccaatactagaagttgtttccatgttcacattttccttcctggtttaaaaaaaaaagagttggatttttttttttttgctttttttaaattatactttaagttttagggtacatgtgcacaacgtgcaggttagctacatatgtatacatgtgccatgttggcgtgctgcatccagtaactcgtcatttaacattaggtatatctccaaatgctatccttccccccattgtatttttcatagcttaaaaatcattgacatagaataattccagctaaagtacgtattaaatccctggaaaataaattttgtcttaacaaggtaagttgtgaaaagatgttttgtcacaggaaaaaggaaatcctccatttaaaaccctccatgctgaaataaaggaggagtcccatctttcagtcattccacttcaggcttttgatataactaatctcttttcttcttcttt

SEQ ID NO: 209244 - DNA, 560 bp, Homo Sapiens
  misc_feature (10)..(10): n is a, c, g, or t
ttttttcagntttcccaactgtaatatttgttctgtatagattttaaacatggatgttaagattcaactaggaatggtactacagcaaaacaaaatatgcataaatccataatctcttggcatgattatgactgacatattctaatcatttacaaagtggtagaataaattatctaacctactcagatgttttttcaacttgtaaaactaaaagacaactataaagaatggataatctgttctttgcccatgagtggccagacactatcaacagggttaggacattcacaatcagctcagccagtggaatcagatataaaaagcatgcaacttgaaagactgggagaagtgaacctgtctattccaatagacaggctcccttacagggaaactaaatcattccagaaagcctcatctaaaacctctgtaattgacaacagtatctaacaatcgtgatcttgataagtaaactatttgctgtaacctaaagaagcatttgtttatcatgtacaaatatttagaatgccaatcctgcattctctgcctagaattcaaaagaa

SEQ ID NO: 209245 - DNA, 546 bp, Homo Sapiens
tgtaaagaagaatcagggcagaaaagtgcttttatcatggctccggggaccttagcttcagttggtgttgtgagaattcctcacacaaggacattctccttgcttcagcatcaggatggaagtgtttctcatctggactttttcaaagactcagctggaggaatcagaattcataatttcctggcagctcatgattctgctacactacaccatgccatctcttgtgtgaaaggacagatttgatggaggactatgtcatccctcatgcgtttcttattgtctacatttattctaatgggaagaagtgagcaaaaacacctcaataatttgggtagtttttagaaaaccttgttagtaaattagaatagtgccactttggcattatgagaaagaagcatggatacataactagggttttgtgtatgactacaacgaaatgcagaatggtgtctccaaaaggtttccagttgctgccacaagaactgcttggtattgcctacatgtgttgtcctatttttgctttgcccttctgcagttacttgctgt

SEQ ID NO: 209246 - DNA, 582 bp, Homo Sapiens
ttttttttttgacacactcccttttaatttattgcagaaataatatgaacatctgggaaaatgatagtgctaaatatctcgtgaagtaagtcattcttagaaagggatttgtgactttgaagtaatatataattagcaagattttaaaaattattcttatgtactgaaactcaaaacagactagcaaagtacctccaaaaaaaaaactatcaaattaaactagaaaagtatttccaaaataaagacgaccaaaaactagcctgagaatactagttttctgttgctacaacacattaccacaaacttagtggcttaaacacaaatctattatcttacagttctgcagattagaggtccaacacaggcttcactgggctaaaatcaaggtgttggcagggctgcgttccttctggaggctatggggaagtttctgtttcctttccagtctcaattctacaggctgcctgcaactccctggcttatggccccttcctccatcttcaaagccagcaatggtgcatctctctctaaccggtcttccatatttcacattcccctctgactctgacactcttccaattc

SEQ ID NO: 209247 - DNA, 437 bp, Homo Sapiens; identical to SEQ ID NO: 45535

SEQ ID NO: 209248 - DNA, 429 bp, Homo Sapiens
ttttttttttttttttcatttcaaactatttttatttaacatttggtattgttaaacaggtatagtattcaggacatacaccttctaccacaatttctttaattagggtactttatattttatcaaaaatgtgcatattaatagattgtagtttagcctttgtcaaaagacatgcaagtatttagtatttacattaaaaggattgcctcagaagaaacattgaattcataagccctcttaaaaagtcaaaaatatgcataaagaagactagtattgatattttctgatattttagatatgattaatattttggacctccattggtttccacactatcatgcaaatttccaacttgctttaacacaacagttctatcagctgtattagagggaatacacattttaattgctctttttgaaaatatcaccg

SEQ ID NO: 209249 - DNA, 427 bp, Homo Sapiens
  misc_feature (427)..(427): n is a, c, g, or t
gatacatctatacttctgaataatcataactgatactcaaagagatgccctgacaccctccaaggttctacaaggtgaccaaatcagagaggtcacctcatgcctagtattattttggggttagcatacattttataataattattttaaaactggcaatcccattttgggactcaatgacagctctctctattaatcatattgttttattaactgaaatagtccactcagtcagtaggattaatgatcagagattatgacacaactaaaaccaaagctggggcaatgggctctcagaatggaaccacccattatgaactatccatctgaccaactctttaactttcttcctaaatatgagatcaccaaggcgtttcaatgcagcctgcacaattcatggggcagggtcctcagattaaagactttn

SEQ ID NO: 209250 - DNA, 636 bp, Homo Sapiens
  misc_feature (588)..(588): n is a, c, g, or t
  misc_feature (614)..(614): n is a, c, g, or t
ttttcttcctgggaattaactcgtcatttcattccttcagtcatcttctgtgtaggtgaccggagcactgagaggcagctctgatgcactattgtgtgtcagcagctcaaaggccctaaaacactgaaggttctgcatctgaagtattagattgttagcagcaaaatatgaaagatgaggtggacagtcctctaagccctatttagggaagcttttccaagccacaatcttaactacctacccaaaggatttgcattacccccagattctgtgccaacaaccttttaaggaaatacagtccttgggaaatgagttttgatggtgaattggggtgttaaggaagggaaagattgtcatagatggtagggctttgaaaatgcagggtatcagctgccactcctggcttcaacacattgagtcactgcctagacggttctcttggtcttattcccatcctggccaatgcttaaatactatttgttgaaaataattctttgagacagatttcagctacctcccttccaggttcgatttaacttggttgtaattgtcaattgttgtataggtctacctgtgtgaaagaaaganaagaagaaagaagaagagaaggaatntaaggccagttaacagtttgag

SEQ ID NO: 209251 - DNA, 721 bp, Homo Sapiens; identical to SEQ ID NO: 48555
  misc_feature (559)..(559): n is a, c, g, or t
  misc_feature (602)..(602): n is a, c, g, or t
  misc_feature (633)..(633): n is a, c, g, or t
  misc_feature (638)..(638): n is a, c, g, or t
  misc_feature (646)..(646): n is a, c, g, or t
  misc_feature (657)..(657): n is a, c, g, or t
  misc_feature (691)..(691): n is a, c, g, or t

SEQ ID NO: 209252 - DNA, 1000 bp, Homo Sapiens
aagcttccctgcagaggccagactacctgccgaggatcttgtgattctggagaactaggccgaaactcaggaacattttcttcgcagattgagaatacacccatcctgtgtccttttcatttgcaaccagtgcctgaacctgaaacagtgttaaaaaatcaagaagtagaattcggcagaaatcgagagaggcttcagttttttaagtggagttcaagagtttttaagaatgtggcagtgatccctcctggaactggaatggctcatcaaataaacttagaatatttgtcaagagtggtttttgaagaaaaagacctcctcttcccagacagtgtagtcggcacagattcacacataacgatggtgaatggtttagggattctggggtggggggttggaggcattgaaacagaagcagttatgcttggtctgccagtttctcttactttaccagaggtggttggatgtgagttaactgggtcatcaaacccttttgttacatccattgatgttgttcttggtattacaaaggtaagttaaagttgtggtagctctatgacttactgaacattatttttataaaaattgaagagctctatgagagcagggatttgggttcattactgcatcctcaggtctcttgacgttagccacatcatcatagttatcatagtaataacaacaaacagagcatttagtttgtactaataaatacaaagaaatttgttgtgttcacttatgttagctcatttagtccttataacaagcctgtgagatggatactattactattctcattgtaactctgagaaaactaaggtacagtagggtttagtgacttaccaaagggtcgaaggcctgagtagtaaggggtagagcaaagattccaggcagtcagattcttgagtccattgtcttaaccattatgccttattagtgccttgttgccttaataaacacttgctgactacaaaaaaaaaaaaaaaaaaaaaaaaaaaaa

SEQ ID NO: 209253 - DNA, 1000 bp, Homo Sapiens
catgttcctttgcttccaactcccataaggaatttgctaaagatacaacctcagagatagcttaaggtggagagaaattttcgaccataagttccttggagaatacgaattcaagtagggtgagtgggaagaggtttctaccaacattttctccttgcatctcaggtcctgaatcttccaaaaagtgctgcttgtgccctacactggctcaaatttgcatttctgaaactagtttggtttgcattaatttcactggagttgtgatcacattgaaaatgcaaagcctaattgttaattaagaaaagtcattttgagatgtgatggtgttttatactcaacatgagcaggttctatttggttgtggcaaccttaagatttatgactgactgtcctatcaacacttggcaaatgtttccatgctatggggatgcattttacaggctgttaaataagaacccacgaagtggtccggtatgtttttaaaaaatgagcctagcaccaatgtatagctttctctagaatttaaatctcattgttaatttgaagttcctctctttattgaaagctgggtattgaatacacctactgggagatgtggccacatagagatagtctggattaatgggctttggtcttattttttagacctaaatttattcttcattaaaagaagagtaaaattccaggtgcggtggctcacgcctgtaatcccggcactttgggagcctgaggcgggtggatcactcaagattaggagtttgagaacaactcctcagttggtcaacatgtcaaaacccctctctgctaagagtacaaagacttggccgggcgtggtggtgcgtgcctgtaatcccagctgctcgggaggctgaggcgggagaatcgcttgagcccgggaggcagaggttgcggtgagctgaaatcacaccactgcactccagcctgggcgacagagcgagacttcgtctcaaaaaaaaaaaaaaaaaaaaaaaaaaaaaaa

SEQ ID NO: 209254 - DNA, 1000 bp, Homo Sapiens
agcccaccgtgtctcaaaggaatgacaagtatccattccaatgccaagccttggcataaaggctcccagaaactgctcatcttcttggaagtggttctgtaaagattccagcaatttttgcaggacatcttggggcactttgtagcctgtgcccttcagttcagtgaatctggttagctggaagcttttgtccaattcgtaactttccgggttaaaggactcccatgtagatatggttgttgggccccactctcctcacagctcagcccctcccttccctctgcgggttggctgggttctttatggatccaccggctcgctttgcgccccgagttaaacttttttctatatatatgagatcatgtagtatttgtctttctatgtcaggattattccatctagtatgctgtcttctaaatttatctatattgattcaaatgatgaaacttaccacctttgaaggctgaatagtattccattgtgtatctatacaacatttattttaaaaaattaaatatattgattgaaaaactcatgtgttataaaagggcattcccgtcttaaagcacatactagtgtaattcagcatatacatatcatattaatcgttaatttgtactgagaattaaccataatactttaatgtgttaataaatttaattctcacagtaactgaataacataggtgttattatcctcagtttgcagagaaagaaacacagccaatattaaaacacaggcaaatgtgtctccagagataacactccttagtataacaataaaaaccatctttaatcgtttgaacccaggaggtggaggttgcagtgagccgagatcgagtcactgcactccagcctgggtaacagcaaggctctgtctcaaaaaaacaaaacaaaacaaaaacctctttaaccagaaaaaaaaaataattattttcacactcacttttaataaaaattaacaaaaattggaaaaaaaaaaaaaaaaaaaaaaaaaaaaa

SEQ ID NO: 209255 - DNA, 1000 bp, Homo Sapiens
gagttgtgggggaagatcatgccccttaaatcagcttgtaaaatgtgagaaaaacaagtgaggcaatctgtatccctggagaaggactgtgcaggtgaactgtttgcctttccacgtgaaggcaaagagaaactgacttcctgggttgacagggatgctgaaagaggtgccactgagatcaatagctgaggaacatcaagtgtcaacaggtgtgttaggattgtatgtgggtctggcgtagtggggtgctgaggtataacaatattgttaatggctcttaggtcttgagacctccatccctttccatttggtttctggacaggcagtatgggcatgctgcaggggctagtgcaagggactatgaatcccttggagaggaaatcattaataatgggctgtctaccagccaaagcttcaggattgaggagaccctgccttacattaggtagaggtttgttggggtctaaatgtatggtaataggtggtgctgagtgaattagacctacatcagtgttagatttagccaagtgtatcaggcggttctcttaaagccaggtgctgagtggcaactgagtaattagtgacagacaagggaaagacatgtaaggtcaattgatacggtttctgaaggagagacctgcagaatggtatctccctaatgagaaaaagaaatatgagcctggtcagatgtggtggctcacgcctgtaataccagcactttgggaggccaagcgggctattcccttgagcccaggatttagagagagaagcctgggcaacatggcaaaactctgtctctataaaaaaatgcaaaaaaaaattagctgggcatagtggcatgcatctgtagtcccagttatttgggaggctgaggtgggaggattgattgagcctgggatttcaaggctgcagtgagctgtgattgtgtcactgcactgcagcttgggcaacagagtgagaccctgtttctaaaaaaaaaaaaaaaaaaaaaaaaaaaaaa

SEQ ID NO: 209256 - DNA, 1000 bp, Homo Sapiens
ggttagttcttctctccaacattgtatctttataaataatagcaggtatatttagactcttttgactattcatggtaacactcacaaaattacctcaaggccatttcaataaacagttttgggggcactatcctcattgctttttcctggcattttataattttacagcagggcgcagtgactcatgcctgttatcccagcactttgggaggctgaggttgacagatcacctgagttcaggagtttgagactagcctgggcaacatggcgaaaccctatctctactaaaaatacaaaaatcagccgggcgtggtggcatgcacctgtaatcccagctacttgggaggctgaggcaggtgaaacgcttgagcccggggaggtggaggttgcagcgaaccgagatcacgttgctgcactgcagcctgggcaacagagtgagactccgtctcaattttttttttttttttttttttttttacattatgaggcattgtccccatcaatattggacatatcttttcctttttctgggtcaaaatttttctagaacagtgatttaaaaaggatttgttctatatgttgagtgtgatggactggtttgcacccacacacctgcaaaccagcctctcggacaacatttacaaatagttgatctcatcccttacattttttttcatcccttacatttttagatcagaattgtcacaggaaataaaacactttgccatcctgacagtagatcagaaggttaatatagatttagtcttggtacatccagatttccggagtccaaaagtggtctgtctctctgtgggcaacccttgagaaccacagaaaaataccccaatgggactgggcacagtagctcatacttgtaataacaacaatttgggaggctgaggtgggaggatcacttcagcccaggagtccgagaccagcctgagcaacatagggagtccgtgtctctacaaaaaaaaaaaaaaaattgaaaaaaaaaaaa

SEQ ID NO: 209257 - DNA, 403 bp, Homo Sapiens
cgattcataccaatatgaacaagttcttgcatctttcactgcagggcgtggctatgcatcatttgttttgtttttcatttactgatgtaaagaactttggacagaacagaatacaaacataatctgacaccgtgacatctcttcttcctcttatcttaccagctttctgattttcccacagggttttccaagctccgcgaaaaggccagtattcgctaggaatggtctgtccaaatgacaatctatgatacttccaatgaaaacaggccaaagatgcagacggtggtagaaatcaggacagtaacaccaatgttcatagtttaggctctctgatattctactaaggaacaacaagaaaaaaaaccacattgttttcaattgcatactcttttgaatatatagt

SEQ ID NO: 209258 - DNA, 397 bp, Homo Sapiens; identical to SEQ ID NO: 58286
  misc_feature (254)..(254): n is a, c, g, or t
  misc_feature (333)..(333): n is a, c, g, or t
  misc_feature (357)..(357): n is a, c, g, or t
  misc_feature (369)..(369): n is a, c, g, or t

SEQ ID NO: 209259 - DNA, 531 bp, Homo Sapiens
  misc_feature (269)..(269): n is a, c, g, or t
  misc_feature (402)..(402): n is a, c, g, or t
  misc_feature (408)..(408): n is a, c, g, or t
  misc_feature (416)..(416): n is a, c, g, or t
  misc_feature (427)..(427): n is a, c, g, or t
  misc_feature (451)..(451): n is a, c, g, or t
  misc_feature (456)..(456): n is a, c, g, or t
  misc_feature (489)..(489): n is a, c, g, or t
  misc_feature (508)..(508): n is a, c, g, or t
gccccagagttgggaatgtgccagaatcaggccaacaccagccacacctgtccacagtgccccttcctgctccagttgatccagagagctcctccctctaccctcatgatgccagggagcgtgattgtgggtgtgtctctgactgggacacccaggatagggtgtgcaatgaggccaggaccctcctaaaccctaacagcatcctaacgaggcccattgcagctttcgatttccttcgtaacagagctcgcaggccctcagttgcagantctcaccttctggagtgactccatcgttactccagtctttctaggtggtggaacactccaccacacatgccatttagaaagacgccagcttggcctttccaaaaagttaaccagtcgtctccccaccacaaancctgtnggaagcangttactcttangatgcacacccgtcaacgaggcantgcanttttttgcaggcatgaacggctcccatctaggncttacccaggagccaacantgctggggagagttcaggcagct

SEQ ID NO: 209260 - DNA, 466 bp, Homo Sapiens; identical to SEQ ID NO: 57992
  misc_feature (466)..(466): n is a, c, g, or t

SEQ ID NO: 209261 - DNA, 539 bp, Homo Sapiens; identical to SEQ ID NO: 40701

SEQ ID NO: 209262 - DNA, 422 bp, Homo Sapiens
aacaaagattactttaataattcatagttgagtcatcttttgaagccaagcatatcttagtgagatttttctcagggcctcagggaaaacagctttctgagccactccaattattttacctttcaatagcacttatggctacaaagtgccatacaaacatttattggctcataacctgacttcaaactagggggtaatttgaagtgccaaaggttatgctctcatctttctactcaacttcttaagtcaataattaatacttcactgacacattaaaagatacaaatgagtaactattatcacatagccaggaactacaatataatctatcttaatactttgtaattcggagtcaaaattatggggaaatgttacagcagattggatttttagaaataaaaatatagcactaagcacttacg

SEQ ID NO: 209263 - DNA, 691 bp, Homo Sapiens
  misc_feature (376)..(376): n is a, c, g, or t
  misc_feature (584)..(584): n is a, c, g, or t
  misc_feature (597)..(597): n is a, c, g, or t
  misc_feature (608)..(608): n is a, c, g, or t
  misc_feature (631)..(631): n is a, c, g, or t
  misc_feature (650)..(650): n is a, c, g, or t
taccacttcgctaatacttttattttctgtccatattcaagcgtgttgagattatctagtttcctaaagtaacaaatataatatatccactccaccacacatttcagcatttaatactcttgtttttccttatgtactagtgacatccttaatacagaaatcatcaatagaaaaatgcagtgtggacattcaacagagcaggaataaaacaacaggtaattgtgtggcttcaatttcctaagaataactgttaatatttggtagatttcatgtgttaccttaggcacaattcataacaatccatatgttaagatattcttatcattctgcttttctggattagaaaattgagacataaaaagattcaacaacttgnctgagggtcacataagcaccaagtgatgaggctgggaattatatgtaagtggtctgacttatgagcctaaggttttaaccagcaaggcatgctgcctcatgaggagcctctgctaggatactccactgttgataggaaatatgtgaaatatctgattattttagtgagcgttaagtttggtctgaagttaattgataggcttaaaacntagggtgaaatcnttacgattgantagattttcctcaccatggcggnccacattagtcctgttccngtgtgtggttaataaaaaaagggtgactactggctgagtga

SEQ ID NO: 209264 - DNA, 553 bp, Homo Sapiens
  misc_feature (470)..(470): n is a, c, g, or t
  misc_feature (510)..(510): n is a, c, g, or t
gctgaaagagttgtttctgtgaaaataagctgattgctttaaaaagataagagacaaatcaccaaaaaaaaaaaaaaaaaagattaacacttttgggtgagacagtagtaaggaaatacagtaaaaatccagaagggctctgtgctctgatgcttcaggagtgtgtctaagttcttgctcgctttaaagaagctgctactagaaattatagatcatgattatcgatgtggttcatacaaaaaaaaaaaagaaaaatccctgggaaactccaatgagcaggtataaactcacgctgggcatggcggctcagcactttggaaggctcaggcaggagaatggcttgaactcgagtttaagaccagcctgggcaacatagtgagaccttgtctctgcaaaaaataaaaaaaattagccaggctgggtggcacacacctgtagtcccagctatttgagaggctgagatgagaggnttattagaccctgggtggttgaggttgcagtgagccatgntcatgcctgagtgacaaggtgaaaccctgtctcaaagaaaaaa

SEQ ID NO: 209265 - DNA, 572 bp, Homo Sapiens
  misc_feature (221)..(221): n is a, c, g, or t
  misc_feature (281)..(281): n is a, c, g, or t
  misc_feature (355)..(355): n is a, c, g, or t
  misc_feature (421)..(421): n is a, c, g, or t
  misc_feature (465)..(465): n is a, c, g, or t
  misc_feature (532)..(532): n is a, c, g, or t
  misc_feature (571)..(571): n is a, c, g, or t
gaactgggtttatgtgcgtccccctcaccccctcctctctttttctttctctctgtctctgtcgtctctctcgctggctttttaaaaatgaggaaccgctccttgaatgttctggacagagcacagaattgcttcttaagtcagcccggcgcggttgcaatagaaatccgcacgccagctccaccgccccgcccgatggtgagtacccttctcgtcgcgantctcctcctagcttaaccgagcgctcgcctacccgaaccgtggccgaggggccgggctangcttttctccctccctgcctgcctggctgtcagttgcacaaggttgcaaaatgaagcgcagaggcaaagcgaancagtaaattctgatacttagtgcgagcctagcagctcctttgctagaaaaccgagtcatctgctgncttgcaaaaccacgctttataggactggtttttagtttgctctntggaaggaaatgagtttgaggagacaggacgaggagataggaggctccgcagtcttaacgcctcgtntaatcatatttggcagcttgcaattgtatttcccccctnc

SEQ ID NO: 209266 - DNA, 459 bp, Homo Sapiens
ttttttgagacagggccttgctctgtcacccaggctagagtgcagtggccaatcatagctcactgcagccttgatctcctgggttcaagtgattctcccacctcagcctccgaagtagctgggactatagacgcacaccaccaaagaaacttcttttttaagcaacagatttctacttactatcataaaagtccagtagtacaataattaaatgggttagcttttgagttttaggtatttttatacaccccaattctttatcatcactgtaactaccatttattaagtggatgtgtctcaaaaacttaggtaagcacttagaagtatgtgaactttattattactatttccatgttcagctgagaaatgaggcattgagaggttagatcaaactccctgactatgtgtggtcaaacacaatattctccagagtttgagctcttaactacataatatcta

SEQ ID NO: 209267 - DNA, 594 bp, Homo Sapiens
atcattcagttactttattaaacgcacattaaggttttattggttttcctttgtataaatttatttgctaattaagatgtttctgtatcacatgagattatgctaattattcaggagaaattaaataatttatcaataacaagataagcagtcctatctcagtgaagaacagtgagaagtttatgtcacattaccagcatttctcaactttctgatacttacaggcagttattcttatgagatggtactggataggtaaatatcaagggaactgtcttaaaaactagaggtgacttgttcttaaatctcttagaagtcaacccacatctttttagatttttctgggcacaaacaatatactcagtaacaaaaaaatcacaatgtataatctgtacaataaatattttgtttcaagagataagcataacaaaaaatcctttgctgatatatttcctaaataatctgtataatgaaagctacaaaacaaatgagttctctggtcccacctaatgctatcacattaataccacctagaaatctagaaataaaactaatttctgcaaattataatttttaaagatttttattcataag

SEQ ID NO: 209268 - DNA, 490 bp, Homo Sapiens
tttttttttttttttttttttttttgactcttccacatccttttatttactattttctgatttttaaaatgacagtggcaattaccatttatactgtgttatttgtataagctgttaaacacaacattgttaaacacaacgaaaattcatttttctacctgaaagctgtatcatagaaaattattttcaagtttatattcaacagcttaataatgttcaaaccaggctgggcgcggtggctcccagcactttgggattacaggcacgagccacggcacccagcctaaagcaatgttaggtttcaagaaaaacctaagcatagcccactagtttttactggttcctttattatattgcaatctgcaaaactatttgtattcagccaagtatctatgtccagttttaataaaatagtagcctaagcttacaaaatagacaaattaagcagcaactgttgattctgagtaagtctgtatgctatcaagaacac

SEQ ID NO: 209269 - DNA, 846 bp, Homo Sapiens; identical to SEQ ID NO: 53886
  misc_feature (606)..(606): n is a, c, g, or t

SEQ ID NO: 209270 - DNA, 928 bp, Homo Sapiens; identical to SEQ ID NO: 49395
  misc_feature (619)..(619): n is a, c, g, or t
  misc_feature (731)..(731): n is a, c, g, or t
  misc_feature (768)..(768): n is a, c, g, or t
  misc_feature (775)..(775): n is a, c, g, or t
  misc_feature (916)..(916): n is a, c, g, or t

SEQ ID NO: 209271 - DNA, 637 bp, Homo Sapiens; identical to SEQ ID NO: 42013
  misc_feature (562)..(562): n is a, c, g, or t
  misc_feature (575)..(575): n is a, c, g, or t
  misc_feature (589)..(589): n is a, c, g, or t
  misc_feature (625)..(625): n is a, c, g, or t

SEQ ID NO: 209272 - DNA, 868 bp, Homo Sapiens; identical to SEQ ID NO: 45827
  misc_feature (631)..(631): n is a, c, g, or t

SEQ ID NO: 209273 - DNA, 515 bp, Homo Sapiens
  misc_feature (260)..(260): n is a, c, g, or t
  misc_feature (483)..(483): n is a, c, g, or t
gctaataaaacagttaagacaattgtccattttatttgttaaattgctaaaaagtcatcaggggaaaacattaacaaaaaatgaaattgacagatttaaatatcaatgaaatccatgtttcattcctacactgttatgtgcccaaaatgactatctcagggtaagccacctggcatccctgagttgtatgggaaacatcactcacagcaccagcttcgccagggcacatggggtgtgcactgacatgaaccctggttggngggaggggagcagagcaagtagagtgtacaatggagccaacacctaaagtttgctctcatttgacaatgaacacggtgagagggagccacttactggtaaccatgcagaacatgccttctgcagttcatggagaggctacatgggacgcaggcctggaaattcagcttcctcaccaccaggcgtggttagatcctcccactgacttgtgcgctggtaagagancatggataatgcaagtggagcatatcacatgc

SEQ ID NO: 209274 - DNA, 1000 bp, Homo Sapiens
caggcccgccgatgtgcagggggtgtgcggcaaccagacaggcacagagagtgtctgagaggtgaagggacccctccagagaaacaagagtgaccttgtgctcagcctgagggttggggagtgacccagagcagggcgagtatattctcaccagcctaccccccttctcctttggccagctcctactaaaaggggtctgtgtcgtaccttgtctctttcttgtggggcatctccagcttgggagacaggaacaaagctctgacctagtccctgccctctttgactgctcaccctcttccagcccctctacccagcctcaatctctcattcttcctctactttgaagtctggcttctgtcttggcccctgtgggtttgatgacaaagggcagttcaggaatgacactatctacacatacatggccatatggacaatttcaggtggtgggacttgcagcagctggggttcccaggactgctgacattctgctgagtgttattagaagatcagggacagagcttatcatctggctgtcactgcccctttccaagccacagcgagcctccacagaggggccctgggggatagccagctgccctgtgctcatgctggagtgaactttcctctgatcttccctgttttctggatttagccagggaaaatacaagggagctccttgctccctgtgtgaggttccaactgagagatcccacccttcccagctctgatcagatacccctgaagtttggaaggcaacagctaaacaatctctctctctctttttttttttctccagcctgggtgacagagcgagactccttctcaaaaaagaaaaaagaaagtaatggcagtgctcgctttggcagcacatatactaaaattggaacaatacagagaagattagcatgtgcaaggatgacacccaaatctgtgaagccttctatatttaaaatatatatatttattaaaaaaaaaaaaaaaaaaaaaaaaaaaaaaaaag

SEQ ID NO: 209275 - DNA, 1000 bp, Homo Sapiens
ccagagtcatgggcctcatcttgggatgggccagtgtcttcagaacattaaacgctgatttgcatgtactgttctaaacactctgtgtgttttagcttgattactcacaatggctccatgagtaaagtaggtctgtctactacttcttccccacctttttcttaatagacaaggaaactgaggcatggagatgttacatcaggttgctggagctgggcagatcctggagcctgtgcactgctactgcctttatatgtctcctctgatttcatttgttggtgtctaaatcgaataccttacaaaccagtgtagacctgataccctgtggctaaaacaaaacctgagtgtgcactgtattgggcttgtgagcagtcagcttgtgacctctgttctgtggttttattggcacgtagcagtacaaggatggtgaggggtgggtagggggcagacagctaggcacttgaaaggaaagctcatctggaaagattggatcgtctcaaatgcacatactcgtacactcgattgaagcgtactctgtgcctactagatcttttcacagccaaaaacacctggcaacccttggagaagtaactattcctttttttcacaagtaagaaaatagagcctcagaaaatttaacagttgtctaagctagaaagtagcaggactggactttgaagtagtctttaggttgtgctgtacattttgtggatatgcttaaatcacagtttagcttgtacacattttcctttattagaattggaagtaagtattaatgtttgaaaaaatattttagcctgacaatatttattctatcttcatatgtttttgaaattagatattttaaactaggcacggtggctcacgcatgtaatctcagcagtttgggaggccgaggcaggcaggtcacaaggtcaggagctccagaccagcctgaccgacatggtgaaaccctattcttctaccaaaaattcaaaaaaaaaaaaaaaaaaaaaaaaaa

SEQ ID NO: 209276 - DNA, 1000 bp, Homo Sapiens; identical to SEQ ID NO: 114766

SEQ ID NO: 209277 - DNA, 533 bp, Homo Sapiens
cctgcaacaaaagggtgtgagggcctctcacggcccccttggcacactcaatagtggccgaaaggtggtgtacaccctggccatctggagtcacacttgggggcggggggaggggaagagcagtgagggctttaaggttctcctccccaagccagacccagggctgggattccagggcttggcctgcagccctggtatggacgcatgcaatgatggacataacaggccctacctgcagtccctacctcctgctaatcctctctgtacgtctgggtcacacattgctcagcacttgtccagaacgctggagcttttgccccagtcgggccgtcctcctgggattcccgatacattttctggcctccgcaggccagagtcccctgtgccttttacagcccagagggaacagcatgctgtccccacctcccctgggctgtagctgcttctatgccacttgggtagcagaggcccttcagggtcggcccaggcctgcaaactggactgcccctcctgtgcatgtccacaactccacc

SEQ ID NO: 209278 - DNA, 603 bp, Homo Sapiens; identical to SEQ ID NO: 51724

SEQ ID NO: 209279 - DNA, 614 bp, Homo Sapiens
agatgcagttttgctcttgtcacccaggctggagtgtaatggtgagatctctgctcactgcaacctccacctccagggttcaagtgattctcctgcctcagcctcccaagtagctgggattacaggtcccagccaccacgcctagctaatttttgtatttttagtagagacagcgtttcatcatgttggtcaggctggtctcgaactcctaacctcaggtagtcgacccacctcggcctcccacagtgctgagattacaggcatgagccaccacgccctgctaggagttcacgctttagttggggaaaatatacaataagcaagccagtttttaaaatgagaactgcaattagagttaaatgctacaaagacaaactcacaggaagacgggatgtagaatgataaggctctcagaatagtaagagaaactattgcttcttacgatgtttgtctttctttgtatcggggctcagctgagtctgcagtgcttcagaggcagctttcattttataaaaatctatgatttctcccttcagttgttttttctcttcctcgagcttccttatctcctcctgttgaatcattttaagatgctcgaacttgtcctgcaactg

SEQ ID NO: 209280 - DNA, 513 bp, Homo Sapiens
aatgggtgaggaaggaatgtaatataagaacagcatttcttaccacaggtaattgaggggaaagtgtcttttaaaaagtgcttttaacttttttgtggttatgtgtggaaagaaaaataaggccttctctctagataccccagaaaaaaactacagaaaaagaagtcaacgtttccaacagcctggtttaccaattcctatgtataactggacttggagaaaggggctagcaggttgcttacaggagctttgtgttatgtgctaccaattttgcatcaaagcaagtaagctaaaagccaccaaagcagatggagctttggaaaccagcaacacttccataaaaggggcagccatgaagggcggggcaggccatggccagggtgaagggctgctgcccacagccagtgctgggcacctcaaggacaggcactaaggattccttaagaggaagaattgctcaggacaacttgagaaataaggaacaaggaagctcccactgtgtgctgaggtgga

SEQ ID NO: 209281 - DNA, 544 bp, Homo Sapiens
tttctctttctctagctctctatgagagacagggtcttgccctgttgcctgggctggtatgcagtggagctgatcaagggtcactacagcctcgacctcttggggctcaagcgatcctcccgcctcagcctccaaagtagctgagaccacaggtgcatgccaccacaccccgctaattaaatgtttttgtagaggtggggtctcgctacgttgcccaggctggtctcgatccctggcctcaagctatctcctggccttggcctcccaaagtgctggcattacaggcgtgagctgccgcacccagcctcctctccttgggcagcagtccctgcgctcactttggcataggtgctgatcttctgacggatggaacatcagacactttttgagccctattctgtgccaggtgctgttccacgcacttgaatcgcattcactcattaaacccccacagcagccctccaagacagacattactaccagccacacttcacagacgggacaccaaggcacggagatgcagagtgacttgccctgggtcaca

SEQ ID NO: 209282 - DNA, 476 bp, Homo Sapiens
aggcctgccatgtggaaatggcggtctctattcattctatttacacggaaacatttaacaagcagctcttgaggaggccagagaggtgcaggcctagccctgtcagcaccaccctccacagatgcccaaacagccccagcgcatttctttaccttgatttctttcctactcatttcctccagctgtgcaagggtaaaggcaaaggcacaaagacctgggttggaccctgcctccatttgccgcaccatgatcttaccacatggattcttagagcgtaactgctgccccatggaccaggttagctaagagaggttccatgaaactgctgttgcagaaatgcttctaactataaaatgccaaacctgggaaagaatgtttggattctcatagcctggatcagtaggacactgccttggcgtgctggtgccccacccccaactcacccaggccaggggaggtagagccccagcccctga

SEQ ID NO: 209283 - DNA, 552 bp, Homo Sapiens; identical to SEQ ID NO: 50106

SEQ ID NO: 209284 - DNA, 635 bp, Homo Sapiens
atttaaaacaattactttattaaaaaatagcaaatctcacaaatacttatttaatttcttatcactggccattggaaaacacaccagcatgtgtactgattgtctaacataaactgaagctgggcttgccacaagacgcctgtgcatcaacagcttgcgatcaacactggaataagtttggtgagctcaggaaagagaaatccctccgccctgtcaagaacatcagcacaatgcatttcaagtataatcccataaggcaacaatatgaagcacagcagcacaatctctgcatcacatttcctgatgaagccttcaacaaggcctaggcctccagttatggcgaattacagcgagtcacatttactaaaagcagtaagtgaaaacgatcattgaacttgcactttaattactttaattccttgttgtggaagatgattctgctactggatttggctggaaaagtaaagactgctgcttctcttcaaatcacaagaaagcaaactacatttcattttagctagcagaagtatttggaacatcttgtgcatctgccaaatggagtttttgtatggaagaatcaattcctctaaatctgacagaaacctatccagattggaatcactggctgtttttct

SEQ ID NO: 209285 - DNA, 658 bp, Homo Sapiens
  misc_feature (435)..(435): n is a, c, g, or t
ccgtttttttttttttttttttttttttttttttatgatttgcggcggggaacgcttcctctcctttttatttttttaaacagacaattactgccaaacacaattctggcctaggaaagctggggcagggagggggcccaaacttcctgtgtccacacactgccacctctgcagctgtcctcatcagtgctgtgactttcttcccctccttgcattgcggtcgtgaaggtcatgtcggggatgacttgcatgaggctgggtggcaggggccgggatctgcacatacctagtgcatgtcagagtttaccttgtcctggaagatgtacaggttgttggtggcggcaatggcaatgatgttctcagccgggtgccaggccgtgtgcaggatcttcttggtgaagtccaagctgtccacactgatgtcatcacgccggngcttgccccccacgcacacgcgccgtgggttgagcacagcccggggcttgctgctttccctcgaggcctccagggtcacgtcccgcttggtgttccgatcgaacatgcggaaaaaattgttgtaagccccggtcatgatgacgctgtcgctcccgttccaggcacattcaaacttggccaaaatgcagtcgttctcgtacagggaaccgaacttgctccgaag

SEQ ID NO: 209286 - DNA, 885 bp, Homo Sapiens
gctgaggcaagaggattgcatgagtccagaagtttgaaaccagcctgggcaacatagtaaaaccctgtctctacaaaaaataaaaaaattagccaggtgcgatggtacatgcctgtaatcccagctactcaggaagctgaggtaggaggatcgcttgagtccagggaggttgaggttgcagtgagcttgtgccactgtactccagcctgagtgacagagcgagaccctgttgccaaaaaaatttttttttaaaagggatcctacatgcatccagagattaaacgaaaacaatcacctgaaaaggctctgaactcagattgatgcttctcaccagcactggaagctagatggtattggaataatacctcacagttctgaaggaaaaatatttccaagccagaattctaaacctagacaaactatcaaatataagtagaaagaagtaaacaaacacattttcagaaatgcaagatttcaaaaaatatatatctcccatgcactgttcttcagaaagccttgggagaatgtaccctaccaaaagagggagtaataaactaggaaaagttgtatttgggaaatggaatcaacttagaaagaagcaaagaggcctgtaatgataaaggggttttctaggatgacagctccatagctggaatgggggacaaccagaccagaatggagctttagtagatatattctagagcaggaaattcgagaatatataaagtagctaaaatagaagaaaatgtagacaattgagtgagagttcaagggtgaaataacaatgttaaatactaaaaaatcaaagtaaaggaaaaaggacaattattaacttcaggaaagacaaagttatgcaaaaaaaaaaaaaaaaaaaaaaaaaaaaaa

SEQ ID NO: 209287 - DNA, 573 bp, Homo Sapiens
aaatcggcaaattctatgttgacaaatactgtaatccagaaatctgcttttctacttcatattggacaggcaactaaagtagtcacattgaacaaggatatgccccaccttcaagaccagctgctacaatgtgaagcctgacaaagcttctatgacaatatcatcaccaacctcaaactggaactaatagaaataatcataatggatatacacgaggattaaaaattcaagtgtgcagagtttaagatacttggctatataaagtttaaaatactcaaatatatctttatgtatatatacttgtctatatttcatatttttcaagaggctgaatctcctgaagaaatccaatatgcacccctaccccgggaaaaaaaaacaaaaaatgaaaaacaaaaaagtctcctcatctcagtggtaatgccagacactatttggaaataaacacaccaaggcagttccagtgtcccgtggtccccacctgggcacctggcactgtgctctctcttctggggactgccctccctccctcatgatgtcctggcttgcacctcatcgcagcagaggatcggc

SEQ ID NO: 209288 - DNA, 392 bp, Homo Sapiens; identical to SEQ ID NO: 60089

SEQ ID NO: 209289 - DNA, 543 bp, Homo Sapiens; identical to SEQ ID NO: 59848
  misc_feature (543)..(543): n is a, c, g, or t

SEQ ID NO: 209290 - DNA, 1000 bp, Homo Sapiens
ccacaacaacaaaacacattgagaactgatgtgccttcacaggaaacttggcccgtgtgtttccaggattcttgatgtttcttctgagctccagggtcaggcagtatgattgaagtttctaagccagcatccttggaataaagtagcttttgaggtaataaggagtagtccctaagaacccacgtggaaggtcacacttctgatctgagacctttcagcagagcctcagagcagagtggaaaaggccaggaaagagcatgtctggaactgcctgttcactgaagacattcttggcactcctgtacagttaaataacacttggtgatgtcagcacatgcagaaaccatggcagactgtccagtggatgggctttcaggaagaattaggctgccagcatgagcaaggggcaggcagcacaggagaggacacgtcactgcccactgtgaggactgtgaggacacagtctggggaaggcatcgcctagatggggaacttgtccctgtgctcctccataagcctgctcccttcctgtctactcactgtctttgcagcctgtggagatgcatcattgttcctattctgatgttacaaaaatcaagtgacagtgttgtataaaggtcaaaaaatgggcctagaaaatgtgacttatttaatcatttcatttgttagtggcatactcagaaaataactaattagggctgagctcggtggctcatgcctgtaatcccagcactctgggaggccgacatgggaggactgcttgaatccaggaattcaagaccagcttgggcaacatagtgagacccggtctctacaaaaaaaaagtatctggctgtggtggtgcgcacttgtagttctcctacttaggaggccgagactggaggattacttgagcttcagcccaggagttcaaggctgcagtgagctgtgaatcataccactgtggtacagcccaaggcaacagagccagaccctgtctcaaaacaaaaaaaaaaaaaaa

SEQ ID NO: 209291 - DNA, 1000 bp, Homo Sapiens
atttggagaatattacatccaaagagataagaacagagttggaaatgcaaatggtgtgcaacttgcgggaattcaaggaatttatagacaatgaaatgatagtgatccttggtcaaatggatagccctacacagatatttgagcatgtgttcctgggctcagaatggaatgcctccaacttagaggacttacagaaccgaggggtacggtatatcttgaatgtcactcgagagatagataacttcttcccaggagtctttgagtatcataacattcgggtatatgatgaagaggcaacggatctcctggcgtactggaatgacacttacaaattcatctctaaagcaaagaaacatggatctaaatgccttgtgcactgcaaaatgggggtgagtcgctcagcctccaccgtgattgcctatgcaatgaaggaatatggctggaatctggaccgagcctatgactatgtgaaagaaagacgaacggtaaccaagcccaacccaagcttcatgagacaactggaagagtatcaggggatcttgctggcaaggtgagttagttactttctccaattctccctccttttaagttccctaaagcaagaagaagtgtccttctctgtagctacttctcaagctgatttggatgtgatattttttcaaaaaagacttatttctctatcaatccagttttcaaaacataagtgtaagcatttaagatttgcatgggctggccgggcacagtggctcacgcctgtaatcccagcactttgggaggctgaggcaagcggatcatttgaggtcaggagttcgagaccagcctggccaacatggtgaaaccccgtctctacttaaaatacaaatattagctgggcatgatgatgggcccctgtaatcccagctacttgggaggctgaggcaggacaatcgcttgaacctgggaggcagaggttgcagtgagctgagattgtaccatgcactccagcctgggtaacagagcg

SEQ ID NO: 209292 - DNA, 1000 bp, Homo Sapiens
tgtatgatttctgtgatgggcaaactttgttttttgaaaaggagagagagaaatccttgaaaaataaaagtgattatttgaagcaaccttacatccatataatgatttacttttggaaacctataaaagggaatcctactgtgttgaggaactttagacatgataatgaattaactgtcatggaagaaaaatttcaaaatcagataagtttaaaatcagcttcagaggaacagcgtgctttaagttctcaaagtaatattgaaaaggaattcaagaattacttcttgagttcgtggttgagagatttcactgtcatttccccactcttcaagcccccccagacctcaaaaaaaggtaagtgtaagaaaagggatatttaaatctcttttaatttgaaactatattagtaaacaaactaaagaaatacaaatctggtttattttatagtgataaagatttgataatgcaatgaaactttcatatacaaaaattaagcatttttctgttaagtttaatttttcgtagcataaaagtactatatagacatagaaacctcaggaagagcaaaaaaaaaattatttaaaaatcatttttatcatccaaaagcagttgttattagccttatatatacacccttctagttgcatatttggattagtgaatttatttctcaatccaattcgttactgtgccagggactagaaagattatatttcctctagagaagaggtttagtgctatgcttctggctcagaatattttcttttagattgagttttatctaaaaattaccactaactttatatctattccatagtattgtaatggtaaaaatgcctagggattagaatttttcccctccagattgaggaataagggaagaatgcatcctgggttaactctgggaattcctcctcttaccataattccgccatgttcattcccccaaaggataaaccttttttcactagatggaaaaacacaattttgaaagggcaag

SEQ ID NO: 209293 - DNA, 402 bp, Homo Sapiens
  misc_feature (30)..(30): n is a, c, g, or t
  misc_feature (32)..(32): n is a, c, g, or t
  misc_feature (401)..(401): n is a, c, g, or t
gacagaaaaatgaagtctctctaggattcnanttcccatcttgaagatggggctagaaatcgtttctacaatagagagttatatgagaataaacaacataatgtaatcaatatagtgcctcaattcatgccttctcatagatggagaatttatgcccacaagcacaggctagtgtccattttctaataactcagctttttgctgagtacttagcattaaaacaaaacaacacaaatcatttatacatgttaagtttcaagtttcccacttcattttgcctgggctgatggctcttagaagacacaaacttatggcacagatgacttcttctgggttctaacttgtgttatctctttttcaaaagttagttaaattcctccatatattttagtgttggttcna

SEQ ID NO: 209294 - DNA, 455 bp, Homo Sapiens
tatgtttaagctgtatatttactcatcgaaacactcggtgaaatcagggtaaaatcaactaaaggaaaaatatttgtttcattcatttgaacttaaaccaactaaagtagtactcatgtcattacgatgcagcaaatacaagacctctttctacaaagattagcacaaccaacaaattaggggatatagcaaaacagagccaaaaacggtaagaaatcaattaagtatgttacagcttaaccctttacctcaatagtttttaaaaaataagcaaagcctcccaatcccaaacaatacgaatacatcttcatcaccaattcgtacttgtatttcttattcttgaggttagattctaaaccctaaagatatccaaactagtattagatctacttatctatagccagagacggcttctatcaatgttgtccttagcagccaaggttattaaaatgtct

SEQ ID NO: 209295 - DNA, 1000 bp, Homo Sapiens
cctcctctagaatgtccctcaaacctgtcctcttttgtcttttctcatgtctgccacacttgtcttagtcattagcgaaatatccacattttatacttctgttttgaaactgacggaattgtcccagaaaactgatgtttatggtttcttttaaataagtacagaaatttaccctcccagtcttaaatcttgagaaagttacatttatcttatctgagttcctttttcaggaaaccaatcatcagtcctcccagtcttaaatcttgagaaagttacatttatcttatctgagttcctttttcaggaaaccaaccatcagtcctcccagatagtatcaaggaactgaaactttccagatcacagcatcaggacagtgagacaccacacccctcacccaacatgattgcctagcccaccacctactgcctgttggctaactcctcttccttaccctttcctggtcttgttttcccacatgtcattacgtttctttcctgctgtgtaaatccttaattttagttggcttaggagatggatttgagactgatctcccattctcctctgccgcagtacccgaataaagcctgacaatactctttgtcctagtaattggcctcctgtgcggcagcagtgacacctatctgtaccatacctttgacgctttgggggcagttctgtgaaggtgggaaaattgattgtggaataaagtgatacatttggtttggggcatgtttctatcttattaatagtatatttttcctcatagagatgtctactacacagttagaaataaaggcctaagctgggcatcattgcccttgcctgcaatcccagctactaggtaggttgaggtggaaagatcgctcgaggccaggattttgagactgtagtgtgcaatgagcatgcctgtgaatagccactgcgctctagccgggcaataataatattaatatatagatgccctgtctccaaaaaaaaaaaaaaaaaaaaaaaaaaaaaa

SEQ ID NO: 209296 - DNA, 1000 bp, Homo Sapiens
aagttgtgttttctaataccaaagaggaggtttggctttctgtgggtgattcccagacactgaagtgcaaagaagagaccctcctagaaaagtaaaatatgactaaaagcaatggagaagagcccaagatggggggcaggatggagagattccagcagggagtccgtaaacgcacacttttggccaagaagaaagtgcagaacattacaaaggaggatgttaaaagttacctgtttcggaatgcttttgtgctgctcacagtcaccgctgtcattgtgggtgagtcatttgattaaaaacaaaaaaaacctgtaccttgtttctctggggcatctggctgcccggggaatattatcagatgaactagttgtaggtatcaaaatggtagcctaggctttcctctgaacttgatgatttttctccataaaaatgactgttttggcttgtttggagcaatatatagtaaacacatcattaggcatcattaggcattatgcaaatcaattgtgtgaggaagaaaaataaataaaatattttcccatttcatgtaaggataaggaagtgatcatttaatcattaggcatgacaaagcaagcatgctagatttggccaaaatgtaattatatacaatgtcagttgcacttaaaactaatttatacaattagtacacctaaaatgacatgttggttccaaatagtaattatattctaactggtgctgacttgaagctgagtatcaacgcttaggcacagagaccgaatattttatgtgtttgcactctctcacccagcaactgggaaaggtagattggggaaaatgttaacacagatctctttcattcattgctttgcagagcctgccataaccggctatacctttttttgaatcatttccatctcttactaatttagcagggttgacagcaatctgtactaataaaatattattgttttgttttgtttattgatcttaaaaaaaaaaaaaaaaaaaaaaaaaaaaa

SEQ ID NO: 209297 - DNA, 1000 bp, Homo Sapiens
atcttctctgtaagccctgtggtccatgcaagtcattatattcattttaaggcatagaatgtataatattgtgagaaaggaggcaaagaagaaggatttggggtcgctgaaccctttaatatgagttctgttaagtttggtaccaagaaaaattaaactctgtggcgtgtgcagtcttgtaaactcttacaatgattgaaatgtgctattttgggatgaaaatgtgaggtttataaattttaaaagctcaaaaaaggaatctagaaaatgactcctgtgcctgttgcatggaggagatggcacctttgactgttggggggtgtctgcctacccctaagtgtctacatcagccccaagttttagtgcgctgtgacggtgtcattgttattttaacactgggagacgttatattccaattggggtgaatctgactgtgtgtattttcttttctttttttttttttaaagataaacttggttcttactgaaaactcaattatggttagacatagttcatgtaaaacctctcagattttaaagagaaggccaaataatttggtatttgtgctcttgctcagagaagcatcatattcggaaatatcttcctaggtttatctaccatttagtgttgtttagtcagactgaaacaacttaaaacctgtaatgactaagacaatgaaaatgataggcttgtaagaaaaatacaatttgttattctttggcaaataaggaatcatgtctaaataagacggaggtcatggcttgatagagagatggctgaacctatagtagaaaaacactaggttccgccaaatggtaagggaaatgttgagtcacaatgacacacatgtcctagatttgtttcgtcaaagcgacttttggttgtcatgatcttacttccggtggaggttgcagtgagctgagatcatgccattgcactccaggctaggcaacagagtgcaactccgtcccaaaaaaaaaaaaaaaaaaaaaaaaaaaaa

SEQ ID NO: 209298 - DNA, 449 bp, Homo Sapiens; identical to SEQ ID NO: 48954

SEQ ID NO: 209299 - DNA, 616 bp, Homo Sapiens; identical to SEQ ID NO: 49151
  misc_feature (594)..(615): n is a, c, g, or t

SEQ ID NO: 209300 - DNA, 1000 bp, Homo Sapiens
  misc_feature (644)..(644): n is a, c, g, or t
gttttaggaaactccagctgctctgtgtcattgaaagggaagaggagagaccagatggtccaagttcgccatggcactggtaaggacctgagactgactgcaggcccttcatgaaagcaaagcctgggtgtgttataaccgccagtcccactctcccacagtgaggtccatcccggcaggggctgagtccaccttgaccactgagacaaacagacctggtgatggactcagtgtttttaaattgtggagcttggacagggaggggcgagatggagaacgaggtatacacaaaagagaacaatgtgatgagggcatgaagtgtgcttaccaaccttccctcactcagaggctggaagagattttagagcttaacagaaaaagagtgggaagaggacactgctgggcaaaagacatgaactaaagacttctcggctgtccccatcagtggcacgggtggtctcagcagtaccgatgtggatactccagaacgtgaggctaccgtggaaatgcttttgcttaacccacacgtttgagtttccaaggagtggaagatccccagggaaaagcatctagggaccccgcccatggttggccccagcctctggggaaggccaaatccaaccttggaacccccctaacctgtngtttaaactggctaaatcaagccctttcttggaaaaaaatgaatattgccaaatttctccccccaacgcccaccatcccccaccccatcaccgcccctaatctccctccctcccctcatcccccttatctattcgcccatcctctcctatccactcatctctcttggggggcgggccccctttctaaagaaaatccctctccgaggggggccccaagttcttattgccgtaacaccccagttttttttgtggataaaaaaaggggggccccccacaattggggggggccccaccttttataaacctctgggggccccctgcgcccccccccttctttttacacaccccgtccgcgg

SEQ ID NO: 209301 - DNA, 1000 bp, Homo Sapiens
  misc_feature (633)..(633): n is a, c, g, or t
  misc_feature (725)..(725): n is a, c, g, or t
  misc_feature (735)..(735): n is a, c, g, or t
  misc_feature (742)..(742): n is a, c, g, or t
aactcgcggaagacaaatgactcctgtgacaccctgagcttacgtttctttacaaacgatgcttctctgacactctttctgtagaatttctctccaatatgctgcttctggtgctgatgaaggtatgcagtgtcatccaagttttttccacatgctccactcctgttcagcttctgcttgtgatgagtttcctggtggtcagcaaagtgaaaaacatcctccaagatgaggccacacatttcacaggggtgagccttcttaggagaaacacctgccctaggagtcctgctctgagactctctttgtacagaaattctctgcttacaaggtgcctcctcatcttttgatccacaccaacaacctgaaagcaagaaaatgctggtcaagtgcaaagtacctccggcgggaaggcacagcccacccacaagtacgtctcacaaattgaggaattaatctatagaaatatttgcaggaacacaatgttggcttcaagttgaagatggggctgctggctgggcatggtggctcacacctgtaatcccagcactttgggaggctgaggcgggtggatcacctgaggtcagaagttcaagaccagcatgaacaacatgggtgaaaccccatctctactanaaatacaaaattagcctggatgtgggtgtggacacctgtatcccagctactccggaagctaaagcaggaagatcatttgaccccaaaagcanaggtttgtantgagcantgattaccccactgcaccccagcctggaacacagagtggagactcatcccccaaaaaaaaaaaaagggcggccggctctaaattatccctccagggggcccaaagctaacccgaaacccaccttttcttgggacaaagggggcccccctaaaaggggggccggtatataaaacttagggccctgggccggcgcctttttacaaacccccccggactggggaaaaaactcgctttcttcttgggggaaactttttggga

SEQ ID NO: 209302 - DNA, 685 bp, Homo Sapiens; identical to SEQ ID NO: 52166
  misc_feature (638)..(638): n is a, c, g, or t
  misc_feature (640)..(681): n is a, c, g, or t

SEQ ID NO: 209303 - DNA, 983 bp, Homo Sapiens; identical to SEQ ID NO: 51498
  misc_feature (665)..(665): n is a, c, g, or t
  misc_feature (731)..(731): n is a, c, g, or t
  misc_feature (858)..(858): n is a, c, g, or t
  misc_feature (860)..(860): n is a, c, g, or t
  misc_feature (862)..(862): n is a, c, g, or t
  misc_feature (864)..(864): n is a, c, g, or t
  misc_feature (866)..(866): n is a, c, g, or t
  misc_feature (870)..(871): n is a, c, g, or t
  misc_feature (873)..(873): n is a, c, g, or t
  misc_feature (875)..(875): n is a, c, g, or t
  misc_feature (878)..(881): n is a, c, g, or t
  misc_feature (883)..(885): n is a, c, g, or t

SEQ ID NO: 209304 - DNA, 850 bp, Homo Sapiens; identical to SEQ ID NO: 45465
  misc_feature (796)..(796): n is a, c, g, or t

SEQ ID NO: 209305 - DNA, 903 bp, Homo Sapiens
  misc_feature (696)..(696): n is a, c, g, or t
  misc_feature (882)..(882): n is a, c, g, or t
gttgccaaatggtgttttgggctcttcttttcccaagaagagactagcccattgtcaccaatgcagagctggaagctgaaattgttaaggcagaatgaaagggagaaaagcacgtcctgagcaccaagaagataactcgaagttaagaagacgtgatggtactttggagaagaaagcaacacctgagtcaaattgcactgagcaacgttctttgttgttgtgagatattgataaatctccaggtcttcaacaaggggagtcgagaataggaaactcatttcaaatcatatctcaggtgacaagaaggttaccatatttgaggcagcctgttgggttgcctgacggcgaaaatctacagaacattctgccttacattgctggagactgtctcctacaacttgagtctttgatactggtgtcactttcaggagctctaagaatatgtcaactctcgcttctgagttggtgacccctcaaccaagaaaggacggtgatctcattcctctcagcaggagtgttgagctcagacaactatgaaaaccaaaaatcatcccaggtaggttataagggattgaagagaaccagagagtggctcattcataggaagaagctgtgatttggcaccatgtgagcgtcgtcagagataaatgaagatccaacactgccagagctttcaaatctccaagagaagcattncacctgaattggtatgtgaaatgtctcagtttttaaaagttgacaaccaaatcagaaaataattttaaacaccatgtaggcccaaatgaaacacatctccaagccagaatcaaatcacagaattccaatcaccgggttgaaatccacttcctctaaaaatcttttcgtctctggaccgggccaagntgggcacaccgctctggtagt

SEQ ID NO: 209306 - DNA, 1000 bp, Homo Sapiens
  misc_feature (576)..(576): n is a, c, g, or t
  misc_feature (605)..(605): n is a, c, g, or t
gcgcagcggggcgcgcgagctcgcgctcttcctgacccccgagcctggggccgaggcgaaggaggtggaggagaccatcgagggcatgctcctcaggctggaagagttttgcagcctggctgacctgatcaggagtgatacttcacagatcctggaggaaaacatcccagtccttaaggccaaactgacagaaatgcgtggcatctatgccaaagtggaccggctagaggccttcgtcaagatggttggacaccacgtcgccttcctggaagcagacgtgcttcaggctgagcgggaccatggggccttccctcaggccctgcggaggtggctgggatccgcagggctcccctccttcaggaacgtggagtgcagtggcacaatcccagctcgctgcaacctccgcctcccgggttcaagtgattctcctgcctccgcctcccaagtagctgggattacagaagtcacctgcaccggtgcccgtgacgtacgagctgcccacactgtataggacggaggactattttcctgtggacgccggggaagcacagcaccacccccgcacctgccctcggnctttgtgagctttgtggtcttcccatcangaacgctggaaagtgacattgtgtacacactgcagccttggggggttttttctttggattgctgtttattttatattttaaaaatatttaaaaaaatgtcgagatggggtctcactatgttgtccagactgatctcaactcctgggctcagtgatccacccaccttgcccttcccaagggggggaattatgggcaaggagcctcccggcccaaggctgctggccatttttcaaatttcccccccggccccctggggaaaaccccccggggttggacaaaacccatttgggacacccaccgggggggggggatgccctcccccaccccgggcttgggtggggggggcctccacacggggtcctccaggggaccccacgtgcttggctcccggtggt

SEQ ID NO: 209307 - DNA, 871 bp, Homo Sapiens
ctaggaattgacaatgtcctcaggttccacttcatgtcgccccctccagcacagtcgatggttcaagccttggagttactgtatgctctgggaggtctggacaaagactgtcgcctaactgaaccgcttggcatgagaattgcagagtttcctttgaatcccatgtttgccaaaatgctgcttgaatcaggaaacttcggctgttctcaggaaattctaagcatcgctgccatgatgcagatccagaatatctttgtggtccccccaaaccagaagtctcacgcaattcgagtgcaccgtaaatttgctgtggaggagggcgaccacctcactatgctcaatatatatgaagcatttatcaaacacaataaggactctaaatggtgtcaggaacatttcctgaattacaagggtcttgtcagagctgcgactgtaagagaacaattgaaaaagcttcttgtcaagtttcaagtgcccaggaagtctagtgaaggtgacccggatctggttctgaggtgcattgtctccggcttcttcgccaatgcagcgaggtttcattctactggagcttataggaccatccgtgatgaccatgagctgcacatacaccctgcgtcagtcctctatgcagagaagccgcctcgctgggtcatctataacgaagttatacagacctccaagtactacatgagagatgtgactgccattgaatcggcctggctgttggagctggctccacacttttatcaacaaggaacgcacctgtctctgaaagccaaaagggccaagggtccaggacctgtggagaggagcccacaagctacaggctgccagggaactggctgtgcgtccctctccctcccatgtctgc

SEQ ID NO: 209308 - DNA, 678 bp, Homo Sapiens; identical to SEQ ID NO: 55487

SEQ ID NO: 209309 - DNA, 593 bp, Homo Sapiens; identical to SEQ ID NO: 44422

SEQ ID NO: 209310 - DNA, 813 bp, Homo Sapiens; identical to SEQ ID NO: 52107
  misc_feature (761)..(776): n is a, c, g, or t
  misc_feature (778)..(779): n is a, c, g, or t
  misc_feature (782)..(784): n is a, c, g, or t
  misc_feature (786)..(789): n is a, c, g, or t
  misc_feature (791)..(797): n is a, c, g, or t
  misc_feature (807)..(807): n is a, c, g, or t

SEQ ID NO: 209311 - DNA, 938 bp, Homo Sapiens
ttccgccctttttttttttttttaaggccaagaaagtcagtttaatcttataatataaatatatcatttagtcacctcagcttatcccgaggtgtttacacaattcccaatgaccagtgcagcttggaagggactgaggctcgcaagtgggtggcacagtcggctcttcagtggctccaaagtgagcccctcacaacaggagacacttcagagaggtctgtccccagccacgcactcatgattgctttttagcagaagtcatggtcgctgaggccctgggtttggcaaaagcacagctgccagcagagcacagttctggtaggtggggccacggctgacctggccccagagctacaggaacaggcaggggccagcttggcttgcaacaccatgaaacaagcctgtggggcccttagtgtcttctcccgcagagcccaccagaaacacttctgtgagtaacagaacctggaaggaaaaggggcaggggtggggccttggtggcaccgcacaggacgtgccccaggcttcctctccagctgcactgccacgtgcggccaacaagagccccgcagccctggggtgctgaggcttggtcctttccaccttctgcaaatgccctgacattgccctccaattcagacgggataaacctccccccagccctgttcctctttcaaatctgcccggcactttgaacccctcctgttacgcccccccccaaacccatttttacccaccccacccccccaattcttttttatttcctcctgtctatcccctttaaaaacccttattttcccccattctttatctcccccccttatccccgccccaacctcccaactcaccccaatactccccccccttatccccccctttctccccccctttcttcctcctttcccttccaatcccgcgaatacatactaaccccgccg

SEQ ID NO: 209312 - DNA, 1000 bp, Homo Sapiens
  misc_feature (642)..(642): n is a, c, g, or t
  misc_feature (693)..(693): n is a, c, g, or t
ctcttttccagtattggagaccaggaatctgagatcaaggtgtgggcaggggtgcgctccccctggaggttctaggagaggatccttcctgcctcttccagctcctggtggctccaggtgtccctgggcttgtggccacatcactacattctctgcctccatctccacgtgaccttttcctctgtgtctgtgtctcctcttctgtctcttagaaggacactggtcattggatttaaaggccacctgggtaatttatagtgatctaatctcaagaatctttccttaattacatgcaaatactctttatccaaattagtttgcattcacaaattctggagcttagtacttggacatatattttggggggttgatggttggaggggcttttattcaactcagtacatcttaataaggaattaatgccccccaacttgccttacaagtcatatattaaaaacaatgttggcctggcacagtggctcatgcctgtaatctcaacactttgggaagccaagggaggaggatcacttgagcccaggagttggagaccagcctggataacaaagggagacccagtttctacaaaatatttaaaaattagccacgccatgatggtgcatgcctgtgggtctagctattcangaaactgaaggtgggaggatcactggaaccctggaagttcaagacagccantgagctatgctcaaaccactgcactccatcctggcaacagaactggaactctggtctcaaaaaacctaacccttaaaacttcaaaattaaaaaaaaaaaaaaaagggcgggccgcctcctaaaatattccctccgaggggggccacagagtttaccgcgtaacccagagttttttttgtgcaacaaaaggggggcccctatataggggaaggccccatatttattaacccatgggcgcccttggtgcggtcttctttttataaacaccctccctggaaactctggggaaataaacctctctactctc

SEQ ID NO: 209313 - DNA, 1000 bp, Homo Sapiens
  misc_feature (590)..(590): n is a, c, g, or t
  misc_feature (618)..(618): n is a, c, g, or t
ttttttttttttcccctttttgtccctttccccaagccaccaattggatggatgaatgtttgacggggaagaggaagggtaggaggatgcatggatgagtggatgagtggatcgatggatgtattgataaatagatagaaccagtcatctgaagcaacttaagaattgtagccttgactccttgagactgtagatttcgatccaggaaacatttatttagcacctgccagatgccagaaatttataccatttaaaactcagtaagtcttttaaatatcaggaaggagagaagcgacatcatgatacatcctatgggtattaaaaagccaatagaatattatgaataattttatgctaataaatttaacaacttcaacatcataaacaaattccttgaaaaataaaaagtaccaaaattcattcaagaagaaatagataccagcctgagcaacatggcaaaatcccatctctacaaaacatcaaaaaaaaaaaaaaaattggtcgggcatggtggtgcacacctgtaatcccagcttgtcaggaggctgaggtgggaggatcacctgggcccagggaggtcaaggatgcantgagccatggtctcaccactgcactctnacctgggtgacagagtgagaccccgtctcacaaaaaaagaagaagtagataatctggatagccctatatctatagaaaacttaatagtgctggggagatataaggaataatatccctcattttaccgatgtggaaaattgaaggctcagagaaagtaaagtctattgcttcaagggtcatgtgggcttaaaatatggccagagcccctggattcccaatcccgggcctcctgaatctttattcccagggcccttttctaggcaaacccatggttgcccccaaaagaatggccaccttccttaattttacctaaaaaaatttggttcctggcccaaattttaaattttttccacctttacaccccatttttttttttttaaga

SEQ ID NO: 209314 - DNA, 1000 bp, Homo Sapiens
  misc_feature (929)..(929): n is a, c, g, or t
ttggttttcaggcctataagaattacttcagagctggtgctcactggattgtcttcattttccttattctcctaaacactgcagctcaggttgcctatgtgcttcaagattggtggctttcatactgggcaaacaaacaaagtatgctaaatgtcactgtaaatggaggaggaaatgtaaccgagaagctagatcttaactggtacttaggaatttattcaggtttaactgtagctaccgttctttttggcatagcaagatctctattggtattctacgtccttgttaactcttcacaaactttgcacaacaaaatgtttgagtcaattctgaaagctccggtattattctttgatagaaatccaataggaagaattttaaatcgtttctccaaagacattggacacttggatgatttgctgccgctgacgtttttagatttcatccagacattgctacaagtggttggtgtggtctctgtggctgtggccgtgattccttggatcgcaatacccttggttccccttggaatcattttcatttttcttcggcgatattttttggaaacgtcaagagatgtgaagcgcctggaatctacaactcggagtccagtgttttcccacttgtcatcttctctccaggggctctgggacccatttccggggccttacccaaacgcccccaaaaaaaaaaaaagggggggtgcctcctctcccaacaccacaaaaatacttctttttttgtttacccacctcccccacccccacacccctcccagaccccctccccctccccacaaacccaccccccacatcccaccaccccgcccctccccctaccctccccactcccacaacctcaaccacccacctagtctccacccccacaccacgcttcaccacattctatgccccctccctccgcgtagncacgttcccctcacatcgaccccctctcccgctcctcccccccagcctcgcctcccctccagtctcccccg

SEQ ID NO: 209315 - DNA, 1000 bp, Homo Sapiens
  misc_feature (526)..(526): n is a, c, g, or t
  misc_feature (644)..(644): n is a, c, g, or t
  misc_feature (648)..(648): n is a, c, g, or t
gggcagtatatgccataaatatggaagaggctgtctcttctttatcttctcatttcctgtacataatacagaaacctggtatgtaataggcatacaattatttgtggctcaactgaataaacgaagatggaaaccagcaagcagcgggcagataatatacttgggaaaggagaactgcagagacgctgggtggttcaaggcttctgcatgatcctcaaatgtcaccccaatctgctgtgacatagctataccactcatcagaataccccaaaacaaattgtctgcctcccttatgtacaacttttattatttcttatctcggttggttaagaatatgtagtaatggccgggcgcggtggctcacgcctgtaatcccagcactttgggaggccgaggcaggaggatcacctgaggtcaggagttcgagaccagcctcaacatggagaaaccccgtctctactaaaaatacaaaattagccgggcgtggtggtgcatacctgtaattccagctactcgggaggctgangcaggagaattgcttgaaccctgggagcagagtttgcggtgagctgagatcgcgccattgcactcccatcagccctgggcaacaagagcgaaactccatcctcaaaaaaaaaaaaaanaaanggattatgtagtaaatggttagaagtccacctgtggaaatcagccctgcataaggcccaaatccccagccctgaactgaataacctgttgaacaaggttatattcagttgactcccaggctttatttatcctgttaaaaaatgggggaatttataagcatatccctggcccctcaaagggggattgtttttgtaagattttaaatatcccccattaagtcctgggtacacttaaataaaaccccttataatcaaaaaattgggggggtgggggggaaaaaaataggtccccaataaaaacttggaacccccctccgggggaagcattttaaaaaaaaatgttgttgaaaaaa

SEQ ID NO: 209316 - DNA, 999 bp, Homo Sapiens; identical to SEQ ID NO: 41106

SEQ ID NO: 209317 - DNA, 837 bp, Homo Sapiens
ctagtttagtcgcgagcgccgccctttttttttttttttaatagtaataacctttatttaaaatagatttaatttaggaaagctcattttatatgagtttccaactaattattagagtcagaaacaaagaaaataaaatcagagaaaatcctctgtagaaaaaatacacaaagaacatttctacatgtgaaaaaacagtaaacagtgttaacatccaagttattagtctcaattccacgtctcctagtgaacaccactatcaaccttgagatctgatttgttcttgtcattcttcactgagtagatgaaatatgttaaggtgtctttttcattcactggaatagacctaaagtggcaaccaactatctcaacaagttgtgctttattaagtcctggtctggttggtagcttgaagtgtcttttgtatctcctaagtgtatttacttgtaattggtataaatcaacctctggggtatcaatatcttgaacaggtgaatcacctccatcatcatcactcccttttctctttcttctgtttcgaacactctgaattaagtttttatgataatcacatatgtaaagatgccttgcgctcttatccagctcgatcttcaccttcttctgggagatgctcttctggatcctcttgctgaagctggcgttgcctggcgcccgggcgcaccgctcaccatcctcccgcaggcagcacagttgccccggggccccgccccggccgcccccggggggcccagccgctgaaaacgccccccgggcccgggaacttcagccccgggtggccgcgcccggtcccgttcccccgcccagagcggggggggg

SEQ ID NO: 209318 - DNA, 1000 bp, Homo Sapiens
  misc_feature (824)..(824): n is a, c, g, or t
agtggagaaaaacgctataaagccagtgactgagaaagtcttcacctggaaatcacaactgggtatgcatcaggtatctaatagcagggaggaggaaggcctgttgctgcaatcattgtacagggggaaatgggtatgagagactgaggcttgagtgaactgaaggcaaacagagccaagtatccttcagtccactggaaagacaagttcctgcatcaccacagtgtatatgcaattctatgcataggaagagcctttagagaaagcatttgagcgaaagtcatgtttggtgacatgattcatacagacctcttgagctcctggaaatagtagaattaagacctgaggagatgactcgtcatctcttatgcttcactttttggataaagaactttttaaattcagtactgattggttcagcatatcctgggacataaaaatactcactactgggaaaaactttttcaaatttctaggttgaggagaagagttttcattgtccaaacactggcagggcactgacatcaaggcagaaaacctacttgggaatgcagatatctgtttttgtgatcattggcacttaagacatagaaaagatttccatgaaaaacttttttcttttcccttgggaagtcctcatggtatatatattttaagtgcaatggaatttttaaatttaaagatataactttatgaattgagaaattaggcctagctctaggctatgttacagaaatatagtcattgaatgatacagacatataaaggtagtagttgtctcattattaattccctgctgggagagcagatgagtcataccctantagaagaatgcatgcctttctaacctatgtcccccaagctgtcatttgcataagctggcagccatagattccctgatccctccgtaactgaccctacgacaatgggactgatccacggcactctagattttcaggctacccaacaacaccctggctttccttgggatttcctgaaa

SEQ ID NO: 209319 - DNA, 957 bp, Homo Sapiens
  misc_feature (722)..(722): n is a, c, g, or t
  misc_feature (879)..(879): n is a, c, g, or t
  misc_feature (929)..(935): n is a, c, g, or t
  misc_feature (937)..(945): n is a, c, g, or t
tcctcatcaaagaggaagaaactatttccaccctaacatgatttaagtctaagcagtgccaaattctgggtcgagactggggcctctagtgttagattcttctttccttattttccccaaggtagtattttcgtgagtattattaaagttatattcatgttttggacactctttagtctaggagtcagaaaccaggggtctttggacactgtgttctattctgcaggcaggagtacccactggaggttttacaactttgacctgcctgccatcaagcagaagtaggaattttgcaggtctgaaggtatagtgcaggccctccaggaacatatgtcaggtacctctgtgctttttccaaagtggaaattccagttctggacacactgaccctttcaaacgtttaccagctaatgggcaagcctcaaggccaactgagaaaggggctgcgagtggtaatataaacaccaaagttctctaaaatacacaagacctgtaggctatgtgtcttctgtacttcaggtgtgtagtctatttctgacaggttgtgttagtgaattttaagaatggagaggagaatttagggtttgctttttctttgaaagcaaaaataaatgttcatattcttctgatacagtaaaaacccttgaaatgccctaatttagaatagcacctgattaattaagagttaaaagtctaagaaagtttattaaggcgtgcatggncttgggataacaatggaaccatttgtctactggcatctgtctgctggtttcttgacaccagtgtaatatagaattgtgacgtaaagaaccacaaaatattagagggtttcctttccatgggttttggtttggttctaagggatgcaggcctttcagncattatctttttatttacctgagtaaaataaatccggttcaaaaaactgnnnnnnnannnnnnnnnaaaaaggccgcc

SEQ ID NO: 209320 - DNA, 1000 bp, Homo Sapiens
  misc_feature (645)..(645): n is a, c, g, or t
  misc_feature (759)..(759): n is a, c, g, or t
  misc_feature (933)..(933): n is a, c, g, or t
tgagttgctttcaaagaaccttcgcaagaccagagagttgtttgttcatggcttacctggatcagggaagactatcttggctcttaggatcatggagaagatcaggaatgtgtttcactgtgaaccggctaacattctctacatctgtgaaaaccagcccctgaagaagttggtgagtttcagcaagaaaaacatctgccagccagtgacccggaaaaccttcatgaaaaacaactttgaacacatccagcacattatcattgatgacgctcagaatttccgtactgaagatggggactggtatgggaaagcaaagttcatcactcagacagcaagggatggcccaggagttctctggatctttctggactactttcagacctatcacttgagttgcagtggcctcccccctccctcagaccagtatccaagagaagagatcaacagagtggtccgcaatgcaggtccaatagctaattacctacaacaagtaatgcaggaagcccgacaaaatcctccacctaacctcccccctgggtccctggtgatgctctatgaacctaaatgggctcaaggtgtcccaggcaacttagagattattgaagacttgaacttggaggagatactgatctatgtagcgaatanatgccgttttctcttgcggaatggttattctccgaaggatattgctgtgcttttcccaaagtaagtgaagtggaaaaatataaagacaggcttctaacagcatggagaagaganactgtctcagctccatgaggaatctgatctggtactacagatcggggatgcgtcggatggtctaaccgatcacattgtggtgggacaggtctgtcgattttcaggctggaaagaaatatcgggtttggaatcaatccaggatagcccccccggtctggggctacaaacctctgntctggttgggctccaaggcaaaagaatccggtttttttgaaggcttccgggggccggaaacccgccc

SEQ ID NO: 209321 - DNA, 882 bp, Homo Sapiens; identical to SEQ ID NO: 48092

SEQ ID NO: 209322 - DNA, 1000 bp, Homo Sapiens
gggccctaccataatcgtcaagaaacatataagtacttttcacttccattctgtgtggggtcaaaaaaaagtatcagtcattaccatgaaactctgggagaagcacttcaaggggttgaattggaatttagtggtctggatattaaatttaaagatgatgtgatgccagccacttactgtgaaattgatttagataaagaaaagagagatgcatttgtatatgccataaaaaatcattactggtaccagatgtacatagatgatttaccaatatggggtattgttggtgaggctgatgaaaatggagaagattactatctttggacctataaaaaacttgaaataggttttaatggaaatcgaattgttgatgttaatctaactagtgaaggaaaggtgaaactggttccaaatactaaaatccagatgtcatattcagtaaaatggaaaaagtcagatgtgaaatttgaagatcgatttgacaaatatcttgatccgtccttttttcaacatcggattcattggttttcaattttcaactccttcatgatggtgatcttcttggtgggcttagtttccatgattttaatgagaacattaagaaaagattatgctcggtacagtaaagaggaagaaatggatgatatggatagagacctaggaacaggaatatgaatggaaacaggggcctgggagatgtatttagaccatcaagtccccccctgaatattttcctccccggatgggttccgggatggccaaaatattgcctggggcctcctcccccctattatttggtggctcgattcaaaaattttaatactgtaaggggggacccaaggctccaaaacaggccccatttgtgctatcagtggaacgtctcccaatggaaaggcgatatttcggcgagacgatccttctcctctccgcccctgtactgcgtccccttcctctctcacaaactgctagcttacggcgccataccaaccgatctcgcact

SEQ ID NO: 209323 - DNA, 1000 bp, Homo Sapiens
  misc_feature (554)..(554): n is a, c, g, or t
agggtgttaagcctctgtctctggccctaccagcatccaggttccactttcctaggagagagtggagatgggaagacagggaaaggaaggcagcaggaggccacaagcccaccaggtcttcatgtcaagagagggagtaacatgtcttctcattgcccacggacccaacctctgtccaggtgcccctcatcatcacagtttaacacaagctcccctgctccagccaaattgatctcccagtcttgtccttacccattccaagtgctctgccagcccctgttcatccaagttttaagtcctccaccctgttctaagagactgttccaacggctctgggcctcagtggtcacttgaccaccattgtctcagagctgcccactttgtgtgtgtcacatgctgcctgagtcacacgtacatcttatttctgcctctagttttgtaagctcctggagggcggataacatcttatactactcttgtattctcatggcacctagtgcagtgctgggcacagagtaggtgctcaataaagacttgttgaatgaacaccccanctaatcccccctcacccctacttccccgtcccccacgctttcctccacctccccatcaaccctccgcctgtccacatcacactccacactctcatcaccctatggggggggcccgctctaaaaaaccccctccggggggcgccacttttatacccccacccagtttttttttgacaaaaggggcccccttaaaggggggcggctattttaaaccttaggcccccggccgcccttttttacccccccccggtgccggtggaaaaacgtgccacctgtggggttccttttgaaagggaaaactctatttttttggggggggggggcacatatattggggcacccctcccttccccaagaatttttacggctctcctgcgcgatatacaaacaatttcttttccggcgctacaaaggggcggttcacatattctgttcgcccctctcgc

SEQ ID NO: 209324 - DNA, 1000 bp, Homo Sapiens
  misc_feature (740)..(740): n is a, c, g, or t
  misc_feature (777)..(777): n is a, c, g, or t
  misc_feature (795)..(795): n is a, c, g, or t
  misc_feature (831)..(831): n is a, c, g, or t
  misc_feature (834)..(834): n is a, c, g, or t
  misc_feature (857)..(857): n is a, c, g, or t
  misc_feature (861)..(861): n is a, c, g, or t
  misc_feature (924)..(924): n is a, c, g, or t
  misc_feature (936)..(936): n is a, c, g, or t
  misc_feature (955)..(956): n is a, c, g, or t
  misc_feature (994)..(994): n is a, c, g, or t
gtcagtgtttcggaattgctcttatattccagtcaccagggttgttccatgtggatgatacagcattgtgcccgagatgttttggaggcccttgcttttcttcatcatgagggctatgtccatgcggacctcaaaccacgtaacatattgtggagtgcagagaatgaatgttttaaactcattgactttggacttagcttcaaagaaggcaatcaggatgtaaagtatattcagacagacgggtatcgggctccagaagcagaattgcaaaattgcttggcccaggctggcctgcagagtgatacagaatgtacctcagctgttgatctgtggagcctaggaatcattttactggaaatgttctcaggaatgaaactgaaacatacagtcagatctcaggaatggaaggcaaacagttctgctattattgatcacatatttgccagtaaagcagtggtgaatgccgcaattccagcctatcacctaagagaccttatcaaaagcatgcttcatgatgatccaagcagaagaattcctgctgaaatggcattgtgcagcccattctttagcattccttttgcccctcatattgaagatctggtcatgcttcccactccagtgctaagactgctgaatgtgctggatgatgattatcttgagaatgaagaggaatatgaagatgttgtagaagaatgtaaagaggagtgtcaaaaatatggaccagtggtatctctacttgntccaaaggaaaatcctggcagaggacaagtcttttgntgagtatgcaaatgctgngtgattcaaaagctgcgcagaaatttactgactggnaangatggtttgatggggaagtttgntgtngcctacaatcctacccgcctggagtgccttacagaaggggattattctgtattcaaacctttncttttaattcanaaaaccttaggggactggnnttccctttttcctcccccttccccaattccttgggggntaaatc

SEQ ID NO: 209325 - DNA, 1000 bp, Homo Sapiens
  misc_feature (796)..(797): n is a, c, g, or t
  misc_feature (807)..(807): n is a, c, g, or t
  misc_feature (905)..(905): n is a, c, g, or t
aaactactttttggtcatgaaattgttcatcgctgctggagaatgaacgtcattgcgatttatcttgcttcattctgaaccttatcaagaggatctgactgagagcccactgcagttagagctgagcacttttgaaaagcttgtccatcactctagtagggagaggctctggacagatgaataccttttcttcggcttgtgaggcttcccactatttattactgaactattatgttaatgaagatggacattttaggaatcaccaaacaatataatagcctcaagcaatataggccagacttggtcctaagcacctgcctcagcagttgtctacattcagttgttttgcattaacgtctgccttctttcctttacggtccatgcctttaatgttgtccacattaagcactgtggatcacgacaggaaaaaggttggagcagtgcttttcactactttgtatcaatccaggctacaatcttcatttaatataaataatttatggatttatgacattacaatcctgcattgtttcaagactgacattttttcctaaggaaggaaataatcatctaagaccacgaaaaaaggctgtttttttttttttttttgagacggggtctggctgtgttgccctgactggagttcagtggtgcaaacacagctctctccacaacctcttgggctcaagtgatactcccacctctgccttacaaaatacagggattactgggtgtgagccactgtgtctggccagaaaaggcatttttgagaaagcaaatcggatacctttattanncaaatagaangaatatatatatatttgcttatctgaaatggcttggaaacacgaattgtttttgcatttttttgaaatatttggataccccataatgagaacctttgngggatggggacccaagtcctgaaacgggggaattccaccctggggttttccgggaaaatggccctcataacccattatatttttgggggcatgaa

SEQ ID NO: 209326 - DNA, 966 bp, Homo Sapiens; identical to SEQ ID NO: 51626

SEQ ID NO: 209327 - DNA, 1000 bp, Homo Sapiens
  misc_feature (725)..(725): n is a, c, g, or t
ttagaaaatggatagggtaaaaaatttgaaaaattctaaaaaaattaaaatgtatttgatatgaattaaaatatatccattcaactatatacaactagccattaagagtaaataaaggtgtatttttattaagatgggaagatgttctcggacaaaagcaggttaccaaagagtatttacattactatcaggttttttaaatttattattacacaagtaaaacatgttcattataagtaaattaagaaacattacctaaaaattgaattacttctaatttcaccatctaaaatgttaacattctaaagtcagtttttttactcaaaccagtacaaaggtaaatatacatttttaatatatttttaagtaattttaaacttacaaaggagttgtaaaaatacagagttccggatacccttcatccagctttctctaatcttagtatattacataaccagggtacatttatcaaaaataaaagtacattggtataataccattaactgaattatacattttatttccccagtttttttacttacataatccagtttgggtaccatatcgcatttaattatagtctccttcagtctgtgaaaggttgtttccttgtctttgatggccttgtaacttttgaagagtagtgatctgttttcttttagaatatccctcagtttgcatttgtccagtgttttctatggatagattgagaatataggttttgngggaggaaatccccagaggtaaaatggtgcctttctcataacatcacaatccgggagcacatacataactggccgatatttaactttttgatcccttgggttaaaggggctttccagggtggtttcccctgcttgagcctaccattttttctccttggtccacgcccaatatttaagggggaagggagaatttaaaaatttccaccctctcctaaaaggggtagaaatattgacacgaaaatttggtggggcaatatgtgtaaaaaccccccccc

SEQ ID NO: 209328 - DNA, 597 bp, Homo Sapiens; identical to SEQ ID NO: 48997

SEQ ID NO: 209329 - DNA, 1000 bp, Homo Sapiens
ctgtcctcttagaggactgttgaagtccattctagtcattttgtaacttcataactgcagaaagaaatgatgcaaggactgtttagtggactgagatggctgagcaggttcttggcctgaattatccagaggagataggtggatctagcttcagaggaagtctacaccccattcccttctgcttacaatgtacccatgatatgtgtttagcacagtaatactgtaacaggacatcacatggaaaaatcaaagcagctggctcactgtatttaactgaaaagaatgcctacagattggatatttaatagggaaaattaaggcactttaataacaaacttcattatgtgaaacttgttgaatattaacatacaatataccttgtatattaatgccatagtttttagtaacactaatttaaacaacaaatttaaggggtgctggcatatcccagtgacaccttcagttttattgctgcttagtattttctagtaaattagttttaattattggcagtctgttgggcaccatttgggaaagaaataaattggtctcagtgtagcagacttgtagccaaaaactttgaattaaaaataagtataataacagaatattatttcatttttaaaggaattgtattatttttgaagtgctgtgcgggtgataatggtttcggctggggtctctatccccaccccccctattaaatttgtaatctcccctaaattttccacacggggaagtgcccccccctgggctcccccccctgcaaccaatggcaccccccccccccttctatccctcatcccccccccgtttcccccttcttcttccccccccccctttcctcccgtctccatttcccgccttaccccgctttccccctattctacaaaccacccccccctccctcccctctatcgtcccccgccgcctatatatataaaccccactgcttctctgtcctttccccctttattttcccccacaccgtcttaccccc

SEQ ID NO: 209330 - DNA, 340 bp, Homo Sapiens; identical to SEQ ID NO: 60470

SEQ ID NO: 209331 - DNA, 1000 bp, Homo Sapiens
  misc_feature (616)..(616): n is a, c, g, or t
  misc_feature (622)..(622): n is a, c, g, or t
  misc_feature (626)..(626): n is a, c, g, or t
  misc_feature (654)..(654): n is a, c, g, or t
  misc_feature (682)..(683): n is a, c, g, or t
ctctagagctgggctccaatttcctgtaggacgagtgcaccgcctgctccgcaagggcaactacgctgagcgggtcggggccggcgcgccggtttacctggcggcggtgctggagtacctaactgccgagatcctggagctggcgggcaacgcagcccgcgacaacaaaaagacccgcatcatcccgcgccacttgcagctggccatccgcaacgacgaggagctcaacaagctgcttggtaaagttaccatcgctcagggcggtgttctgcctaacatccaggccgtactgctccccaagaagactgagagccaccacaaagctaagggcaagtaagggctgaactttaaaaatgtaaacttacaagacaaaaggctcttttcagagccacccaccatttctacggaagaactgagcactctgttctccaaacctatcagaaatttgtggccgagttcaagcactgaggccattactttcctattgggtaaaataaaagtattgaatcaggcctagtaaatactatccaactgctaccttataacatgaaggaacctccttaattgtcccctccccacaaactgtcctgggtctttaaaaaacttggggccgggncgcggntggnttatgcgtccttagcattttgggaaacntgaggcagggggttggggggaaggggannaattttggtaggggactggaaggtcgagacccacccctgataacgaagaacccctggcctcttaaaaaaaaaaatgacttggccgcggtggcctcacgccctgtaattcccaacaacttttgggaggccccaaggagggttgtatcaccagggtcaagaaaatctaagaaccaccccaggcacaacatgggtggaaaaccctggctccctacttaaaaaccccaaaaattttatccccggccgttggtggggcaacccgtctacttaagggaaaacggggccgggaaaaaatccccttgtgaacccccggggagggg

SEQ ID NO: 209332 - DNA, 1000 bp, Homo Sapiens
  misc_feature (719)..(719): n is a, c, g, or t
  misc_feature (790)..(790): n is a, c, g, or t
  misc_feature (795)..(795): n is a, c, g, or t
  misc_feature (838)..(838): n is a, c, g, or t
  misc_feature (854)..(854): n is a, c, g, or t
  misc_feature (878)..(880): n is a, c, g, or t
  misc_feature (882)..(882): n is a, c, g, or t
  misc_feature (884)..(884): n is a, c, g, or t
  misc_feature (887)..(887): n is a, c, g, or t
cttcacttggtcctcaacgtttagagaacatgtgagaattcacacgcaagagcagctctataaatgtgaacaatgtgggaaggcttttacctcttccagatcattccgaggtcatttgaggacgcacactggagagaagccttatgagtgtaaacaatgtggaaaaaccttcacttggtcctcaacgtttagagaacatgtgagaattcacacgcaagagcagctccataaatgtgaacactgtgggaaggcctttacctcttccagagcattccaaggtcatttgaggatgcacactggagagaagccttatgagtgtaaacaatgtggaaaaaccttcacttggtcctcaaccttacataatcatgtgaggatgcacactggagagaaacctcacaaatgtaaacaatgtgggatgtccttcaagtggcactcctccttccggaaccatctgaggatgcacacaggacagaaatcccacgaatgtcagtcatactcaaaagccttcagttgccaagtcattctttctaaaaccagtgagagcacacactaaagagaaattctataactttaatggggtaacctcacattaattcatgtataatgctccagaaaattcacaccagggagagaaatcttacaagtatgatattggtctttgtcaatacctcatttgtaaaacagaccccattagtcgtgaattttccagctctttcaanaataaatgttttatgtgagaaaataattctctaagtcctctttcagctatagtacctaagtttttaatagnttagnggttttggctccttaaatattttcattttccgactgtattagnacccatggggatttgnagcatactttgacatggaccaaannntntnttnttaatttttttttttgaaaaattcttgtttgttcccccaattttgggggggcaaggggggcaaattcccttccttgaaagttccgccttcccaggttcccgcctttttctgcc

SEQ ID NO: 209333 - DNA, 1000 bp, Homo Sapiens
gacagttccaagacaaaggagtgtaaaagtacagcacacaggttaatactcttcaccctcatcctctccgtcagcactatctgctccaacctcctcataatccttctcaagggcagccatgtcctcacgggcctctgaaaactcgccttcctccatcccctcacccacgtaccagtgaacaaaggcacgcttggcatacatcaggtcaaacttgtggtccaggcgagcccaggcctcagcaacagctgtggtattgctcagcatgcacacagctctctgtaccttggccaggtctccgccaggcaccacagtgggaggctggtaattaatgccaaccttgaagccagtggggcaccaatccacaaactggatggtacgcttggttttgatggtggcaatggcagcattgacatctttgggaaccacgtcaccacggtataacaggcagcaagccatgtatttaccatggcgagggtcacatttcaccatctggttggctggctcaaagcaagcattggtgatctctgctacagtaagctgttcatggtaggctttctcagcagagatgacaggggcatatgtggccagagggaagtggatgcgggggtaaggcaccaggttggtctggaattctgtcaggtccacattcaggggctccatcaaatctcaaggaaagcagtgaatggaggaacaatcctggcttaaaaagcgggttagggtatgggaaggttggggggctcgaaatcggaggtttctaccacagaagtcaatagatgggcctcattggcctaccatggaagggccaatcatatgcgaacgggcccctttaaaaaatcccctcccaggggcccaaagttaggcggtaacccgtttttctttggaaaaaaggggccccctataggggggacggatataaaagttaggcacatgggccgcctcatataaaccctctggcactgggcaaaccgcctaacctggggaatctctgtgggaggggacc

SEQ ID NO: 209334 - DNA, 978 bp, Homo Sapiens; identical to SEQ ID NO: 50478
  misc_feature (743)..(743): n is a, c, g, or t

SEQ ID NO: 209335 - DNA, 745 bp, Homo Sapiens; identical to SEQ ID NO: 44246
  misc_feature (679)..(679): n is a, c, g, or t
  misc_feature (702)..(745): n is a, c, g, or t

SEQ ID NO: 209336 - DNA, 984 bp, Homo Sapiens; identical to SEQ ID NO: 49912
  misc_feature (960)..(960): n is a, c, g, or t

SEQ ID NO: 209337 - DNA, 1000 bp, Homo Sapiens
  misc_feature (810)..(810): n is a, c, g, or t
taaatgaattgggttgctatgcttgagtgggtagtgaaatggaaatatttgatgaatactgagagttcctaaaatgctagagcaaatttccgagggaaaggggggcatcgtgtgtcttgggaaggttgcagcaggttgtttcttcaactccctaagaaatcattgggaaggactcaactgcaaactcgggatcagatacaaaatgggtctttccttcccctctcccccaaaaaataggagcactaaattttaaaatctactcaggtgacagttgctttgcaatgaaacttatcccattgaaattttcagtgttaaataaaaagagatttgtgaatattttttaatataaaacttttacatccagtagtcaagcaccctgacaatttggaattttggaaaggtcgaaaatatttttaaaataattttggctcccccaaattagcaaattgtttttttaaaaacaacttgggggaagggttttttttgggttcccttttaaaaataatgcgttttttaaactgtgggccctttgtgtaaaacaaagccaaaaaactttttgggcttttgggacaccctctatttattttttagcggccccttgggaaattgggaacatctgtgcttggacagccccctttctaataaaataacacaggggggaaaccggccctgtgggctccccaatggggcaataaggccccctgggccaaaacctttagccaagaagtggtttccttttaaaaaacgtgacccctcactgtgtgaataccaaagggcttctaaggggagctctttcccggggtctttatncacacccatatgggggcttattaacaacttacttctattgcgctttctggggcgggttttatacaaacccctcctctttagcgaattgggcgctatatacacaagaagacacgtgcctccggtcttatttcttagagctgcgacacttacgtccacaattcttttggcactctcgtgcgtttctccacgg

SEQ ID NO: 209338 - DNA, 1000 bp, Homo Sapiens
ctggcgtcccagtgttgggatttcaggcatgagccactgtgcctggccatgtaatagagacttttaatataggagggtgtaccagaagcaccagtttcctgtggcaaacagaattattcctgctgtatttgtaatctggtgccacgaggtagcccagatcccttcagctctgatggaagagcattgcttcagccgtaaatggacacctgcagaaaccttgcaccgatggatagtctccctcagctccgtgccatcgctgcagaggctgttatggacatcactgcagcccagtggctctctctcctggtctccaccatatgagttggcttctgtttctctcctgttttactttgcctttagctgtggtctttcaaaccaccatccctccttatcttcctctgctggttcctcagatcttcctctgatggcgctgcctccatgccatgccctctgccagttctatgtggtgaacagtgagctgtcctgccagctgtaccagagatcgggagacatgggcctcggtgtgcctttcaacatcgccagctacgccctgctcacgtacatgattgcgcacatcacgggccctgagccaggtgactttatacacactttgggagatgcacatatttacctgaatcacatcgagccactgaaaattcagcttcagcgaagaaccagaccttttcccaaagctcaggattcttccaaaaagttgagaaatttgatgacttcaaagcttgaagactttccgattgaaagggtacaattcggcatccaactattaaaatgggaaatggctggtttaaggtgccttttcaagggacctcgaaggaatattggtcagtctttaaggggtttgggcttggatgccccaggtaaaaagtcctttttggctcaaaaagaaaaagggacttagggcaaaaaatctgttccgggacctatttcagtattaaatttttttaaggagtttcccccttgggaaaatggaacttggggccca

SEQ ID NO: 209339 - DNA, 1000 bp, Homo Sapiens
gcaccagagaaggaggaattcctggcctggcagcatgatctggaagtgaatgataaagctcccgcccaggctcggccaacggtgtttcgatggacggggggcggaaaggaagtttacttatctgggtccttcaacaactggagtaaacttcccctcaccagaagccacaataactttgtagccatcctggatctgccggaaggagagcatcagtacaagttctttgtggatggtcagtggacgctcgacccttccgagcccatagtaaccagccagcttggcacagttaacaacatcattcaagtgaagaaaactgactttgaagtatttgatgctttaatggtggattcccaaaagtgctccgatgtgtctgagctgtccagttctcccccaggaccctaccatcaggagccctacgtctgcaaacccgaagagcgctttcgggcaccccctattctccccccacatctcctccaggtcatcctgaacaaggacacggggatttcctgtgatccagctttgcttcctgagcccaatcacgtcatgctgaaccacctatacgcgctgtctatcaaggatggagtgatggtgctcagcgcaacccaccggtacaagaagaagtacgtcaccaccttgttatacaagcccatatgaagagctgggggcggatggtggcccaggagacagcacaccaccaggctccacacgtgcatgctttccccaagaaggaatggactgtacattgctcatttcacactcttcagaagaatttcatacctgccctggtcctgcttgaagggttgtccaggcagagcagctcctgcagcgcctccggtctgtgacagtccctcctagcacccccatggcctttgagcctcggggactcatccagtcccagaaaaaaaggaaggggtggccaaaagatcttgcaaccctggccccggcggggcatgtaaggctggggggcagtttcaaaaccaactttctcgaaattttccta

SEQ ID NO: 209340 - DNA, 1000 bp, Homo Sapiens
  misc_feature (470)..(470): n is a, c, g, or t
  misc_feature (510)..(510): n is a, c, g, or t
  misc_feature (600)..(600): n is a, c, g, or t
  misc_feature (729)..(729): n is a, c, g, or t
  misc_feature (963)..(963): n is a, c, g, or t
  misc_feature (967)..(967): n is a, c, g, or t
ttattaaaagattcttcacctcctaaatagaaactgaaggggaagcaatgctattaaggatcatacataagctaatagaggcagcagaattatctattaacattttcctaacactattctagtgaccttaacattttaatcacagagctgcagctgtttgcatgtgttctaaagctagcataatctttaagacagtcaggaaaaaaaaccttcaaaacaaattacataatattctatctagaaaaatttccaggaaagcacattcttgggtgaaagaaaaccacccctttgtcattgtgatgcactaaaaaaaagctttggagcctgatagtttggctcctggctctcccacttgtttgggtaaggttcgagtcactgtaaaatgtaattatactcccttttcaaaggattattttgagaatttaataagaattgatggaaggggcctagcagatagtaaaacctgattnaaatatcactaatttaattatttcctagaaagccactganacatcataacatttatttttctgggtagaccttatgagtttattctcaaaggcaattaaaaaatctccttcaggaaagccatgcacattnttattaatcatatttatactactaacaatgcttggctgatggataaaaatacttaatcaccgtagacacacaaaaagagatgtttctcaacttatcctaggggtacatccccataaacctactatcagntgaaaaattggaaaatggaaaatgctagcctgtcttaaatatgctcaaaaaccttacagtagccttactggtttagcaaaattatcctaacccgaagcccgttttataataaaaggggtggaatttccgaagggaaattaattggaagctccacacggaaaatgtatggggcttgggcaccatggaaaaaggccctaaaattggggaaccgggccttaaattggaaaccctttnattntggaaaagggaaaaaaggggaatttggggtttc

SEQ ID NO: 209341 - DNA, 1000 bp, Homo Sapiens
  misc_feature (861)..(861): n is a, c, g, or t
  misc_feature (911)..(911): n is a, c, g, or t
gctgaaatcaaggctgtttcattttagctgaagacctgcaaagctgcttggatttctagcagttgaaaacctaacctgcaattgatgcttaatcatccatccacatgaacatgcagtcagctatacgcatcaagactcgtttgcaaaaaccattgatttttcagtatgtgggataagggtttgggtttttttgttttttggtctgtataaggaattatgtgtgtgtgagttgggatgtatggatatgtgatagtcatattttcaaggtatggatgtttggtgataacgtctcagagcatgcctaaaagagcactgcaagattatttttgaagaaatgttattttattagatctaactcttcatagtatgtaaatgttagaacattttaataatattttaaaactgggctttcccagtatttcaaaaagaaataatatatctgttaacgttattggaatgctgctcagttctctgatcagtgcttatgttatgattgttgataactaaccaaagtagatgcctgcagagactttaaaatgtaaaataaagatgtatgctgcctgtcagctattctcattagaaaagttttaacttattttactccatatagaaactgtagagactaaaaccagttattttcttgtacatttgtgccatgcactgttgttatacaagaataggtgtacaaagctaaagaaaaattgtggtcattgatgatggaatatatgacttgcaggcttttgaagtctgcagaattcaagaaaagagctgcaaatggccattttgaatctttattcagggactcacatgcctttaccctaaagaaacctgggggctaggggggaatggaaagaagccctnaagactggacctaccaaacatggcaatatacttattcactgggctaaatnctgtaggaataacatgaaactgggagaccctattctttttcaaaaaatccacttttgttggaaaagggagggaacaaccaaacaaggga

SEQ ID NO: 209342 - DNA, 1000 bp, Homo Sapiens
  misc_feature (779)..(779): n is a, c, g, or t
caggtgtgagccaacatgcctggccagaaggttctggtttgttaaccaggttacttcctcagaatgttggcctcctgtatgttggaggttatgaaagaccctttgcacaaatcaaggtgacaaaagagctgaaacagtatgacaacaaaattatagaatgcaaatttgagaacaacagctgggtcttcatgagacagagaacagacaaaagttttcctaatgcctacaacactgccatggctgtgtgtaacagcatctcaaaccctgtcaccaaggagatgctgtttgagttcatcgacagatgtactgcagcttctcaaggacagaagcgaaaacatcatctggaccctgacacggagctcatgccaccaccacctcccaaaagaccacgccctttaacctaagacctgcctgtgacttgagggttaagaagaaagaggaatgaggaaaaaacgctgttgcccatttttgtagccagagaaattgaaaaacgactgtggcttgatgttgatacacatttgaattttttttaaaaaaagaaagttatcgtagccagcctgtaaatacttgatgcattcgtttcctcagtgctgcaatacatcatggacttaaacatcttatttatctgataaactcagccttaccttgtggaatctgaagattgaaatatccaaaggtttaaacaagatggaaatcaatgaaaaagaggccttgtttatatatgggtagcttcacatttaatttataaaggtaacaatctgggaaactggtgagcccantaaaacagtattttttttagaagttgtggttacaaactggtaagccaaatttttgctgttttaaaaaatcccagggcaattgggcaattaaaacaatttctttggctaatcaattttaaccagtggggatttttcccttacaatttccctggaagaatcccccctgggtgatttccagaaaaaacacaaaattgtaacacggggtgtttggttttataaat

SEQ ID NO: 209343 - DNA, 787 bp, Homo Sapiens; identical to SEQ ID NO: 52030

SEQ ID NO: 209344 - DNA, 1000 bp, Homo Sapiens
  misc_feature (768)..(768): n is a, c, g, or t
  misc_feature (893)..(894): n is a, c, g, or t
  misc_feature (927)..(927): n is a, c, g, or t
  misc_feature (935)..(935): n is a, c, g, or t
gggccttctccgggatgaggccctggcagaggtgaaggacatggagcagctgctggcccttgggaaggaggcccgggcctgtccctattacgggagccgccttgccatccctgcagcccagctggtggtgctgccctatcagatgctgctgcatgcggccactcggcaggccgcgggcatccggctgcaggaccaggtggtgatcatcgacgaggcgcacaacctgatcgacaccatcacgggcatgcacagcgtggaggtcagcggctcccagctctgccaggcccattcccagctgctgcagtacgtggagcgatacgggaagcgtttgaaggccaagaacctgatgtacctgaagcagatcctgtatttgctggagaaattcgtggctgtgctaggggggaacattaagcaaaatcccaatacacagagtctgtcacagacagggacggagctgaagaccatcaacgactttctcttccagagccagatcgacaacatcaacctgttcaaggtgcagcgatactgtgagaagagcatgatcagcagaaagctctttggattcactgaacggtacggagcagtgttctcatcccgggagcagcccaaactggctgggtttcagcaattcctgcagagcctgcagcccaggacgactgaagctcttgcagcccctgcagacgagagtcaggccagcaccctgcgaccagcttctccactgatgcacatccaagggcttcctggcagctctcactacggcccaccagngacggcaggggtcatccctgagccgccaagggcagcctcagtcagaagcacccctgaagtttttgctcctgaaatccagctgtgcactttgccccaattggtgaagggaatgcccgggcagtggnncctttgcggggggggtacccatggcagcccggntgtctggnacttccgggcagcagctgctgggccccttggtgcccgggggtggggaacttgaaaaccccccggg

SEQ ID NO: 209345 - DNA, 624 bp, Homo Sapiens
  misc_feature (572)..(573): n is a, c, g, or t
  misc_feature (578)..(582): n is a, c, g, or t
  misc_feature (584)..(594): n is a, c, g, or t
  misc_feature (597)..(605): n is a, c, g, or t
  misc_feature (609)..(612): n is a, c, g, or t
  misc_feature (614)..(614): n is a, c, g, or t
  misc_feature (619)..(619): n is a, c, g, or t
  misc_feature (622)..(622): n is a, c, g, or t
ccgcacagcgtggagacggggcagggaggggggttattaggattggtggttttgttttgctttgtttaaagccgtgggaaaatggcacaactttacctctgtgggagatgcaacactgagagccaaggggtgggagttgggataatttttatataaaagaagtttttccactttgaattgctaaaagtggcatttttcctatgtgcagtcactcctctcatttctaaaatagggacgtggccaggcacggtggctcatgcctgtaatcccagcactttgggaggccgaggcaggcggctcacgaggtcaggagatcgagactatcctggctaacacggtaaaaccctgtctctactaaaagtacaaaaaattagctgggcgtggtggtgggcacctgtagtcccagctactcgggaggctgaggcaggagaaaggcatgaatccaggaggcagagcttgcagtgagctgagatcacgccattgcactccagcctgggcaacagtgttaagactctgtctcaaatataaataaataaataaataaataaaaataaagcgagatgttgccctcnncaaannnnncnnnnnnnnnnnacnnnnnnnnncccnnnnanaaaanaanag

SEQ ID NO: 209346 - DNA, 1000 bp, Homo Sapiens
  misc_feature (672)..(672): n is a, c, g, or t
  misc_feature (685)..(689): n is a, c, g, or t
  misc_feature (691)..(691): n is a, c, g, or t
  misc_feature (699)..(699): n is a, c, g, or t
  misc_feature (738)..(738): n is a, c, g, or t
  misc_feature (747)..(747): n is a, c, g, or t
  misc_feature (755)..(755): n is a, c, g, or t
  misc_feature (757)..(757): n is a, c, g, or t
  misc_feature (765)..(765): n is a, c, g, or t
  misc_feature (767)..(767): n is a, c, g, or t
  misc_feature (865)..(866): n is a, c, g, or t
  misc_feature (868)..(868): n is a, c, g, or t
  misc_feature (883)..(883): n is a, c, g, or t
  misc_feature (890)..(890): n is a, c, g, or t
  misc_feature (901)..(901): n is a, c, g, or t
  misc_feature (907)..(907): n is a, c, g, or t
  misc_feature (918)..(918): n is a, c, g, or t
  misc_feature (921)..(921): n is a, c, g, or t
  misc_feature (935)..(936): n is a, c, g, or t
  misc_feature (963)..(963): n is a, c, g, or t
  misc_feature (966)..(967): n is a, c, g, or t
  misc_feature (981)..(982): n is a, c, g, or t
  misc_feature (994)..(994): n is a, c, g, or t
gaggagagtaaacgaccccctctgttccacacgtggcctacaacccatttctatgaggtttcgcataagctcttggagatgtacaggaaggagctgctcctgaagcgcacggtggccaaggagcttgcccacaccggggatcccgacctcaccctgagctacctgtccatgtggctgcaccagccctatgtggagagcgacagcaggctgcatctggagagcatgctgctggagacaggccaccgagctctctgacgtcctgagacggctgcggacactggctccttccacgtctcaccaggcagacagtctgcctaggacccagtgccgcaggcctggatcagaccccaggatcagaccttcttggggtcttctggccagagcttgtcaccagccccatggcctctccaggcgtgctcatgcccacaacccgcggccagccccacgtggtgccgctcagccttctctgcccctcctgggaatctgtcattcgtgggtgcttcagagtaaaatcaatgagtttctgagcagaatgagtgagtgatctagtttctataaattaggcatgctttatacattatgtttgtgtagaaaatccctggtttaatatttttactttatgcctatcttgattgttgaagtttttatgagactatattagttggggggccncaaggggccgggnnnnncnggccgggngcccccccgccccccggcgcggccgcccggcggccgccnccccccgcngggcccgncncccccggncngccggggccccgcgggccgggccccccggcccccccccccgcccgcccccccccccccccggccgcccgccgcgccccgggccgcccccgcccccccnncngggccccgcccccgngccccgncgcccgggcgnccgccngcccccgcgcngcnggcggggcccgccnngggcccggggccccccccggcccgcgnggnngcgggccgcccggnnggcgcgcccgcncccccc

SEQ ID NO: 209347 - DNA, 1000 bp, Homo Sapiens
  misc_feature (787)..(787): n is a, c, g, or t
  misc_feature (800)..(800): n is a, c, g, or t
  misc_feature (804)..(804): n is a, c, g, or t
  misc_feature (840)..(840): n is a, c, g, or t
  misc_feature (846)..(846): n is a, c, g, or t
  misc_feature (965)..(965): n is a, c, g, or t
gattggtggcctaagattgatgctgtgtattgtcactcggttgaacttcgaaatatgtttggtgaaacacttcataaagcagtgcaaggttgtggagcacacccagcaatacgaatggcaccgagtcttacatttaaagaaaaagtaacaagccttaaatttaaagaaaaacctacagacctggagacaagaagctataagtatcttctcttgtccatggtgaaactaattcatgcagatccaaagctcttgctttgtaatccaagaaaacaggggcccgaaacccaaggcagtacagcagaattaattacagggctcgtccaactggtccctcagtcacacatgccagagattgctcaggaagcaatggaggctctgctggttcttcatcagttagatagcattgatttgtggaatcctgatgctcctgtagaaacattttgggagattagctcacaaatgcttttttacatctgcaagaaattaactagtcatcaaatgcttagtagcacagaaattctcaagtggttgcgggaaatattgatctgcaggaataaatttcttcttaaaaataagcaggcagatagaagttcctgtcactttctccttttttacggggtaggatgtgatattccttctagtggaaataccagtcaaatgtccatggatcatgaagaattactacgtactcctggagcctctctccggaagggaaaagggactcctctatggatagtgcagcaggatgcagcggaacccccccgatttgcccgacagcccagaacanactagaagtggcnctgntacatgtttctgtggaaccctgacactgaaagctgntctggntgccatgtcctggttccgccacctctgtgaggaagcagaatccggggtgggggtggatgaagtgtcattgcataacctcttgccaactataccacattcatggaagttgcctccgtccnccatatggagtcaacgggagaacagactttcaaaa

SEQ ID NO: 209348 - DNA, 388 bp, Homo Sapiens
gacgggtaaatcgaattttaataacagattttacttcatccaattgaatggtatcatttcaatgagcaattctgatagtgattgagatcttttacattctttttcactacgtctttaaaatctgatgtgtgttttgtacttggaacacttctcagtgtggaccagatgcatttcacatactcagtagtcacgcgtggccagtgccttccataccacacagtgcagcatctgtagaggtttcctccactgctgatagactaggagaccccaagatggaaagcctgaagaatctgctccttgaagtagggaccttaatggggtgcacgccagggcgaccccaatgtggtaggctgcttttgaaccatggctatccctacctctagactca

SEQ ID NO: 209349 - DNA, 319 bp, Homo Sapiens
ggattttcagatacttttaattttgaaatagtaacagattcacgagaagttgcaaaaatagtacagaaaagtacatgtacctttcccccattttctcctgataataatgtcttagatagctataatacagtatcaaaaccaggtcactggtattggcacaatccacagaccttattcagatttcaccagggttacatgcatttgtttgagtatgtacatagttctatgcacacataaaactttattacacgtagatttgtataaccaccaccacaatcaagatacagaactgtcccgtcaccacaaagatccctctggc

SEQ ID NO: 209350 - DNA, 484 bp, Homo Sapiens; identical to SEQ ID NO: 41000

SEQ ID NO: 209351 - DNA, 322 bp, Homo Sapiens; identical to SEQ ID NO: 50425

SEQ ID NO: 209352 - DNA, 1000 bp, Homo Sapiens
aataacattaaaaggtaacagtaatgatgacaatagtaatagacttagggctctagatataggaattttagataccaccttaaatatgttcagggagataagaaacaagattcaaaatgtcagagcaaacaaaaagaaggcaaatttggaaaagaaccaagtagaaattttagaactataaaaatacagtaactgaaattaaaaactcgatgtacaggtaggtaggtgcaagtagctggtagtcccagttactcggggggctgaggcttgggagtagctggagcccagaagttcgaaaccagccagggtaaaatagtgaggccctgtttgaaaagaaaaatggggtgggagggggtggggaaaacagaaaacttagtggatgagtttagcatcagattagacatacttgaaaataagtgaactggaagatggcttagaaggagagatctggaatgaagcttcaagatacagtattacagaagaaaggaaaagatatagactatacatcgaaaagttttcgcaaaaattggaataatgaaaggagagggaaagttacatgtatagcagaagcagtattttaaaaggaaatgatacctaaaccatagattctcgaagttgtacacattgcaaggaagataaacaaaaagaaatctacacctaactacatcataataaaactgcaagaaaccaacgaaaataggaaagtctaaaagcagccacaagggaaaaaaaatacgttcagaaaagtaatgattagactaacagctgacttcacaacagaaacaatagaatctactaactgcaaacctagaattttgttaaatttagcaaaaatactttccaggaatgaagatgaaataaggagggaattaattaacagtgtaccagctgaaggaaatacagaaggaaagaaatgcaagaaagaatgatctcagatggaaggttagagatgcaggagggagaaaagagcacaaaaaaaaaaaaaaaaaaaaaaaaaaaa

SEQ ID NO: 209353 - DNA, 1000 bp, Homo Sapiens
aaattcaaaatattttagagactattatgagcaactatatgcagtaaattggaaaacttagaagaaatggatgaattccgagacacataaaaacataccaagattgaaccatgaagaaatccaaaacttgaatagaacaacattaacaagatggaagcggtagtaaaaagcctcttatcaaagtagaccaggacctggtgttttcgctactgaattctgccaaacgctgaaagaagagctaataagagttctactcagactgttccaaaaacttgaggaggagaaaatacttccaaacttgccagtattaccctgataccaaaaccaaagaaagacactacaaaaaatgagaactacaggccgatatatctgatgaagtagatataaaaatcttcaacacaatactagtgaattgaattcaaaggcacattaaaaagataattcatcatgatcaagtgggattcatcccaggtatgcaaggatgtttaaatatatgcagtcaataactgtgacacatcaacaaaatgaagaacaaaaaccatatgatcatttcaatactaactgaaaaagtgtttgataaaattcagcatctctttgtgataacagctctcaacaaactgggtatagaaggaacatacctcaacataataaacaacaacaaacccacagctagtatcatactgaatgggggaaaaatgaaatactttcctttaaattctggaaacaagacaaggatgcccactttcaccactgttaatatagtactggaaatccttgccagagcaattagacaacagaaataaataaaaggcatccaaaagggaaaggaaggagtcaaactactcttgttagtagacaatataatcttatatttagaaaaaaactattagaattgataaattcagtgaagttgtaggatacaaaatcaacatacaatcagtcacatttctatatactgacagcaaacaatcaaaaaaaaaaaaaaaaaaaaaaaaaaaaa

SEQ ID NO: 209354 - DNA, 1000 bp, Homo Sapiens
tgtccagtgtgaatcctaagactgaaaactttggggagacacttaaaaaaaatcctagaatttagaaaaagagaattatttgatttcttatttcctctttctgttcaggccttctgaaagtaaaggttcttcctttaactgttccctgttctttcttctattccttctttgtcctactcaaagggataagtttgttgaaattgacctaaagccagtctgcaaacactgttatgagaaaatgccagaagaatttaagaggcgacttgccaaacgggagagagaagcaaaggataaggacaagcagaaaaagaaaaagccagtctgtttgtaaacttttctatccctgtgtcatcattttcactgctttctcctttggttagtcctttggaatatgtttttgttctgtttctgtcttttgctttcttccccccctgcaacttttgggcatgtatttgtagtcatcagagattgaaatacaagtatttgtcctatgtagaactggtccttttgcataactgctaaaattacaaaaattaaatgaatacactccatacttaatacagttttgtggtcatgtatttcacttactctgtagactcactcacctcattttttaaacaccatatagtatacatttctttcatttttttttaatggatttaaagggaagaattctaatctcttaatagaccctggaaaacattttaaaggatttttgtctgattaactgtagcttttaaaatcctggtttttggtttccttgccacgatcatttaattgataaattataagtgttgtttgatatttttaaaaatgcatatattctaagttatgtattaaattatttcagcatggcgaggcatggtggctcacgcctgtaatcccagcactttaggaaggcagagtggaaggattgcctgagcccaggattttgagaccagcctggactacatgcctagaccccatccgtcaaaaaaaaaaaaaaaaaaaaaaaaaaaaa

SEQ ID NO: 209355 - DNA, 575 bp, Homo Sapiens
ttttttttttttttttctgacatacggataaacttttattgacataccaaagagaaaccaatattcactgaaggctgccgaatccgtatttctaagagtaaaggtgtttaattgactctccacacttaaagcactttgtatgaaatatagctacaaatatacataaagaattcagatcacaaaactctctaggacattggctgggcgcggtggcccaagcctgtaatcccagcactttgggaggctgaggcaggcggatcacaaggtcaggagatcaagaccatcctggctaacacggtcaaaccccgtctctactaaaaatacaaaaaattagccggatgtggtggcgggcgcctgtagtcccagctactcgggaggctgaggcaggagaatggcgtgaacctgggaggcagagcttgcagtgagccgagaccgcgccactgcactccagcctgggcaacagagcaagattctgtctcaaaaaaaaaaaaaaacctctccaggaaatcaatagtcatcatataatactggaactacagttaaaaaaaaaaaaaagcaatcttctaggattccta

SEQ ID NO: 209356 - DNA, 565 bp, Homo Sapiens; identical to SEQ ID NO: 55868

SEQ ID NO: 209357 - DNA, 550 bp, Homo Sapiens
ttttttttttttttttttgctcaggactatttgctttcagagcacaaaacaggttacagacaggtgtgtgccaggagtcgcaagatttggctggatcctcccaggaggcttgggggatggggcacagcttggctggacccaggggggacagagacattgatgtctgacccaaaatgatccctcacctcaatgccttctgctaggacctatctatctggccctcctgttctctccacaaatggaattatgagaccacctaggggaaaggggacctcctatcccccctcccccgccctgccaagagaacagagagtggatgcgttgagctggtaaagtgcatggaggagccggtctgtaggtgctttcctgggtttaagaacctgatgccatagactcatcttctctggggcctgggacccgtgcggctgggggaaagccaacagttaggaacggaggggaagctgggctggggggactggcttggatgtgttctcaaaccatctctgccagcagcgtgctgggtcctgccccatctgtacaatgaggggaa

SEQ ID NO: 209358 - DNA, 583 bp, Homo Sapiens
gcacgaggcggagtctcgctctgttgaccaggctggagtgcaatggtagaatctatccaaaaaaaaaaaaaaaagttattatttctgaagattgtatgaaatttataaaagtctgctggccctgatatgatgctgtcagtcatgattctgattactgtcttaaaatgctgcacataagtaattaaatttccttgtgaactgggaagtttcatcagacttttatcataactattgtttccatcatccacagttactgttttgaattcttctctaaaaatatttgtaattggcaatagtccaaattttcttttgttttctttcctgtttttgagacacagtctggctctgtctcaaaaaaaaaaaaaaaaaaagtttcggcaaattccatctaagaattccaccagagttctgttgtctccaatgtcatcttccacagatttcaagttgtgaagccctgaactgttaatttatcttgagaatgtatatttaagcttaatttaagactatatacctaaaaattgagcatgtaatttctataatttgtttatgtaagtttctgtaagtcataagtatgtggtttcca

SEQ ID NO: 209359 - DNA, 585 bp, Homo Sapiens
tatctttagtagagatagggcctcaccgtgctagtcagaatggtctcgatctcccgatctcgtgatccgcccgccctggcctcccaaagcgctgggactataggcgtgagccaccgtgcccagcacccccccgacaattcattctaaaagaaattcttcgaaattctatttttcctcctagacttccctgagatcctcctttccttctgtaactctttcctgcttcccctgactccttcaactttttttttcagtgccctgccccattcaccttggacatcctcccccactctccttcctcaagtgtatttctccccttccctccttaagtctaggaactggggacatgagtaggcacaggttggctgcttctgtaccacagcactaactcaccattagcgtggcctccatgttcctcaggcacgagcttccactgggccagggctccaagggcccccaaggctggccagatccccagtaagacccagctatatcagcagagagaaggcaaggctggaagtgtctgcaggcgttggcccagccaactccccagtgccagcccctccaggaagtagtcaacacagg

SEQ ID NO: 209360 - DNA, 555 bp, Homo Sapiens
tttttttttttttttgttgttttgggaatttttatcaagtactttcagagaagattatttcctgctttatcttcaaaaactggaaagggtcaaagaaaagacagtagcttgctgggcacgatgcctcacgccagtaatcccaacactttgggaggctgaggcgggcgtatcacctgaggtcaggagtttgagaccagcctgaccaacatggagaaacactgtgtctactaaaaatacaaaaattagctgggaatggtggcgcacgcctgtaatcccagctactcaggaggctaaggtaggagaatcactcaaacctgggaggcggaggttgcggtgagccaagatcgcgccattacactccagcctgggcaaaaaaagtgaaagtccgtctcaaaaaaagaaaaaaaagacagtagcttatgttcatggcaagcacctctcatcacagtccagttccaaggaaaaattccagcgttttctacattgggtgccacgtcgcctgaaatcagcacattccatggaggaagtagtacttctctgttgcatctatcctag

SEQ ID NO: 209361 - DNA, 594 bp, Homo Sapiens
tttttttttttttttaacagtaaaaaaaaatttttagtaagttccaattgtgtgtcagaattgtgctaggcgcagggggcaacaataagcaagacagatcaagcctataccgtcttgaaatttaagtttagggaccactctctgtcaaaggatccagcgctggtaatatagattgctgaaggcctttgccttctttccaccaggcaacagaatttgtgtccccgtcactgcttcttcttctgtgaaaaatatagcttcagtttggtccacgaatacagaagttggtcagagatattttctttcaagcacacaacaagcaaaacttggccaatacacaccaatcaaatgcacttcctttttccctgggagctcctgccacatctcagccctgcagggcagtcttcataagggagacaaaagaagggctatgcactggcactgacagttgggcaggtagtgctcaaataagcctaaatctcaacattccaagggaatcttcaagatcaaggtagacctagtccagtcatctcttaatcttttaaggatcactggctggatgtggtggctcacgcctgtaatcccagtgctttggga

SEQ ID NO: 209362 - DNA, 1000 bp, Homo Sapiens
tccactcccacacccacaaataaacaaagaagctttgagcttattttacaaaagtgtttgaaatggccctcctctctctgatgctcctgggccctggtttggccccatctgtgcagtctctctgatgagtgtgaaataagccaggtttggctcatgctctccctgtgagcttgctccccccgtgagcctgccctctccatctggcctcactttgtttgtgtccctgtgtcctttatctctgatcctgggatcctggtggtttcctcctccccgcccagcttgggtacttttccccagggttcttccctatctctacatcagaatttcctgctttctcccagatatgcatttccctggcccaggcatccattacttcctctcatcgtgaggtccctgcagcaggctgccgatggtgttgtggccatgccttcctccacaacccaaggaaagctacatgtgtgtctgtcccataggaaggagtcatccctgtctcttcaagttggcatttcagaggaaggaaagtaaccagcgtcattctcaatttccggaaactgtttatcatattgcaagaagaagaaagctttgtgactcatgagaatgatgttttcctctctggtacataaggttatgtaggtacaatccatttgtgtagaggatcttttctcccttaatgtgatgtacacatttttagcacaagtataaaactactttaaatgaaatcagcctcagccagggaaatatgctgagtaataatgttgccaggtactataccactgagttgagtttgcaattcactgctattaatccctgtgtgttagttctgaatttttactctttgcatacgtagaaaaatggtgtttctcttcagagtcaaggagggaaaaaagaaaagataaaagacgcttataacacctttgtgtccacccctaaaatcagcatattgatctattacttttctaggtattgatggaatattgactcatatactttcataaaactg

SEQ ID NO: 209363 - DNA, 1000 bp, Homo Sapiens
catggcgccgcctgcgttgagactgttgctccatcaccccgtaggagcttagccatgaaatgttccctctgtgtaacgatgatccctgtgcgagcagaggccggcaccatttggtccctgagactcaaaacaaagactgatttgcctggttaagacccccagtctctaatgcagtcgataaatctttgttggtaaataattgctatcgagcagagttttaatataaatttatgagtggtgttttatcacagcttggggctgcagcaaacactgagtgatgggtttcagatagcacttacattcatgacattaactttgtaagttatttaaagcttgtacacttaacattgcttttggctttcaatgacctcttgggactagacaaagaatacacatgacgaataaagggattgcagccaaaagacaattctactctttgctccactgtagaaaaggttccttgggcttaaagcaagatgtgcctgcctggaatcctgatattttggttataggtcattaaaatcagtctttctgatatgtcagtaaattaggtggtaggaattagatcaacatttgccatttccaagtaacataagaagaataatttgaggtgtcacaaaacatttgaaatttcttgctttacaaacaagttaaaatttgtctggtgggtgaaatggtttgcagggaggcagcatagcagcggggtaacaagtataaacccttggtttgtacctcgaatcttgcgcctgtttcttccccttactgctgtttgggttatctattgctgggtaatgagcccaaattatagtggcttaaaacagtaccattttggccaggtatggtggctcacgcctgtaatcccagcactttggaaggccgaggcaggtggatcacaaggtcaggagattgagaccatcctgaccaacatggtgaaactccatctctactaaaaaaaaaaaaaaaaaaaaaaaaaaaaaaaaaaaaaaaaaaaaaaaaaaaa

SEQ ID NO: 209364 - DNA, 1000 bp, Homo Sapiens
tggcttagagtaatggcagtgggtaagttcaggaatagcttggacatgggagagagtgacaggatggcaccagagttgcaagtttgcatgtgtgggtacccaatggtggtgttttctaaggtgaaggccattggaagaggaccagctttggggaagggtacagtcttgatccttgttgagtatgaggagtttttgagtcaaccagtggaggcatcaagcatacaggtcaggaactggaggaaacagctggactagagatacacatttgggcatatatatatatatatacagtatatatatgcacgctgattttatatatatatatatatataaaataattatggaagtcagtgagattgtccagggcaagaatataatgtcatatgagaggggagtccagactctcaaggaacgcggacatttaaggggagagtagaataggatgggccgtcaaagtctaagtcagagcatcctgatgttggaggcaaagcaggagagtgtggattaagcagctagacattggttactggggcaacaaccgtttgggtggagaactggatcagaaatcaactggagtggatcgaggtgtgcatagaaggcgaggaagtggcgaggcgtttggctgcgaggggtagaactagggtgcaccaagcaggagaaacagatggaagtttggacatgattgaacacaaatgggaagagtacagaaacaagagtggaccaggctcatatgtgtaatcccagcacttggggaggctgaggcgggaggattgcttgacactaggagtttgaggccaacctgggcaatatggcgagaccccatctctacaaaaacatttaaaaattagccagatgcggtggcgcatacctgtggtcccaggctaagatgggacgattgcttgagcccaggaggtcaaggcctcagtcatgccactgcttgagtgacagagcaagacactgtctcaaaaaaaaaaaaaaaaaaaaaaaaaaaaaaaaaaaa

SEQ ID NO: 209365 - DNA, 522 bp, Homo Sapiens; identical to SEQ ID NO: 39996

SEQ ID NO: 209366 - DNA, 604 bp, Homo Sapiens
agctctgttctgctggctgctcaacgtgattcaggccatttttgaataaatccctccgtgtgccagctatcacattcaaatttgaatcctaggatgtgaaggccataataaaagcagaaaacactttttcccaaaaaccacaataaataattttcaaaccagacattgtacaattttaaattatttttcaagtaaaatctacctacatggtaaatttcatttattcaggtgaaattaagtctttgttggtgagcctttagccacaagaagagaaacaagtaatacccaagtgtagtagggaatagagtaactttgtctcccctaatgccatgcccattagctggggtaagcctgacaatgtcttgccccttaccatggtcaagcccccactcaggagccccccgccctgctccatcaagccatgggtcatgcccacaggcatgtccaatgtctggaccccatactgggctgaaaaactgccatcctgtgaagaggaagggtctgccaggtcatcaaagtggccaaccacatctgagacagccaatgagggatcagaatccaaggagataggtgggatttcaaattcctcatcacccaagcttgg

SEQ ID NO: 209367 - DNA, 630 bp, Homo Sapiens
tttttttttttttttaaataataataggctttctgccccaactaaaggaattttaggcttctgcaacaagtggaggaggcattttgaagatgggacacaaagaagtcttctttctccagatccagaagtcaggccttgtaagaattcaagccaaaaaaagttcatccatgggaaaaacggttcttctatcatccagcacgtatttgtgccaacagagctgagggacttgagtaattcaagaggctaggggttggggggcagatgtgtccagtggctcccacagccccgccgtcctgaaagtcacgccagttaatgtgcctcggggtggatcagccctcccgacagatgactactaggaaattaatccccagttaataatgtgctttggaccaagtaagtcaagattatttttcctacaattatacaaagatatgcttttccagaagggaacttctggaaaaagaacaaataacactatgcttaaaatattattcacatatttagagaagaaagaacttaaaatagcagaagacctgaataccatgatccacggtgcccacccctgggagcatgtctttgtgtgagacaagacctagcacagcagggctggctttctaagggtacggtgag

SEQ ID NO: 209368 - DNA, 601 bp, Homo Sapiens
tttttttttttttttttagaatcatcaacaaaactcgcatttaatgatggtgttgacctgaggaatcttcaggcagaagcttgtggtcagaggggaccaccagcaaagaactgacccaggtcttggaccaagagtctcccagagagagtcaacctcccagtagaagggaggccaacccctccactgcttcatgaaagaagactaaaaattctcctgggggaaagaaacacggtacaaaatacattcagagccccctgggtgggcctggggcagcccaaatcctacagatgagggaattggggaagtgtgccacaggtctaatccctgtgcccttgctttgcatggccaggttccaaggggcggaatgtattaatcatattcctcttacaaaaatatatctctttacacgcaccttctccatggtctctttgctacttgggaatgagcatttacctgcactccaaggcttcagagggactgcctagggaggctactccaatagaatagcaaagaggctatgacctatggctttttcatctacataatgatggatggtgcaggtttggactgggtgggaagctactggtatccagggttgggg

SEQ ID NO: 209369 - DNA, 633 bp, Homo Sapiens
ttttttttttttttttttttttttttaatcacaggggaagttctttaaagtattcctttgcccaggctcactcctgacccagaggtgaggcacagatactttttccctcactgttctctaggtgattctaacccacaaccaaggttcaataccactgccctacaggaaaagaaaaacaaagacctatccccagggggttcccctttgagccccttgaatgccaaagccccaatatccctgtgaacagctggaggccacagcccagctgagctgtgacagacactgctctttgcctgccagcatccgttcttctcatctgcctcactaacaagaatctggattttgtccagggacagcagtgcgcccaacgctttccagattaccacccacctagtggtcacgtgacctgcctctggccaataggctgcaagcggaggtcgaccacaattgctgagttttgctttcccgatgcaggtgcgttgcttgtccctgcctggactgaggctggaggtgaaggactatcacagtatcctgggatcctgagctgccttcagaataacacagcagaaaaaaacaaggagcctgggctccccaaagccacaatggccctagacttccaggggttcctgctac

SEQ ID NO: 209370 - DNA, 478 bp, Homo Sapiens; identical to SEQ ID NO: 49000

SEQ ID NO: 209371 - DNA, 409 bp, Homo Sapiens; identical to SEQ ID NO: 40531

SEQ ID NO: 209372 - DNA, 513 bp, Homo Sapiens
gcgagttgagattgcgccactgcactcaaggctgggcaaccgagcaagactccgtctcaaaaaaaaaaaaaaagcaaagaaggattggttcccattttacaaatgagaaaactgtggtacagagagggtaagaaactttcccaacgtccctaagtagtctgacgccagagcctaaacccttaactccacctgctgctctctttctgaaaatcagcattttaaatgctgcttactggcaactttgcatgtacctgtttgtgtccctttagctgttgttggcaggtttctcagtttcctgcttgtattccttaggctgtgtcttctgggtacatttttttgaataagttttcttttggataaaaaaagaagatacatgacattaacagaaacttttaaaaatattgtgattatttttatgtatatgctgcatatgttatagatttatatcttctaacagttatatagtaaaaacaacagcgtgtctgattataggaaatgaaatctaaatattct

SEQ ID NO: 209373 - DNA, 530 bp, Homo Sapiens; identical to SEQ ID NO: 45617

SEQ ID NO: 209374 - DNA, 468 bp, Homo Sapiens
tcattcgtttttatttctccataccagggttcagcaaagttctttctataaagggttagttagtaaatattttaggttttgcagaccattaggtctctgtcatggctactcagcactaccacggtagtgtgaaagcatcaatagataatatgtaaataaatgagtataattgtgttccagtaaaactatttacaaatacttaccatgggctggatttggcctgtggcatagtttgctcagtctgctctatagtattctgttacatgcatgtaccataacttagccattttattgtcagcattcaaattttttccagtaagagtatgtgcatagaaaaaaattgtgtatttcactttaaatatactataaaatttatgcataacataaattcgacgatagttttcttatacatcatcaaacattaggtctgacaggtcaagaaaaggctttataagtagcaaggaactt

SEQ ID NO: 209375 - DNA, 1000 bp, Homo Sapiens
tttgttgtccaggctgaagtgcagtggtgcaatcatagctcactgagattgccaggttcgacaaagaggaatttataggatggggatatagggtagacttgactctgctttatccgggaaagcttttaaaactctgagccagttaactttgagtaagcataaaacatactgtattggtgtttgtatttttcatgccacaatattaaaatggaattttaaatgtagattattataatctataaaagataagtatgcatgtattaggatactggaaaatatgcaaatcatagtaaaaaaaaagggactgctctagtttttcagttataactgaatttgccatgtgggtataggcatagtgtaaattacattaatgtagtaaaacatcaattgtggttcggtttgtctttcatttatgtgtagtatagaaatcacctttctaatatgtgttgccaaactatttgccaccatctatttggcgaaatattcattgtcattgtgattttccccaagtataagttcttaagtactttattgattcagaagtaaatgctgtcctgttctccatcaacatgtcccttggtaccgattttggaattacctctcgtttcttttctgagatggggcctcacatcctgcccccaaagcccggaaaaccaaagggcccgcgcttatccgcgtccttatccccctttggccttccccggcttccgaacaactccctcatcgcctcccgcctcccacaatatccgttgggtttatctcagtgttggtccgtactctcagcaatctcattttattacgtccaacccactccctcgtctccgccctcaccgctattaccctctcccaatcttcctcggccttcccactcccctaactatcatgaggactttgcgctccttccctgcctctcgccatacactctgcccctccccctccccccctcaccaacgctgatcttttgaagtggccccaccctcctttcctcttcctctccggc

SEQ ID NO: 209376 - DNA, 1000 bp, Homo Sapiens
  misc_feature (781)..(781): n is a, c, g, or t
  misc_feature (800)..(800): n is a, c, g, or t
  misc_feature (952)..(952): n is a, c, g, or t
aatttttacagtttttttctgactttattgtgaaagtttgtttcaagcatttcttgatatcatgttatgtactatttttatgatttagtcaacatgcatacaaagaaatgttttttatgaagtgctcacttccattttactttgcattgaaatcaaattgggctgaacacttcaatggaatacattttgtggacaatgtcactttagaatctttcatctcagtgaaggattacacattctcaatacttccataattgcaggttgtgttcatttttttatatagtttttgtaatccaaagaatattttgctagatttgcacagatctccaattgaatttgcaatgaagaaataactcaaaaggaatatgaatagcatttaaataagtatacagctgtaagtaaccctgtcaccatggatgatccttttctctaggaatgtatttggattagagatgacaactacattttcgcatttttatgttgaagtcttttttaaaaaggctgtttacttttcagtagttaagaatacttgtttttctttttctttttttttttttttttaccttttattttttcgttaagcctctattgtttgtagaacactcttagaaacttggaaataaaatgtctttcccaactagtggagtcctttttcatttggagcacattgccttaaaagaagtcttaatttaaacggtccttccttattctaaagtaatcactgttttataccatctatgcagctaaaagaaggaacatgcttctgttcttttcctcaagnaatggttattgtttctagncatcattcattcattgattcattcaataattcatcaaaatccttattttataaaacctggtccacttactgggagattcagaatgaatcctactacctttttctgacatctttttgaaaaatcaagccctgtaacaaagtatccaaccttgntggcctataaaccacctatttactattttgccctcctagaaaatgcaa

SEQ ID NO: 209377 - DNA, 1000 bp, Homo Sapiens
ggaagaaaccccaggaggaagaaacctcagacagatcgccggggaggcagcgcgggatcccagcctcaggcgtgcgcggacggtgtgcggctacccaaggtgcgaaaaagaaaaaaggccaaagggaagaaggtggtgctaacccttgcggtcttgaaaaagcaggagaccatgaaagtggtgaatcttccatttgagaaatttggcactggacaggacattttggcattggacagaacatccagcccaaaagggacctcacttgctttgtcaaatggccccattatactaggttgcagcagcagagagccatcctctataagcagctagaagtgccttctgtgattagtcagttcaccagggccttggaccaccaaacagctgctcaatggggtaagctggctggcaagtacagaccagagacaaagcaagagaagcagcagagactgttggcctgggctgagaaaaaagcaaaggagacatccccactaagagatcacctgtccttttaatgggggttaacgctgtcaccaccttagtggagaaaaagaaggatcagctggtgatgactgcacaggacagagatcccatttgaggttggttgtcttcctgcctgccctgtgttggtaaactggggggttccttactgccatatcctaatggaaggccaacgtttggagaccttctaggatttataaaaacaaatcaagccgagcaacgccttctttaaaataatttctttttaaaaccttcctaaattattaaggcgctttttttttaggcccctgagggcgacttcaaaggggtcttgtcggggataggtaaattctcgggaacccctatattggcctggccctaccgcgacttgggcggggcccacccccccaatggtagagtggaggcgccggatactacgtcttccttagcggagacagcgcctctcaccgcggttccatacgcgcgcagcacctcctgacgccagcttgggcgggtccctttc

SEQ ID NO: 209378 - DNA, 1000 bp, Homo Sapiens
  misc_feature (499)..(502): n is a, c, g, or t
  misc_feature (508)..(508): n is a, c, g, or t
  misc_feature (513)..(513): n is a, c, g, or t
  misc_feature (542)..(542): n is a, c, g, or t
  misc_feature (818)..(818): n is a, c, g, or t
gtttttatgtgaaatctctaattttaaaataataactcattaaaaatattgtaatgtccaaaagtatctttccatttaacttctaaaaatctcttaaatgttttttttaaataattgtaaagtgagtttttgttaagcttataggaatgggccagttaactaaggtagacagatgtaggaaattaaatatttgatttacttagggatctatatgacatcagttatcaaagaatacattttaacccaaaagtataccatgctcattgtatctttgatcgttcttcaagtatttctcaatcttttaatctatcaggaacattactatcaagagcagattgttgtaacataatactcaggatacatgaaatgtatgtgagagataaatagataatagaaagtttattgttataaaaatgacctacaacttatataaaaaaattctgaaaatgttgactttttttggactgaagactgcaaaataaatggcttctcaaagtannnncacaanaaacncaaacccaacacaaaagacacacaccaancccccccccacttctccaaaatccccctcatggacttcttattaccccgtctgggtcctttttgggcctcacgaggccccactctaatacgcttcttctctgcctttcgccctcttttttacatcttactatccttcattctaccctttataacccaccacacctccggcctttttttatcctttccccatacctgtcgacatttctgtacccacccatccccgcgcgacacttaccattccttctgcggtctttttccgcaccacaaccacaccntccatcccggacgctatatatttttcgcccaccgccgaacaatcatattgttttctcacccctttctttctctgccacacacagattactccccacctccatacctcattgcgcaaccctcgcgctctccttcttttcttcccgtccgaacgccaacttctcttcccttcatcctcggcctc

SEQ ID NO: 209379 - DNA, 1000 bp, Homo Sapiens
gagaacagggagacagtgtgtgggggtgggacctcatctgtgtgcctggtatcctgagttttacatgtagatgcattcgcctatttgattcagaaaaataaactttcccaaaatgtgtctgaaccacaagagcatacagtggaagtgctacctctaatctaaccagagcaccttcatggtggaagacacccaccaggtcatacaatgtgaacttttgtatctctgcagtggtttcaaggacaaatagtgtccaatgtattgggccatttttcctgctgtttttatactcaacttctcaaaatgaaaaaagcttttatttttcctttgacttatttgtgttgttcttattttttaaatttttattttttgataatagtctgtaagttagcctttttgggttttttttttttttttttggcttttttttttgtttgtttttttttcttttgacattgcaaccgaaggtcataaggccgctaactccgctgggacagaggcttgagagaactaacggctcggtgccttctccctggtctcagaccatcgtctctgcactgcgaaggcatttggtagcctcaccactgagatactaactagacctagactaggagctttatcaggttctaggagggcccttaggaagactctcaaaggcaaatccctgatcccccgccccaccccttagccctggccttctttccagagcaaaattccttgggggaattttcccaccccacatggaaatccgcgcccacccggaataccctttggtttcccccctcccaattggtagggggccggggcattggacccccccacttgaggttttattataacccggcccgggttccaaatctacctccgccgtcggtatcccgccctttcgacgttgtccccttctgttaccttccggtaccggaccccgcctcctttcttttttcgccggttctctttctttccccgccccctcttttcgttgttcctagtccgcgcggcaccc

SEQ ID NO: 209380 - DNA, 1000 bp, Homo Sapiens
  misc_feature (380)..(380): n is a, c, g, or t
  misc_feature (384)..(387): n is a, c, g, or t
  misc_feature (389)..(389): n is a, c, g, or t
  misc_feature (391)..(391): n is a, c, g, or t
  misc_feature (394)..(394): n is a, c, g, or t
  misc_feature (463)..(463): n is a, c, g, or t
  misc_feature (467)..(467): n is a, c, g, or t
  misc_feature (475)..(481): n is a, c, g, or t
  misc_feature (486)..(487): n is a, c, g, or t
  misc_feature (499)..(499): n is a, c, g, or t
ggtctgaaggcctccatttgtaccgaaacaccccgctcacgctgacagcctcctaggctccctgaggtacctttccacccagaccctccttccccaccccataagccctgagactcccgcctttgacctgacgatcttcccccttcccgccttcaggttcctcctaggcgctcagaggccgctctggggggttgcctcgagtccccccacccctccccacccaccaccgctcccgcggcaagccagcccgtgcaacggaagccaggccaactgccccgcgtcttcagctgtttcgcatccaccgccaccccactgagagctgctcctttgggggaatgtttggcaacctttgtgttacagattaaaaattcagcaattcngtannnnananaanaaaaaaaaaaaaaaaaaaaaaaaaaaaaaaaaaaaaaaaaaaaaaaaaaaaaaaaaaaaaaaaaaaaanaaanaaaaaaannnnnnnaaaannaaaaaaaaaaanggggggggccccccttaaaaacctcccccaggggggccccaaatttatcgggtcacccctttttttttggaaaaagggggccccataaaggggggggtttttaaaaaagaggccggggccccggttttttacaccccggggggtggggaaaaaacgccccccttggggaattttttgggaaggaacacctcttccttggggggggggcaaatttttggggcacacacccccccccaaaaatttttaggcccccggggggaaaaaaaaaaattttttaggggggaatagggggtaaaacaaacaccccaaatttcctcggcgcttaaaaaaatattttcttttctcggggtaatttttttgaaaaaatattaaccccggggggccgggggtccctaaaggtggggggggttttttaaaaaacaagcgccccgggggttttttttgggggcccttagaatccccaaaaggggggtttatggtttttattacgcctaccccccc

SEQ ID NO: 209381 - DNA, 1000 bp, Homo Sapiens
agcagcagccactcgcgcgcggagccggagcgcagcgcagcgcagccgcgggcgctctccgggccgctcgcgcgagtgccgcgctcttgccctagcggcgtcccccggcctctcgccggcgccaccgccgcagcagcccgcgggccgtccccggccggccgcccccggccccagcgccgctgaccctgtccgccgcgggcggggacgcgggcggaggaggcgccgcggcggagcccccggacgcgaccatgtcggaggtgctgccctacggcgacgagaagctgagcccctacggcgacggcggcgacctgggccaaaatctctcctgccgacttaccgagcccaaaacttccttcggcgccgggtgacaaacagtgtaccccttcttaaaatatcccttcaaggggaccctcccttccccccataccatgcgttttttgctccctacacgcaccccctaccgcgaatccgtaaaaatcggtctcccgcaagctggcgccccttcctcccccgttctttcgcaatccccccccctacacccatccatccttaaattaccgccctcaataatcccctaccccccgcctcgtgccgccaaaccgttccccgcgtatttcccgtttcctacgcgccgcttgactcctttgagtcgccacatctgctactttcacctcgccctaccctgatactcccgcttacgtgtgttctttccgcgcccagcccgcccttattcggccgcccactcctttttcccgtcgcttcactccgaaccgctaccgctatcccccaccctttcttagttctctgcctccccgaatcccctcctctccgcccgctattacccccctatattacgcccgcctccttctttcttccctgctagcgccgcgttctcttgcaacgctgcctactatgttaccctggaataatacttccaagcacgacaagacgctacattctcaatccacgttgtcccccgccctcactctttattcccgtc

SEQ ID NO: 209382 - DNA, 1000 bp, Homo Sapiens
  misc_feature (506)..(585): n is a, c, g, or t
taatctaggtactgaagaatgcaatttaaaaaaatttagcagtgtctggaatttttaaatcataccaagttagaattcgcaatagtctcgccctggctatgctggcgatttttcactcatgtagaagttggggtacgtcggctacagataattgttggtgtcgcaaataccggtttaaccatggctgtttcttcttaatccgaggaaacttcggataggcgcaagaggcacgggtttagtgctgacaaatataatggtaggatctcaccattcgaccctgtttgcaatttctttctgtttgtaggatgctttgtatgttttgtataatcaaaaaaaaaatttttttttggtgtatcttgttctggcagcgaggttatcagtgtattttgttttaatttctatttgcttttaaatttttaattattttttaatttaaatgttacggtatttttttcttacccactgtcttccccggtagaataaatgtggcgtatttcttctactgnnnnnnnnnnnnnnnnnnnnnnnnnnnnnnnnnnnnnnnnnnnnnnnnnnnnnnnnnnnnnnnnnnnnnnnnnnnnnnnnggggggggcccctttaaaagaaaccccccggggggccccagttttaacgcgaaccccgtttttttttgaaaaaagggggcccctctaaggggggggctatttaaaaatctagggccctggcccccttttttaaaaaaccccgggggtgggaaaaacggctaacctggggacacctttgggaaaagaccctactcttttggggggggggccacaaattggggacaaccttccccctcacaaatatttaaagccttccagggggaaaaataaaaaattttctaagggggtaaaaagggggtaaaacacaagccgcataaatgttttcccgcgttttgaaaagagtcttcttttcgggggggatagtttttttgcagaagatactttacaccccccgccgccccaagtgggttctagt

SEQ ID NO: 209383 - DNA, 988 bp, Homo Sapiens
caggaagtctgctatttattagcactctttggtggtagatttcactttgtggctttggggtaagggctttttcactcacaaaggaagagaaagcacctttgaagagacttcatctaatgaacaaaaaattttgtttcataatctttctaaaatgtgctcagtaggagtgtgtttatggtactcttttatggtttgtataactttcttttttaaattatacatatactatttcctttttatttttttaaaatttttttgctttttgtctttacaaaataatctcaacataacagtgaagtcaaaggctttccttttcttactctgtatgtatattttccagttggttatttgaggctttgaggtatttataaacacaaaaggctgtatttctgctcccctacctcttcctatgtctgtaatgaagttttgaaatgagtcatgatttttaagtttcttttgcttggtatttattgcctaattaaaagtgtatgagttagaacaggcttttttaaattatggagtaaaagaatcttagcatttttgtccctcctaaatctggtttctgaatgagatttatcaccatgacctgctgttggtgcaccataacgaaaaaaaacacctttttggtaaacaccattttaaaatttcatttaaaacttggaatgggaatttatttaattcataacatttcccccaaaaggttatatccccttatttagaaggaatgttaagggggggaaaaaaaaagcttttttccccaacctgtggggggttcttttaagggggaattgataccccttatttccccaaaaattccggggcaacccacttcacccgggtatttgccgtggaaggggacaaaaattggcgcccaggggaaaaaaaatttttgggtttgcccccttgggcccccccaaaaggggcgctactggggaaatatattttacccccttttttcaacaggggggccccaaggggttctttgtaa

SEQ ID NO: 209384 - DNA, 1000 bp, Homo Sapiens
  misc_feature (730)..(730): n is a, c, g, or t
cactatcctgtggtgtgttgccccacttcgggtcctcagatgtgtagcaagcggccagcccgagggagagccacacttgggagccagcgaaaacgccggaagtcagtgacaccagatcccaaggagaagcagacatgtggtgaggaagttcaagggttccagagatggagcagacttgaaggagaatataaagaactgctgggacactgggcagtttatgctattcaacatcagactgcgggttcgggctgaatactgccagcatgagactgctctgcagggcaatgtcttctctaacaagcaggacccacttgagcgccagtttgagcgctttaaccaggccaacaccatcctcaagtcccgggacctgggctccatcatctgtgacatcaagttctctgagctcacctacctcgatgcattctggcgtgactacatcaatggctctttattagaggcacttaaaggtgtcttcatcacagactccctcaagcaagctgtgggccatgaagccatcaagctgctggtaaatgtagacgaggaggactatgagctgggccgacagaaactcctgaggaacttgatgctgcaagcattgccctgacctattccctcttctcactttggggactgttcccatcacccacctctggagcttacactgttctggggtttgttctctacccttccaaccaatcacacccctgcctttttttttttttttttttanagaaaaagacaaaagaaagtggaagtggtattccccacccctccctgcacccatgtgcctggggcttcccctttatttccctttccatttacccccgtatgtgtctctacagctaccttaccactgagccgtaagacaaatggtatagggaagaaagcaagtctacagcacatagtcttttgtttaaggggaattgatgttgaaacccctttttttttgggatggcactaaaggaagttaatccaaatactttctgggctttttatggaa

SEQ ID NO: 209385 - DNA, 1000 bp, Homo Sapiens
tcacttaccacattatttgaaaatcaatcctttatttaattttatttccaacctgtcagagaatgttcttaggcatcaaaatccaaggtagctgtaagaaaaatactggagctaacaatgaagaacagaagtaatctgattagtcaaattattaagtgccatggattactttatgcagcagtcaggtacatagttaggtgaacccaaaagaaaaactcttgaaaacaagagatttcttccatgcacatttacaatattgaggtataattaacatgataaagtgtttccttctaacgagttgtagaaatctgagtaaccacccaaaaaagcaatagaatgtttgtgtcaccccaaaacactcccttctgcccctcttcagacagtccttcagctatttcatggctctcaccctagtttttttttttttgcacttttttttttccgggggtataggggaggtgtggggcgacagggtctgtcttgttctgtctcccaggctgaagtgcagtgcagtggtatgatcatggctcactgcagccttggtttcctgggcataagtggtcttcccacttcagcctcctgagtagctgagactatagactagcataaccacactggctaattttttgtggagatgaagtctcactatgttgcccaggctggtctcgaactccggggctcaaacaatcctcccgcctcagccctccaaaatgctggggattatagtcctgagggcacctaatcctggccctttttgcaagactttaatctgaaatctaaattttttaaaatttaagaccttacaaagggatatacctaatccaacaaattgccatattaataaatgggggcttttaaagtttttttttttttttttggaaaaaacggggctccccttttggtcattccacacactgtgaagaggacaatggggggcaaaaaaacaggggcccccaactctcctcgggggggttcccgggggagataatcctcccccccc

SEQ ID NO: 209386 - DNA, 1000 bp, Homo Sapiens
  misc_feature (797)..(797): n is a, c, g, or t
ggaagatgaaaacctgccccattatgatgagaaaacctggtttgttgaggatatcaatcgagtacaagcagaggacttgctttatgggaaacctgatggtgcattcttaattcgtgagagtagcaagaaaggatgctatgcttgctctgtggtggccgatggggaagtgaagcactgtgtgatctacagcactgctcggggctatggctttgcagagccctacaacctgtacagctctctgaaggagctagtgctccattaccagcagacatccttggttcagcacaacgactccctcaacgtcaggcttgcctaccctgttcatgcacagatgccctcgctttgcagataaagaggaagtgggaagagaggtggttctctggcatttttttctacagtttttattagactacgatgagggcattctttctacatagactgcttgttttgcacaagaagtgattttgtgaatgtgaagtggagaggccgagcagcagccggccgggatgggggcattagaggcctgaggttctctaggactcagccatgccgctgcactgacatactaagctggaagcagatgttttttttgaaagtctgtttcattggggtttttgttttgtttagccagacaccctcaacagaatattaggcttgatggttatagcggggtggggttgtatttggaagcctctgaagagaccatgtcttttttaaatctaactcttgagagtgcagcaggggcatgggctctgctgggagttgtgttttgctttggcagtctctcttcccccacngagaaggctggtttagttttgtgatagaatgggatttgatgaaaaggacacaaagggaaatggggagccttggggattcttttaattatctaagccagatgataaaaaaaactttcactgaaaggacttttgtttcttacaacataatttagggctccagaattttcccagccccctcccttcttaaaaaagatttatggttc

SEQ ID NO: 209387 - DNA, 1000 bp, Homo Sapiens
  misc_feature (393)..(393): n is a, c, g, or t
  misc_feature (416)..(416): n is a, c, g, or t
taagacaagactacaaacacaacacatagaaaattaataaaatagaactttgttttcttctgaggctcctcttcttacttctaggtagtatgtgctccttccagtggctttggggagggggtgggagagacgacaggtctgggatcagggagtcttcaaggcccccgctgaggggacagcgaatctaccattgaaccgtgcacgggggacatggacaaaatgagacgcgacagggacaagagcattttgctctgcttccaggaaacatcaagtgagtccgctcctcagttctcaccaggaagcctgatcaggctgaggcgagttcctcgggaaggaagggcgcgcgggatgctgggtgggctcgagtagtgaggcctcagagcacccgccggnagctgtgcgggcgggggcgtccnggagagcgctgggcctcgcctgtctgcgccggagagcccggctcctggctccccctcccgagagcctggcctcccgggtctctctgacgccccacgggtcccccaaggaccttttcgctcgcagcctggctctcttttccggagcttgcatccggcctggatttccctgcacctccgtcgcgaactgtgctgaatagaagcccgaaacgaaagggccccccccttctaacacttcaggggcgaccggggactgggaaaacatacccttagggttggcctgcacattgtttagtaccgggggttttgccgcggcgtctatgaactagtccggccgccccggagccgggcaacggtaatgaaaggggcataccttccctcccccaaggctttctgaggggcaagagcaaacccggggtttatgggcgccggccactttattgagctcccccataggggccctctggcggagggcccccccatgcccgggaggacacaaacgtactctcgggcccccggggaacccctccagaagatagcggggagaacatgggtcatagaaaacagcctgtccactactattattt

SEQ ID NO: 209388 - DNA, 960 bp, Homo Sapiens; identical to SEQ ID NO: 48102

SEQ ID NO: 209389 - DNA, 1000 bp, Homo Sapiens
atgatccacctgctgcacgatcctatgagggcttcctgtggcacacagccctctgggtgcttgggaactagcttcaggcacagcctgattctggtgatccagtgatctatggaagtcgtgtcttactccaggtgaagggggaaaaaaaaagcctatactttggcaggttatgaactttgaatgtgatgaaatgacacgtttggctgcatttggatggtgtcttagaaccctcattgctcagacctgaaggctacttctaggagcatgaagtttgagttttgtgtttttccaaaggatacttccttggccctttttctttattgactagaccaccagaggaggatgtgtgggattgtaggcaaacccacctgtggcatcactgaaaataaatttgatcatacctaagaggttaggaaatggtgccattcccaccttagagtgctacataggtgctttgggcgtatgtaacattagtgtccttccttgaagccacaagctagttttcttagttttaaaatcctgttgtatgaatggcatttgtatattaaaacacttttttaaaggacagttgaaaagggcaagaggaaaccagggcagttctagaggagtgctggtgactggaatagcagttttaaggtgggcgttcaccctagtcaaccacgaacccgcgtgtggttccccctggccctgggcctcccccgccatgaacatcctttcacccttggcaaccttgggggcttaaaaattaacccaaaggggccagcttaagcaccttggggacccccaaaaaccccttggcctttaaagacaccctttcccagggggagccccacctttttttattttcccccttttttccttttttttcccccccttccccccaaaattgggggttttttttttcccccaattttttttggaaaacccttttaaaaagagggtgttttcccccgggacaaaattagcgtttgggggggggggaattttttccccccccccc

SEQ ID NO: 209390 - DNA, 1000 bp, Homo Sapiens
tcctgaaggagaagagaaagctgtttatccgttccatgggtgaagctcctcaggcagtgcaggacaacccagctatgcccacatcctcaggctcagaagggaatgtcaagctttgctccctagaagaagctcaaaggatatggaaacaaaagtcggcagagatttatccaataatggacaagtcaagccgcacacgtcttgctctcattatctgcaatgaagaatttgacagtattcctagaagaactggagctgaggttgacatcacaggcatgacaatgctgctacaaaatctggggtacagcgtagatgtgaaaaaaaatctcactgcttcggacatgactacagagctggaggcatttgcacaccgcccagagcacaagacctctgacagcacgttcctggtgttcatgtctcatggtattcgggaaggcatttgtgggaagaaacactctgagcaagtcccagatatactacaactcaatgcaatctttaacatgttgaataccaagaactgcccaagtttgaaggacaaaccgaaggtgatcatcatccaggcctgccgtggtgacagccctggtgtggtgtggtttaaagattcagtaggagtttctggaaacctatctttaccaactacagaagagtttgaggatgatgctattaagaaagcccacatagagaaggattttatcgctttctgctcttccacaccagataatgtttcttggagacatcccacaatggggctctgtttttattggaagactcattgaacatatgccaagaatattgcctggttcctgtgatgtgggaggaaattttcccgcaaggtttcgatttttcattttgaaccacccagatgggtaaaagccgcagaatgccccacccacgtgaaaagaatggactttttgaacaaaaatggttttctttaccctccttcccccagggaacatttaaaaattaaggggaaaacttgttaatggaaatgggcctggggggg

SEQ ID NO: 209391 - DNA, 1000 bp, Homo Sapiens
  misc_feature (839)..(839): n is a, c, g, or t
  misc_feature (854)..(854): n is a, c, g, or t
ccggtttgggagcgagcctgaggtcaaccaatcaatggctcagacagataagccaacatgcatcccgccggagctgccgaaaatgctgaaggagtttgccaaagccgccattcgggcgcagccgcaggacctcatccagtggggggccgattattttgaggccctgtcccgtggagagacgcctccggtgagagagcggtctgagcgagtcgctttgtgtaactgggcagagctaacacctgagctgttaaagatcctgcattctcaggttgctggcagactgatcatccgtgcagaggagctggcccagatgtggaaagtggtgaatctcccaacagatctgtttaatagtgtgatgaatgtgggtcgcttcacggaggagatcgagtggctgaagtttttagcccttgcttgcagcgctctgggagttactattaccaaaactctcaagatagtgtgtgaggtcttatcatgtgaccacaatggtgggttgccccgaatcccattcagcaccttccagtttctctacacgtatattgccgaagtggatggggagatctgtgcatcacatgtcagcaggatgctaaactacattgaacaggaagtaattggtcctgatggtttaatcacggtgaaatgactttacccaaaaccccaggggttttggctggagtaacagcacaattttgggcaatttttaaaggaagataccgaaggtgattgtaccttcagaaatggataaaccattataccaccctaaaaatcatttttcctgtaacactgggtacaccctaataaacaaaacatgtggagattccgaagacaaacacaaaataacnaccaccccgcgcgtntgggggcgggcccccctttaaaaaaattcccttccaagggggcccccaggtttaaccggtaacccaagcttttttttggtaaaaaaagggggctcccccataaaagtagaccctgcgttatttaaacccttgtggcccctcggggc

SEQ ID NO: 209392 - DNA, 1000 bp, Homo Sapiens
  misc_feature (741)..(742): n is a, c, g, or t
  misc_feature (745)..(745): n is a, c, g, or t
  misc_feature (747)..(748): n is a, c, g, or t
  misc_feature (750)..(764): n is a, c, g, or t
  misc_feature (767)..(767): n is a, c, g, or t
  misc_feature (769)..(769): n is a, c, g, or t
  misc_feature (774)..(775): n is a, c, g, or t
  misc_feature (786)..(786): n is a, c, g, or t
  misc_feature (797)..(797): n is a, c, g, or t
  misc_feature (808)..(809): n is a, c, g, or t
  misc_feature (812)..(813): n is a, c, g, or t
  misc_feature (817)..(820): n is a, c, g, or t
aagctgaattagggcttccattttccccactttgtgatcggaagtcaaccatggtggcccagtcacaaataggtttcatcgatttcatagtagagccaacattttctcttctgacagactcaacagagaaaattgttattcctcttatagaggaagcctcaaaagccgaaacttcttcctatgtggcaagcagctcaaccaccattgtggggttacacattgctgatgcactaagacgatcaaatacaaaaggctccatgagtgatgggtcctattccccagactactcccttgcagcagtggacctgaagagtttcaagaacaacctggtggacatcattcagcagaacaaagagaggtggaaagagttagctgcacaagaagcaagaaccagttcacagaagtgtgagtttattcatcagtaaacacctttaagtaaaacctcgtgcatggtggcagctctaatttgaccaaaagacttggagattttgattatgcttgctggaaatctaccctgtcctgtgtgagacaggaaatctatttttgcagattgctcaataagcatcatgagccacataaataacagctgtaaactccttaattcaccgggctcaactgctaccgaacagattcatctagtggctacatcagcaccttgtgcttttcgatatctgtttcaatggcattttgtggcatttgtctttaccgagtgcccataaaattttctttgagcagctaagnnaangnngnnnnnnnnnnnnnnnggngnggggnnggggaaggggnggccggaaganaggagaagagnnagnnaccnnnnggggggccccgcctttaaagaatcccctgggggggcgccacagtttaccggcacccactctttttttgtggaaagaggggcgccccattaggggggggcttaataatagacgtagagcccctgggcccccctttttttaaacacccccggggggggggaaaaaaatgtgtctctcttggg

SEQ ID NO: 209393 - DNA, 1000 bp, Homo Sapiens
ctaggaaagcttctttatatcttgcattaaatgggtagggaaaaaatatgactctcacccatgtcatgtactggaccatctttctctactttttaaagaaaaactaatacaactagaaaaacatcacaacaagccaaataaaaatggagaaaaggagtcattgtccttatacctaatggaacagtttccagaactactttaactatggaagcatttttgaaaataaagtattaataaaatagaaaaaaattattaaatatattgtatccttaatgtatagcaggaaaatagtttcacaaattaattgctattagaaattaccaaatttttattaagtactttaatatgcaatacaaattgaataatagtacaactataagttgatataaagtaagtgcttactggtaatcattaaataactaataacatgacttgttggttaatgttaaacctacagtaagaaatgttatacagatcagataggcattagaacatcaggtgataccttttctgatttctggcattcatggcacaccatttcttaaaagcagattgttgtataataacatatacatgtattagggtttttttcatatatattttttattttagaagaaactagcataattcaggggtttatgtgtttatttgtatattaattcatgaaacatgagagtttcatgaactgcagatgtgaaacgctgctatagaatgaatccccttcactttactttgttataatgtagtaagattttgttttctttttgactcagaaaatttccatgtctatagaagtaatctaatatgttcctactgccctagagaagaatacttaggtgattatatccttaaatagaggtataaaggcctttgctttacttccccatgggggccaacagcaagctgccaaatgtaacggttattaaagggaaagatgacttaaggctggggctaagtgaacaaaggtaaaatggttttggtaaataagggaacttcaccc

SEQ ID NO: 209394 - DNA, 1000 bp, Homo Sapiens
tgaaccggcacaactttccttgcagtgtccatcagtacgaatcctcggggacagtgaacaatgatgattcagatcttttggattcccaagtccagtatagtgctgagcctcagctgtatggtaatgccaccagtgaccatcccaacaatcaagatcaaagtagcagtcttcctgaagaatgtgtaccttcagatgaaagtactcctccgagtattaaaaaaatcatacatgtgctggagaaggtccagtatcttgaacaagaagtagaagaatttgtaggaaaaaagacagacaaagcatactggcttctggaagaaatgctaaccaaggaacttttggaactggattcagttgaaactgggggccaggactctgtacggcaggccagaaaagaggctgtttgtaagattcaggccatactggaaaaattagaaaaaaaaggattatgaaaggatttagaacaaagtggaagcctgttactaacttgaccaaagaacacttgatttggttaattaccctctttttgaaatgcctgttgatgacaagaagcaatacattccagctttcctttgattttatacttgaaaaactggcaaaggaatggaagaatattttagtcatgagttgttttcagttttcagacgaatgaatgtaataggaaactatggagttaccaatattgccaagtagactccctcccttaaaaatttatggatatctacaagctgcttcttaccagcaggagggaaacacacttcacaccacagggcttatcagaaacctacccagatgaaactggatataatctggagacaaacagggagggttttttttaaacatctggatatccttgtcacatttttgtacattgggactgctttcaacctatacctcatggggtaattatagctttaaactttagccttccttggaactccggggtttgggtttggtaatttggcggtttacaaataatagatttattccccacttcctgggg

SEQ ID NO: 209395 - DNA, 641 bp, Homo Sapiens; identical to SEQ ID NO: 41791

SEQ ID NO: 209396 - DNA, 986 bp, Homo Sapiens
  misc_feature (874)..(874): n is a, c, g, or t
  misc_feature (951)..(951): n is a, c, g, or t
gtaaggaagaatccagtgaaaagttcaggcaggtggaaaagagtactgagcccaagagtcagagaaataaaaaacctattggtcaagttaagcctgatctaacttcacaaatacagacatcttgtgaaaattcagagggtcctagaaaagatgtcttaactccttcagaggcatatgaagaacttctgaaccaaagacgactagaggaggacagataccgacaactagatgatgaaatcgaattaaggaatagaagaattattaaaaaagcaaatgaagaagtgggcatttccaacctaaaacatcaaaggtttgcaagcaaggctggcattccagatagaagatttcacagatttaatgaggatcgtgtttttgatagacggtatcatagaccagaccaagatcctgaagtaagtgaagaaatggatgagaggtttagatatgaaagtgattttgatagaagactttcgagagtgtatacaaatgacaggatgcacaggaacaaacgagggaatatgcctcctatggaacatgatggggatgttatagaacagtcaaacataagaatttcatctgctgaaaataaaagtgctccagacaatgaaacatccaaatctgctaatcaagatacctgtagtccttttgcagggatgctctttggaggtgaagatcgagaacttattcagagaaggaaagagaaatacagactagaactgttggaacaaatggctgagcaacagaggaacaagagacgagaaaaagatttagaactcagggttgcagcgtctggagcacaagaccctgagaaatcgcctgatagaactaagcagtttagtgtggcaccaagacactttgaagagatgataccacctgnaagaaccagaataagctttcagaacacctctcccctcctttatctggccccatctgtccccacccatcccatcaggntcaatcctggtcccttctcaaaatggaaggatttg

SEQ ID NO: 209397 - DNA, 1000 bp, Homo Sapiens
  misc_feature (609)..(609): n is a, c, g, or t
  misc_feature (897)..(897): n is a, c, g, or t
  misc_feature (908)..(908): n is a, c, g, or t
  misc_feature (935)..(935): n is a, c, g, or t
agagttaaaaactgtgatgtctgccccccctccacctccaccaccaccagtcattcctccaacagaaaacgaacatgatgaacacgatgagaataatgctgaagctagtgctgaattatcaaatgaaggggtaatgaaccatagaagcgaggaagaacgtgtaaccgaaacacagaaaaatgagcgtgttaagaagcaacttcaggcattaagttcagaattagcccaagccagagatgaaaccaagaaaacacaaaatgatgttcttcatgctgagaatgttaaagcaggccgtgataagtacaagactctgcgacagattcgacaaggcaatacaaagcagcgtatcgatgagtttgaagcaatgtgagagctgctattttgcatatatgttcttcataagctgaaccaccaacagagaaaagcaggcctttgcagatatgatgcaatgcatcccaccttgccaaagcacttacaccagtttgactgtgctagctaaaagacaaatttaaggggagctcttcaacattaaggcagcatgatatcatgcttggcctttcttttttcttttgccccacccaatggagaatggcgctccattgcctcttntcacattttttttctttttcttttttttttctgccgcagattaaccctacttatcccccctgacaaatgcccatgcgaggacaccacacctgcgcaccttctaccagataatgccgcaaccttctaaggcccctcccctggccctttcactatttacccctatttcccaatcatctcctcgatccaattttaagcaaaagaagacttcatcttatctgccctgccccctaccccctacattccgcgcggcgtaccggatccggccaccgcctcacaatggatgggaanccacccccggnggcacgggacctctgaattcttatgancacaaaatgcgcccatgcccaccccccccacccaccattcccaccctcccacacacagccctgcc

SEQ ID NO: 209398 - DNA, 522 bp, Homo Sapiens
  misc_feature (34)..(34): n is a, c, g, or t
gcagacagcaggacacatcctggagacaaggttnggggagacaaacaggtgcccaggtcagggctgatcacagcagttacaaaagcatcccgtgaagacggggctgcaagacggtgctggcaaaggaacaggacccaggaagaccaggcttgtcctgtggaggggccgggtcttggcagggggcaagcagatgtccccagtttttgctggtgatcaacaagtgaggccgctgctccattctacacaggacagcatttccaggggtttccagtattctgtctagattcataaaggtcaaaggccttgagaatctatgtgtgcctttctatcttaggtaaagaagagaaagagaaagcaaattctcgttactcctctttcaaaaagttcattaaaagccaggctggcagctcacagtgctataatcccagcactgtggaaggcctaggcaggaggattgagaggagttccagaccaacctgggcaacaccgtgagaccccatctctacaaaaaaaaaaaaaaaa

SEQ ID NO: 209399 - DNA, 1000 bp, Homo Sapiens
gctttattgaaggttctttgggtaaatattagtctccctccatgacactgcagtattttttttaattaatacaagtaaaaagtttgaattttgctacatagttcaatttttatgtctcttttgttaacagaaaccacttttaaaggatagtaattattcttgtttataacagtgccttaaggtatgatgtatttctgatggaagccattttcacattcatgttcttcatggattatttgttacttgtctaagatgcaatttgattttatgaagtatataccctttacccaccagagacagtacagaatccctgccctaaaatcccaggcttaattgccctacaaagggttattaatttaaaactccattattaggattacattttaaagttttatttatgaattccctttaaaaatgatatttcaaaggtaaaacaatacaatataaagaaaaaaataaatatattaataccggcttcctgtccccatttttaacctcagccttccctactgtcaccaacaaccaagctaaataaagtcaacagcctgatgtgtatctttctgtccctttcttcctgcttatatttagaacatatgctcatttgagaaaggatctttctgcatattattattataattatacatcatactgcaacctgcttttttgcatttaatagtacagcctttcagatcagatatgggctctaacttactctttttacctgctgcctaatacccacaggtttttaatttcttaacttggcccatatcaaaatttagccccacacaataaaaggtacgggggtggagcccctttttttggttaatagggttatatttacttatagggaaaaactttacaagggataattaacccccttttcttgaaaatgccgtaaccgaaattccagcaaaaagggggaaataccgaataaaaatttgaaaaaaaatgaactttttcggaaagcaaacggaacccccccaccctgtaaaagtttgaa

SEQ ID NO: 209400 - DNA, 1000 bp, Homo Sapiens
gactctccaaataaaaaaccaagaacgaccaattttattgggaaaatactaaatgtaacaaactttattttttgatgagtgaagactatttttctaattttgcttaaaaattttaggtttagccttaggtaataaagttaatagagagaatgtttactaccatgcataaattcaaaagacttgttagtttagattgtcaatttaatgttgaacaaagttgcttgaaattttcagatgaaataactttaggtaagcttaagaaaagtttgattgcattttgtttataatcttgtacttctattttcattctgatttagtaggctgcacactttttaaaaaaaaatttcaggtggattgtggccattccttttcctcttaagtcttatttgattgttcttccagaacaaatattaacatttgcagtcctgcatctggatcaagcagtttggttagagaaatttaaacctttaaatcacaaaacagcttattttcaattgtcatagctgacactgaatctatgcctaatggtgtaagcaatgtggatattggaatgtctctgagttttttatattaataaatttactagctaaataagtgatgtaatcattctgttgatgtctgagatgaagagggagtaaaaacccccctaaaagtcttccataaaactaaacctatcttggaattctttgtaaaaataatttctgggagatggaacttttggaaagttttccctgtaatttcctggaaatcaaattttaccgctgcatggaagtcctgaccatttctgcatttcccctttctggaaaaaaaaacattcacttattttcaaggcccaaaaaggcccccttttacttgggcttgggtaaaaaaattctttccaaatccccgctggattccaggaaaaccggaggggattttggggggatttccaggaaaaattcctccggggggggctaaaaaggctttgtgaaaaaccattttggtgaccccatccccctct

SEQ ID NO: 209401 - DNA, 1000 bp, Homo Sapiens
gatgaagatctaaagggatattttgcaccaaaatccaggtttctggcatctcttgaaaaatccaaagatttcgcaagttcacctaggctctcagaaagtcgcagttgttgggagttgggccggagccagaactcccaacttactgtggtccggccactcatcccatcagctcctgaccaagcatgagtagccattcatcatggcttgcttttagtgtttttggtgtttatcttaaagtacagcaaagaagaaagggaagtatttcttgaacccatgtctgtgtcaaaacagtccttgcatctttcctgtctttaggtacgcaccatctttgctgtctttaagtatgtgccatcatgggcagagggggctaggccaggaacacctggtgttagatttgtagccagtggcaaccgtacccatctgtatccccaagttctacacggaatccctccagcacttcacgactccattatccagctaccactaattcctttgtgggcagagtccagccacgggcagcccctgccctgcctctggtcaggacaacacctgcccaaggagagcaagggcctgtgacctctgctggcctgtgcgccctcacctgtcacccagctcagccctgtgtctggcctacccagggaggaaggaaccagatttatcagcctgaaagggaggtagaagttttggagaaaagacccctgtttcgggtgtccaagtaatgaactgaactttattcggaacctcatctccaatccaaatccccaccgtggtctctctcttcctcagctttttcctggggcggggtttgactcccggtggtcacctttatcacagggggcaccatggggggttgaagaggagggaacccttgggcagtaaggaaaataccctttggaacagggttttaaattttcccggggggaaatttccagtcccccttcccccttaaccctcaaaacaaagcccctgggggaaagccccaccctttggcaaacccagt

SEQ ID NO: 209402 - DNA, 1000 bp, Homo Sapiens
gtcatgccaatgatcagaaaatctgtaagaattttagagcaatttttctatgtacagctatgttaaacagtctgaacatgagactttttctttcaagttgaagattattgtcatcgttttaccactaagttggttgagacacttacttgtaatactttaatttttttaaagtgtttttagaaacaagttgtttgaaaaccaattagaaattagaatatttgccagattataagcagatggaatgcagtgtaaaactgttaacaatgctaataaaattatgagtcatcagattggtacagttttccctgccaagatggtcatattgataatgtaagacaaattttagtattacttgcattatgtgtacctaataggtatatcatactggtactgagcatatatagaaaatactattcatagaggagtcatcaccacccaacctccttgcctgtgtaggcatatttcttctgaacctgaccacacaagtacaacattttggtaacttcagtcttttcagtatttttgtaatcttagccatagtcctatgagaaatgtacataagagcaaacaattcaggatagaaattagcagaaagctgggaatgatgtgaaataactggcagcatagtacagaaatgtaaggtatatgttttgcttctggatttttagaaattgtgctaatcatgtttacaaattaaggcatattcagatgtctgctattatgtttaatattgatttgataaaaaaatggaattaggtgtagcttagagtataaatgagtcctttttaaaatgtgtatctgggaagtagggctaattaaagaaatccttttattttcaaagaatgaactttaattggaccactcatcccccatttacgaattggtatccataagggttggctggattttgaggataaaccggctcggggttaattatattccaagggaaggtcctttacatccttcattggattaccaaattttccccaggaaaatggat

SEQ ID NO: 209403 - DNA, 747 bp, Homo Sapiens
  misc_feature (729)..(729): n is a, c, g, or t
  misc_feature (734)..(734): n is a, c, g, or t
  misc_feature (738)..(738): n is a, c, g, or t
  misc_feature (742)..(742): n is a, c, g, or t
  misc_feature (744)..(744): n is a, c, g, or t
  misc_feature (746)..(746): n is a, c, g, or t
tcaccagggcctccaggcagggctggggttggcctccatcacctccaggtgatgggctgtggaaccagcggcctgcgccttcctctgggtacccagagtggagggctgggttgggctggcctttgccacctccctgcctttgcagggcctgtggacagctggagaggccacagatggggtggaatcccatctgctgctgaatcctcacctgggcctgagggactgtgcctgctgtgcactcacagctgggtcttcccaaggatgctgttctcaggagtggtgggtccccagcccctcttcacactgggtatgatggaggtgtgggcgggctcgtccaggccgatcaaggcacagcagtgagcagcggaggcctgtggtggggaatggactctcgtgggatcctcttgcagaggatgccccaggcctgaaccctctagtggatccacagtttgtggagactggcactctcccagccctgtccttgaccgagagtccagcattttttcagttggcccctggttggctgcctcaccccagcaggggaggaggcatccgaatccacagggacggcacgtgccatggctatgcacattgcctgcccgtggcatcaactggggccgctggcacttgtctaggatggaagcccccaagaagggcaggggtttctgtctgctctgttcagtgaatcatgtgaagtgcttgcaaaggcagctttacacagaaaaaaanaaaanaaanaaananana

SEQ ID NO: 209404 - DNA, 1000 bp, Homo Sapiens
  misc_feature (563)..(659): n is a, c, g, or t
tctttggatgggccttttagaaacctcattggccagctcataaaatggaagcaattgctcatgttggccaaacatggtgcaccgagtgatttccatctctggtaaagttacacttttatttcctgtatgttgtacaatcaaaacacactactacctcttaagtcccagtatacctcatttttcatactgaaaaaaaaagcttgtggccaatggaacagtaagaacatcataaaatttttatatatatagtttatttttgtgggagataaattttataggactgttctttgctgttgttggtcgcagctaaataagactggacatttaacttttctaccatttctgcaagttaggtatgtttgcaggagaaaagtatcaagacgtttaactgcagttgactttctccctgttcctttgagtgtcttctaactttattctttgttctttatgtagaattgctgtctatgattgtactttgaatcgcttgcttgttgaaaatatttctctagtgtattatcactgtctgttctgcacaataaacataacagcctctgtgatccccnnnnnnnnnnnnnnnnnnnnnnnnnnnnnnnnnnnnnnnnnnnnnnnnnnnnnnnnnnnnnnnnnnnnnnnnnnnnnnnnnnnnnnnnnnnnnnnnnaagggggcggccccctcttaaaaataccccccaaggggccccaattttaccgggcaccccccttttttttggaaaaaaagggcccccctaaaagggggcgccattttaaaaataagggcctcgttgccctcccttttttaaacaacccccggaactgggaaaaaaacggcccacttctggggaaacctttttgggaggggaaccccttcctctttggtggggggggccaaaaattgggggaaaaaatattcccttaaagaaattttttacaccctctcagggggaaaatataaaaaatttttttaaagggggaataaaggggggtaaaaaacaaccccccc

SEQ ID NO: 209405 - DNA, 1000 bp, Homo Sapiens
  misc_feature (808)..(839): n is a, c, g, or t
  misc_feature (841)..(845): n is a, c, g, or t
  misc_feature (847)..(864): n is a, c, g, or t
  misc_feature (868)..(874): n is a, c, g, or t
  misc_feature (886)..(887): n is a, c, g, or t
  misc_feature (889)..(889): n is a, c, g, or t
  misc_feature (893)..(893): n is a, c, g, or t
  misc_feature (908)..(910): n is a, c, g, or t
  misc_feature (920)..(926): n is a, c, g, or t
  misc_feature (928)..(928): n is a, c, g, or t
  misc_feature (938)..(945): n is a, c, g, or t
  misc_feature (950)..(950): n is a, c, g, or t
  misc_feature (953)..(953): n is a, c, g, or t
  misc_feature (956)..(958): n is a, c, g, or t
  misc_feature (963)..(965): n is a, c, g, or t
  misc_feature (968)..(969): n is a, c, g, or t
  misc_feature (976)..(981): n is a, c, g, or t
gatgtgatttatgctttcgtacgagattctgtatgcataaccgtagactacaaattgcctcgaacagttccagatccactggctgtcaaaaatggctctcagtgtgatattgggagggtttgtgtaaatcgtgaatgtgtagaatcaaggataattaaggcttcagcacatgtttgttcacaacagtgttctggacatggagtgtgtgattccagaaacaagtgccattgttcgccaggctataagcctccaaactgccaaatacgttccaaaggattttccatatttcctgaggaagatatgggttcaatcatggaaagagcatctgggaagactgaaaacacctggcttctaggtttcctcattgctcttcctattctcattgtaacaaccgcaatagttttggcaaggaaacagttgaaaaagtggttcgccaaggaagaggaattcccaagtagcgaatctaaatcggaaggtagcacacagacatatgccagccaatccagctcagaaggcagcactcagacatatgccagccaaaccagatcagaaagcagcagtcaagctgatactagcaaatccaaatcagaagatagtgctgaagcatatactagcagatccaattccaagacagtacccaacacagcatagtactgtgatcctctaaggacgataactcaagctcctagatgaatctgcttcctccggcccctgagacataatggtgtgtccaaaaaaaaaaaagggccctattcctcggccatcgacctctgagcctagggtataagggttaccgggacgttgtccnnnnnnnnnnnnnnnnnnnnnnnnnnnnnnnncnnnnncnnnnnnnnnnnnnnnnnncccnnnnnnncccccccccccnncncccnccccccccccccccnnnccccccctcnnnnnnncncccccccccnnnnnnnnccccnccnccnnnccccnnnccnnccccccnnnnnnccccccccccccccccact

SEQ ID NO: 209406 - DNA, 1000 bp, Homo Sapiens
  misc_feature (919)..(919): n is a, c, g, or t
atagcggagttcagagggcccggaggtgggagacttcccacacggtgactgagatgtcgtccactgcggctttttaccttctctctacgctaggaggatacttggtgacctcattcttgttgcttaaatacccgaccttgctgcaccagagaaagaagcagcgattcctcagtaaacacatctctcaccgcggaggtgctggagaaaatttggagaatacaatggcagcctttcagcatgcggttaaaatcggaactgatatgctagaattggactgccatatcacaaaagatgaacaagttgtagtgtcacatgatgagaatctaaagagagcaactggggtcaatgtaaacatctctgatctcaaatactgtgagctcccaccttaccttggcaaactggatgtctcatttcaaagagcatgccagtgtgaaggaaaagataaccgaattccattactgaaggaagtttttgaggcctttcctaacactcccattaacatcgatatcaaagtcaacaacaatgtgctgattaagaaggtttcagagttggtgaagcggtataatcgagaacacttaacagtgtggggtaatgccaattatgaaattgtagaaaagtgctacaaagagaattcagatattcctatactcttcagtctacaacgtgtcctgctcattcttggccttttcttcactggcctcttgccctttgtgcccattcgagaacagttttttgaaatcccaatgcccttctattatactgaaagctaaagaaccacacaccatgtccagaagtcaaaagtttctcatctgggctttctgatctcttactaatgaggaaagctttgttttgaccacctaactgctccaggcattcaagtgggatatttggggtatttaatgaaggaacaggaatcccnaaggaacttttggatttggggagcaaactgggggggatgacggacctttcccaacaagccttaagggaattttttaactta

SEQ ID NO: 209407 - DNA, 1000 bp, Homo Sapiens
  misc_feature (854)..(854): n is a, c, g, or t
  misc_feature (923)..(923): n is a, c, g, or t
taccccagtgatttaatgatgttagaaagaattaaatgggagagaattgctaacagctttcttgatctcttaactatggagatgtcattcatttatttctggggtgaaaattatagcttgctttttgacattgctgctagtattgttctttgttgctttaaaaattgtctctctttagaaaaactcttgagcagttaaacagttttttttctgattcatatcattgcttttaataacatgtaaaggctgtgtgtagagcaaactatataaaatgagtagaaagggcttactcatgttaattggcatccttgatgattttagttgagattccttaacatttattttagatcacatctttacgtaacttatttttcctaatgttttccatcgtgtcttaaaatgatgctggtatatcaggagattgcagtattatagtcatactccccaatccctagaggagaggaaagactaattcttgttttaagggcccctggagataccttttattaaggttgaaaaaggtcaacacagcctgaaaataagaaaaatatatactagcaattactaattttctaaatgtgtgtatctctgctgtactaatgtgtgaacaatatgtcgtgcataatactgtagctggtcgtggtatgtcaatacattctgtgagtgtgtacagtctgagtgatcagttttctatttttatgtgtaaaaaaaataacttgtcgtatcccatttaaaggccaatttctgtattcaggcaggcatatgtacatacatgaataaagcccacaaaagtgtgcacatgtattcagtaacagaatttgtcccttttatttttgaaggtcagaaagggctgntttgatttgggtttttttttttatccatctccttgagtagggtaacataattatccacaaaggctgaantataggtaatccagtaccattggcatatttattaaaatatgcccaggggcctaagtaacccatgcccatttagtccc

SEQ ID NO: 209408 - DNA, 963 bp, Homo Sapiens
  misc_feature (775)..(775): n is a, c, g, or t
gcctgccctgctgaggttcacgagctcatgaagctgtgctgggcccctagcccacaggaccggccatcattcagcgccctgggcccccagctggacatgctgtggagcggaagccgggggtgtgagactcatgccttcactgctcacccagagggcaaacaccactccctgtccttttcatagctcctgcccgcagacctctggattaggtctctgttgactggctgtgtgaccttaggcccggagctgcccctctctgggcctcagaggccttatgagggtcctctacttcaggaacacccccatgacattgcatttgggggggctcccgtggcctgtagaatagcctgtggcctttgcaatttgttaaggttcaagacagatgggcatatgtgtcagtggggctctctgagtcctggcccaaagaagcaaggaaccaaatttaagactctcgcatcttcccaaccccttaagccctggccccctgagtttccttttctgtctctctctttttattttttttatttttatttttatttttgagacagagcctcgctctgttacccagggtggagtgcagtggtgcgatctcggctcagtgcaacctctgcttcccaggttcaagcgattctcctgcctcagcctcccgagtagctgggattacaggtgtgcaccaccacacccggctaattttttttatttttaatagagatgaggtttcaccatgatggccaggctgatctcgaactcctaacctcaagtgatcctcccaacntcagccttccaaagtggttggaataatagggcatgaacccactgcacccaaggctttttttttttttttaaatttaattattaattattttttaaaaagaacggtatcttgcctaccttggcccaaggctggggcttgaacctcccgggggctaacagggatccctcctggccttaaacctccctaaa

SEQ ID NO: 209409 - DNA, 1000 bp, Homo Sapiens
  misc_feature (851)..(851): n is a, c, g, or t
ttcgaaagtacaacgctttattgaatcttaataaattgcaatttttttcttggctgttcaaagtaatgtgtttttcatttttcaaaagacactatggatgtctactttgcacgctgcgattgggagagctgtcccgctgcatgcgttccctctgtaatttcctcagagctcacatacgtacctctctcacgagtgaactcagattttccattgttttgctttattctatcatttgctttgtggttttgctgtaaatattgaaatcttaatcatcatcgagaggcacagccaagctttccagctctccacccccgtggcccatccaagtctgttcatctggtaacttctgttgtctgggacggcagcaagaagatgccggggcttgcctggagtcctggcagaggagtgccactcacttttgcctagggtccagttggggcttaaaaaatatttggagagaagagtaatgaggattttttgtgtttcctagacattttatgcatctatttttgtaaaatcaccttcgctaactttcaccaagcactttgagcacagtggaacttcagaagcacaaccagcctaaccccagaatctcaggtggcacagctagaaattgagtccctttcctaggacactggccgtggccttcaggggtgaccagtcagtggccaacgggttggccatttggtgttacagacagggcctctgaaggacaaaccgaaccaccccagcgggccccttcaactaagcaagggatctttttttctggctgcccctccctggggcaagggccaaagggggacccccccccctgtgggggccaattccttttcaaaaaaatggggaccccnaaacccccccaaaagggttggccccccccccacccatgggcgaaaaggggggggggctttctggcttcttgacccttacccttttttggaaaatttggagaagggaacccctttgggggggggaccctaaatcccggaaaaaaaaaaat

SEQ ID NO: 209410 - DNA, 1000 bp, Homo Sapiens
  misc_feature (778)..(778): n is a, c, g, or t
  misc_feature (852)..(852): n is a, c, g, or t
aatgtcctcccttccagttcatgagcggcccagttctgtaccaggagaagctgctgaagccggcagctttgctgctggagaagggtgccgaccaggaggaagacgaggccctgcgggtgctgtccctgcgcgccctcggcaacatggccctgggcgcccccaagaaggtgaagcagtaccggaaggtcttgctggagaagtgcctgggccccctgagggagcccgtgagcaacagcgtgactgccgagggcatggaggccctgaccaagatcctggctgagctccgggaaggggatgtggggtcctctttcgacgccatgtctgagcagtgcaggatcttcttcgacaacgagagcgagctgctgcgtctgaaagccttcatcctctttggaaagctggcaagggtggtcgggatgtccaagaagcatttcttcaaaggggaggtgaagaaggcctggatccccctcatgctgcactcccaggacccctgctccaatgcagcccaagcctgtatggctaccatgtttcagtgtgtgcacttctggggctggaagtccctggagcatccctcagggccaagtgataccgctactgatgacaagatgaccgttttccagacaaccatgtgctccatcctgactcggaaaaagccggctgttctctaccgcttcttgctagaaacaatggcctatgttaaaaataacttgtcaagaatcagaatcgctgcttgcaacttggcaggaattattatgaagcagatgtctacacattatctganaaagctggacttcccagcattacggaactccctccaggaactacagctgggacccgggatcccgggggtcaggnaggggcagcccctgggagacggctcacaggtcttgggatagcctgtaagtcaggcatgggggttttcttggcttccccccccaagaaaatggtcctaaggtgggtcccaaacctttaagaacggtaaaacctgtccctttcctttaag

SEQ ID NO: 209411 - DNA, 1000 bp, Homo Sapiens
  misc_feature (647)..(647): n is a, c, g, or t
  misc_feature (655)..(655): n is a, c, g, or t
  misc_feature (807)..(807): n is a, c, g, or t
  misc_feature (817)..(817): n is a, c, g, or t
ctggtgggtgggcgacatccccgtgtcaggggcgctgctcaccgactggagcgacgacacgatgaaggagctgcacctggccatccccgccaagatcacccgggagaagctggaccaagtggcgacagcagtgtaccagatgatggatcagctgtaccaggggaagatgtacttccccgggtatttccccaacgagctgcgaaacatcttccgggagcaggtgcacctcatccagaacgccatcatcgaaagccgcatcgactgtcagcaccgctgtggcatcttccagtacgagaccatctcctgcaacaactgcacagactcgcacgtcgcctgctttggctataactgcgagtcctcggcgcagtggaagtcagctgtccagggcctcctgaactacataaataactggcacaacctggtatcgccagccttaaggtgtctggagcccccacacttggccaacctgaccttggaagatgctgctgagtgtctcaagcagcactgacagcagctgggcctgcctcagggcaacgtgggggcggagactcagctggacagcccctgcctgtcactctggagctgggctgctgctgcctcaggaccccctctccgaccccggacgagctgagctggccaggcccaanaaggcggnaagggaggaaaggggggtgggctgggcgcaacatcagcgcccggggaagggccccaaagctgccgggatgtgataaaaggcccctgaaggtttcctctttaaaaaaaaaaagaaaaaacaaaaaaaccataaaagcccccccccaacctatnaaaccccacncgggggcggccgcctcttaaaaatccccccgaagggggccccagatttaccggtacccccgttttttttttatacaagaggggccccaatagggggagcccttattttaaacttaggggcccggccgcgccccttttaaaaccccctggagctgggaaaaatctcgttaattttgggaatttt

SEQ ID NO: 209412 - DNA, 1000 bp, Homo Sapiens
actccgagatgctctgctcctgatttttgctaacaaacaggatgttgctggagcactgtcagtagaagaaatcactgaactactcagtctccataaattatgctgcggccgtagctggtatattcagggctgtgatgctcgaagtggtatgggactgtatgaagggttggactggctctcacggcaacttgtagctgcctggagtattggatgttgcttgattttaaaggtaccagccgtccgcaagctttgcggctacaaatgcacttcgcccaccacatgccctaaacaattccatcactcccccacctaccgctatgtcaacctcgcctccctatatcctatatcgccaaccaggcctcctctataatccggcgcccctacccatcctcccttccccaatcatttcttccccaacatttcatccctacacatccccccaacttttttttccctaccctacataccgtcaaactacataaaaaaccccccttcggtatctccaccgacgatccttaatcaccttttcctccccgcgtcactattctttgccctaccatccgttttcgtatctatacccccgtgtctgtgaatcaagagtataatatcccgtacgctacttcctacccaaccgcgctaattccatccaatggcgaggtgcgaccctcccccccccaattactccccgtttccctctcccctcgtcaataacaaacccccatgccccccatccctgtatttcctatcgcccccgatgcttccccatatcaacccctccgcccctattattgataattccctccctctattacccgcctgccaatacttttctctaccttcgacccactctaacctgtttctcccgcgctttcctaatgcatataatcccctccacgcccatttgttacccgcgttctcactctcatcccaaccccctcgttgtatttcctgcactaatctctacccacccccctcgtattcctcccctccttactaaccc

SEQ ID NO: 209413 - DNA, 545 bp, Homo Sapiens
ttattattattatttcgctatcacagagtagtgtacaactaacagaacaattatattgggtaagctgcatgaaaaacaattgaagagggaaaaataatatctccatatatatgtaattgatttgtactatgcactaataaagcctgccttaaatttctgttctagtttaaaccccgaaacagtaccaggcaaggttagtggctattgaaaatatcattaaggacagggttatctaaagacacactggatactacattaattttgcaaaaataaaaagacagtatacagtgttcagtttaaaaacaaatcatatgatcttacatttcagctttttttctttgaaatcagtggtgtaatgcggagttaaatacttttaggcaaaaaacaaacacatacacacacactcacacaaaaacaaattaataaaacaaaagcctcttttaaaaccaccctattgaccatcatcatttttttcttcacccttttcatctttctattcaccaatgtctttccagtcctttttttcttttcttcttttttctttt

SEQ ID NO: 209414 - DNA, 375 bp, Homo Sapiens
agcacagtttattcaggttcatgaattgggcagcactcacaaccagaggaggtccagtgaggtccaccccatggtgtgagcagcaaacctgataggcaaactcagaagcacagtggagaaactgattggctatagctatgcaggctgccttgtggggcctggtataatgagttggttgcccatgattggccagtagccccctgttcattacagcctaatgtaggtttccattgttaggtgggaactcaacgtacagagacagcctcaagctaatggcctcttgcttatttaagagcagtatgcaaacttttcctggaaagtttcaaatggtaaatattttaggccctgtgcgtatgccacctctgtcatcactac

SEQ ID NO: 209415 - DNA, 460 bp, Homo Sapiens
ttggctttaataaaatttatttgggaatctcattgtctaatcaaagaaaaaatacacacaatcatttcacagacacaataaagataaaaaaaagtaacaccaatgcctgccttagaagtttaccagtaatttctttcatatacatacatattaacagactggtgagagtcctttttcacaattttttagatgagggtcaatgtctaaaactctctaaggaaacatatggtcacagaagatagactttatcatgacttccagcaatatcttctttctctcaacttcattgctgtttacttaggaagacagaaaagcctattttcatctgctttatctaagattctatggatcacttgagattcaaccccaagaatatgctgacaggagtgaggttctcagatgtctactataaaggtgtgaggagaagctgacactttacattgcagttttatagtcaccg

SEQ ID NO: 209416 - DNA, 483 bp, Homo Sapiens
gttctttaggtattcttttttttattattacaacatacaattcactctctgctgctgggaatctgagactgattgtgaagatttcttcccatccacactccccttcctcaaaaagaagcccagaagggaaaaacagtgtaacctactagagctcaagactgagtggccaggcagaagatgtttttcaattgtttccagggaagctcatgtctttcacccaggcagaggctctacataaaaccttctaagtgagcaaatgagcccttgtgcaagaccatggacatgtgaatttctcttcgcaactcagcacagcagctttcctaacacattggagaagtcccaaccaatggcaaacagatggaaaatcagtgccagtttcactggaatcacaaccacatccaaacaagctagaaagctttcagttctaaacaaacagcagaatcaaaatgaattctgggatcaaagtacagatggttggttagt

SEQ ID NO: 209417 - DNA, 429 bp, Homo Sapiens; identical to SEQ ID NO: 60641

SEQ ID NO: 209418 - DNA, 374 bp, Homo Sapiens
gacctgtgctcccagaagccctcgcatgcccagtgcaccatgggatgatgaaattaaggagaacagctgagtcaagcttggaggtccctgaaccagaggcactaggattaccccagggccatctgtgctccatgcccgcccatccccttgccgcctgactgggtcggatggcccagtgggtttagtcagggcttctggattcctcggtttctgggctacctatggcttcagcttcagctcctgggagtcccagtctgttgttcccagcaacgtcgccactgccctcctactctccaggctttgtcatttcaaggctgctgaaatgctgcatttcaggggccaccatggagcagccgttatttatagaactgcct

SEQ ID NO: 209419 - DNA, 519 bp, Homo Sapiens
ttttttttttttttttttttttttttaacgggaaaggatgagttacgtttattgccccatcccttcactgaatgtttacattaacaaacaccagagagcaaactgggcttcctacactgggccatgcagaggacaggccaagaaactccacatcataacagcctcctgatgcctgggcttggctggagctcacatgaggtgctttgatttcttctgcagactctcggtgatggatgctacaactgacttatcatctttgtcatagacggtgagcgtgcagctgctgcggtccttgcccagctcgttctccaccagcacgctgtaatcgccgctgtccttgagcgtgcaggtggggatgacgagggtgcacacgccgctggtggagttgtaccagaacttggagttggccgtgatgttgacgtcgcccttgtagagggtcactgtgggccgccggttcccaaggaaggcgcaggtcatggtgcaatcctggcccgcgacaccgtgtgttgcttgaagggc

SEQ ID NO: 209420 - DNA, 538 bp, Homo Sapiens
ttttttttttttttttttacgcaaaccaacgtcaactttttaatttgatagacataaaaacatgaagaaatcaaactgaatagagttttggaatatatgtttagggtttggttagacagagtagagctttgcagttctcccagatctccaaaaggcttcacattcttggtaagagaagagaagtaggagaaagaaaacaggaaagttagatacaagccaattcccttcccaaacccccttagaaaccagtggctagatgtggtagaagtgcagttatgaaaattctacaggcaatcatggattcaagaattgtttctttgatcaagacgatgatgagaacaagggaaaaggagaaacaaggcagctcagattcctcagaagtgtgtccgcaatatagaattatattaaaacatatggactatccttaaataacaagaatgaatagaaatgattaaggtatatgaacttgtcttcacagagatcagggagagaacatggtacaattttccataatcagttctcttacctagtgacgcat

SEQ ID NO: 209421 - DNA, 655 bp, Homo Sapiens
  misc_feature (557)..(557): n is a, c, g, or t
  misc_feature (637)..(637): n is a, c, g, or t
ttttttttttttttttgtagtaattattctttattccaatattataataatcctcgctctacaatcataacctaggaaacaccaggccatacagagataggagctgaggggacagtgaggagtgaccagaagacaagagtgcgagctttctgttatgcccggacagggccaccagagggctccttggtctagcggtaacgccagcatctgggaagacacctgttgccaagcccaccgtggtctagctgtagcgttagtgtcaaggaaaaacacccgctacttagcagaccaggaaagggagtgtacagtgagatcaggatgagggtggtgaggtggtgatcagggggacccatgcttctgctcagggggttggcagaagccagcaaggcttggggtttccctgtttggagctctccaagttgagagtgcagaggagtgtgagatgcgtgtgaaaatgcaaacttggctctccctggctggaggctggcattgggtgagtctctggtaggaccaggccatgtatactttttaagcttttttattcttgaaaagttcanagatatacaaagatagactatgcaggataatgagcccccacatactccgcatctcttgtctgtaattatcagctcgtggntacctctacctctcccct

SEQ ID NO: 209422 - DNA, 572 bp, Homo Sapiens
tttttttttttttttgtatttaataaaatggcaatttgtaaattctggtgaatactcaaaattgtagctaaaaacagctatctgaatataggtttaaaacctcaaagacacagagctaagaaatatggaatacattgtatattgctttttcaatagagtagacataaaattgatgacaaatgtttccaaaccctcaataagaactcaaaacatcatactatgccaagctgaattacagaagggtatctaagaaagaagacagtgcatcagttatctctagagtaagagccagtaaaatcaagttgcatttgatgtatacatcttattgggagtagttttcagaaagcaatttccctacaaacagaaaaagcattttttttttctatttcagtctttagcagtgtggtactcacataaaaaaaaatgactacttgaaaataagaggtttttctaacttaagacatttgtaagggggtaaaaataggagattgtccaaacagattgaccctgatacttcttgaaaaagtgtttaaattcaatgaaaatggacacacatagatttttatagaccc

SEQ ID NO: 209423 - DNA, 522 bp, Homo Sapiens
tttttttttttttttttggagggtatctgatattttattacatcataatcaccaattgttaaaatcttggctgcacattcctggataacatctttaataaattaataagagaagactgattcttgcccaaaagctcaacttaacagcagcttgaaacactattaagatacactggaatgaacctatttaactgcattggccatccacccaacccccagagcccaaaaataacaggtacaggggcttattatttcagaagctatcaaaaatgacaggtttgctttggctctttggagcttttttttaaggaggcaaggacacagattcccatagactactttgtaatactttatcatacagtcataattcataaacttaaaagaatcttaaaccaatagctgttattttaaatgtccagaaagttatctaaagtcagcactatttaatggactgactcccagagcagtttttctttccactaaaatatccagacaagtcaaaaccaaaatgaactactgtttc

SEQ ID NO: 209424 - DNA, 579 bp, Homo Sapiens
ttttttttttttttttttccttgaagtttattgactgttactggtggcagagcaaattccataaacgagcaggttccatatggagcaagtagaaggggagctctgagttggtgaggaaggatgcgtggagtggggacttggagtaaaggatggaaaggtagatctctcctttttccctccattcccataaggatactggattaacaatgggggctatctgctcagcattccctctccaaattggagccagagaggggaaatgatgcaaatcagaggaggaaacacctcacagctcctctgtttctccatccaaggggatgccaatatccacgttgtagtctacaggctccccagagctcagccagggaataggggttcgattgaaagaaggcctgttggagaggttttggttgtagaggaccaggggttcactcagcaagggccccaggtcaaacttgggcatctggaaggtcatgcgtttggaggccttctcatatccaccatagggcattgccgtcctgttgaaggattatatttgggaagttcagctttggccccataggccagcaggtcaatgcc

SEQ ID NO: 209425 - DNA, 589 bp, Homo Sapiens
ttttttttttttttttttgtgagtacaattaacaggtttttaatatattcacaaagttgtgcaaacaatggcacaatatattttaggttatttcaccatccaaaaaagaagctccttatccttagacaacccctagtcctgggcagaccagtttctatctctatagatctgtctatatattttctggatatttcaatacatggaattatttaatatgttgacctaccttttgatgccatgccccacctttatgcttggcgcattccagcctaacagcatcattcatggtacttaacattttatatcatcgagcaatcaattgtctccaacctatctttcttctgccactcctcctctcttcccagccatcttcccataatgatttttcaagatgcaaatatgctcatatcttactcaagtttaatatcccaaaagggctccccattgtcctcaggctgaattctgaagcccttcccaaagcctgcgagggtctgccgcatctagccccagtgacctcttcctcttgggctacagctcatagatgtccttccattctcctagggagccctgtgcccacccacttcgggct

SEQ ID NO: 209426 - DNA, 668 bp, Homo Sapiens
  misc_feature (21)..(21): n is a, c, g, or t
  misc_feature (508)..(508): n is a, c, g, or t
ttttttttttttttttttaanaatcacggcatctttaattggcaaactcagggccaagatctatctggctgtcagtctgggctgagaactggtgttgcaagctgggctttccccaggctgtgttgagggttaggggaggggactgagatgtacactggaaattaaaacctggtacaaaggtatctcctactgccaaggttcctcttctcaccccatgtgcccctgtgataaagtgacacacgagtcaacccgccccagaaaagctgagggagagagagaccacggtgggattggattggagatgaggttcgaataaagtcagttcattacttgacacccgaacagtgtcttttctccaaaacttctacctcctttcaggctgataaatctggttccttcctccctgggtaggccagacacagggctgagctgggtgacaggtgagggcgcacaggccagcagaggtcacaggcccttgctctccttgggcaggtgttgtcctgaccanaggcagggcaggggctgcccgtggctggactctgcccacaaaggaattagtggtagctggataatggagtcgtgaagtgctggagggatccgtgtagacttggggatacagatgggtacggttgccactggctacaatctaacacaggtgttcctggcct

SEQ ID NO: 209427 - DNA, 635 bp, Homo Sapiens
  misc_feature (538)..(538): n is a, c, g, or t
  misc_feature (626)..(626): n is a, c, g, or t
ttttttttttttttttttcttacaacatattcttttattgcaacattttcctcagtttggaaaactgtgtccccacacgtaggtccttctagaatattgtaagtcaatagaagaaggcctgtcgctcacacactgggattcccacctcgctggaccccaggtcagatagcaccagggcctgtgtttcttaggccgaaggtcctgcctccaggaaggtgggcttcccttcgtggtccataaagaaagacagatacttggatgcaaccaccaggggaacagccatcctccaatagaggcacacgactcacttaggcctgggcgacagccccaacgggatggcctgagaaccccagagaggctggtgtcccaaggactctgcccgagtacccagaggccaccatcaaaagggagcagggaggggcagggtggggaggtggggcctgaatttcttcagatgaactcatcaaccacttctgctatgcagatttaacccaggcagtccaagaggggctcctctggattggaagatctctcccanatagaggaatcatttatacactgtaacatagtcggtggcagacattagtgcccagctgggcctccagacaagtgaccctggggttggncaggaaacc

SEQ ID NO: 209428 - DNA, 521 bp, Homo Sapiens
ttttttttttttttttttgcccggccagaagttttatttccaaaccccaggaaggcattacaaataagagatagaaacccaaattaagctctgaaacaactggagacaggcctgcctaggtgatcaggagcatccaggcagcagggatgggaagcagaagagatgcattctggatagggacctcaccccagagcctcagtctgtacatacgtgtgactattcagggaccgggagttgagaaccagaaacccaccaatcctagtgttgccctgggtgggaggcagagaaggcagcagcacgtgaggtcaaggacattaccaagtctgaccttggcatttgttgcctgctctcatccccaacagtccataaataagttatccagcacatctcaggggtggaggcgggggagcaagccaactagccatagcctctggaagaaggggcaggccagcctggcactggggcagagctacagcagaatgcagtctgactcgtgcttcggcctctgccgacgctccccg

SEQ ID NO: 209429 - DNA, 627 bp, Homo Sapiens
ttttttttttttttttttaaaggttaacataaaactactattaaagaggaaaagatataggtcatgtaacttagagatacaaaggacatacttcttaaaaggaaaaacaaaccctaatgcacaatatttaccaatatttaaataatccagttgaaaccctttttttttttgtcattaatgaaaaaacacaccatagacggttacctacactgagaagagtggaaacgatggtgttaggggagaggaataagaaggtccgttcagttagagctttgcaagattcgtatatacagcaccagatcctatgaaatcagcgcccctcgagtcagtacagtttgtgagaaatgaacacttcagaattgcagtagaaaatatggccataaaaaaacttcggtcttccagtcctatgcaggaaggggcaccatgcaaggtggggtctcgctggagtggctcgcggctctggcgaccctggggctccccttccccagccccgaccccgggccccacctccagggccagtcacttgcttccagagtgcactgccgtcacagtggtgggcctgggtctccgctcggctccaactcctgagacccccgacgaagaagaaatgaaactacagagcgtgga

SEQ ID NO: 209430 - DNA, 595 bp, Homo Sapiens
ttttttttttttttttttgctgcaggggttaaatatctgggagaatccagggctgtgttaccctttaagatagaaaacaggttttgcagcttataagtaggaatgcccaaggtggggtgaagccagttaaaattacctagtaatttctgataatcatttaaggtgtgtaagttgctagtatttaatttaaccttttgaggtcttactgaccaggaagtatgtacccaagatacttccaaggagaggacatttgtgctttttcaggtgcaatgattaaaccacttagctgtgcattctttatgacagaggtatataaacttaaaagcactggctccactggggctgctagtagaatatcatccataaaatgaataaccttgcaatgaggaaattcttttctactggggaacaaagcttgatttacatgatactgacacatggcagcactgtttagcattccttgaggaagcactttccaatgaaatcggcaagctgacctttcaatattgatagctggtattgtaaatgcaaatttttctgtcttgctttgccaggggaatagtgtaaaagcaacagtggccattattagaaagag

SEQ ID NO: 209431 - DNA, 662 bp, Homo Sapiens
  misc_feature (580)..(580): n is a, c, g, or t
tttttttttttttttcttcttaaaattttttattgtggtaaaatatacataccataaaatttacaattttaaccatttaaaaatgtacaattcaacgtcattaagtatattcccaatagtgtgtgcaaccatcaccaccatccatctccagaactctgtcatcatcccagtgtgaaagtgttttagaaaccatatatgtaaaggcaggtcaattaggaatgtgctagctgaagtcttgaccggacagcaaattcatccatccacctacctactgtgtttatgtaccaggcttgataaatacagaaacaaatgagaccagaactacaaggtaagaaccttgtcgtctgtgatgctgggccccctgtcctacttcaaaacagagtgggaagatagaaaggattcttagatgagtctctaattgaaggaattcaagttttacttattctcctttcccagggaaatgggaggtgctctcacccatggcctcagcctttccagttaccaagaggtgtgggattttctctctcttttgtatattgttttgttctggtctcttgcatggggagacagaggacgatgntataactatcatttgtttagagcctttcagctgactaagctctttcccaggagttctcttttgaccttcacacgagcctgcg

SEQ ID NO: 209432 - DNA, 671 bp, Homo Sapiens
ttttttttttttttttttgcaaaatagaagtataaaatttatttaaaaccacccacaaagttctgtgtaatcaggaatgatacaatttgcaatagttttttttaaaaaaactcatgacaaagatttaaaatatattttcaattacagtattcatttagccttattcagttaggctgaataaaaaaaacctttatgctctaaataaatgacacacaaggaaaatataacaatttccacaactacctttacatgtatgtttcaacactaatacatttcaatgcattttgctacataaacatgaaatcatgtacaacctgctgtgcaccaaaatttagcttaattagatctttcaagtaacatgcaattccaactcacaagtcttcaagtactgctagtaagtgttcccttgtttgcagaggattaaatgttgataatgaattgaaattatcttaattaaaatgatcactttctcttctacgtggtgaagtgctttttcttttactgcttcccccatatgttaagaatgaaattggatatttgtgaagttttaaaagtgtttccttgctaagatatttcattgtacaggatacttaagatagtaggatggcaataggtaaaaatcccccaaatcaaaaattcaaaggtaaataataaatagtaaatatatcctg

SEQ ID NO: 209433 - DNA, 604 bp, Homo Sapiens
ttttttttttttttttttccaaccttttaataaggaaaatgtttttttcaaaataatggcttatatggagtgtcaacataaaaacaatataatttcaaattgataagtaaaatatagtcagcaatctcacatacgtcaaaatttggtatataacacacattctggagaggtgttgcttttggtcttactttttttccatttttaaaattgtaaaacacatacaaaatttagcattttaatgacttttaagtgtacacttcagtgtcattaaattcacattgctgtgcaaccatcacgaccatccatcttcaggccactttgcatcctgtgtaacagaaactctacacccattaataactcccctttctcccctccctccagcgtctagcaaccaccattctactttgtctctatgaatctgactaatctaggtactttatataagtggaatcatacagtatttgtccttctgtgtctgatttatttcactttgcataccgtcctcaagattcatctatgttgtagcacgtgtccgaatttcctttcaaggctgaataatattcctgtgtgtaatattttgcttattcatcgataggtacttgga

SEQ ID NO: 209434 - DNA, 538 bp, Homo Sapiens
ttttttttttttttttttaagtggcagtactgcagggctgacagaatctgcctgaacatggtccgggcctcctcttcctcctcgatgtggccatagtggtatatctggtggtgcaactctcctcctctggtttactccctcaccacctggaagagctgaatgatatttgggtgatggaaagtcttcaagatggcaacctgggtcccagttggcctatgctgagccagttccctatcagatggtgtctatgaactgatagttttgtatctccttgtcaagtgaggtggagggtgatccctgctccatggtgcctcccaactatactgactacaaatcctgcctctaaaagctatgctgtgatgcacagcactaactgtgctagctaggctaaggccactgtcggtgacaataccccaggctccaaaccctctgggtctgagggccgttcccttccacggttacacagattcccacccctccctgcccatctacccaccatgcggggaaggtgccaaggagtagacacatggacagtcgt

SEQ ID NO: 209435 - DNA, 651 bp, Homo Sapiens
ttttttttttttttttttacatgcaatacttttattttagacatgcaaggaaagctatttcagaatctactaatttaaagcaagcagctgtatacagacagcaaaagaagcaacattttgttacagcttagcacaaggcatccaacacaaacaggcatgagacaatgcatatttatgtagcattaaaaccagatgaataatatattgtggggcaggaggaggaaaggaggggaaaaaaaaatagaaatgaaagaccaatgtttctcaatgcttccaatatataatgctaaatttcccacctgattgatagcacatccaggtgcttcaaatgtcgtgcattacagtgagaatgttaagaatggaaaatcttatctgtgtacctgcctaatactaagtttggtcaaaacacattttcatagatcttctttcagtgataaatcgatttgaacatcttgtgaagttattgtttaataacttacttaacttaggctttatgctctctagatataaacaatgaattcttttccttttataaaaaaatatgctgcatgttttattaaaagaatatgcaatagttaccaatattaaaggttttaaaattcagaaatataatgccacagttaacaaagtatcaagtatttacatgaggac

SEQ ID NO: 209436 - DNA, 670 bp, Homo Sapiens
ttttttttttttttatttgtaacaaggaaacaaatttattgattttaaaagacaagacaccattttgttttgaaaaacacaagaaagctagcctgagttcaagtctgaaatattcagaaaaatcctactaatatctttagtatgttccagtcatttgtttaaacaacacactaaaagttaatatatatttttataattataaaagttccccagttattgtacagtacacaatacaaatcgcccacaaactattatttagctcctgccaattttgagaggacatgatatactaaaagatttagcatttctcacaaaaatcacatcaggaaatacgtatttacaaaatcaaatacattatacaaaaaaccatcacatgttattcggtaaagatgtttttaaataattaaaaagtttattcaactgtagtccaaaaactggaaaagaacattacattatctcacacatacaatctctacaaaagttgcttacctcatttacataatatattcagtcgattgtaaaataaatgttcaaatatctcctagtgttactatgtttctgtgcttgtgggactgaataatgtaatctgccacttactaagtgaaatttaaatgatggcacttaaaaaaaaatacagtatcttaaaaaaacacaatgaaagaagttttac

SEQ ID NO: 209437 - DNA, 603 bp, Homo Sapiens
ttttttttttttttttttcacagtcagagtggacttttattaggaaatcaccctgcaaacacaccacggagtgctgtgggttcaacgcgcttcctgaggaaggagggtcacagtattggagctgtcggagggacgggtggcacagcctgtgagcctggcggtgactcgaggctgcctgcggccagcactccctcacagcaacaggactccaccgcaagagccgacacgcaaacgcgacacgagaaacacgcccaagcacacacatctgcgctacacttaaataataataaatacagaattccatttgctgttatccgtgcctgaaacaaaaggaacccaaaatggaaaaagaaaaccaaaatgtctttctctccattagaccaagggaaaacaaaatccccaaattatcaaaattcctcagttacaaaatactttttaaaaaaattccattattaaaagaataaataacaaaatatataaaaaataacttggttgcatcaaaattataactaggagttatatcaagattttttgtggcctatattatagtcaaatagttatttttgctttgaattcacttttttcccctcttagggtgccctg

SEQ ID NO: 209438 - DNA, 720 bp, Homo Sapiens
  misc_feature (50)..(50): n is a, c, g, or t
ttttttttttttttttttgagacagagtctcaccctggttgcccagggtnggaatgaactggcacaatctcagctcatagcaacctccacttgctgagttcaagcgattctcatgcctcagcctcctgagtagctaggattacaggcatgcgccaccaggtccagctaattttttttgtatttttagtagagacagggtttcaccatgttggccaggctggtctccaactcctggcctcaagtgatcctcctgcatcaccctcccaaagtggtgggattacaggcatgagccaccatgcctggccaagattcatggaatttttgaactccttgtcttaactactctgccagctcttgttgaacaaagaccaatccgctcttcatgatttgctcctcatgtcttcttataattctaatgtgtctacatccttgtctaccatataataggaaaattcttttaaacaactaaaacagacataatcacaattccaacttaatgtaatccaatacaacttcatacaaatagcagttaaatcacacgtagtaaaatttcgtacaacatttttttaaagtttcaaattcacatgttccaaatgtttaattattttgtcttaaggtacatttgcaaagaattctaactgctgctattacctttgtccttgctgaaggaaacattaggagaatgagctgtttttaagctaaacgtgtctcacttgatga

SEQ ID NO: 209439 - DNA, 655 bp, Homo Sapiens
  misc_feature (638)..(638): n is a, c, g, or t
ttttttttttttttttttcatcaaaggaaatgatttttattgttacacaaaacatttcttgtcagagcacacataaatctagacagcagctgcattttcagaacaaacagatgaaatacctttggtgaactgtgagttggggaaaacaagtcaccttattttaaaatttggtaatgtgtttactgagtttaacagaaatcaaaatcaggacagagtgagaaaaaacatttctgtggaaacaaaatgcgttctcatgagcacagcctattgtgatgcttattattttacacagaaagaagaagaactgggttccatttcctgggcttgggaaaatgcagcaaaccctgaccaatgcaaagaagggcttcctgggtctgcctcttagtctctgagctaacagtgctccccagctgccttctgacagacgcatataccagctgacacatccgggagcacacagctcacctgtgtgtgcacagggcagagccaagccgggtttattctcatcacgttgtcgctcccacagccgctccttccagttcattctcactgcttccatcggggctactgtggtagtctgcctgtcttcggggcctccaccccaccccacctacaaccacaccgccattgaggcttanaggctgacctttaccat

SEQ ID NO: 209440 - DNA, 753 bp, Homo Sapiens
  misc_feature (565)..(565): n is a, c, g, or t
  misc_feature (633)..(633): n is a, c, g, or t
  misc_feature (719)..(720): n is a, c, g, or t
ttttttttttttttttttagagtacctgtccacttttatagcatgagaacagtacaatcaactatttattttgcagttactcatttcagtgattgagaatttctgtgctgtgcagagagacggcctgtaattggtctcatcatccacttgattctaacatgatctctgcccaaagttccatttcttgggctttgatatttataatggcgcctgctcttcatcttgtcttacgctttccgagcaagttcaaaccagaaagaaaaggtgaggctagaagcccaaagtgagtgagtgtgaggaccacaaggaagcccaccactccacagtagatgatcaaaaccacatcctcacgtgggaggtagcacttggagagggtgtagtctgtgggcgtgatgctaccctgtcaaaactggcccctggctcactgggttcccatcaaatatagtgggggatccataacagagattcagagaggcaccgtggagttccagggtcatcggtcagcgaggaacaaggagggaaaggtgtcttcctgccccttgatgctcaactaagcatctgttcncatgatgaaactggggttgtttctgttcctccaactgaaagatgggacgctgagctcggggactcggnccccgtggtgcacctcgcaggcgctgtgcgtgtggccactgagaaccaggcgcggctggagccacacagcacttttgtgatgctcnncgtgaagacgtcatagtctccttaatgggatgt

SEQ ID NO: 209441 - DNA, 661 bp, Homo Sapiens
ttttttttttttttttttaacggtcacaatatgcatttattaatgaatgtatttatacacaatacaaacgtgcggggacaccgtccccttcacagcccagaacccagggtcagaagatgagggatccagcctcagaggggagatatgcgacttcccaagagcagttcttggcctggaggggccatgagagtgcaagacacggggccgtggccggggcggggctacgggagcggggcgtggccggcccctgaggttactataggggaatgggccccggccaggtcccctctccttggggcagtgggaagacagcggggcccacgggccagagctgctacacgtaggcgtttctgccgtatttgccaaagctgctgtcgccttcttggtccgaggtggcgacgggcatcacggacacgggagcctggtagggccgccgggcgctggcggctgggtcctcgtcagagccgcagcagcaggcggagcagaggcagaggccacccaggatggagatcagtgaggcgctccaccccaggtagagggcggggcccagctcgtacttggttccggggtacaaggggtcgaagaagtcccgggtgatgttgaaggcgtaccaggagatggcaccatcccgcagatacctggggaccggaggacgacccca

SEQ ID NO: 209442 - DNA, 618 bp, Homo Sapiens
  misc_feature (479)..(479): n is a, c, g, or t
ttttttttttttttttttaacaaaccttttttttttttttattggagataaaaacagcgaagtcccacataccataccctacaagacacaaggtgcgcagacgagccttggctatgtaccggcgctgcaggaagaggctgtccgccgggcctgggctgctccagctacgcggggaggcggccccattgcaaagtgcagtttctccgcggaggtggcggtgggtcagtggcagagggccatggtttccatgttaaggaagcggacgtgcatcttggtctcaatgtcgatcccctgccagatcttcaggaagtcctcgaaggtgatcccctcgtacacctgatcaggctccatctgccccatgcacacgctggccgcctccatcatggccccgtcggcgatggagcgagcggactccttctcgatgtgagggtttcccgacagcagctcctcgaccactttacatttcgatattcttccanagtgatgcggccgtcgctgtccgagtcgtacatgtggaacagaaatctcagcttctccttccgggacagctccacctgttcctcgtccatggtggtgtcgatgggccggaagtaggacatgatggtcaggaagtcctcg

SEQ ID NO: 209443 - DNA, 692 bp, Homo Sapiens
  misc_feature (675)..(675): n is a, c, g, or t
ttttttttttttctttttaaatgcttttatttgccaaaagttttgggtgattttgaaatacattagacatcccattcattgaggaaaaagacagtttattccaaaacattctttaatagtcctaaactgattttgtctatcagagcaaaaggaacaaaggtaaaaatccacctgaaaaaagatctttgtatcatggaaattatgaagctggatttcttagacattaaagaaattcacagacccacatagtttaaaaatttaatttttaagattaaattttcacaacacattatgactgtaaatgagttacctgaataccaattattacctctagttatttttagcaagggagctggacttcactttacttaatgctagcttataaatttaactttgtaaaattatagtggaaatgtgtcctggctagctgcctctgcccaaagcaaatgtcatctcccctaagtgccacagttctatctccccgtcctctgagctccactgaaacttaccttgtatccttcttgtcccccacgccttctaaataagagtctcttgcatctatcaatatgtgtttgtggaagaaaggaaggtgcagaaaaataaatacgcatcatagtttaattaggaaagtaagggctttgaatcaaacccagctttgtatctcacttcatctanttattcatcatgtgaca

SEQ ID NO: 209444 - DNA, 654 bp, Homo Sapiens
ttttttttttttttttttcataattaattttactttattgcagtctaatttttaaaaatgttatcccaaatatgatgtacatggtaattctcagttacttcaaatacgcttcactcaacaatggaaatggcatgaaagtgagggctacttattcatttttatgaagaatattacataaaatgagcgtatgtgaaaaaatcagaaaatacagacactgacaagttaatcagtttatatctttgcacattatcagttgtgaaaaatcccaagatataaagcttttttaatcatagtatctctcagagagggtgtgggccttgtaccttgcaccaaagcacattttcctcatggaaaaatttcccaactgagtcttcctcttcttttaaattttagttgatgtcagtcataggatcaaaaggatcatgaggcatgtccctgttaatgaccagcttttcggttctatgtagagtcgatgggcccactttccgctccaggtccctcaatacttgaaaattctgtgtcaataagcggtttcagaaatttctcaaccttggttaatctttgtttcagtttctgctgcatggactcatactcagccaagattcgggcaaacctggtttgcaggaggtctactgacccctccattcgacctcg

SEQ ID NO: 209445 - DNA, 616 bp, Homo Sapiens
ttttttttttttttttttgattttaacaatgaatttcaggtttaatgattttttacctttcctctgaaagacagttgaaaaggacacaaatgattcacaacagaggtttatgtttgaggtgatcaccactaatacacactttgaaaagtaccatcaccatatatatatttgctttaaaaaaattatgacaagcttcaggtaaaaataatttttaaagggtccatttttcatttacgtacaatcagtacatcttatttacatatatgactggatctttattctattttcttcatataagatattttaactggtaggtaactgctctattctgtttttatagaaagactaaacaccttatttacaggcagttttgatgatgctagtttgtctccaaattacgtactgaatatagttaaaatcttaatgaataacataaaaattaagatccggtattaacagactattttatgggtcacactggatattcaaggagtcagctgcctagtgtgtgtcaattacagctgcaacaaaacagaaatcaagtgtggttctgaagaccttgaaaaagaagtctgacttctaagacattaaccactgcttaatactgctactgatg

SEQ ID NO: 209446 - DNA, 457 bp, Homo Sapiens
cttggttattttaatgacaaatgacagaccaataattgattcctcaataaaacaatggaagtcagaaagagtagaattgtacattcagaatgctggcagaaaataaccatcaacctagaattgggcactcagcaaaattatctttcaagaattaaagtatagaaataaaataatttccaggtacatggaaactgaatttaacatctacctacactttttaaaggaagttctaaaagatgtacttcagaaagaaaaattacttcagaaggagagtctgagatagaagtgatgggcaaagaaattgtaaacacatagttgaatctgagcaaacattacatgaaataacaccagacaacaaaagtatgtaagacgagaggtggatgacaaagttaaagaattctaaggtctctctttgtagttaagatatcaattaatagagttgacataattcaagtct

SEQ ID NO: 209447 - DNA, 565 bp, Homo Sapiens
  misc_feature (546)..(546): n is a, c, g, or t
ttttttttttttttttttcaaaattcatttttaatccttcattagttgccagttagaacaatgtatcatataagcttacaattaaatttaaatcctcttttgatgacataaatggattccagatctatgaatttgccgtatgtagacattcttttgttggaaaataaaacttaaagcattctatcaaattcacaatagtttgattacttcttacagatgtgcaatatcaagacaatcaccaacttcaatgacaattgttaaattatggaacatgtaataacaatctgtagcaactctggtctttcaagcttctaccttttgcttttgctctttgattttatctgccattaaaaaacaagttgcattcctgccttgtatgaaagaattctgaagctatcagaactgtcttcagataattgaagatggtaacttcaggtaactctagctggccaatttatatctttatttcattttattattttattttgaggcagagtttcactctttttatccaggctggtgtgcagtggctcacccttgtaatcnccctcgtgccgaattcttg

SEQ ID NO: 209448 - DNA, 466 bp, Homo Sapiens; identical to SEQ ID NO: 50116

SEQ ID NO: 209449 - DNA, 551 bp, Homo Sapiens
ttttttttttttttttttgatcaataggaattttattacttagcacaagtaaattctttaggggccaggatcagaaagcgttcttctgtaacttcttcatgttgaccagggacactgtatccagagatgttagaggagtgaaaatctctaggcactaaaactaaatatgttttagggtctcccaggataggttgcaaaggcacctacagttgaaatttttctaatctttcttctactagactgtgactctccagcttcccagtaaagacaagagagttatcaaggaatggggaaagagaaggacaggatgaatactggccattttcttctctttattttagaagaaagtggatgatcagctcactaccacatcaaaggtgccaactctctaaaacgtagactctgtgcagctttgaagcctggaagacaatacctgtattttattgaaatactgtccagcttcaaatggaacaatattgtatgtagaaattccaattactggtttgtcagtaggattcttagctctgtaaaacgccagtgcacctcgtgcc

SEQ ID NO: 209450 - DNA, 674 bp, Homo Sapiens
ttttttttttttttttttggtttgttgagtacagtcatgtttattgaaattgctgacatatttggatatgctgtcaaatcctagtgcttccagttcctggcagtgtgactttggtcagttacattctctaagccacttcctcctctataaaacagggatggttgtgtgaggactgagatgtatataaattatttggtagactgggcagcacacacaggctctgagtagattcccttttttctccctcatctcctccccttttagacagacatggacagatatgtctcaacgaccaaatgggtgaagatgctcagagcatcaaggggatggagatccagttcttgtgacagagactgagcaagtaggaggcaaagagaggtgctgatgattgctgtgagtcagagacagtgtgcagggccaggctttgggtcaggcactacacaaggtgggtcctgtccctggtttacatatgaggaggtcatggaggttcaggaaagtcacttatcttaggtcccaaaagtagccacagggaaggagtcaggctctgcagcctgaattcaggcccatgccttttctgttccctccagcatgctggaagcctgtgcaatttcactaggaatgtgcatctctcctctctgagttttcccctaagcctgtcatccctctcagtctct

SEQ ID NO: 209451 - DNA, 623 bp, Homo Sapiens
ttttttttttttttttttgccacaacgagatctttattaggctcctcgggggcggggcgcggagggaaagaaggggtggccaggcccaggccaggctgcaggctttggcgacctctcagagctgggagcggggtcccgaaggcgggtcagtcccggtcagggtgggctgcgggagcctcaggccacggggaagtagtgggggagccggctccggtagatgtcctcgtccttctcgaggaacacgcagatgatcagccggtccaccttgtccttgtgctgctccagccactctcgcagcgtggccagcacgatctcggcggccgcctcacaggggtagccaaacacgccggtggagatgcaggggaacgccaccgagcggagccggtgctccagcagcaggtccagactgctcaggtagcagctgcggagctcggcagcctggctggcgctgggctccccgtaggcgatgggccccactgtgtggatgacgtacttggccgggagccgatagccgccggtgatcttggccttgccagtcttacagctctgcagggtccggcactcgtcggtaagcagggggccggcggcccgatgaatgcagccgtccacgccaccgcctccga

SEQ ID NO: 209452 - DNA, 614 bp, Homo Sapiens
ttttttttttttttttttaaagatgaaaaaacatgctttatttgtttattccattgttcagcttctctttaaattctttccacatggacaaattgcttgacaacaaagtttacttagttttctaaacacttgggatcatctctaaaattaaaaaaattaatattaaatgttggaccaaggatttcaaccatgcagtatgttgcttctggggtctgctgtcctattccagccctagtgaatagttaatgccttgaactattcctatcaccacaggttgccaggccaccaaataacgaagccaatccaggatttgtccatacagaaaatgtgtgcgctcccagggattactgatcatcctcttcaaatcaactttctctttgcagtaagggcaagtctgctttttcccaacgatacaccaacctcggatgcagaattcatgaaagacatgattacaggaaagctggtaggtgttttcaatgagcccttcttcatcaagctccacaatgatcttctgcccacagactgcacagatattgtccgataagctccttgtaggcaaccggctgacactgtagaaccctatagtggaagccatgtagtctgagcagatctcg

SEQ ID NO: 209453 - DNA, 624 bp, Homo Sapiens
ttttttttttttttttttaatttacaaaggaaaagtttaataactcacagttcagcatggctggggatgcctcagaaaacttataatcatggcagatggggaaacaaacacacccttctccacgtggcagcaggaagtgccgaacaagagggaaaagccccttataaaaccatcagatctcgtgagaactcactcgctatcacgagaacagcacggaggtagccgccccgaggattaaattacctcccactgggtccctcccatgtcacgtggggattacgggaacaattcaagatgagatttggatggggacacagccaaaccctatcaactagggatttgttgacttaatgcacacgagccaaccataccccaacaaagcaggtactagccttatagtacacgtgaggaaactgaggaatgaggcatctcattcatgttgggaatattaattgaaaaacctgtcagctcctgtggcccttggagttccttgaaaataatgttatacgccaatacttattatagtactgtaaagatgcaccatatcccatatctcatttgtcagtggaaagaacacagatttggagccaggtaaaagtacctcttgctacctgtgacgtcttg

SEQ ID NO: 209454 - DNA, 370 bp, Homo Sapiens
ttttttttttttttttataccacttggttattctttattctcatgcattccaggatgagatcagagaatgaagagggtcccgaggacagcctgggagagaagcaccagccttcctattggcaagaaatgacccagtgctgggggtagtgaggggccctatgagggtgccggggtcatgcctggagctgctgctgactcctccagccagagccgcactggtctgagcgatcgggtgacacaggcttgaatttctcctgaagcgtttgtgttctctggcatcaatctccttcctctgtcttcctgaacatggccaaggcctccgccagcacaccatcagggtctaggattttgacctcaggaatggggaact

SEQ ID NO: 209455 - DNA, 599 bp, Homo Sapiens
ttttttttttttttttttcatttaacacagcctttattttctgtttcaaaacagaatttccaggaaacaaaacaaaatacttacaatggttgggtacaaatgaaataaaaatcacagtttcaaagaaccaaaataagacagttgctgaaaggcagatcacttggtttaccaaaaaaaaaaaaaggttaatgtcaaaaaggattaaaattaactttaacaacattctatataatgctacattccccaattaagaaaggagagttcacatatacaactaaatgttaagtgtggagaagagggtgaaattctgcatacttcatagtaaattatgctgaaagtttattaattgcataaacttcctgagtggctcccatgctgcactaggtctacatgcttaatatatcaaacaaattatagctttaggtgattgagcatgacagaccttgaacaactgcactttccagttagtcactgtatctgctgagggtatgttctggaccgcaaacctcaatctcaaatcttaagttacagtggaaaagaaattcaacttaaaaaaaaactagaggatgacaagcacgcatttaggagtttattttata

SEQ ID NO: 209456 - DNA, 597 bp, Homo Sapiens
ttttttttttttttttttaatttcatttttccctttattttttcattttttagttgtgaaagtagttcgtatatatttagaaaaatgtttacttttgttaataaactattcatttaataaatgtattaactgagcactaaataatgctcaaaggatcatagatttttttcctccacactaagcccatgggacatgaagaatatctgggtgcttccaggatataaggaaggaatgtgccttttcccactcctggcctttgggtactgtcctgagcatgggatgctggggcaggggctgccttggccatcttgccatctgcatggcagtggcagaggatagctgagggaaaagactagagagccctggagctgccgccttgctctgtgagaagccccttccaatggagatttgaattacttgcaacttgttggcctgcctctccaccccacccccatctgttccctagctctcaactttggctgcacactggaatctcctactcatgctccctgactatgccctcacagattctgatttgactggtcctgggtgcaacggggctggcatgagacgactaaaaactcccaggtgaatcaa

SEQ ID NO: 209457 - DNA, 684 bp, Homo Sapiens
  misc_feature (560)..(560): n is a, c, g, or t
tttttttttttttttgttgttgttggtgtttattgattcacctataaaccacatatcaggctatctcttaagaatacaacagactccaatcccattggaagtgagttcgcagcctgctctctgggctctctccctctttccggccttttctctttcacacggaagagcttacctataaaaggctcttgataagctctcttgacccccaagtttcctgggcagggttatttggatagtgctattactccaactttcttcttcctctttctgtcataaatcaaagccacctgacactttgcgcccgacttttaaaacaaacaggtctcctttctttcttcagccaggtcacaagaactgcctatgggctaatcttgagagcatgtttttcttggtctgaggcctgggagaaagagcagagtggatatctcaaaggcaactagagcccgagattgtcacttgaaaatgcgccagcctgggtgtaaaaagaatccctcttttgtctctcctcagttgggagagccgaggtgttcctcagaggttaacactggattatacacggngtgcggcgcgggggagctcgcccttcttttctgctcccattttgtttgtggcttctgcccattcagatttatgctgggctcaatgcccttttctcctcactcagggttacatcccagattcaca

SEQ ID NO: 209458 - DNA, 392 bp, Homo Sapiens
acagttcactgcctttcaaagtgtttattcagaattatactagaagtaatttcatgaaaataatattgtgcaaccttttcattctatttcaatgaaaagcaggcatgaacattactcaagcttgaaattttactgaaaagtaaacatttcaattaagcttaaggaaaaaagaaatttcctgagatttccagtgtatacagaagtgtctttccattaagaataattaaaagttaaaaaatatgctgataacttgccacaattgacagaatgcagattaataggataaatggcaaacaaatctataaaaatgcatgcagagaatcagagtgatcaccccaccaagcaatggggtatagatggtgatatacccttgtccttaggggagagggaga

SEQ ID NO: 209459 - DNA, 669 bp, Homo Sapiens
  misc_feature (81)..(81): n is a, c, g, or t
ttttttttttttttttttcctgacaatgcaatattattcagccataaaaagaatgaagtactgatgcacgctacaccatgngaggagacttgaaaacatactagtgaaagaagacagacactatatgattccatttatatgaaatatccagaataggtaaagccatagcaacaaagtagattggtgggtttccaggagctgggaggagggggaaataggaacacttgcataatggttatgggtcttgcttttggggtgatgaaaatatttggaactagacagagatgctggttgcacatcatgatatctagttgccacggaattgtttactttaaaatggttaatttcatcttatataaatttcacctccatcaaaatgaaatattttagaaagagaaagttaaaaaaaaaaaacctatgtgttccacgaacacaacccaacccttgctctcattcccatttcctgttccctgtgtgcccattgtcagtgccatggtatcaaatcagtgcccattgtcagtgccatggtatcaaatcagcttatgatgcagattactgttgggcttgttcttgatcctacttgtgagatacatcctctagaattccatgacttaagctgagtctacacagtagcaaccacatgttttagcagagaacgatgggtgtttc

SEQ ID NO: 209460 - DNA, 653 bp, Homo Sapiens
  misc_feature (53)..(53): n is a, c, g, or t
  misc_feature (640)..(640): n is a, c, g, or t
ttttttttttttttttttattatcttggtttttttttttaatatagaattttntggaaattcctcctttcaacaagcagtatacagaatcccagcttcgagcaggagctggctatatccttgaagatttcaatgaagcccaggtgaggagtttctttgtgtaacctaatatagtggcaatgataagagccaacttgctgtgttgagaagaggcctgggaggggttggggaacctggataaagtagccagagatttcaggaactgagaaactgccaaaatgtttttgcatgaaatagaatttttgttgtgtatagggaagagaaggtaggaccttgggttagttaatggctatggttctgttgctgggacaaaagaagattgatgtttatgtttagtagtagaaacccctattagggttgctgatttttagcctgaaaggctgagttcataggttttggttgtccgttgaggatttaggtcctcagtatgctgcaggtgaggcagagagaacatctatggaaattacttgggccttccagtgagaagagtggccttgggcaggatagactaaatcacattttgggtagtagttgggagtcttcagatctgctcttcatggctcattatggctgctgcttangagctttccacag

SEQ ID NO: 209461 - DNA, 639 bp, Homo Sapiens
  misc_feature (567)..(567): n is a, c, g, or t
ttttttttttttttttttcatttaaatattctttatttttttgcattatgaaatagtttatacagaaagatacagagagtaagaactgactcatatactcacagccagctttatcaaattttaagaattggctatacagtatttgcttatttttaaaagaaatgaataattaaaggtattttcatttgcatcctttccccaatctcagttgtctttctccctgcaggtcaccactgttctgaatctgatgattattttattaattcttttagatcctttttatatagtatttagccatgacaaaaatacataacactaatttgcatgttttgaaattgtacgttatactgtattatataaaatagtctgtagttcaatttcattaatactatttttgaggtttacccatgttgacagaaatatctctagttattcattttagtttgcattctatcttgtatttaacctaatggttagattgctttcaacttctcattctcacagttctgcaatggaccatcatatgtatctccttgaaacacgaggagagactatgtagaggtttanacatggaattgctgggtcaaagattattcacatcttcaactttactagacattgccagattatgctaaacac

SEQ ID NO: 209462 - DNA, 616 bp, Homo Sapiens
  misc_feature (554)..(554): n is a, c, g, or t
  misc_feature (584)..(584): n is a, c, g, or t
ttttttttttttttttttcaattttagcagattaggttttattttaactgcatcgggaaaaccacatagataaaactatcttattgtttatcctttacaattttaaagcaaaacaaacacaacagcattttatttatttaattgtagtgcatccgtattttcacatattggattttaaaaaatctctgcttacaagaagaaacgaaagcccaaacaagaatgtagtatgtaagcgagtacaaaatgagatagagtagaaggcaaactgattacctaagtcccaagaagtcaggaaacaaagtgtaactcagatccaagcagggttaaccaggaaaggctgcatttctgtgtgtacctgctgctttcttcagcactgcactgtacaacattctggggcagcctgagagatgcagactatacaaatatagtctcacatctcaccaccaaagcacaaacattccagaggcatggaagccaaagtgtaaacacttctgcagtcaactcttaactattcacatttacagaaggaaagagcaaaggcaccactaatccangaatagataaatggaaagatcactgagttnagctttggatacactcttgcatataggtgtat

SEQ ID NO: 209463 - DNA, 690 bp, Homo Sapiens
ttttttttttttttttttaaacactaagcttattccagatgggcagtgtatgggacagtaaaaacagataaggcaccagtagtacgtaaattgacaacctgttggatattaagtatgaaaacaatttatacaatatttgttaatattaaccatatgatctgatgtcatggccaaatttggatggaagcccaccagagaagcaagcaagagcaagaagtgagcagaatttccaagctgggagaatatcttaagtatatattaggagccatttagcacacagtgggtcttctataaatatttgctcgtgattagccaatgttacgatctccctagtttatattaaacttttttcctcttgcattattcttttctgaatacctgttctgccctgaggatataaattaggttccctgctcttaataaggagcccaggaaaagaggaaaacaagatcatttattaccttccaatatgataaatgtaacgacgtacaagatgcctgggaagatggggaaagtacgtaagtcagctttggtgaaacacaggagcccttccagggagagcgcttggtttagctttactataccaagaatttgggttttatccttaaagagataggatgggctgctacgactggatgttaggcagaggaatgaaactgtccagtttacaggctggaaagggccagcgga

SEQ ID NO: 209464 - DNA, 639 bp, Homo Sapiens
  misc_feature (567)..(567): n is a, c, g, or t
ttttttttttttttttttcaattgtacagccattttattaactccaaacacccattcaagcaactgagtaggcattcctgcaatacagaattgaacattcaaaaccaagggcacatggacaattcatataattttgataatctgaaggcacagtcacataattataggtagagacaattccatgaaaaggccattataagtctttgatacagaagggaatgaacactgattgaatacctatgcacttataacttggtatcattcaatgctcacaataaccctacaaagttgggaggaaactgaagaccacagaggttaagtaatttatccaggaccacccagtttgtaaatgacagagctgggatttgaaatcaggcctgtgtgacttcaaagactgtattattttctctataccactttgcctttatggttaatggaaatgttctaaataatcacttggaacttttggatactggcgactccatttcattagtatacggggaccgctgaaagctgtggctttataggatagggagagtcatagcatatcaggtctcattatgccanacaaaatcaggattgactctagtaaatagtagggagcccacaaagctgttgtagagtgagtttcggaaggaa

SEQ ID NO: 209465 - DNA, 649 bp, Homo Sapiens
  misc_feature (598)..(598): n is a, c, g, or t
ttttttttttttttttaaaataagccagaacttgtttattgaaaaagcactaaaacaaaatattttggtaagatcgagcaagaagacacaaatagagaatggaaaaatgaaaattttataaacgcagttgaaatttgaaaatgtgaggatattatgaacaattcatttgaaaactgacaaaatacacaaattactacgagtattttactcaaactaattgaagatagacatgtaatcccacagctcctaaatagtttcagtaattaaaaatttcccccaaagaaaagccttttatagtaagttccactaacctgttccatatggtaccaattcttaatctaacagttaacagttcattcaaaataatggcaacaatgtatttgattttgtacacatatatttgtgtgtgtgtgtgtgtgtgtgtgtgtgtatagtcgtcatacttaggggtgcttatatataagtggaatgacagcaatgatacatgggataggaaagagaaattaggattattttgttactataaggtacactgcccaagaagcagtatattattatttgaaagaggggttgcattatttgtaaatctatactgcanacacaagggcaaccacaagaaaaccacgctagaagagagaataataaaatg

SEQ ID NO: 209466 - DNA, 604 bp, Homo Sapiens
ttttttttttttttttttaaacaaggataggttggggaggtgggaaaagagtgtcaacaggagaaagggggctgggaattctgattctctaaaagagatgagtagtcctagaaagagaacaggggcacgatttgcaggcaataaaatgttagtctgggctcaggagagctgcagttacacagccccctccatccaggaccgtgatgagtagttcctcgcagggctccctggaaacgtgggtagtagatgaacaggcctccaagcagctgctgacataatcattgtgggggcactcccctcactgtcacgtggcctaagctttcctgaacaatgagggaagggtgaaggggagggctctgtggaaaagctgagacaagatcgtgttataaattaacccagaaaaatcgaaacaggaaaacaaaagattcaggagcctggaggccgggcgcggtggcctgtaatcccagcactttgggaggcccaggcaggcggatcacctgaggtagcgagttcgagaccagcctgaccaacatggagaaaccccgtctctattaaaaaaaaaaaaaaagattcaggagcttggattctccctcgtgccgaattc

SEQ ID NO: 209467 - DNA, 706 bp, Homo Sapiens
  misc_feature (329)..(329): n is a, c, g, or t
ttttttttttttttttttgcgtggttggtttttattaattatctggataacagcaaaaaaactgaaaataaagagagagagagatctgggtgttggtggttgcatttgttaaggaattgaagcagttcttgcccaggcaacctgcccccagccagaagactcaggggcaggccaagaacacaggcctccccctttcttcagctctctgaagtttccattgttcattgctctttggtggctgatagccttatctgcagctcacagtcggccaatcccagaggattagtgggtccggtttctgtataaattagggggcaggggtgctgtanaggcttcttatcgatgattgacgccgaggcccaggctgttgtcctcacaggagcaggcacctagcctctcctccagcagcagcacctggtcgctgagagattcgatccggtcaccccggccccacagctcagccacctgttctggctgcagctcttcaggcggcacgggcagcaccgctctgacccaagccccagcctgaccggcccactagaaaggaagagatgcctcagggtattgacagtgacgtctggcctcgccccacccagcaggcttggctcacctgctccagccgctccaagcgcctcgcagctcgtgaatctcctgcttcagagcgcgtcatctttttccgctcccggacggcacgctgagtatgctg

SEQ ID NO: 209468 - DNA, 696 bp, Homo Sapiens
  misc_feature (567)..(567): n is a, c, g, or t
  misc_feature (612)..(612): n is a, c, g, or t
ttttttttttttttttttgacatacaaaattttattctttatttattattattatttatttcttatgtgcacaaaagaaaaagaatcaaaacgaaccgacgcactgaaagtggccgaggagaccagaaccgtccggggacatttagcaggttaggcctgggcctgggtccggggtctctgcccggccagccccacaggactgggatgggccggacctcggcgccctcgccgccctcgccgccccgttcgggccactggagcctggctgggcgccgggttcccttaaacgattctcttttctctttttccttctcaaataaaaagggctcgcaggggagagagatctgggcgaggactccaagccttttcggatttgttcaatgatttttatttattttcactttattgactttgtttctgttatttcgagtcgtcacgatccacgggtgaggagacatgcagggcgcatcgccactaccgaaagagcaactacggggcgggacggggcggcccggccttcggccgcccggggcgcgcggggcacgcccgcgagggggcgagcccggnggctggagctgccacctcggatctagcctgcggagacagggcggncgggccaggtctggggagagagggcgaggaaagagcagagacagacagacaagagcgacagagacggagagagacagagacaga

SEQ ID NO: 209469 - DNA, 569 bp, Homo Sapiens
  misc_feature (508)..(508): n is a, c, g, or t
ttttttttttttttttttaaggaacaaaataatgtttttattaaaaattgtacccatagcacctctctgtcttcctacaagttgtttctttttttcttttaatgagatctgtttttctgcacaatttcagaaaaagttgtagggaacgtttagggacctgacggctccctaaaccagaaggtgacgcgggaaggagacgtgtcccagcgggcaggctcagctcatgagtttccacgttgtcctcacctttcagactggatccatgctaccaggacgctgacccacggggagccacacttaggtacgcagacgggttgctcgtcaggaggatagctacactgtgtgccaagaatgcgtaagaaataaaaaccatgctacgaaccattaggcaaacatcatgcttcagcccagtcacagttagatacaaacacggcctccgaagacctgtacagagtgagccacctcccggggctgtggaggcgcgttccgtgtgtggccatctgggtcncctctccctggggcccctcgttttttggctacagcattgagtgaagtgcgccttataaaag

SEQ ID NO: 209470 - DNA, 726 bp, Homo Sapiens
ttttttttttttttttttaagagtcagtatttattctgattaatattttacaaaattttgacatttaatttatgtaaggagggctaatttattaaacactttacaggtttttctttccacagaataacacggtaagtagcaaaataatacttggcacagttataaataaagaaaatataaaataaaaacatccatagcttaagtacaatgatgctgttttacgcccattaatatcaaataaattcctggaaacaacaaaaatatgaatgaaaaaaaactccaaggaagtaattcatgttcagtgctgagaattaagttcctatttgctaaaagtatccaattaagttgataagaactattcccaaaggttcaccatcatacacaactttagaactgggtttatagttggttccacacacaggacctacaaaataattaaacagatggtatactgctgcatagctggctcctgaccatctgaccatttctgagttatagatttcacaggtactacaagatggttactacaaaagcattcacattgctagtattttccatgtaattacacatctagaggtttgtctttttaactgaatgacatctcttttgcactgaaaatattgttccacaaacaaagaagatggtaacaacattcttagccaaactctgaaaaaacaccatagtctttaactgttgataaaatgtattcgataaaaatgcaactga

SEQ ID NO: 209471 - DNA, 386 bp, Homo Sapiens
ttttttttttttttttttatttgtaattaacaaatttatttacatttcctgaaccaaaattaattgtaaaatttaacaggaagggggtaacatgacctctaaggtgggctgtacacatagttgctctatttccaaactaataacttgagtcctcacccatagctgggcccccccttcttcctttgaaaggagacacagaatagcatcaggcttccggaagcttcaacatttaaagagacaactctttaaatgcatggacgcagagaagggtgagaagaatcacggtacaaattgtaatgaaagaaaaagtggccagagaatcgatagcaaacccatttctgtctccagattaatggcttggctgccagaaatggggggaggtcctt

SEQ ID NO: 209472 - DNA, 600 bp, Homo Sapiens
ttttttttttttttttttcctttgtaagaaggatttattagattatatggaaatggacacggtacagaaggtctgtggcacagtcagggttctgcaggaccccagagcatcagtagaaatgctggtgttccaccttccccagggccgcctttgcctgggcttcagagatgcagctgaggcctggcctccaaatgctgtgggcagtcctgcaggccatcctctgggcagactggcctgactcacggtgactattgtagtttctgtgaacctctgggttttggtcccactgttgtcgagagccttgaccaagtgtaaacgaatccattacggatgaaagttgcagccttggagggtgtcacagcagagaagaaagagcgggagcggagtttggcaggcgaacataagcgtggaccagcagctgcaagctgggaactgtcaggacagcatcttagtttggacagcaggtttccttctaaactggaggccaggagctcacagcagtggcttggctatgacaagcaggttttctagactgagtgaagcacagatgtccctagatatgctcctgacctaaaggagagacctgaaggaaacatgagc

SEQ ID NO: 209473 - DNA, 426 bp, Homo Sapiens
ttttttttttttttttttgaagggcatcactttattccaaagttgatcattagtgagggggatttttacagtcttctttccctcctccctcagctgcctcctggttagagatgctaacaagaattacgatggtcctaagatactggaggaagtaaaaaagttgaaggccctacatattttagttcacgtttggcatttcttggtctttaccctatgtaaggcaaggagaaaaagacatgaaatttaaattacagataaacacaagtgtattagtccattttcacactgctatcaagaattgcccaagactggataatttataaaggaaagaggtttaattgactcactgttccacatggctggggaggcctcaggaaacttacaatcatggcagacagtgaagaggaaccaaggcatcttcacaag

SEQ ID NO: 209474 - DNA, 451 bp, Homo Sapiens
ttttttttttttttttttcagtctattccccctgtctggaaggcccttcatcctactctcttggcctcttctaatttttttcagtggagtccaaagtactcataaacacattcattaaaaatgtaagaagccaaagggcaaaaaaaaaattttttttaatcagggatgaggagggaagctaagaattttaaaatagtaaatgaaaaatttagaaatatgtattttgtagaaaatagtagacttagcactaagatgaaatgtttttggtaaagtttttaatttgggagttttgctgattccttcttacccttcaggacaattcacagatatcaatcctttctggagttacccctgactccctcaacaccccaaaactctaaatgccacggtcatctgtttctatatcaaccttttaacatatttatggacaagattcactttaacctaagtg

SEQ ID NO: 209475 - DNA, 497 bp, Homo Sapiens
ttttttttttttttttataaaatttgaaggtgttattaaaggattaaaaaggaaacaaaaggattgtgataagaagcaaaaaaaaaacattttttttacataaccagaaaacaaattaaaaaattaaaatcccccaagaaaccaaattaactcatttttttagttaacttactaaatgttttggaacatacaaagtgcaaaatatcttttgcatccctttaagaaacacctgcctttctttggtaaagaatttcttgcaggaaagattccaaagtttgaagttccctccaacgatcccagcagaaatgtttctaacttctaagaatgtcctaagagaatgagctaaaacacagaaaatgttgaaagtcttatttagaatattaaaaactggaagcaatctaaaggtctaacagtggaagaatgatgtatttataatgtgaatatacatgtgatgtccaacaatttcaattctaagtatgaagagtaagccacaataa

SEQ ID NO: 209476 - DNA, 697 bp, Homo Sapiens
ttttttttttttttttctaaatctcaatcagttgtttattggttggcaaacaagtttcacttttacaacaaatattagtaatgaggtcatccaactttgagaccatacaaaatggatcataaattaaaaaaaaattatatgtgctgctaatttaccttttgtattcctacattactcaaaatcctgtcaaataaataaattttcctgttaataaacagaagacttttttttaaaaaaatcacttcaaaataatttgaccttccaatgcttacgagggagtgaatttcctctaaaaagtggtagtgcaggtgcccacttgttgatcagactgagcattcagcactttaatgcctatggaaaaccgtttttcacatgcagaagccccactagttctatagacaccttttgacttctagaatcatagctagtgtcctggtgatgaactgcttgccaaatatgctttgcattacaacagacgtgccctgtaaacataaaagtttgtcctgctctaatttgcaaaaaacactgttggaaatattctgactgcataaagatatatagtgagggaaggaagtctaattttatttattttgtttttttgtaaaaaataatttgtttgcattactagaaaatgattcttataaagtgatagttccatttatttattttttgccaggcgaattttaaaggaataaag

SEQ ID NO: 209477 - DNA, 637 bp, Homo Sapiens
ttttttttttttttttttggggaaacataatgtttttaatttcacacctcacagagcacagttgaatgcttcataacgacataaacaaaagttaggctaagcactgcagacgagttgggagggcaaagatagcttcccctgtggtctgcactccaggtttgcgagggaatatgtaactaacaaactgcttggctaaggccacagaaatgtgtttcctggtgttttggctgctgacgccagtcttctctgacaaagatgtgttaacactgggtgcaacaaactgaatctctttcctaagatcagtcaggaaaattcatgtcttatttcttcctggatttctttttggtggtgtcataagcacggatgacttcttcctgactaacagctccgtgttcttcttgagaaaaagcatacccatgcgggacgccctgctgcagggagctgccccggaacagcgtcgggggcgtcttccggcccagcctcttgatcaggcggtcgcgctcgttcagcctctttccattgctatcccgcagcaccgcttttcccaggactcgagacttggtttccagctcctgcacctcctccagcaatgtctttttgcaggtgtgcttggctgctctccatgccacatcttcaa

SEQ ID NO: 209478 - DNA, 638 bp, Homo Sapiens
tttttttttttttttgttggtatagaaatgtttaatacattaaatcttatgaggtaaaatacaaaaggtagtattcataaaagagctattttgttttatttcacttgaagttcttaagagaaaaacataagaggagatatagacagacctcatctgtaaactcatgttgctctttacaaaggaagagacccagcagcttttaagccagttagtggtagagacaggcaagagtcaccaaaaaaggtcattttagtattctgtttaatggaacttagaaagagactacatcgtggggttgggggagggggagggatagcattaggagatatacctaatgtaaatgacgagttaacgggtgcagcacaccaacatggcacatgtatacatatgtaacaaacctgcacgttgtgcacatgtaccctagaacttaaaagtataataaaaaaataaatagagactacaacttaggtatatttaagacacccaaaaacttgtggcttgtatgcttgaaacaagactaaggtaacaccaaaaatgtgtgggtgactgccaatctatgttagttcctcctgactacatctattttttagcactggggaaaggagtcacagcagcacagttcccctcgtgccgaattc

SEQ ID NO: 209479 - DNA, 664 bp, Homo Sapiens
ttttttttttttttttttcaaatgaaacattttattgtaaatagctcttcataggtattcctcgtgcttcactccccacccacccttgttttttttgtttgtttgttttgatcttttaaaatgatgtttattatcaggactagtgtttccatggggtgtggtgttacattaaaatgacccccctgcacagcaggggttgaatatttcattgtaactttggttccatgcccaagacacatctttgcttgatctgcagaaactagttccattgctgaactttttctttacacaatatatgtttatagttcttctcttctgatttgacatatacatgtttcattaaatgcagcatatattgtagattttcaacagggttgtgtaggaactgtcaagtaagaaaccttgaataatggctttaaaatacacagttgtagtcctggctacagggtagttcttagcttttgatctccctctcactggtgtaaacaattttgccatctttgaaggtttagaagcacttgtcttcctgggatcttatccatgttttcggttactctttaagaggcaccttgacatcaaggccatagaataaaggcaagagagaagaacaagaatagaaacagaaacttttcttctaagtcttttatttgtcttttctggatgt

SEQ ID NO: 209480 - DNA, 584 bp, Homo Sapiens
ttttttttttttttctttaaataaaaaatccataaatttattgcaaatctagaagtaccagaatgtcactaatacagaacagatcagcaatcttgtttgtattttcttccaaacatttaaaaccttgattattgacatactgaaattggcatacattttgttttcatgcagataacagaatagacatggagcagatccctcagaaatcagttataaatattaaattgtattgaacattcatagtaaaaaatatgtcgtaaagtgctgaagtcatgtaagtctgcaaaactgccacaagctcaaagttctcaagcagtgacagagatttgctacatccaccttgttttagattatgcctgtttttgacagacactttgtcatttcctcccccaccctccccaaagttttatagattgtcctatttctatggctgataagatgctctacaaaatgtagcaggtggtgatgaactatgccactttcatttcagtgcagagaaatattcaagcttgtgtgtacctgtaaccaaactaggcttgttatgtttttccccctgagttgtcataaattaacattaacgatga

SEQ ID NO: 209481 - DNA, 720 bp, Homo Sapiens; identical to SEQ ID NO: 50838

SEQ ID NO: 209482 - DNA, 784 bp, Homo Sapiens
ttttttttttttttttttcataaagaaagaaacggcaatgcaatttaaaaactggtaggccgtttaaaagagccggtttgacctctgacaaacccagccaagacaaggccccttggcccggctcgcgagtctttgtagagagcagagcttaccctgacgacgatggcgttttgtggttaaagtgacttgggcgcacccccaggacagggtctggtcccacacgttcacaccaggggggcgggaggggggacatcaaaaacagaccacatcctctgccagacgggctccaggagtagcggtttggacgagggacatttacaagcacagagtgcacaatagttttgttatttacaaatacacagcagtccttcaagttttcaagtttcataaaaaggaggaggggaggagaaagggggaaaaaaacaaaaacaaaaacaaaccgacgaaccaaacaaaaagaaaaagaaaaaccaaacactgaagaaaaataataaaccagattaacaacacaactgtatcgctccaaagacgacagagagttgacaggttcacacacggtttgcggtatgtacatcaattacagaggtggcgacgcaggggagagaggttcacactcgtgttttcacttgttagaggcgctcggccacacccagcacccatgtgtgccagcgcacacgtgcacacggcacccacgcacgggcacacgcgcacccacgctcgcttgcacacacgcccacacgcacagacacgcctgcgggcagcaggcgcaggggagcgcgtatca

SEQ ID NO: 209483 - DNA, 475 bp, Homo Sapiens
ttttttttttttttttttaagagttaatgagctgctgttttattgcttttgaatctacagaggcagcaatccttagatgggggccccagttttccaaagtgacactcaattttcccctccccccagtacaccacccttctggcctcagctttcagtttcctgtcttggctgcaactgtggaaatagtgaagatattgtgagacagaaagtcagtctggaacaaagaggtatacacctgctaagaaggtggcccagaagcctgattctagaagtcctaaaggctacagagcaccaccaccccacctgcccctaatgcattccatgggcctcaacctcttgggggaagaaaatatttcccaaggtctgttgtaaaaagaaaatagggaccaggcgcagtggctcacgcctgtaatcccaagcattttggaaggccaaggcaggcagattacttgaggtcaggagttcacctcgtgcc

SEQ ID NO: 209484 - DNA, 661 bp, Homo Sapiens
ttttttttttttttttttgctataaaattatctgggtttaattattatcaacatcagaactatagaacattaacgtactaaacctgtatttacaattacatgtacaaaaaaaaatgttctttgtgaggagcaattttcagcaaatctgacaaacagcaagagtcattcctattttgggtttgaaaagagaaatggaaatttccaagacgcccccctcctccctctcactccagtgaccctctgaacatcaatttgcaaaggcctgaggtagaaagggaggtattaacaatatcaggcactcattcttcccctcttatgaaagggatgaatttttaggaaccgttttccatcatttattatactgatgtgccatccatctgcatcattaggttcagtagttaccatgacaatatgatgcctacagcaatctaacttgatagccacatgccagaatgtgaaaaaataggaccagctaagaaagtgagagaaatataattaatctgaaccacattcaaaaaaatgtgcacaaaactaggaccaagagggaaactgctgaaatatcattgaagaggaaattataaagggcagcaataatcaagtttcagtataaaaactttgctaaatagagccatgtattggtctattactaagacaggaagta

SEQ ID NO: 209485 - DNA, 706 bp, Homo Sapiens
ttttttttttttttttttaacaaaaaaaccaaactttacttgcatttagccattaataaataatttacagtatgtacacgcggtgacactccacacaggtcgcagacacgtggacgcagtgaggggtccccacttccaagcagaacgtgagcaaacacaaccaaaataaagtgcttcactttttacttccaacatagggaccaactaaaaccagcagggagagggaggggccgggccccgagcgccctcccacccgcccacacacggttctggcagagggagcaggacctcttggagggagggggagacacacgttctgcagcctcctggccagtgtatgagaggtccctggggaacagcagaggggctgccgatgggtgggtagggtgtggagctgtagggctgctggcaggatcaccctccagggcctggctgcacttttgggagtgaagcctggctttgtgctgtgggcatagcagcacaggtgggactgttctgggcccctggatgagcaccctgggctgaaatgaggcgggagccagcggcaagtctctcctggctgtgtggccacagggcttaagggaagagattagaggttgaagaccctgccagggatgctcagagctgagagtcctaagaccctgctcctctccccagactccaaacgtggatggaccgggctgggggctcttggggttgtgaggag

SEQ ID NO: 209486 - DNA, 701 bp, Homo Sapiens
  misc_feature (631)..(631): n is a, c, g, or t
ttttttttttttttttttaggttctcaataaatgtttattccttttcctttctgctgcatttcaagaggttttgaaacaatggaaaagagcagaggtagttagcttgatgaaggggagagcatggtggaaaggatgttccaggttaggtgaggtgtctgcttgatggaaggagccagtaacaagggtgacttggagctttcaattccctgagaatgaatgctgtgttgataaggactgtagcagggttgaggaagtacccttggaaagaagaaagaggagcacacctctgccatcagcaaaaaggccagaggaggtgagagctatgtggagggagagaaagggaatctggcctgtgcttaactgacgtgagagccagactttgaactccagtggcttcatttaccactcatgtcatcttgggccaactgagatcacttttctaagcctctgcttcactggaatgttgtgaggcctaaatgagaagcatagagcctggcctgtggacatgtttttagtattggtggggagctgcacacctggtggcctccgtttctcccatggactaagtcatctgggtgggtgtggtgcttgaaagcagacactttggggatagagagccccccagggtanggttcttgcccagccgtatatcagctgtgagaccttgggcaagtgctctagtttctctgaaccttggttc

SEQ ID NO: 209487 - DNA, 520 bp, Homo Sapiens
ttttttttttttttttttgacctcaataaccatttatttctggcacagctttccctctctctctccaggtgaagtttgtgcaagcgtgagttaagagatttgatgaaattattcacccagatgtaagtgtcggtatgttattaatactttctccaagaacatgcacatcttcacctgggcttgctgctgccccacgtagtaaggatgcaacagtttgtggttctctagagagctttgccaccagttttgcagggagagggcttttagtgtcttagccatagtgacatgtaaacaattgatatgagagtttttcttgagaatgaatttttatacaaagaaaagggagaggaagagaacattgctggccttggaaatctcaaataaaaggctacgcatgggctcaatatatcatctcaatgaaatggaggtgacagaggatggaatccgtgaccttgaggatagctcagtggaatttgttccatcttatacagcggacgccgcacatcgatggggcagttct

SEQ ID NO: 209488 - DNA, 744 bp, Homo Sapiens
  misc_feature (718)..(718): n is a, c, g, or t
ttttttttttttttttatgtgttcaaaaaaatgttttttttattgaattgaatgggagctaaagtaggataaagtggagccaaattataaataggaatataggtaggagttcattcattcagtaaatatttattgaatgcttattgtgtccaggccctgttctcagctcttagaatacatccatgaacaaaccagataaaaacttctgcccttgcgcagcttatactctagatcgtaagggatgggattagcaataaatttacataaattcaaccatacctactggaaaaagacacatgcatggaaattattaatgctataagaatctcttgatatgcagtttgtatttttgtacttaatataagcataatatattcatacctacatatcactccacagggatttaaactttaagactacaaagagaaatttattggtaatttaggagattttcaaggaccattctgagcatgctcaattttgtccttaggcacggtctttaaaacctaaccaccttacaagttgtgactccactgtaccaaaatgaagactctgagacttttgggcaaaagaaccattttaagtatttgagtatgagaaagatgacaggatgaatccacattctctcagattaatctggtaacaaggaacaagaaagagtacattcatctgaatatacatggtcaggtaacagtggaattcacatcaagaatttttntaaaaaagaaacagttcatgacatgt

SEQ ID NO: 209489 - DNA, 714 bp, Homo Sapiens
  misc_feature (678)..(678): n is a, c, g, or t
ttttttttttttttttttcacctggcaaaggtttattgccttagtgatgacagaatgagcaaagtcacgcttgttaaggacccccccctccccaactgtgcctggcactttgccaacagcacaggactcaagacccatttcttaatcacatggcagttgggaggtagattctgctgttagtcccctttgacacacacagaaatggagaatgggcagcaggtgtgatgttggaggaagaccagggcccaggggcgggggctgcagcagtgacctggtgacccagggcctgggcaggactggaggccaaaggactggacttttaggctattgcagcccaggtaaacgaggctctcattggcagggcctggctccccaccaggccggcaggcagataggcgggcgaaagagaaggcagtatcccagggcccagctcagatcttctccacgtagtttcctgggaaaaggccctcctggccgtgaagccggcccttccaccagcccgagggatcttccatgaggatctcaatgacctcgttcacgttgaagctcagctcgtccacatcttggcccacgtactggtatagggcccggcacctgggaccatgtgtccgaggctggggcttgggtcggcccacaccaggcactggccgttgccccacgctgcgcttcctctgcatngcggccatgccctggtcaggcacgttgacctcgtgc

SEQ ID NO: 209490 - DNA, 706 bp, Homo Sapiens
  misc_feature (600)..(600): n is a, c, g, or t
ttttttttttttttttctgagcattaatttgggctttatttcaaagttaacactttagctatccaaagggtatttcgtgaagaaaaacagaacagtatcagagcatcaaagaggaggaaacactactagtttcctttccccaaaaaacttaaacttttatggtttagtggttcaacactagcttcacttcccagaggcttatataaagaactttctgttggtgttagcaccaaacaaggccattcgtatttctggcatcttttgcttggctgagagatccagtcggctttccaaggtatttgaaacctttattctctgattgccactgtagacctccacacctccagctgcattcacagccaggtatgcctctttatcaatctggacctccacatgtttctgggaaattgtcatgtactcggggatggctttttgtacagcagcctccaccaggaggaggtcttgtggccggcagcgtacaatcatcacaggttccagcagtcggagcagaccctggagcaccagtttatccagcagcccctggtagacctctgggtcctccacaatcctgctgagtctcagcttcgcctcactgagcanatctgagatgaggtcatttcgggctctcaggactttcagcctcgcctgattcctcatggtggacatcaggattttcttctgctgctctatctgcttctcctttttc

SEQ ID NO: 209491 - DNA, 592 bp, Homo Sapiens
  misc_feature (480)..(480): n is a, c, g, or t
  misc_feature (549)..(549): n is a, c, g, or t
ttttttttttttttttgtagagacggtgttttgccatgttgcccaggctggtcttggactcctgagctcaggtgatctgcctgtcttagcctcccaaagtgctgggattataggcatgagccaccacgcctggtctgtatgtgctttttaaaaagcctatcccatactgaattgtgggaacctatgaagtgtctcttaatgtcaattaaaagtaacagtggctgcagatattgatttctgaaagtacatgagaatttgtctctaactatggttgaaacaacaaaaccaaatctgaatcaggtagaggtctaccagacacaaactctgaaattaaacactaataggactgttactgggcaggggggactcctttgagtaaaaaggtaacatacagttttcctaggtggctggtgctctcccccaactttcatactggaacaagagttaggctcaggtttacatgatcctctactattcttnttgtgaagaatgacaactgagtcagttggttgagcttgaagtgttccagtcctaagggatcactctcancttatgtcatatattggtaagggcctacatgaggctcgttccg

SEQ ID NO: 209492 - DNA, 703 bp, Homo Sapiens
ttttttttttttttttttgacaccaattcatagcatttattgacatttccatttaaaatgctaggaaagctgtataaattgtaaacatggaaaccaaatacttgcataaattatttcaaaaactctacagcacattagaaaacagtgcagctattgaaggatagaaacataaaaccgacaaatagaagggaggggccgattattaaatcgtatacccatactgagatttcagtgcctgtttgaggaccagcaaaccatgattgtcaagtttaagttgcagtattgatgccacagttggcctcaatttgctctgcacatttcgtacattaacgctcataatctagggatgagtgtgcaggaagagccagaaaaacatggaccttgacaaaggagggagagacaagtcagtactccagggcagctctgccgagcaacctttcctattaacgctagccagactccctgcgtcccagagatgctccggaggagggcaaagtcgagggcgttcccactccccttttctgaaacaagtcctctggtgcttagagcaactgaatgaatgggtggagcctcagttcctctagtatctccctcttctttccccacatttgcaggaggaacagtacagcatatgcgacttgaacttggccctgtactattcccaacttgtacacttagggagtcacgttatgaatacttgaaa

SEQ ID NO: 209493 - DNA, 697 bp, Homo Sapiens
ttttttttttttttttttcacatggaggaaatttatttattacagggaaattggttatacaggcattagagggctgaaaagcaaaatacaaaggctgaaaaaccaaaagtcatctagaaataataacttcagaaagcagctaccacctctagggctggaggaacaaaaggaaaaatatgaagtaaccagaacttagaagcccagaattgcaaccacaatctttgtggaaggtagaaccatctggctgctgtggataatctctgagcgggtacagggggaatcactgaggctgattccagtagtgctgaaagaagctgaagtggcactgccactgctgggagaagtgtctctaggtgaagaagcattgctggtcctgtaagcaacattaacaagaacagaaaaaacaggaagcatattctctccttctgcctcccagtctctctctagtgacccctattggcagaactgaacaggaagcaagcttaaaaagaagtctgagaaacagtttgaggacaactagccccatcattacagggaagaagagtacagaaggtagatttagaggtgaggggcaataagtaaatgactcgcacagatggtgttcatgctcaatgtttctcttctgaacaattttcacatttggtgttaaagcacttctggccaggcgtggtggtttatgcctgtaatccatcacttc

SEQ ID NO: 209494 - DNA, 726 bp, Homo Sapiens
ttttttttttttttttttcaaaagcaaatgcttctaaactttattcacactcgagttgcatctctgcgccaccactgccaatgttttgtcatgtcacgggcagtcaaccaggagcagggaaggagagaccaggctgatttctgccttgttgggaacactgtcatggtgcctgtagatagtcactgaagaaacataaaagatgaaaacccaggctatgctctcaacagggcagaagctcccccattaagcccaagtctaggcagctgcttctctccacagggatggacctggccttgctgggaggaacgcccacaccaggacctctggaagcagtcccaagggcttcagctcacattatgttctttccatttggtgataaattcctaacgccttaccccatttgctaactggaatgcagagagcaaatgccacggttgaaacgctctccttcgtgaatcagctccttccccagggtgttttaagatttaggagtttcagttccccggtttaaaaggaaaagtaaaaaacaatccacagttgagcagttgatgtgcaaatcatcccaggaatccaactttctgtctcttgggccccaggctttcttccttgtgcacaacactctgcaaggaggcatgcagtaccttgcccacacgcttgccagtctccatcatctcgaagatgctctctgggtccaggctgcccttcccactttcctcatgcacgtca

SEQ ID NO: 209495 - DNA, 611 bp, Homo Sapiens
tttttttttttttttgttaaatatctaatcaaaatcttttattgaatttaatcagaagtatacagttttcgggatttttttccattgtaagagtagtatacaagtgaaaagttctgtgacatatatctggaccaactttctgaatttgcaaaatgaataacaaatatacaattctcattttatccagtgactttggccaacacgtaaaaaatacatcattccttttgatctcctgtgtatccctatagttatttcaagtaaagaataagaaagataaacaatgcatcaaactacagagcaacaaagagatttatagcagaaacactgattaaaatgatgaccatcccaaactgtggaagcagcagtttgcccaaggatgcagaaggatggcttttgggacctggaacaggaactggacctggagcaggtatttgggtgggttcaaggattttcacaccatggtcttcaagcttctggtttttctcaccatggtcttcaagcttccagtttttctcactatggtcttcaagcttctggtttttctcaccagggttgtagacatagatgggttgaaaatattctaggttctcaatacagttttcggtttttag

SEQ ID NO: 209496 - DNA, 685 bp, Homo Sapiens
ttttttttttttttttttcccccaccaccaaggtttttattccaaaacagttatttggctaaacgtgaaccgttaagatacgggatcaatggagttacaataaagacaatgaaagtgacaatttattaatacacagtaagttctaaaaggcatctttcaaaacaaaacttgatttcttttgtatttacattttttgtttcaagtcttagcaaaatgctaaaaggcctggcctagtcacaattactgacatccttctgggacacaattttctgggcctgtgttgaatgaggataaattatcttttctctaaaatgccacatgaaccctctctatattcccacatgaagaggaatggaaggtaattatttggccttttcttctgtttaggggaatgaactgaacgactcatttttttaaaatcacacttaaaagacacatgggcaaaaaagttccccaaaactactgtcttaccgaatttgagaagggaggtaatgtatgaagcttaacagctggcttcaaaagacacctttccaaagaaattgtactacctctattaacgtgtaaaccaccaaccaaaaaaaaataataagttactccatcaaacacgttattatccataaaaaagacttcaacattgtagtggaagatctatttaagcataaatagtactaagcaccaattacta

SEQ ID NO: 209497 - DNA, 742 bp, Homo Sapiens
ttttttttttttttttttaaaatattgctgttttatttggaccaaaaaacctatcctcaaaccttcagtcttttggccaaaagtttcgatctagtgaggattggatttgtcagcttttaatagggtatgtcaataacaaaagtcctgtctcccaggaggaaatagactatgccctgtgttggtggtgggggcctgtcctctgttccctaaaggatacgggggacaagccagaagctacttcttctcaagaaattaatatccctcatcccaaaaagtcaaccaacacgtgggaccccttagaccaccttcccccaccaaacaccactaacttccctccccctccagtagctgcaactgccccagacccttccccagctcactttgtttcttccccttataatcctgacttggggtctccctagcctgaatgcccttccccaggaagacttcaacgtgagatagaacagtgtaaaaaagatatccaaaactttcctttccccactacctcgagaatctgctccaacgatctttcccttaagggaagtgcttctaggaggagggggcatttgttttgtgaacgccctgttaaccagttcagaagtccgaagcctaaaaagggctcaaaccactcttagacaatccctatggagtagcagatcaaattgatcaatttctaggaccccagttgtatacttggactgagttaatgtccatcctaggcatcctcttttcgggagaggaa

SEQ ID NO: 209498 - DNA, 706 bp, Homo Sapiens
ttttttttttttttttttcagactttgtagctgtttttattattaatattatcttctcctttaagcatccctttaagggtgaaatgaaatccaaccatttacagagaaaatgatttcagaatgtacatattgattttcccttacaaaaaaaataatactattattgatgtccttacattatgcatttcccagggtcctgccttctgcttggacaagtcccgtctccccacccagactctccctgttgcccccaaagatctcccatgctgcccctgggaaccgacgtgacccatgggtggataaggccagccatgcttcccggatgcttggcatggacaggcctccttgggtctaggggtctcagggccagttattcccggggagaaaggtggacatgggacatggcagcagtgtgccggtggtcacattcagcttggtttcccttcatattgagggagtggccctgggttcttctgcccccaccaaattcccagtgtatgctgtgatgatatgtgaaactcttcaatcctgtgccctggcccccagccctctgacagctgccctctccaccgatggccaggccttcactcctgctgctgtgaacaggacctgccccaccaggtctgtgaggaaggcagagcctggcagctctgagctgctcctatcttccttcgcttagccctgagctggtgccctggaggggcat

SEQ ID NO: 209499 - DNA, 608 bp, Homo Sapiens
ttttttttttttttttttcatttttaaaaatgttttaatattttaaactaaaatttttaacttttttgtttgaagctttaacacatgtacagtcacgcgaccaccaccacagtccacacacagaatggctccacccccaaatctccttagtgccacacctgaccacggcgccttcccccaaccttccttcacctcttcccacccccatggtgcccaatgtgtcagtctctccccattgtcactgcagaggagtatttcactgcatagatataccacagtttaccagttcacccaatgaaaggcatttgaatttcagcttttgatgattatgaataaggcatcagtaaacatttacgtacagtttttatgtggacttaagtttttcattctctaaatacccaacagtgggattgctgggtcatgtggctgtgtacattgaactttataggaaaccaccatgccgtcttccatttccagcaggtccacaccctggcagcttggggcaccaccagcattctcttgcactgcggctgtggtgcaggtgcctcgtgtcctgcgtggtggctgaatctgcatttcctggtggctggtggtgtcaagcctcttct

SEQ ID NO: 209500 - DNA, 608 bp, Homo Sapiens
ttttttttttttttttttaacaagaggcccttgttttcgttttgtgttgggccccacaaattctatagctggtcctgcacacagcactaggctccacatctgtagaggcagaatgtttgaatataataagatcacaaaaccagagcagcatctggattctcttcagtgaattaggccaggcttcattcttgccgctttctaaacctccccatttaaaggacacaaataaattcaaatttagggctcagattttgtatctaaacagttaaacagactcatatgattctaatctacacaaaagggaaaaaaccaaagcatttcaaaagtttctgcagattttcctcaaggtttggattgccaattcatgaccaccatgaccagatgttacaatccatcaagacaaccaccaaaatggctgctgaacttgaagatggcacacagaaaacaaatgtaaagtgttaccctggagaaaactatctctaaccagactctccaaaggcaaaaaatgggcttttgttgtcctctggatcggtttggtttagcagtacaagggtaaaaataacccgcttaacggcctcaacaagtcatgcctattccaactcttttgt

SEQ ID NO: 209501 - DNA, 580 bp, Homo Sapiens
  misc_feature (510)..(510): n is a, c, g, or t
ttttttttttttttttctgaaaatcagccttttaatctagttgaacccaacgagtgggggaaagaactaaaacatttttttcccttcattttgattataagaataacgggtcagaggtgtctcttccataggaaactgacatcccctatgtcctcagagttgtttttttttttttttcttcaaaaaaatgcataaaagaatttcaactcatgtgcatgccacacatttccatctatagtgacaaatcataggggcttgcttgggaagtaccatctttcgtggaaggtgccgggtgtataaaggagtacctttgggcagcctggtcccaaagctgaaagcccaggtctggtgcctctggggcaggttggctgcccaggggagaaaccaaatcattaatgtgtccacctagtgggggctgcgagattgtcgaagcctggctgagagctgatcgatatgcattctgggatgttcccctgagggaagagactgcagctctcctaggaggggtcnccaagatccctggactcccaccccttgcctgactctgttcttggggctcccagggaaaggggaactgcac

SEQ ID NO: 209502 - DNA, 722 bp, Homo Sapiens
  misc_feature (650)..(650): n is a, c, g, or t
ttttttttttttttttctaaaaaatcagaacaaaactaatttattatagttctgtcttcattatacaccacgtgttggtgagttaaacacaacaaaattgtcttttcttttaaaagtgtctactaaagataaaaagaataagataacaattaacatgtagtttgttacattaaaaaatctgatatacatatttctattgcctgttagcttgttctaagcctctttaactattacaacaaaaaaaaaaaaaggaaagaaaaagaaaattcattgtttaaaggcaaacattcaattcagttgatacaacattacagtacagtcaactaacatcattcaacgaaggtaacaagtctagccttagcttcttgagttaaaagtctatagaccagattgctacaaaagtttcaatgctgcttcaaaaccgtatgttagctttttggaggacaaagtactttctacggatggcttcagaaggggtcatgctactggtaaaagcacaggggaaccccatcctgtcattaatcattttattgagcactgtagttagaacagcattattgagtttagcacaacaactaaaataaaataataatataataacaatcataataatgataagaataaaaaccaaacacagactggaagcctanagtcgctggcagccgtgtcaaacccttgcgatacgctatactaaaaaaatttgaaatatccacccgtcctct

SEQ ID NO: 209503 - DNA, 651 bp, Homo Sapiens
ttttttttttttttttttcagcataaactatcaagcaattcatggttgttcttgtttcatctgtccccatgtggatttataatcagatatttcgttaaaggcataaagtcttcagattgcatttctaaaatttaaagaccgtttcgtaactataagattaacatacaaaataaaaattgtatgtgtacaaaattataaatgttttatatacagtactgaattgtatcaactgctgcttatttaagacagattgctatcagcatacaaaatatatttgatgtttagtaggtgtgtctttgagtttattaacctatacgtactgcttacttctttaatatttatgtaacgttgctaaactgcttgtccattagcttcccacattgtgctgggcgcagtggctcatgcctgtaatcccagcactttgggaggccgaggcggacggatcacgaggtcaggagatcgagaccacggtgaaaccccgtctctactaaaaatacaaaaaattagccgggcatggtggcgggcgcctgtagtcccagctactgggaaggctgaggcaggagaatggcgtgaacctgagaggcggagcttgcagtgagccgagatcgtgccattgcactgcagcctgggtgacagagcgagactccgtct

SEQ ID NO: 209504 - DNA, 712 bp, Homo Sapiens
ttttttttttttttttgtatctagtaaggatttattataacaaatattgaataatttattatttaaatggttagaataaagttcaagggaaatataagcaaactacttctttctctaacaatctgaaatacatgggggtttaaaccttctatatttttgtcaaaatagtaattaaccatagatgacagatgctgctccctagtcaatggagggtctcaaattttactctgcatctcattgggaaggaaatataaatttttaaaatagaattaacttagggaaaggcatcagtgctgcaactcttagcaccaaatgttttttcttggagcaccaaatgctctaaggaaaacattccaagtatcaaagttttcagatagataaatatttatggatcaaatccataaagaacagacattgttatgaaatatatatagatgccttcaaaactttctttctaggcagagtagacacataagttaggagtcatttcccacttaattgtttttgcaaccttatgcaacacgaatggattatgtgcaagacttattcatttttacacagaaagtagatcttgactgacatggtgtccagaaaatcaaacagaagctatttctctatataaaatataaagtgccattaaatttatagaaatggcttcattttaatctttttttggtggaaaagtatagggatttttgatctggtcttttgg

SEQ ID NO: 209505 - DNA, 604 bp, Homo Sapiens; identical to SEQ ID NO: 57898

SEQ ID NO: 209506 - DNA, 614 bp, Homo Sapiens
ttttttttttttttttttactttaacaaaagatttatttgaaacaggtttgcgcagacatacaccagtcaacaggattgatcaaagccacaaatcactaaattctcccaaaacttctagaaatacaagtagatgccctccgtttgtattcactccaggagggaacccagtgcactgtaatgtgctgctgtaatttaacaaccagaggacattaataggacgtgaaaacggtaacacttctagagggaggcaacaaaaaaccccacacaccatagaagcaccccccacgctgctgggagccaattaaacgtgcccccacagccctgcttccctctgcatcaccagattaaaacctccccatcacaaacaatatttaagcaatccaggcacagatgtgacagcagacaggagagcacgtggctttgctcgcatgagaaagacgccacaaagatgatgcatttgaacgacaattcagtgaccggcagccccatcctgcagctggccctgctgcagctgcctgcgtggcccttgagagggaggctcaaagggaagcggcattgcacaggcctgaacttggccatctcgggcaacgggggaaagtggggcgggagggga

SEQ ID NO: 209507 - DNA, 675 bp, Homo Sapiens
ttttttttttttttttttggttccatcggtgattttaagaatttcatttaggctacagaggttcataggaggactcagagttccaggccctccaaggagactctggcctgtaactgatttaatcccagggcagtaaggtgagcagcatgtaaccccttgtcaaataaggcagtggaataagggttgacagaggccagcactcaggctgtgctgctcaatgacagtgaactcttccaggcacagatgatgagggtctgttgctctcagacttggaacatgagaacagcaactgtctcttgtccattaagaaaaaaaagccaaatttcttctctgggcaatatccaagcccaaggtgtaagaagaaagcttccttacactttcagcactcaaagtgggattccaaaaatcgtaactacaaaacatgcagctaagcaggctctagcaagtccagaaacatctccacatggtcagaccacatgacaaatgttgcttttggtttgatcaaacctggagctggtcagttgcacagctaatccatggcatccatgatgtcttccaggcttctcttgatttttacaccaacctttagccaaacttcactgagggcctgaagagacttgattgggaaggccatggacatgccaatagacccaagacccatgctagggaacagtg

SEQ ID NO: 209508 - DNA, 756 bp, Homo Sapiens
  misc_feature (695)..(695): n is a, c, g, or t
ttttttttttttttttttagggtccttcataaaattttattaatggcaccttaagtgtaaacactatggagaaactgccagaagaatgacgactcagcagaaaatacatgtcttttgctataagtaagtaatgagaaaacaagagccaaatgtttccatctttaaagttggtttgcttacccttcaactttgacattcatttggaaaatgaggacattttatataccaagctgtatctcaactgctcactacattgcagtataataagctatgttcaaacagcagttggagaaggatgctgtcagccccagttaaatatccaaacatatgtcaccaagcacttacaatgagttcagaatcccgtcccatggaaatgacggttcggttcacggtccggagaagtttctccatgataatctggacgtgcctctgggttggccccacgtccttcctgtacagcacctccaggatgtggctgagcagctgacagcaggcctccaggtcctcctgtctctccagatggtacttgagctgatcggtcatcatgggaagcaggatctctctgcagtcatgctgtgtgaagaggtcactgtggacgatttcgatcaagcagtagagtttctggatggtcagcaagcccatgggaacattgaggatgaatttcagtaacattttgctgagctctttgggatcanacaccatttcacatcgttgacgatcgttggtaagtattcagtgctgccccttcaccggacg

SEQ ID NO: 209509 - DNA, 689 bp, Homo Sapiens
ttttttttttttttttttggagcaaggaaagggactttatttcggagagccagcaaaccaagaagatggtggactaatgtcctaaagaaccgtcttaaaattatgcgggctttgccttgtcttttatgtttaggtcgggggaaaggaaggggctgacaaccgcagacatctggacaccagcaagggtccaggggaggtttgcagaacttctttgtccttggctaacagtctgtcatgtgacaatagccaaacctcctcattcctataaatctttaacaaaaacagttagctgtttacatgcttcccctttaatcccagagttagttttgcaaacggcatgattcctgtttttgcgttttatgtcagtgctctaaagttatcctagcctaggtgcaggaataggtaaaggccccttaaacaaaaatggagttagttatgttagttcttctgctgtttcatggttacaagacacagaagagaacccttgcatcaaaacaggatgagattaggttgttgttcctataaaaaaccatgtggttgttttttggccccctcttcaatattcggggtgtgctgacgaagcgagcagcagctctggagccataaaccaccatctcatctcagcccagggcatgctgggagaggccaggaaaatcacttctcttctttgctttaactgtcttttctgt

SEQ ID NO: 209510 - DNA, 705 bp, Homo Sapiens
  misc_feature (648)..(648): n is a, c, g, or t
ttttttttttttttttttggtagagatgtgagtctctctatattgcccaggctggtcttgaactcctgggatcaagtgatcctcccaccttgtgttttaacgggtttggcacatgcatcccggtgcactgtaagagcctagcaaatagaaagtgttactggaatcatttagtgtgaaatcttacagcacccactctaataccagctccaagaagagggggatgtgcacctactttgtgctgtggggtatcccaagtgtccagaacaatgcctggcacatgtagacgtttaataaatacttgcatacatgaatgaatcctctatgtggcagatttttaaacaccgcaggaaagacagctcagactcctcccccgacccagcagaaagtttacctttcagggtagctacagcctctcccacttgacgcaggaggaaagccccgtcttccacgtctttcagagtaaccaatcggctggctgccgtggagtccttcttcaagtcttcaacaaagtcttccaactcgctgcgggagcaaggacaccagcacatagagctgaacacgaggcctcacagaggaagaggaggggccgagtgcccgtctcagcctctgattttgtgtagagccccagctcctcccccctgcctttcntgtggtggtggtggaggggggtcgctcatcttttaacagtggctgggaacattttgc

SEQ ID NO: 209511 - DNA, 446 bp, Homo Sapiens
taatcaaggattatcatgggcaggctatctagcctctctttgtccatttcctcatctacaagtatcaggtggaacggtgaatggagggtcattaaacaagtcaccaagtaattgatcctcatctgggttacatgaagaacaacacagaagttctcccataagagggacagttccagcccccagagaattccctggagttgatccctggggtctgaacaccaaagatggcaacccaggggaatgtcctgagatacccacagtgagcgcagagacttaatattcagagctaagatcaaagtaagagaagtaactttagcagccagagagaaatgtagttaaaataaatgatgcttcacataggccagcaagaagagaaatcagaattgggatatttgaagggtcactcagtttaaaagaagtgattgtttcaaccaattatcttgggt

SEQ ID NO: 209512 - DNA, 614 bp, Homo Sapiens
tttttttttttattttttccatactataatttaaaatgtatttattgcatcatattctttggcacgtataaagtatatggcatcaagtatatggctcagtatggtttgttgcacatcatagtagagataactgcaacacagggaaactagatccaaggtgctgggtctaagaataggatgctctcttggcctctgccaactagccgtaacctttcatcttcatctctttcttccctgtgttcctagcgttagttcttcacaggcaccttttatttcctcttcctacatttagatcaaattctgtttcttcttcagacataaaatcttgaaggtgtaacctatcttgcctactcctaagtctctgaggctagttggtaccatatcttcctacataaagagacagagatttttccattaggtgtattttcattttattttcacccgcaaacctctagtattggggcctagagaaaatgaaccctagcattaaaatataaaatgttaatcgaagagttcaacgtagccttactttgtctgaaaagagttctcagacaaatgaacactaatgtgtaaggagataatatacatacacacacacacacacacctcgtgcc

SEQ ID NO: 209513 - DNA, 678 bp, Homo Sapiens
  misc_feature (602)..(602): n is a, c, g, or t
ttttttttttttttttttgacaagaatattttttattattgaaaaatacacaaaggtgaaaggttgctgagcagctgattttccatagtacaacagagtattataagaaagagggaaatgtatctgttatatatggcagtttacatttctaaggcatttaggcttaagagcactaggtcttgcacagctaggtgcattgtcttgagtttaaatatactgaggcacaccaggcaggcaaaggattcaaaactatacattaaaacttgttcatgcatttgtgtcttaggattttattccctaccctcctcattcatttttttcccacatgggttttggagttgttcatagaacactggaaataatcgactcttcaagagtttgtttacaatgacaacaccaatgggacacaccaaacagaactacttcacagatacattctgtctcttaccaaaatgaagctccagtaagaaaaacactgatttgcaaaggcacagtggagacaggtttaatgcattaaatataacatgaatcattcacaataacaagtttcgtgtttcagggaacttttgttaatacaacacagttggtcacacaaaatacanatgcttctgttgatttgtcttggcactcagatacatcaacagtgctaacagtttaacagctttgttctcatctgac

SEQ ID NO: 209514 - DNA, 708 bp, Homo Sapiens
ttttttttttttttctttaaaaacgttgatgctgtgacagtgcaaacagcattgattttattgctcgacttcggcatgggcacatacatagttaatttttaaaaaccatttatacagatgttactgataaagctcatgtaacaaatgaatgaaaatacaaagaatatcaaagctaaaacactctgtaataaatacaaatacaatgaaaatgataaaactttgtttttaaagtcagtctgagagaagaatattacataaagtgaactaattacatctagaaataaaacaactcagcatttggaacaatcatcctaacatgttaaataccacaaatggcacccgttgactgtacgcttagaaaacaagcagaaggagccactctcccaaactaaggatggttggaacagcctctaactcccaacaatccaatcagtccaatgcactggaaattcaaagcccagatttagtgttgtaaagtaaagcgaattacattgtatttgaaagaagagaatcttgtgctccggactgtaaatacatgaaagaaaaaaaggcttggtaaaaaacccattcggggcaacaaactatgtgcaaaacacaatgtacactatacactatacactatgcactatttaaaaactacaccaagatacaaggccctctgaggcaggacttacctctctgtactgcctatgagctctacaaaggaat

SEQ ID NO: 209515 - DNA, 744 bp, Homo Sapiens
  misc_feature (687)..(687): n is a, c, g, or t
  misc_feature (732)..(732): n is a, c, g, or t
ttttttttttttttttttagtagagacagggtttcatcacataagtcaggctggtttcgaactcctgacctcaagcgatccgcctgcctcagcctcccaaagtgctgagattagaggcataagccaccatgctcggtgacatttcacttttgaaaatttaagacttaccttctcagagcaactgtacaagcaatgtacaaataaaggatgataacatcagcaccaaactacacacttattcattcctgggttaattctgtggctcctatgactttatttcttcattttactttctcatctacttgtactttgttagcctgttgtacttataaccataagccatcttacatccttttgggaaaaaagatttacttatttggaatcaatcgctggcacccaagtgaatatacacaaccaacaaaaacccttttagagaactccaagagcacttcaatatgcccttccaggagataagtaaggtgaataaattaagagaaatcttggttgtgacagtccccggtaatacaattagtggcaaaacttttgagtcctttgatgatcatttctaacatataagcatgacagcacaactggaagagctgcagtcactggtactcagacgtggacttacctaaaacagagccggtaaggccaaagagaccttctagatgcttcgttgctagacanaccccactctccatttacctgaaggcacacagtaggtttctgcanactcaattattc

SEQ ID NO: 209516 - DNA, 600 bp, Homo Sapiens
ttttttttttttttttttagatgtttgcatcctttgtattaaaattattttgaaggggttgcctcattggatggctttttttttttcctccagggagaaggggagaaatgtacttggaaattaatgtatgtttacatctctttgcaaattcctgtacatagagatatattttttaagtgtgaatgtaacaacatactgtgaattccatcttggttacaaatgagactccttcagtcagttatccaaataaaagcagttctgaaactatccctttctttgttatgggtggaaggtggggctccaggccttcgcagtctgtggcttataaaatgtgcagaggccctccttccaaaccctggggacgcgggagaggcctggctgcagctcacagcagccacagccaaccccactgcctcccaaggcactctgggtggatccgcacagctgcctgccaagccagcctgcccccatcctgtgcctgccttggtttcctttggaggacctggttgagttccaaaccagtttgaaactttgaagccttgctgcgtagaacgcacacaggaacccgggggcttggatttgaaaccctttccacttctg

SEQ ID NO: 209517 - DNA, 589 bp, Homo Sapiens
ttttttttttttttttttcaaagttgagcattaaaatatacttagaactctatagttggaaaaaagaaatggttaaatgtggaagccacttatttaatatgttcttttaagagagaaacaaggttttataaaaagcatgagaaatatataaatttaagcaaatcacttatgatctaaagatagcacaagtgaaggcctcacttctaggatgttgcaagcaaggtaccaatgctgccagacccaagaagagttttagcaggaaaggttacacttggtttgatttttaaagccaaagcaagaattatgagtcttaaaccaaatatactaacttgggccatggggcagagtaacttggataaagacggtatcattgcctgtgaaaggaaacaagaaaaagtagatttttttctttcattgatatattcaactcatctgcaaaaatttgtattatgatgaaaatgttattgtcattgtcgttttaaagaatgctgtaacagtttatagtaaaacctcattactacttacttttgagaagaaaaaatgatatcatattgggaatttaagattcctttgacctttacttgagttc

SEQ ID NO: 209518 - DNA, 740 bp, Homo Sapiens
  misc_feature (722)..(722): n is a, c, g, or t
ttttttttttttttttgtgactcaatgtcatgttcacatggaagacaacagacaatatcgacatagtctaaaacaatacttccagggcaggtgcagctccctcatgggcctgttctaaaccagcctctaggagttgatccaaacaagacgactacagaaacccccaacaaaacgtgccacgaccacatagcatctgaaaggcaaaacaagacgctggatgttgactttaacatataaaaatactgtaacaaaatgaaatacaaatatatattagaatctgtaagtattctgtataaagagatacttttgcggttaggctaccagcaggcaaagaggagacaaagtccagccttttccacttcctgacaccttcaccgggagccccggccctgttgccagtggtgttgcaaggccacagctccctccggacgcaccctgctgtatctcttcatgcctaaaatgcagagcgaactaggggtcttcacaaagggggacaagatgtggagagaggacttctcagaggggtgattttgcagtagccaccttccggactttcaagcggagtgtgaataggcaacgtgagtgctgactcaggtccttagcaactcgctggctgatggccaagttggagaaaaagttgatcctggggcacacagctctcacatcatctcatggtggattccaatcctcagactgcactgaggtcagcgctgctgtgctangaggctgggcatgtggtg

SEQ ID NO: 209519 - DNA, 694 bp, Homo Sapiens
  misc_feature (601)..(601): n is a, c, g, or t
ttttttttttttttttttaaggaatatctgtccaaggggtatggtttgttatggtcgtgtcatagatactggagaaggagcgatttgtgggtagtgtctcatggtacagtggaaacagctcagtcacagggtgtgaatttgagtcctggctctgctttgtgactgggcttgagaactctgggctgacctataaaaacctgacattgggggttgaattaaaccagtgggtttgtccccatgagaagtcatggctaaactatgcatagaaaacgactggaaagaaacattaacagtgactatctttgcacagtggaacaggagtatgttttattcacctctttatactttcaaaaatattttaaagcagtttctaaaatagcccttaaaatcaagaacaaaagtgttattgaaacaagcaaaaatatcttgaaccatgctatacctaatgggtttgcatctgctgtggctgaggtttccccagcagagtttggtacatggcagcaccaggctgcctaccaggccttgtgccaagggctaccagcaggactcaagctggaaccccgatgggaaaggacccacaggctggtcaaacaggtgtttntaagggcctggggaaaggccagctgcccctggctaggtagttaaaactgtgtatgccttcccttgtacaatgtgggactttggtggaactgcc

SEQ ID NO: 209520 - DNA, 720 bp, Homo Sapiens
tttttttttttttttttctaacaaaatgattattttattgctataatacacagcagatacaaaagtacctttagcaaatacataaatcagcagttattatggcaaaactactagtttaacttaggtttttcccaaaagaagctacttactttgaaaataaaactagaaatcagattattgggctgctacttaatgcataataatttacaaaatgaagaagtcaggttaaaaggctttgcacagctattgttcacatttacagccttggctcaaaccctggtctctgaccaaagaaagatctgcttataaccatatattccaaggctcagccccttttctctatctttctttgatggtagatttcagagtaagcagtggcagaacagcaattacttaaagctacagctttgcagtacactttaaggtcacatgattgggcatttgttccaccagacttgggtaaaacaagtgtgttcatttcaacatcaaagtcaaggtctgcatcgggtgagtgcaggacggaccgtacagttcaagctgccccttgcaccctgacgcccagagcctggagagcctgcacagaatattctgttgagagtgagttactgagtcctcagggtgcagcctgggcccagcagaagagtgatcacctgggcttcctgcactgtgagctgctgccaaggcactgtttgggtgtgtctggcagctcacccccagcag

SEQ ID NO: 209521 - DNA, 653 bp, Homo Sapiens
tttttttttttttttagtcaaaaaggacttcatttaattagtggtatgtaaagactcttgcatagaaaaaggttacaaagtaatgcaaaaaagactaggtacagtaatttcaaaacaaatatttaaaagtataattttgcataacgtttaacattctcataatgtttattgctttctccacacagtagagaaatgaagtgcataatacatgctgtgtctcttatcttttaaacaaaaactctcacgtgcttgatttcagcatattaagagattattttgtcattaaacgaaatcgaaaaaaacaaaaccacaaccccattacatagcactagtttaggcatgggcaaaaataacttatgtacatcccattgcatacattcatcttgttttgggatcaaatgcaatcactaacttgacaaagagctttaaaaattgtagcttttctcttcctagtgctccctccttgcttcatcacctccagaaatgtaacttctcccaaagggtgacaagaatagatgttgcatcattaggagaaaatgaagaggataaatatataaaaatagtcctaatgaaactgaataaattaaaccaaactcctacaaactggagagttttcaagttggcatgaattaaataccctctggtggacacat

SEQ ID NO: 209522 - DNA, 640 bp, Homo Sapiens
  misc_feature (580)..(580): n is a, c, g, or t
ttttttttttttttttttggaagagccaatgtttttatttaataaagtcctgattaacagcatattataacataaaatgttggctttctaaaacgggcttgaacttttacacaatctgttttgaacactggcatgcacacctgtgtacatatatactgataggagctctggttctaattcttaatttcaaaaaattttgataaaactaaaatgttaaatgtacactctaatgaaatcactgctataactaacaccaaccagatggcttgtattccttggaaaattctttaaagcattttgaattagagtaataactttgttatttagagaactccctctaatggtcgattaaaggcagcactttgacccaatgcagtgtttccctaatttgcctaatggtaagaagcactgaggagcttgttaagagtactgctctccagggcctaccccagtgtttctgaatctaaatctctagaggtgaaagtgggaatctgcctgaacccaagcaattcctgtaatcaggtaagtttccaagctcactctagtatacggcaaatgggttttgaaactcgacatttanaaagaccataggtgggtagaattagttcatttggtcagttttcattttacaatctttttt

SEQ ID NO: 209523 - DNA, 742 bp, Homo Sapiens
  misc_feature (689)..(689): n is a, c, g, or t
ttttttttttttttttttccctagaaattggggcagagtacacccatttattggaaaatgagaagtcctgtgtgtgcagagaaattttaaagaaaagatcaggggataatccatccattaagaattctccattaagaatactcattataggtttaattaatcacaatgatggatatctttaacattaggcaataattgacagttttatagtggtgagactatcatcacccaaaatacaatttttaaaggtcatattcacttttcctttcaacatcataaaatcttgaatgaccacaagtagagctcaacagagaataatcaggcaaaaaatcaggaatgttcatcatcgaaggtttgactatgtcctcggttgatactcataaatttaaatatggtaggtagaaaagaaataacacacagatttgtcaaccatatgtaacagaatagttcagttcagcaaggggaattcagaattctttctctgctggctgagcctgtatgtcagccaacaacatccacttagtctcaggtgacaacagtgccagttaattagcttttgtttatgttttgactattgatagacttaaattatattcatattattatgcaaaacaaacacatagaaagtcttgcctttgatctaaatacaggcacttctttgttgcaatgatgtttgaactgtgtatcanaataaaaaacttacagtaagccaggcataaaaagtagatcatctaaatcagat

SEQ ID NO: 209524 - DNA, 721 bp, Homo Sapiens
  misc_feature (648)..(648): n is a, c, g, or t
ttttttttttttttttttgatgctgacatattatttataatagggatgtaattacccaaaaataaaagtattaacaaacagaatccaatccaccaggagcaagtaaagtctatctccggaaagcaaagacggttcaacattagagaatctgttagtacaactcactacatgaagagactaaaaaagggaaactttgggcatctcaaaagataggcccctaacaagcaactggtaaatttaatatttagtcctaattttaaagcacacacaaccacaagatattcagaaagctaaaaatagtcagaaacttccttaacctgtaacaaacattgtatttaatgcatgagaacagatattagcaaattttcccgtaaaagctcagatggtgaatattctaggtttttcgggcaataccgcctctgtctggactatttaacaccattgctgtggcgtgacagtagccatcagacaatatgtagaaaaatgtgtgtaactgtgttccaataaaactttatttacaagaagagaccattggctggatttggccccccggccaccagtttggaaacccctgcattagaatcattcgcattagtcagaaacaagagaaagacgcttgagtcctggccaacatgataatatacacanagtataaatattagaaaggcagagacacaactataattatttgcataattatatgactgtttacctaaaaagt

SEQ ID NO: 209525 - DNA, 730 bp, Homo Sapiens
ttttttttttttttttttgatgggaacatatttaataaccaaggttctaagcaaagttctgaaaagaaaactttttgtagtaaatatgctagcatagacaagttccttgtgttttccaacaggtttgcttcaaaatcaatccttacagcttcaagaacaggagaaactcttaacaaagaaaggtcagcaaatttattaccacaaattctaagatattgctcttctcttacctgcctagaggcagcgggatggactacatgacctcctggagtcccagccagttctgggagactgttaagtccgggatgtgtgggagctttttaaggactgatcattggctctgaggacacttcaactagttagccttctatcttgaggtatataaactgtgaaaaagggtttctattctctctgaaagcacatgtctgtgttgaacatttcaataaatttattttgaactcaggatttcatgtcaatttttacacacttgattttccaaatcacatccaactccccagccccaaaccacatagcagtccagagtcaactcactgttagccctagagagtctactgtccatgtttcctgagaattcactgtgtatacagaggggcaatagctcctcacctgtccactacacacgaccttttgttttctcttcacaatcattgggcataaatatatagataaggcagaaatttttatgctcacagagtatggataagacatg

SEQ ID NO: 209526 - DNA, 732 bp, Homo Sapiens
  misc_feature (637)..(637): n is a, c, g, or t
ttttttttttttttttttcctgaatactttttatcgcagttggttgaatccgtggatgagggctgactataagcctctgtaagtgttagctattgttaattattgtcttcctctctctaaggggttccccagccctggatctggcctgctccgccttgcgaaggccccacagcttgcttacctcagcaactcacagcggaagtgtgacaaacgttcataggcaaatgtcaggtcagatgtcaacttgttgctccacagcctttcggcaacagcccctgctctgggcctggaggaaaaggggcatgtgccagattgggccctgtattccctgcaaaggtgctggacatccacaggctgctacctcttgtctaggcaccctggactcactcaggccaaaggaagtgatcaataccttgttatgagccacagccaggttggatggctcccagagagttctacggctcagctccaccttcattaaaatgtgggtagcaatcccactctcttcctctctcaaagatacgggaataagaataaaccttaaagccatcattaaccacaatgacagtggcagcagcagaggtccttaaaatgtaaactttgcacacccaaccatacttggtaaggctgcagtganaacagcagagggaagccttattacaggaatcatggatgcttgtgctgggtcttgagcaatcacctatgttctccaggctcattatctctctggga

SEQ ID NO: 209527 - DNA, 689 bp, Homo Sapiens
tttttttttttttattttgaggatttgtttccgttttatttttcgtcaatatttttcactgcatttttcacatcaacagagttgggtttagggttccccaggagagcaagggagatggatgggtccctcccaggggtgcgaggaagagggctacgtccagcatgtggggagtgagggacaagggcacagggcacacactcatacactgggcactggagaaggcagtcttttgagcacagacaccaaagagttaaacagtcaccacctggtacagtgttacaaaatggggagagtgaccacagggttggggcactggacgcagcatgacgaaggtgaattttgattttcttttttgttattttcacttttttccttttaacatttttttaaacattttacaaacatctaaaaactacaacacgtcacagctacagtggggtgaggggagggcaccaaagaaagcagccacacagagtagggtgggatggggcagcctaacctacagaggctattgtgtggaagggtaaaatggggaaactgaggcttctagtccctgcattaggggtccctcactcactgcccaacctctccccactcagaggagctgccaggagggcccctgcttcctgcctctgccccagctctttgtgctttttgatctgctggtttgaccagatgcctggtttctt

SEQ ID NO: 209528 - DNA, 733 bp, Homo Sapiens
  misc_feature (718)..(718): n is a, c, g, or t
ttttttttttttttttttaaattaaattcgaatctagtttatttgcagaattttacttaaccagttatcatttcttcctgtttctcaccattatataaaaacttaccctttgtacaagtaggaaaaatgtggaacaatgaataagtagtgaatattgcacatttaatgtccaaaataaagttgtggtttttaaaggtcacactagatatgtgggaagaaaacgagttgaacacacttaagtatgtgtctccacataagtgattttaaactattgaaagaaaaataaattctatcagtgctcaatgagagacagtacatctgtacattaaaaaataaaagttataatcaacaacattccttcgcaatttcattatcccaaaagaggatcagtagtataattattttttttttcaagttattttcatcaggaatcaggaacctaccagagtgaaggaaacctcaaatacagctactcctggacactgatgcccgaggcatgctgtggaaaccggaccaaaatgaagtctgcgttagtaagtctagaactttacccagcacaacccagacacaaatggaagatggtagaaggggatactttcttttaatcaacacacttatttcccaacattatattctccattttgcttaataagacaaagttaactgatcagaaaaatgatcagctactatctcaaaatgagctgtacagttggcccanaatgaagagcaggca

SEQ ID NO: 209529 - DNA, 728 bp, Homo Sapiens
  misc_feature (474)..(474): n is a, c, g, or t
  misc_feature (532)..(532): n is a, c, g, or t
  misc_feature (547)..(547): n is a, c, g, or t
  misc_feature (717)..(717): n is a, c, g, or t
ttttttttttttttttttgacattttcacagggtgtgttttcatttgcctttggcactaatgggtctctggaacgttccatcctggccggggaggtcagggcctgggcggccagggcccatttcgagaaagcaggttttcctttgtggcatgcttatttcaagcaccattttccctcctggttatacttgaaatggggctcggtgttgggaggtttcaaatgtggacattccgggcaaggggcctcatgaactctgtggacattctgggcaaggggcctcatgaactctgaaggttgagcttggaaggacggacacaggtcttggcagcctgagtgggtacaaacgctgatttttctggagtcagtcctctcctgctgatgggctgagagagccccccaggccctgtgtcccttctcagaggacctcagccccccagtgcctgggccacggatgggctgggggctggggcccanggcctcgcatcctacaagggcccaagggctgaaatggggctggggtccctggatctangggatgagggcccanaacgaggctggggtctggggttcagtggagcaatgaccaggaatcaggctgcgatctgtagtccaggtgtctggcgtcagacagcaccctcctgtacacggcacagctgtactgcagggttagggacaggatttactgccaccaacggaagcgttgattccaagtctcanacaccgcccca

SEQ ID NO: 209530 - DNA, 671 bp, Homo Sapiens
  misc_feature (564)..(564): n is a, c, g, or t
ttttttttttttttttttgaacataaaaattctttatttaacctaatccagccagtattgagatagtttgctatattaaaaacaagacgtttaaaaaaattacagcaaagttagcaaggcagtgactaattaagtcactaagtttaattttatattcttcacagtcatttcataatcatgtaatggtaaacaatattttcagccactttggagataagttaacttttgaaaagaatagaattctagtagtcgtcattgaattttataaaagaggtttaaaacattaaagtttccagaaataacacagtaaagaaatatgaaaataaactggaaaataaaatatacccacccatccgaaaaatctacatcatctctttcatttgtccccaatgcctttcttttacctctccatttacttttcctagagtgcaaacagattacttagcaattaagaaacaactactgctttgtaggggcgattttgagcctaagtgctgctgttcctttaatctctcagttaatcctagaaatagtcttctgagataaacattatttgcatttcanagattaagaaaactgcagttgagagaaagtcaaatcctttagccaaaatcatacatacagttattgaaagctgaactatgatttgaacccaggtctatccaacttta

SEQ ID NO: 209531 - DNA, 698 bp, Homo Sapiens
ttttttttttttttgtttcaataaggaatatttattaagaagacatgttaacatgcttagatacaaagtaaaaacacatgccaatctcagtgaactataaagaaaaaaataagaacaaaattgttttcagagaaatttttgtgttttataggcatcacatgtccatttgcatactagaaaattattagcattgataaacttttttttttcagtcttaaagtctttttaaagtaactttttggaaatgtgaagttcacaatacaaaatttgcattgaagtctgaatgtaaattatagacttctccaagtgtttgagaatagaaatgtgattgaagatttgcattcccagatgctgcctacagcagtttcctttcaagaaatcaaatgttcttcattatcacatgataaggataagtttttggaggaaaatttttagggcacattaattcttggagagtactataatttttagttaatatgagcaagtaaatctttatgtcaatcaccaaaaatttagcttttccaaagaatatttcttcatgcctgaaaataaaattctatcaagtctatgtatttctataattagatgtataagtctaataagatcatctaaaatattaataatgacaactaccacatattgaccacttactctgtgctaggcaccaagctaagcattcacatacatcatcccattta

SEQ ID NO: 209532 - DNA, 718 bp, Homo Sapiens
ttttttttttttttttgtcattcaccagatatatttgaagtctaagctctttgagctatacacgtgcacaaatgattcagttggtggaaatcttccccttccccttcattgttaaagttttcaaacttaaaatagtgctaaagagatttgcataatgtgcgtcatggaaatgctgaggcgattctgactttcacagtgctaggaggttcccttgcaacacttcaaggagtctttccatttcttatcgttctcctaggaaaagcccctcttttcccccctccccaaacccaacctagtgaaagaattacttgatctgagacaggttaacattgacacagagcaataagttttactaagactaactccagaggccatacacttcattgtgtttcttttatgactacacagaatggtcatttcaacttttactaagttgttaaaaatgtcagatgtgtcttttaaaaaacatttaaaaatcattttcaaatactttctctcatctagatttctttagaacctgcattctggaaattcagggtagcttaaaaaatcaagtcaaatgacccacagatgattgagaagagtcagctttgaaaggctggatgctgcagtgctctgcatctgaatagcggagcctactatttcttccactagaggacacatttctccactactaagtctgtagtcgtttatcatcaatgaaaaaccaaaaacctcc

SEQ ID NO: 209533 - DNA, 683 bp, Homo Sapiens
  misc_feature (662)..(662): n is a, c, g, or t
ttttttttttttttttttcataaaacaaaatttatctttaatttgtaagtgtcaacagcagtacaaaagatggagtgatgacaactagattagggtagagaggacagtcttgaggtaaatgagcataaataggcagttcttatagacactcccctaaggggcctgagccccatcacggcatatacattatcacccaaagatggcatgttgaacatatcaggaaagcaccttgtgcaaaaaggaaaaaaaaaaagtagctaaggtgccaacatacaccaggatagataaagacagtgtgtctttcaattttgtcttttcccttaattatgaggcagaggaggggaagactttgaaaagtaccactgaaagattattcaatgttgagctttatctcacgtcaatactgcacaacaaaatccaagaagtttgtgtatgcaacaaagctaagaacaatgattcattcctgtaaatttgaagagattttttttatttttcccatttctttaatccttagcaaactttttattattattattatcaagaggagagtgtgagaaagatgtgatggcaacccttaaggtcatttaaaaactttacactggactgtacaagatttttttttgataaactatttacattttcagactttcaaacatattcanagcagcattagacactagttt

SEQ ID NO: 209534 - DNA, 765 bp, Homo Sapiens
  misc_feature (694)..(694): n is a, c, g, or t
  misc_feature (741)..(741): n is a, c, g, or t
ttttttttttttttttttggacaagaaaataagggtttattcaaagccacaaagggaagcagcatgtgatgcccagtactatactcacaacaaattttccctctagaaagaaaccaactgaattctttgttttttatattggtagaaatgcagtagaaaatagaaattaagtgaaggaaatatacacaatgtcttaaaattagtatactaacttataaaactggaacagaatcagttttaggcatgcatgattttctttcaaacagtaatattttcttgtaaaattactgaataataaagcatgtgtgaacagtcattttcattttctagtatcctgcacaagtataactatacattttaaaaatctatattgaagtgaacaatctaggatgtttactaatacaaaggtgttaatctcacatcataaaatgtcatgtaataaaacaatcttcacagtatttgttctaaaaagtggttacagcccatgtccaaatacctatatggagagttaactgagttaactttagaaaataaagagcagaaatataaatataccatgtgttttataattaatattaaacttgatgctgtttcatattttgataagaataccagtatgctaaagtacataagagaatgaacaatttttactttaaaaaaattaaggtatccatctcaatcacacctgcttcanaggtacaagacaaccagcagaagtttctttaagatcatgtgaatggntctcgggacattctgtgtcctctg

SEQ ID NO: 209535 - DNA, 692 bp, Homo Sapiens
  misc_feature (681)..(681): n is a, c, g, or t
ttttttttttttttttttaattttagctttgatgacaaaaacaatgctgggaggagagtgagagcaccaagttgaacccacgtggaccagctttgacgatgaagctacaggcagccaagtcaactcacacatagagaaagtggaaaaagaacagaaaagcaggagacagaaacaaaaacatgcaggagagggtgattctgttccatgatcttggctcagtgctccagggttcctaatgtttcagcaaaaagaaaatcactgtaatgaaatgtaatgagaccctttgacactgaggaagtgacagctcaggcttggccttctaccacacacctataatctgtgacttgcaacagaacttttcccgaagagcgcagtcctccctgagcaaaatggctagggcctacgccgtgatttgctgctctggaatgggacacacatgttgctaatccttgcaaaaccagctgaagaaccattttcctcctgagaattttcttctgttcactgctaattttggctactttagttgctttgtttctcctccacttaagtaaatattcctcgagttgatgtgccaaacctctcttttggaataacagaaggtttaacacatatatgctcatagggacagcgctttcacacgttactgacagcttcatagacatcatttctatttctcctcangacaagctaag

SEQ ID NO: 209536 - DNA, 728 bp, Homo Sapiens
  misc_feature (135)..(135): n is a, c, g, or t
  misc_feature (692)..(692): n is a, c, g, or t
  misc_feature (695)..(695): n is a, c, g, or t
ttttttttttttttttttgatatttttggcgttttattaaaaatggaaaaagttgttttagtgagcactcatggtgctttctcccctcctcccccaggcagaccccaaaagtgtcagggaaaggcaggccccctnggaggggtgcggtggggctgaagcaggggctgctatggctaccagaggtgagctggtgatgtgagctgagttgtcacatgacactctccaccacgacgaccttgctgctctcggacactggggtcagggtggtcaggcccctgacatctgcgtcctgagctcggtactccaagtggtggaggccccagatgggctgggtcaggtgctgccagcgctcagccatggtgcccttggccctgaggaggcagcccaggaggtgcagcggcacgcacagcatggaggacagggcgaaggcccagcccatggcctcaccccaccacgggtacacgtaggtgttgttgtagaccagcggctcgtagtacacaacgttgaagatgaagatgcccatgcagaccagcggggtgaagaaggaccagcaccatttcatccaggggcaaggtcggtacccgatcatacaggcaatgtcgtccatgaagcggtcagctccgtacacccaggccaccaccacgcactcccaaaaggcctgccagagcagggtggtgccgctggccgagtantantcaaacagctggaagacgtacatcccgccatca

SEQ ID NO: 209537 - DNA, 635 bp, Homo Sapiens
ttttttttttttttttttccaattttaacatagaactttattgaaaacacagactcaaatagagaaccatatatttaaacaacgaatagcagggtagcttacttaggtgacacagttcattgaaaacttaatactgaaaaataccgcaatctggacagcaagacaaatatcaacaaatgtgttttcagttttgatattcatttggcatccacaaaatgatccagctcaaaacaagagtttgacaaagttaacatcagcattaaaaaatataagttacaacaaaaaaacagactgtgaacaccaaagcactactcagggctctttgggaacataaggctgatcagcggcaggtggttaatcatattaactttgttgtcccacctcaggatcattttggttgtctatttgggcttgtagttgcttagctaactcctcaaattcacgaaatgcagaaataagcggctcaagactgaaatcatcatcaattaaggacatctttccactttttataatgttactgatattctgaaacattttaataacaatttgaatattatcatttgtctcttctatgttaaagagacccacaaatattgaaagagctttggcactgaatagtttttttgccacagcag

SEQ ID NO: 209538 - DNA, 623 bp, Homo Sapiens
ttttttttttttttatttatttatctatgccaaatgtttattagtgaaatagtcctgaagatataattctacatatggcgctttgatttcacataatatttaagaaaaagacaaaacacatagaattagacatataattcaaagaccaccgtacaacctttatctttttttttcacttcagcaaacaaaaaatgtcaaatgacatgaaaagtggcaagtcttccgacaataaataataaattactttataatttttgcaatgcaagagcaaacaaaaaaagtttcctttttttttttttcctttttatttccatagagagagaaaacagtcattttaaccaataactatacacatctttgagggaaaagttcttggacagacacaagtcaaacacaatcccgagacgcttgtggcaaaatagaggtaaccttgttgcaatgctttataagttggtttttaaatctgaattcaaaaacctttaaagtcgcttcagacttcttgataaaggatggatctcaaaaaaagtggggagggggcaaagtaaaaaataaaccagctacaggacaggccaagagacccaggatttcaattaaccccttgttaaagtcaactttaaacatat

SEQ ID NO: 209539 - DNA, 702 bp, Homo Sapiens
  misc_feature (20)..(20): n is a, c, g, or t
  misc_feature (447)..(447): n is a, c, g, or t
  misc_feature (496)..(496): n is a, c, g, or t
ttttttttttttttttttcnggggcaaatacactttattcagtcctggcatcagactggcggagtcctgctgtgggtgccagtgccccagacagagggaccccacccctcagctacgagactagttctccaagaccacagacagtgacatctcttcactcacatgacgttttttttttcattgtctttttttgttgttgttgtttttcttaaaaaaaaaaaaaaaaaatagaaagagcgcaagaaaggcccagagccggagcaccaagcttaaaggaggcagctggtggctttgtcagcgacgggaacgcgtggggcagagacctgcagagaccctgggcaggggtccggaggactctgggaccgtttgttcctgagatttgtgtgtgtgaatgagagtgtgtgagccacccgggagggtgaacacacgccggtgagatacaggtantgagggcaaggggggtgtggggaggccggaggggcggggcggggcaaanagatggcggcgtgagaggggccacagcaacagggacagggctcccgagggcaccctgaactggacacaacttcctcctaacagcagcgttctccccatttctcagtctcactggccaagtcgatggtctctcccaaaccagatgtttaaaagcgagagtcttcctgccatcacttctgctctccacgcctcgtgccgattcttggc

SEQ ID NO: 209540 - DNA, 754 bp, Homo Sapiens
  misc_feature (708)..(708): n is a, c, g, or t
ttttttttttttttttttaacttcattaaacctcagtttctcatatgtaaaatgagaatccaaacagtattattaacatttactacccacttgctatttgccacatactgtattaaacagcatagcaggcagttcttgcaacaactgcttgagttgggtgcttgctctattttacaaataaggtaaaagaggcacagcacaatgtaatatattccacaacatagaataaagggcagaatcaagatctgaacccaagcagtctcacttcacaaatggctgtgcatttaactcctactcacatggtctccttattgccttggcaataaagcttcccgggaaatgggatgctgtgctaaaactcagaagcattatcttaaaaagtgaatttattctcccttttgcctggtccttcctctggtggaaatatcaataaacaaaggaaaggtgggcgaacaggaagaagccagttggtttctttagtagacattgctacaacaaaataacttgcttcttcagaaggctgtttatcttttctcttgtaacacttcatcaaaaagtttgctcttcttgggtctgaacaataaagttctaatgaacactgaagggtctaccagcactcaggaatgcaaactaaaaacaaaattctaagctccaaaaccgtctgaatggacccctcctctcaactaagggcattctaaagtaattcanggcatgatgggaagagggggtcaacatgtctcattaacattcctcc

SEQ ID NO: 209541 - DNA, 742 bp, Homo Sapiens
  misc_feature (673)..(673): n is a, c, g, or t
ttttttttttttttttgtgttgtcagtgttttattagatgccagggatacatcaataaatgagacactatctgcacagagcttacattctagtgggggacacagttacaaaacaaaaggaaggtaattgcagattgcagtaaatactgttggaaataatgtagtaagagaaatttaacacatactaaatgtccagaatgtcccaggctttgtgctagaaaggctgcaatgataaacaagagagaacagtcctgttctaataggcctattgtgtatgaacttgtcgctttgtatgtgatttgggttgtgaatacagctggccctcagtatcctgtggattcaactatcctcagaataaaaatattttttaaatcccacaaaacaacaaaaatacaagtaaaaaatacagtatgactacacagcattacattgtattaagtactataaataatctagagatgatgtatggggaggatgataaccaaatactatgccattttatgtaagggactttagcatccactgatttggatatccacggaagtcccacaaccaattcccactcccctcctcatatggagggatgaccgtattcacaaactttgcgctaagagactgatatctcagttagggttttttggttaggatcaacagaaactaacactggctaacanactagtactcgctaacgtaagcaaaagggaattatttggaaggatattggaagttttgaaaattaatga

SEQ ID NO: 209542 - DNA, 513 bp, Homo Sapiens
  misc_feature (462)..(462): n is a, c, g, or t
  misc_feature (499)..(499): n is a, c, g, or t
ttttttttttttttttttaaacaaaatgtgatatatttcacacaatggaatggccataaaaagaaatgtagtactgacacattctacaacacggatgaaccttgaaaatacgctaagtgaaagaagtcacaaaagaccacatattatataatctcatttatatgaaatgtccacatttcttatggcacatccataagaggcagaaagtagaggagtggccacccagggctggagcgatggtggtggtggtttcatttcaggatttcttttgtgattaatgaaaatgttctcaaattgattgtggtaatggcttgcccaactctgtggatatactaaaaccattaaacggtatactttaaatgggagagtttatggcatgtgaatatctcaatgaagccccctttggtttttaatcctctaagttcaccataaactgcatctgcaatactaggcacttattanagtttactttaagccaaatggatttttcttatcactngctaatagttgtta

SEQ ID NO: 209543 - DNA, 447 bp, Homo Sapiens
  misc_feature (39)..(39): n is a, c, g, or t
ttttttttttttttttttcaaatttcaaacatttattanaggggaaaaacagctgattgttaacagcataaaccaattagttttactcagacatcatggtttcccttagtcaggggatgtagtgatagcgataatcacaataggcaaaatcatgtaaatatttacgacgtctccagcactggggcctgaactcaaggattactttgaaagacgaacttatcagtactattaaaaggataccaaaggttagtgcagcatatagaatcttaaacaataaaggcttattcacatttaagcattgcaacaggcacaaagaaaaagagtgagcaagaaaagaatccttgatattactggccagcaaaaagggaaaagagcatatgccttccttaccgccccagctttccctctggtggtacccaggcaacagaatccaacatcatgaccttg

SEQ ID NO: 209544 - DNA, 560 bp, Homo Sapiens
ttttttttttttttttttcgagaatttcatttgcatgttgaaatttcattgcaacatggtcccacggagggattcgacgctgagaaagctactgtgcttggggcgggggggtcttgctgtggcagaagaaggaagagaaaaaaaggaggaaaaaaatggttgggaaaagtaaagctggtgataatgatcctaacaattctaaaatacctgcacagagacacagatgcacagacacacttctgctcccacaactgcttgcgacgcaggcaaggcgggagaggaaaccacgctcggagaagggacgggactcagcttctaggaatcagctgagaagtggagacgctgggaccgcggactccaggacccgggctcagtcacccacgccgggaagctgcccaggatggcaagaacccagcccaggcccacgccgcccccatagctcagtggacccggacctcagggtgcccctgtcctgggaaagttgcttcctgaccctgaggaaacgccagcaggaaagactccacttggtaaacacttttggtggggactgctctgtgact

SEQ ID NO: 209545 - DNA, 581 bp, Homo Sapiens
  misc_feature (316)..(316): n is a, c, g, or t
tttttttttttttttttcccattccctttttttttccgtcgtttgagttgcatgttttcttggtgacgtctcgtggctggcaccgcttggttcttcccgtggcccgtggcctcctggcgagtggctggccctgcagtggatagagcaccaggagggccggcacgtggggcagagggggcggggcttggaggaagaggtgagctgaggcaggtgaatgtcaaacctccacagactgaatctggttcatctgcgcccgcatcacctggatactgttcaggatttttttctggtggccagccaaagtgaccccaacccnggagaatgtcctccatcatcatctgagacacgacgtcaaaggaggtgaagccggcattggcgaagctctccttgtactgccccatcttgatggcctccagccactcgtccaccgtgttaaagctggtgtagtcggggatcgtgcggtccagcagcggcaggttgatgccagaggagaggggcgccatggctttgaggctgttgggattgcggatcatcctgtctagcgtgttgacaatttggccgaacttgggccggtgggtgcg

SEQ ID NO: 209546 - DNA, 641 bp, Homo Sapiens
  misc_feature (621)..(621): n is a, c, g, or t
ttttttttttttttttttggggctggatgttcacttctctttccaaaaaaatatgaaacacacagtctaggtatggcaggggacagagcctggctggggactggacattacacacccagggggcccttggcggaggcgggcaatttaacaactggtctgaaagtcaaaagagagagagctggttagtggagtgagctgtggggtcgggggcaggggctgtgcattcaggcccggacatgggtactggccagcgtggccagaccttggccctcacagcagccctgcctggggcccattcccgggggcaggggcgccatggtccgacctcaccatctgtgtaggtggcccccagccctgggcgcactggaagaacctgagacctaaactcagaccctccctgtccttgtgtgaacgttcagcatcccggcactgcccttgtggggttgctgtgaggagcccatgggactggggagggtgaaggtttctgctcaccccaaggacctgggtactaaggtacgtcttggccactgctctatctctagggcccagcacgtagcagacacccacgcagctcttcagtgagtaaacagccgggctggtgcctgagggcctgtctccagngatgcatgctggtgcccacc

SEQ ID NO: 209547 - DNA, 735 bp, Homo Sapiens
ttttttttttttttttttccataaaagttttatttatccccacaacaaccctggtgaggtagggtgatcagggcatttgaagatgagaaaactaaatctacattacttgttcacggctatactgcatagtaaataagaagaaattaaattgagattttaaaatgtccatgactttaatattgattcacgtggaaacaaggcagagagaatattaactcccccctaccttaatgccaaaaggacactgccttgaaaaatcccatttcaaaagatgaaagtagtatttcattgcttatttctacaaagatttataaaataaaaaaatagtgaaatattttacagataatatatataatggtctcattcagggacatgtcctttagctatgtatatggtcaactattccaagtcctagaaatgcaaacccttaaaaaatatgaaagacaaaaatgataatgagcagtagccttaatcttctttattattcctccatgtatcttgaataagctctgtgaaatctggtcccagtttaaaaaaaaaaaaactctaccacaaagagatgtctggtgaactttaattttgttgcctactctcaaaccagtgtcacatttagctaaaacattgattacccaatactggctattagaatcaccaggagagctttaaagaaaaaacaaaacaaaacaaaacaaaaccaaccaaacaaaaaaaaaaagccagaactctcaggcccct

SEQ ID NO: 209548 - DNA, 693 bp, Homo Sapiens
ttttttttttttttttataattgaaggttgacacttccttaaatacatgtttattttacttcaatatcgctcagggttgtatgtatttgaatacttcagtactattttgaacattctaaatatgaaataccataaagcgttcaaatttatcaaacagtggtacaatatggttactaaacttgcaacttaatttacaatgacgttcaatttttcctcttcaaataaaatcactgactttggtccatttgatgagaaactaggacatatgccatgacagcatacttctagcactctatgtaataagcaaaagataatttagctaatatagacaggttacctgactgaaattctactttctgcttaattgatcacgatcaagaaaactacaaaaaaaaaacaaaaaacaaaacaaaacaactaccacagactacagctctcagccaagaaagtaatgatatataagaaaaagacaaaccttgttggtaatgttaataccaataagtacaaattgcacgctccatatctcatattcagtcagaaaaaaaaaattagccttcagggacactgataactttattatatgttaatgaatacagtatcaaaaacatctggaaaaagtacccctgttaaagagcacagcattaagaattcacagaggctgctcaggataaagccaggtcaaaactaaggtca

SEQ ID NO: 209549 - DNA, 721 bp, Homo Sapiens; identical to SEQ ID NO: 57850
  misc_feature (669)..(669): n is a, c, g, or t
  misc_feature (710)..(710): n is a, c, g, or t

SEQ ID NO: 209550 - DNA, 556 bp, Homo Sapiens
ttttttttttttttttttaaggtattatgtagtagttcatacaccaagtactattattttattaactttaagaacatgttttacataaaaacaggcaacatcaaaaaagctcagttgataaatgaacataatatatcacagatgatttcattccacattaacctacatgtatcagcttaaactgaaggattagggggaaaaattggatctcattccacctttaattaaggacacaaattgtttgaaagttatttcattaggattctgaaaatcaaagattaacctatgccatctgatccatgcagcaagtgataaattcagtattttcaaaagaaatattgaatttttttcttgagtcaaattgaaacctttcagaaacttgtttaaatgcgccaagtccctacgcacctttttagtatgtatgagcaaaatactgttgaatttcacactcaactaatcctttaataattttctttcagccagaatgaaaaaggctagtattaatttcctaataaaattttttttcaaaagttatcgaggatatgactataacctt

SEQ ID NO: 209551 - DNA, 590 bp, Homo Sapiens
ttttttttttttttttttattgctaaagagattttattgtaaatatatatcacaattctttattctttctgtcatttatgggcatttaatttctttgaataaatttaacaagttgcaaatgaatatttagcaaattgcactcagattaaaataacaaaataatctcttatcagaagctaagaaatacattttcctcctcctcatccatatccaaagacggttctgaaaatgccttttcttctctattatagcaacacctagtggcttgagaaggccaggtctagaggtatgcatttacggctgggaaacactgacctttagctttgaagacctcaggtagcacctagacgtcggctataaccgcataacaatggtccccatctgaaaccatttaagtcagaatctttggaggaagaggccaggattggtaggttataaaagttgcccagatgattttaatgtgcagccaaggctaagagctacttatctagaccagtggtttgcaaacttttgtcaaataatcagaatcgcgtttcaaacacagattgctgggccccgcccacagagtatgtttcagtaggtctagggca

SEQ ID NO: 209552 - DNA, 638 bp, Homo Sapiens; identical to SEQ ID NO: 51253

SEQ ID NO: 209553 - DNA, 748 bp, Homo Sapiens
  misc_feature (722)..(722): n is a, c, g, or t
ttttttttttttttttttgaggacctacatttaataaatcaaactgtactggcatcatcagaatattcacagtttgcaacaggatcagcgcgttttctcacttgcagactcggaggtatttcaggagaaggcgacgtgagcgcaccattccgatgcttcattcttgaccctctctggggctttcaatgtgtcattgtgtcagatccctctccccttcaggttttcacggtgctcctcatgcctccgccctctgggatccctttgccgtcttccggtgtggaagctttggctgctggccggctggcctcgaaggagtccaggtgagatttagggagctccccctggatggccaggcctggcggggctggccccgtctcactcctctgaccttctatgggactctctcttctgacctcttccagttctgcagctgcctgttcctttgtcagtttaattatttccctcccaaggctgtttacttcttcctcagaaggtaactggggtaatgaaggatgaaagagcttgcattggttcccgcggctctgatttgctggggagttgacagcgggcctcccagcatcctcaggcgctgtcaacgcctcagcagcggcacaactttcatcttcttcttgcttctgagcctcccatccttgggatctgctttgttctcagtgggctgctcgacaacttcagcagtggggatctcgacctctgtccactangaagagtggggtcgctgaacagtatg

SEQ ID NO: 209554 - DNA, 639 bp, Homo Sapiens
  misc_feature (576)..(576): n is a, c, g, or t
ttttttttttttttttttaacagaacgtgtatttattaatgttcaaaacactggaattacaaatgagaagagtctacaataaattaagatttttgaatttgtacttctgcggtgctggtttttctccacaaacacccccgcccctccccatgcccagggtggccgtggaagggacggtttacggacgtgcagctgagctgtccgtgtcccatgctccctcagccagtggaacgtgccggaactttttgtccattccctagtaggcctgccacagcctagatgggcagtttttgtctttcaccaaatttgaggactttttttttttgccattatttcttcagttttcttttcttgcactgatctttctcctctccttctgtgactccagtgactcagacgttagacctcttgatgttttcccactggtccctgaggctctgttcacctttcttcattcttttttctgtctgtccttcagatttggctatttctggtgctccgtcttcaagttcactgattttttttcctctgtcgtcttaattctgctactgaactcacccagtgaatttatttcanatactgtaattaagttttaaaatttccattaggttcctttttatttctctgctgggtacttct

SEQ ID NO: 209555 - DNA, 671 bp, Homo Sapiens
ttttttttttttttttttagaattttaaactatttttattttaaagttatggcataacatataacataaaaatattttatatacgtttgaaaaatctataccgttcttttttatcatcaaagtttctcaatggccagtagaagcaaaaagacaacaccacctctgatctacgggacataatgttcccaggaaaaaaatcttcaagtgggtgtgagggtgtttctaattcaaaatatgtagatttctccgcatggaagaagtagtaaagattttcttaacatgctcctgtgttcatgcttggagacaagaataagatggtttagaagctttaccctttcttggaacaagtagaatcccggtctgagacctctcaggaatttcagagcttagcagtctggcctggaggtttttcagccttttagtataataaacagtagttgcttcctagagttgagtttttaaggattcacaaaaaggagcctgtacaaaatatacatacagttctttattaaacaactgtaaacacttcactgtaaaaatccataaaactttataaacaaacattttgtaaatagaatctatgctacagtaaaataattaacacaattatttacatgcaatactgacaaatttggcactttttgaaaagaaatgtacaaaacacttgcttt

SEQ ID NO: 209556 - DNA, 717 bp, Homo Sapiens
ttttttttttttttttttcacttaataaatgttaacctttattgttactattatttattaaatgacactaaaacatggcagaatgccccagcaaaacaaaagtcaaccaaaaaactaacaaccctgcattctaggtaattaagggtgctcgattttcttaattaattactatgtgccagaacattgtaagtactttgcatatattacctcactgaatcctcacaataagccttatcttcaccatttatctatcatttcagagaagaaacttcaacctacctcatttttaatctaaatatttcttccattcagtatgttttccaatcaatcacttgcttcattcccaacacttttctttttcaaaaccgtcctaaaaatcaatacccattttagataaataaaaacacaaagatgaataaaaagtaaaaaagtaaagatcactcattattcttctacccaaagataactactgtttctatctggatatctataactccagtttttagtgtccttttaaacatatgttttattagtctcaaaaaatggaactatacttcgaatacttctatctacccttttttactttctgacttcacaacgcataatgaatagcttttcctggcaatatagatttccatcagcatacttataatatcctactgtgtgaacattccttgctttataaccaatccaatgtgctagatacttaaattgttt

SEQ ID NO: 209557 - DNA, 697 bp, Homo Sapiens
  misc_feature (541)..(541): n is a, c, g, or t
  misc_feature (559)..(559): n is a, c, g, or t
  misc_feature (685)..(685): n is a, c, g, or t
ttttttttttctttttttagaaaaaagaaagacaaaacagcaataaacattttagctctttaatgagcaaagatcatgtttcttagcattggactaatagtcattatccagattatctttatttcacacaatgaccagtgacatggccaagatgtacaaagttggttccatcaagtagtatacaattttttgtataataatctttcattcttgaaaaagagtaactgaaaagaaaggtttctgttactgcagttagtttgtcagagaaagttctttgcattatcttataaactatcaaaattgctagtcatctgaaaaaatgtaaaaaaaaaatcacataactttagtctaatagaaatatagtacaggtgagagagaaagtatttatcaggatgtgctctttaagtccatctcatttgtttttcaatataaatgtacatctgattacatatacaaacatttggaaaggtctgtgatatactgttactggtaaacaacagggggatgaagagtttcctgtggtctgagaatattcgtttanaatcacacatatgtgtangaaagactaaaatcctccagatgttgactctcctaggttctgtatctacgttgtactctactgagattgcgtgagtaaatccagtgaatgaactcagtgagaaagatagtgatgtaagagggatanactttataatga

SEQ ID NO: 209558 - DNA, 558 bp, Homo Sapiens
  misc_feature (545)..(545): n is a, c, g, or t
ttttttttttttttttttggcatttgagctctaaaatcaaatttatttgatttgcattaccattattgatgacattttcacatttaaaaactacataagattttataataaatgcaaccactcttacctgcttaagcaaatataaacaaacactcccaggcctattgtttttaaggctgtatatttcacttgatggaaaaagtgatgaacagcaatgacttcccaagaaaaaagaaagaaaagtgggtgttacatattcctgaaagccagactctaatcacacagaggaattttattgtaagttacatgcaaagcaaattagttcttcaggaaaataaataaataaatgggtcaactaagatatactaaacctcaaaaaaccctgaataaagataaaggtaaaaatgtattaataaaaaaaacccttaaaatacttaagaaagtattaaaatacaaaactttaacttctctacagtcaaagtttcattcacagggagctgtaggtcagttggttgttgaaaacttatttgagaaagtcaaaaaanaattgctttattt

SEQ ID NO: 209559 - DNA, 686 bp, Homo Sapiens
tttttttttttttttattgaaatcaaattttatttttgggaaaatgacattacacacatcttgcaaatgtacacagaaatgagaatgcgatgaagaacagagcttgagagccaaaataattgcaagagcagctctttggctgcctggtattgaatgctgcgaatcttcagcactcacagttcacagcaccttacacacatggcaaacttctctagacaaccttgaagtcctctgacccaagaaagccctcattgaattgcggagggggtgggggaagaggggtgttacaggcacaggagatgaaaagggtctgctccagctggtttatgggggcctcaccaaacctaccagtccaagtggggtcagcaaaccaaaaaaggagaatgcctcttgaaatactgcttttgaatcacaatttcagagtaggttaggtattgcctaggacactgatagtaatgcatttgaactcatgcccttgtttttttttctggctataactattctaaataggtggctaaagttcttaaatatctgttttatttctctcattttttctttttttttcaaataattattggtcatcggtcaagcagagtcttctgaggtctctatcttaaaacagctgcagggataagggacatcactacctactgtcctttggttacatgtgattctgaaaactattc

SEQ ID NO: 209560 - DNA, 702 bp, Homo Sapiens
  misc_feature (616)..(616): n is a, c, g, or t
ttttttttttttttttttcagttcacaagcgtttttatttttacatacatatatgtagcatggtgtattggctaagaaaatcgaccttggaatttcaagcccaactctacagttaactgtgaggttggatgagttattaatgtctctgaatctatttcctgattagtaaatgatgtattatggttctccagagaaacagaaccaatgatgtggggtgggggaggacaagagaaagagggttattatcaggaatgcactcacagggttatgggggctgggcagtcccaagacctgcagctgtcaagcagaagagctgattgaaagccagtagacttgagacccacaaagagctgatgtgtccattcaagtctgaaggcaagaaaagacgtaggtcccggttcagtcaggcaggaggtggttcctatgcgggccttgaactaattgaatgaggcccacccacattatgaagggcactctgcttcactcagttcacaaattcaaatgttaattttatccaaaaacacccccacagacacactcagcacacacagtgtcactacttactctcagattgctctccagactgggggaaccaattgacaaggcccccagctcncccagctatgagactacattccccataacttttcagcatgttcacttgattctcaaccttaacagacttgtgatattactttaatg

SEQ ID NO: 209561 - DNA, 683 bp, Homo Sapiens
  misc_feature (640)..(640): n is a, c, g, or t
ttttttttttttttttttgccagaaccaaacgtctccttttattgcaaggtcaaacccttttcattttgtctatttatacagaattttcactaaggactgctcgacgcaacagctgtgagtacattggtccaaccattaataaatagtcttaaataagaaaacaaacaggttgaaggaaagcaagctcatcgtcctgaacgagggattaaaggggggggggtgttcaaaagagctttggatggaaataaataatctctttgctttgtaacaactatttacaggtttaaatgtacaaatgatgctaaccagaggctggttgggtcagaaaactcacaccaagagggatcacacaaaaagccccagctctgccagcaaatgaaaccaaacataacaaaaaatactcctccccagtgactagagagtggaggctgcagcccaagctactaaagaagaaaaacatcaaagaaaataaaaacagagccccggtgtttccaggaactgtctgagtcaagatggagaaacagtcccccacaagaccgggttccacatggccacagttttcgatcaccttgttttctttacagatgcagaaaacgtttgcagacagtctagccctccccgaggccttgtgtttgtggncggaggctgagtgcatactatttatgggactcaccagccaagg

SEQ ID NO: 209562 - DNA, 768 bp, Homo Sapiens
  misc_feature (673)..(673): n is a, c, g, or t
  misc_feature (728)..(728): n is a, c, g, or t
  misc_feature (744)..(745): n is a, c, g, or t
ttttttttttttttttttaactttttaaaaagttttatttcaagaactttgttttttactggtatttcaaaaaaacgtgggtcaaagtacaaaaaaaagtcagttgaataacagcacaggtttagaaatcacagcagcagaagcaatgtacagacagcacagaaaaaacaacccaatgtatgcaattctgttcagtttctttgcttattttaagtattttttttgcctcctgtacaaaatacataaaagcatgccatgagatcagaaaaagaaaagagtttaacaaatggttacaagaaatagactctgtacaagaggagataatggttcttcccctaccccccacccactacccccgcttcctctcttcttgctctgctttaggttaaattattctgaagacagttcacatccaagtcagcctggtcacctttgccaccctcaagtttgggcgacatggagttctggatgttaaatgactcctcctctttcaggcaggacttgagaacctcctggattttgtggggagcactaggatcatcatttgggtgagagccctcggcaatggtggagagggagaagttatcattgtggagctcagatggggtccggaatttgttggtcctacgcagcttagtattctccgtcttgagcaggtagagcttcttggcanagaacaccgtcatcatgaagagcaggagcaggacgagggcagccgagcccacggncacgcacatcacctgnnaagtcggtgatgatggactcgca

SEQ ID NO: 209563 - DNA, 732 bp, Homo Sapiens
  misc_feature (633)..(633): n is a, c, g, or t
ttttttttttttttttctaaatgaatatcctttttattggattttttccaattacaaatgaaatttcattttacatctataattagaaacaacacttacaatgggactgtacaaatttaggtcaaaataaaaatatatgtatcttgtgacttcataaaacatcctttactatatttttaaagaaagcagaagtaacagcaatatatgtaaaagtaatgatttaatgactataagcaagacaaagcaatagaattgtgcttcttttgcagactggggacaatgaaatgtttagctacaattttcccatacaaacatgaaacaatattcatatagaataaacaccctcacaaataactgatgggtgatgaacacacaccaagttcgaccaaagcaaaaaataaactgaaaattgttgggtggggttattcatattttaaattcaacatgcttgctctatttaaaaatacctgtagaagctcataataaatagcttctattttcagacatagcagagaaggcatattccattgttaactgtaaaagcaactcttaaatttaaaattactgctataccacctattaaaataactttagataaaatgccttcttttagcaacctgctggtttatttanaaaattgttttagaattatagtgatcaatatgcatttttaaaatacaatattaattccatcatagccaatggaaaattaagacggtttccatatttctc

SEQ ID NO: 209564 - DNA, 749 bp, Homo Sapiens
  misc_feature (724)..(724): n is a, c, g, or t
ttttttttttttttttctgatgctcctttccagccactgtattgtttttattaaatggaatactgaattagaggcaaagagcatttgtactaggcatccaattttacagaaaggcagtcatatgatctaccctggctctcaaagaatccatcttgacatcgtacacctggttttgcatgtggcatcagagagggaggaaattctggatgctggctttaagataagagtaaggcatccaaacttctgtgaaaccagcagccatcccctctcagttcccaacttcacactgagcgggaacaaaagaaataaatggagatgaatgatgctttggtttgggaaataatgcttacatgcataggatgcatccacttaagtcttttaaaaaccattgttctaatgattttattgctctgtaacaaaataaatcaaactgacattgattccaaggtgattgtgaattgaagtttaaccatgttaatgactaataggatggaagtttgaatgctaggaggcttgagtaggaaggcatcacagtatattgcattcttgtaaacattagtataagtacagagtaatagagattcccctagatgatgctaattgggcccctagttcctctactttctgaaggaagaacattaggatcttttccattttacatctgctaggatttcatatactgccctaaagaagaatggactccaatttggctcatttcttctangatgctgttgttggttccctccatg

SEQ ID NO: 209565 - DNA, 619 bp, Homo Sapiens
  misc_feature (584)..(584): n is a, c, g, or t
ttttttttttttttttttaaattttttttaatagtcacattcagctcgcttgctcaaaccagactcccacattgggtgagcaagatgagcccataggattccagagttaatacgtaaccgtatatacaaacagccaaaaaaccataatggtgccacagggatggagcagggaagggcatctctaacgtgtcctctagtctatcttcgctaaacagaacccacgttacacatgataactagagagcacactgtgttgaaacgaggatgctgaccccaaatggcacttggcagcatgcagtttaaagcaaaagagacatcctttaataactgtataaaatccaggcagttccattaaaggggttaagaaaaccaacaacaacaaaaagcgagggactgtctgttgtcactgtcaaaaaggcacttggagttaatgggaccaggattggaggactcttagctgatacagatttcagtacgatttcattaaaaggcttggatgttaagagaggacactcagcggttcctgaagggagacgctgagatggaccgctgagaagcggaacagatgaacacaaaggaatcanatctttacaaccaaattgcatttaagcctcgtgcc

SEQ ID NO: 209566 - DNA, 630 bp, Homo Sapiens
  misc_feature (582)..(582): n is a, c, g, or t
ttttttttttttttttttacaaaggaagaattagagaagtaacaaaggaataaatctgtaaaacctagagtgatgacatattcagagcaatgaaaaaatagattccgagtctgataaaccaacaaatgccttaagttctttcatggattattgaactgctcccttacataaggtatgcaccaacatttatggaatgaggataaagtgcacatttcataagtagtattcttgttatttgtgtgggtatgctggtaaaacagaagttaaagttatacatatttcatagtatgtatataacaatatcattttaaaactaattcactaagggggaaaattttatatgcttggaatacaagcagattttagagctacagtgaaatgaattcaataaacaaacaaaaatctttaaaaaccaacaaaacaaaacaaaaccatacagtatttccaagggtattatggttccatcagggaatcccccttttgccgttagtaatgggcatgtttgaaacagtcctggaaaatccatgaacctcagttcagttctgtgttccatcaggccttacggtcctcagcaggtctganaatccagttctatacacaatgctccaggataccacatgcccccttctc

SEQ ID NO: 209567 - DNA, 709 bp, Homo Sapiens
ttttttttttttttttttcaagattaatactttttattaaaaagtcactgcaagctttggataggaaggaaacttgaagaaatgatgacaactggaagaacatttccacattatcatctgttatttttgtttttccagtataggcataatcgagaaatgcttttactgccttggaggacaaattagtaatggtaacacttccatcatctctttctttcatgtttacttcaaacatagccctgaaaaagtcactgcatgctgctaacacacaacgatgacacgggattatttcatctttcataattattttgaaatcataaaagacattttgttctctaaaattctgtagtacacttaagattttttgtccatgatcttctgatacaaggaagttgtttttcttctcagatggaattccattacatgtgcttcgttgattgaaagcatatgaattatccatagccaattccatatgtccttagaacgctggcctttggctgatatttccgggcagtcagaggaagaaggaaatcggctgaatcccgcagtaccgcactttaatcgacctccaggtagtcatttacagtcatctgcagagaccaacttttccctggaccaaaacctgcagggcacttggatcgcgtgggctttcatacgagagtcaacacagcctacacggaacaactgcaactgcagtctccctcttgcc

SEQ ID NO: 209568 - DNA, 531 bp, Homo Sapiens
ttatttttttttttttttaaacgttaatgtgatctttattatacagcacatctggtatttgtgtatcccaacaagtatacagaatactctataaaaccaaacccaacccttcaatattacactaatgaagattaacccagagtcgcatctcttcaaaatgcacacaattaagacggtcctgctgtaacaatattatggaaagagccaggtagcacaagaaaggagagaggataaagactgaagtgtgtgccaaagtcattgtcttttgttattgcacttttattctacacacttagtatcttacacttttatttaacactgtaataaacattagtcctttaaaacaaagaaaaaacattacatgaagacaaaagacaacaggctgcccagaccaattttcttttcaactatctgggcaaggtggcctccccagtgctagatgtcctgatgcacctctgagatcacctcaattggactggatgttaacaaaacagatgaagttaaaaatgaaacccttttaggcctcgtgcc

SEQ ID NO: 209569 - DNA, 668 bp, Homo Sapiens
ttttttttttttttttttgaggataaattgccaggtttattttaccctgtaagagctggcaaacagagctaaggaggtgaactgctctcccacctgcaagagtttacaatataactccaaggaacagagtttggttgtatattgctatgtccatgaaatggcttgcatttggtctcccagttcacaacgtggtcagtgcagagggatagaagtgttgatctggcaccacgtggcgcaccaaaaggctcaatttcacagacagcaaataactattcctgcttctaatctgattagcatcttctacccaaacccatgaaaatacgttatcagggagatcaaatacaattggaataactgcaatacgaaaaccagactggcaagagccagtggggattttctgggtttgggggtgattgtggaggtagtagcttttaaatgaaagctcttgacaaaatatttcctttctatcagcaggaactacattgtacctggggaaaatggcttataaggtttcacaaattgtgcaaagaaatatatatattttgagatgccattctctgttgacattcttgtgaaaagacttttagctgacagtctcataaatctttaaaccatattaaatgaagttgtcacaacacaagcaaaaagggtaatttttcttcttttgt

SEQ ID NO: 209570 - DNA, 748 bp, Homo Sapiens
ttttttttttttttttttccttccttcctttctctttctttctttccttctttctttttcttctttctttcctttctttctctttccattcatcctacattgttttctaaagttgtctcagatcatttgtcaatggcctagtgtttctccatggtttttatcttcctgagagcatgtccaagcaaaatgggatcatgatccaaccaccagataagggcctgttggtgggcctggctcagagatgtctgctgccttgctacagagcagaaagcaccctgcactttctggacaggacacccaggtttttatcccagctgactgactttgggcaaattccttcctctttccagatgccagtttctcaacaataaagtgagggagctttgctccgatttccctccttctcttactgcctaaacttgtcagatagaacttcaagtttgcttcaccttaggtcctgattgccaccacagtggggacagcagggacggtccccaagcctgaagcaagaagaggacagagaaggatgaactgcaggagactttgcctaagcagaaatccaaaccccatttttccctaaagatgaggcatcttacttcaaggacatttgtcaagttgttaaagttcccttgatggtctctcagaagccctggaacttctggaaatcacttgaactgtgataagattctccttagagctgcctgagaatagcaggacacggcaggcgaggagggggagtcacctgctg

SEQ ID NO: 209571 - DNA, 587 bp, Homo Sapiens
ttttttttttttttttttcctctaaagttgagtatatttaattcccagtgttacagaatttaaaatgatacaaatactgcatgtctttaaaatttcagtctgtttttctactgagttcaaaaagtttaaaagatggaggctaccacaattatataaaaaaacttcactctattctacaacttacatagatctagtacttttggtgagtcctcttaaaattttttctggcattaccaatctgagagtcactttttatcaatatatgttatcttgttttgcaaaaatgcatttttaaaaggtttccaaagtcaccttgataatcatagtgctcactcacttgacacttactgctaaaaggttgttatgcatcttttatacctggttgaggatcaacttccagctatcagagaaaaatgtccctataattctataattgacaaaagggaaaagataaaaaagggaaagagaacagggtggtaagaaagattgatttttcatttcttatcttgtgatacatgctgcagcagtaaacaccactatctctcaagtagaccctttgaagacagggggagaaaacactccaagag

SEQ ID NO: 209572 - DNA, 560 bp, Homo Sapiens
ttttttttttttttttttaaagtgtttgccgttgggttttcgtttggctggttgtgtgtacacagtgtatacaagttgagttgtacagaagcccaagaaagagcaagagacaaagggtagtgggagcagggggtggggcgggggcgagaacggggaggaggggaaaggagaccgataaaaaatagaaccacatccagacaacaatgggggatgggcagtgggtgggggccagacacagacaaatcgccgtagaaaaggagtgggaggggcagagagaggggacccttctcccccctccacctccccaagcccctgccccaggtatgtacaataaataagattaaaaataattaacaagatgcgttttcccctcccacccgacgccaaatgccctgcggagggaatggcctttagcaaagatcttggcctgcaggggggacttggggggaaggggtcccccagctctctgaagccaccccaccccccccagccatacatagacttttcctatacattatgtacaaggtggagggggcgggggctgtggctgtcctcgtgcc

SEQ ID NO: 209573 - DNA, 750 bp, Homo Sapiens
  misc_feature (689)..(689): n is a, c, g, or t
ttttttttttttttttttactggctgtttgaattatgaatttatttacaacttgcctagattataataaatgattactgttctattatacaaacataacagtaaatgttttttaaatacaaagactgcaaatgaatacatgaaaaaattacacacatgtacaatatttataatttataaatgcaaagttaagacctctttaaattattgcacttgcgcattttacaaagatttttgtcatacatataaaatcattttttaaaatttactaacatcaactatgataaagttagatactgttaacttgaaattctttctccttccaatagagagcctattaaaattctggacacaggttcattgactctacaaatcagttcttcatgagcattgtatttgtgatggcatataacctgtgttactctccagtagtttttggtcagcaagattatcaacagcaaactcttagatgccttagctacgttatggatctaggatctcttttgttcatttgttcatgtaaagaaaaccatcttgtcttctcagaaagaatgaagatgctgcatttgtacaaattttggtaactatttcacagtgtgttgggcaagcatgtaatttcaaataggtaggggcattgtatagaaacaccttctctgggtaaatctattacactctgaacttgcacacganatgaacacatagcatatacaccatacaccagatcatatggaaaataatattcctatatgtc

SEQ ID NO: 209574 - DNA, 639 bp, Homo Sapiens
  misc_feature (609)..(609): n is a, c, g, or t
ttttttttttttttttttaaaagggacatatttattatgaagacacaaaaaccatcacatacaaagtacaatactataacatcctgaaatacatatacacacatactgtacataaatttatattatcaatataaaaatacatcattaacatttctaaggatgacaaatactaaaccaataaatattgcaattctaaaacatctacttacattaagtgctggtgaataggatgacggtaaaagaaagaggacaaagcggaccagaaaaccaaccacctggcttccagttacagacttgagttggtttgggggaggtatcccaatcaatttccccaaacactgaaaagtgcctgatgtcatcaactctcaaaaacagagcaaaggaagaatttgacattatggcactattttttggccacatgcgcgcgcgcgcacacacacacacacactcttcaaccgcatttagtgagatacagaaatatcaatcgataataagtttaaattaaaatcaaagcccctacaacctaaccttctatgtagcaccccagcagaatgttttacttctcatactcatctttcctatcttgtgttaagtcttttttcctttcantaagtaaaactacacctcgtgccgaattct

SEQ ID NO: 209575 - DNA, 630 bp, Homo Sapiens
  misc_feature (278)..(278): n is a, c, g, or t
cacgaggcgcacctattttttttttttttttttctgatgtggtggtaactttttgagggataatgaaattatgttcagcctcaaaaccctgaaaattaattataatgctgctcagtcttgcttatgcatttgtttgctctaacatgctctttccattaaaaattgttaacttcctccattgctgttaaaaaaattaaaaagggatggaaaaaagagagagacaaaaaagatgaaaaaaaaaaaaaaaaaagaaaggaaaaggcaaaagcacttccctngggggaaaaactgtcagatagaccgatagtgttattgttgcatggttattttaataaaagtattcttatatgttatattattaacaataatttaattaaaaacccaaaatactctattgtttcatttctcttttaatatttctctctctcctctaagaaaatgttgcaggaagtttggatcctcttggtttccagcaaaacaagagaataaaacttccatgcaacccgatggcaatacgaaaaaggagttcatattgtttgcagtgacacaagaatctacaaaacacctatattataggtcattcttttcattatactatagttaagttacagactgctacaaaaggacatg

SEQ ID NO: 209576 - DNA, 617 bp, Homo Sapiens
cacgaggccgcacctaatttttttttttttttttttttttggcaatggtgactgtgccatagtgcgaagtatttttttccccattaactctatttgtacaacctaacctgtaaaggtagttgtttttcttttgtagtgatattactagttggcaaagttactggatatcttagatttgcaacagggaagagctaaactcgctttggaacttacaagaataaagtatgtagaggtgatggagaaggccatatttcatggcattaaaatacatcaaatctctaaactgtgatggttcttttggatacattttggacttatagtcttgctggactactgcatgtgcaagaactgtaaggcccaactttgatttgtcttgcttgccaatttataatgttgacttaaaatggctttcttgtcatttgaccaacttcattgtttagtgtctgtagattctctgaccatcatcatgactcaatgtcttgtctattgtatgagatactgacttaatgtgaaataaaattttaattatgacaaaaaaaaaaaaaaaaaataggtgcggccgcaagcttattccctttagtgagggttaattttagcttgggactggccgtcgtttt

SEQ ID NO: 209577 - DNA, 607 bp, Homo Sapiens; identical to SEQ ID NO: 52083
  misc_feature (431)..(431): n is a, c, g, or t
  misc_feature (546)..(546): n is a, c, g, or t

SEQ ID NO: 209578 - DNA, 500 bp, Homo Sapiens
gcacgaggggccgcaatgccgcatttttttttttgaagctcaggtgtctcacgtctgggctgcaccaggcgaagagagaaattaaagatttgaggtttttccagaagctttgtctgcctctcgggaggaaggccgtggggctgggaccctgtggtgggcaagtgggtggagtctggcagctgcccacagagggccgagggtcacccgtcggccgccgccaccccaggcgaggccggaggaaggatcatctgagacgcaggaggcatctgctggagcagcaatttcccaatttattgaaagtgatcgctttgcaaggatgtctaagctaatcccgtcacagaaaggaaacgcacaggcgcctaggcagaaacttggagactcaccgcagaggccacgtgaacccacggccacagagaggcaggacggcagagccatgatttcccaccgagcgattacgagaacctcttcccccaatagtagacacatctccaatacaaaca

SEQ ID NO: 209579 - DNA, 525 bp, Homo Sapiens; identical to SEQ ID NO: 47506

SEQ ID NO: 209580 - DNA, 461 bp, Homo Sapiens; identical to SEQ ID NO: 49220

SEQ ID NO: 209581 - DNA, 509 bp, Homo Sapiens; identical to SEQ ID NO: 55417

SEQ ID NO: 209582 - DNA, 641 bp, Homo Sapiens
cacgaggggcatttgacctgaattatggtgttttattgaatgagctataagacaacatttttaccctttaaaatgaacactgaacaaatgtgttaatggtatctttgttaaaaggaaaacatagctataaataaaatactacatcgaaatccagcactggagttcatttgaaatttgatattttgtgtaaaataacaaacctattaacacagatttttaaaataactcagaatcgtataaagcactttggtacttatttgttctcttttcccttacattctgtgtggtaggtggtattatctctgatttacacatgaagacatccttgttaatgcaatttatttattcattcgggcatttactgtgtgccaacttgcaaaaggaatagaaatgtctgtgatctagatagttctagattgaacatagattttctgccaacaaatcctctctgctgttcacattatcctttgtttaacgtatgaaccaggttactaaaataggataaatcatgtgtcttaaaatatgaaaatagtaaagtctttgaggtcacttgatcttctctaagtagactttataatattgtgttttatctcatttctcaatattagaatacgggtagattttaattttgctataatata

SEQ ID NO: 209583 - DNA, 544 bp, Homo Sapiens; identical to SEQ ID NO: 46014

SEQ ID NO: 209584 - DNA, 676 bp, Homo Sapiens; identical to SEQ ID NO: 45565
  misc_feature (661)..(662): n is a, c, g, or t

SEQ ID NO: 209585 - DNA, 450 bp, Homo Sapiens; identical to SEQ ID NO: 40448

SEQ ID NO: 209586 - DNA, 612 bp, Homo Sapiens
aggctcctgggctcacgcgatccacccgcttgggcctcccaaagtgctgggattacaggcgtgagccaccgcacctggcctgatcataattcttaaaaacgcagtagttgccctcttaataatgacttgtgcttgcccctttttaaatctatttccaattgatgtatagaaaaagatgaaaaatatatccatgtagttatgaatttcagatgtatgtctgtagatgaacagacattaatatatataaccatggcaaaaatagtttgatgacaagtaattataatctctctctctggccatcattggcgagtgcagtgttgagctaaaagtgacccagaggaggtgaactataatttacttgagttaagaaggataaaaattggagcaaactttccagccaaagcagttaattcccccaacatagtaacttacttaaattcaagtagagtgggtagatctattgaaatgaactttactctgctgtgcatgttacaatgtattaaagtattgcttccaaagagaacagaagagtgaacatttaaaaattttattttaagaaagaaatctgattactctgtgatattttttaaacaataaagagattttgctctt

SEQ ID NO: 209587 - DNA, 453 bp, Homo Sapiens; identical to SEQ ID NO: 54286

SEQ ID NO: 209588 - DNA, 551 bp, Homo Sapiens
  misc_feature (471)..(471): n is a, c, g, or t
ctggccccggcaatcccactgaatttctactctggggtgggtggggcacacacttcggtttttttaatgccaattccgttttcatgccgaatctaagaagccacaacttgctttgtcagcttcagggcaggcagccatgacttcatttctcgcctgaacaaggaccatgctgtcctgcacgctgggtctgaccgtctgccctctctccccagcaccaagcgtgaccttggctgtggcgctcaacggccagctccggcggcccctctgctgctcctcggctttcccggaagtgggagagcctgcctggcctcggcctttgtccagcgaccaggctctgtccccgagaagctacggccgacctgggtctggtgttgggacgcatggaccgggctggggaggtgcacagagtgatgttaactttttcccgtgtgtagatatgtacagccaaagggtcgtgtaaatgttctgcanaagtgggtctatacagagtgaaagctatttattttgtgcagagaaaaaagtctggagggatggaaccttcagggttttat

SEQ ID NO: 209589 - DNA, 529 bp, Homo Sapiens
  misc_feature (511)..(511): n is a, c, g, or t
cctaaccctccagcactgggcaaacgctgcccgatgacgcccgcctcgggggccacggcatcactggggcgactgcgagcccggccgcggagccgctgggacgcggcttacctcccggctgtcgctgctgtgtgtgttgcccgcgccagtcacgtccctaatgggaccctccgtttcggcgtctgtaaggcgaggaggacgatgcgtcccctccctcgcaggattgaggttaggactaaacggggtccgcagcgcccggcagctcccgagcgctctccccagccgcgcctccctccttcccgccacccgtcccgcaggggcccgcggcgtcacctctcaggctgtagcgcgcctgcatgccgaataccgacagggtgccggtgcccgtgcggtcgtccttcctgacgccgcagcggaggatgtgttggatctgccccaggatttccaggtcccagatgaagagataattctacttactggatataggatgcattagatcttcttaccttanaaaaaaaaaaaaaaaaca

SEQ ID NO: 209590 - DNA, 698 bp, Homo Sapiens; identical to SEQ ID NO: 51235

SEQ ID NO: 209591 - DNA, 642 bp, Homo Sapiens
tgaaaccagactggaaagtcaaggctttctacagaggcctttccccctggcactgatgctgattaggaaagagtaagagggagggaagaagtggaaaggccttgaatgagggcgtgagagggtttggacccgaggagcttgtgatgtcaccagtgtgccctgcgggatctggggaacaggagaagtaggccagagaagtcgggttgaaaggtgtgtcgtttgcgtcctggatctcccttaatttaaccccataacattccattttacagataaggagactgatgctcactaagacactaatatgcccactcacacagcaagtcccaagtctctccccaaaatgatttgagaattttgaggcacacaaaagggagaaaattgagtgcccgtgatccaacgttctgcaactgtttggaaaccaggaaagtggaggagtggtagtacttctgaaccctaactaaaatatatcagcctgcaccatcagcacagcttgcagatgaatgtaatggccaggctattaaaactgaagtgaagtgaagaagttacaactgagttcgaattctgactcctccacagattagccatgtgagctgggaccctcagcaattttttgagcctcaggttccttatctgtaaaagggt

SEQ ID NO: 209592 - DNA, 565 bp, Homo Sapiens
caaaagcacaaacttgccctaacccacatgagcctggctgtggggaaagtggggacccaggtccctgagctgtctgctgggctccgtagagcggtggtgggcaggcaccttggcatctgtgcagagacggcccagtctggccaaatcctcttcctctcccctgctctaccttctccggcaccaggcagccccttaaaggaggacaaagtgtgtaaagcccgtctgctgtcttcccccaaatcctcagctcagagccttccgcttccagggccaaccccagccccgtttgctgcgttgtgtaagggcttggggtcttagaagctgctctttagcccagatacacatactcttttttgtctttgtgcaataatcagtgttcctggcagagcctgggccaagctgcagcctactgaggaggcagaggccacctcctccagaaagccctcggcctgggccgccgccgtgactctagcactctcagtcgctgtacagtttctatggtgtgaatgaacttccctcctagttgctgatggcgctggtacctgctggcccatggcccgggtgt

SEQ ID NO: 209593 - DNA, 504 bp, Homo Sapiens
  misc_feature (432)..(432): n is a, c, g, or t
tctacaccaacccttccgtctaccctgctcacatgtacagtgacggggaactcaccaccttttgaagaggcagttcattttctttgcaaagctctctcctaacttcctccgtaaattccagccagcatggccacatgggtcacgcctggtgccttcacacatttgaggggtcttcgtctctttttaaagcttagaggtacaagctcaggacagtcttcagtaaggaaatttgtggatttccctttggatctttcttcctctccagcccacaagtggctctagtgagacgagcatttaagctgcaggtggtggcactcgggtctcagagccaccagacgtgcaggtgggacagtggttccagctccggctgcctgtcagcgtccctcccaggtgctagccctggcaggcacagccctcccctcatgccagcanaggaaatgctcttgatgagaggctcgctttaaagaagcccaaagcgtgtgcttatccaaggggttcagctat

SEQ ID NO: 209594 - DNA, 602 bp, Homo Sapiens; identical to SEQ ID NO: 55004

SEQ ID NO: 209595 - DNA, 526 bp, Homo Sapiens; identical to SEQ ID NO: 40057
  misc_feature (462)..(462): n is a, c, g, or t

SEQ ID NO: 209596 - DNA, 520 bp, Homo Sapiens; identical to SEQ ID NO: 41867

SEQ ID NO: 209597 - DNA, 477 bp, Homo Sapiens; identical to SEQ ID NO: 45923

SEQ ID NO: 209598 - DNA, 464 bp, Homo Sapiens; identical to SEQ ID NO: 43495

SEQ ID NO: 209599 - DNA, 623 bp, Homo Sapiens
  misc_feature (610)..(610): n is a, c, g, or t
gcaagaggcggagtcttgctctgttgcccaggctggagtgcaatggcgctgtctcggctcactgcaagctctgcctcccaggttcatgccattctcctgcctcagcctcccgagtagctgggactacaggcgcccaccaccacgcccagctaattttttgtgtgtttttagtagagatggggtttcaccgtgttagccaggatggtctcgatctcctgacctcgtgatccccccgccttggcctcccaaagcactgggattacaggcatgagccaccgcgcccagccactattttttaagttagtagcacacttaacatataaccaaccttaagttagaaaagtcattttttgaaggcacagtttgtttccagctcaactgtggaaatcaaaatctgtctgcagtaccaaatcccatcccacagtcagcccagccctggcaccattttgcttgtctccatgaaatgtgtctagtctagagggtagcatttttttgtcgatcccaatcatcatgtgaaaagtttctggagccatgttacgtcttccttcattctctgtgaaaatgcaagcaactcatttataaagtagcatcagcaaccaggccttcctgngcatgggagtggg

SEQ ID NO: 209600 - DNA, 467 bp, Homo Sapiens
cggactcctgcctcactcatttacaccaaccacccaactatctataaacctagccatggccatccccttatgagctgaaagggaatcttactaatatgctgggacatcagggataaaccaggactgttttggggaaaccattctcaggtgtctacttcttctatcccgattgactttagctcctcaagggcagaaactatatcatatactccatagtatttgttctaactccagcacagggccttgtacatagagggcactgattaatgaaataaacaagaaagaggataagttgatgggagaagtgtggacagatggatggatggatggatggacggacggacggacgagtttctaacatgcttaaccttttctcagagaataagctagttacctgagtgaggacttactacttatttaaaagctcccatatttatcagttaaaaaaaaaaaaaaaaaaaataggt

SEQ ID NO: 209601 - DNA, 451 bp, Homo Sapiens; identical to SEQ ID NO: 40112

SEQ ID NO: 209602 - DNA, 538 bp, Homo Sapiens
caggcccctccctatgtgcaggagacaagcagcccaagaaacaggagaaaaacccagtgttggtgtccccagagtttgtggatgaagctctgtgtgcgtgcgaggagtaccttagcaacttggcccacatggacatcgacaaggacctggaggccccgctgtacctcacccccgagggctggtccctcttcctccagcgctactaccaagtggtccagtgagtcccctgcagctgggactttgggctgtgggcaggtgcttagggatagaccctttctgtctcgtgcagcccctaccccttccccaagcctcccgctcgtttaccccgctgttctgctcaggaaccctcgaggactcccactgcctccgtgatagggtctgggccacttttcttggttcttggcatagcatagtcactaagagcatggactgtgccaccaaatggacagcacattacccaaagtgtgtgttgtgtggatgttaattctacaggaagtaaatagattttatgaaaaaaaaaaaaaaaaaaaaaaacact

SEQ ID NO: 209603 - DNA, 578 bp, Homo Sapiens; identical to SEQ ID NO: 45058

SEQ ID NO: 209604 - DNA, 572 bp, Homo Sapiens; identical to SEQ ID NO: 45853
  misc_feature (505)..(505): n is a, c, g, or t

SEQ ID NO: 209605 - DNA, 516 bp, Homo Sapiens; identical to SEQ ID NO: 54975

SEQ ID NO: 209606 - DNA, 480 bp, Homo Sapiens; identical to SEQ ID NO: 49075

SEQ ID NO: 209607 - DNA, 506 bp, Homo Sapiens
gttacccaggggagagggaggggcatcgggaggcctcaggaatgctggaacgttctgtcttgatctggttaatggtcacctgggggcatatttgcataaaaattcaagttgactattctagatttgtgcttcttactttatagaagttatgccctcagtaaacattttgaaaacataaagaccaggcagaggcagggaagtaggcaggtgtgcggcctgtattggtagcagagtcctccctgagggctggatcattagggaggtagtgggcccagggaggaggcacgggaggttaatttagaaaggtggcccaggctgggtcatggtgggcctcagaggccccactaaagaatcagacttggccaggtgtggtggctcacacctgtaatcccagtacttttgggaggctgaggcaggcacattgtttgagcctggggattcaagaccagcccgggcaacatggaaaaacccgtctctacaaaaaaaaaaaaaaaaaaaaaacgcgg

SEQ ID NO: 209608 - DNA, 585 bp, Homo Sapiens
gcggcttctttaaatccagcccttcacccgccccctagagaagcagtgaaaccccttggctagtccagctggaagagctagaccgcaggagccgcgccgtcttcctaacctcgcctcggccttcgctccacagtggagagtgggagcctagctgtgcttgatgctgaatgcctgttttgagagtgtgagtgggatcatctacagtaaatacttgcaaagcatggcactgtggctctggggagctggtacgcctgtgctgtaaccatggtactcagtccttccaaagtgtttattaatcaagcacctgtcatgtgccattgagcccacgatggggaatgaggacagtccctgcccccatgaagcttgtgtcctgttgggaggacagacaggtggcccagcagttgcagcatggtgtgtgcacacgtttggctggtggaaccatgtttctaccactcatggtcaaaaaaagcccaccaaagtcctgggagttcacatctgtgtgatgatacggcaacattgtttgtaatggaaagactggacacccccagtgcccatcagtgggggagtcattaaataaactatggt

SEQ ID NO: 209609 - DNA, 483 bp, Homo Sapiens
gctgcagtgagctatgattgcggcactgcactgcagcctgggacaatgagactgtgtctctaaaaataaaaaaaaaaaaaacatgatacatgctattaaaaaagacagcaaagcaggagtataagaaaggaaattcacccgaggtcgcagggccttgagtactcattttggtgctgattacctctctgcaaatggacacggcatcataaattggtagtttcctgctctttttgtgtaatcttttccagttaatgtgaagcctctgggggctgccctcgtgcactgatggttgtgtggagtcgggggcggcagtgcgattcccttttagctgctgcatggggggaactcaggctttccagctgcttcctggggttccatggggtagacccctcaaccgcttcagctgccccgttaacaggaattgacttggtttcgtttggtgctaccagcagtcctgtaataaactagctatccatctgtaaa

SEQ ID NO: 209610 - DNA, 637 bp, Homo Sapiens
aggatgagcagaactcctatgcagcctgagagaagttctctatgtgtctgtatatgtacacctctgtgtgtgtgtgtgtaacctcatggttgtgctcaggctgacagggagggcaaagagtgaaaaggaagcatctctttcttgttatccaacattgcttcaaagatgcccaacccccgtagtagcaggcagttcccaagtggagggtcggggcagaggcctccaccaaggccatcaataaccaggtgtgagctacaggtctctgtgtaatgtgaagctctcccgtatttcatttctgcacccagggggcggctctgcaggattgcttacggagaactctgtgtctggcacctctctccacaaggcccaggcgcccagggtcccaccgacctgcccaggaatgcatcacattgttctctggtgctgtaatttggctgcaggagctaggctgaatgcctcccagggatgagaaacatactctccctggcgtcctcccttcgccccagctagcttgagcttctgccctatgaccactgagtgcatttaaataaaaacctcagaaagactgagaaaaaaaaaatcctaattatctctcttctgttaagccatgtagagactcgtgtcctgagtgggtctg

SEQ ID NO: 209611 - DNA, 652 bp, Homo Sapiens; identical to SEQ ID NO: 48127
  misc_feature (582)..(582): n is a, c, g, or t

SEQ ID NO: 209612 - DNA, 566 bp, Homo Sapiens
ccaggcttcgttgcccccagcgacccaaaagtccgatttccccgccttgattctccccacttcccaatacaggcgtctggctccgcagcagaacacgaagtttgcattccccaaggggcggccagggggcggaccagggaaaggtagtcctctgcattttgccgtgtgctggaatggtgtagagtgacgatgaggtggcggtaaggggttgagcgctcacgcgaacgcctaagtgaccagaacgactggtgtgaagccgtgatctgactctgtggagcctgggactggtttcagcgagagcctctgtactgctctgtagtctctgctaggacatggacgaaaagggacgcagccgggagagcgactgccccaggtgggggctggggggacgtaagggaagaataataattatctggctgtgtttttgtttaaaaaaaaaaaaaaactggtgtaaatctccatagacttcctatcctcgctcccttcacccacccacgcgctcccaagatgcaataagcaaataaaaagactaataacgctgtaaaaaaaaaaaaaaaaaaacgcgg

SEQ ID NO: 209613 - DNA, 558 bp, Homo Sapiens
tggatctaaataatacaggattgtctagaagcggtttccaggccaccgctctcctgcctacatcccatcatggctgctgcggtgtcactgggctaccgtgagatccaagttgaaatcagaagcctactttgatggtaggtttgaatgacgtgtcctacagcctcagaggcagcaggaggctagcaaagcttaaatgcctccttctctgcccccagcctctgtcccccttggaggagggctgtaggaagattccctcttcctgccaagccaccttccagtgagctctggatgaagctctggccaaccaaagacactgtccccacagcaggtgcctggtgggccacgtgttctcacactggtggaggagctgggcttctctccaaggcacaaaccttactatggaaagcagccatatttgcagataccactgtctccttttgtcctcttcgtggctggaattcaaaagcatgtatttctgaagcctcttgtgacattgttttttttttttttttaattaaacagaaaagatatttgacaaaaaaaaaaaaaaaaaaggac

SEQ ID NO: 209614 - DNA, 646 bp, Homo Sapiens; identical to SEQ ID NO: 53117
  misc_feature (619)..(619): n is a, c, g, or t
  misc_feature (624)..(624): n is a, c, g, or t

SEQ ID NO: 209615 - DNA, 629 bp, Homo Sapiens; identical to SEQ ID NO: 48585

SEQ ID NO: 209616 - DNA, 576 bp, Homo Sapiens; identical to SEQ ID NO: 45322

SEQ ID NO: 209617 - DNA, 588 bp, Homo Sapiens; identical to SEQ ID NO: 51969

SEQ ID NO: 209618 - DNA, 663 bp, Homo Sapiens
  misc_feature (554)..(554): n is a, c, g, or t
tgagatttttctcagggcctcagggaaaacagctttctgagccactccaattattttacctttcaatagcacttatggctacaaagtgccatacaaacatttattggctcataacctgacttcaaactagggggtaatttgaagtgccaaaggttatgctctcatctttctactcaacttcttaagtcaataattaatacttcactgacacattaaaagatacaaatgagtaactattatcacatagccaggaactacaatataatctatcttaatactttgtaattcggagtcaaaattatggggaaatgttacagcagattggatttttagaaataaaaatatagcactaagcacttacgatgtgccagttataaaaagaaacaaaaactaaagaaatcaatgattttgaatcaataaatcttccttttcaggaaattaatttctgtataagaggtgttaatctcaaaagtcaacatgctcctaacaaccaggacaactaggcaacaggaacaagaaagtgacttcataaaactttcaaaatttgatggcanaagactcagagattatactgaatccttagaaaggaagagcacacgaggtcactataacctgtggcttcataaaaatattaagcccaatattttagaactagacagaatt

SEQ ID NO: 209619 - DNA, 1000 bp, Homo Sapiens
tgcagtggtgcgatcttggctcaccgcaagctccacctcctgggttcaagtgattctcctgcctcagcctcctgagtagcggggattacaggcgcccgccaccacacccagctaatttttgtatttttagcagagacaggctttcaccaggttggccaggatggtttctatctcctgaccttgtgatccacctacctcggcctcccaaagtgctcgaattacaggcgtgagcaccggcgccaggttcagtcatttttaatgatctcagatgaccaagccagcctttggagggttctctgtcttacttctgactttacttgtggtgtgaccatattcattataatctcaaaggaggaaaaaaaaaaaaaaaaaaaccttgtttaaaaaaaaaaaaaaagcctgggcgcggtggctcgcgtgtaatcccagcactttgggaggccgaggtgggtggatcacgaggtcagaagatcgagaccatcctggctaacatggtgaaaccccctgtctactaaaaatacaaaaaattagccaggcgtggtggcgggagcctgtagtcccagctacttgggaggctgaggcaggagaatggcgtgaacccgggaggcagagcttgcagtgagccaagatttgccactgcactccagcctgggcaacagagcgagactacatctcaaaaacaacaacaacaacaaaaagtctcgttctgagcattccagtagcttctttagtgtatgtagttagttgtaccataagtagttggtttgtgtgagatggttaaaaaggccaaagataaatgtttcatttatttgccttttttgtctatgaaatggctgcttatttatttaggcctatttgatgtatgtgtgaaacaatattgtgcaacaataaacccaaattttattttgctgagttgttctaacagcaacaaaaagaagttaaggaagagaagaagaccagcaaatgcaaccacagagtgactagtgaagtagatgaaact

SEQ ID NO: 209620 - DNA, 663 bp, Homo Sapiens; identical to SEQ ID NO: 49205
  misc_feature (13)..(13): n is a, c, g, or t

SEQ ID NO: 209621 - DNA, 477 bp, Homo Sapiens; identical to SEQ ID NO: 54209

SEQ ID NO: 209622 - DNA, 601 bp, Homo Sapiens; identical to SEQ ID NO: 46984

SEQ ID NO: 209623 - DNA, 634 bp, Homo Sapiens
  misc_feature (501)..(501): n is a, c, g, or t
aatgttgcaaaaagagttacagaagaaacagaaggcatcatggtacatcccaaccaggagcctgcagtgatagctggacaagggacaattgccctggaagtgctgaaccaggttcctttggtggatgcactggtggtacctgtaggtggaggaggaatgcttgctggaatagcaattacagttaaggctctgaaacctagtgtgaaggtatatgctgctgaaccctcaaatgcagatgactgctaccagtccaagctgaaggggaaactgatgccaatctttatcctccagaaaccatagcagatggtgtcaaatccagcattggcttgaacacctggcctattatcagggaccttgtggatgatatcttcactgtcacagaggatgaaattaagtgtgcaacccagctggtgtgggagaggatgaaactactcattgaacctacagctggtgttggagtggctgctgtgctgtctcaacattttcaaactgtttccccanaagtaaagaacatttgtattgtgctcagtggtggaaatgtagacttaacctcctccataacttgggtgaagcaggctgaaaggccagcttcttatcagtctgtttctgtttaatttacagaaaaggaaatggt

SEQ ID NO: 209624 - DNA, 475 bp, Homo Sapiens
gcgtccttttttttttgtattctgaagtccttcagcacttgattcctttaagtttaatcttggtattctattgggaatcatatggaaatgtacaatgatatttattgaatgaacaggaaacagggaaagacattgaccagaaaaagtgtttattcatcaagtctttaaagatacaaaaacacgtgtcttctgtggagctctgagaacaggactccagcaaagcacttttcagccttgtggtcttcaagcatttccaagatctgtgacattggaaagaaaaaaaattaagacagatttgggtctccatgagcagagagtattctttcccttagttctgggtagcatagtgcccaaggaaacctaatcagtacagtgggaaaccaaatctattccaaatcattacccataagcaatcctatggactctctgaggtttgacagagtcagcggccctctccaataaatgtgtttttcta

SEQ ID NO: 209625 - DNA, 554 bp, Homo Sapiens
tgtacccctcaccctttacatacccagaatcatcagtatgtcacttcctaatttctatcagtgtatctcattatttcatactgttttactaatcctaagtctaaacagatttgctcaaaaggagaccattctattttttaaagtacttagtgatacacgtataagctttgcatggacgaattaaataagcacattgaccttttcttgtacattcagaacctgaacatccatgtgaaaactgggtccatttttgagagatgtgaaactacagtttatttgtaataaataaatataatctatccgtatatgcatatatctatatgctgtgttaagtggtaatgggtacattacagtctgtgagagatggatcgctccctctgtaaggaacaagacgttctcagctgatgtcacggtaggtttagattctgtagagtgttccccaacccgcaccgttctgtacctctcacaccactgcttgcccgggcagtagtggctgaccaataaagacctttacctgttttgtatggcaaaaaaaaaaaaaaaaaaaaaaggac

SEQ ID NO: 209626 - DNA, 628 bp, Homo Sapiens; identical to SEQ ID NO: 48051

SEQ ID NO: 209627 - DNA, 621 bp, Homo Sapiens; identical to SEQ ID NO: 52115
  misc_feature (581)..(581): n is a, c, g, or t

SEQ ID NO: 209628 - DNA, 674 bp, Homo Sapiens; identical to SEQ ID NO: 44315
  misc_feature (661)..(661): n is a, c, g, or t

SEQ ID NO: 209629 - DNA, 751 bp, Homo Sapiens; identical to SEQ ID NO: 52671
  misc_feature (665)..(665): n is a, c, g, or t
  misc_feature (716)..(716): n is a, c, g, or t
  misc_feature (737)..(737): n is a, c, g, or t

SEQ ID NO: 209630 - DNA, 696 bp, Homo Sapiens; identical to SEQ ID NO: 53145
  misc_feature (19)..(19): n is a, c, g, or t
  misc_feature (74)..(74): n is a, c, g, or t
  misc_feature (638)..(638): n is a, c, g, or t
  misc_feature (669)..(669): n is a, c, g, or t

SEQ ID NO: 209631 - DNA, 315 bp, Homo Sapiens
ccaaaatggatggaagaatgcgcctaaattgagctgtcaggcacttggctgcgtaaccatgctttctggattgtggtgttgaaagtgccatcctgtgtgctctctccggatggctgtcacgtacttgcgtctgagaacagtgtatggacctgcatgagcactaatcagtcttcctagcagacttgctctttctctggtcgtatgccgccagatcctctgagaagagagtgggcctttcccctcaatgggcaaagaaccagcttccattttaaaagctctcagaaaaaaaagaaaaaaaaaaaaaaaaaaacgcgg

SEQ ID NO: 209632 - DNA, 704 bp, Homo Sapiens; identical to SEQ ID NO: 52466

SEQ ID NO: 209633 - DNA, 648 bp, Homo Sapiens
ctagcgcctcccctccctccggagcaggattccccagtgaacaaactgctctacgccctgggagatcccacgctacaagcagatggtggagaggtactatgcggacattcgccagagctctccggcgagctaccaggagatgaactctgctttggctgagctctccgggaactacacttctgctccccactgtctggaggctctgcaagaactctacaaccacatccacaggtactatgatcagattatcagtgccctggaggaggaccctgtgggccagaagctgcagctggcctgccgcctgcagcaggtcgccgccctggtggaaaacaaagtgactgacctgtgagctctggctcagacagcagcaagccggatccaccaacaccgcagcgccttatgaccccggaaccgagccagccactgaggggagctggcagagcctgggggcacagggtgcaaagccaggcactgtgcccagcagtgggctccctgcctgccacctcccctgccagcccacccaccttccccccacctgagattgtttctaatttataaggatccccctccttcgccctctccccattgtatttatttgcctgctggaaaatcacatccggaaatacaatagaaatatgtctttttatt

SEQ ID NO: 209634 - DNA, 699 bp, Homo Sapiens; identical to SEQ ID NO: 45473

SEQ ID NO: 209635 - DNA, 668 bp, Homo Sapiens
ctacggtgtcgggccttgaactactacccccagaacatcaccatgaagtggctgaaggataagcagccaatggatgccaaggagttcgaacctaaagacgtattgcccaatggggatgggacctaccagggctggataaccttggctgtaccccctggggaagagcagagatatacgtgccaggtggagcacccaggcctggatcagcccctcattgtgatctgggagccctcaccgtctggcaccctagtcattggagtcatcagtggaattgctgtttttgtcgtcatcttgttcattggaattttgttcataatattaaggaagaggcagggttcaagaggagccatggggcactacgtcttagctgaacgtgagtgacacgcagcctgcagactcactgtgggaaggagacaaaactagagactcaaagagggagtgcatttatgagctcttcatgtttcaggagagagttgaacctaaacatagaaattgcctgacgaactccttgattttagccttctctgttcatttcctcaaaaagattccccatttaggtttctgagttcctgcatgccggtgatccctagctgtgacctctcccctggaactgtctctcatgaactcaagctgcatctagaggcttccttcatttccctccgtcactc

SEQ ID NO: 209636 - DNA, 697 bp, Homo Sapiens; identical to SEQ ID NO: 53928
  misc_feature (41)..(41): n is a, c, g, or t

SEQ ID NO: 209637 - DNA, 737 bp, Homo Sapiens
  misc_feature (721)..(722): n is a, c, g, or t
ccaattaaacctcatagtgcaagttctttgtctaaagggtcttctgttgattattctgcaaggaagataattaataaaagcctaagttagaagttcgtgcttctggccaggtgcagtggctctcacctataatcccagcacttgaggaggctaaggcaggaggatgacttgagcccaggagtttgagacatttcatggtatgtaattaatagttgtcattagaacattagttccatgagaacggggactttgttttgctcactgctgtctacccagtacatagaagagtacacgatgcattgttaagtacttaagatttattgaatgagaactgcattgtacaatatggtgccactagacacgtctatttaattaaaattaaaatataaaactctaaaactagccatgattcaaaggttcaatagctatatgtgactagtggctaccatataaaacatttccatcacaaagttccatttatcagatcttatatagaaccttgaataaaatttaatagacaagtgattttgtatttaacatttcacctttattgaatgcctataaggccatttgaataacggatcatgtacaaagcaacaggaaaaaaaaaactgcaagcagtaaaggttgtgcaggtgatattcagtaacactgcagtgtagccagagcaaggacataaaacttccttagcttttgtagtctgtggaaatcaaacttctannagagaaaacgaatca

SEQ ID NO: 209638 - DNA, 687 bp, Homo Sapiens; identical to SEQ ID NO: 46746
  misc_feature (596)..(596): n is a, c, g, or t
  misc_feature (657)..(657): n is a, c, g, or t

SEQ ID NO: 209639 - DNA, 446 bp, Homo Sapiens
ggagctgtcagatggagaaataaaagtggccattagtactgtgagcatgaaccttgaggtaagggtgggaatgcttttttagcattgattgatttcccacaattgcagtctgagcaactggaatgtaactctctccattggataagtccatgatagtcctttgcttctttgtgatacatttgacttggaatatagtggcaggttattatttgggtgaaaacactatgctaagtcaatgaaaaatgccaaacctggattctcaagatgaatgctctttcattcatctcagtaaaacaaagcctaaaacaaacactcagatgtgggtgtatatttaacctgtttaatagcaattatgatatgtgtgattaggttcacttccatattttctgtgtaccaccctgtattgttcatagaacttttcttaaaaaaaaaaaaaaaaaataggt

SEQ ID NO: 209640 - DNA, 532 bp, Homo Sapiens; identical to SEQ ID NO: 45861

SEQ ID NO: 209641 - DNA, 595 bp, Homo Sapiens
cgggaccgaattaatcgcctggcccctcctgtggccccggggaaaccccagctggacttgttctcctgtatgctgaaacaccgcctgaaactgaccaacagcgagatcatcagggtgaaccacgccttggacctgtacaacacggagatcctcaaacagtcggaccagatgacagccaaactctgctaacccgggactccttgccatggacttttcctgttgttgtacacacacaacagaacaaaatgaagcaaaacaaaacaaaaaaacccacaaaaatttgtaaaatgtaattaatattcaaagaaaaggaggaaaatcttcatttgttggaaatgaaaacgttctagcaactgtataaaagcgttgggcatgtttgttatttctatactcactctgtcatgaagaagggtctcagccttttgtggagcattgagggagttgcttcttaggcctcaggtgctgtattgggggagaagggagaaagcatatgcaatgaattgtaaagatctctgctgtgcaggtgctaagattaaacactaaaaagaaagagagatatatgtaatgtacaactgacactgccatttttcctttt

SEQ ID NO: 209642 - DNA, 638 bp, Homo Sapiens; identical to SEQ ID NO: 45407
  misc_feature (586)..(586): n is a, c, g, or t

SEQ ID NO: 209643 - DNA, 652 bp, Homo Sapiens; identical to SEQ ID NO: 45463
  misc_feature (611)..(611): n is a, c, g, or t
  misc_feature (633)..(633): n is a, c, g, or t

SEQ ID NO: 209644 - DNA, 663 bp, Homo Sapiens
cgggaaggtggagccagagctgggaagtcaggctgtggggaagctgccgaagggcttgctggggacttttggtcattcatttacgtattgggtgattcacttacccactcaccaactcattcattcatgtctttctgggatgatttcatcactagttgacttccttgttcatctgttcattcattcattcttctatgcattggttagttcatggaatatctcactctttcattcattcatgtccttctgcaatgattcattcactgctttgttcatctgttcattcactcattcttctatgcattgatgaaatcactcattcagtgatttattcatctatactcatgcttcaatgcattgatttactcatttcctcatgcatttattcattcatctatgcattggttaaatcactggccaactcactaactcattcattcattcacacttttctgcaatgatttgttcacttgttcactcccttgcttatctgttcattcactcattcttcaatacattgaccaagccattcactgacatttattcagctacatttattctttcatgcattggtttctggatttatttggtcattcatttatttattttgcacaattaatgtatttttaattgacacatacaaactgtatatattttcatgtg

SEQ ID NO: 209645 - DNA, 629 bp, Homo Sapiens; identical to SEQ ID NO: 55888
  misc_feature (605)..(605): n is a, c, g, or t

SEQ ID NO: 209646 - DNA, 704 bp, Homo Sapiens; identical to SEQ ID NO: 49674
  misc_feature (674)..(674): n is a, c, g, or t
  misc_feature (690)..(690): n is a, c, g, or t

SEQ ID NO: 209647 - DNA, 706 bp, Homo Sapiens
  misc_feature (639)..(639): n is a, c, g, or t
ccgcccgcgtttttttttttttttttttacagctttaaagtattaaacagaaaccaacaaagaagaatatgagacagggacgtacgtggtccgtaaagtttaactttctgatccttaataggaggataagcgccgtgatagagaaatccaaaggtcatttgtattacgatggctagataatgtaatgaattccaatgtctgtgcatcagcgaatacgtcatcaaaattgctacaaaacaataataataggttgttcacagcttaaaatgtttaggtagtgaagaggaaagaatataacctacattatttattgactacttatatttccctcattttacggaagagatctatcaatttacgtactcaataatagaactacaacatggttgcactccttaatctcaggatagagataacaatttttataaatctattacattatgagaacattgttagtactataaaaatcaggatcagttaaatgttctcttaaaataattttcaatattaaatttttaagtaactcagtggatgcatattttccttatttttggaaatttgacttataaagtttaagccatgactagaatatttacatcattaaaataaaatttccaagtaaaaattttcatcttaaangtatacggaaatgattttgctacattattctaggattttacaaagtaattcacctttagaaaaaaag

SEQ ID NO: 209648 - DNA, 767 bp, Homo Sapiens; identical to SEQ ID NO: 58091

SEQ ID NO: 209649 - DNA, 497 bp, Homo Sapiens; identical to SEQ ID NO: 53236

SEQ ID NO: 209650 - DNA, 585 bp, Homo Sapiens; identical to SEQ ID NO: 47960

SEQ ID NO: 209651 - DNA, 585 bp, Homo Sapiens
cattcgttaactcagacacttaacctttacctttacttctgttggcgaaaaagaagtgctcctttttattacactgatttatccttccatcttttccttggcatttaccatcttccatctcccccttcacttttttcagatatgtctacaaacagactccaatctcagtcgcactaaaaataagaacaaaacctaaaccttacagttctttcaaattattaaatcaatttattattcctttctttggcaaaggttccaaatttttactttatatttgtaattttactatttgcattcagtcccagcgcattaatctgaatctgctgtcctaaaatacactggtgaaaacattacttgtacaatctcctatcagaaaactgttcatctactcactgtagtgccctccttgaaatgtgtgtttgttcattcaactaacaatatttggggatccctgtagtaaacactgtatgaattttacacagtctggccatcaagaaagatcacggagtatattctagatggggaggctactaagtgaataggaatcaccacgctgggctgtttattaggtacagtaataaacat

SEQ ID NO: 209652 - DNA, 546 bp, Homo Sapiens
ccacaaagtagattatctaattaccatcaaaatgagtcagaagcaaaaaacaacaccctccaacagcctcttaggagtacaccctgttctgctactaaaatactagactcatttccctggtggtgggggggaatgcaggtatagatcagaaatataatccaccttaaaattagtactaatgatcacattatttcacaagaactctgctggatgtacagctcttaacattttattaagccatttgtgtagcccaccacgtttctttgtggtgcttgtcctgtgtggaagattgtaaatcttgggcctgttgcatacttccaagggctttaaagcaatgtgattaacagtacttggcctgctgcttttggcttactttgtatttttagctagatgctattatagtgttgaaaggatatggattctgtctgggatgcatttgttgtcctttcagaacccttcctcccattaccctgtgaataaaaacaaatgggaccccctgagaaggacatcttcctacagtgatcacctcaccagcccagtgttgtg

SEQ ID NO: 209653 - DNA, 500 bp, Homo Sapiens
tagagctccgaaggcacttagctgctgccagaccaagccctctcaccctcctgccctctggggtgcggttctttacacacccgtctccttccttcaaccagtggaaggcagcgaactggcccgctcagcacaccgcggcccagggccacggcaggcgctcacaatcgagcacacgcgtgtgcacacacatgtgcacagatcagtgtcagaagcatcgacctgcgagctcacagagctgggagcagagcacccacgcacaccccgaatggctatggaagctgcagggcgccagggacactgggagtccctgctctcatggcaaagcagggacgggggacttaaaagccaccaacaggaaaatcggggaaaaaagggagatggtggtaacagttggacactatttcttggcaaaaccgtggaaaaacacgttctacaccagcaggtggcaaattgtggccgccatctgtgtttgcaaataaagtttaactggagtttgaaaa

SEQ ID NO: 209654 - DNA, 601 bp, Homo Sapiens; identical to SEQ ID NO: 45216

SEQ ID NO: 209655 - DNA, 497 bp, Homo Sapiens; identical to SEQ ID NO: 55906

SEQ ID NO: 209656 - DNA, 577 bp, Homo Sapiens; identical to SEQ ID NO: 55127

SEQ ID NO: 209657 - DNA, 553 bp, Homo Sapiens
ctcaaggtggacgtgtacggacgctcccacaagcccctgcccaaggggaccatgatggagacgctgtcccggtacaagttctacctggccttcgagaactccttgcaccccgactacatcaccgagaagctgtggaggaacgccctggaggcctgggccgtgcccgtggtgctgggccccagcagaagcaactacgagaggttcctgccacccgacgccttcatccacgtggacgacttccagagccccaaggacctggcccggtacctgcaggagctggacaaggaccacgcccgctacctgagctactttcgctggcgggagacgctgcggcctcgctccttcagctgggcactggatttctgcaaggcctgctggaaactgcagcaggaatccaggtaccagacggtgcgcagcatagcggcttggttcacctgagaggccggcatggtgcctgggctgccgggaacctcatctgcctggggcctcacctgctggagtcctttgtggccaaccctctctcttacctgggacctcacacgctgggcttcac

SEQ ID NO: 209658 - DNA, 660 bp, Homo Sapiens; identical to SEQ ID NO: 40726
  misc_feature (596)..(596): n is a, c, g, or t

SEQ ID NO: 209659 - DNA, 1000 bp, Homo Sapiens
  misc_feature (703)..(703): n is a, c, g, or t
  misc_feature (769)..(769): n is a, c, g, or t
  misc_feature (791)..(791): n is a, c, g, or t
  misc_feature (953)..(953): n is a, c, g, or t
  misc_feature (971)..(971): n is a, c, g, or t
cccccttcctgcccactaccttgtttccctccagttgcgagagaaaacattgattgagcattaactatgtgccaggcttgtcctaagtcctttgcatgtattcactcaaacaatcctcacaacattcctatcacatctcccatttcacagtgagggttctaaagcacgtagtgggtgaggaacttgtccagggtcacacaactaagtgggggtggagaaacatcaaatctaggtggtccaggtggtggccagaacccatcagcacctcactacagctgcctccagtttctcgctctaggaaatactcttccctgtcaactcctgttgtcctctgggctcagttgacatgtcatctccttgaggaggacatcctgagatgctccccgactagggtgggcacccacttccacactccaaatgcctatttgacctgtgtatcgctgcatccccactgcctggcagatagcaggcccctaataaatatgatttgagcaaataaatatagttcttcaaaaaatagggaggacttcttgcttcaggtaacggtaggctaggacatttggaccaaccctcctgcagaaaatagccatttattttgatgcaatatatctggctatgactagagatttcaaatatttggagggctattatgtgaagaactaaacttactctttgtgacatagaggtcagaaattggtcgttntcatagagtatgagagagacagattgtgctcatcataagtatcttttttaaagttagacttaatanatgggctgcctttggtagtggntgagttctctgtcacgaaagagatcagccacttgctctgagaaagcatggagaatatccaacatggtaagggtcgaccacctcatctctgaggcccccctcctcacttaaggtgccatttgcaggtgggaaccactggggctgagtgtctcaagaacctggngtttcaccagctgggtgnaaaccctggggcttgggttggttttggga

SEQ ID NO: 209660 - DNA, 1000 bp, Homo Sapiens
  misc_feature (473)..(473): n is a, c, g, or t
  misc_feature (512)..(614): n is a, c, g, or t
  misc_feature (616)..(621): n is a, c, g, or t
  misc_feature (623)..(627): n is a, c, g, or t
  misc_feature (629)..(631): n is a, c, g, or t
  misc_feature (633)..(649): n is a, c, g, or t
  misc_feature (652)..(655): n is a, c, g, or t
  misc_feature (658)..(661): n is a, c, g, or t
  misc_feature (663)..(666): n is a, c, g, or t
  misc_feature (688)..(690): n is a, c, g, or t
  misc_feature (713)..(713): n is a, c, g, or t
  misc_feature (729)..(729): n is a, c, g, or t
tacaagacagcagccttcccgaaatgtcactactaagaattattcagaggtgattgaggtagatgaatcagatgtggaagaagacatttttcctaccacttcaaagacagatcaaaggtggtccagcacatcatccagcaaaatcatgtcccagagtcaagtatcgaaaggggttgattttgaatcaagtgaggatgatgatgatgatccttttatgaacactagttctttaagaagaaatagaagataatatatttaatggcactgagaaacatgcaagatacaggaaaaatgaaaatgttacaagctaagagtttacagtttaagattttaagtattgtttcctgagcataactccataagtaagaaatttctagttcacagacatacaatagcattgattcaccttgtttttttaacctggttgttgtaataagagctttgtttcaatatcactcttgagtaaagattanaataaagctaccattttacatttctatttcataatgaannnnnnnnnnnnnnnnnnnnnnnnnnnnnnnnnnnnnnnnnnnnnnnnnnnnnnnnnnnnnnnnnnnnnnnnnnnnnnnnnnnnnnnnnnnnnnnnnnnnnnnannnnnncnnnnngnnncnnnnnnnnnnnnnnnnnccnnnnccnnnncnnnnccgcccccctcccccccccccnnnctcccccccccccccccccctcnctcctcccaaaccctnccggggggggcacacctcccacccttggcacccggggcggagagccaccccccccccggggcggggccccttatgtggcaaccccccctcaaagaggattacaatcacccccgcggggtttgtaccgttcttcgccggccctccgcgggggccacaacagagtggccatattgccctccactttgcgagaagtacctccctcttcttggcgggggcggcttcacagacaaccccctatacacccctacgggttaccgcgaaccattcccct

SEQ ID NO: 209661 - DNA, 934 bp, Homo Sapiens
  misc_feature (136)..(136): n is a, c, g, or t
ggtgcgtgcctgtaatcccagctactcgggaggctgaggcagaagaattgcttgaacccaggaagcagaggttgcagtgagccgagatagtattactgcactccaggctgggcagcagagcaagattccgcctcanaaaaaaaaaaaaaaaaaaaaaaaaaaaaactgagcatggtagcatgcacctgtggtcctggctacgccggaggattgcctgaagccaggagttcaagaccagtctggacaaaagagcaagaccccatctctaccaaaaaaatttaaaaattagccaggcatggtgccgtacccatagtcttagctactcaggaggctgaggagggaggattatctgagccctggcggttgaggctataatgagccatgattgtgccactgcactccagccttggcaacacagtgtgagaccctgtctcaaaaacaataaaaacccaaaacaaaagaaccaagaaattactggacctgaggcctggcctttagctgctgccctgcccttgtgacctggtcactcgggatcccctgggcctaaacacacagcctattgtctacctcaagaaggctccccactgcttggctggcaattggggtggggctttgcaggccccacctgtcctggccccacggcgctggtgctgcaggcccccaccactgcattgttccgagctccccagcctccctgaaaagttgcctgcacctgatggcgatgaatcaagaaggccaggcgtgtcctgggccacaaagcaatcatggctgccaacccacaagggggctcccattggaaccttggaatgggggttgggcctcctttgcccaagggaacctgggggcccccaaaacaaaaaaaacggaaaaactggaatccactcccaccccttccggagaaaaccggggccaaacccgggcccaatcccagaaa

SEQ ID NO: 209662 - DNA, 1000 bp, Homo Sapiens
  misc_feature (562)..(563): n is a, c, g, or t
taaataatttgtctacttctagcattcacttacaaagagttcttaaaaacacctataataggtacttagatttcacaacttacttagatatttgtcattattcccattcctggtgtttttactggttcatatacaatggtattctattagataagaagctgctatgtgatctcagcactcactccttggttgtcaagaaatggtggataactcacaggattaaaaatgaatgaatataaaattttctgaaatagatatttaaaaaatcattttagcttgaagccaatatgtctggatcataggttttgagttcataatccagtaataacagctttcagctttctatgagtatatacaattctatacaatgataaatactctgcatataatttataaaaataacttctgttttacctagttaacaataaaacctatgtgtggagccaaatgttatgcagacaaaggtctgctcatcccataccagtgtatatatagtcaaatatgtgtctagtacaaataaaatgtatctctaaggcataaaatgttttaacacaccccttcnnccctcccccctttttccccctcttttttcttcccccttttcccctctccctttccccctctttttcccattcatccctcccccttatcccctttcccttcctccccaccctcccccccttcttccccctatcacaatttatttccccttttccgggggggggggccccccaaaaaaacccctccgcggggggccccgatttttgcgcacccccttctttttttcaaaaagggggccccccaagagggggccccaatttaaaaactgcggcggggggcgctttcttaataaatttgcgcggcggggaaaaagtggtggccggggggttttttggcgggaggaccaccctcttgtgggggcggggacctatttcggggaaaatcccctttcaggcagcctattaccccctcccggggataaacaacaatcattctctcg

SEQ ID NO: 209663 - DNA, 1000 bp, Homo Sapiens
gccgccctttttttttttttttgtcgggggatggagtttgcctaggcacaatctcggctcattgcaacctgagactgtgcctggtcaaatgattaagtttttagagatggggtcttgctatattggagtgtagtatctatttatatgtgtgaccatggttcactgcagccttgaactgggctcaaatgatcctccccctaaccttctgagtagctgggattacaggtacctgctaccatgcctggcaaatgatttcatttttaaaaacccaattgatataactttaggtatttacctattacataatgcatgtgtttataatatttccttctttgtatgtttatctgaacaatttagtattcagtaaaacacccaatgttttaataccacaaaatggttgtgaaattagaaaacattttacttttcatatgcctgctgtataatcagaagcataatctatttataatttaaaaattctaactgcacatttataaaacaaacttaccaagatgcagtcttatttgcacatctgaagctatttttataatagggtcctggaagataagttatttgaaaactataaaagggctatattaatataaaataaaattaagctgatacttgaggtcaaagtatttatggcaaaaataacatattagaaacagatttttcctggataatgcaaataaaatgcttagttcagcaacttattaccatagtaagggctcctggctgctaataaatttttattttattagaagaccatactggcccaggatggcttcccagttttcatttccaatatatcctgggcccgaaatatatttccttccaaatctcctgggcccttgggccctggtccctcccctattttccagcgaattacctccaaaaaaaaatcccccttcccccaaaaagggcggctgaaacgtcacttcctacaggccaaacacttggtatttccccaaatcttttccccttcaaacagcggggaaaactc

SEQ ID NO: 209664 - DNA, 1000 bp, Homo Sapiens
  misc_feature (714)..(715): n is a, c, g, or t
  misc_feature (717)..(718): n is a, c, g, or t
  misc_feature (721)..(721): n is a, c, g, or t
  misc_feature (723)..(724): n is a, c, g, or t
  misc_feature (727)..(731): n is a, c, g, or t
  misc_feature (733)..(740): n is a, c, g, or t
  misc_feature (742)..(746): n is a, c, g, or t
  misc_feature (750)..(750): n is a, c, g, or t
  misc_feature (755)..(756): n is a, c, g, or t
  misc_feature (763)..(763): n is a, c, g, or t
  misc_feature (780)..(781): n is a, c, g, or t
  misc_feature (833)..(833): n is a, c, g, or t
  misc_feature (842)..(843): n is a, c, g, or t
  misc_feature (857)..(857): n is a, c, g, or t
  misc_feature (1000)..(1000): n is a, c, g, or t
aattggcacatgcagctgtttgccaaagccttctttttttttttactttttaagaaattatgttagggaaaataaattctgcttccagggacaacttcatggagcctatttacaaattaagagtcagcttaatttgtaacatttctaccagagccaagaatcccaaattcctggtagattagtgttttatttctaaggggcttatgcattcggctccaactcaactcgtctatgtgctgccagtaattaaaatgttccacctcagactgcacaaatggcttatccttctttgtggcatggcgtctgtctcaggaaaaaaggttttatgaaattccatggcaacagtcccaacatgtttgagacttcagctaaaggaatggatgtattttggtgtgtagtcttcagtatatcactgtatttccgtaatactagactccaagctatgccagattgcttattcacctttgtgaaagaggagttgctcattacgttcctgaaatatcgcacatcctgttggtccttcaagggaccagagaaagagaatttggaagacaggtattagtagaagagaaaacgagggaaagggagccctttccaccagattagggtttcaagtctttgcagaagagaccaactttttttgttttcttttgttttgagacagtctctcctcgggtggcccagctgtggaaagtcccgggccaccctctaaanntnnccncnnccnnnnncnnnnnnnncnnnnntccnacccnnccccccncccccaagccccacccnncccccccccccccccccgggcccccccccccccccccccccccgcccccccnccggcgccnncccccccctacccntgcggcgcggcgcccgcgcgccccctgcctcccgttgcccgcctccctcttccccttccgcttgtctcccacctctgcgtcccccccccccttcctcccactttcctcctcaactcctcacctcctacttccgaactccccgn

SEQ ID NO: 209665 - DNA, 1000 bp, Homo Sapiens
gctcgcgacgaggaggatccggagccgccggtggctgcccctgacgccctctaggccagcaggacccgcccggtcccgaccttccctcgagacccgccaagaaataaaggcgatgatttccgaccaaaaaaaaaaaaaaaaaaaaaaaaaaaaaaaaaaaaaaaaaaaaaaaaaaaaaaaaaaaaaaaaaaaaacaaaaaaaaaaaaaaaaaaaaaaacaaaaaaaaaaaaaggggggggcccccctaaaaattcccccgggggggcccagttttaccgacccccttttttttggaaaaagggggcccttttgggggggtttttttaaacccgggcggggggggggttttaaaacagggggggggggaaaaatgcccatttggggatttttggaaagacccccttttttggggggggggcaatttgggcgaaccccccccccaaggttttacggccttgaggggaaaataaccatttttccggggtatatggggggtaaaaaaccccccaacaatttttcgggggttgaaaaatttttctttcccggggtgtgttttttgggaaaattttttcccccggggcgcccggggggttccaatttgggggggggatttttaaaaaacaccgccccccgggggttttttttggggcgccctgaaacccccacagggggggtgtgtggattaaaaacccccccccacccccccttttggagaggggttctctctggtttttaaaaaaccccccccccccctccccttgggccccggaaaaaaaaaaaagaacgcccaccccccgcgggtacaatcgtgtgtttttggcgccccttattgtgggtcaccaacacaagcggcagcggccccccaattttttccccaaacacgagcttttttttctcggcgcccccaccaggggggggggggccccccacccctcccgggggtcttttattcggggggagccacacccccgcgcatattatggcgagaccccgaccctg

SEQ ID NO: 209666 - DNA, 1000 bp, Homo Sapiens
ctacagttggtctcttcccatggcgatgtccatctgccaccgtggcactggtattgctttgagtgcaggggtctctctttttggcatgtcggccctgttactccctgggaactttgagtcttatttggaactcgtgaagtccctgtgtctggggccagcactgatccacacagctaagtttgcacttgtcttccctctcatgtatcatacctggaatgggatccgacacttgatgtgggacctaggaaaaggcctgaagattccccagctataccagtctggagtggttgtcctggttcttactgtgttgtcctctatggggctggcagccatgtgaagaaaggaggctcccagcatcatcttcctacacattattacattcaccccatctttctgtttgtcattcttatctccagcctgggaaaagctccccttatttgtttagatccttttgcattttgagaactcccttggaaccattaaagaacctggtcagaccctaaatagtgggaaaaagggaataaatttttcccccttgtttccaaaaaaacagggtggcctggaacaacctcccccttcttttaatctacaaggttgtccgatttctccggccccaaaaaacggatattctccccccccaatatttgaggcctattcatctcgcgcctgtacggatacgtctttctgttatccttcatttccttgggaacagtttaaaaacacctttcacagcttctgtggatttcctcccccctttcgaaatcgctctgatctcctatatgtgaccgaccacccccgcggtacagtagaacttcccacaaccatattaagcgaatgtattcctctccccatctcctgattcatccctatcgtccgctcttctccattcctcttgtcgcgcacgctatcacggcgcgtaacatccattgtaccccccgtctatttccgactggacactatcttgtcggatcgtctcctcctatatcgctcttacgccccg

SEQ ID NO: 209667 - DNA, 756 bp, Homo Sapiens
gcctgggtggcgaattccgacgagggtggggggttgatttgtggaagcagagcacagcagcccaaatttgcttgtaatgtcggcggctacagaggaaaggccaagaatggacagattaataaagggccatctacaagccacgaataaggccatcaccagaagccaaccccgccagtccttgatctaggacttccagacttcaaaacttttctagcctgctggcctgccttcactgtcctgggggaggcttggagagaccaggtggactggagtagactgttgagagacgctggtctggtgaagatgtccaggaaaccacgagcctccagcccattgtccaacaaccacccaccaacaccaaagaggttcccaagacaacccggaagggaaaagggacccatcaaggaagttccaggaacaaaaggctctccctaaaagaccgccgcttcaaaaaaacctgaggaatggagtgggccaacactatccagccactctgaccagccgaacgaggaactcaatcaaaatgagccatagcgggaccacaagggcaaggagaccaccaccttctccagtctctcttcggacagccagtaattcccgggcaaggccagagacttcaagtctatctgaaaagtctccagaggtctaaccccagataaatagccaacagggtgtagagtacattttacaccccaaagagtgtgccccatggtgatgaaaataaagtgaacatgttgcaaaaaaaaaaaaaaaaaa

SEQ ID NO: 209668 - DNA, 1000 bp, Homo Sapiens
cgtgcagggtgtggagctggtggtgaactacgacgccccccagtacctgagaacctacgtgcaccgggttgggaggacagctcgcgctgggaaaactggacaggccttcacactgctcctgaaagtgcaggagaggagattcctccgaatgctaactgaagctggggcacctgagttgcagcggcacgagctctccagcaagctgctgcagccgctggttcctcggtacgaggaggccctgtcccagctggaggagtctgtcaaggaagagcgcaagcagagggcggcctaggctggggctcagagggccggagggactgaacgctcaccaccctgaccctccttccagagcagtgctgatcactggatcctgtatgtgaggaaaggaatcccccagtggacacagccttcctccccaagcacgtggtctctgcgccaggcagcccgggcgtcagagctcaagcacctgccccgactggagacttcagggcttgtcactttcagagtgtggaggtcaggatggctgcgggcaatgaagccttagtaaaacggtgaaaagtactcccagacggacgcgggcacccgtcatgcttttgctgagagttgggggcattaaccttgagctaatgttaaaaatcaagctcttggccaggcatggtggctcatgcctgtaattccagcactttgggaggcccaggcgggtggatcacctgaagtcaccagttcgagaccagccctgaccacatggagagaccctgtctctactaaaaatacaaaattagcccaggcgtgggtggtgcatgcccggtaatccagctactttgggaggcttgagcaagaaaatggccttgaacccgggaaagggggaggttccatggaactgaaaattgccccactggccttccagccgggggaacaagaaacaaaattccgtttcaaaaaaaaaaaatttcccgggccccggtggcccaaggcctggaatccccccccctttggggag

SEQ ID NO: 209669 - DNA, 1000 bp, Homo Sapiens
  misc_feature (663)..(663): n is a, c, g, or t
aaggagaagtttccgcaggactacttccccgagtgcaaatggtcaagaaaaggcttcatccggacgaggtggtgcattgcagactgtgcctttgacttggtgaatatccatcttttccatgatgcttccaatctggtcgcctgggaaacaagcccttccgtgtactcgggaatccggcacaaggcactgggctacgtgctggacagaatcattgatcagcgattcgagaaggtttcctactttgtatttggtgatttcaacttccggctggattccaagtccgtcgtggagacgctctgcacaaaagccaccatgcagacggtccgggccgccgacaccaatgaagtggtgaagctcatatttcgtgagtcggacaacgaccggaaggttatgctccagttagaaaagaaactcttcgactacttcaaccaggaggttttccgagacaacaacggcaccgcgctcttggagtttgacaaggagttgtctgtctttaaggacagactgtatgaactggacatctcgttccctcccagctacccgtacagtgaggacgcccgccagggtgagcagtacatgaacacccggtgcccagcctggtgtgaccgcatcctcatgtccccgtctgccaaggagctggtgctgcggtcggagaccgaaganaaagttgtcacctatgaccacattgggcccaacgtctgcatgggagaccacaagcccgtgttcctggccttccgatcatgcccggggcaggtaacctcctgccatgggcaaaatggtggggcttgcacgacctggcgggaaaaaaagcctccgccccaaaagacccctcctgagcccccctggaacccgggaccgaataccccccccttaaacccgcatccgacaccctctcccgccccacttcgcaaaaggggcagccccaccttttccgtcaaacgccccgagccctgccggaaacaacccgcccatagccccccctgactcgcgccccggcatc

SEQ ID NO: 209670 - DNA, 613 bp, Homo Sapiens
ggattcagggccagttgttggcaatattaaactccaggctgcgtttgaaagggtccttcactcgggcagccaaagagaggcgttcctgccaggataggttgcatcgctgcagatctccagccctacgtgcatacacacgtgcacacacacgtgtacacacacgtgcacacacatgtatgcacacacatgtatgcacacacatgcatgcacacacatgtatgcacacacatgcatgcacacacacgcacacacatgcacacatgcatgcatacatgcacacacgcgcgcacacgtgtgcacgcacatgcatgcacacagacacgcacacgcacacacatgcatgcacacacgcacacacatgcacacacacgcacacacgcatgcacacacacacatgcatgcacacacgtgcatcttggatatctcttgttaatgtcagccctctgccccaaactagatttgaaaacttgtaggtaatcaagttttctggttaagagaaataatcccagccaacagttagtaagctcttatgtgtcaggccttatccaaacagttcacacgaagaccagatccaaaaataaaagtgtgctttgtcctctgtgaaaaaaaaaaa

SEQ ID NO: 209671 - DNA, 533 bp, Homo Sapiens; identical to SEQ ID NO: 45350

SEQ ID NO: 209672 - DNA, 639 bp, Homo Sapiens; identical to SEQ ID NO: 47172

SEQ ID NO: 209673 - DNA, 456 bp, Homo Sapiens
ttttttttttttttttggtttgttttagctttaaagagacaaaagagttgcatgcagcatggaggaaagaggtagtaatctaatagaaaggaagcattagagcagggtttcccagcctcaacactgttgtcatttggggctggatcactcttggttatgggaggctgccctgtgcactgtgagatgtttagcagcatctctgtcattcacccactagatgccagtagcaccctttcctcccagttgtgacaaaaatatctgcagccatcaccaaatgtcttctagggggtaaaactgtccctggttgagaaccaccagattaaagtaagggaggaccatggagagagcaagttctgcagaacagaatgggacccaaagagcaaactatgtctgtataaagtggcaataattttgctaatgatcaaacacaaaattaattacctttatgtctggatc

SEQ ID NO: 209674 - DNA, 607 bp, Homo Sapiens
tgagaggaaagtcctcacatcaatagtacatatgaaagtgacctccaaggggattggtgaatactcataaggatcttcaggctgaacagactatgtctggggaaagaacggattatgccccattaaataacaagttgtgttcaagagtcagagcagtgagctcagaggcccttctcactgagacagcaacatttaaaccaaaccagaggaagtatttgtggaactcactgcctcagtttgggtaaaggatgagcagacaagtcaactaaagaaaaaagaaaagcaaggaggagggttgagcaatctagagcatggagtttgttaagtgctctctggatttgagttgaagagcatccatttgagttgaaggccacagggcacaatgagctctcccttctaccaccagaaagtccctggtcaggtctcaggtagtgcggtgtggctcagctgggtttttaattagcgcattctctatccaacatttaattgtttgaaagcctccatatagttagattgtgctttgtaattttgttgttgttgctctatcttattgtatatgcattgagtattaacctgaatgttttgttacttaaatattaaaaacact

SEQ ID NO: 209675 - DNA, 417 bp, Homo Sapiens; identical to SEQ ID NO: 45095

SEQ ID NO: 209676 - DNA, 578 bp, Homo Sapiens
gggcgtgagctactgcgcccaaccccatttttgtttaaaaactaataataatcacccacacatggttatgagtacctatattcccaactcctcaggaggctgacgcgggaggatggcttaagcccaggagtttgtggccaccttgagcaacatagcgagacttcatctcaaaacaaaatttatcacaataatcattttcacataagtatacctataggggaaaacctagaatatacatatagcagtcttgtccaacctgcggcccaacgcaaatctgtaaactttcttcaaacagtacgaggtttttttgtgattttttttcttttagctcatcaggtattgctagtgttagtgtattttatgcgtggcccaaggcgattcttcttcttccagtgtggcacagggaggccaaaagattggacatccctgatatacacattaacaggtgccatccttggatggcaggattatagagatttctacacattcatgtctgtactacttcattcttataaatacgcattttccactcgtaacaaaaaactgtgattgaaaatcgtcccgggtcacagtgtctc

SEQ ID NO: 209677 - DNA, 654 bp, Homo Sapiens; identical to SEQ ID NO: 48758

SEQ ID NO: 209678 - DNA, 615 bp, Homo Sapiens
acctctgtggtgttgctttaccaccgcgtccatcctgaggaagtcaccttccacctctacctgatcccaagtgactgctccattcggaaggaactggagctctgctatcgaagccctggagaagaccagctgttctcggagttctacgttggccacttgggatcagggatcaggctgcaagtgaaagacaagaaagatgagactctggtgtgggaggccttggtgaaaccaggagatctcatgcctgcaactactctgatccctccagcccgcatagccgtaccttcacctctggatgccccgcagttgctgcactttgtggaccagtatcgagagcagctgatagcccgagtgacatcggtggaggttgtcttggacaaactgcatggacaggtgctgagccaggagcagtacgagagggtgctggctgagaacacgaggcccagccagatgcggaagctgttcagcttgagccagtcctgggaccggaagtgcaaagatggactctaccaagccctgaaggagacccatcctcacctcattatggaactctgggagaagggcagcaaaaagggactcctgccactcagcagctgaagtatcaacaccagccct

SEQ ID NO: 209679 - DNA, 667 bp, Homo Sapiens
tgacctcatgtgattcacctgcttgagcttcccaaagtgctgggattacaggcgtaagcccggccaacatctgcttttaaccatgcattctgatatgcattatcagtgtcaaaaagattttctaagacagaggagcactacggccaagtgtccttttatgatatccacagaattcaaaattgcagagcctaaaaggcactaactttatcctgtcgtatgtcactgtggaaagcactcttcagagccatgttcccacacttgttttctcactgtggagtacatctgtgttggtgacttcagctaaacctgttccccagggataaatgcaacagcccatacaaaatcaggcatgaggacacagtccaacaacttcgtgtataaataaagttacacattcatcgccagttgcttgttttaaaaataaaaaaaaaaagtctccccacagatttactgactttcatgtaggatctgtgtttgtgtaatttgaagtaggcttgatttataaggtttgctatagctaacatttaaagaaatgtttaaattaggcacagtggtgcatgcctgtagtcctagctacacagaaggctaaggcaagaggactgtttgaggccaggagttcaagttcagattggacttcataagatcccatccattaaaaaaaaaaaaa

SEQ ID NO: 209680 - DNA, 614 bp, Homo Sapiens
acgaggacagtgaggagctgcaggccatatgcaagcttggaactggcttcagtgatgaggagctggaggagcatcaccagagcctcaaggcgctggtgctgcccagcccacgcccttacgtgcggatagatggcgctgtgattcccgaccactggctggaccccagcgctgtgtgggaggtgaagtgcgctgacctctccctctctcccatctaccctgctgcgcggggcctggtggatagtgacaagggcatctcccttcgcttccctcggtttattcgagtccgtgaagacaagcagccggagcaggccaccaccagtgctcaggtggcctgtttgtaccggaagcatagtcagattcagaaccaacaaggcgaggactcaggctctgaccctgaagatacctactaagccctcgccctcctagggcctgggtacagggcatgagttggacggaccccagggttattattgcctttgctttttagcaaatctgctgtggcaggctgtggattttgagagtcaggggaggggtgtgtgtgtgagggggtggcttactccggagtctgggattcatcccgtcatttcttttcataaataattattggataaaaa

SEQ ID NO: 209681 - DNA, 700 bp, Homo Sapiens
aggattgggccactgggtgcggttaccgggaacccaggcccatcaatcactggccactttgcgttctggcatggagaatagcgaggtggaggaggggaggcactggggagaggtgccaggatttccccccaactgccaggacctccaaacggattggaactatactggttgactcaggtctggagcccaaaatcacagccagaatataaggtgaggctgttttcttgctcctggggttttgtctggttgggcttgtcccagggagtgctgtaaaattgtgaaaggaaggtggggacagagctttgaggtccttgtagagagaagacaagagctatggaccatagaaccagagactatggagagacggaggagaagggcagggttcagaggtatttctgtatgttttgacataaaataagtgccatggagattacatgcaaaatggcatgcaaatgaggcctggtgccttttggggtatgaatcgtagaaccttgcttttgcaagaaagggaacttggccaggtgcggtggctcacgcctataatcccagcactttgggaggccgaagcacgtggatcacttgaggccaggagttcgagaccagcctggccaacatggtgaaacgccatctctaccaaaaaatacaaaaaaattatctgggcatggtgatgtgtgcctgtaatcccacctacttgggaggc

SEQ ID NO: 209682 - DNA, 527 bp, Homo Sapiens; identical to SEQ ID NO: 44794

SEQ ID NO: 209683 - DNA, 574 bp, Homo Sapiens; identical to SEQ ID NO: 50956

SEQ ID NO: 209684 - DNA, 602 bp, Homo Sapiens; identical to SEQ ID NO: 40133

SEQ ID NO: 209685 - DNA, 1000 bp, Homo Sapiens
atcatcagactttttagggaggtgtctggagaaagggagaattttgaaaaagagagaaaagaactcagctgaaacaatgtagggaggaacagataatagaactgaaactagaaaatggagagagttgataggtaaagttgaggaaatccctcacaaagaaggataaaaacaaagagacagtggaaaagaaatgccaggaaatttgggggatcattccagcaggtccaacatctaaatataggagttttaaagaagatgatagagataaatgtggaacagaaattgtcaaagaatatgtaagaatatttatcagaatcagtatcttaagtcttcagattagaatggcctagcaagatgaatgagaaaagacccatatgagggcacatcaataaaagttcagaacaagaagtcaaggagaaaactttaaaagcctccagagaatggagagagaaagagattgagatatcacaaataaactataaaaaatcagaatggcacctgaattctaaacaataggactataagaagacagagggacaatatccttaaaattcttgggggaaaggattgtcattatataaacccctatccacccaaacacaatcatggatatagctaaaataaagatattctcaacacggatctggaaccgcgctccagttccagaactctagtaaaaagaaaaaggtggccggacgcggtgcctcacgcctgtaatcccagcactttttgggaggccaaggcaggcggatcacgaggtcaggagatcgagaccatcctggctaacacagtgaaaccctgtctctactaaaaatacaaaaaattagctgggcatggtggcatgcacctgtagtcccagctacttgggaggctgagacaggagaatcgcttgaacccgggaggcggagattgcagtgagccgagatcgcgccactgcactccagcctgggtgacagagcaagactgtctcaaaaaaaaaaaaaaaaaaaaaaaaaaaaaa

SEQ ID NO: 209686 - DNA, 695 bp, Homo Sapiens; identical to SEQ ID NO: 45942

SEQ ID NO: 209687 - DNA, 522 bp, Homo Sapiens
aaagctgcagtgaactgtgattgcaccgctgcattccagcttgggggacagggtgagaccctgtctcaaaaaaaaacaaccaaaaaaaactatataattttgtgtggaaaatataggtaaatatatttttgactttggggtagtgaaagactccttaagccacaaaaagaatttaaaaagaaatgatgaacatacttgaccatatgaaaattagaacctaaatccataaaccttaagaaagtgaaatctaaactacaaactgggagaagagataaatagtctcaagactacatgaagaactctgataaatcaatgagaaaacaacctaataggaaaatagaaaaaaaaacatgcataggcatttcatggaagaagagatacaaaaggccaacaaacataaaaagaaatattctatttcattagtaatcagggaaatgcaaatcaaaagtgcaatgaggtacattcagctggtaaattttcagaagtctgaaaagcctataccggtgagaatgtggatcaaca

SEQ ID NO: 209688 - DNA, 417 bp, Homo Sapiens; identical to SEQ ID NO: 46754

SEQ ID NO: 209689 - DNA, 603 bp, Homo Sapiens
aagcttgggacttaatcattgagaaataaagcacatttgactctaagaagtatgtagaaccttgtttataggtgagaataggctgtattatatgaaaccagctacttgggaggctgaagcaggagaatcgcttgaacctgggaggtggaggttgcagtgagccgagatcatgccactgcactgggcaacagagcaaaactcgatctcaaaaaaaaaaaaaaaaaaaaaggaaaaaaaagcagctctctctctcgggagagggaggggacttccgagaggaaaaggcctgcaagagcctttgggttaactgagaaagcacagcccggccaacgcttgggaagaaagacaggcaagcactggaaacaggagctattagggtgaggagagagccttgcctttcacagcacagtgaggatgacattgcaccagggacagagattgtatgtgacaaggctggggctccttctttcctagacaatcaaagtatcagtgatgggttttggttggtgattttgaaaaaaaaaaaaaaaaagtatgttatactagtgtatgctgtactgaattgaaataaaaccaaaatctgcaaaaaaaaaaaaaaaaaaa

SEQ ID NO: 209690 - DNA, 681 bp, Homo Sapiens; identical to SEQ ID NO: 54238

SEQ ID NO: 209691 - DNA, 514 bp, Homo Sapiens; identical to SEQ ID NO: 48895

SEQ ID NO: 209692 - DNA, 553 bp, Homo Sapiens; identical to SEQ ID NO: 45148

SEQ ID NO: 209693 - DNA, 682 bp, Homo Sapiens
caaactcaaaagtttaccaccaagtcagatgtgtggtcctttggcgtgctcctctgggagctgatgacaagaggagccccaccttatcctgatgtaaacacctttgatataactgtttacttgttgcaagggagaagactcctacaacccgaatactgcccagaccccttatatgaagtaatgctaaaatgctggcaccctaaagccgaaatgcgcccatccttttctgaactggtgtcccggatatcagcagtcttctctactttcattggggagcactatgtccatgtgaacgctacttatgtgaacgtaaaatgtgtcgctccatatccttctctgttgtcatcagaagataacgctgatgatgaggtggacacacgaccagcctccttctgggagacatcatagtgctagtactatgtcaaagcaacagtccacactttgtccaatggttttttcactgcctgacctttaaaaggccatcgatattctttgctcttgccaaaattgcactattataggacttgtattgttatttaaattactggattctaaggaatttcttatctgacagagcatcagaaccagaggcttggtcccacaggccacggaccaatggcctgcagccgtgacaacactcctgtcatattggagtccaaaacttgaattctgggttgaattt

SEQ ID NO: 209694 - DNA, 563 bp, Homo Sapiens
ggaattcatgatgtggagagagccgaacaggaggaagtggagtgtgaggagaacgatggggaggaggagggcgagagcgatggcacccacccggtgggaacccccccagatagccccgggaatacactgaacagctcaccacccctggctcccggggagttcgatccgaacatcgacgtctatggaattaagtgccatgaaaactcgcctaggaaggaggtgtacttcatggcaattattgacatccttactcattatgatgcaaaaaagaaagctgcccatgctgcaaaaactgttaaacatggcgctggcgcggagatctccaccgtgaacccagaacagtattcaaagcgctttttggactttattggccacatcttgacgtaacctcctgcgcagcctcggacagacatgaacattggatggacagaggtggcttcggtgtaggaaaaatgaaaaccaaactcagtgaagtactcatcttgcaggaagcaaacctccttgtttacatcttcaggccaagatgactgatttgggggctactcgctttacagctacctgat

SEQ ID NO: 209695 - DNA, 579 bp, Homo Sapiens; identical to SEQ ID NO: 44856

SEQ ID NO: 209696 - DNA, 464 bp, Homo Sapiens
gctctctatggtgtacccgggttggtggcggtaagaagaaaaagggtgaccgcactgcgcaggcgccctcggcgtctctctcgctctctcggtcttttttttttttcttttttttttttaatccccgcaccaagcgcttaacctcattggggtggaggaaaaggcggcggctctctggtccgcagcggcaacagtaacgaaaaacagggctaatggactgctgaattatgaagtatttcagacccagtagtagaacatcactctgccactcactcctttatctcctactagttatttaaattggacttttaatatcctaccagctgctcttcagacacacatggtgcattgttgccattccccagattgcatctttgaaacacaggctcttagtaaccttcagcgaacaaagaggcaacctcccagatacgtctgctgggagggagtcatcgtgactgccctct

SEQ ID NO: 209697 - DNA, 542 bp, Homo Sapiens; identical to SEQ ID NO: 47056

SEQ ID NO: 209698 - DNA, 656 bp, Homo Sapiens; identical to SEQ ID NO: 53359

SEQ ID NO: 209699 - DNA, 699 bp, Homo Sapiens; identical to SEQ ID NO: 49542

SEQ ID NO: 209700 - DNA, 572 bp, Homo Sapiens; identical to SEQ ID NO: 54053

SEQ ID NO: 209701 - DNA, 430 bp, Homo Sapiens
cgaatctgcgttctgaataaaaattcttaaaatcaaactgtttctataataagaaaagatgacaaagtatctacatatctttgtttaattcctctgattgtaataaataagccattatcaatacacagtggctgaatcaaaaggatttgttttatacattaaaggttgaaagaggagagacagggaatctgaactctccagatttttatatttggttttaaaagccttctcctcatttaaagtgtcattattaaaaattattaattttttttaaattctagaaacaactgaaatcacgttcagtatttttgaaccttcagaaacatctataattgtggatcagagtttaggaaatcaaaaaaacactcagggattctccatttcattgtatcttaagacattttacaaaatataaacaatctcacactta

SEQ ID NO: 209702 - DNA, 524 bp, Homo Sapiens; identical to SEQ ID NO: 40793

SEQ ID NO: 209703 - DNA, 688 bp, Homo Sapiens
cggcacgagggtggaacgtcttccagagggtcgataaagacaggagtggagtgatatcagacaccgagcttcagcaagctctctccaacggcacgtggactccctttaatccagtgactgtcaggtcgatcatatactacactgaaggctggttacgctcttatgtgcaatagaacctcaaacacatcgtaacacacctttggagaatccttacaagaacaccaagttaacagttatctctgaccacactacctcagcaaaaaaccaggaagaaaaaatattcttcaacccttttcagggacagaaagcatcatttcaaaagtccaagaagggaagcaaaacttctgacctgagacatcgaagcagataaaaagccgctacacaaaatgtatcgctacaactagagggcagtcttgcctttcttccattcaattattcagtttctcatgttcctaagtgccagcccagaaccatggaatgtgaagaaacacaaaactcactcctctgcatcagtgaattgattgtgtggtggggatgtaagtctgcatgtgactgacagttccccaaagtggtgccaagtcaatctaaactagagagaatttctggccaggccaagcagagatttcatggatgaagtctcccaaagactgatttcctaaacattaaacatcactggttttccaaaaaa

SEQ ID NO: 209704 - DNA, 387 bp, Homo Sapiens
gaagatgcaaagtcctaaaaatatttataagtgaattttagtcataggggagaataatgaatgaaaatgaaacaggtgggtacaggatccacagcaccaggagttggtttgagaaggagtcaagtgtatgcaacagccgtaaaacaaagttttcaactgagctatcagaagtaatgagaagataaaattttttatataaatgtcctcactctacttaaatagaagacacaggaattttagctgttttttacatacaaacagggcaaataagcatgttttcctaggtccaatttactgacacagcccaaatcataccacatccaaccatgatcctattagtatgtgccctttgtatgatatacatggggaattacaataacaggtaca

SEQ ID NO: 209705 - DNA, 578 bp, Homo Sapiens
tttttttttttttttattcaaaaaaacattttttatttttatgaaccaaaaaatgtaaaagcaagattaatatgagaaccaaaatatgtaaaacacaatatttaaaataattagaacaaaataatgctgtagtccaggcaaaagatgattcttgaactgtaacaaggccatggctaaagatattcagaagagatagaaaaaagactccaaaaagaagtaataaaaatcttttggtattggaattcaccttctttaaaaactggttgttttgagaagaaggttactcatattaatgatcgattctcatcatggaataaataaaattattcacaaaaatgtaacgttttaagaaaatggtctgactatattggttctccagcttcataatttgttgtgaagaatctttaagttcttaacttttcattttttaactgaattgaggacaacttttaaatgaattagaagtaatagaattgaaatgaaaaagttcaaaagaatcttaacagaggggtccctattatgaaaacttaaaaagtttattaaatttcatgacaagaagttttatgatggaaacatca

SEQ ID NO: 209706 - DNA, 532 bp, Homo Sapiens
gcacgagatttttagaggcagggtcttgttatattgccccgtctggagagcagtgggtattcacaggtacaatgacacaccacagcctggaactcctgaccttaagcagatcctcacatcccagcctcccaagtaggtgggactacaggcgggcaccaccacacctagcttaaacaatcaatttttaaataacatattcatttaatgtaataattttgttgcacttatggatttcactcaaactgtttttaacagtttaaatcctagaaattctttttctgctataattgtctcacttaagacgtagtgaaaggaaatgacacccttttccataactctaccacagaaatcttgctaaaaagaaccttttcagtacagcttagtctactgttgtcagtgggcttctcttactttggcataaagtccgtgtgtggaagacatacatatccccctcttctagaatgtcattacaaacaaaaagcaagagtaatacaaaacccttaccagaaagatccaccacagcctcatgact

SEQ ID NO: 209707 - DNA, 489 bp, Homo Sapiens
acaaaaatgaacatgagaggtttctgctaagataaaatattggataagggaataatatctttgtttggaactggtaaatattacctactcctggagtaatacatttaaggaaactagagaacagatcagagataatatttaaaagtttaaggaactaacaaatttatagtgacagaaagcagataagtgcttgctggggaaagacgggggcaaggagagacaagaagtagaaattacaaaggggcatgaggaaactattgggtgtgacagatatgttctttttttattatagtgattgtttcacaggtgtttacaagtgtcaaatttatcaaattgtacattttaaatatgtacagtgtatgtcattgcatgtcatttaggtcattgtatgtcattttaatgtatgtcatttataactcaataaagctgttttaaaaaatcaagaggctgggtgtggtgactcacacttgtaatttcaacattttggga

SEQ ID NO: 209708 - DNA, 422 bp, Homo Sapiens
agacgggccgcagaccagtcttaggaagagaagccggaaactagggagtcatgtgcagttagaatcctcttggaagactagtaggatgtgaggttcgagaggtggacgacgaccagaaaattcccttgtcttgccaggcttctgacctaactatgagtttcctctctcgcatccagcctgccctgctctggcccctaaagtacagcagtaacactcagtggtgtccctgccttcctggaatgcgcgttaacaattctgattcttactcatggcaataacctacacaccacatagacgttaaatgtggttcgggtcagactctagggcaggactcactgcctgcaccttgtcttggctccaccagcttgaccttgagcaagtcacaacctgtgggtctcagtgttccttactagtaaaccgta

SEQ ID NO: 209709 - DNA, 530 bp, Homo Sapiens
ttttttttttttttttcggtttttaacatttattacatatatagaacatataagaatttatagagcaatgaaaataccacattttgacatttgtattgtactgggaaagatttatatgtatttgtataaaaaataaataaaggggataatctcttgggatttccccaaaatacagcatccttttcatctttttccattatgtaaatatggtatgatagaaatataatatgctgtgaagtgatagacatcatgacatatcaaaatgtattatatatacacatatatatacatgtacatatttattgaggtataatttatatacaaaatatacaaattccaaatatgaaattcagagttttgacaaatgtccacaccaatgtaaccatagtcaatcaagacatagaacatttcatcactccagaaacttcccttgtgtttctctgcagtcaactcccatcccacctcaacccaggtaactactgatacaatttctactgctatatcttagtttcgcttgttctaggacttca

SEQ ID NO: 209710 - DNA, 441 bp, Homo Sapiens
ttaactttgggaaaaatatgtatttattataaatcatccatttcattgggtggtttcaaattaagaaagcaatataggcttgtcataagaagaccaatgaatgcaaatgtatataaccccaaagctctcttttcctaccctattctgtctctggtctcccagctagtgaagtcaacagatcagtgtggatccttccattgttttctcctatctcattcatgcataatcaaataaaaggaacatacataatgttcaatcttttctgaatacaatcctaggacgacgttgtttcttacgcttcttaggctttcattattagtttgcacatacttctgcttccatctcagtttcttatccaagggaaccatggaagcaacatcttaaagatgtcagagcccccatcagctgggccctgaatgactgtgtgggcacccctctact

SEQ ID NO: 209711 - DNA, 513 bp, Homo Sapiens; identical to SEQ ID NO: 48577
  misc_feature (11)..(11): n is a, c, g, or t

SEQ ID NO: 209712 - DNA, 498 bp, Homo Sapiens
tttttttatagacaatagaaatttatttctcacaggtatggaggctggtaagtccaagatcaaggcactggcagattccgtgtctggtgaggactgctctctgcttccaagatggtgtgttgttgctgagtcctccagagggaacgaagactgtgtcctcatgtggcggaagggatggaaggaaacaaaaccactccctcaagcccttttagaaggaccgtgaccccatctataagagctgtgccctcacgacttaatcacatcctaaagttcccacctcttgttaagtttcaacacatgaattttggggaagacagggataaggaaagaacatggtgattaatgctgtccccctggactgattttcaagctttctatggcaagagtttataggcaaaaacaaaatccgtccattgcatgtttgatagtgccatgaacctctcttttgttgcactcatcacagttgtacattaatctatataattacttaatgctcat

SEQ ID NO: 209713 - DNA, 1000 bp, Homo Sapiens
atttgagagctgttagcatcgagaccgtgggtttcaaacctgcatctgtgtcagaatcacttggcgtcattcccagagagtatgattcagtggtggtatcttaggcttttaatggcaagcaagagaaaccatcctgagctgatttaagcagaaaagggctgcactgaaagggaatgttcagtagttcacagaatttctgggaagttggaaaactggggctgggcagcaggcaggatctcagccaaaatcatgccaccgagccagtttggcaggacactgctgccacacactaaatgccatcgctgtgtcactgttccctgaacactagacaccattgctgtggttgccaccagcattggaatggatcttccactgtgctcctgattcaaagtctgtagtgagggcttctgattggttgagcttaggtgtaagggaggctggaaaagcaagaatttgttgttttcagctttcacaggaggtgaactctgccaagacctgtgcagtgaggaagtccccagacataggaaggaggtcagatgccagactggcacacaatgacagatgtacttgacagcaagtttgccagcttgtgggattgtctgggaatctgcatttaaaccagcaccctggaaattcccatgcaggtgctgcctgaaccacatttgcatccattgcttgaactggtacttaaagctgtgggggctgggcgcggtggcccacgcccgtaatcccagcactttgggaggctgaggcagggggaccacttgaggtcaggagtttgagaccagcctggccaacatggcgaaaccccgtctcactagaaatgcaaaaaattagccgggcgtggtggcacgcacctgtagtcccagctattcggaggctgaggcaggagaatcgcttgaacccgggaggtggaggttgcagtgagccgagattgcgccactgcactccagcctgggtgaaagggcaagactgtgtctcaaaaaaaaaaaaaaaaaaa

SEQ ID NO: 209714 - DNA, 789 bp, Homo Sapiens; identical to SEQ ID NO: 44588
  misc_feature (3)..(3): n is a, c, g, or t
  misc_feature (712)..(712): n is a, c, g, or t
  misc_feature (759)..(759): n is a, c, g, or t

SEQ ID NO: 209715 - DNA, 725 bp, Homo Sapiens; identical to SEQ ID NO: 40868

SEQ ID NO: 209716 - DNA, 1000 bp, Homo Sapiens
  misc_feature (798)..(798): n is a, c, g, or t
  misc_feature (902)..(924): n is a, c, g, or t
  misc_feature (926)..(995): n is a, c, g, or t
taaatattaatttactatgtaaagtgaacttacgaattaacttactaaatacatatatgtagaccttcccgaaatgccattctcaattttattttatgggctccaaaaaaaaattatctgggttaataaggttatctattaaagcccccagaatctcagcactagatgtcataaatatgaaatagtaaaaacaaggtcacttgaaaatgggtatttaataccttagctggtgttttcagaagcatacagaactggaaaggtaagaacttgcttactattgcagatatacctgaccactcacaactgtctttttagcagcagctttgttaaaactgcacaaagcattcactttattgattaagtacaaatgctttagtgtttctacctaagtattagtacatctgttcaggaaatggaaaaaaaaaatgctgcttaaatttgttttatcagctgaggttgtggaggatttttgtccactgatcttttgcaacagaaaagcatactttgtcagcttctaataagatagccaggtttgaattatttgcaaaatttatataagcaaataagatctcttggtaacaattgacattgcactagaatttgaatgatactgttgttggcatttctgtttctctttcaagtagttgtaaataatctctttttctcatataaacggaatgcataatgtcttactcttgagtcatttagtatcattgatatggtaccaagttgtatagcagagtaacaaaatcatgatttgacaatgaaatttacatattgcctcacctaaagatgttntgtctgtatgacttttttttttttttaagtttggcttactggtactttaaatgtttttggggtaaattgtgtaatatgaaaaagttcaataatgtccgaatttnnnnnnnnnnnnnnnnnnnnnnnannnnnnnnnnnnnnnnnnnnnnnnnnnnnnnnnnnnnnnnnnnnnnnnnnnnnnnnnnnnnnnnnnnnnnccccc

SEQ ID NO: 209717 - DNA, 1000 bp, Homo Sapiens
  misc_feature (918)..(918): n is a, c, g, or t
gcacagttatgtaaaaggcagactgactcttctagctctgatatgcaagcctgttctcaagacaaagccaaaatatctcttggttccagcatagattcagtcagtgaagggcctcttcttagtgaggggagtctctctgaagaagagggagaccaggatggacagccccttttgaaagtagcagaaattttaaaagaaaaggaattttgtcctggagaaagaaatagttatgaacccatcaaagagtttcagaaagaagctgaaaaattcttgccactttttgggcacataggtggtacacaaagcaaaggaccatgggaagaattggcaaagggaagtccacatagcgtcattaatatttttacaaaatcctatcagttatatggaaaagggtttgaagacaagttggacagaggaacatcaacatcacggcctttgaatgccaccgcaactcctctaagtggtgtttcatatgaagatgattttgtctcctctccagggactgggacttcgacagaaaaaaaatcaactcttgaacctcatagcactttaagccctcaggaggaccattctaacagaaagtctgcctatgatccttcctctgtggatgttacctcccagcattcatcaggagcccagtctgctgcatcgtctcgttcatctacttcttctaaaggaaagaaaggaaaaaaggaaaagacagaatggttggattcattcactggaaatgttcagaactcacttcttgatgaggaaaaagcagaacgtggctcccatcaaggaaagaaatctgggaccagcagcaaactttctggtaaagattttgagcagactcttgatacagatagcactttggaggatctttctggacattctgtgagtgtctcatcagataagggaagatctcagaaaactccnacttctccccctgtcacaagtttccagaaatcattgccagtttgacgttgcaggaactttctttccagaaagatcttagtcg

SEQ ID NO: 209718 - DNA, 1000 bp, Homo Sapiens
ggtctccctctccctctctttccacggtctccctctgatgccgagccgaagctggactgtactgccgccatctccgctcactgcaacctccctgcctgattctcctgcctcagcctgccgagtgcctgcgattgcaggcgcgcgccgccacgcctgactggttttcgtatttttttggtggagacggggtttcgctgtgttggctgggctggtctccagctcctaaccacgagtgatctgccagcctcggcctcccgaggtgccgggattgcagacggagtctcgttcactcagtgctcaatgttgcccaggctggagtgcagtggcgtgatctcggctcgctacaacctccacctctcagccgcctgccttggcctcccaaagtgccgagattgcagcctctgcctggccgccaccccatctgggaagtgaagagcatctctgcctgggcacccatcgtctgggggtgtgagggaccccctctgcccgggctgcccagttctgggaaagtgaaggagcgccctcttcctggggcggccatctccggctaaggaagagaaggaagcggcctcctggccccaaccggcccatccgctcggacaatgctgggggagaagtcctcgtggcccaggccggcccccggtcttggggatgggggaggggggacgctttcgggcccgggggagcagaccccggtattgggggaaatggtacaggtagaccccgccgcccccagggagaacaccgctcccgatctctgcaaaaatattcggaggggccccatccccaagggcggggacgacgatcacccctatacagaactaaaccgggtagaaacctcaccttccccccccacgcgtgtatcccacccgccgatgcggtaataaggtcagtgaggaaagctcattgcaaaaggccagacgagcggagagcaatacgtagtggataagagcgaaagggagagggggaagacacatcctggatgtataaacacgcgatc

SEQ ID NO: 209719 - DNA, 708 bp, Homo Sapiens
ctgatctctcaatctagcgggagagacaggataacctgtccgagagtatagcgccactatgactccgccggaaaaattactttaaaaatcgccaaaaattacttggagcaaagggcagtcggcggagcttcgccaaggctggcgcagtcggtttaataatgatagaatgaagaccacaataaaagagacctctacttagctcagcaattcttacctttcttacctatttgatgaagatgtcttttgaaaggtgtactgcaaggaacaaaatgtttgtaaattctccttttaccaaggtaaagatcaaattttataaatttacttgtttgtttatacaaggaaaaataacttcatatattgaatatattcaaaagtttaagcatttagttgtattgccctgttaagttggcatagcaaataaatgcttttcttttcctcattttattctttgtgtttcctaacctatagcactgtgctgggcacagaatggacttcagttaagtttttgatgtagaaatgttttattattctacttaaaatctccttaaaaataattatgcatattacatcaatgttataatgtttaaacatagatttttttacatgcattctttttttcctgaaagaaaatattttttatattctttaggcgcgaatgtgtgtttaaaaaaaataaaaccttggagtaaagaaaaaaaaaaaaaaaag

SEQ ID NO: 209720 - DNA, 1000 bp, Homo Sapiens
ttttttgtgtttccagaagagaaatttaatctaatttacatacttctaggtacatcgataaccaaaatgtggccactgaaaaaagttaaaaggtcaatcagctcctggcttctagctggcccaggattgcaaaataaaaagatccacgttccttattctctacacaaaacgcgtttttaaaaaagtgaaaggtctagggagctatacatagaaagcaacagtgaaaagggagagggagcaggagtgggggaggagagtcccaccccccaaccccaccctccagggccccagagcccctgaggctctttggggggccttgacatggcaggaggcagctgtcagctctgagctcttcccagctgggaaggcccctctcgggggcagccaacaaggatttccgtggcattgtgggctcagtggggggctcccaggccccagcaggccccacagagggagcgtggcttcccctgagcaagcaccgtggcatgatgtggtcgttcaacccaggaactgggggtccggggcaggtcccgggtctcacgaggtgcgtgttgtgtgtgttcgcatgtacatgtgtgtgagaggatattcatgggggagagagggaaccagaacaggggtctttggggtctttgcaaatggccacggatggcagacatcgccctgcctggctgctagacgggggagtgctgtcctcccctgtgaccagaccggctgccatcagagacctggctgctgcccctgctggaccaggtgggcatgggctgaaggaagacaccctgtggcccccgagtcctcgggctggggggaagggcagctagctggctcccggcgccctggcttgtagtgtgccccggccccccaggggcggccgggttttgaggttttgggcttggttccttttggaaacggaaaagaaagaggaaaaagggaacagggactcccgagggaggaaaaaggagggaaaccgaaggggggcaaccaaaagggggaatcttgg

SEQ ID NO: 209721 - DNA, 607 bp, Homo Sapiens
  misc_feature (584)..(592): n is a, c, g, or t
  misc_feature (594)..(602): n is a, c, g, or t
ggaaaaccctacagcccaagatctaacattgtttaactcttgaaactccaaacctgagaaaagccttagacctgcagggaatgtgccatgtctttcttcagtgttatggctatagagagcctttgtgaaggagccgtctgcctaaagttaaacctcatacttctagacctcccgatgggtcagactcccattagttccaggcatatgtgtcttgcaggagctcctttgcatgttctaaactgctggaggcctttgccagagttaaatcattagtcacccttgcatactaaggcgaggcagatacacctgtgttctcccaacccttggaggaaattccttgagcagtctgagcctttaaggggaattccttcccttttctgactgattacagcatacatctgaccagttttggccagaagggcccagcctgggttctgctggaagctgatgtggaaggcttcccttcatggaaattcttgttttcacacaacacttggtagtttttccagcctccaagtcaccacctagtaactggctgcctcacattgctctggtttgtgtggtaataaaggccttatttttannnnnnnnnannnnnnnnnaaaag

SEQ ID NO: 209722 - DNA, 1000 bp, Homo Sapiens
atccatctggagtgcaggtccactggctggtacccccaaccccaaatacagtggagcaacaacaagggagagaacatcccgactgtggaagcacctgtggttgcagacggagtgggcctgtatgcagtagcagcatctgtgatcatgagaggcagctctggggagggtgtatcctgtaccatcagaagttccctcctcggcctggaaaagacagccagcatttccatcgcagaccccttcttcaggagcgcccagaggtggatcgccgccctggcagggaccctgcctgtcttgctgctgcttcttgggggagccggttacttcctgtggcaacagcaggaggaaaaaaagactcagttcagaaagaaaaagagagagcaagagttgagagaaatggcatggagcacaatgaagcaagaacaaagcacaagagtgaagctcctggaggaactcagatggagaagtatccagtatgcatctcggggagagagacattcagcctataatgaatggaaaaaggccctcttcaagcctgcggatgtgattctggatccaaaaacagcaaaccccatcctccttgtttctgaggaccagaggagtgtgcagcgtgccaaggagccccaggatctgccagacaaccctgagagatttaattggcattattgtgttctcggctgtgagagcttcatatcagggagacattactgggaggtgggaggtaggggacaggaaagagtggcattataggggtgtgcagtaagaatgtgccaaagaaaaggcttgggtcaaaatgacacctgagaaatggattctgggactatgggggctgactgatgggaaataagtaatcggaacttctacctggacccccgaaaccaacccggaaaacttcctaaagcccccttaaaaaaagtggggggtccttccctggacctatggaaactgggggaattcttcctttcctaaaatggccgggggcatggaatccccttttttccta

SEQ ID NO: 209723 - DNA, 1000 bp, Homo Sapiens
  misc_feature (520)..(520): n is a, c, g, or t
cgggcctcacttagcgtgctcctccctgtccgagaacccgagggtccccatgtggattatccagccagtgtgtggtcctttgaggccccaagcgcaggcctgtgatgaggaccaaagaggtgacttatggtcaggagtactccaaacagctctcagagtaggcatctttcctgggtctctaaagagtcatgctgacctggtgtgcaaattcccttccacccatccctctacctcctctggggatggcttgccgacatgctttagaaactcccctcttgggaatgctcctctgactgagggctccaacagctttaatgaaatcagccgagagggtaaaaaccaacctgttgcatagaatggaggggggaaaaagcacatactcaatagatttttgagtgtggtactctgtatttttgcagcgtttattttccaaatgaccagtttagaaatatgtgatgtaaagtacatactgtacgtttgctgaaaatttatattaaaagcactattttaattcttaccnccagcgaccccgatccttacccatccccccctcgacccttccgcgccctccctttagcaaagtcccccgcgggcccacacaacccttttcatgagggccaccctctcttttctgtcgggccgcctctttcccgggggcaatgcgtcgctcctctttatcaaaaacgcctcgctccccttacattttggcagtcgcctacgcagcgcggttacccactgtttccagcccgggccgaaacattgcggcaccgccccgtataccttttcgcccgagagcccccttcttctcgtcggccgggcaccatttaccttctggcgacaacacgttcccttaccgcgcggaatatccccggttctcctgtcgggtatactatactcgcgctacgatcgccgttgcttaaacctgccgcttcgtccggttcctttcgccgatgcgcccccctacaccctccccagtgccaaacacttttccgacccctcc

SEQ ID NO: 209724 - DNA, 1000 bp, Homo Sapiens
  misc_feature (622)..(622): n is a, c, g, or t
gtcattatcagtattacatactgtacataactgaatgtgctgtacttttatacaactggcagtgtagtaggtttgtttacaccagcatctccacagacacgtgagtaatgcactaggctatgacattaaaacggctaaaacatcatgaggcaatagattttctgctccattataattttatgggaccactattgtatatgtcattatgcagtacataactgtaatcttctgcaaaaccagtcaaatctaaccatgccacaaaaataactaccaccatctgtcttaaagaacgtgactcctatatggatggagattaacaagggcatagatcgattctatagaatatttcatttaattgattttattataactggattaggtctgagccctgggaaacagacatcaccttgttatacagaatcacacattatagttttaactgaagttgtttttcatataggacaatcataaatatgagtattacaagagctgactacatactttcaagtttatatttcctgacaaaggatatgacctttttccatcctgtaattcagagaaaaagaaccacttgccctatataaactctaaaaagaaaactgcataaacccagggaacaggnggcaaggagtgctcccctttgacctactattagcaggtccaacaaatgatatatcaccacgtctatgaaagaaatttctttctataaaagcacaaaattttaaatcggatttgacctttacataattaggccttccatccttgatggaaaaaatcataacagccagcagcttcaaaactggattggttaaaagggaaaaaacaccggggcacaaattaaataaaggcaacctttgggaatcttcacctccttcctccttttcccaatttaaatgggcgtggaaatatgaacacctcctttttataaaaaaattcctggccccatggaggttttcttcttccccttcctttttctggcgcctttaaaaaatcctttttc

SEQ ID NO: 209725 - DNA, 1000 bp, Homo Sapiens
aatgtgtatattaatagctttgcacaaatattttaaagacaaattcagctagtctaagaacttcatgaaaataaaacaggtggataaatacttcatgtgcacaatgcactccatcagacgtcgtcggctgggagaggaggtatgttgatccttggccttgtgaagaatgctatcttctccctaaaggtctgcacttggatgggctctttgtggctctgcccacgcagctggtagatctccttggaggccttcttcagcatcttctcagccgcctgctcatgacggtagtcaagtttggtctgtcttgtctgccgctcggcctcccgcagcaggccacggagccgctcgtcccgaagcacccagggtgggaggtcagtctggccacggagctgggcgtcctccaaccgctgccgcagctcacggagggcgcagagctcctcattcagctgcctctgccgtgttctcgacgcctggagatccagctccaagtccagggaggtgcgggccatgagctcagccagggaagacctgcatgactgcttatagcgaagggttcgtctttccaaagtatttcggacaaagggggacttccggggcagcgttgaactgtcgctgtcactacgataaagtctgcaaacatactggcttcgtgcttcaggcgagaatgtctgggaacggacaatcgtgccactccgaacaaaaggcgaccctcgggcccggcggctgggcccgctccttcacgaggctggctgcttctttcagaaagaaatctttccggtttggtttccttaatcaaccttaagaggcgaagggctgaaattttctcggggcctgtaaggcccctggccctgacacacaaaatgggtggccccagaatgggaatccaataccccatgcaacagggcttttgggggaacgggaaggctttctctttggtgggcaaattttataaacccccctaattccaccaaagccccccttgccaaattccccttcggaa

SEQ ID NO: 209726 - DNA, 1000 bp, Homo Sapiens
  misc_feature (658)..(658): n is a, c, g, or t
  misc_feature (845)..(845): n is a, c, g, or t
gaatcataagaggcaaaaaagtactaccaatattggacaaaacagataactgacattatcgatttttagtaagattcttagtttctttgtttttgttttttacaatctgactgcattaagacacatatactctttaatgtaaaaaaaaaaccatcatatgcggaactaaatgcacaaagacctcattattggaacattagccatgattattttaatattctcacagctttgcaattttgagaatatactagcattatataagaaggaagaggagaaggaggaataagagggaaaggaggagaaagagaagttggtaaacagaggcctagttaagaattccttgccttagtggtgaacaaggactaaacacagacaatgggtgaaacacagacgctaattcacataacagagagtaggcaaccttaagaatgaattgatgcagactcctatagaattcctctgttatgactgggttcttattttctcctccttgtatgtagttgaaatttcatcattatgaatagttccttggatctttttttaaagttgtgaatgcaagtgtttggctttgtaatacaactttttagtatccagaagataaccagtgctctacccaataaagatcttttgatacaaagggtttttaacttctgccagntcttactcatttttttcaggtttttttatacatttcttaaacaacacatacattatgtaaaatataaggaatttatgtacatttctccaaggtccagattcagtggacaaaatgcactaccccgaatctagtaaaccatttttactccttgcctgcatattaaggggcggtgtagaaaatacaaggnaatattggttttgtggatccctggccagtaaatggtcaccaaattattaagcaaaccactctagacgtttctttcagcttactaaaaatttactggccccggtccccaaaaagactttaaccaaaattaaaagcctgggaagggttacaatccaa

SEQ ID NO: 209727 - DNA, 1000 bp, Homo Sapiens
attgctgacctgggaaatgcttgttgggtgcataaacacttcacggaagacatccagacgcgtcagtaccgctccatagaggttttaataggagcggggtacagcacccctgcggacatctggagcacggcgtgtatggcatttgagctggcaacgggagattatttgtttgaaccacattctggggaagactattccagagacgaagatcacatagcattgatcattgaactgctggggaaagtccctcgaaaatacgctatgttggggaaatactccaaggagtttttcaccagaaaaggagaactgcgacacatcaccaagctgaagccctggagcctctttgatgtacttgtggaaaagtatggctggccccatgaagatgctgcacagtttacagatttcctgatcccgatgttagaaatggttccagaaaaacgagcctcagctggcgaatgccttcggcatccttggttgaattcttagcaaattctaccaatattgcattctgagctagcaaatgttcccagtacattggacctaaacggtgactctcattctttaacaggattacaagtgagctggcttcatcctcagacctttattttgctttgaggtactgttgtttgacattttgctttttgtgcactgtgatcctggggaagggtagtctttgtcttcagctaagtagtttactgaccattttcttctggaaacaataacatgtctctaagcattgtttccttggggctgggtgacattcaaatgtcattttttttggaatgaaaaatactttcccccctttgtgttttggccaggggttttgtaacctatttatgtaagaaacaatttttaacctgaagtaccattatacactttacaatcccttaagaaaattattcaagggtgggcacacccagtaaattcggccaggggaaaatggtcaccaatttttattctttcctgggccaaaggggcgcaccttcattttccttggatc

SEQ ID NO: 209728 - DNA, 1000 bp, Homo Sapiens
  misc_feature (453)..(471): n is a, c, g, or t
  misc_feature (473)..(477): n is a, c, g, or t
  misc_feature (479)..(521): n is a, c, g, or t
aaaagtgcaaggctacttgcctatgtgagaacaaaatttactgatttacctagtgagcattgtgcaagactgcatggataagggctgcatcatttaattgcgacataccaggggaaattgtatgtatgttagtgacaaatttgatttcaaagagcaatgcatcttctcccccagatcatcacagaaatcactttcaggcaatgatttacaaaagtagcatagtagatgatgacaactgtgaactctgacataaatttagtgctttataacgaactgaatcaggttgaggattttgaaaactgtataaccataggatttaggtcactaggactttggatcaaaatggtgcattacgtatttcctgaaacatgctaaagaagaagactgtaacatcattgccattcctactacctgagtttttacttgcataaacaataaattcaaagctttacnnnnnnnnnnnnnnnnnnnannnnncnnnnnnnnnnnnnnnnnnnnnnnnnnnnnnnnnnnnnnnnnnnggggcggcccgctctaaagtatccctccgaggggccccaaggtttacccgttaccccagtttttcttgaacaaagggggcccccaataaggagcccctaattattaaccttaggcccgtggccggccttttttcaaacgcccccggacctggggaaaactgcctaacttgggggaatctttacggaaagggaacccttaccttccggggggtggggaaactaatttgggaaaaacctaccctacccgaagaattttaaggctcctaaggggaaaataattaaatttttttaagggggaaaaagggggttaaaaactaacccgcaaaaagccttggccgcccttgaaaaatttttggcttaccggggaaatgggtttttttgaaaaaattttttccccccgggagccctgggggatctcccaaatggggttgggggaattttttaaaattccccagggcccccaagggctcttttttcta

SEQ ID NO: 209729 - DNA, 1000 bp, Homo Sapiens
  misc_feature (580)..(580): n is a, c, g, or t
ccatgtggcaaagccaggacctgctggacctcgggctcgaggacctgaggatggagcagagagtccccgatgctctcgtcttcaccatccagaccagggggactgcggagcccatcacggtcaccattgtgcctgcctacagagccctggggccttctcttcccaactcccagccaccccctgaggtctatgtgagcctgatcaaggcctgcggtggtcctggaaatttctgcccatccttcagcgagctgcagagaaatttcgtgaaacatcggccaactaagctgaagagcctcctgcgcctggtgaaacactggtaccagcaggcccatcatcctggatccggccgaccccaccctcaacgtggcagaagggtacagatgggacatcgttgctcagagggcctcccagtgcctgaaacaggactgttgctatgacaacagggagaaccccatctccagctggaacgtgaagagggcacgagacatccacttgacagtggagcagaggggttacccagatttcaacctcatcgtgaacccttatgagcccataaggaaggttaaagagaaaatccggnagaccaggggctactctggcctgcagcgtctgtcctttcaggttcctggcagtgagaggcagcttctcagcagcaggtgctcctttagccaatatggggatcttctcccacactcacatctatctgctggagaccatcccctccgagatccaggtcttcgtgaagaatcctgatggtgggagctacgcctatgccatcaaccccaacagctttcatctgggtctgaagcaccagattgaagaccagcagggggcttccctaaaagcagcagccgctggaatttcaaggcgcagtcctggcaggaattgtttgtgggtctggggaatctatgggcattccaaaaccgtggaaccctcctcctcctcctccaagaaagaaaaggggaagccttctggtttccccccccaggttaatttttta

SEQ ID NO: 209730 - DNA, 753 bp, Homo Sapiens; identical to SEQ ID NO: 52754

SEQ ID NO: 209731 - DNA, 1000 bp, Homo Sapiens
  misc_feature (936)..(936): n is a, c, g, or t
agtgatggccattgcccgctccaccctccacatgccctttctaactcctcagttgacctagggtccccaagccttgccagtcacccccggggcctgctgcagaaccgtggcctcaacaatgacagtcctgagcggaggcgcaggcctggccatggcagcctgaccaacatcagccggcacgactccctcaagaagatcgacagccctcccattagaaggtccacgtcatcagggcaatacacgggcttcaatgaccacaagccactggacccagagacaattgctcaggatattgaagaaacgatgaacacagctttgaatgaactccgagaactggagagacagagcacagcaaagcatgcccctgatgtggtgctggataccctggagcaagtgaaaaactctcccacccctgccacttccacggaatctctcagccctttgcacaacgttgccctcaggagctccgagcctcagattcgacgtagcacgagctcctccagtgacacaatgagtactttcaagcctatggtggcacccagaatgggcgtgcagctgaagcctccagcccttaggccaaaacctgctgttcttccaaaaacaaatcctaccataggacctgccccaccctccccagggtccaacaagacaagttcatgcacaatgtaaaaaaccagcccagcaaaggccataaaagggaaggtggacttaaaaaaagaaaatggatttatgggcaaaagttcactggatcctaacttttccctaaattttggggcttataagctggggacactttttggccttttctaatgtaggaccaaagggaaagattcgcaaacccacctaaaattacccccgcgcccaatttcgcaatctatgcacactttctttaaacaaacgctgggcctacagtgccctttttaagggacacattcntaaacatccttgaacgttttctttgcaaaacccacgggctggggccccctttgtggacagaaag

SEQ ID NO: 209732 - DNA, 576 bp, Homo Sapiens; identical to SEQ ID NO: 53149

SEQ ID NO: 209733 - DNA, 636 bp, Homo Sapiens; identical to SEQ ID NO: 51244

SEQ ID NO: 209734 - DNA, 1000 bp, Homo Sapiens
  misc_feature (592)..(592): n is a, c, g, or t
  misc_feature (637)..(637): n is a, c, g, or t
gatgcaaacttcttcagctgtgtagaaactttatgaatagatgagtgcttgagtgtctccagtctctaaagtggctgcttttattctttcttcaaagttaataacatgttgcaagatttttggacaaaatattatggtgtgtcataggaaaagcaccatgaattatatttaggtatagcaagtcagatcctttgaagtgactctgtctctgttcttagaagggttcttggaattggctgtggtttgaatctttctactgtcagaggagacccattaaaagccagaatctgcataaagctttctttacttcaaacactgaagctgtaggcgagccatcccgtatcgactttatactcaaagaaggaaaagccagattgcagtgagtgggtaggacagctcagatccaaatgaaagtagggtctcaagtaacccaagggtggccgggtacggtggctcacgcctgtggtcctagcagtttgggaggcagaggcgggcagattgcctgagctcaggagtttgagaccagcctgggcagcatggtgaaaccctgtctctactaaaatacaaaagaaattagccagggtgtggcggncataccccctgaagtcaccgcctactttgggagggcaaaggccangaaaaatttgcttgaacctcggggaagtgggaaggttccaattggagcctaagggttgcaccccttgtacttcaagaacttccaaaccctgggggaacaaaaagtgaaactcctctcctctaccggtataactcccaccactttataccccgcccccgaaggggaagggaagccacccctcccaagctcgttaacccgtttaaccctgccctccctttcccctcgaaatcacagggagcaaccgaaaatccccataagaatgtcgcactcctagaccacatacactatcaccaaatacacctcttgtagaggctaagaatcgctccatcccgacccgcccacccggaccataaatatcacccc

SEQ ID NO: 209735 - DNA, 1000 bp, Homo Sapiens
gaagaatgcaaaggaaagcaaaaggatgggacatcttttggagagtatggcggctggtacaaagcctgcaaagttgatagtccaactgttacaaccactctaaaaaaccttggggcactttacagacgtcaaggcaaatttgaagctgcagaaacgttagaagaagctgctatgaggtctcgtaaacagagggtggcagaagtgctcaatgaccctgagaacatggagaagcgcaggagccgtgagagcctcaacgtggacgtggtcaagtacgagagtggccctgacggaggggaggaagtgagtatgagcgtagagtggaacgggggcgtctctggccgagcctctttttgtggaaaacgacagcagcagcagtggcctggaagacgccaccgctaactgaccccgacctggccccgctccaggatgggactgccgagtgtggccccggagctggcccgggacagccagggcgggcagggaaggccccctggccggggacccgcagggctcactcattttctccctgcgttggtgggcataaggacctggatactaataacccccccggctgggcctgaaccttggggcctggggcctgggcctaaacttggtgcccctgctgcgggcgtggttttctcccaagaaaacttgggggcttgacctcggccccccgggtctcccttccaatggggaccctttcccccccatgggcggcgcaacacatattttttatttgtaccctttttcaaacttacaattttatctgcctttccgcatactatgcccccccaccctcctctcataattaaacatactctctttacgcccccctcactctccgtgtgcgtgatataatgtgatcccgtgaccgccgtatgcggtattaattcgttttatgagaaccacttctcttttttttcaactacagcccaatacgtccccccgaccctcaacgttcgacagtcctatctatctcctccagcagaaccagtctccc

SEQ ID NO: 209736 - DNA, 1000 bp, Homo Sapiens
  misc_feature (807)..(807): n is a, c, g, or t
  misc_feature (906)..(906): n is a, c, g, or t
  misc_feature (987)..(987): n is a, c, g, or t
aaccttgattctgcatagactcggtggattgcccaaggccactcaaccagttaatatcagagccagctctgctgtttgaccagtatattattttcaccatgctgtatctgcttctcagtcaccaaaagcaccagctaaaattgtatatagactgattaggggacttccaacctaagattgtcctggaaacttaattcttatcttggctcatctcttcaaaacagatgcctctttcgttggtgacctcagatacactgttcagaagtactcaaagtattccttttttctcacatttgagagtcactctagcattttaatgagttaagcaagccagccctgcatttccaaacccttcccagaagtctaaccttactttgatctgatgacatgggctttttaaaagattactatttttttttagaggtggggtctcactatgttgcccaggctggaatataatggctattcacaggcacagttagggtgcactactgccgtgaactccaggactcaagccatcttcctgccacagcctcctgagtaacctaggactataggtgcatgccaccatgcccagctgacaatggttttatatacataatatttcctcacaaacatttatggcttatttgggacccgtaaaaaccctcttcactgaattagccctggttaaaagggttgggcattttactcccaggtcacctggcctttaaccattggagtattacaggtctcccccccacaacaaaaaattgcagaggtttccctctagacatacaatcccccccgcacggccccaatcggttnttacccgcgcgtgtactccaccaaccctcccaggcgagcactgatattgtatgtcgccaccagcccggggctggcgtttcatacttgggacaacgcctnatgctccggtgcatctaccgacggggccacgatcacatatcgcacacctaccggtgacgagtgattcaccccttatgttcnaccgaccgcctac

SEQ ID NO: 209737 - DNA, 1000 bp, Homo Sapiens
  misc_feature (669)..(669): n is a, c, g, or t
  misc_feature (720)..(720): n is a, c, g, or t
  misc_feature (881)..(881): n is a, c, g, or t
gagctttggcggctcgcacgtcatgcaggtcatctacacggacgacgccggcaggccccagactgcctacctgcagtgcaagtgtgtgaatgagcttaaccagtggctgtctgcgctgcggaaggtgagcatcaacaacaccggactgctgggctcctaccaccctggcgtcttccgtggggacaagtggagctgctgccaccaaaaagagaagacaggtcagggctgcgataagacccggtcacgggtgaccctgcaggagtggaatgaccctcttgaccatgaccttgaggcccagctcatctaccggcacctgctgggcgtggaggccatgctgtgggagaggcaccgggagctgagcgggggcgcagaggcaggcacggtgcccacgagccctggcaaagtccccgaggactcattggcccggctgctccgggtgctgcaggacctccgcgaggcccatagctccagcccggccggctccccaccctcagagcccaactgcctcctggagctgcagacgtgaggcccgccctacgctccccttgctgagtcccctgccaagcgctcggagcccccccaggacactctgcaccccctcaccccggtcctcctcattagggtgcagggcctaggtctcttccaggtgggggaagggggggagagtcnaggaataagggggatccccagaagtgcagaagctgaagcaggcttgggccntgtcatggcctggccgggaagtgtcccccagctccctacagacgctgtagccatcactgcctctccaggggaccctcctctcctgcccagggacagacccaggcagacccaactgcctaggatggccccccaacccaaggggtctggcctccagggacctnaaaaaaatgggggaaaggaaaaacgggggcccccaggaagacccgggccggccaccccacccgggttacccctggggggccccccagggcctgtgcttgtttgcccaaaagttaaaccc

SEQ ID NO: 209738 - DNA, 1000 bp, Homo Sapiens
  misc_feature (524)..(525): n is a, c, g, or t
  misc_feature (532)..(533): n is a, c, g, or t
  misc_feature (555)..(555): n is a, c, g, or t
  misc_feature (557)..(558): n is a, c, g, or t
  misc_feature (560)..(563): n is a, c, g, or t
  misc_feature (565)..(565): n is a, c, g, or t
  misc_feature (568)..(568): n is a, c, g, or t
  misc_feature (576)..(580): n is a, c, g, or t
  misc_feature (582)..(582): n is a, c, g, or t
  misc_feature (586)..(597): n is a, c, g, or t
  misc_feature (599)..(604): n is a, c, g, or t
  misc_feature (608)..(631): n is a, c, g, or t
  misc_feature (634)..(635): n is a, c, g, or t
  misc_feature (643)..(643): n is a, c, g, or t
  misc_feature (645)..(648): n is a, c, g, or t
  misc_feature (659)..(659): n is a, c, g, or t
  misc_feature (661)..(669): n is a, c, g, or t
  misc_feature (693)..(693): n is a, c, g, or t
atatgctgacccagaaattctacttataaagaatttacggtaatcataggacagtgtctgtaataaaacactggaaacaacctcaatgtttaaagtattaaataaattagagtacattcatattcagactatatagctgttacggtagatcttggtgtggaaatgggatgatgtcaagtatttattaagtgagggagaaacgcaaattacaaaacagtacctctaattgctccatgtatatgattaatatatatatatatatgtcttttcctatatgtatatatataaggaaactgccttatttttgaagttgctggttgggatttctctgttctttcagcccctgggggacacctcagttaaagcaagatcagtctgttggccgagagtggtggctcacgcctgtaatcccagcactttgggagtccgaggcgcgtggatcacctgaggtcaagttctagaccagcctggccaacatggcgaaaccccatctctactaaaaataaaaaataataataaattannaaaatannaaaaaaaaaaaaaaaaaaaaanannannnnanaanaaaaaaannnnnanaaannnnnnnnnnnnannnnnnaaannnnnnnnnnnnnnnnnnnnnnnnaannaaaaaaanannnnaaaaaaaaaanannnnnnnnnggggggccccaaaaaaaataactnaaaggagggggcaaggaaaggacacggcacccctttttttttaaaaaagggggccccccggagaaaggtggaaaaaaataaccagcgcgcgcccgggcgcgtctttttttctccccccgggtgggagaaaaaaaatttaccccgtgttttatcttttataaggaaattatcttcttgtgtgggggggggcaatatttgggggaaaaccccaccccacaaatatatttgattcccctggaagggtaaaacaaatacttttttctccccgatttaactcgggctaataacaaacacgcacgtgctgttt

SEQ ID NO: 209739 - DNA, 1000 bp, Homo Sapiens
  misc_feature (718)..(718): n is a, c, g, or t
aggcttttgagttgcccaggaactgtggccaaagaccttaggagagacgagcagccttcagggagcgtggagacaggctttgaagacaagattcccaaaaggagattctctgagatgcaaaatgaaagacgagaacaggcacagcggactgttttaatacattgcccagagaaaatcagtgaaaacaagtttcttaaatatttatcccaatttggacctattaataatcatttcttctatgaaagctttggtctctatgctgtcgtagaattttgccaaaaggaaagcataggttcactgcagaatgggactcatactccaagcacggccatggagactgcaattccattcagatcacgtttcttcaatctgaagttgaaaaaccagacttctgaacggtcatgcgtacggtcaagtaatcagttgccacgttcaaacaagcagctttttgaattactttgttatgcagaaagtatagacgatcagctgaacactctcttgaaggagttccagctaacagaggagaacactaagctccgatatctcacctgttctcttattgaagacatggccgccgcgtattttccagactgcatagtcagaccctttggctcctcagtcaacactttttgggaagttaggatgtgattttggacatgttttttggatctagatgaaacccagaaacctcagcgctccccagatctcaggaaaattntctgatgggaattccagtgaaaaatgttccttccgaaagatttgcaactccgaagatcctgtctgtgttaaggagagggccttgaccactttgggccctggctggggggggggggcaaaaaatatttaaatggccggggggccccctcgtgggggttctccaccccaggctcccgggatttccaggggggatttgacctacccaaccctaaggggttgggctttgaacaaagttcccaaactcccctttataatataatggggggggcccccaaaaacccaa

SEQ ID NO: 209740 - DNA, 1000 bp, Homo Sapiens
  misc_feature (461)..(461): n is a, c, g, or t
  misc_feature (465)..(465): n is a, c, g, or t
  misc_feature (482)..(482): n is a, c, g, or t
  misc_feature (489)..(491): n is a, c, g, or t
  misc_feature (493)..(494): n is a, c, g, or t
  misc_feature (496)..(496): n is a, c, g, or t
  misc_feature (504)..(505): n is a, c, g, or t
  misc_feature (508)..(508): n is a, c, g, or t
  misc_feature (520)..(520): n is a, c, g, or t
  misc_feature (522)..(523): n is a, c, g, or t
  misc_feature (528)..(535): n is a, c, g, or t
  misc_feature (537)..(539): n is a, c, g, or t
  misc_feature (543)..(543): n is a, c, g, or t
  misc_feature (553)..(554): n is a, c, g, or t
  misc_feature (561)..(562): n is a, c, g, or t
  misc_feature (568)..(570): n is a, c, g, or t
  misc_feature (580)..(585): n is a, c, g, or t
  misc_feature (602)..(602): n is a, c, g, or t
  misc_feature (657)..(657): n is a, c, g, or t
  misc_feature (929)..(929): n is a, c, g, or t
ctcagctcgcatgtggaagactctcaccttcttcgtcgcgctccccggggtggcagtcagcatgctgaatgtgtacctgaagtcgcaccacggagagcacgagagacccgagttcatcgcctacccccatctccgcatcaggaccaagccgtttccctggggagatggtaaccatactctattccataaccctcatgtgaatccacttccaactggctacgaagatgaataaagagaatctggaccactacccgggcaccagggaccacagcactggtttggaccgttactctgcacatggaccagaaaaagtatatgggaccttaagctcaccttctttacttgtatcaaatgatgactggtatactggtctcccatccctttgcttgtggcaggagatggcttaaataaataacttaaatttaaaaaaaaaaaaaaaaaaaaaaaaaaaaaaaaaaaanaaanaaaaaaaaaaaaaaaanaaaaaannnannanaaaaaaannaanaaaaaaaaaaanannaaaannnnnnnnannnaaanaaaaaaaaannaaaaaannaaaaannnaaaaaagggnnnnnnacaaaaaaaaaaaacanaggggggggggagaaaaaaaaagggaaaagggaattttgttgaaaaggggggggncatattgggggggatataaatataaagggggggggggggggggggtgtttataaaacccacgtttgggggggaaaaaatacccccttgcgggaattttgtggagggaaaaaccctctcctttgttgggggggggcaacaattgtggggcaccctccccccccgaatgatatacgccccgcccgggggaagaaaaaaaaattttttttggggggggtgtgaggggggggaaaaaacaccatcggtatattgtgttgttttgcgatgaaacaantttttctctcctctcggggatggtgtttttaaaaaaaaaaaatataccccaccggcgccgcgtgtgtgttc

SEQ ID NO: 209741 - DNA, 1000 bp, Homo Sapiens
  misc_feature (758)..(758): n is a, c, g, or t
cagggctagctcccctgtggtcttcaggaaaggttttgaaaaaggatgggtcccaccctccctccagagccaccagtgttagagcggagcccaaaggaaggatgggagccctggagtgggcaagaccaggccacctgctgaggtcgctgtggagcaccctcgctcctctcctggctactagctctggccctgcacctactctcactggccacctctggaggctctgcctttcccaagggccctggcagagggtggggcactgcaccttaccccacccatccatgccagcacttctgcactacggccattctcctcttgggcgctcctcagcctcactgtgacctttctgccagagctcccagccaggcctactctgctgaggtggcgcttcctgctaagggcccttctctgccctttctgccctccttcccatcccacatgctgagccgccacaaagaccaaagaagtgatggcttttctctgtcccctgctgctctgaggggagaggggtgggtctcctgagccactcagatgggaaagtcccttactcggcccctccctccccagcagccccaagctttacactggatgcagcgatcaacccaccactcaccaggcctctcctcccctctgcccccggctcttagctccagctgctccaggtagttggttcatccttccccctctctccctccctgcttccccttcagtgcttacttggctccagccctccagctgcagcccctggggaaaagcangcctccttctcctctccctccactccctcgctccctccctcagcccgtgtctctgccaggggcctccctctcagtcaggcttcagagcagccctgggagacaggaggccatgttaaaacttttttacaggtttaagaagacaattggaggtggaggataatgggtgggggggtcttggcacactttccttgccttaatcccaacaaacacggggggaagttttttccccttttctttccccc

SEQ ID NO: 209742 - DNA, 1000 bp, Homo Sapiens
ccgggaccgggagagggagagagagagggaaagagacccggaccgaggcccccgccgggacacacacagggacgcgggccctcgcgcaggtgaacacggagtttgggaaaaaccgcgccaaagccggacgcgggacggagcccggggactgacctgggacgcagccgcgcctcctgggcccgcgccctgggaagccccggagccgccgcagccgcagaggaagggagaccccgggcgccgcagacccgaaagtgaacccccttcggagagatatctgccctcgacccccaggcctggacgagaggaggtggaatattaccagtcagaggcggaaggactcctggaatgccacaaatgcaaatacttgtgcactgggagaggtgtggtgcagatagtggaggtggtcttgaatgggatggttctcatatgcatcgtggcctcctactttgtccttgccggattcagtgccagcttttccagcggcgggggctttgggaacaactactactcaccggtcgagggcactgagctagagcaggttcggcagcttggaccagccagtacacggatccttccgcctcggccccctgaatataacgggtgggcggtgggcatggttttccctctgggggtcctggggggggtcccctccacccaggggggggggtctttttaccctccccaggggagccccaaagaaggttccaaacccatgggtttgattcaagggggaaagggggcggcttcccctccccggggggggcgcgccctttttaggcccctccctaagcgggggcagaggggggggctaccttggcaaccaggggccatctgggtggggtttaccccctcccccggggggggtttttgtggaggaaatccaagtaggggcacccgggagcccttttggccgcgcaacccctgcaacaagagggggtttttctattggccccctcccaaagggggggtcctccccccccttggggaaatgggggaccta

SEQ ID NO: 209743 - DNA, 905 bp, Homo Sapiens
  misc_feature (862)..(862): n is a, c, g, or t
  misc_feature (865)..(865): n is a, c, g, or t
  misc_feature (867)..(867): n is a, c, g, or t
  misc_feature (870)..(873): n is a, c, g, or t
  misc_feature (876)..(878): n is a, c, g, or t
  misc_feature (889)..(893): n is a, c, g, or t
gaattttcgggatgcgaggacatggtgttgcccctgtcatcgttatcgtcctggccatgagcttgcaggactgggagggccggagtcagccaggcagacggcagcacagcatttgcctgttggcaggtggccttggtggcttcccaaaggcaatcgctccacgcagaacaaaactcacttttttggggggtgaagcaccttggttcatttgtttagttcgttaattccagcagtctgtttctaagggaaacatggctgcagcccgtcctgcccctccacccacccaccaggtgcccagtgttcccaagggccccgaatcccaaccttattcaggcgtcagcatctctgcaccccaaatgcctgttagggaggatagtgaaggctgagccctcctgggctcatcaaaagccagcagtgagagaacacccccatctctctgaggtgaccttgtagggcagtccgtgctgtctggctggcctgggtgaggtgggcagggaccaaggcctggcgcctgggcctcgctggccttgctctgcgtgctgacttcatcctgatagtaccttgattttcctactgtgacttccccttctgtcgacttcctcaccaactttaaaattccgtattgagagcagtttcctaagttacctcaaatcctattcagaagaaggttcttcctggaagttgggagggcggaaaacaagtttagtcacagaagactactccatgtttgagcttctgtttcaagggaagtgagtaactgccggaggagccctgcccctctgcagtgtgtggtgttgccctgatacttttcagattgaggtgttacttacatgtaataaaatgcacagacttaagtggtaanaananaannnnaannnaaaaaaaaaannnnnggggccgggcgc

SEQ ID NO: 209744 - DNA, 868 bp, Homo Sapiens; identical to SEQ ID NO: 40293
  misc_feature (826)..(826): n is a, c, g, or t
  misc_feature (828)..(828): n is a, c, g, or t
  misc_feature (830)..(830): n is a, c, g, or t
  misc_feature (832)..(833): n is a, c, g, or t
  misc_feature (838)..(841): n is a, c, g, or t
  misc_feature (853)..(853): n is a, c, g, or t

SEQ ID NO: 209745 - DNA, 1000 bp, Homo Sapiens
  misc_feature (724)..(731): n is a, c, g, or t
  misc_feature (733)..(796): n is a, c, g, or t
  misc_feature (798)..(803): n is a, c, g, or t
  misc_feature (805)..(820): n is a, c, g, or t
  misc_feature (822)..(823): n is a, c, g, or t
  misc_feature (825)..(829): n is a, c, g, or t
  misc_feature (832)..(833): n is a, c, g, or t
  misc_feature (835)..(840): n is a, c, g, or t
agatggaacctttctctgggataatttgcacaacagatatcatcctctcggccagctaaataaagacatgacctatgcgcagttgtactccttcctgaactgcctccaggtcagcccctgccacggctggatgtcttccaacaagacgttgcggactctcacttcagagagagcagagcaactctccaacacactgaaaaaaattgcagccagtgagaaatttacaaacttcaatcttttctacatggattttgccttccatgaaatcatacaggagtggcagaagagaggcggacagccctggcagctcatcgagcccgtggatggattccaccccaacgaggtggctttgctgttgttggcggatcatttctggaaaaaggtgcagctccagtggccccaaatcctgggaaaggagaatccgttcaacccccagattaaacaggtgtttggagaccaaggcgggcactgagcctctcaggagcatgcacccctggggagcacagggaggcagaggcttgggtaaactcattccacaaaccctatgggggctgccacgtcacaggcccaaaggactcttcttcagcagcatctttgcaaaatgtctttctctcaatgaagagcatatctggacgactgtgcaatgctgtgtgctcccgggatcagtaacccttccgctgttcctgaaataacctttcataaagttgctttgggtgccattccnnnnnnnnannnnnnnnnnnnnnnnnnnnnnnnnnnnnnnnnnnnnnnnnnnnnnnnnnnnnnnnnnnnnnnnannnnnnannnnnnnnnnnnnnnnannannnnnaannannnnnnaggggggggggccctcataaaaaacccccccggggggccccaatttttcgcctaccccccttttttttttaaaaaagggcccccccattgggggcgccgttatataaaaaaaaggcctgcgcccccttttttaaaacacctggggaggggggaaaaagcg

SEQ ID NO: 209746 - DNA, 1000 bp, Homo Sapiens
gtttatccttgtatctctgcagtgtggattgaacagaaaattggaaatcatagtcaaagggcttcccttggttcgccactcatttatttgtaacttgacttctttttttttctgcttaacaatttcaattctcgtgggaatacccagagtacaaagagagggtggactttacccgaaactgacagcccattgggggagggaaaatgccgggtgatggaaagtggtgggccctgaaagggtagatggactggttttggaattttttaaaaaaggtggtggaacctggtccaagtttggcaattcctggtttggcctttttttctccaaaatggaaccctccccgggggacattaacccaaaaatgggggggggcgttttctcgcgccttcccattttttcccatttttttacaaaaaaagggggaaaaaaaaacacccgtgcggggaaaacaaaaagttcccattttttgtccccccaagaaaaaaaaaacaaatttcccccccccccggggggggggggcgcgagaaaaaacaaaaattgtggaacacacttggtggttcccccaaattcttacacaacaaaattgttgcccccgctggggtatttttttctctctgggggggggggggcccccactttttctccccgccgcccctgtgttaccacttctttttgcacaacatttttttttttttttgtggggatttttcgccccagaagaatcgtttcccgcctctcccttcggggaacccgccgccaaccacacccaaagatttcctacgtggggccctgggggtcttataaaatacccccgaccgcttcccccttttttccccttttaagaaaggtgtgcaagccaaaaaacctggggggggaggtttccccactcttccaaaaagagggtgtgtgctctgcgcccccgtattaaaaaagggggggggtttctttgtaggcggacaaaatcccagatcgatggacaacaaaagccgccccccgcgag

SEQ ID NO: 209747 - DNA, 1000 bp, Homo Sapiens
  misc_feature (573)..(593): n is a, c, g, or t
  misc_feature (595)..(600): n is a, c, g, or t
  misc_feature (602)..(604): n is a, c, g, or t
  misc_feature (606)..(611): n is a, c, g, or t
  misc_feature (613)..(613): n is a, c, g, or t
  misc_feature (616)..(618): n is a, c, g, or t
  misc_feature (627)..(627): n is a, c, g, or t
  misc_feature (638)..(638): n is a, c, g, or t
gccttttaggatgttcttatcccacccataatgagagttgaaaggggatggatagctgctccccatgcccttcccactttttggaataggccgtgagggtgtgaggaagaaggctgtcttttgtacataaggacaaaattgtttgttttacataaattttgttacatatttttgctaatggctttgtatgtaacaagaagcgagttgccaaactacctgttgtacttttgaattttctgattgaattacagactgcgaacaacggctttcagaatgagggacttccatcagactctaatgataatagtagcacaaattgaaaacttccccaaagctttcacagaatattttctcataataaaatccaagtgaacagataattagaagaaacccttttccttcagggaaccaagcaactctattttagtactgacatgcattattttcactgtgaattcacttttttattgcatgttcagatgtccctctttgttttttttttttgtaacattaactgcaatgatgttcttcctggaattcatgaaaatataattaaaacacatttttaaaccnnnnnnnnnnnnnnnnnnnnnannnnnnannnannnnnnanaannnaaaaaaaanaaaaaaaaaangggggggggccgcttaaaaatccccccggggggcccaagtttaaccggcccccctttttttttgaaaaaggggccccctaaaggggggcggatataaaactgaggggggggcgggcggttttaaaaccccggggaggggaaaaactggcacttggggaaatttttggagaagaacccttttttccggggggggggaacaaattgggggaaaacacccccccagaaatttaaagccctcagggaaaaaaaaaatatttttaggggggaatagagggtggaaaaaaaaacgcaaatgtgtgggggtgttaaaaaaatttttctcttcgcgggcgggtgatttttttgagaaaatatatccccct

SEQ ID NO: 209748 - DNA, 1000 bp, Homo Sapiens
  misc_feature (1000)..(1000): n is a, c, g, or t
taggtacaactgtcaaagaagacactggagaagagccaagctggatctataaggaattgcatatgagatggcacacatattcatgctgtctgaagattcagtcacgttaccatatcaagctgaaaatgtcaccactatctggagagttggacatgttttattgagaatgtattttttttctctggatctgttatgaacacctttgttggcttggttcagtaataaatatgtgagacttttcatttaaaaaaagtcaaatgacttaattctgtattttaaattctgttttgtttgttttgtttttttgagatggagtcttctgaaaattttctcatcttctctaacccggttcatgacagacccttggactttactgttgtggaaaaatctatataaaacagtatcagtgtgtcaaagcattatggctgtcacaagcttgtgaaaggaaaataaaaattactaagccaaagagaaaagtcaatctgggaactgcgtcagacaaacctgccttccattttattcctaaacaagatagttacaaagattttttaaaaagctacatatgcccctcccaaaccgggaacctcaagatctccaccctaaaataattctgttgaatttcaccctggcgatgtaaactgagagcttatcttcacagatgtgggaaagagcccatccctctgcacacctgagtcaaatggctatctgattgcttccccttgccctatttatgtaaaaaaacaggttcccctgaccccagcttaaggcataagtgacttattcctccctccctgctcacatataaaattggggatttaagggaaaggctggatcaaagattcaaagaaagggtaatttggtatccacctgggggaaccacaaaggtcccccaatttcccagtattccccccttttcaaaaccgaaccaaggggaaaaaaggacccggattgcctggcccccggggggccggaaaaaggtgggaaaaccaaattgtgagcn

SEQ ID NO: 209749 - DNA, 1000 bp, Homo Sapiens
ctggcgagcctgcaggatggcgcggccgagtccccgtacggccacccggcggatagttcggatgtcgctgtggcaaagtccgagggccagcgctgccctggagattgagcgcctggaggacagggctggagattgagcgcctggaggacagggctggagattgagcgcctggaggacagggctggagattgagcgcctggaggacagggctggagattgagcgcctggaggacagggctggagattgagcgcctggaggacagggctggagattgagcgcctggaggacagggctggagattgagcgcctggaggacagggctttgtctgcactgtgccctcggggtctgggctcagtgagggatgaaccctaccagagctacaggaataaagcacccaacaacgtgtacgcccagacgaatatggcgctttaagagctgtgcgtgttttgggggagcagacggttgacagtgttgagtttgattgaaggcatcgactacaagacgaccaccatcctgctggacgggcggcgggtgaagctgcagctctgggatacttcaggccagggaagattttgtaccatattccgctcctactcccggggcgcacagggtgtgatcctggtctatgacattgcgaaccgctggtcttttgacggcattgatcgatgggattacggagatcgatgagcatgcccccggagtccccagaaatcctgtgggggaaccgcctgcacctggcgttcaagcggccagggccccccggaacaggcccagggctacgccgaaacggcctggggcggtacctttttttgaggcggagcccctccgggggattttcaccctccaagagtcgtttcccgggagttgggcccgaacacgctctgcttggcccatgggaaaacaacccgctccgtgccgacccaaacaggggacttagaacttggcaaaccctcttgctccccgggggcggttgggttctttatacccccggaagaacc

SEQ ID NO: 209750 - DNA, 1000 bp, Homo Sapiens
  misc_feature (288)..(289): n is a, c, g, or t
  misc_feature (295)..(296): n is a, c, g, or t
  misc_feature (333)..(333): n is a, c, g, or t
  misc_feature (336)..(336): n is a, c, g, or t
  misc_feature (364)..(364): n is a, c, g, or t
ccagcttcagggtcaatgacttactagctcagagggaaatgtataaatatttaagtacatacctactatctgtacagagtgactctcattacccagagaactgctgtaaaatattatttattcacagattacacaaaaccaatctaaattagtacttttatacattctatttggggagtacttaaggtgtatgagcaaacaaattgttatccaggtcactccagaactgttgtatacagattaagaattgatgttggatactaattaaaatcattaaagcaaaatcannaaaccnnaaaaaaaaaaaaaaaaaaaaaaccaaacacaaaaggnccnaaccctctaaaaaaaccctcccagggcncaaacccccacgcgcaaccccaactcccttggcgcaaacgggcttcctatccccccataccgcctcgttggcccccgggcccctggttccttcgttttccccaatgggccgctgacctgggtcacaacgcgcccccccttttgtggacaaccccggggaacccttacccattaccttcccgccgtccggagacaccccaattgggccgcggctctccctttcttccaaattctaaaggccttctagagggcaaacgcataacactttcttttcattctcgttaaaacggccattttcaccctcccgtcgtgcccgtgcggtttgtctccgccttgcaccatctcccttgcctttacctgggacaaacggctttttatcgcgacaaaaaaaattttcccattttgtcgacgcgaggtagaattatctcctttgcccctatttgtgcgtagttcttatccttttgcccgagcgcgcccaacagggagatccccctttttacaagggacccccccgtaccctctcttttaaacaaagatcccgcgccccccatgcgcccccgaggatttcacccgtccttttccccacacaattttgcgccggtaagcgcgtcatataacttctcttcccctcggacca

SEQ ID NO: 209751 - DNA, 549 bp, Homo Sapiens
ctagttgagacgagaagagcgacaaggttgtgatccacgtggcaggtgttcagaaggctgggggcgggcagcgctggggagagccctgggtacttcgaggagaccccgaagggaggctgctcccacacctgcgccagtttccaccctctctgtgagcagggctgcggtcacctcccacatctgaagagaaccaacctgaggatttcacgctggctgcgtgccagaccagtccctgacaggttgtgcgaggcccttcgctggacagcccattgctggccactggacggagaggcagagggggctgaaattcgggcccatgcctctgtgagcgatgacggagcaacagctctccagcacgtgaagctctccagacagctgttcgtgagaagccagacagaggcctggggtctcagtccagatttctggggagtggggtgtccaagcgtgggccacgctgctgggagccacctagggaagcaggtcgcctgtttctatagtgacggtaataaaccaagtcaattttctataaaaaaaaaaaaaaaaaaggac

SEQ ID NO: 209752 - DNA, 715 bp, Homo Sapiens; identical to SEQ ID NO: 48034
  misc_feature (695)..(695): n is a, c, g, or t

SEQ ID NO: 209753 - DNA, 425 bp, Homo Sapiens; identical to SEQ ID NO: 53261

SEQ ID NO: 209754 - DNA, 563 bp, Homo Sapiens; identical to SEQ ID NO: 46799

SEQ ID NO: 209755 - DNA, 584 bp, Homo Sapiens
ccacagggcacacggcaccctcagtgctcagcacagcagtgtgcagcagcctggttaacttttctgcagggaagtatgtgaacgttcacaccaagcgtgtcagtcatgtctgtaagtcatctcccaccaacacaggtcaggttttcctgcccaatgagcttggggatggcttgactttggagctctttggatctgtggattttggaattttggatttctgatacccgtttgatcaaagaggcaaccgaggtctaacgggtcaagtgactttcccatatccgtgaaggtcatgaaaagcagggccaggatggtggcctggggtgccttgaatgataagctgggcccttcactgtgcaggcccctctccttcagtccactctgccactgctgtctgccacaccctgctctgatagctcctctctgccaggcttttccctcacatcctcaactcagccaagagctggtttcttccagagagccctgctgtgcagtcagttattggacttctctttttgtgcatgtttgttttcagggtttagctgatcaaagtggtatcgttgtaacaggcaaaaaaaaaaaaggac

SEQ ID NO: 209756 - DNA, 622 bp, Homo Sapiens; identical to SEQ ID NO: 49173

SEQ ID NO: 209757 - DNA, 649 bp, Homo Sapiens; identical to SEQ ID NO: 45813

SEQ ID NO: 209758 - DNA, 641 bp, Homo Sapiens; identical to SEQ ID NO: 48806
  misc_feature (589)..(589): n is a, c, g, or t

SEQ ID NO: 209759 - DNA, 666 bp, Homo Sapiens; identical to SEQ ID NO: 45897

SEQ ID NO: 209760 - DNA, 408 bp, Homo Sapiens
cgccctctgctgcgcctgaagagagaggcgactctacaagcctcacagcatgcactgttactaaaaagacgatgcgtcctcctggagctgagatctgtgtgatcgtgggaaagcgacgaaaaacgaacaaaggaacagtaaatggagtaacttggctagaatatggcagtaactacaaggcatgttctgctctggcacgaagacaacccacctgaggcaccagacacatgagtgaagccatcttggacatcccagtcacagccaaactcactcctgagtgcatctgcatgatgaacccagcaatccccaccatggagcaaaggatccatccagtcaacccaaagaatcgtgaaaaataataaattgttgttttaaagttaaaaaaaaaaaaaaaaaaaaaaatagggt

SEQ ID NO: 209761 - DNA, 557 bp, Homo Sapiens; identical to SEQ ID NO: 48405
  misc_feature (530)..(530): n is a, c, g, or t

SEQ ID NO: 209762 - DNA, 562 bp, Homo Sapiens; identical to SEQ ID NO: 50349
  misc_feature (521)..(521): n is a, c, g, or t

SEQ ID NO: 209763 - DNA, 553 bp, Homo Sapiens; identical to SEQ ID NO: 40651

SEQ ID NO: 209764 - DNA, 679 bp, Homo Sapiens; identical to SEQ ID NO: 54208
  misc_feature (624)..(624): n is a, c, g, or t

SEQ ID NO: 209765 - DNA, 707 bp, Homo Sapiens; identical to SEQ ID NO: 40487
  misc_feature (640)..(640): n is a, c, g, or t

SEQ ID NO: 209766 - DNA, 611 bp, Homo Sapiens
  misc_feature (48)..(48): n is a, c, g, or t
attgtccgtccctggttggaagccactggactagcttgtatgactttntggcagacaaactaaactcttggtattagttccatcttttttaatgtatgacaacaatacctgctgtaagaatgaaatgaaatagcattaatcaagcttctaccagggagcctggcacaaagtagacagacacatctgagaaagaaccttcacacccaggttagtgggggaggcagggaagcttcaaaaagtgggaagcatttgacgtcgacttgaaggatgagaacatattttccaaaaggactagaagtattgtgattattattattcatcctccttcctctacccttgcaggcctcctctcacttgctggtcactccttcttctctcctgtaaaaatcaaccaaagagactcttctaaatcctcagctcctggaaacaggagatttggttctggcctcacatttaaccctccctgcgcctgctgctccaggagtgcatagactcgccccttgttctggagcaggccaagaatgacccgtttccccaccttgttaagtatgaattggaaatttgtacccatgcagtttccttgcaaaaaaaaaaaaaaaaaaaaaacgcgg

SEQ ID NO: 209767 - DNA, 516 bp, Homo Sapiens
  misc_feature (21)..(21): n is a, c, g, or t
gctgttccctcacgtacggtnggggactccaagggcctcctagctgctgtgcctctgctgacatttggcaggcagcttctgccagccaagggtctcaccccagccccccggctctgcacccactgtgctgcccacaggagtggtcctgcccatggaagggccagttcaggtggccggagctcctgagctgccctaggggactgctgtgggtctgaggtggtgatgtcccccacggctgcctgcgcctgagcccccacgcatccacccctggggccactctgctgttcaggagcacccacccgtgtcctcgaccatgagcagccccccagcttaccctggcatcaggatctcagggtgccgggcccttggagcagaaggcagcagcaatgcagagttcctggacaggctcctgccacctgtgggcactgggcgctctccccggaagcggaccaccagccagtgcaagtcagagcctcccctgctgcgtacaagcaagcgtaccatctacaccgccgg

SEQ ID NO: 209768 - DNA, 720 bp, Homo Sapiens; identical to SEQ ID NO: 49105
  misc_feature (651)..(651): n is a, c, g, or t
  misc_feature (670)..(670): n is a, c, g, or t
  misc_feature (690)..(690): n is a, c, g, or t

SEQ ID NO: 209769 - DNA, 404 bp, Homo Sapiens
caaaaataatttaatattccatctgggcagcgctctgaggtctgcttgtccctccctggcccctgtgccctacctgacccacccagggaccaccaccctgtccctacccaggcctcggggtgggggagtcagaggcccccagaccctgtgtcccattcctagtgaagctgaagccaccataacgtcagcctcttcccagagccccagctctgcccctggcttccctcgcgatcctcccctggctcccctcgcgatcctcccttggcttccctcgcgatcctcccctggcttccctcgcgatcctcccctggcttccctcgcgatcctcccctggcttccctcgcgatcctcccctggcttccctcgcaatcctcccctgtcctgagccgggcatcccagagcct

SEQ ID NO: 209770 - DNA, 421 bp, Homo Sapiens
gcctgagagggctgactgaaaagtaaccaaaggcttaatatcaaacactaattagctttttagtgccttaaccctgacctggttaccagttttctgtagtttctacacccaagccactgaagtcatctgtggcccaagaggtaggacaaaaaaaaaaaaaaaaaaaagctgatttcaatatttgatttgttgacatcccaaaatgaaagttttatgtttcccttagaaacatgttttgcttggttctatagtatgttacttaggatctatttaccatatatttgtatgagaaatcctcacccaagcattcaacctaaatctttgaaaagttgggtgctgtctttagtaacttttaaaatagtttaaatctcccattttaatagtgataaggaaacctgttaaaatcatggctattgatgtt

SEQ ID NO: 209771 - DNA, 393 bp, Homo Sapiens; identical to SEQ ID NO: 46859
  misc_feature (197)..(197): n is a, c, g, or t
  misc_feature (297)..(297): n is a, c, g, or t
  misc_feature (322)..(322): n is a, c, g, or t
  misc_feature (350)..(350): n is a, c, g, or t

SEQ ID NO: 209772 - DNA, 330 bp, Homo Sapiens; identical to SEQ ID NO: 48975
  misc_feature (221)..(221): n is a, c, g, or t

SEQ ID NO: 209773 - DNA, 1000 bp, Homo Sapiens
cagagggagtttaatgtgattttatacaactaatgaaagcaaaatctacattcatgaaaagagggacaaggcttttggttgggttagtctcaaaaaagccagagagaaaaaaattccttagagtcatgctttctttcacttagacaatgagaagagattaaggcagtacccttccaaataagacatgtttatcttttcacagagatttctgaaaaaaaatttaacctctagaaatgatagccataaaattaaggatgctgggtgggaggtagagtgtattttgcagtgagcatgccacattttcaacatcacttgggtcctaaagcttaagaagcctccattctacaaataagaatagctctatttatatcttttttgttgttgacaaagactttttataataactttatgttttgaaattacctcaaacttagagtagttgcaagaaacacggaacttctgcataacctttacctaggtgccttgactgttaatattttgccacatttgtttcatcattctccttttccttgtctctcccacctcatatatttttaataaacatttaaaagttgcaaatatggtacctctttatccctaaatactttggtgcatatcgcttaagacaaagattttctcttataaaaccacagtgcaattattaaagttggaaaattaactttgatacagtattattatctaatctatagaccttattcaagtcttgctaattgtcaaaatattgttctttatatagttagccttttaattaattctgactcttcctgggttcagactttagataaagcagagatacagaaggcaagaggtgttgtacctgttggtgaggtggcctttcttatacttagattcttatacttggatgttgagtattaggtcaacatcactaatgattagggaaatgcaaatcaaaatcacaatgcaataccaccttacactcctgcaagcatggccataatcaaaaaaaaaaaaaaaaaaa

SEQ ID NO: 209774 - DNA, 1000 bp, Homo Sapiens
ctgaactcctgacttctttgaactctgggcttctaatctgtgaagtcagaataataataactgggtagttgtgagcattaagtttaaaaatatgttgtggcagcactttgcatgagcagaccatagtataaatgccagctccctttccccggagataagaagtgattgtgattgtgcgttaagttctgttttaagcttcctagctgacaaggcaaaaatgaaacacaatggcttatattgttctagtctgattcaaagaatgtccctagtttttcaggaaatataaacactttcctggtgttacattctaagacaactttattttgcaagcctaaatgattcagtcagggtttccaacaatggttttcaccccaaaagatggagaattcccctttctatttccatagcatgtatcaatcctttaaaaaatactaatctggggttatgatagtgcaacactaaattcggaaggcgaacgccatggagctggaattgcattctgttgctccatttctttcaccgtctctttttactggacatcttatgataagaacgtaaatggaaagggcaagcctggagtgacaaagggaatcctccattcactccatacagtgctgttgctgggctcgggacgtggagagggcaggggccgtgaagacatcctggtgcctttgcagggtcgtcatgaggataaaggggatgggccaggtgtgacagctcaggtttataatcccagcactttgggaggctgagactggcagatcacttgaggccaagagtcccagactaccctggccaatatggtgaaaccctctctctactaaaaatacaaaaattagctgggcatggtggtgcacacctgtaatcccagctactcgagaggctgaggcacaagaattgcttgaacttgggaggcagaggttgcaatgagctgagattgggccactgcactccaccctggcaacagagcgatactctgcctaaaaaaaaaaaaaaaaaa

SEQ ID NO: 209775 - DNA, 1000 bp, Homo Sapiens
gtagcaacagtaaatgggctgttttattcatagtcttatattttaaagacatattgtttatgtatgaacaaagtaaatcacttaaggtgtaacaaatctttgaacccatcatagttctgctaaaatatactgatgcattcaacagtattactttctattttatgtttcaaatttaggatttttatttaatttgattattcaaaatgatattatcttcttgagttaggcacttacacttaaatagtgccttttgattttaaaagaataacctggaacacttttatttttcataatacctgtcacacattttatatgaggatgaatgttcttgtgtgtgcaacaagtgtaaaatttttatcagtagtttagagaactctgtggtggatattttttatatgtattagcattagctcatttgtactctatgctttaaataattgtcgtacatttggtagaaaagcctttacatacatgtatatgtgttgtgtaggaatacattcacacacacacacgcaaacataacatatacacctgtaggatgtagggccacaggacaaataacttaggaaaatacaattggctttaattttacctttttgtagcacataaaaacatgaaacaatacatcaataaacaggtcctattttactgaaatacaacagaaaaaaagaattaattttagagttaaagaagtagtttatacttaaatattttagatataattatgcaaggctatatggttattaggacagtgattaaaaacagcttaatttttctaaaccttttttatgataatgtactttaaattctctgtttaaaaatatatgtataagaattattttatttgtataaaatagatattaaacgattgggtattagaatctgtacattattaaatgacactacatgtgcaaaaaaaaaaaaaaaaaaaaaaaaaaaaaaaaaaaaaaaaaaaaaaaaaaaaaaaaaaaaaaaaaaaaaaaaaaaaaaaaaaaaaaaa

SEQ ID NO: 209776 - DNA, 623 bp, Homo Sapiens
tttttttttttttttattatttcactgcctaaattccagaaagcaacaaaaaccaaatcacaattttcaagaacaaacaaatttagcaagactgcaaaatagacaaacagcaatagcaagacggcaaaatagacaaacagcaaggttatcccagtcagaacttcatagctatgtttgtggatatctgctaatcagcgtaacacaaatgtaagtgatcgtcagaaagaatcagacaggagcaatcagggtgttgcaagtcctgattacgcagagacgttaatcacgtttcatgcatctccaatcatcatgttctaatctgccctccggaggaggaacaggtaaggattatcccacctgacgatacaggcaaaccgccgacattctgcactcagtgaaaaagattccgttacaagctagggtgagttcataacgcgctggtatgagcaatcctattatttagcgtccttccagttgttttgccatattagctcgcacatttttttaaatttttttttcattcggctgccgaaaaggaataaattacttcttcccagaatgctccgatcagttacgtgccggacgttctaactgtacgcactttctatttacatatctccgcccac

SEQ ID NO: 209777 - DNA, 689 bp, Homo Sapiens
ttttttttttttttttttgcccttaattgacttgatctttggatgtttgaggttattagggatcatgtttcatttcccttgctttcaaatacagttcagaataaggattacatgaagtcactagcagttttactatgtctgaactagtcctgaaagtaaataaacatgcacatcctgagcactaaaagagttgcagaattaatgatactccaatctctcaggccatgtgtcagttggaaactaacacaatggtgagaacattttaaatatttacagcctcatgatgtgaacaaacagcattctccctaaaagagtagactgtaactctacaccaagttgaaagaacagtctgtcaaacatcaggaaatagtcacaaaaaactggatgtacctcaggtgactcctaagacttgcattctccacatttaatgaaaattatatgaaatgtaaatagtaaacagaccttagaaataatctgacccaccttacctcatctttgttttctcagtttaacagtgtatcggtgagacattttacttttattataaaacagatatttcaggcagaattctaccaccctggaaatgtaaccaccctctccttcctaagcccagacatactccttagtatttaaataaacatctgttaagctccaggccatgttcaacgttggaattgttatgatcaatt

SEQ ID NO: 209778 - DNA, 526 bp, Homo Sapiens
  misc_feature (457)..(460): n is a, c, g, or t
ttttttttttttttttttcctggcccaatagatgtttattattattattactactatcatgactggcacttgacaggggctcaaccattgcttgtggtagtttgctctctttattcttcatcccaggtaacccaggctatatattagactccagtgggtactcttaaaaaatatgcatgcgccaggtatggtggctcacgcctgtaatcccagcactttgggaggtggaggtgggagcatcgcttgaggctgggagtttgagaccagcctgagtaacatggtgaaatcccatctctacaaaaaataaaaaaattagcttggcacagtggcacacacctataatcccagctacttgggaggctgaggcgggaggatcactggagcccgggagagcgaggctgtagtgagccatgtttgtgcactccagcctgggaaacagagtaagactctgtctcannnnaaaaaaaaaaaaaaaaaaaaaaaaaaaaaaaaaggcctacagccgcggccgctccaaccctcgtgc

SEQ ID NO: 209779 - DNA, 638 bp, Homo Sapiens
ttttttttttttttttttcacattaactggaactttatttgcttaaaacctaaacattgtcagtttgaaaagaaatccactgtgacctgtagactgatcttgttgattaaattctagggtttttttttttttggattcttggtaaaattttatccaaaaaacaggatacatatatatttagagaaggaaatatgaaatcaagagttttggcagcccctgctttttttttttttttagctccctaaagactgtagcaggataaaaggatcactggctccgagtctctttgagataacaagtgatgaaataaaaaagaaagcccataccctcaaataaggtcaggtaaccccattgcccaccctccctacaaggtaaaaaatgagtacttttagtaacagttcagaattcatctttatctcctacctgcctcatcggtggaagtttaaagtcatgattttttttagacattgatacttgtgtctatagacaaataaactcatattagatgacaattgattttttaaaagtccaggtagagaaaggagcaatcattttgaactaaaatctttctatgttttttgattactattcaacttgctattttttagcaaaaagcgaagtttcaatagtgttcatct

SEQ ID NO: 209780 - DNA, 791 bp, Homo Sapiens
  misc_feature (735)..(735): n is a, c, g, or t
  misc_feature (767)..(767): n is a, c, g, or t
  misc_feature (778)..(778): n is a, c, g, or t
ttttttttttttttttttgcgatggagtctcactctcatcatccaggctgaactgcagtggtgcaatctcggctcactgcaacttccgcctcccaggttcaagcgattctcctgcctcagcctcccaagtagctgggattacaggcatccgccgttacacccagctaagtttttgtatttttagtagagacggcgttttaccatgttggccaggctggtctcaaactcctgacatcgagtgatccacccgcctcgtcctcccaaaatgctaggattacaggcatgagccaccgcacctagccggcaaacttttttaaatggttggcgggggtgggggaaatcaaatgagtaatgttttgtaacacatcaaaattataatgacgtgctgcataacttttggtcaacaatggccaaatatacgatgatgatcccgtaagattacaatggagctgaaaaattcctattgcctggggacacagccatggtaacatcatagtgaaattactttatgtagcctaagtatatagtgtttataaaagtctacagtagtgcacagtaatatcatggccttcacattcactaaccacttactgactcacccagagccagcttccagtcctgccaacttgttcatggtaaatgtcctaaataggtgtaccattttatatcttatatatatctatatatatatttttactgtaccttttctatgtttagatatgtttagatacacanatacttagcactgtgttacaactgcctacagntatcagtacangtatatgccatac

SEQ ID NO: 209781 - DNA, 748 bp, Homo Sapiens
ttttttttttttttttttcacactgcaaaacaactttttatttaaaaggccaataatgagaataatgagttgcacaagaatgaaaaccttatcccttccaaaagatcggcctatacattatgtataaagttagaataattctaaatacaaaatgccaaagaccagcgggtccactccttcctctcctaagccatcttgacagtttcacatttcagcttccagacgtcatttctgttgcttttaagggtgcttacccagccgtggtctgtaccagacagggtagttggcacagcgtaggcactgccagcaggcccttgggagcttggcgaggtgggagccttgagaaatagctggctcggacccatggcggggtttgtgtgtcaactccctggtcctcagagaatccgagccacgggagagcaaacgctgcttccaaaaccaaaggaggaattttgcaatcgtttagacgggttataatagaatctcattcagatcttgaaggttatcggtgctttctgcaggtttttattcctcaaaaatgcagccaagctttgctgtgcttatcttggtggatctgagctaggttgggctatcttttcctaattcaattgccttttttttgcaaggaagggggtttctggtccatcggagggatcaagggcatggtcctcacgtctcgtcaggagacaaaatagaattcagcagacagacacagccagcgcatgcgaccagcgtcgtttggcctcgt

SEQ ID NO: 209782 - DNA, 753 bp, Homo Sapiens
ttttttttttttttttttgaacattcaaaggacttgagagcattttattgtaacttaaaaaaataaatacaactgtcactaacttttgtgagcaatttctctgaaaaagatcttagttctgtaagacatttgaaccattctctggctaaaggaaagaggtgtctgtaataatctgcacgaacatgagacagaggtgccagctggcctttctagtcaagaagactaaggtcaatatggaagtagacataaggaaaatagtcttggttattgagttgcagtcccgggatctccacagatgcatccagtatacttgtagcggctacttcatccagatgtcggaagacagagtttagaacctctcttaaacgcttggtggatgacttcttatgcggctgcaggagcactgcctggaagttcactggtagtccatacctgagcacggactccacaaacactctcagggccttgatgtggatccaggcaatgaaggcttcactgaagttcaccttgagccagcgcagcagggggccctgcaaagacagaagagccaggtgacccctgctgaacaccccgcctgacacagagccaagaaaggacttgggttttgacagagcacgccctgagctgagaagaagtgccaggagccagaagcagagagtcggtcagaccagccctgggtcaggctcaggacctcgaggtccagggcacctggtgccggggaagctcagcgggccagcacccggtgcatgcacg

SEQ ID NO: 209783 - DNA, 692 bp, Homo Sapiens
ttttttttttttttcctctcttttgacctccccagaccgagtgacggttctctacaggagcaaagccattcgctatacctggccttgtccatttcctatggccgactccagcccttgggttcatattaccctaggtgatggcagcaccttccagaccaaattgttggtagttgaagattcttattttgctaggggtcttgtatatctacatcttatcctagattctagggactctggttttcgatttaagctatagtttaattttaggcaaaacttttggttatgaggaccagtacctattcaggccagctcaagtggagatggtctcatcgtaaatcctgtacagggagcaatctcatgggccgtcttaggttgtgaaataacagatagctgggcctcacaggacaggcaccagagtgttgggaatggaggctgttctttccctctgaggagtctgtggtcattgatctcttgcctctcatttttctcctttctgctcacaagcttccctttttgcatggtagccattcctaaccctacatcagaactattcagctccagtgtgtgccccatactgaaactttccttattgctctctagttcacatatcaggagggcctggctgagtttaactcatggctggcacctgttcagtcatgtccagctttggctctgttggctgaggctgatgt

SEQ ID NO: 209784 - DNA, 641 bp, Homo Sapiens
ttttttttttttttttctgtaagtaatgctgcccgagaacctcttcccaaaaggtcctctgcctcatctttctcctcctcctcttcttcctcatcttcattctttaggaaaatccccacattcttcactttcttcttcacagaagtgagaacagtagctgggccatcctcatccacaagcactgtgtcaccaatgaacagggcataggttttctcttctggctttttcccctccttgttagtcaggtctgagaatcctaaattgatgctgaaaaccattcctttcttcagtttgtattgatttttgctattgattactagggagccttcacggaattcaattcccatcccaaaccctaggtttttggtaattttgttcagcagttctggcttctgctttttaaccacgtccatgacagcgttatacacgtcacatatcttcacaccatgtcttaattccttcagcagctcctcttgaagctggagcaaaaagttataattttcttgaacttcttgagaaggatcaaccatcaaagtgcgaacaaggttggagcagtaagacttgaagcgaatacccatggcacaagtgatagccccaaagtgcatatgattcttgtcactcaccacctcgtgccgaattct

SEQ ID NO: 209785 - DNA, 614 bp, Homo Sapiens; identical to SEQ ID NO: 43663

SEQ ID NO: 209786 - DNA, 662 bp, Homo Sapiens
ttttttttttttttttttcagtgttttccccggaagttctctgaacatccagggtcttcacagatggacttctcataaaaggtaactcctggaaccagacataaattttttttttggggtgtgtggtgatgggatacatagctgtcgccagattctcaaagggacagtgtcacacttaacagagcaaggagagtaatcggtgattggtgaatgatcatttatcagagactgtgtgtcaaacatttaaaaaataaaaagtaactgctgaagaaatgaacaaaaagggtcacaccttcaaaaaagcctaatttccattccagagcaatctcaagacaaggaaaaataagagctgcttcacactgagggcttatctggtatcaaggaccaccgccaatgtcatccattagccatccccaataaacccatgaagttcagcctgaacagcatagaaagacctcgtctctacagaaaaaaaaaaatttaaaaagtacccaggtgtggtggcacatgcccagctactcaggaggctaagatgggaggatcacctgaccctaggagaccgaggctgcagtgagctatgatcacgccactgtactctaccctgagtgacagagcgagattctgtctaaacacacacatacacacatacacaccatgaagtt

SEQ ID NO: 209787 - DNA, 582 bp, Homo Sapiens
  misc_feature (77)..(77): n is a, c, g, or t
  misc_feature (524)..(524): n is a, c, g, or t
ttttttttttttttttttgctgctggaacgttttattaagttaagaggttcagggagcagaagagaaacaccttttngggtggctctggcggttctgcacccagcacagcctcgaaggaggctgtggggccatggaggccagctgctagctccctctgtcctgagccccatggtacgggtccaaatggggcaggaagtgttagtaggaggtagggcaggaagagggtggcaggctcccgcctctcccctgtagagacaccccgccatggctgctgcctgggcctccgccagacctctgggccagggccaccagctcagaagcccaagcagagggtggctggagacagagggggaccagggttggaggcacacagccaccaggaattgctttttttttttttttttaaagtataaagtgttttggaaaaaaaggaaaaaaatctatataaaaatctcttcacatataaaatcctgaagaaggtgcaaggtgagacccagtgcgaggggcgcgctcagatatgcantgtgtgtgtgtgtgtgtgtgtgtgtatccgtgtgtacatgtgtgcacgtgtgtatgga

SEQ ID NO: 209788 - DNA, 581 bp, Homo Sapiens
ttttttttttttttttttacaaataatgtaatttattttccatatttaaaatacatggtgtcaacctcagctaagcacccagaagtacactgtcaccctcatctgagaggtgtaggactgtaagggaatgtgtttgggggtttaggaagtcacttatagacacatgaaggtggagatgcctgtttgatgtcccagcagagagctgcggagacaactgcacacaggattgtagagctccggggcgaggcctgcaggggacacggagccatgtaggtgggtcaaagccgtgagatgataaggttcaaggtgatttgagtctaatcctgtttttcggaggactggaatcctttaaagttcaaattacaactaaatacctccctgtcctacaggaaaagccacacactccattgtgcccatcatttcaggggtcagtgtcactctgactgagcttttctggtcttctccctcacctgtatattacaggtgggctcactgaggttcacagcgggggacgtttcaccaagttatcctgagaagctccgagttttgtaagaaggaagagtcgctgattttcatgtgat

SEQ ID NO: 209789 - DNA, 598 bp, Homo Sapiens
ttttttttttttttttttactttaagtcctggggatacatgtgcagaacatgcaggtttgttaaacacacgtgcagaacatgcaggtttgttacatacatgtgcagaacatgcaggttgtatacacatgctgtggtggcttgctgtacctatcaacccatcatttaggttttaagctaaaacatctttttaatcatgccaatgataatacttttacctaatataattgattcatctaccagaaataacacaggaaccaacatcagtaactaaacctttttgaaaaatcacctccacgaaaatcttacaattaaaatttaaaattacttcagctccttaaattttcaccagtctgatatctacattcttataggaagacgttttaatagcctacagtagtcaactctaactgatgaattccaagggattccaatcaaaatgccaatcataaattttctagaaaatgatgaatgacttcagaatacactgagaagcatgagaatgaatagctatgaaaattctaaaaacaagaattacaaagaatctgcctcaatattatgacatataaagatacagtgaaacaatatgccacagttgcc

SEQ ID NO: 209790 - DNA, 696 bp, Homo Sapiens
ttttttttttttttttatgtcagcagaggctttattctagtggaaaaggcagacaataaacatataactgcatgatgatttaaaagcaactgtgataagtgctataacaagatgatgaagtctagggtgttagtagaacaattaacagtgaacatgacaagctcagggtcatcttcatcttctgtgcccccaaatataagtgacctgctcaaagttaaccagtaaaagaggggaaaacaaaactgtcttcctacttagggattctctggtctttggaccaaaccttggaatacaacttacatttgggccaatagccttgttttccctatttatactcacagggaaagccagctggaatatgcatgaatcaacattctaacctcagagatatatttctaaaattcaaaacagaagttatcactgatacttggttcagctgaacgactgtgttcatgaaagttgataccattgccattccttgatttttacaagcatagcaaacttaaaacgctcaacacacccagaatgggcaataaatggatgtgttggcatggtcctcctcgtgctggcacttcaacaacacagcaagctatgtacttttgaacaggggttggaacattttttctgaaagcaatcttcaatcttgcaattttgccacattcttttattttgccatactctatgaattattctact

SEQ ID NO: 209791 - DNA, 707 bp, Homo Sapiens
  misc_feature (657)..(657): n is a, c, g, or t
ttttttttttttttttttaaagtgtaggcactttaatctgtttcaatccagatctgtctgaattcaatgatgttcccaaacttggaacatgaaaatatcaactttctccaagaagtctgacatgtttaatatcctctaatagcaaatgtgataaggttagcacttaagacactggtttacaacggacctgtgtacttgatgcctccccaaccggaagataagccatctgaactcacttaaggcggcatgttcacttttgcttccccagctccacagttaagtgtaccacagtttctggtacacgtaatgcgtgttaataaagatttgttgaataatcaaataagcgaaactgcttttaaacagaaagccataatacaatgttattaccttcgaatttggctagagaacatcaccaagcttaccagtttgtgatctagactccacttttccccatttttttcagtgtgctacttttgcttatatccattcttctgtgactttgtttgccacaattccttaaatacttccacccctccttttcataacagcgatctgccgtttgtgaacctcttttacagagaaaaactagaatgttacttttcctttcatagcaattctttaaaatttctgaaagcctttacaagggtattagcgcanacatcagagatcgctgaggttaaactatcttttaacctcgtgccgaattc

SEQ ID NO: 209792 - DNA, 687 bp, Homo Sapiens
  misc_feature (583)..(583): n is a, c, g, or t
ttttttttttttttttttggatctgaaaataatcaaaaattttattttaattcacatttatttaaatataacattttttatagacacatgaaggtacttatgaacatttataacatggtaggcacaaatatagatgaaatgtttaggtattttcgacaaaatttcacacaaaattagacaaactgactatgtgcttgcatttaatttcaagggtacattaacacagatatttgaaaaggatgttcttttacaaaactactacaaaatgttcacgtttgcatcagtaataagtcatatttcctagactgatgctttgtaagaactatgtaaagatctaatttaatcattaacaccatatggtaacattatatgtaaatgaagcatatttttgtcaatagaaatgttcctctaacttttaaataacatagcatttgtattaaaaccatgccacatttattaaacaaacatgcataatactttaaaactggaataattcatgtacctttatgcacagtgtttagtttcactatggcactctatctttgtgaaaaaatatacttaaaacttggcacagagttaacanatcatattgctggtaatcaaaataaatgtgatttcaatttcccatgacatagaaaattctctatcacaatttacctcttcgctttacagtttattgaccactgg

SEQ ID NO: 209793 - DNA, 766 bp, Homo Sapiens
  misc_feature (707)..(707): n is a, c, g, or t
  misc_feature (710)..(710): n is a, c, g, or t
  misc_feature (743)..(743): n is a, c, g, or t
ttttttttttttctttttaatagactttattttttgcaacacttttaagcacagcaaagttgagcggagggtacagatttccaagcctccccaccgccatcctccccgactgtcgagatcccagtcacccacagtgggacatacagctggggaacctacagggacatggcataatcccctggagcgcagcattgacattagggctcactcgtagtgttacccattctatgaatttggacaaatacataatgacatccatccctcatcacagtgtcatacagaatagtttcactgccttaaaaagcctgtgtcttccaccttttcatccctccctcccccagcccctgacaaccaccagtaatttaattccttcatattttgccctttccagaacaggtggaatcacacattatttggtctttgcaggttggcctctttcatttagcaataggcattcaagattccttccatgtcttgatagtgcatttctgtttagcactgactaatattctgttgttggttgtcaagatttactagtttattcaagttcattctttttcaaataaattctcaatcatattttattttattgcaggttcatacttataacacaatttagtatttctatcacttaagaactcttggcaacacatatcagaaacttgcatgtatcagacagtagcgaactcaaggcggtgtttatgtancangtctcgggtgggcctctgggaccgcgcctgttngactcagtgctgctgatggctgc

SEQ ID NO: 209794 - DNA, 693 bp, Homo Sapiens
ttttttttttttttttttacttttccattcatgtatttattgtcttggggatacacctaattaacagcagaagaaaaacaatgtaccctgaaactaactgtaaatttattgaagacaggctccacatctttgtctcccacatcttcttcccctattttgtgcagtggttcacatatagtaagtattcaattaagttgaaaagcaatgcaagtttcaattcacattaatttggaggggttgcactgatttaaggagcagctgagatgaaaaggctagcttcgatcttttctgatttctggctagtgaggcacaccatcttgaaaacttcctctgctgaaccttgcataactgctgtccactgcggcattcttaatgtcttgatttgtttccatttctgctgaaggtaacgagatggttctccagtgcttatctttccaaagagaaaacgtgcagggtgatttgaagcaggtactcagtggctatctgtcccagtcctagaggcagtgtatcatcaatagagatgagctgcaagttgttgttccatagttgacataggcttcctgatctagccaattctattgccaaagctccccagtgaatggcagcttacatcacggcatggtagctaccataaggatgcagctctggggctcctcttgcatatggaaataaggaaattttaatagaaatatt

SEQ ID NO: 209795 - DNA, 703 bp, Homo Sapiens
ttttttttttttttttttcatgtttaaagcagtaatttattctgagatttacttttgtctgttttctttccagtccaggtatcaatattttcaagaatattaaagtataataatcaaacattcaattcataacatatatgcttatcagaagcttttacaaaatggaaattttatgttagaagatttgggctaccagtaatattcactgtgcatattttaaaaaaaaaggtgaacagagttcattgtttagggaaaatgattatggagaaactaaaatcaagagcaattttaatgtggatattaatgacagtgatcactttcatatccatgactttatctgttcctaaggactaaagggatgaaggcagattatgtaccttactgtcaagaacagggtcagaaaaggtcaacaatattaatttaagaaatgtttattaagcatctactattggctacgtactccactaggtgttgaggacatagaaataagaaaaaaaagttacctgaaaaggtacttgtccacagtttggcccaaactaactaaaccagaaaccactaaagtaaggaagaaaatgacttctgtttgtctcttcacttcatctctctatgaggtgaggatgaacactgaaggaagcttagcagggaggtacaggccagaaagagaacatgagaaaatgctatttggtatacctcctacgtttaa

SEQ ID NO: 209796 - DNA, 594 bp, Homo Sapiens
ttttttttttttttttttcggtttcacaactttattaaaaataaatttataagtaaacaaatcgtaactttatagattaaagttgattgggattaaggagaacctgggtataagaggatctggtacagagaggtctcaggatcttttcctgagtgggagtacatacgaggtagggaagagaaaacaacaaaccagaacaaagttgctgctcccaggtcctctttcgtcctccaccttcccacacagcattctgacagcccctgagctctcctcaactgcactacaaaagggcaggccacccccagcacagtcaagtcctgagctccctctgcttgtagccaggcaccatgttagtgatttccacctcagggctttccttttaaaatccacaccccacatgcctttgcagtcagctctctcacctctccatactcatttcactcttccccaactcccccagcccaccttctgccagctccttcactcactgtattttcctcttctactatacagaacattattcatcaagcaagagccatgccatgcagaaacgcatctggtatgctacttaaatcatgccgtttcacccgtttt

SEQ ID NO: 209797 - DNA, 665 bp, Homo Sapiens
  misc_feature (609)..(609): n is a, c, g, or t
ttttttttttttttttttagatgtagagatagattttattaagacaaattacacattttactatatttttcctttctaaaaccctcaccatcaaagattgatcccacagaatttctaattcaagaacactcatttcataaaacatttcagagatagaaggagagaaaatattaatgctaggcaatagattaaaaggtgtcccctccagggacccgggatgatcagacattccttcctaaatggcatcctagtcactttcctccacctctccactctcatttatctttccacccaacaatagcatccaagtgtcagcagagggcccagagatgggcaggtgagtcagaggttgaacctccttctgagcctttaccctcctctgtcccaacctcttgtggctatctgtttaggttaataactgccaggcagccggagaggagagcaggaagacacaagtttctctgtggtttcctttccttatttcaggactccccaagcctttacccatcccatcagcacccacacacacacacacgtgcattttaataatgtaataatccctctataagtctcagtttccaattccaagcatcgtttaccttcatccanaacaacagcaacccattatggattcagtgaatacagagaccaggccaatccctggg

SEQ ID NO: 209798 - DNA, 594 bp, Homo Sapiens
ttttttttttttttttttgcagaggtagaagctttcagaaagccttttggggtaagtgggaaaacccttttgaaagccgttatgtccttttatttggtgtgatagatgactgggtatctctctaactctatttgctgacttcagcaaagaatcaatgatgagcttagtttgcaagaaccggttccatcacatggaacgggaacgtatgttaagctctagcagccaccttctgtcaaaactgtttgtaaagcaataaccataatcaggttatgaggtcccttggttgggggaaaaagtattatcaagacttggcacagcacatgaaaagcaacatgttaagtttctaggttttaagcaaacatctgactatgctattttcaactacatcataactcattatcatagttttggggtttggaattgtcaagaaaaccagcattccaacaatttggcctgtgcaagtctttgaagggagtgtattgttagtgttaatatcccgtataagcagaggcagaattatatgtaactttggtttgactgaaaataaataccatggactacaattgctataatctttgctttcagtgtaaaaac

SEQ ID NO: 209799 - DNA, 543 bp, Homo Sapiens
ttttttttttttttttttggctgcctatctttatttctattgtaaagtttccatatttgcttcaattaatttacatataattactgtacatgagagataatgttatgacaagaatagtttctgcaacattaagtatgggtcaaaaaaagaagaaatgggccaggcgcggtggctcatccctttgggaggctgaggcaggtgtatcacaaggtcaggagttcgagaccagcctgaccaatatggtgaaaacccatctctactaaaaaaaacacaaaacttagccaggcatggtggtgcacgcctgtaatcccagatactcaggaggctgaggcaggagaatcgcttgaacccgggaggtggaggttgcagtgagccgagatcacgccactgcattccagcctgggcaacagagcaagactccatctcccaaaaaacaaagaaatgactttagacaaatggcttgaatgaaattacaaagaggagtgcattaaaaaataccagcagtaaaatctcgttgaagaattaaaatgacaggctaaaaat

SEQ ID NO: 209800 - DNA, 555 bp, Homo Sapiens
ttttttttttttttttttcccggctgtcttgcctttattcctggttagggcaggtggtcctagacagcagtttccagtaaaagctgaacaaaagactacttggtactctcttcttggtgtacatggctgtgtcctgcactgtgccccatcccgcctgggacagagacgggcatccagggtgctgggacccgggcagggaggctactgtggagaccaggcagcagtgctgtgggccccaagcagctgtgactgccctggcttgaccagcacagggttgggcctggtgtggcctaactttggcttgagtgtccagggtcatccgtggctcccgaactgtggcccctgcagggtgcaggaggcagcaccgaggttcccgtacagcactgacttgaggaataagccgtgggctggggctacacgtgtctggtgcttgcccaggggatcttggctctccagaatcgtcttcacctgggcaggtgccaaagcccccagccccacggccaccagcacagccgtcatcctccgtacctgtctatacaggaaagactggctctc

SEQ ID NO: 209801 - DNA, 641 bp, Homo Sapiens
ttttttttttttttttttaccaattacaaaaaggctttattatattttgccaaatgttaatcgctttcattatgtctccaaacattatttcaccactcatttttataacaagtgcagtgaagatatgcttatcgaatattgtacaatactgttgtgttctgtaacactctttcgggaacagcttagatgtaggtaacaagagatgcctgcgtatgaaagtgcttcataaactgtactgtataaatgtaaactactaccattttcaggtaaaatcagagaataaatgtctcttgttggaagtgtcctctcaggactcctctagtccaatctccccagtgagtggatgagggaaaagactgacgccagaggcaggaggctctggattggagagttagaggccaacgcaagtatagaatctgcagtcctagcacagggatctttctcctcccttgtgtaatttatctttaaaaacactgatagttttctggtgctgggagcaccatgccctttaaaacttatgaattaatggacgattacaacaaaaagaactttttacctagccctcaataaatagttgttggtgaaattagaaatttgaggttgaattgttaaagatcgtcttggtcactcctctctcgtga

SEQ ID NO: 209802 - DNA, 652 bp, Homo Sapiens
ttttttttttttttttttaaatcgaaatattttagtagtttcattaaatgtacagaggagagtatgtgcctatcattgggagtctgagacaagataaaagcacggatctcataacaataaattactttgaaatcttctttcttgctcagtacaggtcccgccgccgcgccgcctggctctcgtattcctggttctcggcgggctgtggggcttccgcgccgcagccgttagtctcgtcgggtaggtgactccttcagcgagcaggcgcagcgacgagaaaggcctggcggggttgcgctgtcttcccgcccaccggaaggccctgaggagaagcctcgggccctgagggagggcttggggtcgggggcggccgctgccgccgccatgttgggctggaggtacgcacgctcccaacgctctctggctgcgctcccaacggtatctggctgcaaatcacggcgggagcgcctcgggcctcttgtcttttgaccctgtccttggaacccgaggagacttgccgttcccgggggagggtgtgtgtgagtcgggcggcggaggccgtctacgccattgtaggggcggggggagccgagattagagcatcagcctgagagaagtggtgcttctggttctccgctctgcctcgcatctt

SEQ ID NO: 209803 - DNA, 768 bp, Homo Sapiens
tttttttttttttgttttataattttttgtttaatcaatttgaaataactgctgatccaatcaaattatctttaagtaacaaagatgatcaatctgatttcaatattagattagtacattagctaccaatattgactcaaatgattattacataaaatcttaggaagtcaatgaaaatagcaattacccatgataaatattttcaaatatttcctattgcgtaatttgtccatttgaatacaaataaatccttgtacaagtatgggagaatcaaatgcagataaacctatgaagggaagaattttctaatttatctacaggatttttcttcaatttaaaaaaagattgtaaaatacacataaaatttaccatttttaagtgtaccatttaagaacagtattaaatacatccttaatgtgccaccatcaccactatccagctccataactcatcctgtaaaactgcataacgtcctcaaggttcattcatgctgtagccagtgtcagaattttcttccttgaagtggaataatattccattgcatggatatactacattttgcttatccattcatctactgatggccgattgggctgcttctatgttttagctattgtgaacaatggctgctatcaccatggaacacaagtatctcttcaagaccctgcttttaattttttttgagtatatatgtcgactgggattgctggatcatggtattccattttattttatgaggatcacacattttccatatggtgtacattc

SEQ ID NO: 209804 - DNA, 677 bp, Homo Sapiens
ttttttttttttttttttggcttttaaaaagtaaatttattaccacacataataagtccagagagtagagagattccatcatgtcatcaagacccatgataaatctttaaatattttgatttttttgaactttacactctgttactctcaatatatgggtctcatactttggccggttcctctgcagtgcctcaaactctgtcccctgagcagaaagccggggctgtatttacccaagtggctctgcgctgcacttttcataattgtctcacatttaggacaaagctgcaggtagaaacagggagaaaagagcagttgtatatgtcccttggtttcacagctcctcaaagaaacagagaattaattacatggtagatctacactatactgaatgccaagagggagccatcaccagccctctattattgctgctcctacgtcttgaaccaaagcagcatcctgttctcagacactaacttgggtttggagacctgagtgtttggagacacgatgtctaaataataaagcttggagaatgtgggcatcgatcccactacctcttgcgtgctaagcaagcgctctaccacttgagctaattccccacatcagggcagcattatttattgttagcaggtggcctggaacacaggtgatttcagggccttcagcaggaaagc

SEQ ID NO: 209805 - DNA, 755 bp, Homo Sapiens
ttttttttttttttttttgctttcattgccattttaataaaaaaatagaaactcctatattacaaaatatattgcgtattgatgtcacaatggaaattttacaaacacaaactttataaaagggtgttaagccaattccagatgaagcaaagacatgaaaacaggaaagttctagaaaaagtctaaataaatgtattcatattctatgagtgaaaaagataattcaaaaggatgtccgtaaggctgggcacagtagctcacgcctgtaattccagcacttggggagggtgagatggggggactgactgagcccaggagtttgacaccagcctgggcaacatggtgggacctcgtctctacaaaaaatacaaaaattagtacggtgtggcagtgcccacctaaagccccagctactgaggagactgagacagaaggattgcttgaactcagaaggctgaacctgcagtgagctgtgatcatggcactgcactccagcctgggcggtaaaagtgagatcctgtctcaaaaaaaaataaattacaaaggactcatatatattaattttgtataattcctctaaaggaattattcaaagatctcaaaatatttcactgatatttaagtcctgtaagtttccatttcatacggtgatataagaccatgggtagaaaatatcagtgaataaaggaagacatgccaaatgtctcatctgaatattttgaccactccatgatctcttgtcctcgcactgctgc

SEQ ID NO: 209806 - DNA, 712 bp, Homo Sapiens; identical to SEQ ID NO: 44357
  misc_feature (579)..(579): n is a, c, g, or t
  misc_feature (700)..(700): n is a, c, g, or t

SEQ ID NO: 209807 - DNA, 579 bp, Homo Sapiens
ttttttttttttttttctcaaaaacatcttttattgattttgtggcaagtactccacagtcaataactcgcacatctgcatatggtctgcttgcagcatcggtcttcagattttcaatttgttcgattacttcaaaaccagaaataaccagtccaaagactacatgcaccccatccaggtgtggagcaggctttgtggtactttggagcgcacggtgtaacactctttatgaaaaactgggaaccattggtatgtttccctcgatttgccattgataaaaggaacgctctgtcatgtttgagaataaagttttcatcttttcattttgcaaaagaccacattctctttaaaatatccaccataaattgattctccaccttttccattaccttcactgaagtccccaccctgaatcataaagtttttaaccacacgatggaacgtagaacctttataacataacttcttcccagttgttttcccaaggcctttctctcctgagcacaagcaaaggaagtttttgcatgtttttggacatatgtctgagaagagctgaaacataatgcgaccaaccggctc

SEQ ID NO: 209808 - DNA, 666 bp, Homo Sapiens
ttttttttttttttttatcgaaagggaattatatgtatttaattataatttagtcattgtaatacaattacagtattttacaaatagaaaagaacacacaagaaatatataggatttcagttaggatatggtgaaatggagatgatgcttaataaaggatataattcagcattatattctagcgtttatagagatgttaaggaattatttaaggggtttctgaaattattctgcatccatgttaatgtaggccttctaagaatgagcagattctgagcagaagcaagatgttctacattcattatagatatgaaatagatgaagattttcttaaatttaatcacattcaaggctttctcaattatgaagccttgtatgttgagtaagttgtgaaggacatctaaagtctttaccacactggacacatgtatagggtttctcaccagtatggatcctttgatgcagagtaagttctgagccacgactaaaggccctcccacattccttacattcatagggtttctctccagtatgagttctcagatgttcagtaaggtgtgagccacgaataaaagccttcccacacgtgtttacattcataaggtttttcacctctgtgaattctctgatgttcactaagttgtgagccataaataaaggccttgt

SEQ ID NO: 209809 - DNA, 673 bp, Homo Sapiens
ttttttttttttttttatgatcataaatgtttaattctgggccataactgggaaattagttactgaacatctaactttcaacaaaaaagcccatgaagtttacatagataattcttgtgtttaaccaagtaataaaatatttaataaaatgaaagtatacagaagaaaattatgaattcatcaaatcaggccgttttgcatccagattgcattcagaaaacttgtttaacacctaggaaattactgtccaaagttgatagtgcttggtcttttttatcattgtttttattctgaaagctgtgcattactaatctacttttatgtaaatctgaaatacagtatttatcccatatgtccacatggtaaagtaatcaagaaagatattttcagtgcttagcacccccaccccaatttaaaggaaactctgactgtagtaaattcatgctaattgagaactctggggaaggggttaaaacattacccaggtacaagtcgggtggccattataaacgttacccaaataaaagccagaaacaggaagccaaaaaccaggtccctaaggcaggcatgtgtcttaaatgatatcatttgtcaagcttccagcatcttgtggtggtgaacacaaaaagaaggtctgcgttgtactgaggacattacatcctcattagctgga

SEQ ID NO: 209810 - DNA, 706 bp, Homo Sapiens
  misc_feature (687)..(687): n is a, c, g, or t
ttttttttttttttttttaaccctaaaattattttttattatacagataatatacaataatagtggaaaactagaaaatgctaaacagggaaaaagaaaataaaaccacccatatttgtaacatccagacacaacgagtgctcacatcctgataaatcactttccagattttcttctgtgcatagatgcatgtgggaaccatgctgtattctgccaaaatggttcaccgtgagatctggcagcgccccatgcagcatcgggagctttgtcttgtccccccgccaagtccatgtcattaccccttctgctttggctgggactgaaattgtgtgcctatgttgtgaagacagggcttctgatacagaaaaaggaactaagacccctcccctatcaccctgtgttccttacccctccaacccccaactagattccaataggagagcccacaggctcttctctcaaggtccccaaacctcccaccctcagaggctgtggccagagtacctaatgctcactgtgctcagcaggtcctgaccacgaccctgactcagagctgagggcctccttcctgccactagaggccccacacggccattaggccgtacccacaggaagaggctggagcggaaagtgggaagcgaacctcgaaggaagagcagccaggcccggggcactgtcacttgccgntccctctgcagctccaggt

SEQ ID NO: 209811 - DNA, 665 bp, Homo Sapiens
ttttttttttttttttttgaatgatgtttccttttattgacatatttgtttcctggtattgcagttatgtaaaggttaagtaggattttatatgccaatcatccgtggttgatgtagtgaaaaaggtctggactgttaacattctcctaggaacctctgtggagttgaacttaataacttttcagatctgttcaaaattcacattctgtgatcctgtcaagtaaggcatttggttccagagtgaggaggcagtaagaggtgcttgagccctgacatgttgtaggctctcattataggccatctccctggatgatctcacctactcgcatgccaggattaccatctgcattgttggtgcattccaaatctatatctccagcccagaactgagttgacatttatatccatttgggtatatttcaggcacgcaatcctgtttccagtaagttcatcctttttcagaaatatagtcctgttactctgttcattgtcatcccattttctgatgctgagcacagtacctgatccatagtccaactcactgatgcaaagcaggtgaaaccttaggagatgatccagtcactgacttgattgagggataagtgtgatttagaaatggaatggccttggatgtctccgattcctgtataaagtcatgagatggt

SEQ ID NO: 209812 - DNA, 672 bp, Homo Sapiens
ttttttttttttttttttgatgaagaaatctaatctttatttctatgattttagcacaatatactcacacaatagcttttatctgtacttaacaaaatacatttatagcactttacaaactttatcagtttggaaaacattgcataacatttttttaaacacagtactttatatatactatatatattttcataattttatttactttaaaaagataattaactctctttattcaatacttggttttatcagtaaagcacagcctaacaaaggaagaagtgctcccattagcaaataagataaatagaacactaagaagagataccaccttttagtctgatttattttaaattaaggtaccagtggaatgtaaacaaattttttgtaatttttgttttacaaaagacatgttatcaaatatacatgcagaggtctgagttctagtgtctatcattatatgtccttaacaatgtggtacaatttgttaagtcattaaaaactgtagcctttggcactttgagtagaaaaagaatatatcaatatttatgtaaagaaaaaaaaacttcaatgactagagaagtactttaaaatcttttgttaagaaataggaaagattaggaaatatcatactgcacctgaaatgctgcagcaggggtttttgtttgcttgttt

SEQ ID NO: 209813 - DNA, 668 bp, Homo Sapiens
  misc_feature (643)..(643): n is a, c, g, or t
ttttttttttttttttttcactctgtttctttattggaaatccgaacaccccagccgccttcgcaagtctctccaaccactcctaccagcaccccgcggcccacgcggtcttggctctcacccacgcctgcccgagggcggcccccggcctaggctccaggcaacgctcaggcctaggcaccccattctgcaccccacactgcccagaggaccggcacagagcagatcctgggcctcaggttgtgatgaatttccagctttggggcaaaaacaggcatcctctgttctctgtcatacatgtggtggctgcccctgggagtctgatcaggtctgaaggccagcgtctttgatctcctcaggttgaggtactgcaatgatttcatttctctggagaagccactcagggtgtcaatctggttgtctcgaagatgcaaggtggtgagattgctcagatcctccaagccttccaccttcttcagcatgttttgggccaggtagaggttcttcagcttaggaagattgattcccagggtgctttccagctggttcccccgaagctccactgtgtgcaggctgatcaacttctcggggtccagacctgtcaccatgtggatgctgttccctttgagattcagggtttcangacgaggatgagagatgcttcagtg

SEQ ID NO: 209814 - DNA, 602 bp, Homo Sapiens
ttttttttttttttttttgcccggtggaagggtttattagtccctgccagcagctgtcctccctggtgcaggtggcctggccagcccactggattggggacgggccaggctgggccaggtcgggggctcagtctgggaggtaataaaagcagaccgacacgcagatgttgctcgggaagcagatgtcgatgcagagataaatcagccgctgtctccggggcccctctgctcgccgggcccagtagatgggggtcctcatgcacaggcgctgcaccaaagcccccgcctgggcggggtccacttcgaggctcccctgcactgccagcagctcctgggtgtggtgggtgtcctggctggggacccaagcctcttggaccttggaggtatccaccagcagccgcagggtctcccgatcactgtcctccatcaggcggaggaagcagacctggtgctcctcagggcggtaacagatgcagccgctctgcccgtcgaacagcaccgcccagctgtggttgctctgaggtggggtcactgtgatggtcgccgcgttccgggccacgtccaccaggatggtttggttgggccggggcatgtgggggctc

SEQ ID NO: 209815 - DNA, 630 bp, Homo Sapiens
ttttttttttttttttttcacattatcctctcaaattttatttgtattctgctctaacaaatatagtatgaaggcaacagttgttttttagtgtatggcacagatgaaaagaaacaaacagatttagaagcagtccagcatttaaatgccggtttaacaaaagaggcacgtattatcctatttagcagtttataccagatatcagaagccatttttttttccttgcaagcaacagactacatttatttgcattaagtaaaaacatatcttgatcaagaaaattactttttttctgattttcctttatatcacaaatgtcagggtaaggcaaatccttaatgaatcatgtaataaaaaccctattccccaagaaaatatattgaacatattctgctaactttgttatttttcaaagcaaagccgacatgcgccacatacagagaaatgtcttttcaaatcaagtgcatcaagcagaactgtattaattcacaaagaggcttttcagtgtttcatagaaagatttacaattagctgcagtgattaatatgtgacccagtatcacagacagtgattcggatgccttctttgtaatcttttatgaaagaagcttgtccatcatctgaatagtta

SEQ ID NO: 209816 - DNA, 593 bp, Homo Sapiens
ttttttttttttttttttccgttgcagttgaactttattcatccgttcacaccgtgggtccctcccggcccccacctaccctggccctgcctactcagggcttccaagattgggtgtcggggtggctttgcttatcctccagatgccttcttcccaggatgtgatccgtgccctccaggatctaagggatgaggactaaaggggtctgttcctcctccaggcagctggcatggaaccgtccgtctcagcggctgcttggtggtggcggtgtggatgggtgtggctctctgtttgctggggggtattctgccaggatgtataggaagccacccagggctgccactgctgtggctgtgttgtgggaggagcagccatctggaaattgtttttctcgcctcttcactctcctcgaaaaatgctgctgatattgaatagctttagatgattcttcatcttcagcatcaggctccccgaagcatccttcctgctgtttctgccagctgagaatggcctccagccaccggagcttgtagaagtcggagaagcgcccattccacagaacatgactggaagtaaagacgggggccctctgc

SEQ ID NO: 209817 - DNA, 621 bp, Homo Sapiens
ttttttttttttttttttagctcatcagctatcattaatgttagtttattttatgtgtggcccaagacaattcttcttcttccaatgtgccccagggaagccaaaagactggaaacccctgtttagtccctgcccttgggaaaaatggtttgagtgatcaaagatcagtgtattggcttttacttcttctttctagatttataactcctctcataaagcccatccatttgacaggtaaactgatctctacaagcctaactctatctattactcctcaaatgagtttgcagagcacaaacttaaacctgtaagtggtggtacacatgttggattttcaaaggatcccagtctctacaaaaaaaaaagacattatcagaaactcgtcatcttagcccttttgtaccacagtaaaagacatgaggtagaattgggaaattacaaagaggctttaggagttattacattttggggatttataagatctttttgaaagcctctccatgagtgagagggaaccctaatttgcttgattcccgtggcatgggtacatcttacagcaaatgaaatctaagattatgctggccaaagagctttctcttactttatgttaatctgggagtc

SEQ ID NO: 209818 - DNA, 619 bp, Homo Sapiens
ttttttttttttttttttaatttctaaacatttttatttcaaatctcttttcacccctccccaaaaagacatgggtaggtacagcaatcataaaaaggagatacaaacacaagagtcaaatgtctctcgcactgacacttacaaaaaactgggaattgtacatggggtttccaaacaggacctgcagcagctactaacgtccctttacgagagtcaaacatgcctattaatacagtatatacagacaccccattctggaactaatctacagggacatccctaaccccaccccctctatccccagaaaaataccaaaacacacccaaagtgcatttgttttgtttatatcaaaacctctttccctttccccatcccaccctcagacccctcccaccccatttaagattggcctgcaagtctattttaaccatttagtatttttttatagtttatgaaaataaattatacagcaactattttaataaattaagcacaaaaggaagggtaaaagaggaaaactaaatgggaagacaaaagccaggccacgctttggcttggaggagggcagagggggggctaacggagacagaagtggttgcaaggggtggctccctttctg

SEQ ID NO: 209819 - DNA, 711 bp, Homo Sapiens
ttttttttttttttttttccaatcaggaaataatccaggccgcggcagcctctccaaactcccgggcttcccacagaatgcgctcgaatgacactggaaagatttcaaaaatccaggcctccccctgttttaattcctttcttcccccaacagatgttgcaggcctggtgaggaagcccatcgtgtgtgactctcacgccactgacggggtttcgtggtgcggccaaattcctctatggccatccccagcatcagtccttccggattgaggaagccccttccaggaatgagctccatatttaaaggagtggaggagatgaacacctctccaccttggagccaagaggttaagctttcaggaggccccagggctgggcaggaaggattgaagctgtccctctgcccatccctcagagctgtttctctggactttaattgaaggtcgtgatcctcaaaccttcattttaatgactagttgcaacctcttctcttcttcagaccttgacccagcttctcaaccagccagagccactggtttggatttcatcttctatataatttagggatgcctagaccaagggaccttggcaagtggtaacacttctctggcctttggcttcctgatctataagctgatgggaacacgagcaacgactgccaagggctcctccagttttaatgtcctgggggagcagtcacataacctctttg

SEQ ID NO: 209820 - DNA, 656 bp, Homo Sapiens
ttttttttttttttttttcaacttttttattacacagtaaagaatacaacaatacctgaatcatactttaaagattcacaggttgacagaccatacattacagtccaactaaggaaaaaaggataaacaagaaaccacagttcagacatagtagacttaaaagctcaagagtatgctgacaaaagcatgatgcctagaccccaccccccagtgttagtctaccattaacttgtggtacatgtctgaattaagtattgcacaacaactttaatttttcacaatgtcgcagaacccaaaataatattttaaaaaaattacttcaaatctgcatctcaacagtctccaattttttttctgtcccttgaggaattcggacaacatggagtcgctttctttccctaagtattccagacgtaggcatgctttgcataagtaaaccagccttgaaatttttaaatccccaagacatgcacctacacataaaaaaaaaaaaaatttaagaaaaaaaaaaagacaggtggccctgtcacacacagtctcatgacagagaaaaagagaaagagaaaagagtacgagacagagataagagctagaggacgccctattcctatcagcgaccaccattcaattctatccaatgaagatactttttctta

SEQ ID NO: 209821 - DNA, 639 bp, Homo Sapiens
ttttttttttttttttttcacatttaaaaacctattttattggggtttatctggacattgttgttgtcgttgttttaagttccaggcagccaagcagccatggatggattactcttaaaacctgatcataaaatattgtccacatgggcaaaggcactaatcaaaactgtgaaaggaaaggtttgaattaaggaaaaagttcaatgagacacaagggatttttcattgcaaagtttctctaattttgtatcccaggctgacccataaaggaacaaaatattctgccttgatgacaacatgtgatttagcgtagtctgtattacagaatggccacagcttgaagatggcagcatggtttccccagagtctggagcagaacttgtagttttgtctacacacaatgacccattgaccattttttcctgaggaattgctttttttgttgttgttatgtgaaaaagctttgcccagtctgctagttcttaggtctgttttttgtcactgtccacatagagttcttggaaaacaatacgggctaaccccaagtttggttgtgaatttcttccataataacccacaagtcttgttttacatgtaagttgcttgctgtgtccttgctttcctttgtttttcctggat

SEQ ID NO: 209822 - DNA, 739 bp, Homo Sapiens
  misc_feature (713)..(713): n is a, c, g, or t
ttttttttttttttttttcagtcttcaatgccagtttattaagttacatctattaaatatattaacacatacaacatttcatttacagagattagaattcatacactagtacccaaagacatgggatgcataccagttaagtacgtatccaacaacatacaatatgcattttaccttgcggttgatgttttaacataaaacataaaatcaatgaaagcacatggggtttgtcactaaaaccacataaacacctacacttcttcaatctgtacacccctgaaacaaaaaaaggggaacattacatgctttaatgactttaagaataaaatcatttgatgaagttcagctactttatttacttggcactgtgtgtcttgttcctcctgaatgtatacactgtgagagtaggacttgcctgtcgcattccttctcagctctccagtatccaggcaagtgctgccacgtgacagatgctcaaaacaaaaatgatttacgaatgaagttgaaagactgctgggcttattgttaagatatctaaattctacttttagcatccaactagctactgtctggcactggccacgaagggtgacagggtgtggatgtgatggctccctctgagcctgggtttcttcatctttgaaatgatataacttggaataaactcggcagatactgtcatttctaaaattccatgacatttctctattggncaagatcttaggggtattttgtgttg

SEQ ID NO: 209823 - DNA, 609 bp, Homo Sapiens
ttttttttttttttttttaaggtgaaagcaatttattaagaaagaaaggaacaaaagaatggtactccatagacaagagcagcgcctagagctgctggttgcccacttttatggttatttcttgcttatttgctaaacaaggggtggattattcattcctcccccttttgggacatatcgggtaacttcctgatgttgccatggcatttgtaaactgtcatggtgctgtcaggagtgtagcagtgaggacgaccagaggtcactctcgtggccaacttggttttggtgggatttggttggcttctttactgcaatctgttttatcagcaaagtctttatgacctgtatcttgtacggacctcctgtctcatcctgtgacttagaatgcctccactgtctgagaatgcagcccagtaggtctcagcctcattttattcagctcctattccagatggagttgctctggtttaaatgtctgacagctgggactacaggcacacaccaccaagcccagctatgttttgtattttttgtagagatggggtttcaccatgttgcccaggctggtctcgaactcctgggctcaagcaatccacccacccctcgtgc

SEQ ID NO: 209824 - DNA, 710 bp, Homo Sapiens
ttttttttttttttttttgagtcaatatgaatttttattaacacacatttgtcaaagtctgtacaaaccaaaacattcctgtgttttaaaatgtccattattacaaacatacaaagaaacaaaaggtgttaccaaaagttagctactcaatttcatggtaaaacagtgtcatgatttttaaaaatcaaaatttcaagactgaggtttcttctttccctttttggaacttatggaaagatagaaaacgtgtgaatttgctttatattaaatgccaagaccttaaaaaaagattagtataaaactaagtatgtttttatattgtcatacatcatgtaacagaatttcagtccttaaaattaaaaaaaaacaccatgactgtcatttccccctaatttttctcccatagtcaatgcaaatgcatctgaaaaatattatgacagtttatctttacctaaaagcttctcattcaaaaactttacaaaactatttagcactgccatttcccttgcttagaagggaaaattatatcccctagtagggtgatatataagcgacatggtccactgtatcccttatcagaaggaaaccaccatttccacatctctgtccaattatgtgtaggactccatttatgagaatgctatcacaaattatagagcatctgcttccaggaaacgcctagaagttaaatttagtactataattttttg

SEQ ID NO: 209825 - DNA, 575 bp, Homo Sapiens
ttttttttttttttttttcatctttatcattattttattttagtaataagaaactggggctcagaaagtttaggtaacacagtaggaaatgatgaaactgaaacaagaaatcatgtctatttgattgcttttttcctgtaaagacagtcattaatgctcttcaccaaatgttttcatttcttctgacacatgccaagatcgcacttccccatccttttgaagttacttgcagccatgataattgccctggcccaatgcaatgtgaacaggtaaaagacatattttacttctgggccaaagcttcaagaaccagtgcatattttgttgtcttctctctctctaatgcagataacagaagtcccatgagcctgggtcccacaaagagacatggagtgtagcatccagcaatgtcgttataaacttgtagtgggaattaacaatacacatttgttgttataaactaagatttggttataaaccactaagcataacctagccactgctgactgattaattcacaaagtggctatatcactttgtgtttttaagtggcaataatttaactcagttctcta

SEQ ID NO: 209826 - DNA, 695 bp, Homo Sapiens
tttttttttttttcttttgaaattttatttttttagaacacaaaagaagaaaacaaagagtttcatttttctgcttgctgaaagtacttgggtaaacttagctttaagatgggtcttctttcaaagattttaaatatatttttgaaagggtattgataaactttgaaaagcagatttgatcaacttcattttgcttggttttgaagtgatttatcttagatttccttttgaaatatttcttccaaattttctaaccatgcttggatttattttacagatgtttcttttatgttccattgttggtttgttttcttgtaagtgcttctcacttgaattatcttgtcgaacacgtttggcaaatccagaatttacgtctgcagttaacgaactgtttgatgtagaacttgttaatttccgtttccttttggcagcagtagtcattgccatgtaggatggcaccatgcttggtacaggcatagaatgcttagttgagaatgaagaaggatcaagccgttgtaaaatgtctttgttatcatttggtagtgattcttgttcgggtaatttacacttcgagctcttgatgtcttcacatatagtaaatgtagagtccaagtcctcctgtccacattcttttcttctattatgagggatagctacttcacacaacattttcagacaattatcactgtttatgt

SEQ ID NO: 209827 - DNA, 637 bp, Homo Sapiens
ttttttttttttttttctatgtaactgatagttcattttatttttataagccttttgtaaacatactgctatgtaatatgagtatatataacatactaaagaacatatctttttagtccataaccattacttctaatggattataagtatacccagattttgaaatgtatacaaagaaaatttaacaaataataacatgtaagctatacatgtcatattttacctgttacccatcaatctgtttctgtttttaaaacacagttttcaaacactaagtctgtgattaaacaatgacactaaaattaaattgtttatatgtcctacctagttcaataggcttaacaaacatgtatgcatatatgtttccaaagagctaatgattctaaaaactgctttagaatcagagaatttgggaagcaaaaggaaccctagaaatcattttatccaatgccccttgtgttacaaataataggacagagatctggaaagtttagtgatttttgaggtatataaactttttatgttaacatctttctgccaaactgtataagaaaattgttgttagtatttcttttgcagatgaagaaagcatatcttgcttccttgacagttcttcgggatgtcaatgtctacgaat

SEQ ID NO: 209828 - DNA, 680 bp, Homo Sapiens
  misc_feature (500)..(500): n is a, c, g, or t
ttttttttttttttttttcattagaaggttctgaattcatctaatggctggttatttttacagatgccaagtttacaaaacatacaagtgcacagacaggtgtgggaggtagctcgaaacatacagagtgttcgcaacactagagacgtcttctggctgccatcaggggactcggaggtagggtaggcttggtgaggcccgtggcttgtgtccgtggcacagcctcctgcaaaggggctgccctgctcccctgttcccatggtgccaggccgtgctccccaggtgcctccggggtgctgaagatcttttcatagtactcgatcagcagttcagtgaacatgttcaggggcacaagggcactcagggaggagaccccctgggatggccagatcaaattcagcccgaagacacaggccaggttagagctgttcattttgttgaagatgctctcccgggacaccgcatgcaggaagcccatgaggtagcggaggacgacgtanttgtgctctgggaggctccgtaagatctggcggcagccagtgacacgcaggctgctctccacacaggtgatcccgagaatctgctcgtaggcctggaaggtcagaagcggctggggcagctctcgcaggaaggtcttcaggatcacggcagggatgtgaatgtccccgtagtcgtcaaat

SEQ ID NO: 209829 - DNA, 614 bp, Homo Sapiens
ttttttttttttttatttgcttccaatccaggggcacaaattcagcagctcctggctatattaggctccaaaattcgataagaaagaataagtattttcaggttatatatctctactcctccctccaaaaaggattaattcaggttaaataaatgtttttgctttatagtttgatttttttgtattactttattttttttttcaatttgctcctgacctgggcacaaatgcagcccctttctggctgtgctgtgctccaaagtataacagggaggataaatattttatagaacctagtttcccaaaatgaagataacgtgacattttaagaaaaaatatgttggggttgctcaagtttttttattgacactttcctgttttaagtaattttccagcttttacctgccagacacgtatttagcagctttctggctttgaagtttgacatgaaaattttaatttggtgtaaaaacaacgaagttttttaaactcacactgctggtgattataattgtgtaaatcctgttaattttctttttcttcccacccacgtacatgccaacgcaaattgttttctgttttcacaatgcacataacatattttaccaatgtta

SEQ ID NO: 209830 - DNA, 698 bp, Homo Sapiens
  misc_feature (679)..(679): n is a, c, g, or t
  misc_feature (683)..(683): n is a, c, g, or t
ttttttttttttttttttaccaactatcccaatccgaatacatatggagaatgttttcacagtcagagggattattgggaggaaaaaaaaagattattcgattcagcatttccagaagcacagaaagtaggtcagtgaatttgcactttagaaatatcataattacttgctaaaaacaaattatttccactgaggggcctcaaaatccaaatggcactcaatttgaatccatgaagcttaagaaactaaattttttttgaaaatcaattataatggctgagcctggtggctcacacctataatcccagcactttgggaggccggcaaaagttcaagaccaggctgggcaacatggcgaaaccccatctctacaaaaaataaaaattagtgaggcatagtggcgtgcgcctgtagtcccagctacacaggaggctgaagtgggaagaacacctgagcctgagcctggggaggtcgaggctacagatcacgccgccacactccagcctgggcaagagagagagatcctgtctcaaaataaaaagggaatgatcttcacgatccatcccaaaacatattggagataaccctacctttagctaactatcccctgaaaaacaagagagtatttactaagtagaacacattggttggatagccattccaaattgctctaactttngcangcttaaatggcaagg

SEQ ID NO: 209831 - DNA, 644 bp, Homo Sapiens
  misc_feature (617)..(617): n is a, c, g, or t
ttttttttttttttttttaaagctcactgctgctttattggaggcaacagcccctactggagcctgtgtcttagcgttcctgggggtcccagggccagccccggcccccacccagctgccctggccctgcctggctcccagcccacttaggggtgagtgtgatggggggaccagtgttcctgtccttggagcccaggcacagcttggtcctgggtttctgggattgggacagggcaagttagtgtggggcaacagagtcccttcgtcctctggagcctggcgcctggttcagccctagaacccaacctgctggatgagactggctgggtcctacgagatgtccatcacagaggccctaggcaagcacagccttgctcctgctcaccctcccatgtgggcccatgtccgtctgtgtggcctggggtcagggcccctgtgactgccttggcctggcagccacatggactgccatcacctaggcccagtgtagccgtaggggtgccgcagcagcaggctctggtggctgggcagcacgtgggtgtggtagtgctccaccatgctgcccacactcacaaacaggacctcgccctccaggtagaacttagagtccttctcanaaatgcgatagttcctcactttgttag

SEQ ID NO: 209832 - DNA, 689 bp, Homo Sapiens
ttttttttttttttttttggaaggggaaatgtaacgtgtctaagaaagtaagacaagcatcatattaaaaaaatctcttcgaggagcctagaggaaatcctattttttatgcatttttaaactttttgtcatattgctttattttttcattttcacagcagaaaaaatcaagtctacgtgactacataaaagaagtttgatcaaacagtgagacgggagcctccacatatgcacatccaggttgcttaaattcaccaattgctcattggaaaccacatctcaactcggtcatattgcttttagtggtttgtttctctgtagagaagttctctgttcacaactgcaggcaaccaaaagttcccaaatcatttaaaacagtcctatctgtgcactggcagaggtgctagatcttgtaagaatatctctacccaataaagttattacttttatacatggaacattatgagcttgtgtctccctttgtaagccgttttatactttcagcacttttgtgcttttattgagtataaaaataggtctcctttaaaattctgtttattttaagttcactaaaaaactacttgtttgtgaaattctcttataaactcactgcatccacatggaacagataaaactaattaggcagctaatggatataggtagtgttaacaaagctcgtgccgaattct

SEQ ID NO: 209833 - DNA, 636 bp, Homo Sapiens
ttttttttttttttttttgttttacataagcttgtattcaaaataaaccgatattcattacacttacatatttgatagttacaaattataatgtacattatagatacttgcacctacatatgcacataaactggctataacttctttaataatgagattgcctccgtagagtaaatgacacaataaatgttcaactattttgaatggttgctatttccattttatggtcagtaatatgtcttcattgttttgaaaatgtaggcatttgaaattaagtagtctacagcattcatctgtagtaagtgctaagtatgttatacatgaacaaaaacacttataaaagcatcttatgcattcctttgaaacaggtgaaaaataacagacataacttgctttaaaaagtcataaaatagctgcttttctactgataacatttttgcttttagcatttcagatgagtatttttcatatggagaatttataaatgtacaggaaacatgttcatttaaccaatatttatagaccaacataattttgtttgcataagttgtaatttgtaagataccaattaacaatgcaaagttattacaactatcaatgggttcttcatactaaagcatttatattcatgtttgt

SEQ ID NO: 209834 - DNA, 677 bp, Homo Sapiens
ttttttttttttttttttgaataataaagctcatagcagtttattaagtcccacatttatataacaaacctcaggtaacagtctgtcacctggctatctgcaggccatttttcctcccaccaggccaagtttggaaatgacctaccatctgtgacagctcaaacttcagtctacttttggtatgcggctttgtaaaatgaatgttttactatggattgttggtaatgcaaggacatctatatcttgatgcatttatttgaagaaaagaaattcttacctacttaaggaaaatatattaagaaaaataaaaataataaacatttcattaactcaaatattcagtaataacatcatcttttttaattatttaggtaaaatgtataccattctccttctcaggtattttaaataataggtatggtatgcagtttctgtattctttttaagatttatcttaaaccagtgtaaccagtccactttctgttttttgttctgtaagcagcgctgcgactttcctcctcggtaagttttatgaatttacatacaagtaaactaacattattaagtgttcccaagtaactctgggaacatactataaataatttacataataactcaattccatttaatcgacagtgaatattgcacaatcaaaagtgatgatagaaatattaaaa

SEQ ID NO: 209835 - DNA, 701 bp, Homo Sapiens
  misc_feature (677)..(677): n is a, c, g, or t
tttttttttttttgttttaccattaacatttattgatgggatggataaatacagattgagaaacatacttgacagcaagatatcaaactgatagccagactataaaatgtatacatcctttttaaattttttgaatttttttacaaagagcccttactataatggtcacttacctcctatcattcacataacagcagtagatatcccaggggtagcatccagagctgaggtgccccaaggaagacagaggcaatggcagaataatatgctgagaaaggactcttaagagcaatacaaagagaacagacaaaaatctcaccacaaaattgtacctgagtgacagattggtaaagtgttttactttttttttttcttttcgctctttggtctgacaagaaaagagttttaggtgtgtgaagtagggtgggaaaaaaggtcagtttcaaattcagtaacatatggtaacactaagttaggctgctgcattcttttctttgggtacttaagccagctggcacttccactttgtaaccaattatattatgatcaacaactaatcagttagttcctcagcttcaactgaagagttcctgattacctgatgaaggacatacttgctctggcttcaattagcatgctgtcaagcatcgctctccatgcttaacatggcaacacanaacccaagagtccttctctttttt

SEQ ID NO: 209836 - DNA, 722 bp, Homo Sapiens
  misc_feature (700)..(700): n is a, c, g, or t
ttttttttttttgtttttaaatccaggatcaagaccacaatttattatgtaagacatggggtgaagaatggtcaaggaaagttatggccgtgagtgacatggaattagatgaaaaggctcaagtttgctgaagagagtttaaatttggcttttgctcttggaaacgtcaaaataatcataagaagcacttgtgccttacagagcaaataatccacagagtgtcatattcattttgcaaacagggtcacaacagcagtcaaatagaagcctgaacacccagagagttaacatacagattccataaggataacaagggattgagcatgctggtgggtttttaagtcagatccacattgaaccctgtgacctaccggaggttataagtggaacccggggaaagcagcttttccatacaaaacaacaacaacacaacgacaacaaagaaaaccagactctgctggatgtctataatactcatttgcagtaaggctttcaagatacaggaatttttatagcatttgtattttaaggatttagggcaaatacatttttttttctacttgataaaaagaaaattagtacttaaaaggttcaaaaatatattgattgagttatttttcttacataaataaattatattgatttttaggatttaacagctgaaaaaacctttctgcttccactggaggcaaactgaacnaatgttagttaatagagagagc

SEQ ID NO: 209837 - DNA, 675 bp, Homo Sapiens
  misc_feature (657)..(657): n is a, c, g, or t
ttttttttttttttttttgacttttgcatccctttatttgtgtattgaaagaacaagcacctcctatgggaactctatgccctgacagtttaattacttatcaagtttactctgggccggtattgatcattctttcgtgaaacgaattagatacttaaattaaaaacaaacaacaaaaccccccttttcacatagcatggcggcatgtcccttggtaacaaggttgagtggatccaccaaggcccagcagcttgcctccttttcgtaaggatgtaactattgtccaaccagaagagagaggcatggagtgggatgtgcaccaggatgaactcgccggaatcgtcaagagtcgttgtgtgaccctcaccttgacttcgggcgttttgtggggacccaactgctttcttgccgctgctctttggtctgagtttccctcagccaaacacttcacccacccatgaccctccaactgtcccgctacagcaggggatgggggttgtcttccgatcgacctcggggggcaaaggcaaaagtccctagctgcttcggaaccgctcctcgagtcctgaagccgctccacgcctcctcgcccaccacttgggtcccgcaggacgtggcagtctcgggctccagcctggaaaggagcccgcccgggtngcgtcacccgccccgcgc

SEQ ID NO: 209838 - DNA, 669 bp, Homo Sapiens
  misc_feature (606)..(606): n is a, c, g, or t
ttttttttttttttttttactgtgataaaacatacacagtttacaagaatatgaaatgctttactaattcgtgtgtcatccatgctaatcatctctctattgttccaattttagtacaggtgcttttgaagtgggcactcttaattttttgaacattttctaggtttctgataccatactcattctgtgtcttacctatcacaaccccagaatcagccatttctccaaattccttttagtggagagtggtatttagaaaccaggatctggacaccatttctctttttgttattgttgtttgccttgctttaatgatagctctttttattaatttttccattattataaaagatggccaaatacatacatttctatgaaaatgaatcaagtcttatttattttacagttaaaattcattattcctatttaactgataaaccagtttaattttcaagatgtattaaagtctcccacaattgtattctattgttttcatttttttgagatggcgccttgctgtcacccaggctggagtgcagtggcactatcttggcttactgcaaccttcgcctcccaggttcaagcaattctcatgtctcaacctcncgagtagctgggattacaggcgcatgccatcacacccggctaatttttgtatttttaatagag

SEQ ID NO: 209839 - DNA, 646 bp, Homo Sapiens; identical to SEQ ID NO: 44091

SEQ ID NO: 209840 - DNA, 746 bp, Homo Sapiens
ttttttttttttttttttaggtttcagttaatacatttattacagcaggtctttagtcattattgccattaaaaagttttcatgaaatttcacaaaatcttttaggctattagtattagctttctttttatggagtgacactttgttaatttatgaaatatttacagcatttacaaaaagtaagagaatgtctaataaaatttcttatacttacaaaattcatacattatactactgtatttgagatgtcttacttggtagaccaattaaactatgacataaaataatttacaaagatatatttaatctttcttaattcattgaaaacaaaaccatattagttataaatagtcctttacaaatcattgtaaaacacttcattgttttaactcgagccttagcttttacaaatatacttaataaatgaattagttcagatagcaaatagaactgtgcatttaaaatttcacttaatactataaaacaaaacaacctgaaaaagcaaacggcctggtacttcaagtaaaaatttgtagaaccagtttttatgcacgcgtggggtggggaggggaagccaacaccattgaaattgaaatgcataaacacaatactttcaagaatacgctcaacacatgtacatctggggcactgatttctaaggatgatgctctagcaatagctcatgcatccaagacggtagccctacattttggcagatgagctggactgactagagcacatttgcg

SEQ ID NO: 209841 - DNA, 799 bp, Homo Sapiens
  misc_feature (764)..(764): n is a, c, g, or t
  misc_feature (783)..(783): n is a, c, g, or t
ttttttttttttttttttccagttctgggcaccatgcccagggaccttgtaagcagaggtcccttgtcagaaaacattagtcacattcactggtaattctacattatagcctcattcatgtgaagacaacacagtaatcttagtacagtgcttctcaaactacaaagtgcctgtgaatcacctggggactttgttgcaatgtagatttagatttaataggtttggagcagagcccaaacttctgcatttctataaataacaaacttcaatacgatgttgatgctgttggttcacaaatcatacttgagtagcaaggtcccaggtacctctgccttcccatatttgaaccacattttacctgaaggtctccttgtggctggttatcccaagaaaaataaggcagaaaactcagaatttctgccatgggaaaattctaccctgcacacaggagttaagttctctgactctcattgcccagactcaggatcctgcttcttgcccagattgatttggcagagtcctcctatttagctgatgacaaatcctggctcagcctaaccagccttggctgatgccactctgccagcaacccaaacattagtggtgtggagaacctcctaaaatatagattcctaggctctaatcctgagattctgactcattcagtctgaggtgtgcctcaagaataaacagacatcttaggtgattctaaggcatttctagatttgagagaaggaatgcatgtaccactttgatagattgangaaactgtatcttactgcntatatatcttttacat

SEQ ID NO: 209842 - DNA, 698 bp, Homo Sapiens
ttttttttttttttttttaagtgtttccactgactgttaaggcaagagggggcatgtgttgtcagagaaactcttgctggaagggtcaggttcctaggctacccacaaaggattctgcccccaacacagccgcaccaatgacaagccaacattggtgcaaagagctgccgtgaaccacagcctaaatctttgtcttaatgggaaaacatatgaggtcagaagtcaagaaactggggacatcttgacctgacccctccccacaaaggtggccacaggagcccaaccaccccggcagtctgagtgagacacgggctgcagcaacccacctgcccctgagcagccccttgtgagtgagcccagaggcctgaaccaggatcttcaaggatcgccctgccctcattaatggtggctcttgctatccgtccccatcccacccacggtgtgccaggacccgaccgacctctcaaaggccacattacgagtgtccaggtgggtggagacgataggagaggtgaggcgactggccacatgctcctcgctgggccgcatggcggccagcagtgtttcgggctcctgcagagtgagccccagtgtctccacatgcaccacctgccggtcatggtccacttccatcaccagggctcctgcctcctggcccttgaagatgaagctcctccggccccgctgccaggtcatgt

SEQ ID NO: 209843 - DNA, 579 bp, Homo Sapiens
tttttttttttttttattaatgacaactttaatatgaacatgtgcttaaccctcaagaaattgtcacaactgaaagacgggagcaagctgacactgcaaggaacacatgatgctttggaatgggtggcctgcgtattcaaacacatcaaagcagcagttacttgaacaatcggaacttcttcaaatactggcccacttcttccttggggtagggccggagagcaatacaagtggcgatattctctggttgctcaagccacagcatgtggtcaatgttcttctgttgcagggtctcggccagctcctttagggtggtctcatctggggcctcgaggaccactttgcgcatgcgccccagctcttggaggtaagcggctgtgtgcgggtggtcgcggtgagtgtgcaaggccgcggtggccgcgtgacaagcctgcgctaccagtgcgcccgccggccaggagaacggagcttgtgatagatcctttcgtaacaccaagtattgtaccaggacctgcggctccgccccagaggccgccatcttcctgaccacccgaaaggccggacctactcccctcgtgc

SEQ ID NO: 209844 - DNA, 713 bp, Homo Sapiens
  misc_feature (647)..(647): n is a, c, g, or t
  misc_feature (654)..(654): n is a, c, g, or t
  misc_feature (685)..(685): n is a, c, g, or t
  misc_feature (688)..(688): n is a, c, g, or t
ttttttttttttttttttacttgcatgtttgtcttttgagtgtgttttcaatttgtgcattccttagaaaatctttgtgtggactttggagtttctccctgaaatgtgccaggcgcctgagtcagacacaaacactcccttaggaccttcgtcagaaactccacccctgtgtggaatctccttcctctctctctctccggaggatgccacccgaattcgaatgtgactgtgtgtttctgctgagaggtccattgtcatccccagatgaaagaagagaccaaagcagttaccactgatggaagccagtgaagatggttgggggaactccttaacctttcttggaatgttttgaacgaggacgctggtcctttgccagtcaggaaccagcagaggatgctcctgctctgatcccagccagggtggagagtgcagagtcggccacagggctctccgtggaggctatggcttcagacaggccccgaaggtctgtcaccaatgtgctcggttgtgggtcacataacgctctctggagggcttgcctttcagcttgggatcatgaaaagatgatttgacgctgtttctcatggtctccgacctaataaagcaagataagagaaaacaaatgttattttaaaaaaatcaccctnttggcanaagaaacatgtaaaattagaatctggcacanacnaacctgaatctggttgtgaactttc

SEQ ID NO: 209845 - DNA, 691 bp, Homo Sapiens
ttttttttttttttatttgtatatgttttttatttttaactttcattttaagttcatgggtataagtgcaggtttgttacataggtaaacttacatcatgggggttcgttgtacagattatgtaatcacccaggtattaagcctagtaaccattactcatttttcctatcccaaagtcttatgagttgaatataaaacagaaaaacaccctttcttcacatgcatacgtttaataacatgaaagccaagacagaggtaaaaacactaaatcaacttggtatccgttttactccctaatattagggggacagtgaacatataactcaagcaataaaatgcctttggaaaccaagaagggaagggcccaagtttgataagggaaagccaacaatggctaaaacatccatgcaacacttcgtgaagtcccttctgccagcggctcccgtgtgtccatatcttggagtgtgttaggctactgcttcaagaacagaccgtggacctggcttcctcacttccccaaaagaattcctacagaaggctacaggaaaggcttcttggtaaccttctttgtttcaaacaatggaaaacatgagaaatggatagaccctctcatccccaaaacaccatcatcatagcaaggataatgactcaatggagtttcgaatctgtatagtgctttatatgttttcaa

SEQ ID NO: 209846 - DNA, 625 bp, Homo Sapiens
ttttttttttttttttttacttttaacaaaagcaacaatttttattatcttgctttatatttaatggattagaactataaagattcttaactttgaaagcagaaatataagttggatagtagttgcagatctttaataccattttcaatttcatttatgagctgctacattataaatgagatgctctaaaataataatcgcttttgttgttgttgttatagaacaatgaaaattcctgttaggaacacaagttgctgtttatatttgcttgttctcttaaatagtatgagaagaagtaaggtggagctgttggaaaagcccatcgtggacctttggagattatcttcttggttcagtcatctccaccacagatttttaagagtgtgatttcatagtctccagaagtatccgatttaattgctgaatatagggaatagccataatgcttcttgaactctgttcgaatgtccaaaaggtcaatttctgatctggacaccattattcggttcagagtaaactcatcagttccaatacccttcaaggctcgatgcagtctttcggctaaaaaggccggcgtgttcctcacacaattaactatggccaacagtaagtcttcaaaatgccc

SEQ ID NO: 209847 - DNA, 754 bp, Homo Sapiens
  misc_feature (631)..(631): n is a, c, g, or t
ttttttttttttttttttagttcctgagtcgaagtgcctcacacagtccacacaagccccataacctggcacactaacaatcagatgcagtgacagagcctgggttgctatattcatgacactttcatacaaaatgaggtttcaatgttacattcccacttttcgtatttcctgagtattcctaataagagaagagctggaagtaatgattcttctgtattctgttctgattagtcacaggaaaagctttcaagggacactttacattagcactgggaaatgctgcacaaagcaagctagactcaagacctagtattttataacctttatggagttttgctccaaagtaaactcttttgactaacaaacttaaaaatctgactgaagtatttacactattcacagtattcacaaattactttatagtgtggactctttgatggcgcataaggaccgatctgtgcctgaaagccttcccacattcattacatatataagcttcatccccagaatgaattctctgatgctgaacaagggctgagctccttttgaaagttttgccacattcattacactgataaggttcctccccactatgaatcctctgatgtctgataaggtttgagctcanactgaaagcttttccacattcactacattcatagggtttctctccactatgtattctctgatgagtaatcagctctgagctctgcctgaaagcttttccacattcattaccctcgtgccgaat

SEQ ID NO: 209848 - DNA, 748 bp, Homo Sapiens
ttttttttttttttttttagtaaactttattgtaccgaacaaaaaaaatgattttgcaatgattttctctcccacaaaagcgtgggtgaaaaccagtaacttataaaaatactttcggactctaataatacatacattcacaccttatcttctgagtatttaaatgggggaggttcacctgaaaaaacccatagttttttgcctcaactgacctgtaaaaaagtccacctatatcaactttctgccaatctggagaagatctgttttctttgatctgacgtcatgtgttcacaagcttctaaaatgtttgccaaaattaaagtctgctggatggtttttgccttaacccatattcttccattcattccaaatactatctccagtggatagagttttcccacttcctgtatgatttcacaatctggagctaatagctttctaattaagcccagagtcactttaaaaagcagaccatcctgtccaatgacacccattccattggctcgtccacagctgtcaatacagaccatctctggttccatgtctttattagcaaccacaaattggccatagatgagatctccaacctgcacatttggtctgtttcttttagttgcaccttcaaatgacaagtaagacaaagaagctggctcactccctccaacatcaactttgaatatatctccagatttagctgtcactatgccaatcacatggtctccttttactggaacatacgcttctgctg

SEQ ID NO: 209849 - DNA, 758 bp, Homo Sapiens
  misc_feature (672)..(672): n is a, c, g, or t
  misc_feature (704)..(705): n is a, c, g, or t
ttttttttttttttttttagttcattcatttattccagcaacaaatatttgagaacacactgtgtcccagacactgttctaaggactggcagcgaagtccaagacaaacagtccctaccttcagcaagtttgcagtcaagcaggatgcggatgctgagcattacaagggaaatgattattctgagagaggaagtatggggtgctatgggaacatacaaccagggacctaattttatgggaaagggaccagcccagatccaacacttgctctcccagtttacctccagtaggttctttttaacttgaactaatcttgtttggtggggtacacagtgaggaaaaagaagagctagtgacaaaatctaactcccttctcagtcttaagcaaggtgaaggcaagggagtagaagatatcaagggagtgagtggtggtagccaccaaaggagatagcagactgaggccctaaaaaaagaaaggaaatctaaatctatccagcaggaccagagaaagagtgctgagggtgattagatggaatccctgcatgtactctcccggcattctgaaaagaagccaaaacaaggaagaaaccggggtatctagttaagacctcacaaatcactcatccattcctctgacatgttcataaactttttatagtggttacgaaccanaagcttggcatttcttggcacttttccaatanncctttacagctcacattatctgggctccacccaggctacagatagcctggctg

SEQ ID NO: 209850 - DNA, 779 bp, Homo Sapiens
  misc_feature (661)..(661): n is a, c, g, or t
ttttttttttttttttttgataaaattgtattttttttacagtcatgtgtacaatttgttacaaaaccatagaagactacaacttgttttaaatcatttttggtctgcaaatatgtaaaatctgtgtgcaattatcatgtatttacagggtcttgtgttagtcattttcaatgattattccaacaatgtcacactctcaacataagacatggcttaagataaatatattagtaaataaatattctgagaacatatttccataaatgaaatgtgctgctatacatatacagaatatacataagttgtcttctagcttttaaaacattttttaaaaatggtaatgttggaaaaagagcccttagaccattttattacaaaatctttacagcaaggtctttacaaaatctcttttaagtgctatgggaaaaattaaaaaattttaaaatagtgccttgttagaccaacacaatagaaagagtttacataaagagtagaaaaaggcagttctgtttaaagaataatagtctcgactagtaattattttttagacctcattttaaaagcattagtcctgcacgaacttcgagtagagactagcagcacataagtatgtgagcagtgggacagaaggggctttattttataaaagggcttggattangaggagacagggaaggagctgagagttaaagccagcttactggggctgcatccataaagaggtacttgttggtaacacccaacttcatttttagctggtctagactctcactgtatat

SEQ ID NO: 209851 - DNA, 718 bp, Homo Sapiens
  misc_feature (650)..(650): n is a, c, g, or t
  misc_feature (669)..(669): n is a, c, g, or t
ttttttttttttttttttcagcattaccaaacttatttattaagaggttctgaggaaattgttcagagtaccgccacagaccccgttttcttctcttagctctctggcatacaggccaatgacttcataccagccagcctataccacggatggcacaatctccatgccggtatcttagcacaactggtcttcagcactggggcctatagttcagacagctgctcagcggaagagggtttgcactgcaggcccctctcttgacagaagtggaggtgaggcttgtctctgcttcaaggactctttctgccaacttccaacagcaagctgtgcgttcggtcataagcccccagaaagatgaaacctcccagactgatggctgccattcgagggaagacacctgcaaataatcctgccagcccctgtgaccgccagaccccatgcaggacagagagcacattcccatcagcagtgctggagccagcctttgccagcgtaattcttgtctttgccacgtctagaggggtggtgactgcagcggcaaatccacctgcaaaagctccacagactgctgactgccaagaatccaccacatgatcctgcctccaggaccagagggcttttaaggactcccataagggaaactggaccanagaaaaaggaatctctctntaaactgtgcttttatagcctcgatacacccttggatacctcttcatat

SEQ ID NO: 209852 - DNA, 772 bp, Homo Sapiens
ttttttttttttttttttactttttccataatagcctttaatactaaaatgcattaaatttttgaagcagagaaaacacatttaaagggggaaacagagaaccaccagataaaaggaaacaatgtggcagataacaccatttgaaacataactgtaataatttaataaagctgctttatcatcttcataaaatagacagtggtgattcttttttgtcttttttctttttacaatgattcaatcactgtgaaaatgtacataacatacagatcagcatatacaacaattttatcttcatataatcagcaacagagactgcttaatgagacatactgtacttgcatccctctaaatttccaccctggtttgacaggtaaacagtaatagtgtcatcaggctcattcccctcactagaggagcgaaggcgtaagcctattgcaactaataccttagcattcaaatagcacaaggaggtatttgttgctgatttctagctcgagctagtctggctcttggtcattaaagtctgtatcctagccttcctcagctgaacgccagccagtgccagtaaaaatctacttaaccagtgctgtaatggtgttagctggtttgtttgctaaggttgacagcaactttcagttagtaacaaggtcatcttgaattgccaacacagctggagcaacagtcagcatcatcagttttccctaatgacctacaatgctttccaatcaagatcaggtgtttgtgggttattctttaccaagagcgcttc

SEQ ID NO: 209853 - DNA, 651 bp, Homo Sapiens
  misc_feature (43)..(43): n is a, c, g, or t
  misc_feature (404)..(404): n is a, c, g, or t
  misc_feature (541)..(541): n is a, c, g, or t
ttttttttttttttttttacaatggctctggaaaaaatttatntgatggatctgagaattttttcacacatgaatcatttctccttccaatggttattgatactgatagaagttccccgctgagactccctggacccatagtttgtgcctgctgggcatcccactatgctgattcctactctaaaagacacttacagcagaaagcattcacccatgaccattatgaaggaaatattctgtccctcactcaccctctggaagctaatatggagcagcagtcactctatccagagccacatgttcacagttctctagcaagcaggtcacaccccgtgggtcccctattccccgtgacccttgttgatccatcctcttcctgctcagttgctcccctgctcacctgnactgcgggaggcatgggtgcgcccactgaggccatgctgaggagctgggatggaatgcaggacagggagagaggggagactgagctgagagggagcactggatcctgggaggtgtggatgcactgattacagtccanagacattggcagcaacaaaggacacacaatgactgaaaacattaacgttaccttctgggatctctcagtgccctgagcgatctgtgtgtctacctacagatgggcaaagc

SEQ ID NO: 209854 - DNA, 714 bp, Homo Sapiens
ttttttttttttttttttcaaaaggaaattgaatatttatttgaatttctcctggtaatagcactcaacaaataagaaaaaccgagctgtgagattttgttttaaatgtagccatatttcaaaaggtaaaaagttggcttctatatttaatggcaagtgggacatcttctattttaaaattaacattcaaaaagtagtaaaatatacactatcatgaacacgatgtgttttatagaatggattcatgtccgaatactaatctgaatgtggaagaaatgtattatctgttaaaaaccacactggaaaaatgttcttttttataaaaagtagcttgaagtaaaaaggaacttgctaataaagccagtaaactttcacacgtgggatttttaaaaaatctccacccatcccacctctgaaaaaaaaagaaggagaagaataaaagaaagaaaaagaaaaaacccatatggtcaatctgagtagagccattcattacatgactgctcattctgtacaatgtggaagcctggttatttaggaaatatttcgtttcctaaagtgcatcttttgaagatttgcctagtaaaactgcaatatcatatacaaaacacttaacacaagacatgcaataacaaagctaaatcattccagtgtaaagttgttaaaactacttttaaaacttttgtttcaccaagaaataaagatggtaaatacagt

SEQ ID NO: 209855 - DNA, 799 bp, Homo Sapiens
  misc_feature (692)..(693): n is a, c, g, or t
  misc_feature (761)..(761): n is a, c, g, or t
tttttttttttttttttcctttacaagatactaactctgattttgtcagactcaaaagctgggattcatattacagatatacagtttacagcacacttggctggaatgcaaaaccatctattccacaaggccagccatgcaattctagacatcttgagaacatcaggtccaaaccctagcctaataggaaaaatcagtcctaaacaggacagacttggtcaaggtcaaggtcactcgagcggtgtcatgacagcaggatgcttctgacctcagtgttctgagttcatgtccttgcttgcatgaagtcttgtaagcgttctccaacagtctcagctgcttcctttgctcgcctcccagcccagtccatgtgtctgtaagcccacacctgctacaggaaatctgtaactcccctcttcgtcagcctttgccctcaccctcagcctggtagaccttcattttcctcccctccaacctcttgaccatattcgatccaaaggcccaaatttcagtacacaggtagctaagacaaaggttagaaaaagcccagaaggcactttattggaggtctctgcctccattcacaggagaaaggagctgggagccccatcctaagggtcccagcatcagcccactggagggcctggaacagtccagcactctgtgggagaggagtggggaggggaatgttttannaaaaatagatctctatgtacatctgacatatttatatagcacataaattagggagtgctctgaccccntgccgtggagcccagcactgagcaggggaggtgacgca

SEQ ID NO: 209856 - DNA, 682 bp, Homo Sapiens
tttttttttttttttcttaaaaaaatggggcctcaccatgttgcccaggttgatctcaaactcctgggctcaagctatcctcccacctaagcctcccaaagtgttgaggttataaaattgagccaccatgcctggcctggtgttgtattttcaagggtatacatacccccagctgactaaatgttttctttcaggtatgtttatgcatatattcatccaagaatgaagcacttacttacttcctccactcttcccctatgggtgttctaatcaaagaggtatcatcccataaatgcaagatttggcaaagacaagaacagattccccatctcctatctataacctaaggccaagagtgccctttattactatattcagaactcaaaaagaattcctgtgggttagagccccaagctaagccctccaagccttaaaagtccttctattcaattctgtgctgggaggaccctgaacgatatatgggatggaggggtgaaggtggaattggggggaagcaggtgccaggcggacaagcccattctcaaacctgctgcctcgcctggattgactgccagacagctctcaatatgcctggtttgtgaggaagggtgagggaaggaagggtacatgggtagaactggtcagccctctgcatagatagccagggttttggattgagtat

SEQ ID NO: 209857 - DNA, 794 bp, Homo Sapiens
tttttttttttttttgttgaatcaaacctatatttgtagtttctaaaatgctgatccacagaccactttcttgttacacgtgtaccaatgaaaacaaaaggcaaacagaatcactgccatccctatgaaaggaatggttccttttctaacattctttaaaaatatacattttacactccttgcacctcaacaaaggcagcaatgtaataaatacacggtttattttgtcctcctcacaccaggcgcctgtccacaaactacctgttgtaagccctctcttttttggatttctccagggctttgtccatggtcttctcgttctccccccggcacttgggacagtaccacttgcccttgggtttatgattgagccccacgcacgagaagtggaaccactcgatggggcactcgtcgttgtcgcagccgatcatctccccataggagacctggttgcacagacagtacgtgggttcgttggggtcgatggggaggtcggcaggggacgcctctcgctccgccttggccttggagcgcttcttcttcttggaggtcttggccttcttctccttgggtgtgcccgaggcgccgtcgtcgtggtcgtggttgctggacgcgttctcacggttctcgttgttgcgctgccgccgtgagcgcttgctgttgggcttgtcagcctgcgctgccgcctcgcctttgggcctgtccgcgccaccttgccgctgttgccgctgtgtcgccagctctgctgcgctcgaacactcacgtggctgtccacctgcgctgcggtctccaca

SEQ ID NO: 209858 - DNA, 724 bp, Homo Sapiens
  misc_feature (628)..(628): n is a, c, g, or t
ttttttttttttttttttaatcaaatactgggtaaagtttattataggaattttcttaaagctgggaaaaggagaaaattcatccataacaacacaaaacaaaatatctttaaaataacatgattacacaagtccagaaaacaccatttatattatatttaattttccaaaatgtggcccttaaggagatcaaagagaaatcaaaatgcactaatgctttcgttttctaaggagaaaatatagctatcaataaatttaagaaatcaatagggacaaataaacataaaagtggatctgaaggacaaataaacataaaagtggatctgaagtaggaggcaactgccacttttgttcttattacaaaaaaaaatttttttataacaaaaaataaaacaaaagttaaacttttaaacattctgtttaactttttcataaatgatgtgttaaacattctgtttaacttttaatgtttcaaagtttagcttttaaattttaaacatttaacttttgagcattctgagagaaactgaatccttctgtgaaaaacaggaaggatgtatttaaaaattacaatgaatggaaaacaggaataagttggcaggataggttcaactagctcagtaatgantatgaatttaagaagattaaactcaccaattaaaagacagatttctgcatttaatttaaattacttttaagagccaatcatggtaacttgattcta

SEQ ID NO: 209859 - DNA, 809 bp, Homo Sapiens; identical to SEQ ID NO: 57880
  misc_feature (688)..(688): n is a, c, g, or t
  misc_feature (699)..(699): n is a, c, g, or t

SEQ ID NO: 209860 - DNA, 703 bp, Homo Sapiens
ttttttttttttttttttacatataactaaaacaattttttattcttaccacgtgggatgcattgtgaaatattctatgttctttcatgtaaagaaaaatgagggtcacattttagtaaaaaagtttcacaaatcactaatatgttataatctataactcccataactgctctaaagcattgacaatgctaagctataattttaggggaatatatattcgtgctccttcttagaattagcccatgatagtattttagggactcaactcagagaaaaaaaatttaacatagccttgttgccatgtatccaacctggacatggtacatgctttcagtgagtttaaatcacctaccttcctaggcccaaaatctgagggaatgacttccaactgtgtaacaggaccctttgtctgtattatacattttatatatgtcttttcatgtacattatttcatttgatcctcacaacaaccctgtgaggtaggccggggggaaaatgttagattcactttatagatgacgaagttaaggttcagagaggttaagtgactttctcagttaccatatacctagtacgaagcagacagaataagaaccactaacttttgtggttgggggcccttttctctaaacacatagcttctgagagtataaatgtaccaaaacatttttaccgcttcatcctcatttccttattgttaat

SEQ ID NO: 209861 - DNA, 658 bp, Homo Sapiens
ttttttttttttttttttaccaaattttaataaatttattcttctttgcatctaataaacacagagggaagagttcttactgcattaattacctaccaatacgtataatgaatgttaattctaataagatcccaggcatgctcccaaaggaatgctttgtaacaaagcgtcagtcttatgctttaaaaaaccaaaccaaaccaaaacaacaacaacaacaacaacaacaacaacaacaacaaacaggatctaaagcatacacacaagtgtgcacaatttttttatgaaggtagagtcttattatgttgcccaagctggtctcaaacttctgggctcctcaagtgatcctcctgcctcatcctctcaagtagtttggattagaggcatgcatcactgtgcattcttatgattttaatattctgtacatttattattgatttaaaatgcattttacctttttctttaatagatgttggaattcctgatgaatctgcagtcaggtaagatttcatagatttaaaaaattatgttaactaagaaaatatagatggaagaaactaatatctgttgagtgttgtattctgggctagacatcctaatatgttctatgcatttatcatctcataaagccatcataacatctgtgcctcgtgccgaa

SEQ ID NO: 209862 - DNA, 647 bp, Homo Sapiens
ttttttttttttttttttgcaatcaaacaaggaatgtattaaaagcacacccaatagctcaaaataaaagacaagtgaacaaagttaagcaaatgacagtaacaaaagctgttctgggaacctctattgaaatagctacttattacatcaacatgctaccatagaacaaaagctcatgttgcttttctgaacttgaaaaacccattaacaatgtacagttctgagcctcagctgaccatagtgctcatgccaagtcctgagcagggcatcttgaatggtggttccctcatgactacatacaccgttagggaatgtttcgttaagaggaaatcaagatgttctaacctgtgaaggtagaatagattccaggctacacaaacacatgaagtgtgccttatattgattactaaagaggttgctgccaagactgcttccaaagggcagaagatagccctaaaaaatgtttgcagtgtggaaatgcatttttaataagtcatattctagtaacaagttgcatttggtaagacacaaagaaacaatgttggtatgcagagtagaaatctctggaagatgatattgtcatatcagagatattgtcagtatcagagatactgaaatctctggaagatgatttttgtctcacatat

SEQ ID NO: 209863 - DNA, 671 bp, Homo Sapiens
ttttttttttttttttttggggttgaagagtttatttattgctctgcccccttggcacagcaagcccaggctctaccagcaacgatagtcgggataggtctcagacacaaactcaggatggataacatagttgtttctctggggaccaccagacttcttgaagtgacttgtgtcccatctaaggttcggatatgggtagtatgacggcgggggagttgtaacagcacactgcattccgggccggtgctcgtagggaggtacacatcttacagtcggttgctcccggcaccaaggccgcaggcggcggtcggtgcagggcgccccgctggcgtagtagtccatcccgcgcagacagtagtggcggcccgagcaagcactttcgtaaccatggaagggcaggcggccgggcagcgggtccacgcacccgcatcggggcgtgatccgcggcagctgctggttccgcgacagtgagttcagcatgttcaccatcacttcgcgctcgtaggcattgagccgctccggcctaggagggcattccaagggcattcctcgaactgctgtctccatcctggcctcctggaagcggcacacatgctacctcaagctctgacctggcagagctgctcccttttaggggtcctcccagaacacccagacccctcgtgccgaat

SEQ ID NO: 209864 - DNA, 700 bp, Homo Sapiens
ttttttttttttttttttaactgtactatggcaaactgacttgtcatgaaaaacttcctgcttttccatgactttgaggataacgtcctttagctatctgatgttaaaagaagaggctggttactgcagtagaatatcataattctgggggggttggtacatgtttggtttacccacagtagggagcatgcttaccaaaagcatgtgaagcattgctctaagtctctggatccttctgcacatctccatctacatacttcgtagtcacagttcctaatatctcacctgctgttatcattgcctacttgaaaatctggcaggaaggttattagggaaaaggaaaaggggaatatcatttaagttccctcacaactgctcttcaaacactagcagagaatgttagaaagaaaaagagtaagaaacaaatggaaggaaaagctaaaatagacgtgaggaatatggagggaaacacgttccaacttccccattcctattaatactcctttcatgcctggatcaaaaaagtgctacctcttcactcatggagagtttttgactgcttcctgtcttcagctcctggtctagtttctaaacgcctaatttcattcttttgctcaacccaaccagacctggtccaggctacaggagccaagaactagaaactagcgtagatctagtaagtgacaagactgagaaactt

SEQ ID NO: 209865 - DNA, 675 bp, Homo Sapiens
ttttttttttttttttttcatactcgtgttgcaattttactgtaagtttgaaactgtcaatacaaaaagttacaaagaattgtttataaagaagaagaagaaaaaagcaaacccaaccaagctcaagcctagatccgtatttggattcagctcgtctcggggcggagccaggcgtcacggcctccggattaaagtatccccccggggagtgtgctctgtgaatctgggtggggagggcgctcggtgctgttcccagcaacccaccaccctcctcctagtgcttgcaagaataggcagggaactcagctgactgcatcagaacctgagaagctggaggctgaagccagacaccagcctctcaggacttggggacactatgagcccactcagccccacaggtctgaatctttggggaggggagggttccagtctgcactctgcccttgaccatcagggcagggggatcacactggctatcggcatcatctctagcagtttctccagccccagccctagaatcaggccaagctctcagcactgcgtgggtttgatcttgaggattctttaccaccatccaggactggggggctgccgctcatgggttttgttgttaagagacagggtctcgctctgtcacccaggctggagtgcagtggcatgatcacggctcactgt

SEQ ID NO: 209866 - DNA, 707 bp, Homo Sapiens
  misc_feature (552)..(552): n is a, c, g, or t
ttttttttttttttttttgacaactgaaacctacttgtttatttctgtgattccaaaaggacgcaaaaaacccaactgggtcaacccttcccttccccctcctttacagtgtatctctttctagtctcattaccgaacgacaaggcaggagacgcacagtttggaggggccgatgcaatcatcatggcagaaagcgccacagcctttgcacatgatcatggctttcaagcggcagtaacatttcgaaggcgtgccctctatgctgttctcttcggagaacgcctgaacaggaatggtctggccatggctgctgggattcatagcttggctagcagggatggtagtgacagtcactgaaaatgacatgacatcacctacattgctagatacctggctacctggtacagcagagttatggtccatgtcagatgaggtggagacattgatcatgcctctatagcttggccctatctgggtggggcttccatacaacttcggggtttgcaggggtggaaggagtaggggctggtgggtggggctgtctgcaggcanaggaagaacagtagaactgaaaagctcggggctgctacggattgccttacctctcactgcatgagccatctgcttctgtgctgcctgaattaaatctctggctagggtcttttcatcaaatgtttggcctctagtgaacaggtaattctccttac

SEQ ID NO: 209867 - DNA, 775 bp, Homo Sapiens
ttttttttttttttttgtattgaaaatattttataatcaattctctagaatcctagccatccagtacaggaaaaaattatattggaacacttccgtatttttaaacaatgaaaaaaaatttgactagaggatggcataagaaatttacaaatacaaacttaggcttcctcacatttcccacagagcaactaaacgagaaaaagatttcaagaaatgacagtatacctcgaatgcaaaattccaaagtcaaatagctacttacattaagagatttaccaaaacagtttgtaaattaaacattaacagcaaaaggcacaaaaagcctatttcttttatggtgtctcggctgattctttaagaagcagataaacaaggtactgtatggaacgatcaaaacttggcctgagctgtcttctgataattaatcctagtatatccagatttgttgtccaaggacacaagctccatgccaccttctgctgtcactttccaagaagaggctgtttttttttttgtttccagttttcactatgatctgagtagacagagaatgtcataaaataaatgagagtattccattatccgatcagaaatgccacctcttttcccaactcattgctctgacttgaaagatgaacgtatatatgaattctcattttattctcctgagaaattatgcatgatccattataaaacatacaggtaatacaaagtccaaaagcctgtcatgtttatggcagtggtgtgatctcagctcacgggaaaccttcacttc

SEQ ID NO: 209868 - DNA, 746 bp, Homo Sapiens
ttttttttttttttttttaagtgttctaagagctttactgactgaagaccacagggagtgatgaaaatctcagggaagggatgccatgtggacactggtgaccacaaagaacactctcccattatcttagcatcatggcaactcagctaatcctagttcaaatgtccctcttcccagacgcccctcatgacccctcctcactgggagggatgcaccccagctccgtctcccacttcagagccttctgtactctgctgactctgtccagaatcccagctatttgggttcaagcatcccagtgacctggctctatacgtcttaatgtggtatttctgatgtaggaacagtattttctaaaatgggaacagacacctagctcacacctcctcactgcttctcactactcacttggccacaccattctctgctcagtgccccatggaagagacgtgattgcagaaagcagataacaaaggcatgttttcctggcttttgggtttcaaaagcctaggtcctgaagggaacagaaaaggcttaaggcatagataaaagattcaggagaggccaggcgcggtggctcacaactgtaatcccagcacttttgggaggccgaggcgggtggatcacctgaggccgggagtttgagagcagcctgaccaacatggagaaccccatctctactaaaaatacaaaaattagctgggcttggtggtgcacaccctctatccagctactcgggaggctga

SEQ ID NO: 209869 - DNA, 750 bp, Homo Sapiens
ttttttttttttttttttgcatttgtaacatgcacatttattcagaagaaacaactcattaatttattctaaaaccatttcacctgataacttaaaatacagagtaaaacaaattggtcaggtaaatatacatgtaacttaaaaagaaacagtcatgtactttaggcataaggacaatgcttttctcttttacaaattctaagttaggtcaaattctctgaaagtcactacctttctttactgtgatgtgttttcggtgaagttacagcctatttgcaaatcacatcactggtttgtccaagcagaggtagatgagaggtaagctcctgtcctgctaaaagtctcctaaaaacagcaagaaaatatttttacatgttcaaaaatgctcatttatttatattcctaaattttcttttactcagtataatatagataatttaaaaataagtagaatatttttattatatatgttttatttttatacttctagttaaattaatagtggaacattatatatctattaaatgttttaaattacatggaattaaaatatcaaagttaattatgttattataatttttaaatttcagaaaccttctttaaaattcttactgttttatcttaaaaaattcatatagaaattgtggtcagatgtaaactgtgactctgagcacaatcccaatgctattgccaatttaattccaatttttgtgttcacacatgaaatgtagtttttcttttattgagttt

SEQ ID NO: 209870 - DNA, 728 bp, Homo Sapiens
  misc_feature (618)..(618): n is a, c, g, or t
  misc_feature (704)..(704): n is a, c, g, or t
ttttttttttttttttcaggtgtaaagaatattttatttcaatacttcaatattgaaatcagctatcacacatatccaccaactgatatttcattgtccatctctcaggagatattcaaagtgagattaatttaatgaagccttctcagcaaacctagaacactgtacttcatcttcaaatttaagtcatagcctttaataagttacttcctagtcattattttatagtatttatgaaatagtgcaatatatcaatgaggtatcatttaagaggcaaatactctatagatttggatttgtcatcccaattccttggcattcaataatataagtatctttagcggcgtcttcttcatcttctgatttcttcacaataaatttagcctgaaatcagaagaggagtatataagtaatacgaagagagatggaggaaagagcccacaactccaacttatgtaggcagagagttaatgtcaagcccattttattgaaaaacctacagagacacaaagatcaaatgattgatgagaaagaaacttaatagcctcaagataacacatttcattgtacaaccatggttcttcttcagaggtatacatacctgtgagttttgtccanatatatatgcctgggccccttccacgcacactgaatcagaaagctcagatgtacagcttaggcaaataacaattttgaaacctcanatggtaattttaatgcaactgtat

SEQ ID NO: 209871 - DNA, 683 bp, Homo Sapiens
ttttttttttttttttctcgtgcaagtggtttattgatggagtgctcttaggagaaggggagtgagggaagcagcgtaggacagaggaaaaaaaactgagtaagaatgtgctctcagaagaagactgacttcagcttgattccatgaggagctctgggaaaggaagttccttgatgtaagaggtcagtcttttgtacctccatacaagaggtagcaattcttttctagagatggtctcaaaattagaatacatcaaaatcacttggagggtttggtaaatcagaatgctgtgccaacccccagagattctgattcagtaggtctgaggtggggcctgaggatttgtatttccagcaagttcacaggtaatgctgatgatgcactctgaaaaccttcactctagagaagaggacagctctgaggtgttagcacccacagcatctcgcaaaggggatcaggaaagcacctactacatgaaggcacatgccagggacagatggattggaccccaagctggggctatgtagactacatctttgggtcagaacatctagattcacagtatcttgtatgttcctgttgtcatctcacatctcttgccaacgcattgttgaaacatcttacttggtcttgttattggacttcaagagaagggtctgggagatacatgaggctttgaaaag

SEQ ID NO: 209872 - DNA, 765 bp, Homo Sapiens
  misc_feature (584)..(584): n is a, c, g, or t
  misc_feature (703)..(703): n is a, c, g, or t
  misc_feature (728)..(728): n is a, c, g, or t
ttttttttttttttttataaatattgattttatagaaaggaccaattcaaaattggtcagatgccacacgctagaagcttccagaaccacgatggaaagaaaaaaaagaaaacaaaaaacagagagaacaaacaaaaataccccagaccaaaatgcctgaaaaatcaaggtcctggttgaccaaaggattcttaaagaaacatgtggctggggtgaggagaccccaatgcctgaacgagaccccagagtggaaggaaaaacaacccagaaatgcaaatccgaagtccctgcccacggggcccccccacgctgtcaaaagcgaggcaaagggcttcacagctttatgggggtggggttgatggcagtagcttaaataataacgggaggaggagggtttttatacttcagctttttttttgtctgcccccctcttcctctacgcggaagaggagagactggtagcttgaggttaaggagaaaacagtatttcccccccacttctttaataggcaaaccatctagaaatggactgtcataaaaaaatgccagatcccacctgtgacctgacagcccccaattcctanagaggtgagagctgtcgtgtggcaggttaggagaggtgccaaccttgggcgatgcggcttcttgggaaataacagctccagcgagaaagaattggggtgagggagaggatgggggccanaatggggggaccttaagtggtacanaattagctgccgtctgctccctgctggtgggtccttg

SEQ ID NO: 209873 - DNA, 697 bp, Homo Sapiens
  misc_feature (630)..(630): n is a, c, g, or t
  misc_feature (642)..(642): n is a, c, g, or t
ttttttttttttttttttaaaaaaaaaagtgtttatttcctttattttaagattcagtaggatagccaaattcatagagaataaaattacatgaaagagttacaagctcactgttttaaagacttgacatttttcatttagttttaattaacagtaataagtcacctcctgtttttcaatgttcaccaaaaaaagaaacatagaatagggggaaaacatgcttatatagccaaggtacagatccagatgatgtaacctttttagtattcgcatgacttgaaaactgggcagatcaatagataatcgaagtgctttatctgaagggagagggtaaagacagtgtgaccaggtttgttttcagggctgccgaatgagcctcacctaacagtgtccatgggtaattcgctaaccttaacaaagatgggaagaagtgagtgctctgatgtcttctgctggctctccataagtactgtaaattttttttataaataaaaactgtgaatatatatgtacaagttgtaagtatttccccctttttatttttgaaaatcaagaagcttgatttggtgtggtgcaatggatattggataaaaatttgaagacaaaattgtttagttacagactcagganttataaagaaanatataaaagaatgctcatgatactgaagtcaaggtcactagtaataaactggcta

SEQ ID NO: 209874 - DNA, 736 bp, Homo Sapiens
  misc_feature (649)..(649): n is a, c, g, or t
ttttttttttttttttttcatttttcaagtttcctttattatattacttttgtgattttaaaaatcggacactttaattttgtattaagaaagtaatacatactcattgtagaaattcaaaacacaatttacagaagagttcaaagtgaaaaataagacttccccctggccttaagctcagtagattttaaaaagtaacttgttataaacttaccaaaaagttggaggaatagtacaaagaactcccatgttcacttcatccagattgttcaattggtaacacttcacatttctgcagcatgcatgcgtgcatgtgtgtaccaccattatcatatggctttttcttaaccatttgagaccaagttgcagacatgttccatcagtcctaaacactccagtgtacaattctcaaaaacaaagacactcttgtacataactaccacattgtcaaaaaaaggccaagcccaagagtgattgatttggcttctaaagtaatgacatgtccttttaagattcagtttattacctacatagacagcaagaggaagatgggccaaaggtgccagctccccatgtccttgttccctgcaccaaacaggacttctgaaacaaggcctgcatgtttgctgcaccagttatgggacactcncttgctgaggagcccttttagactgcagctagcagttttatattctgtagctatacctgagtggggcagagcagatagctcagactc

SEQ ID NO: 209875 - DNA, 693 bp, Homo Sapiens
ttttttttttttttctttaaaaaatacacacatttaatggttggtctgttttaatttctaagtaaagcaattccaaaaatacaaactgaacatcagagccatgtgaaccaccatgaggaaaataaaacagacattcacaataattacgtctaaagacagttcagctggataaatcatcttccaagtatgttaaagaaaaatttctaaaaatactgctggtgttcagttagaattaaaggactttggggaaaatgaaataatatgatacaggtggagtgaataaggatacacgggatttacatttttcattacccctagatataaacaaacattcaaaaatcaacacaaactctgtgtgttattcaaaatattgcagctgcaggaaaggcaaccttaaattaatagctaggggaaaatcaagttttggtggaggtaaacagaagtaacagtttttaatttgcacttttgtaaagctcatttatacctggccaaccaggaaccaaatgcagacaatgaagttctctgcttcttttggctataatgtgacaagaaaggatcatcttttgaagatgtttaaagaaataaagcaactttctttataaacagtcaaataatcaattaatggaatacataagtacgaacccacattttaaccactctgtaatcactacactttacatattttttattttg

SEQ ID NO: 209876 - DNA, 728 bp, Homo Sapiens
  misc_feature (628)..(628): n is a, c, g, or t
  misc_feature (681)..(681): n is a, c, g, or t
ttttttttttttatttttaaaaaagactttattctctagacaagacaatgaaaccatcttccttgtatagagggcaaggaagttgcataaacgcagaatgtttcagcagctttgggttcactcatgctcattttcttcttagcaatcagcatgtgaactggaggacacaaaagcattaacaactcccgcagtgcagaaaggatgagttaccgacatcaaaggaagatgaaggagaagtacttcttgacccatgccatgctgccacagtcccctaaaggcagaagtataaaagcccgagtgcatgatgttattctgagacaaccatattccagccaaatgcacattaggctggaagtgatctcaggaaaggaatcaggtaacagctttccatgtgatcaatatgaaagtcaatgccatttatctcaaaagcatgaatggaatccgttagaagcattaccttctaacaatgggatttatggcataaatgacatataagaaagcagcacatgccttgcttcattctgagccaatgaagaagtataggtagaaaagattacagtagcatcctcttagcaacaactacaccacatagacaatcacagaatccattgctctgccaggaattcanttagaacttgccatgccccaaaaggacatgatgcattatcttctatgttgcanatagaaatatgggaatatttctcactgataccaagtgagaatatgga

SEQ ID NO: 209877 - DNA, 678 bp, Homo Sapiens
  misc_feature (623)..(623): n is a, c, g, or t
ttttttttttttttttttgcaattttaaaatattttattatttttaatatagtgttgtaacatttcataatattgcatactactcaaaagttggtttatttagtagggtaagaatatcttctcttcttactccccagtcagaatttaaagatatactatccttttagagctctattatattggctcctaaaatgtcacatttcataaaacagtaatgctataaactaaactgaataaaggttaagaacaatttgatttcacagtttcgcaagcagccagtagattgctgaattgagaaccataacaaaaattcactaagactttatatttatttttccataatgctccttcttaaaagaagaaaaaatataaaggcaaaggtaatatatgcttcttttagtcccttatccaataaatcaacctttaactgcaaataggttttacagttaccaaatgatatgttagttctgtgccagcagaatttattacttttttgctttcttgttctggtgttaccagtaagttgaccaaatgacactaaaatttaaggacactatcacttaaaacaacgttttgaaataaaacacagtaaaaagaccacacccagtgagtcaagtgcttantaatataaaacaagcataattgcatagattaaataggagaaattcagattcagac

SEQ ID NO: 209878 - DNA, 667 bp, Homo Sapiens
ttttttttttttttttttgaatgctagaatgcatttatttaaaagatggaaaatggtctaaccacagggtggttaatctactatattccaccagacacaaataattttcatttctatgaactaaaaatcttttacattgttattagttttctacaactttcagagctataaaatagccccaaaacaatgaaaggaaaagaaaaccagggagtgtataaaaatagaatgtccaataatcatacatatagagcatgaatggatattgacagtatagccgtgaatggaaaaacaaaaacaaaaaaagggagggtaacactgtgccagttatcaatttattgctccttagtccaaagcaatctttctttttcttgtttggagttaactgatctggatctggatcccatgaacatttctcatttgccagctggtgcaatgttaggcttatcagcagagggcactagagagacactgcaggcatagcagagaggcagtagctgcccttcctagatctccttgttgtagattttgttcttatggtgtcacctatggagttccattggcactcactctccaataagcttccacctcaccccagtagatggcttccagctcaacatccccacctgcagctgcaccaccacctctatctgcagcactccagtgaatt

SEQ ID NO: 209879 - DNA, 685 bp, Homo Sapiens
ttttttttttttttttttcatttctcgagtttttattaactattgaatactacaatatgatttacattttttttgagtgttatatttaaaatgaggtttcctattaaattaaacaaacattaaaacatgaaagcaggtcagaaaggagccattggaactatgttgacaacagcaccacatctcctactgttgtttcggagtcctgactgtggttagaactgataccagtgtccgagtctgtgtcatttgtgtaattgctaaatactctttgagtaaagggaggaatctccccattgctactgggaacctcagattccttcgctctgttttcctttaactggcacccatctttgttgctaatgtgaagtgaattgaattccttggccaggagttcatattcttttgctttcatctgaagcaatgagtcactgtatttaatctctttctggatgccactcaaatgagagtgaattttcaaaccagctttcatgcttttctccaaatcacacttaacactctctaaattagagctttccagttcacttgcagcttccccttccgcatcttcatttatatcaatgcaaacactttttacctctttttctatttcagcagagagcttatcaatgagtattcggtatatttcagtcgttcttccagctgttcaattccatcactttcgctc

SEQ ID NO: 209880 - DNA, 651 bp, Homo Sapiens
ttttttttttttttttgtcccagtttaattgagcatgatttttatttcttattggtaaacagtgaatttcaccattgatgacagcttaaattcaataaaatacaaaattttttcacttaacaataaattctagctctcaggagcatgggattatataattagaaagagctgaggaccacatttgtggctggaaaatagaatgctataatttttattcagtttttgcccttgcaaaacaggaacccaaacagagcaatgaagtaaaataaggctcttgtaaagcagaatatagttttgagtagtttaaaatagtttaagtagggaagtccaaattatagaagcagtagcacttttactctctggaaaaatgaataattttatagaagctaaacaaacccaaggaagttcagaggaacgaatagcagaaattgcctcagcagcacagaatgtgcagaagtgactgcctccactctacatcaagtaatgtgtcctctctgaagatgaaaaataactttttagaattcttggaatttttcagggctgctatagcaaagcaaaggagtcttaatggaaatagagaccaggagcccagtgaagtctacccaggaatcttagccagtgaagtgaagtagcagtgaacatctatgtttc

SEQ ID NO: 209881 - DNA, 661 bp, Homo Sapiens
ttttttttttttttatttgagtattgttttattaaccaaaacacaaaaccaaaatgaaaactggcttagaatataaaattctcatttttcaaagtgaaagtttgaagatactagctaaagttgataacttaaatagtggtaaaagtaaataacttagaattatggcagcaatcacaagaagaaacagaaaacagggggactagggattcggtggtagacttttactttaaaatagagctatgcagcagattctccatgacttggcttacatgcagtatgtcctatggaagtaaaattttcaaatacctccatcaccttcagtaactcatattaataaagtaaaagccaggtatataaaacaagaacccagtatataaacatatacatcaattggatccccaggtaaaccaaaaggagtttttaaaaatatccccaccataccttttaagacaacttttccgctaccctacagtaggaagtaaccacattcaaattagttaagctataaaaaagtaaaaggggccacaagctttattaaaagtaaatgcaacagtaatatgtacagatggcacatggtgccaattttatttgtaaatatagtactccaactcaagtttacaagttacacctttgccacagccttggctaaatcttgaactag

SEQ ID NO: 209882 - DNA, 735 bp, Homo Sapiens
  misc_feature (677)..(677): n is a, c, g, or t
  misc_feature (700)..(700): n is a, c, g, or t
ttttttttttttttttttaaacattcaagctgtgttttattgtatcaccaatggattatctactttttctcatgcttcaaaaatgaaaaacttttaaaagtaattattgtctggatatctttagcccatcatgcaatgttttcataagaaaaccaagctcaacataatacgttttaagcaaacagggatttaacatttaattccaattcaccaaatctttattgaacatctgttgtcagatgtagacatcctattaaaaacaagtacctctatttcagttggtttatttctgtaccatctcctacccacagccgtaaagaagacattaaaaaaggcttactgaaattatactatatagtatttttttagataagacacacacacacttcatgtctatgacttgtttacctaagataaaagggacctaattcaacttactttagcaaacatactactgccaattaatcatttcttaacccttttaggccagtgatacatgtcttgatgtgattggtggccgggacacacctggagctaaagtagctctatggactgaacatgggcaattcaggcagaagtggagactgaataaaaatggaactatcagctcttatctcagtgatcaacttgtccttgatgttaaaggtgggcctttgatgatacccaatgttgtgtcnctggatattagtttcagttccanatctcctcattttgggtaaaggacatccttatgta

SEQ ID NO: 209883 - DNA, 643 bp, Homo Sapiens
ttttttttttttttttttgaagagaaaacaggacggtttaatttgtggagtcgagtcgtttgttcttaattatgcactcaacatgcaaattatattcacctcttggtacagaaatggcaccgtcacttccctgggacctttaatccagacagaattattcttgggcacccttatctgtgtgtctaccaacaactgccgtctctcccttcttacagcaatatgtaaattctcttttgttccaagcaactgggaaatgaggtccttcatccaaaggagtagccatttccagtatagcaccactgatttgtcaatggatttgataagatttgatacactgacatccagatcaagattttgcattatttatagacagtctctgatgatcccaaaggcactttagaatctggcagtgcctcagggtcactgattttcactgggcagaattaagtgatatagaaggtttgctgagtctgtcctgaccctgggtattcactctgaagagagtttatttgaataaggttttgacatatttggtctctatgtctatgtaggctcaaaatgaacagggagattcattttgttcatccatagtttctaaacctttggtagtggaaatggtttacttgtgtaaagaacctcgtgc

SEQ ID NO: 209884 - DNA, 680 bp, Homo Sapiens
  misc_feature (645)..(645): n is a, c, g, or t
ttttttttttttttttttcacattttctttagtactttattgttttacaagtgaacctttaagtttctccccacctactcccgcagaaaaaggcatattcaattgtcccatactaatttttgaataacctaactctccctttgtttctactaagagaggtttctttttggctacaagtaacaatatacatatacccaaagcaaatggaacaatataaagaatatctcacataacaaaaagtccaaaggtaaagcagttcctggattggttaattcagaagcacaattcaggtgctttctatctacatcccactattctcagtgtgatagctttcatctccatacttgtcctttcatggccatcagaaggctgttgcagattagcttcaaacatccatatcacatatcttcactgagaagcagaagagggatgctggcaaatccctaacttgtatcaattgttaagagcaacagaaaatttcttattcaaagccttcagacttcctttgtctcgttagcctagattccatcaaatgatcaagtaagccaattaccatgattggcacagaatctaatcaacactcaccctctataggctagggaagcaccctattctatagcacaaggcagccatacagagttttangccaaaaaaaaagaaaaaaaaatggggctttgtca

SEQ ID NO: 209885 - DNA, 704 bp, Homo Sapiens
ttttttttttttttttttaaacgtgtcaacatttattgagtatttaccgtgtagccagcactgttttacaggcactactcaatgtggtccgcacaatgaccccacgagagaattattaacactcattttaaggataaggaaggaaccagaagcactgagaggtgaagccttaggtaacaaagccagtaggggtgagaccggcatggtgatttctttaggggagggtataagagtcctttgcgaagagaaacatttcactttcaaatgcctcagcacctgctgcaattccaggctttggtttgtacttgtatctcagtcacagttattttatagttaggcatatgaatttaaaatgaaagggagaaatactaaagatttgaaattttagttatgtgtcacctcaagggaaagttaattatcatttttgtcggcaacacctacacacaaattgtgactccagtaataaaatgagagcttagaaaaataagcacccagggctgatgaaaataatgcatttgtctcagggcaggggctgaatgtgaagccaactgttcttagagagaaacatgtcaatactaaatcttttcaccagcctttgatggatgtgctaatcttctcaggtcaacatgggctcaccctggcaatgtactgtaataacttatttaaaaggcagctggcttttataaatgacctgctccatcagc

SEQ ID NO: 209886 - DNA, 627 bp, Homo Sapiens
  misc_feature (620)..(620): n is a, c, g, or t
ttttttttttttttttttgggagttaaatgaaagttttatatattcacattaacagatgtaaaaaaagttattgttgagtcacagaatgagatgacattatttatgtaaattttaaaacagaaatatatattgctcatagttatcttactctctatataacacatatataaatatatatttaatataactgacacatactcatatagaaaacatacttatttatatagatagatatttctaagaaaaaacataatatcaggccgagtgtggtggctcacacccgtaatcccagccaaaatattactattatacatgttcgctcatttatgaaccactaacaaaaatacctgttacatacaaaagagaaatctagccaaagggcttctcctctttataaagccaccaaaagtaaccccttttctgtagctgatgaactggaatacctgtctcttcctcactgatgctagttttccagcctttcctctgctactgctgatgtcactaagtattcttaccttttcttaccctgttgtcacagaatttacctcttcattgttgccagtggctcctaaaaccctatcatcttctctttctatcacaaccagggaactctgtttcnctcgtgc

SEQ ID NO: 209887 - DNA, 716 bp, Homo Sapiens
ttttttttttttttttttgacagagtctcgctccgtcgcacagtctggagtgcaatggcgtgatctcggcccactaaaacccccacctcccgaatccaagcaattctcctgtctcagcctcctgagcagctgggactacaggctcacaccaccatgcccggctaatttttgtacccctagcagggacgaggttttgccatattggccaggctggtctcaaagtcctggcctccggtgatccaccagcctcagcctcccaaaatgctgggattagaggcatgagtcaccatgcccagcctaaacttggcaagataataaatcacctttttaagtgtcgttgggcacttgtctggttgtttttctttaggttaccatgccagcaatgattccttttgagtttctgacagaagatagtggttttcatccaaataagtcaactactctaccccatccctaagccacttgtatggaaagaaaaagaggaagaagccagtactgtgactgcgtaagcttcccccagcatcaccggctatgagatgtgtggcagctgagacccgggaactgctcaagggcaccaggccccatctgtctgcactcactcaccttcctcaggtactcgcatgggcatgtcactgactttacatgctgctgcagctccttggtgagctggccctggtcatgggacaggaactgtggggtcaggacaatagagagct

SEQ ID NO: 209888 - DNA, 637 bp, Homo Sapiens
  misc_feature (573)..(573): n is a, c, g, or t
  misc_feature (589)..(589): n is a, c, g, or t
tttcctgtttttttttttctgaaacataacttggatccacaatgttttctctcataatttattaactaatgtgaaatggaaggtgaaagaggaattatgaacctctgaagcacatggttttcagtgagaaagccttgatccagcaacacaaactgccaagcactgtgattaacttaaacactgggtgcaaattggatcaaaaatgtagtcaaatgaaaattttgttccttcagatcgtgtttattccacatgccagaagttgtttaaagttctttaatcttgacccacagcttatttcttccacagaataaccccaatacacataaaaaaccaattttcgcaaaacaaaagatagaagatgaacaacatctggcgatgtagaacccggaaggtccatgatcttattcaaagcatctggattctttggattcggggaaggtccacgttcagtatacccacataacactcctaacagggactggggcagggataagtggcatgtatgactactaacagaacagacaatacaaatggccttacctcacctctgctgccaaatgagttttggtgtcnccattcctccagacanaaaaaaaaaaaaaaaagcctacagccgcggccgctccaaccctcgtgc

SEQ ID NO: 209889 - DNA, 734 bp, Homo Sapiens
  misc_feature (671)..(671): n is a, c, g, or t
ttttttttttttgtttttaaattattaatttattttcaaatcatactcagtttgagttcaaatagttcaaaaatcaatataatgcttcaggatgcttccagctattgaaacaacccaattaaaaaatatacaactcacactttattttagttaaattcataatgtaggtaatattaaaaattattataaacatttaataatgctttataatttgctattatagtacaccactacagacacataaaaagttgacttatctaattaaaacattttcccttcctatgtttctaattctgaaaactataaaaatattaaagtcatgttacatatttttcaaaaataaaactgccatatcccattgccaactttacatgaaaaaggtatatgttctggtatattaggaagttaatgatgaaaaatataggttcagaattttaatttggtgtatttgaatatgaaaacacaaatgacacaaatggtttaagtcttcattaaaacaagcttcacatttctctgaatgcatattttgcagaaggatgaactgctagccaacatacaataaatatatcaattgtttacattcccaaattttgaaaatactgggtgaaaaatctagaaagacagtgttaaaggagcataattaaatgaaccttagaccttttatcattganaattaagatcctaattttagttactgcttggctgtggtatgggaaagtctgaactattcatgc

SEQ ID NO: 209890 - DNA, 658 bp, Homo Sapiens
ttttttttttttttttttcctgagagtgttttaattgttggacaacatattctcaagaatggactttccttacttaaaataggaaaaagaaatttctacattataaaatggcttcagttgtgatgaaaagtccttctggttgtccaaataaacttacccatcattcattctcaagacctctgaagggttggctccagaacttagacctttgcttatgcaaatcagaaaaacagaatggactaggactcagtgtgagtaacttcattatttttatgggccggttaataaatatttgtttaataatgggatgttttattttctgatgtacaaagcttgattaccatagaaaaccatgattttcagggttaatctctttttaaaattatacttcagaagagaaagaaatgctgctttcctatcttacccttcctgctctcctttttgtagtgatgaggaacaatgaaaaagaggtagtgtaaggaattgtgaggctgggcatggtggctcacacctgtaatcccagccttgggtgtttttctttcagctcctccagtactttcatactattctaataaatatattttgttggtatgaagctatgaagcaaagtatctattaccaatgcatacatacagtacactggttttaagttccactc

SEQ ID NO: 209891 - DNA, 661 bp, Homo Sapiens
  misc_feature (564)..(564): n is a, c, g, or t
ttttttttttttttttttcctcttggcatgataagtcttaagtcccctcccagatctgtgacatttgacaggtgtcttttcctctggacctcggtgtccccatctgagtgagaaaaggcagtggggaggtggatcttccagtcgaagcggtatagaagcccgtgtgaaaagccatactccaaggggctccaagtccagcgcacagtcccagaagggcccagcaaggcagccagggcggcacaggcaccaggtcccaaccttcttccctgtttgcccactctcagaccccggagttcatcatctcggagccgctggccaatatgtactcatgtgggaaccagaacacactgatggaggagttggcagagcaggcacagcagcacgacgagatgctgcacatgcaccacgcgctgaaggaggcgctcagcatcatcggtgacatcaacaggaccactgtcaccatgcccatgcccccgcccgtggacgacacctggttgtcagagcatccctgacgaacacaggtaccaaagactgccccccacggccccaaaatcccccacccgnggatgcccagaggagtgccctgggggcaagtggcacaccccctcaccggggtggctccacctggagtgacggggggagcttgacaaggagcactggc

SEQ ID NO: 209892 - DNA, 724 bp, Homo Sapiens
ttttttttttttttttttccaaaacctcactttattccaatgtgaaatgaagacatgatggtttaaaaatgagaaaaagttcctgataagctgtgggggtgcttcacttgccagctcatgcccattccctctgaaacaaggtgtctgttacccataaacaactctctgtaaagccccaggtagaggtcacagctggacgtggctccctcaggctcacagggtagcaatctcctcccccagtccaggcttccacagcaggcacggacaggtgcagagagggagtggccatggcctgtggggtcccctgccaccctcagagctagtctctgcagaaggtgctgtgtggtaagcagcagggctccacagagaggtgacaacccttcctgtgtctgcaacctttccccaggatccatgattcaaccctggctccctaggccccttacccagcacaccctccgtgtgtcaggcagctcaggttaaaatggggagaatgatatattccgactgtagacccgaaggttctgtccatctggggtacagggagtagggacgccagtcagagcctgtggtagcgcctcctgctgggcctgagggcagacaggccagggctgggcacagggacatctgggggaccaccactgacaaacctgtccctctcagcctggagctacggccaggccaatcatgattaaataaacactgcagcctcatcctgcacaaacta

SEQ ID NO: 209893 - DNA, 622 bp, Homo Sapiens
ttttttttttttttttttaaagtctattttatttattgttttataaatttttagtttgtggaaaattgttagtaaatgtctttaagaactcattcagttatacataagtaaagttttacttgaaaacttgctgttaattcaagtccttcatatttgtaacaatcactatacctgaaatcccaaatgcaagaaattgtttttcaaatagaaaaagtgtagctgacttcagcaacaagaattgcaatatactatataagtaaccaacagaaggaaattattgacaaatcaataattcaatttggcacttgacaaatggcagcatcaatgaattagcagtaagatgcttagcctgtgagttggtggtgtgctgaattgatgaatttgtttttttgaccttggatcttggatcacagtttccttaatgaacttcaacatggtttttggtgcaaacatttgtcaatgccattgcaagaacaaaataacttgagtcttatctactttagtgagattaaagtgaggaaaggcactgtttttggccagtccctagtttaatttttgtcagtactaactgggatataaaggtgtgtttctcgaggatataagagacagacttgcattctga

SEQ ID NO: 209894 - DNA, 721 bp, Homo Sapiens
  misc_feature (643)..(643): n is a, c, g, or t
  misc_feature (663)..(663): n is a, c, g, or t
ttttttttttttttttgtctgtgcaaatgctttaattggtggattcttagatacagtggttaatccattgcccacaattctttactaattccgaggcacctcatgccgggaacacactttcccttccactaaacaaaggtgaccgcgtttcagagctctcctcttacaaggttcacgtccttcgttaggccgaggaccgtggtactacaaaagaacatttcgttagctgaagtcactacgattggcgagaaacatccgttacttcagaatacgttaactacaaaatatattgaatttccatatgtattaaccatatacatgtgtaactattactaaatgtagttcagtcattacaaaataagacattctgggagcgggctacaaatattcaaaccagctgaattccccaggtaaggccccgtgttataaaaaaaccacaaacatcagacgtcagaccgagagctcagtgactgcagggtgcgtagccggaaaagccaacaaggcactggcaccgcagagtcgctgggggggtggtggggggcactgccggctcggggggcctttggaagtcacctctaacttcgattcccagccaacagcggctggggtccacacggacctggagggtgccgagctcccttcncaggggcctggaccgcctcnctgcattctttgctcctttggggagcccgccctgcctcttgggacctgcattgggcac

SEQ ID NO: 209895 - DNA, 666 bp, Homo Sapiens
ttttttttttttttttttaatgcttaaaatgtttaataactttatgtttaatattataccaggacctacctttgttttcaattttaagatgattatttctaaaatctatttagcctgtaaatcattgaaatcatatatgcactccataggcaaaatccaaatacccagatctgtaatgtgtcaaagcatttttcacttttcaaataaagatacctataatgaacaaatggagttattttcagtattctgggtctgcttgttacggtaattttatgttatacttgaagaaatgtttcagtactggggaagtaaagaggcaatgttaagtgagctctctgggtaactggactactctaatttctgtttctggcacaagaatgtcaaaatctgccttacagctggccaggaaacctcagtacccacccacccacacatcatccaaaagagaaataggggcatgtgttattaatttcattaaatgaggccagaaccagtgtgtctaccactgcagagcaccttcaaagcatactacagacaatcacaaagaagagaacccacattttccagacaactctaggtttgaatcaataatcctaaagaaatccatgtggcacaagtaatataactagggaggttccgaggcagaagcacggttcacagtgtcgc

SEQ ID NO: 209896 - DNA, 743 bp, Homo Sapiens
  misc_feature (667)..(667): n is a, c, g, or t
  misc_feature (693)..(693): n is a, c, g, or t
ttttttttttttttttttgatgttttaaatttaagtcatttattttacaaacagagactacctattatacttaagacattgtgttagatctttgccaaagacatggtttagtcatactaatgtaatccattttttaactttccatattaatttaatttttaattcatttttctttatgcttgcttcaggggctacatctgggactgaatagcagcatatggcccaagggctgtggttttgccactcatgctctatactctagtctcttccagagttgagtatagcagtcactatcttaatacagtgtgtcactattttattacctgcagagaaacagattaacttcctttatttaatactgataaatagaaaggctttttcaagaaaaaaaaagaaagcttacatttacaaaagtgatttatgctaatatgtgccattaacaaagacaaatactgaaatccacacaaaatcagaattaacttctacaactaaaaaaaaattacagggtaataaaactgtaggaaaagctgtatgtaaaaagaaaaaaagacaagtccctatgtagctaattacaagagaatattgtaaatacattcaaaaagttttccaaaaatcctgcagcctcatctagaaactgatacatgttaagattcttgatctataccanattataatgttaaaggaaatcatganaactgaggtatatatttgatgcattagaaactatcattttgacactattt

SEQ ID NO: 209897 - DNA, 690 bp, Homo Sapiens
  misc_feature (642)..(642): n is a, c, g, or t
ttttttttttttttttttcgtctccttagtttatttttttctagagtccttaacatgctacattaacctgacaaagcttaatcttgtgttcgtttcacaatacatttcatgcagttcacagctgtgattggttttacattgacattacacatgtttcgattcagccatgtgaaaagagtaattcttaatggggtttgtctctgaaaactgtccaagcttaaataagcatatgagcagttcactctattcttaagtgcatctctctttaaaatgcaaggatttttagtgtaagaatataatgtccctgtttatagtccatttgcaacagaaccacttcctttaggtttcacatatcctgaggaatccacttttacaaaattgcattcaagtatattatttcatttaacattccaggttgggtttaggtgcaaggctgaccttcagctttacatccccaaataaatcttccacggacccagccttcccaagactattcttaacattagactctcttttacaataaacattcagcactaaagccacagaacagagctatttggcattttccagtgaagtgcaagaagttaaataagttatgtttttattgctaatgtatagaatcaagcacagtcaccttgtcanacagaaggaaagggcatacacaagatgtggcctctcctcagatgcctc

SEQ ID NO: 209898 - DNA, 677 bp, Homo Sapiens
ttttttttttttttttttcaggatccacaaatggtttattgattccaagtcgccacacagggtacattcagcagtcactgcgcctgcagtcggcgacagtttaatgtgaggcaattaccgctacagacatcttgcttcatcttaaaaaaataaaaattttcaaagcatctcacaggccaaagagctaagcaggaccctcactcagacattcaagagtgtttccgaggaaaactcgaggaggaggcagcgtggaacatcttcccatggccacggccccggcacagagctcaaatgcctgcgggaagcggcccctccacctgcggaagggaagacgatgcctgttggagccgcacggaagcatccaaaactctgaggcctgggggccggctgcggtcagtgcaaggctgctgacatggtgtgacctcttgcaacggggtgggggcaaagcgtgcggtgacaagggtcagactggcggctcccactgcagccagaagtgagggagccagcacacgggggtgggcagtggacaggacaggatgcggcaggccccagtaccccccactcaggaatttgcttcaggccaaaagcccagggcagcagggtaaggcgccatcggccaagacctgcacggcaggggcagcccctccactccctggacccgagaccgtctctctcct

SEQ ID NO: 209899 - DNA, 782 bp, Homo Sapiens
ttttttttttttttttttcagatatagataaaactttatttatacataaaaaattacacttttaggaattctggttcctaaaagcattctccttagtaaagctcaaaatgaaaaggttgaaaggggcagtgaacagctttttaactgtgtacatactgcagtcacaagcaattttttaagctgcaaaaatcatctcttctaagtagcatgagcttttgaaactgcagacttaaatctcatgatggcatcaaaagccaaagcgaaataaatcaatattctgaaatagaagacttggctgtcgatgttaattgggtgctatctccaaccactttccatcatgttacttcttcctcttaggtgtaactcaagaaataacttttttctaataatacctatcactgcatggaaaaaatgaaaagagaagtgataagggcctcctattagtagtttaatattaacattatctaccctcaataagaaacaaaaaatgtcataatgttttaggataaaattacttatacaataaccattgatctattctgaagcatgtaagccttggtaccatgcaaatctcaacctcacttttttttttttttggagatggagtctcgctctgtcgcccaggctggagtgcagactccatctcaataacaaaaaacaaaacaaagaatcattcaaggttaagatgataaattaaatgtcaagtggttgctacatctaaacaagatctacatctaaacaaggttgctagcatctaaaaactcttagatcagggcttttcc

SEQ ID NO: 209900 - DNA, 686 bp, Homo Sapiens
ttttttttttttttttttgacttgtcaatttttatttatcaaaactttgaaagtctctcagctaacatgacttaaaaattgaggttatgaggcattttttgaaattcatatatccttactataatagtgaatcatcaagtgttgaatgtaagtgcagtagaaattatgaaatctcttgccacagaaccatacagaaaaatccgtttatcagcaacaaacattaattgcatggtgaaggatgttttgagtgtctgcgacctgatatcaaaatataaacatacagacatatttgggaggcaaaggagtgaataagaatggattatttatgttacagaaaacagcatggggtttctgtaaagagaaaaattatcctggtatatttactatagattggatttataaaaaataaattttcatgtaactttttgataacaattggatgaaactagtcgttcaggtattaaaaaggcagctgatgatgggtcatgaactaaagatacagtcccttaaaggaagtgtggttattgttgataggaattccaagttgtttatatgattggtaacttggaagacggaatacacttgagagaggactttttttttacataggtgatttgaaatgaaaagagattagtaatatgaaagttgtccacgtaaatgatgtgtagtacgtgaaagtaccaaat

SEQ ID NO: 209901 - DNA, 774 bp, Homo Sapiens
ttttttttttttttttttgaaagacattattctttataaataaaaggttcatctgtgcaatattcacattagaaaaatatacattgcttgccatagaccttctctggataaaatcagacgaatctaggatctgactccacttcactgtgagggctctggctccacggtgacgaccgactccacagcttctagaggaactccttctagcgggcccatccgcaggcacgcccctctgcatcagtcactgtgacaatgtcctcctcctgagacactattgtaccagcggccaaagcatgcaagggcctgggcttctcccggcctctgctgttggcagcaagagattcagtggtatcgttggacagggcttctcttctgggccttttcactgaggccagtccctcctccgcagcctcacgttccctcttctcgctgctagctccctctagctgctccccatccatgtctcggctgaggtgcttgggtccaaggttgtctgggtgtatttctttcttccgtaggaattctgtgattcctaatgactcagcaaccttcatcagaagaaactcatacacggtcacaacctgagccagctgaggcagagccaattccaccagatcctcccggtcacactgctggaggaactccttgagcctggctttgcttggcgacgccctctgctctcctgccgcagcagggccaccaggtagctgagcagctcttctctgctggaggacagctgtgcgggactctgcaagggtctctgagcatgtgcgt

SEQ ID NO: 209902 - DNA, 793 bp, Homo Sapiens
  misc_feature (670)..(670): n is a, c, g, or t
ttttttttttttttttttaggtcttggagttcttttatacaggattcaaaactaaaattccacaacacacttaactgtagttctaggacatatgtatggtcaggacaacagagcagaagttgataatgctccgaggaatcaggtaagtaaacggttgtcctgagaatgagatcactccaccccaaggagaaagatcggaacctttaaactttgggttattaaaattaagcttattagtaccttgatgcaagttagagtttcttacaatgactctaaaagtagagccagggtcctggcaagtaaatgaacaagcttttaatacagcttagttatgtaaaatactgtacactgtaaaagatctagaaaactagagcttcaagtcatgttttaaaaaagccattaagcttaattgaaaaaccaagtatagagtacaaaactgcaacaagagccacagtgattccatggcatccagaccccgagtccttcatgcagagctgcagccggtcagtggaagtatcacattggtgtgctgtgtggacacaagcatgtctagcctggggagtgggttgggagctgcatttgggtcctgctgtcgcttttattcttgaacttgaacaggcggcagaatatcaagaaccaggtggtatgaaggattacgctgcaacattcncccctcttctaccccgcccttcaacctctggctattgttactttctgggaattgtgttgggttctttgtagtttactttgttaacactgtctgtagtagggcttacagcttggtctaacggtg

SEQ ID NO: 209903 - DNA, 673 bp, Homo Sapiens
tttttttggttttgttttgttttgtttattgtggtaaaatacaaaatctaccgtcttacagtgaggtggcgttcagtaccttcaccacgccgtgcagccatcccatctgattccagaacattctcatcacccagaaggcagccctgtccccattatgtcacctagtcacccccaggtccccctccccagtcccggcacccacgaatcctctccctgattctgtggattggtctgtcctggacatttcatagaagtgggatcacagcgtacccttctgtgtctggtgtctctcactgagcgtgacatcctcaaggtgcatccgcactgtggcctgggtcagagcttcgcacctccttgtggctgagtctcattccagcgcgtgggtgcgtgggtggccgcgccgtgctgatcccctcaccttcactgggtgttcggtgttctccgcctcgggctgtcacaaatcgtgctgctgtgagccactgcgtgcaggtctcatcctgggtgtattttacaaacggactggatgtgagtgggtgaggagtgaggagctggggtgacaggtgcctgcgaccccggccaggcactgcctcctgcgatcgaaggggcagggggagacagaagccctcaagggggtgtggagatggagaagccagaccccaggtggggggtgcat

SEQ ID NO: 209904 - DNA, 716 bp, Homo Sapiens
  misc_feature (667)..(667): n is a, c, g, or t
ttttttttttttttttttcaagagcaggtgacgtgtttattgtgggacgcctctttctgggggtcgtgctggctgtgagggaaccctcacaatccccaggtcccagaacagacagatacaagaacttgaatccaaactgcttgcacataaatagaacggaggttggcaaaggaaaaaaaaacaacaacaaatgaacgtgcagcctcctatgctagtgtgacacggtggcagagtcttatccacaccccgtctcttttcttactgtctccatgctgagattttcagctgctctggaaagattcaccaccttccgatctgactcagcagcagacagctgccttcctggcggcccctgccacagtctccaggactggcaaggggctaaggaatccaagacaggtattcctcaaacaaaacaaaaattgcttccacggtcctttgcacctcccagttctgctgggtgaacaatgtgtcccccaaccccaaactaaaccaaagaacatgctgagcacaagctgcgagtcagaataaaaacatattgcacatggttacaagagtcttcctgagggccctctcgctgcagatccctaaatactggcttttgatccaaccagtcgcttgcctatcaatggtggtatcaaacgcccatgtacatcccactccccanatacaggtgggactaagcaattttccacattgctatccttcgctatcag

SEQ ID NO: 209905 - DNA, 717 bp, Homo Sapiens
ttttttttttttttttttgggttaatacttttaattacatgattgtaattatacaatttccactattcgatattttgtataaaaccagttacaacccacaagattttcaaatgtgacaatatgtatcaaactacatacatatgcaaagtttacacgccattaggaagctttatcttaaaaataccttcaggaaaataaacattcattcaaccagttctcttggctttaaaaaatatgattagaaatatacgctgtaaaaaaaaatcaagacaatgattgatcaatactgatcagttacattttaaaacttttaataatctgtacatgagtgcaggttagataaaagtctgcaaattattaatagaaaactgcagtactatcatcggatgaacatgtctgctgacaattctaccaggtaattaaggaggtaatttcctacacagtataggtgaattgtccagtctttaaacacatctggagtcatctccactgagtgacatggagaataacctgatgtgggtaaatggaagagcagcagatagcctctccagggcagtttcagcgggagagaaatttaaaggaacaataaaataggttttaaaagttgcttttgatgagcactgctttccaaaatgcaataatgattttttttaatgtagaaagagaagctgtgttaagaacagacatccaatgagtgcactgcttctgtggctccaa

SEQ ID NO: 209906 - DNA, 780 bp, Homo Sapiens
  misc_feature (698)..(698): n is a, c, g, or t
ttttttttttttttttgtgttctgtacagggcttatttatttactgttaataaacagatcttccaaaacacacagttacctggttcacagatagctgctttttattgacaaacaagatcatagtatttcagtcatggtgtcaagcacattaatacttttctgttactcagcatttttttttatatcagttcaaaagctacttttgccaagaaggatgagacaaaaggccagacagaaattggactttggttttcagacatgggactctcatgttaacaaagaataaataagcaaatattgaatcctttgtttctaagttagtttcttctgtataagattaataaactaaagggttcctgaagggttggggaggagagagggtgggggaaatagattgaccccaaattcagtgtgaacacagctccattcttgtttactcttcctttggactcctacttttcttctaaactctctgggtagataatgttatccttattggccttagagatacccaagatattataaaaccagagctgttatgtctgtcaccagccctgcaggaattattcaggaacctgtggtacatgtgacttgttcgaggtagaaatgtctcagctagatccccaagttgtggggtgaaaagtgtgaacagaaatggctgtaaaactagttctggcctcgcagtttttgctgtgcanaagatacacacattgttggggttaaggcttggttttgggtgctactgctaatataagttttcagactttactgacatatagt

SEQ ID NO: 209907 - DNA, 779 bp, Homo Sapiens
  misc_feature (747)..(747): n is a, c, g, or t
ttttttttttttttttttaaagattgaaaccaagtttactgtttcttgaacagaataggaagaaaatattttaaatggctgagctggtcattagactattactcatttatcttaaaggcagaaacttgtcaacccaactacgtgaaacagagaagcatgatttgcttaagcaggcgacattagagttaggcctctccactgaagcttcccgaccgtcagcacgtggcagacaggatgcgcccatcattccgcaagggagaaccggagaggcccgggagagtccttggctgtcctctcatcgaatgatgggtgccgagcgatcattcgtcacagtcgggcggagtttcacagtggcaaaggggttttctccgctgagaaaaggcggctttgcagtcccgttggcatcgttaggagccgcggtctcgggcttggacgctggggccttaaaggtggatgtcgtcctggccgaatctgctctcctgtcggcagctgcccccatggataagcattccaagtagtcgggtggggggatgacaacactgctattctcagacaagttcacggtgctgatgcttctcactggtgtggggcttggcgtgggcacggtcactgcttctgtctcattttcttccagcaacttcgtgtacgacgacgggaaccaacccctcgccttggacacgtcgtgttctccatagagccagccatccttctcctcggggatgagcagcgtgatgacatctccctgtngcaagctgagtaagggtctgttggagcccgca

SEQ ID NO: 209908 - DNA, 735 bp, Homo Sapiens
  misc_feature (657)..(657): n is a, c, g, or t
ttttttttttttttttatgattattattttttttattgatctttacatcctcagtgttggcagagtttctgatgcttaataaacatttgttctgatcagataagtggaaaaaattgtcatttccttattcaagccatgcttttctgtgatattctgatcctagttgaacatacagaaataaatgtctaaaacagcacctcgattctcgtctataacaggactaagttcactgtgatcttaaataagcttggctaaaatgggacatgagtggaggtagtcacacttcagcgaagaaagagaatctcctgtataatctcaccaggagattcaacctcaatattctgcatcgaagggatagtcttccaaatgagaggattgcaacacgttacaggccctccagtttctgttgaagctgagtatggttgccatctcctcatcactcaatttaaagtcaaagacctgaatgttctcaacaatgcgtgctggtgtcacagacttggggatgacaatcacattcctctggatatggaaacggatcagaacctgggctgcggtttttttgtgctttgcagcaatctccttaatcttgggatcctccagcagggaagggtcttctggcttggcccaaggtctatccggagagccagggggctgtangccgtaacggtgatgcccttggagtggcagtactggatcagtttctcctgtgtgaggtatgggtgacactcaacctgg

SEQ ID NO: 209909 - DNA, 748 bp, Homo Sapiens
ttttttttttttttttttactattcctaaactgttttatcgctttctctcctctcttgacaaccgattaatctaaattctgaatttaaaaaaaatgttcattacaaaaaaggtccccacaaaacagaaaaagatcaccagctaccttaaaatggtcttaggctactggatgttgcctgaaaccatctccagacttgagtatgtatttatgtaacaaaatacaaaccaaatggcaaagacaaattacttcaaactttgcacagatactgaagaataaatctttccagaaagactcaacatttttgaaaactcatatgtaataaccataatctaccatttgaacatttataaataaatttcattttcactgcttaaaaggtttgaatatgtttttggaatagtctataagtttaccagttaaattaagtcttcccttgccagaagaccaatgccataactctcaacaaaagtgtatggactggccaagcacggtggctcaagcctgtaatcccagcactttgggaggccgaggtgggcgtattgcttgagcccaggagtttgagaccagtctgggtgacaaggtaaaaagcccgtctctattaaaaacaacaacaacaacaacaacaacaacaacaaaagcttatggatctttctcctgtaccactgcaagactctaatgatgactcactttataggtaaaatcctttgcaaatatgcaaagcatgttcaattaactaaaacctcttggt

SEQ ID NO: 209910 - DNA, 579 bp, Homo Sapiens
ttttttttttttttttttgctttattaggtcacacaaaacagaatgaattagcagaaaaatgtatgttataaaacagcatttactacttcaatttaattttttttactaacaattgtggacctttttgatgacacttatgtatgtttttaataaattatgtacttattagtacttaatgagcccttcctgcctcaatataaaattactaaacttggagaattacagattttattgtaggccctgatgttagtcactttggagaagctaaaaatttggccaaaatgaatgatccaatgatcctttaagttatctttatatttaatatagtgtgatcctggactacactgatttaaaacatgctttttgaaaaatgtcttagtaatagggcagtaatcttcagtgtgtttcaaacactacttgcaccaaaatcacgtaggttgttgggtattggttctcaaactaggataagaaagacacctgcagagtttgcttaaacacaactgctagcccctgcccctgcccctgcccctagagtatctgatttagtagatctgatctgagatgaggccccgagagag

SEQ ID NO: 209911 - DNA, 696 bp, Homo Sapiens
ttttttttttttttttatctatattggtttttatttataaacagattgacataaaataagtccagatggcagcgtgagtagctgtgctgctgacttgcttacaaggaagcctgtggacaggcgagtgggtggaaccgactccagcctggaaaacctgccctcccatcccccttagcgccttcttggccttccggcctgattttcttcgacagcagttctggccagggcaaggagctgtggtgggggcagtatgagccagggactcccttcccacagatgaggcctagggctgcaaaagggccccgtgaagagaggagaaggtgacagggatccttctcctccccatatggagtgatgtggtcaaggctttatgggtctctccacctcaaagagaaagtgccctagggtagtgtcctctgaagaggggccacgcctatctgcagagggcctctctgggaccaaagcagggcagtctccctcctcctgaaacccagtgtctagtgtgggaggagtattaactacagggtttgcccaagtgccagaaacaataaattaacaataagatctttttgtaaaaaaggtagaggtttgcaccacgagtttggattcaggggaatctggtgagaaggtacgagctgtggggcgatggggtgccacagcaagaccaggacagagttggccttttcctccatcacg

SEQ ID NO: 209912 - DNA, 702 bp, Homo Sapiens
  misc_feature (629)..(629): n is a, c, g, or t
ttttttttttttttttttggtggaaatcattttattctcatacacaggttattacagcacaattaggaagagacaatcacaactcacacaatgctatattcaaattatgccaaagtcccaacatattcatttcatttgcaagttaattcctaaaagatcagagcagagtgatacacaagtttattaacacagactacaacgtcaatgaagcctcctggcattgtcggaaatagaaaacatgtataaaaatcttcgaaatgcaggttaaaatgcaaatccaagtgaaaggaaaaagcactactgtgaagcctaacggcaattatttcccttcaaaggaggtttgtgtccagctggagagaaggcctggtggacagaagacaaaggaaggcaaaattcctaagggagaaattcaaaaaaatgatgggggtgctgccctctgctgggcctctttggcagtcgacttcaacttaatgcattagcgccgtaaggttgtaagagaagcaactctggcttgatcttagaaaagctgattttctttttggcagcatatttccggtgagaactgatgggaaaggtggtgtggattcgtggacgaagtctctaacgtaatcttgactactgaagggtanagacttgcccacaggttagagattacatgaattatccacaacgaatggtagcagatgatgggtcacctcgtgc

SEQ ID NO: 209913 - DNA, 720 bp, Homo Sapiens
ttttttttttttttttttgctggaaaccaacattttattgagcactcctgctcctcggaatctattccagtagattctttgccgagggcatcacatatcacacaggggtgtgaccagcactccccctgctacctgccgtgtgggcaggggcaggagtgaatggctcttcctgggcacaggccacagttaaccggtgacaattgcagagccataggaattcatcttttagaaaaaacgaaaactggaataaaaaaaaaacaaaaaacctgagtataaaacctcagcagtgttccagcactatctcggggtttaaatataaaaaggcatcatgagaaaacagttaaaaagataacagcagcaggccgccacctccagggcagtggtcatgggggtggggccagccccgccctgagccgccggggcctcacttgagcagcaggtgcaggcccccgctgagcagcggcagcagcagcgccagcagcagcagcagcgccagcagcacctgttcgcaggacacccaggacccggggttcggggatctccagaacctcattatgttctccttaagtgtggtgaaaccgtccatgaaacttctaagaacatccctgatgtcctcagtctggtcgtagatgaaagccagacccaggctgtgcatggccacctcggagagctgggccaggcgcggggccctgaggctcacgtccatctcgtccccgatgc

SEQ ID NO: 209914 - DNA, 671 bp, Homo Sapiens
ttttttttttttttttttagaggttgataaatgcttttaatccccacattccacacacggggggacgctgtcattcacattttcatatttctgttctggtcgcagtctgtgtcctcaccaccctcatgaatgagggactttgatagatgcctgggtttgtgggctctgcggtagctggaggagatacacaaagggtcctcggaggagggtgtgggacagctttgaggggacaaccactgcagacacctggagggagctaggggagattctgagacttaagagacatggaatggctgggcgcagtgactcacgtctgcaatcccagcactttgggaagccaaggtgggcagatcacttgaggtcaggagtttgagaccagcctggccaacatggcgaaatcccgtctctactaaaaatataaaaattagtcgggggaggtgctgtgcacctgtaatcccagctacttgagaggctgaggcaggagaaccacttgaacctgagaggtggaaattgcagtgagtcgagatcgtgtcactacactccagcctgggtgacagagtgagatgccatctcaaaaaaaaaaaaaaaagtaggtaagtggagatgctaaggggagatgtgtgaagagatcagaggtcaaggtcagttcagaaggaccccgggatgtgaag

SEQ ID NO: 209915 - DNA, 676 bp, Homo Sapiens
ttttttttttttttttttgagtgtcacaggggaactttattgagaggaaacatggtcacacccagcagacatgctttccctcaatctcggtcttgcactggcgcgcgcgcacacacacacacacacacacacacacacacacacccatctccagcccctgccactgtccagttctcagccacaaggcgggacactcctcaattcctacgatcagaggcagcaggggcaggagggaggcaagaggaggggagaagtagcctggtcctggggtcgggaggaagcgggtgcggagagcaggggtgggggcatgaccagtggttaggtgcgctcaacagctgcaagaagagtgggatccccagccccaggtggcctcagctctgccagtccctctccacggagccctttggagcaagaacagcgcctaggggagaagggtggggcctcccaccccatactagtcctctcggcagggtgggggactggagggggcagggcggggcggtggcgggcaacactcagctctggggctcctggggagcctcgcccccctcttccccggcgttgtcggccgtccacagtgtcaggttgtctcgcagcagctgcatgatgagggtgctgtctttgtaggagtcctcgctgagggtgtgcagatcagccatggcctcgtcgaagtggt

SEQ ID NO: 209916 - DNA, 725 bp, Homo Sapiens
ttttttttttttttttttcaggttttcaattcaggacaaatgtttaatttgcttctccatcaaaaaagacacacaatattttctaaacagagaaaaaagctatgaattgaatattgaaaattttaaagtatttcaaataactgattaagaatgtgttatatacataattgttctaacagtaagactttgtaataataagctgcacaacagacagaattttattcctccaactacgaagtacttgtttctgggcatccaaattttcataaaccttgaagtgggcactgacgctgtaaatgtaatcctaaaataatttatcttccttcaaaaatctctgccatcgtgactttacataccacacacaaaaaagaatacctggaaataattcaaatgtataacaacaagtgtatgtcatacataagaatactatacagagtttaaaaagaaaactagatctacattgttaacatgaacgaatattcaaaatgaatgtgtgaaaaatgcaagctgcagaatacatgtaagagtacgacatccactgtgtaaagtttaaaaacacacaacagactacatattatttatggatacatacatatgcagaaaaggtataaaagcatgtacacaaagaatacacatcaacttcagaatagtggttacctatgtaggggatggagaatgtaaacaacgggatggatacaaacaagctttaactctatccataatgt

SEQ ID NO: 209917 - DNA, 845 bp, Homo Sapiens
  misc_feature (720)..(720): n is a, c, g, or t
  misc_feature (724)..(724): n is a, c, g, or t
  misc_feature (741)..(741): n is a, c, g, or t
  misc_feature (761)..(761): n is a, c, g, or t
  misc_feature (789)..(789): n is a, c, g, or t
  misc_feature (805)..(806): n is a, c, g, or t
ttttttttttttttttttgcaatacaaataaaatttttatatttattttttattcctacagagaagaagaaacacattcgtacaagggttcatttcccagtggttaaatgtactgagaaaaatacattaacaaagtaactcaaggatacaactgctgtgaattcaaaagacagactactacaggaaaagtgagtgcacttactttcatattttgcagctgttaatagaagtcttaaacatttaaaatttaactaattcacacaacctccaccaagtatcagtaaataaacttctaaacaataaaaatggataaacatggtcaggttgttaggttaagagctaaaaatttcattttgcttccatggttgcaaccatgagtcttaaggccttcaaagcataaacatcacagaacacctatcacaaaccacaaaccaaccacaggaaaaccctttttatactgtgtatcttctgtatttcattaaacctaataagccatcagttgtaagatgcatcctaattcagagatgtcacaaagtgaaataagtatctctggatcaataaaatatggtatgtatatatacccgagatatgagaggaaactatttaccagtttgaattacttccatactattgtgccaaacaacaattaagtgtcaaaacattgaaattttatgtaggtaagctttttattattgttttctttacaggaacaataatcanacanatcttgaaccaatctantaacagaaaactgttatgtnaattatatctatttttgcaatacatcanatactgtattgatgannataatagatacaaaaacatatacatcattctatgttgct

SEQ ID NO: 209918 - DNA, 667 bp, Homo Sapiens
  misc_feature (610)..(610): n is a, c, g, or t
  misc_feature (652)..(652): n is a, c, g, or t
ttttttttttttttttttggacacgggcctccgtggagcctcaattttattacatttgagtaggaatgactttgtgttataacatcaaagaaagaatctgaatgtgagggaactgcagaaattaaactttcagtctaattctcagaatgccagagtaagatgaaccctttacagtaatagtgaaataattcgggctcattttcagtagaaactcaagctgcttcaatatggaaatacaattttgacaatacaaaaaaagaaagaaaagcaggggtgaggccccacacttaagaggaagaggccatcgcagcatctgtgccctgggcttgcctggcaggggtgacgttcccgcactgagagggaggggccatcccggcatctgtgccctgggcttgcctagcatgggtgaagcctcacactgagagggagaggccgtcccggcctctgtgccctgggcttgcctggcaggggtgacgtccctgcactggagagggagaggctgtctcaacatctatgccctgggcttgcctggcaggggtgaagcctcgcactgagagggagaaccatcctggcatctgtgccctgggcttgcctggcaggggtgacgtcnctgcactgagaaggagaggctgtctcagcatctgtgccctgngctcgcctggcgtac

SEQ ID NO: 209919 - DNA, 693 bp, Homo Sapiens
  misc_feature (598)..(598): n is a, c, g, or t
  misc_feature (662)..(662): n is a, c, g, or t
  misc_feature (678)..(678): n is a, c, g, or t
ttttttttttttttttttcactgaaagagatgaaacaaaaaaaattttaatagtattaaaacagattaagacaattccaggtgcagtagccccagctactccagaagctgaagtgggaagaccactagagcccaggagtttgaggctacagtgagctatatgatggtgccactgcactccagtctgggtgacagtgttctttctactccctccttcccccagttctcctgaccttaaaagtttagaacaggttggcaaatttttttctgtaaaagaccaagtattttaggctttgttccagctacttaaccctgctgttgtaatgtgaaagcagccacagacaatatataaacaagtgggcataactgtattccaataaagttttttacaaaagcaggcagtggggttgtaacctgtagtttgctgacctctgacctataacaagtaacacttcctgaaaagcctttcctgatacccatcagaatcaggagctttatcgtccttggctcacatattactagtaaatccacttagcacatttatgatcccttattatatattcatctccattagggactaagttctttgcaggtaggtngcattttgctacataagcctcctcatgttcactctagtgagtatctcacagggcagacattcantgaatatttgtttctnaaaatcgtatcttct

SEQ ID NO: 209920 - DNA, 699 bp, Homo Sapiens
  misc_feature (586)..(586): n is a, c, g, or t
  misc_feature (684)..(684): n is a, c, g, or t
ttttttttttttttttctcggcacaaaagctcatgatttaatgaggaacagaaacaaaatctctgattgttggtgtttcaaacttcattggcgtcctctggcaagcacaagttgatccctctgcagcttcaataccctttagcctgatgacagcttcatttaacagatcatttttccttgatggaggtggcaagcgtaacagtgttctgggcctgcttcagtaatggcatgtcgatcatactcccttggaaagtaaaggccccctttcctaattgttgatgttctttaaaggcagcaatcagttcttcagcccacttaattttttcaggggaaggagaaaactgctcctggaccacggcaatttggttagggtgaatcacctgcttaccagtgaagcccatggcggctccttctcgtgactgtctaagcaggccagctccatctcgaaagtcaatgtacaccagatctacggcttggagaccaaaggctttcgctatgacaacaatcttttgccgggcgtagagaatatccagggtttctttactacttgttgcacctatgctggctcgaaagtcttctcctccanaaacgactgcatctagaaagagacctacttgaggcccgaccttcagggtttcttcacacactgccttaaaattgagcaaaccattgcagtttccacanaagggattaaattca

SEQ ID NO: 209921 - DNA, 751 bp, Homo Sapiens
ttttttttttttttgtttgtttgttttttaattaaaaagaaaataagaaaacaaacaacacttcccaggtactcacaaaaacaaggagaaatcccaagagatcacacagagaccccctgtgagggtgggcccaaggcccctcccttgaggccattgttttctcagacaaacatccacctctcctgggctaaaaaaaaggaagcgcttatccaaccttgtttctcttggaagattcagccatctccagctcactggtccatgacatgcacacaggaaactgggctttacaagattttacagatgggcagtgctggggtgggaggatttaggggtacacaccactcctctcactgatccctggatctgctcaaggtttctggagggctggggagcaatgctgtctctccatggggatgcatcgcacatgtcagatgcattgttctgcagggccaccagggctgagtttcctgcactaaggccactggtgacttccttccttgagtggtagcaaaaggagtgtctgcaggtaagttggggcaagcagaataaggacttggaccaggacaagttgtgcctaggctggcactaaatgctggtggacagaaggcagtggagagatttcgctatatttgccatagcaagcttttcacactgaccttccttggctactcaaccaattctccatcctggcctccaatctctgaggatcacatagacctggatttgactcttagctctgccatttactagt

SEQ ID NO: 209922 - DNA, 757 bp, Homo Sapiens
ttttttttttttttttatattacccttataataaaaaactttatttaataaaaaaaattccccaaaccacagcaggaacaattaggtatgacaagagtgggagtgtttttctttgtagggctgagatacacaaaggaagcgggagagggcggagcgccaccaggaggctgcgggcgtggagcggggacaaggaggggtcggctgtctgaagcagtcaggctcagtcccagggtggctgggcctggcgtcggccatggccactgccaccaagggcagacaggcggggcaagggctcttctgggccatacttctggatctccaggtcagggtagacgggagagatggggcggactggagcttgctgggtcgagtagggctcgggagtctctgcacagggaggtcacctcgtggctgtgccccaggactctgccttgcctgctcttgcactcaggagcatctttgggggacagccccccaccccacccaaagtctcctcagtgggaggcaaggccccaggccccagacgaagagcaggcagtggtgtcctgtcccttgggccccagctccgggctgccctactccatttgtctctaaggcagatttccatgtccccctccctccctggaccatgtggcctgcaggggcagggccaaccacactggcagcagtcacaaaacaacagactttaatggaaatcatgaaggagggaagcgggcggaccgggaaggggctgagtgacatcgcccatgccgctccc

SEQ ID NO: 209923 - DNA, 700 bp, Homo Sapiens
ttttttttttttttttttggaaacatcctagtaaaaatttattcagacaagaatcgtcaaaggatgctaaacctaggaggggtagatttgatgaggaacagaattgtcaacaaggtctcaaagtttctcctcacaaattacccactaattgcaaaaggaaaaacaataacgatacactggagaaactggacatcttacccaagtgatcaaaattagcatcaccaataagggacaaatggacattctgtgcatctggatgtatacctgcaatacatatcacttacagcatttcaaccctcactgcactaccccaatctaaccatgaggaaacatcagaaaaacccaaatagaaggatactctatcctttagctgtcctgtatttttcaaatatattactattataaaaaacaaagaaaagctgaggaactgctccagattagagggttatggcaatacaacatatgatcctaggctggatcgtggagctgaaaaaaattaccaataaaacagcaaatgaaattgaaatatggactgtaaagtattatggcaatgttaaatttctgaacttgatagctgtacttgggtaagacagcatgcttgttcttatgaagtgcatgtgtagtgttaaagggtaaagagtatgatgtctacaatatactttctaatgggtcgaggattctaggatacacacccccagtt

SEQ ID NO: 209924 - DNA, 613 bp, Homo Sapiens
ttttttttttttttttttaaaatatttgaagagatttattctgagccaaatgtaagtgaacatggcctgtgacacagccctcaggagaccctgagaacatgtgctccaggtggtcggggaacagcgtggttttatacattttagggagacatgagagatcaatcaaatacatttaagatatacattggtcctgtccagaaaggcaaaacaacttgatgtgggggcttctagattataggtagatataacaattttctgattggcaattggttgaaagagtaattatcgatagaaaggaatgcctgggttgtaagaggttgtggagaccaaagttttatcatgcagatgaagcctccaggtagaagacttcagagagaatagattgtaaatgcttcttatcagccttaaggtctgtgttgatgttaatgctggagggtatgatgaggcatgttcgactcccacttcccatcatggcctgaaccagtctttcaggtttaattttcgagtgtcctggcccagaaggaagtccatttagatggttgagggggcctcagaattttgtttagtccccatggctccctctaaagttgaactcatagtcctttcttcttgc

SEQ ID NO: 209925 - DNA, 629 bp, Homo Sapiens
  misc_feature (548)..(548): n is a, c, g, or t
ttttttttttttttttttgctcttccaaaggatttattggtcctatttacatctattgcaaattgtgagaaggcagcaggggccaacccctggacctcatctctgtctagaatgtgaggtcgcagggatgcttaagtcttcctctggcagagacccgaggtgcagagatgattcttctcaccccttctctcagggtcgtggagccccagcaggggttcagggcccagaggctgccccctcagctgaaggcacaaacactgtggtaggggtgggcagacaacgcatggactcactcctggcaggcgccactggccaagtgcaccttttccccctgctcctagcctccttcttccttcccgtcccggtcccacactggccagggcctggatgggtggccacttaaaccccagacccaagcccttaactcctggaccacggccagccttccttaggctggaatccaagcaccatcagtgccctggaccaggccagcttccctgtcctagagggatgggacagagagtgcccagcgggggctgaggggctanagaccggctgggcagggccagtctcccttccccttcccgagcttccctgtcctcatgtggacccagagggcggagctgggg

SEQ ID NO: 209926 - DNA, 702 bp, Homo Sapiens
ttttttttttttttttttcatttaaaaaattttatttaatatttacatttatttttaaaataaaaattagaggaaagcccatgaactcattttccatgaacataatataatagtactcacctatctcctctacccaacttgtgttttagatgagtccttttggatctttttccccataatggcctctctccttttgctttacagtgcaatcagggcagaataacagatatgttgagtagctaatttatatttctgaagatctccatagaactcttaagttctaagtcttcatagtctttgcaccttgccaagtttgctttcctttgggaattctgtcataaccacaaggttattccccagacatgcagtttggggaaattaacccggcagtagtaaacagactggattagaaaaggtggcagtcgtaataaggatattccaataaccggggaaagctacagaaggatcttgagttaggatgatgacagttacaatagaaaggagaccagtacaagagacggtgaaaacagaatggatacaatttagttgaagaattggctgtgggtgaaaagaagaaatcaaagatgcctgaagttgtgagtttcaggtagccctgagtttataatcctagttctgactcgtactatctttggatatactagctgctgactactaactgaacaaggtagtaccttgtcatct

SEQ ID NO: 209927 - DNA, 596 bp, Homo Sapiens
ttttttttttttttttttcattttaattgcattagcagtgatttaatttttttagatgctaaaccttatgggtgaaagtggattaaatgtagccaaatgcaacatcaaaatcttcaggcacaaaaacccattaactttttaatactctcagaagatgaacctaatttcaaatgaaagctgcctccagaatatattgttaagcatatcctagatataattcattctagcaaacattctgtagaaattcacataacattttactgtactaaaagtaaattgcccatgtaacaaaaactatcttttcataacttcaaatgaattttaaaggatgactgaccgtccttggaagagaaacagtaaacaaataaggtttatagcaatgatgtatgagttagaaattgcagttccaggccgggcgcggtggctcacacctgtaatcccagcactctgggaggcagaggcaggcagatcacgaggtcaggaggttgagaccatcccggccaacacagtgaaaccccgactctactaaaaatcaaaaaaaaaaaaaaaagcctacagccgcgggcgctccaacatcagaatggtaaccctcgtgc

SEQ ID NO: 209928 - DNA, 582 bp, Homo Sapiens; identical to SEQ ID NO: 49165

SEQ ID NO: 209929 - DNA, 699 bp, Homo Sapiens
  misc_feature (663)..(663): n is a, c, g, or t
ttttttttttttttttttgattttaattaagtttattaagtttagtcacttaacattatataggaatcctctgaaattctcagagatctgacagtctagcagtgcgctcacagtagggcttgaacactgctagtaaaacaaaagccatattcctaccttagatctagtatttagccagaaaaacaagtgatgcccataagaaccaaccagagaacagtatctggtactagagtttgaaatcacaagggacagcctataacagtatagtattgatgaagaatgtttctacccaattgaggagtcagctaagtagaaacagaccaaaaggcaaggaagaacagccagcaagccgctcatacctgcccaacagcaaggtggatagagatgtacgttagcatggtaatgacaggaatgaaaaggaaagaatctaaaacgtagtgaagggaggaaatggtagctgcagcgtgcctgggtgcaagagagagaaaagccagaagtccaagcttctgccacacctgtaagtccctggggcaggtgtgttatactgacctagaaatactgtggttttaagagctgggtgtggtggttcacgcctgtaatcccagtgctttgggtggccaaagcagtatgattgcttaagaccaggagttcaagaccatttcnccaacacaggagagactaaggaatttcagggtaaaa

SEQ ID NO: 209930 - DNA, 562 bp, Homo Sapiens
tttttttttttttttcttgagacatctcactctggcttaggctgcagtgcagtgatgcgatcgtagctcactgtagcctcaacttcccaggctcaagcaatcctcccacctcagcttcccatgtaaataggactacagggatgtataccaccgcacccagctaattttttatattttgtagagatggggtctccctgtgttgtccaggctaatctcgaactcctgggcccaatcaatcctcccgccttggcctcccaaagtgttgagattccaggccaatgttttatttttacacggttagtttatcagagttgcatatgaatagtgaatgaatcaactcaagtccacaaagacactggtagggtagaaaaagtagctggactggagcaagcacagacggacttggacttgtcctatacttggagctagttactgtaaaagtagagcgagggcaaggcatgaattaaaagtagcccaagaccttgacatcaacgttcatactaagtacttaacagtgcacttcataacttaacagtgtataggctgccaacaaacctcttgc

SEQ ID NO: 209931 - DNA, 637 bp, Homo Sapiens
ttttttttttttttttttgagggtgacccacatctcttaggcagagcagtgacaggctgtgccccaaagtccaaacaggccaggcagagaagggcagggacagggctcaggctgagaagaacagctggcgtccaggcagggtggccagaacgggtgggcacaaaggatgggcccgcaggcctaagtcatttggtgcggcgcctccagcatctccataaggaaggtgtcaatgggtgtgtccccgatgagcttgaagaagaagagatgttccaggcatttgagcccgatggagcgcagagccggcaggcggagcaagagcttagcgaaccttcccggctgctctgggtacttgtgcttgcagtaggcctccaaggacgcatagaccttctccctcagcgcctccacctcggccgggttcgagagccccttggagtcagggttaaagaggacgatggcgcgcaggcagcccagctccgtcttgtccatctgcatgtcccgcatcttggacacaagctccgtcagcaccctgtcaaagatggcgcccacccctgcgctgtgggcgctgttccggtggacgtgcagcccggtggccaggaggatcccgtccttcacggcgatggagcggtgggagaaggag

SEQ ID NO: 209932 - DNA, 641 bp, Homo Sapiens
  misc_feature (604)..(604): n is a, c, g, or t
  misc_feature (622)..(622): n is a, c, g, or t
ttttttttttttttttttcctttttgtaagtctttattttttagttgctcctcccatagtaatgcactgaaaggcataacagtttatattgtacaaagcatttgaagaaagtacctcaacttgctgattatttcaaaatgagattacaaacaaaaagaaaacaaatctggttcctcaataaagggcaaaataactgaatacagtctgttatttacttctctcttttaacataaggttgggaacacttcattttacaaataggattaacatgaacataacatcgcacaagcttgcagacaaccagcataaaatatggagtacagtttttaatcagaagaatcatgcttccatgaaagaaattataatcgtttatacaattgaatcgatttcagtattacaaaaactaagttgcatctattcgtatttagttcattaagaaggaaaacaaaacaaacaaacaaaaaggaatgttaagaaaagccaaacaccatttggcactctcatacacaggtcgggtcaccttggtccttgaaattcggaaaggggtgtgcctcagacgtcataaagtagtggctgactggaacagtgctattttaatcaacanacaatagtttgccaacanatacatacatgatacacgc

SEQ ID NO: 209933 - DNA, 639 bp, Homo Sapiens
ttttttttttttttttttgggttccaaaaaattttatttatggacactgaaatttgaatttcacataattctcacgtgtcacaaaataattcttttgattcttttccaaccatttaaaaaatgtaaagaacattcttagctctcaggctacacaaaaatatggctatactttgtcaaccatccctagaccctgaacagcatttctgaattagtaacacttaggtgtcctaaaaaacaggtttgggatagctgtgtgttaaggagtccctaaaaaattcataatgccaattagcataataaaggctctaagccttgcggttaagaaagcaagcttaacttccgtcagctcagctagtccttcctttttcctagtattaagttgcaacagtttgaaaaatatttaaataagaatagtcaagtcaaacttcctgggatgactaaaatgatagctaaggtttaaaacagacatccaagttcctgaaactaataaagccacaacatgacttcagctatgccatcagaaactgaaagtatctagaggagaacaatgataaaataaagtgtatacatgctctgaaaaaaagtcactttagtactctagttctacattaatttgtattatatttgaactcacagatg

SEQ ID NO: 209934 - DNA, 583 bp, Homo Sapiens
ttttttttttttttttttcagggatccgaaaacgactttattgaagatggagttggcaagacctagccccacttcccacccccagagccgttcctgtctccctcactcacacgctttccacaagctctgcacttccctgcacctgcctgggtgccctgggaagggctctctccccacttatgaccctggggtggagaccgagcgcccaagcaggctggcctgtttttaaagtgctctgacatgcagtgctcctgtcggaagggtgatgagcaggccacaggagagttcctcacgccctgccagccccgtgcttgggctgggcttcctctgccccagagctgaaggagtaatgcaggcctggagcagtgattctcaacgtacattccttggcgttcatgctactcctctttctcccctggggcctgggagatgagacctctgggtgtttggtttttgttttgtttgatgcacccaggaaaatgagagcaagttccaggaagcgaagtgagaacacgcagtcagatctgatattcccagctctccccgtcctccagacccctgttgattatcccacgcaggtctc

SEQ ID NO: 209935 - DNA, 674 bp, Homo Sapiens
ttttttttttttttttttcattaacaactttcttttattaaaaatgtacataagtaaaaggaacatggtttaattgtgcaaagagtaagaaatacagatgagcaaataacacgtattaaagccacctacgatataccacccagaagtaaccaggctgttgaatttttagagactggggtgcaaacacattttttcactcccttgtgcatatatctgggagctctgccatatacagacacagacgcggtgtccacaggcgatgcctctgctgggaatgctgcaagcaggagtctatcctttcctggtactggctcgggggccctcctcagcgcccaggtcactctagcatccaggagtccaaaggcccggctgtgcaggctgcagaggtgatcttggtgtgttttcctccaataggctacaaactctggcacccatggctggtggctggcattcaactctccagcagccagggagtccattttcttgtttctctgctggccatcctcaggacttgcggcggggagtggggggcccagggtgtgctgccacctcgcccggcgcgggttgcggccccagggcccgcgctccaggctggcggccgctgcattctgcgcccctcgcctgaaacggcagctgcgccagtcctggccacgaccgccctcgtgccgaattct

SEQ ID NO: 209936 - DNA, 739 bp, Homo Sapiens
ttttttttttttttttttagagataaagaattcgctttattgtataaatgacaatttcaacaagggtacaaattagatataattatataaactgaatatttacatccaatttacatccatcattctattaatgagcactttaaatatataatacaattcagaatgataaagatatctacattaaggcatcaaaaagaaaaaaaaaaagaaagcaaagacaggaagtctacttgcccactcagtaattaacaaagatttatgtaaaattcccacaaattgatctcagaatcagaatcagcattttctattagcaaaaactgtgaaatactagtaattgtgctttatataaagctgtttgaggcaatctgcataggaaatattatcaagattcataattgcacaaatctgaaaggccttacatgtcttatcacatgttacactgctgtcataactcacaaagaagtaattgtagtattttataaactgcttactgtctaggattgtaaattgtttagctaatccatataaactttccggctgcaaatcttcaatgtcgtaggtctgggtcaggatatactccagcttccagatggactctccctttagattcgcctctgtcagattcaagtaatactgcaacatatccttttttatctgaaagaaccataatgctgtctctgtgagtgtgtccataaaattgtcctgcaatgacatcactgtatttttgaaaaatatctat

SEQ ID NO: 209937 - DNA, 717 bp, Homo Sapiens
tttttttttttttttcttaaatcaggttgtatttattaaaaacaaaatacaaaataacttggaattcagattattgtgatgtttatcccctaacaggtcagtcctaaagaaaaagctaattgtttcaagggtggtaacggaagaattttaagtaaggattatattaaatacatctagtttgatgcaaactgagttttattcaatgttggaggcctcactatgttcctctaagttttcaaccattaacaacccaaaccggttgtttccctcataccaacacttggtgtgtgcagtggttctccctctgttcttagaacagctggtattctgtttcttctgcctttttttttttgaatttgatctaccttttggtaggaatatttcagcgggggcatatgaccttgtggcattgaatagatattcataaagttgcttagcctcaggacatatgctcaggagactttctacagaggtcgatgctaacagttgctggcatagtccgtgcaccaggcttccactgtacagtcgagttaggtctggctctgggagaggagtggacagcagctggttgagatacatccccatctggagacaggactgccactgacagaagatgtgagctgtgtctaagtccagtcttgtgcccagccgtgtctgcgccttcactctttggaactctgcatacaacatcttagcaccatcttcctgcagctcttc

SEQ ID NO: 209938 - DNA, 732 bp, Homo Sapiens
  misc_feature (711)..(711): n is a, c, g, or t
tttttttttttttttgttaacaaactgtgccagcctggaagttaaaaactaagattttaaacgcaactaaggatctctctttagtctctattttatcgatttttcattagttggctctatttgagcagggagtctgccttattagtgctgtattctcaaggcttagaactattcctggtacacggtaggcacttggtaataatcctacctgtatggctatacaaaaattaattgaatggtcatgaataatgcaaagaagcaaaagcttaacaagagacaacataagccagtatcaagatcagatgttcacagttttctggtttgttcctgatcacattccaggacagatatttttgtttggtttatggactgaaattttttaaaaaaatttatttcagcagaccctgaatccatttttataaaaacccttagctgtgaaaggaacaaaggttttggcagatagtataatcagagtcaggattggctcggtttgaaccctaatgcccttcaggatattgaaaatgtgataaaataattgcattatttattaatgacccaacgaaattcttatacattatgctgtagagcaattccgcagccattatcttctttgctcctaagaacccagaaaggttatccttttatttatcagaaatcaccatgttaaaatgcaaatacttaggatcggtagcctcaacccttatcttctanaacatctttagctatccatac

SEQ ID NO: 209939 - DNA, 574 bp, Homo Sapiens
tcttgcggcccaggctagattgcaatggtgcgatctcggctactgcaacctctaattcctgggttaagcgattctcctccctcagcctcccgagtatctgggattacaggcaccagctaatttttgtatttttagtagagacagggttttggccaggctggtctcgaactcctgacctcaggtgatctgcccacctatgagtatatgtttcttaaggtagattctatgttccaataatggaagcaattcagtttccgactaatggaagcactgcttggcatgtttttaaaatgtcgtgagatcagctgattttgtacattacttgctgaatacaatctctggaaagcagagctgccatacagtctcctccctctttaacaaacattttcatacttaccagtgctgcttctctaatgcacctaattctgccaagcattattttcttgaagaacagtatcagggataagagtcatattttcaagtcattaaaattctggcagtctcatttcatttaagacaccttaatttttctcaggtcatgaatcagtgaacatctgatattagcagggctaag

SEQ ID NO: 209940 - DNA, 753 bp, Homo Sapiens
  misc_feature (2)..(2): n is a, c, g, or t
  misc_feature (4)..(4): n is a, c, g, or t
  misc_feature (6)..(6): n is a, c, g, or t
ancncnttttttttttttttttttctgaaaataggagattccagtctacccgaatcagtgtaatacggaaatgctcactgttttaacccttaaaagaaaagtaatctgatgttaaccaatcagcattttttcctgttacagttctcaccttacaaaacccactgctttgccactgcccagtgagacctctcattctattttgtagaatggaggctgatccgattcatgcatcttgaataaaagccaattagatctatgattaaatttgttgtaattttgtcttttgacaacatgtatattaaaagtactcaatctttttgttattgtttttgatagaaaaaataactatgctacacttatccacagtccttggtcagccaacttcaggctcaaatatgtcacattacattctacaacttgctttaaaaataaatgtgcagaacttgagaagcaaaaataatactactcagccctaatctgttttgacattaatgaaacccacgtaatacaatgtattgcacatacacatacatgtacatatagctaacattcattgaatactatgcgcttgttctgtaccttacaacaaacttctaaggtagaacatttcagctttctttacaggaaaagaaattaagactcagaaaggttaagtaatttgccaaggtcacaggtagtgagtggcagggctattttatttgaacccaagcagcctgcctctaaggcctattccatgaatagttcctctatttt

SEQ ID NO: 209941 - DNA, 588 bp, Homo Sapiens; identical to SEQ ID NO: 47297
  misc_feature (17)..(17): n is a, c, g, or t

SEQ ID NO: 209942 - DNA, 786 bp, Homo Sapiens; identical to SEQ ID NO: 47937

SEQ ID NO: 209943 - DNA, 792 bp, Homo Sapiens; identical to SEQ ID NO: 50271

SEQ ID NO: 209944 - DNA, 783 bp, Homo Sapiens
aagcctcagtaggccacagccagagatagagccagaagcagcagtgcaggaaatgaggcctcccacagatctcacacattttaaagaaacccaaacccatggtaatatctttcttctccttcctgtgttgttcagtgggcagttacattgattgtggataggttttaaaaagcaaggccagttcttgtctgtgcatttgactttgtatgtgatatactgactctgtagcaaggaaacatactttcttggtcttcttcctttgaccgccagtcattatttgtcttcattgcaaattaagggcagttatttccaatccattccagaattacagaaaattgaaggctatggaatctgaaaccatagctgctgtggaataatcctgagctgctgccactgtgtgagttggagggcagtggaacagggtacatgatggggcctgatcaggtggtctccggataagtcaacccctattcattttttcctccatccctaaaacagaggccaaaccataattgtactcattggactaaagttctcaagaaggatcttgcttcattcatttttgtgtgtttggaacctagcacaaaacctgacacatatccacccgcctcagcaaatatttgatgaaaaatgttgaaagacggaatagattgatattcatatagatatatgcatcaattaattctggattttcctatatatatattctaattacaaaggggttatatgttcattttagaaacttttgatcctacataaaagtcccaaaggaaaaaaagaaat

SEQ ID NO: 209945 - DNA, 568 bp, Homo Sapiens; identical to SEQ ID NO: 48474

SEQ ID NO: 209946 - DNA, 590 bp, Homo Sapiens
ctggattctgatggcatcgtgcgcttctggtcggctgtgatgtgctccagctttccagtgacatgtgacggcgaggcttctggaagaaaggatcccccgtgacggctctgccccacttgtgaacgccaaccctcagtgcttagcctgctttttatcaaagcactgattgaaacaagaaaggtctcattctttacctttggagagacaatatcacgtttttgttttcgaattagacttctttaaaacacacacacacacacacacacacacacacacacacacacacacccacacccctgatccttgccaacatgattcctaaagggagatgtgactgatgctgcaagaaccatcttttctatgaaaatgactattttataatataccaatgttacattttctgaaacgtagcaaacaggatattcaaaagattctttggtggcctctgtttcttgttccctttctagatgtgtgcttttctcagctgttttcagctttgggaccaaagggattgttgacgttttcccagcaatcttaatctcatgactatgttcttctcccaaacaaggattgataggtaaatgcattga

SEQ ID NO: 209947 - DNA, 586 bp, Homo Sapiens; identical to SEQ ID NO: 49356

SEQ ID NO: 209948 - DNA, 714 bp, Homo Sapiens
cttaaatccccgtctgttaccatccccaaccattcatcagactcagtacaaaccaatcttcccaccacattcttacattgcagcatcacctgcatatactggatttccactgagtccaacaaaactcagccagtatccatatatgtgaaaaacagtatattggggaagctcaatgatacaaacatttgattaaaaataaaaacatggtatttaatattagccatggcacaagaaaattatttttgaatcatgtagacttgggtgcaatttaaacaactttgagctttaaaaactcacttttgatgtgttttgcacatttggtataacttgtctttggtcatgttatcttcttatgtagtaactctagacaggtgacttatgggagcagaagtccagttttgctcctgctattttttataaattgccttctaactagtgcaagacacgtctacatttgggaagccattctgtgtacagacttagagcaacagatgcacatatgtcagaattacagcatacaagtgaattgtattatccgtgtcttagtgtataaatgttgggtcacctacctaagaaattgagctattgttctttacatttgcatgtgtcttttgcatgggcaaaatgttgcctagactttgctcttaaatgttgttctaataatctcagctgcattgtaaaccgttcctacacatagtgccttaaatatttgga

SEQ ID NO: 209949 - DNA, 645 bp, Homo Sapiens
tttttttttttttttttttatagaggatatatatttaggatttctaatacaaaggggaacaactagtagaagccttaaattaaatagggaaacaaagatgtactgctgttccttctttgctcaatagattgtcagtatgcttatttaactgatagttttctttgtaccttctcaggtttattatgctgtcaagggactagcctttgaagaataccgtagggcgtaaggcaaacaaacagaaaaccctgaagatgacagtaagattcccttcgttacatcttaaaaggaaggccagcaatgcccatccaaacttggaatcccatattatgcttttgagttcataagttaacaggctttgagcagtcaatggagcatccgagtaagtagatgtgaaggctgggagaatcactgcttagagagaaagaacccaagaaacatgtctaagtttgtggaggaaagtatactctgcttctatgaaatcaaagctgtgggttcaatgtgctagtttaacataaataaaaaaattatattctaaaacaaacaattgtgccttaagcacacctggtagtctcataaatgctgactgatggtataaaaggtataacggatcaagatggttagctagataccaactcatccttactg

SEQ ID NO: 209950 - DNA, 338 bp, Homo Sapiens
ttttttttttttttttgagacgaagtctcactctattggcaggctggaatgcagtggtgcgatctcagctcactgcaacctccaccgcccagattcaagcaattctcctgcctcagcctcccgaatagctgggagtacaggtgtgtgccaccatgcccggccaatttttgcattttcagcagagacgggtttcaccacgttggccaggatggtctcgatctcttgacctcatgatccacccgccttggcctcccaaagttctgggattacaggggtgagccaccgcgcccggcctaattttctttattagtagtagagacagggtctcctgtattgcc

SEQ ID NO: 209951 - DNA, 493 bp, Homo Sapiens; identical to SEQ ID NO: 53110
  misc_feature (84)..(84): n is a, c, g, or t

SEQ ID NO: 209952 - DNA, 463 bp, Homo Sapiens; identical to SEQ ID NO: 52498
  misc_feature (4)..(4): n is a, c, g, or t
  misc_feature (10)..(10): n is a, c, g, or t
  misc_feature (41)..(41): n is a, c, g, or t
  misc_feature (408)..(408): n is a, c, g, or t

SEQ ID NO: 209953 - DNA, 425 bp, Homo Sapiens
  misc_feature (14)..(14): n is a, c, g, or t
  misc_feature (217)..(217): n is a, c, g, or t
  misc_feature (365)..(365): n is a, c, g, or t
gagggatggcaggnatttcccatttaagaactatcgacaagcaggaggggattatgccatgtggagcatcaccccagatacctccatccagctatactggaaatggtttgtctctcacttcagatcaaatctagaagaaaaatatcagaaaaaatttgcaggtaaaggtaaaatccccaatgcatgggccaaaatcacaaagcaagacgtgcttgangacttgaaaaaacagtaatactcagtgaccacaaaagagccccagtgtctgaagaaaagaggcagtgtacctgaacaatccaaaaacaactactcattacaattaggaaccttcatcatttccatgtttaaaatgaaatgtgtaaaantcaatcaattaacacattaagggatgaaaatttccagtaaaaggacttcatttctctctg

SEQ ID NO: 209954 - DNA, 545 bp, Homo Sapiens; identical to SEQ ID NO: 44060

SEQ ID NO: 209955 - DNA, 422 bp, Homo Sapiens
ggatggtgaacccgtctctacagaaaaattcaaaaattagccagaggtggtggcttgcacctgtagtcccagctactcgggagcctgatgtgggaggatcccttgagcctgggaggtcgaggctgcagtgagccatgatcacgctactgcactccagtctgggcaacagagcaaaatcctatctcaaaaaatatatatatatgagccagccccaaatgtttatggggttgttattgataaaccctgcattaaacaatcccacagtcggtgctgcggtgagccgtgatggtaccactgcattccagcctgggtgacagaatgagaccctgtctcaaaaaaaaaagtaaaaattatttacccaatatttggcgaatcagtgagtgacagcagttgatgtgctagtgggttaaatcaaggaataa

SEQ ID NO: 209956 - DNA, 738 bp, Homo Sapiens
gggcctctgggtcagttacgcagctgtcttcaggtgactggacgtgttgatcagcgctcgctgggatttggctgacgtggccccagccccgcctccctccccaccccacaatggcagaagaaactggacagagtaaattagctgcagccaagaaaaagttcaaagaatattggcagagaaaccgccctggtgttccagcagcagcgaagaggaacacgaaagcaaatggcagtagccctgagacggccgcttctggtggttgccactcatctgaggctgtgagtcttgcctggacaggcttttggggacagggggctcaaggagcagtagagggcaatcgttaagattgtggatggactgttgggtactggtgaaggattctggatttggccgggcacagtggctcacgcctgtaatccccacacttcggtataccgaggcaggtggatcacaaggtcaggagatcgagaccatccaggcaaacacggtgaaatactaaaaaatacaaaaaaaaaagccgggcgtggtgctgggcgcctgcagtcccagctgctccggagtctgagggaggagaatggcgtgaacctaggaggcggagcttgcagtgagccaagatcacgccactgcactccagcctggaaggcagagagagactccgtttcaaaaaagaaaagaattctgggtttgaatcctgcctctccgtctgctagggatatgatttagggcaagttgcttgag

SEQ ID NO: 209957 - DNA, 547 bp, Homo Sapiens; identical to SEQ ID NO: 52517

SEQ ID NO: 209958 - DNA, 853 bp, Homo Sapiens; identical to SEQ ID NO: 53712

SEQ ID NO: 209959 - DNA, 595 bp, Homo Sapiens
taaaacatggttttaaataaaaaccaagtaacaaatgtatctccagagtatttaatatcatgagacatgtttacagtgtgctgtttaatagaataaaaatcatgatactctttaatacctgtacatctccatggatggaaaccttcatagtaagattgttttttcttttccttttttttctcatacttctattttttttattatcacagcaaggtgtgagaatttttttcttatacttgaaaaatgcttttctgtgattgctaaagtctctgaaatgagtaagtattaatttacaaaatacatttcagccattaattattatttagaaaaaaatacatgtatagaaagaaagaagagattgtaaaagaccagcaatggttgtgttcttctcctctgccctggtgtaacaactctggcccttgtaggtctctgccttttgtggagatgtttataataagccctcttagcctcatgcccgtcatacattcaggccgtaaagcttatcaaatagccatcctgttatgatttagctttccaggtacttggtctgcagaaagagtatatcttagcaggaggtcccacatatgtgttcttt

SEQ ID NO: 209960 - DNA, 650 bp, Homo Sapiens
ctgaaaccgcctagaaagtagattcatttcccagaagcttttaaaaaggaactctggagccaaatgaaattgggttgtgagtttaatgaaaatcaggcagaaggccccaaaaaagcctaactgagcctgtttcttcctcttccttcctgtgttttcaaggaaggatacctatgtgaaataatttggagggtattttttatagactaaggtttgtgttctcttagcccagagacacagagaaagttaaagatggaaggtacataggcgcagaagagttcaaacttcattacagctttgtcttagtgatgcttcctccctcctctcatcactttctctgaaatagacaaaattggtcacaatataagacagtgtttattgatgcctgctaggtttcatactcattatcttctgaaactttatagcaaatagggagcaaataatctgtcatttattaaatggaaaaataaaagatgaagaaaaaagaaaaatgaaggcttagagcaatgtgtaaattgcagctaacaggagacaaagttatgaagcatgaaatgccaattctctccatctttcccttcagcattgattccttccttacatattgtagttaaaaaaaaaaaatcagctatcacaaacaagttctgtgtgaccta

SEQ ID NO: 209961 - DNA, 726 bp, Homo Sapiens; identical to SEQ ID NO: 53690
  misc_feature (151)..(151): n is a, c, g, or t
  misc_feature (154)..(154): n is a, c, g, or t
  misc_feature (595)..(595): n is a, c, g, or t
  misc_feature (661)..(661): n is a, c, g, or t
  misc_feature (692)..(692): n is a, c, g, or t
  misc_feature (706)..(706): n is a, c, g, or t
  misc_feature (715)..(715): n is a, c, g, or t

SEQ ID NO: 209962 - DNA, 582 bp, Homo Sapiens; identical to SEQ ID NO: 55668

SEQ ID NO: 209963 - DNA, 241 bp, Homo Sapiens
  misc_feature (183)..(183): n is a, c, g, or t
  misc_feature (203)..(203): n is a, c, g, or t
  misc_feature (211)..(211): n is a, c, g, or t
actttaatgacactatgttagtaacttctgattacccactaccatttgacctgccaaaaaaaaaaaaaactgttttttaatgcagtctctttgaaggtcagtgaagcaaagcgcaataaaatgaggtctgcctattgttactttgtcgagtccataagactttctatgtaggaaagtcctgtnttttgcggataggccgtttnactttctnttttttcccaatcttttctttcttgtgcat

SEQ ID NO: 209964 - DNA, 578 bp, Homo Sapiens; identical to SEQ ID NO: 49225
  misc_feature (554)..(554): n is a, c, g, or t

SEQ ID NO: 209965 - DNA, 520 bp, Homo Sapiens; identical to SEQ ID NO: 55702

SEQ ID NO: 209966 - DNA, 510 bp, Homo Sapiens; identical to SEQ ID NO: 48269

SEQ ID NO: 209967 - DNA, 568 bp, Homo Sapiens; identical to SEQ ID NO: 58354

SEQ ID NO: 209968 - DNA, 760 bp, Homo Sapiens
aacaaaacaaaacaaacaaatgaaaaacgtttaaaaagaagaagaagaaaaaaaacaagaacaagcagcaacagctgttttgttggggctatagatttaagttaggcatagtcaatttcagaataactaagagtggaatatatgcatatggtgaaattataaccttgcccttttttatttgccctctgcgatccacctgctttttagaagtctgccgagtgagaaggccacagtatctcatgctgtttgcattacagaactgcagcttttctactctgaaaaggcctgggagcagaatggctggcctgctgtgagcaggagaggagattctaagaaggatagtcccccctacaacatactgtcatactgctgggttttcatgggtaggaaagcttgtcctgaccccagcagcaaagaggtggcaggtcgctaatgaatatatgctttataatgtccttcttcattgctgagagggcagccttagagctgtggatttctgcatcccccctgagtctgacccatggacacctgtttcattcactttagcatcacagtgacctttgtatgctctgttcagtctgtgtcaggcagtatgcttgtcctgaagagaggtttggctatccccaccccaccccaccccaccctgttccttttttatcaggaggacttcagagccaggcctgcagcattttgtttgaaaacacaatcagctctgacagttagacatgcacacagacgccatagctggattggaaacatt

SEQ ID NO: 209969 - DNA, 700 bp, Homo Sapiens; identical to SEQ ID NO: 50187

SEQ ID NO: 209970 - DNA, 464 bp, Homo Sapiens
gtttgggcgttgattctagggtcagggccctcactcacactgctggaaggttaaagtcgacttcacgctagtttaaggaaatatctgacgctgataaccatgtcccaagcactgctctaagttcccaatgtgtccggaattggtgggttcttggtctcactgacttcaagaatgaagccacagaccctcgcgttttagactatgctaaaaacagcctcaggaccttcagcactgatcaacaatcctgggcatgggctgaccgacagttttcacccagagagtgaagatcatgggggagccatcttaaattccgcccagcgcaggctcccaggaatcctaatgtcacgatctcactgcagccaatgtgacaaacacagcagtaattaagtctagagagctaaacatacctcaaaaagaattgtctcttggtatgagtggaatggaataaaatacatggaaacccc

SEQ ID NO: 209971 - DNA, 447 bp, Homo Sapiens
tacatgaaagaagtcatactggagagaaaccctatgaatgtaatgaatgtgggaaggcatttagcagtggctcagaccttattcgacatcagagaagtcattcttcagagaaaccctatgaatgtagtaaatgtgggaaggcatatagtcggagttcatccctgattcgacatcagaatacacattctgaagaaaaagcctaaggttgttttaaatctataaaatcaacgaatgaggctatcaaacatatggcaaatatgtatttgtctataatgtaaattttgtgtatatgggaccatttgatgatatgtcccactttgaaagccaaagagcaaaagtcattggtgattttgacctcaggatttgaaattaactgaaggaaactcagaagtttggtcagtcattgtgaatgaagatcatttttcatttgataagaattactggctg

SEQ ID NO: 209972 - DNA, 738 bp, Homo Sapiens
  misc_feature (664)..(664): n is a, c, g, or t
cgaattcggtcattattggcccggggaagaaaaaaaaggcgagttgagagacactgaggatagacagaaagagtagcaaccagcaataatcctataattactaatgctggatgcaaaaagatagtgggatagtatattttaaaattctttggggaaaataattttgtacttaagagttcaatacctgcccaaattataaaactgacattttttagacatgcagtactcatgataagcataattactagacgaaaagaaacaatattttcgttcaaaaccattagggagaaagaaaaatggaacatagaaaattcagtaaaggcagcatatagctggaaaagaaaatacagaagctataagaaaacatgagaaatagaaatacaatgtagaatggttgcattcacttattaaagggtagcctctcaaatcagtttgaaaaatgtttgctgtttacaaggagcacataaaacatagactagaaggttgagaaaaagattaatcaggcaaataaaaagtagtaggcatagcaagagaattcaaagcaaaaactcattcaattaaaagaaacgaagagatatttcattatcatcttggtaaattgttttatagatatgaattcacttagcaatatagctttgacataaagagaagaaatctaataatntttttaatgtgataaaaaacaagatcatagtgggagattttagcacacatctttcagaagttgacagaacaaag

SEQ ID NO: 209973 - DNA, 610 bp, Homo Sapiens
gggaagtgccagaagcatgtgcctggttgtgacaaccaaaaacagtctctaaacattgccagatgttacttaggggatgagaaaggggggatgaaggggaataaaataacacctggttgggaaccagctgagttagagccatctagtccctgggaactctcaaaactgaccagccaggataatcttccaggtcaggaccctacactgaggagaatcaaaattaagcaggacgagggcaacagatgcccttgttttccttgaaaagagaaagccaagacaaaagtaaggcagtgaataaagtcaataaatctctggactaggcgctgtggctcacacccataatcccaacactttgggaggcctaggtgggaggattgcttgagtccaggatttcaaaccagcctgggcaacatagcgagacgttgtctctccaaaaaataaaaaaattagccaggcttggtggcatacacctgtggtcccagttactcaggaggctgaggtgagaggattgctgggaggtcaaggctgcagtgagccatgattgctccactgcactctagccagggtaatagagtgagaccctgtctcaaaaaaaaaaaaaaaaaattta

SEQ ID NO: 209974 - DNA, 583 bp, Homo Sapiens; identical to SEQ ID NO: 49900

SEQ ID NO: 209975 - DNA, 648 bp, Homo Sapiens
taggggattctttctttcttgaaccatgaatgttattttagctgaagaattcttggggttttataagggtccaccagtatgcatagtactttttcttctagatgctaaatcaatttgattaataaaagagtaggaatgtaaccacattggaaatatgaagtcatacttttttatgagttatttaattttttagtaaatttgttttagaatgggcagtgagttgaataatttgggatattttaaatgttattttcaaatttagtgaatttgagattctcaactctgttgtccatatgttaaaatatttaaaaatacctcagtgaagcacaaaattaataactgtgctcacattgaaaaaaatggcccaggcgcagcggcacatgcttgtaatatcagcacgttgggaagctgaggcgggtggatcatttgaggtcaggagttcaagaccagcctggccaacatggcgaaaccccatctctactaaaaatacaaaaattaacaaggcatggtggcgcgtgcctgtagtcccagctactcgagaggctgaggcaggagaatcacttgaacccgggaggcggaggtttcagtgagccaagatcacgccactgcactccagcctgggcaacagagggagactccatctcaaaa

SEQ ID NO: 209976 - DNA, 583 bp, Homo Sapiens
gagggagaatgacttgaccctcaagaaacttaactgctacctttaaaaggttataatgaagctgggcacagtggtacacacctgtagtcccagctactcaggaggctgaggcaggaggaccccttgagccgaggagttcgaggctctgtctcttaaaacaaaaaaagttataaaaatattcagactggagggttcctaacttttaatacttaagcagggtctttaccacagagttaaatttaaaattctgtttagaatggtaacaaatttaattatgtacaaaacagcatcactttagtgttaggatcagtgttactcaaagtgttgtaatgttaataacaagcatttaaatcacattgtttgaaaactgggatctacaaaaaatatgattccaataattaactttttaattatgggaaaggcaagggaatgttcagtgaatgtaaaaaaaatatactactgagcaaacaaattgttttaatgaattttgattttctgttttaattttttggtacattgactcttcttgacatggcactttgctattaattaaaaaaaattaaaccccaaagacaaattaatt

SEQ ID NO: 209977 - DNA, 563 bp, Homo Sapiens; identical to SEQ ID NO: 48688
  misc_feature (410)..(410): n is a, c, g, or t

SEQ ID NO: 209978 - DNA, 520 bp, Homo Sapiens
  misc_feature (468)..(468): n is a, c, g, or t
  misc_feature (498)..(498): n is a, c, g, or t
gcaccactgtgagctgacctgagtcaaaactgattatcacctagcctggtggatcacagtggcgtttggggtccccaaaatgagtcaattctggaccaaagtctagtatccttgagaagcctgggtacattttctctgttgcatagttaccctgctaagtgactgtagatccctttggggaaagctaagaggaaagtttacagtgtatctttttggcagtataataggatatttccccaaggaaaattggcctgggaagtggatggctctatttgatgaacaaggccaggcctctattcaccagtcctgcactggtgaatagacctttggcaagactccattggaagaaaaaaagcatgcttaaaaatcagtaagctttggccacgtgcagtggctcacgcctgtaatcccagtactttgggaggccgagttgggaggatcatctgagccaaggaattcaagaacagnctggccagcatgggaagaacccatctcatntaggaaaaaaaaaaaaaaaaaa

SEQ ID NO: 209979 - DNA, 511 bp, Homo Sapiens
ttttttttttttttttttggttttaaagttctcttaggtataacttacataaacgttaataaatcttagggtacaccttggtgaattttgtatatgtctatacccaccacggtctccatcaaaatattttatcgtcccagaaatttcccttgggccccacctcatcctcaaaggttatcactattctgatgtctatcaccatagatttgtttttcctgttcatgtaaatggaaccataaacagccctcttgtgtctgttttcttcacttaatatagtgtcattgagatttatctatgttgtattatcagtagtttatgctttttaattgctgtgtaatagtccatagtctgaatataccacaatttaaaaattctattctgtttacaaacatttgagttctgtcctccaggttcatccatgttatcacaaatgacagaatttccttcctcatcaaggctgaatagtattccattgtgtagatataccacattttctttatccattcatcca

SEQ ID NO: 209980 - DNA, 455 bp, Homo Sapiens; identical to SEQ ID NO: 57868

SEQ ID NO: 209981 - DNA, 474 bp, Homo Sapiens
ttttttttttttttttttggtatatctaggctacacagttatacatggtgtatatctatgagtgttttcatgttgttgaaaatctccgaaatatattgattgaaaataatctgcatgtaagtggacccatgcagttcaagctcatgttgttcaagggtcaactgagtttcattcgcaaatggaaatgatgtaaaagctaccatgagtctatcaagaaaaacaagacctggaagaatatacagcacatctcctaggcagcaagggttatctccattggatgaggtaacaggggcttctgtttgccataaactctccaggttgcagcccatgacctgactccgccccagggaatgtgctgagttgcaggaaagggtgaaaactgctaggcagcctcataaacacagcattcacagcaaaacagtgaccaaaacacagatactttcgctcaaatactggcagcattccccctcgtgc

SEQ ID NO: 209982 - DNA, 522 bp, Homo Sapiens
ttttttttttttttttttggtgagacacaatgaacttttatttcttactctaaaaagaaatccaacacagatgaagtagtgaccttctatcaacccagtctggaataagcagcctccaaggtcaccttggcagggatagagaagcctgaggatgtttgtaaaggctagacctgaaagtggcttatatcacttttgctcacactccattggctagaactcaatcacatgggcacactcttaactgcaagggttactgggaaatagacttcttatttgcaaggaaatggaaccagtgtgataaacacagcactgcctctgccacacccttcaaatgccacttctatggagcttcttgcctgtgtagagaatctcatggaaaacctgggtactaacgttctttcatagtaagagcatgggtttcatttttgagcacacttttgaatgttcttcatacagagagtatttttctactggggactaaaaaaacatctaaagacgttgggtgaactgaagacctttaca

SEQ ID NO: 209983 - DNA, 379 bp, Homo Sapiens
ttttttttttttttttttaaagcattctaagaatttattttgagtaggaaaaaaaatcaatgcagagaattggatgcttttttctcccttgtaaagttgcatttgtatatgtcaaagagattgttaactagcctcagagatctaaaaattcaagaatgtgagaaagccacctgcaatggcactagttgcttgaattctcaaagcgggtgattcacaggaactcacttggatgctgctgccaacgtcatgtctgccaaatgcctgcgcatcttgctacagctgtactggaattcttgttttcttctgacttttaaatctctccttattgaatcccattgggtgaatccaagctagatatctgcttgaaagtgattccaag

SEQ ID NO: 209984 - DNA, 642 bp, Homo Sapiens
ttttttttttttttttttcagataaacagtatgtggtttattcacacaatgaaatattatacaaccatgagaatgaaaatccatgtacaaatacatgcaacaaaaatctcacaaacataatattggtgaaaagaaaccagatacgaagaatgcataattccatttatatatctccccaaaccagacagaactaatctatgcgcttagaactcaggatagtggtttcccttggagaggtagttaactggaagggaatctgacggggggcttctggggtgccgattgtatgcacgtgctccacttgtgaaaaatcattgatgtgtttctatagttacactttaataaaaagttaaacaaaatgatttgcctctgtctggatactcgactcaaaactgaaaaaaatgtctcctttgctctcagcctctcactttggctacactctcgtactggcattctcagctcctgccacttgcaaatggtgagggtgggaagagaatccctctccctgccatgcaggctaaactagatttgctacaggttgggctgctaaagaaggtggtctaccaaactgaaattcaagtcttatctctgcttcctgccagtgcactcaagtgctgtcttgctctctctaaccccctcttt

SEQ ID NO: 209985 - DNA, 608 bp, Homo Sapiens
  misc_feature (602)..(602): n is a, c, g, or t
ttctttttttttttttttgagacagagtctcgttctgttgcccaggctggagtgcagtggcacaatctcagctcactgcagcctccgcctcctggttcaagcaattctcctgtgtcagcctcctgagtagctgggattacaggcacatgccacaatgtctggttaatttttgtattttttgtagagacagggtttcaccatgttggccaggctggtcttgaactcctgtccctgcccgcctcggcctcccaaagtgccgggattacgggtgtgagtcactgcacccagcctaagttgctcttttgaatcacctaattgcttgtagaggagcaatggaggggcacacagaggggtaagcacagagaacattccagaaaatgcaggaccctttctctgaggcacagctatgtaacaggcaaccccacccagggagaagccagtacagaggccccagctagagtctgaatgaggacgatccctctcccctgtcctggggagcctggggtcaccttgcagaacaagatggtcccaggactctgactctgcacttctggctgtagtgagcctctttctacgtgtgggtgcttctgctgggctcctgngtgttg

SEQ ID NO: 209986 - DNA, 686 bp, Homo Sapiens
ttttttttttttttttttccaaatgcagaaaaaaagtctttattctcataataaaaataagtctgttctgtattttacaatatatttcaaatatttccactatgaagcattcattagtcccacatggtcaagaagtatacaaccttttccaaagacagagctgccgggagtgtgtttaggacacacacctcgtacagccgcacttcaccactttctcaacctcgtccacaaaggaggagccgtcagtgcattcgaaagagtatttccgccgcttgctcctcagcggtccacagcactgccctcctgcacacccacctctgcactctaatcgggacaccttcttggttgtttggcaagcagcatagccctgctgcttttggtaataatctcttatcctttcccctcgacaagagatttctcgatcacagctgtcccccgtgtatccactgctgcattcacagtagggctgccccagacctgaaagcctgcacttcccatgcttgcacttgatcgcctggcatgggttaaacagatcctcctcttcatcacagaggacacctccatggccctccaagcacttacagctgtaggagaacgcattgatgggcaagcaggtgccatgtacgcatttatttccaaggcaagggtcattggtccgttggtcacagaggggccccatccatcct

SEQ ID NO: 209987 - DNA, 647 bp, Homo Sapiens
  misc_feature (593)..(593): n is a, c, g, or t
ttttttttttttttttttacaactccttaaaaaggtaaaagccatcgcttgagccagggaggttgatgctgcagtgagtcatgattgcactactgtactccagcctaggtgacagagccaggccctgtcttaaagaggaaaaaccattcctagctcacggggccacatgccatagtttgctgacccctgaattcaacctttctgcttttctgcaagctgcctctctctcgaaatgttttgacatctagcttgctgacacctttgattcaagcctggcgcagcgggactggctgagctcacctgagtcttaaaggggccgcccacagagccaggcagcgactacagatccctcttatactccctcactgctgctgggaagagctggagggaaacaggaagcagtaatctcactgcaggaaggggcaactgtagacatccgggaagcatcccgacagtcccgttcctttcggggaagccgctgaaatctcctttcccttccctagatgggccctagtggacctaagcatctgggctctcagcaggacgatgtgtctcagaaccaccacctgagccagacacttgagcaatttcanacctaaacacaatcatgtgtttcagcagcagacactcaacaatgcaggtgggcc

SEQ ID NO: 209988 - DNA, 713 bp, Homo Sapiens
ttttttttttttttttttaatgcaaacatatttttattaaagaatgaatgcatttatgctaaagaatagcttacatatgttgtaaagcaacaagcatatcttcaagaagtgagtcctcctcaatatgactccatgcttattctacatgcctgaaaactgggcccacacacaggggcacacgtacacgcacacaaacgcagatacggacacacagatatgcagaccgaaatgctgacaccatcgctctctagattggattagctctcatttaaggcttcttaggtgccgcagtgcccctaatattaccaggattgaaaacagacttttaggaaggagcagcattacttcgaaaagtagtcatctgctcttgtcctccaatgtgtgtattttaacaaatacaatttcattctatgttgactctgtgtttataatatttaaagaaccatgaaattaagaaatctcaggattgttttagtgagaacttcccattcaaaataaaaaaaaaaaagggcaattctgaccctaagatatcatcaattttatgataacgcaataagatttccctttaggttaagatgacatgggtctctagacaagccaagtttatctaactcattctgtatctaagtgcaatgctgagtgatgggggcaaggtttcctcggtgatacaaatcagatttgaagcttgcatcaagatgcatcagacaggacca

SEQ ID NO: 209989 - DNA, 653 bp, Homo Sapiens
tttttttttgttttatttatttaatttttggagacagggtcttgttctgtcacccagactggagtgcactggtatgatcatagctcactgtaacctcagacttctgaggtcaagtgatcgtcctgcctcagccttctgagtagctaggactccaggtgtgcatcaccattcccagctaattttatttatttatttatttgtttgtttgtttgtttgtttttgtagagacagggtctcactatattgctcaagctggtcttgaactcctgggctcaaacaatcctcccaccttggcctcctaaagtcctgggatcacaagcatgagccaccatgcccaaccttttctagtttttaaattttcatacatatctattagatgtttatagtgtaaggttgaactccattctttgcttctctgttgctggtaaatttttgggtatatttttactaattttgcacattcttttacatattggtaaaggaacagtctgtgatctggatttattcagatccttattcagaattaccaattgttttattaatcattttatcttaaatgtgtctctacttactagtgatttgcagtatattccaagttagtttgtaaaacatttcacaatagactaatttcttgctttcctgtgaaattgtct

SEQ ID NO: 209990 - DNA, 733 bp, Homo Sapiens
ttttttttttttttttttgggcagaagagcattcttattttatttataatgaaatacgaccacaaggttacatagtagtaaattcacagtagtgatttttttgtttttcagtaacaaatccgtaaatcacaaacactacccagaaatacttaaatcactttacaatcgcagggtctctgctgcaggactatttaaataaatatgctaacatttctgtgctactgtaagtaacctatcactttttaaaaataaagcccaatttttaagttaccttaagaaatatctagtaaggcttccagggtagtgaagtttgagcagtaattttcttagagcttgacctttgtttgtttgtttcttgctgttttcagagtcctaaagcaagaaagagtttaatggacttgcctgcaggacagcaggctccccagaagacagtgctgtgctaaagccatttactctagcgggagaagccagtgtcagtgagggaaaggaataaagcaggggagggaaaagtcactggtttagagcgacctctcaaaacacagggttattaagtcatctctcaaacacaggggactgcagaaacacagacaccctcacacactcagctatatacacaatgacacgtatctgctgagctacacacctgctacagataacacagatgttaagatgtctgacatataaatgtgctatccgtctggtaatacactcagagaaatgctcacatatatgg

SEQ ID NO: 209991 - DNA, 668 bp, Homo Sapiens
  misc_feature (634)..(634): n is a, c, g, or t
ttttttttttttttttttggattaaagtcttcacgtttattaaggagtccatgacaatgctacatcttttacagataatgagtatggttagggttgtcttcacatttgaaaccctttcatttaaccagagacattacaggggagacactctataaaaagtatgtgctttaaatattcctgcttatgttatgttcatctttatgccaatatttttatgctgtccaattcatcagattttctttgttgtttagtgatttccacgccccccacccccaaatactagccttcccaagtttgtggaaacagtgtactattttgttatagaaactaaagaagatcaatcaggggtggtggtccatgcctgtagtcccagcttctcaggggattgaagcaagaggatcacttaggcccaggagttcgaggctatagggcactgtaactgcatctgtgaataagcaatccagcctgggcaacaccgagagaccccatctcaaaaacaaaacaaaacaaaatgctgtgcgcatggctcaggcctgtaatcccagcactttggaaggctgaggagggagaatcgcttgagcccaggagtttgagaccaatttgggcaacatagtgagacccatctctacaacanaaatttagccaggcgtgttgttgcatgcctatag

SEQ ID NO: 209992 - DNA, 727 bp, Homo Sapiens; identical to SEQ ID NO: 52642
  misc_feature (559)..(559): n is a, c, g, or t

SEQ ID NO: 209993 - DNA, 578 bp, Homo Sapiens; identical to SEQ ID NO: 52968

SEQ ID NO: 209994 - DNA, 721 bp, Homo Sapiens
  misc_feature (674)..(674): n is a, c, g, or t
ttttttttttttttttttgctgaaagtggttactttattggttgggaaagggagaagctgtggtcagcccaagagggaatacagagtcccgaaaaaggggagggcaggtgggctggaaccagatgcagggccaggcagaaactttctctcctcactgctcagcctggtggtggctggagctcagaaattgggagtgacacaggacaccttcccacagccattgcggcagcatttcatctggccaggacactggctgtccacctggcactggtcccgacagaggccgagctggggaaagttaatgttcacctgggggcaggaaccctccttatctgggtagaaaaaggagtaagggtaagtgggcagaggcgatacagggagattaacttgtacctgcagcatggcccccccactgcccctcactgggcttcacatacagcagagctgcctgcctgagtccatcttgggcacctgagctgctctcaggaggcccaggaagatcacctgcaaatccctcctcctgctcccaaatggaatcacaggacctcagcttgagtcccaagtgggccttcgtggcctagggccagaaatctcccagagcctccgtgtctttaggtgccagtggaacagtgctaattacaacatagggttgttgtgaaagcagtgggaaacanacatatattatttctccctgaaatatcaaactactctgtagttatga

SEQ ID NO: 209995 - DNA, 666 bp, Homo Sapiens
ttttttttttttttttgtggtatgcattccaaaacaaatttatttgcctgtggaggtgggggtgtaatttaaaaggccatgaaaactctcgaaagagaaaatattacttttcagcaacggcaagttctggtagtttttttttttttctcaagatactttcgctccatttatattgcctctcaatatgaaaatacgcattgggttgaacaaaaaactgcaccaaaacatacttcgtgctcatttccctaacctcctaagaggaaattccttttatgttcttctagaatatttccatccgtgtacaagcactttcttttttagcccaaagtgcccttgaatgtcgctgacgctcattaccttttagacaattgagacaaattctggaggttcccatctcgaagatttacgtaaaggccacgcccactgttcttaaacgcaccctaaaggggctcgaagtgcggcgaggttggccattcctccgcttcgaaggggacccacggccgcccaaggaccaggggtggagttgaacatcccgcctctccaggggagttatctgcgctcgcgcaccactggccggctccgcccttgccggaagtggccgagcgaggccggtctccgccgggcttcttccggtctgggacgcgggggagtcatcgtctccggaaa

SEQ ID NO: 209996 - DNA, 698 bp, Homo Sapiens
  misc_feature (647)..(647): n is a, c, g, or t
  misc_feature (685)..(686): n is a, c, g, or t
ttttttttttttttttttccaagaattaaccaagagaaatgccttttaatgagtgtcacatgtgagataactaacttgacataatagtaccaacaagaacagtgagttaatttttcataacacaaaggtctatcatttcctttgctttggatcacttgtttttcttttttatttccttaacaatatttcctatcaagcttcaaagtgtgaaatcataacatagtttggttctaaacatagcagaaaattctccaaataacagaatagctttttgctacttttagaaatcaaccaaaatataaacacttcagtcaacattggatcaaaaaacattattattgattaaattattgttttaacatcacttttctgcttatatctgaagattaatttattcttcatacagaatatgaacagattttatgattttctaaattaatttttacaaatccaatttctaagagagaaatgatataaaagcataccaagaaatgagtaaaatgtactaggtcatatgactttaagtgaaaagagcagaatacaaaataatatatacactaaagctacatctatataaaacattgaactctaatcacaaaaatgaatatactagttatgtcaagatggtaaattatggatgtttttanaaatgtatccagtatttctacataattctttccattannatagaatatttc

SEQ ID NO: 209997 - DNA, 644 bp, Homo Sapiens
ttttttttttttttttttcagagtttctcactgatttaagttaaatattctagtctttagagaatgggtcacatgactcaggaattgccaacagcctgttttcacccagcggcttcctggtttaccccctttaggagatgattaatggaaattgagaatgtgtctcataaattactttttttttttttaaagcagcacagttttaggaacttttcgagacagaacagctcagccagcctagacttccacttgtcctccctcctcccactcctgccaattaacaccagtcaccagaggcaagaaccgcctagatcagaagcgaccccaggaaccaggcttcagcacccctgatcttcatcaatattttctcaacttgcctaatcataggactgagctataattctttaaaaaaaaaaaaaaaacaaaaccccaaccacacacacacaaacagagacagggtctcgctatgttgctcaggctggtctggaactcctggcctcaagccatcctcccattcgggcctcccaaagtactgggattacaggcctgagccaccgcatccagccctaggctggaattcttaaccccactcctgctgctttttgcaggcctcacttctgactcactgggtctaagtttccggg

SEQ ID NO: 209998 - DNA, 677 bp, Homo Sapiens
  misc_feature (649)..(649): n is a, c, g, or t
  misc_feature (651)..(651): n is a, c, g, or t
ttttttttttttttttttaaactttctttttaatagagccttgcattggtcagttcgaaaattaaattaagtattataaacccttaataatagcattcgagaggcaagagcagctccagcttgggagagaacatttgcaaatcgtggtggccatggcttaatgccatcactggcgtgtgcgtgcattcatgctggaggctgctacataaaggaaaagaaaggaaccaacagaattcagggtgtctaaaagtttcatctagtgcactgactggaggcgctacagtttaatacagctgaggttcaaggtccctcacacatccttcatccaggaaggatgcaccacacattcaaatataatcccatggtacgccctgatggactggccacaaaatgcactcaaatgcagcagagaactacgagattgtcagcaagcagtgctccagaaattgtttttaagtcatgtctagttttaaatctttggaataaaactgatttttaataccctccaactaacatacatacaattgcctccggcaaatggacagattttgtgtgtgtgtgcgcgtgtgtgttaacgggtgttctttctttttttttcattttgtattactttgtttttttttttgtttttgtttttgttttttttggncnaaaaaaaacctcgtgccgaattcttg

SEQ ID NO: 209999 - DNA, 700 bp, Homo Sapiens
ttttttttttttttttttgtgagaaaattacaatatttatttacacatttacatatagcacaatgtattggtcaagtactagtaacaggcaattaacaaactaataagaaaatcagcattttaacaatttaaacgcttcatgacagggtaattcatgtccaacatatcaaaaacatatttatagataactttagaaagaaaatacatactttttttgataatcacaagtagcaatgagattttctatattattttcagtctcactttagaaatgttttaattgtctaaatttaatcaattcatcgattaaaggaaagacaataaaatagtaaaattacatgtgtttatatataagtgtgtgtgtttcaaataacaaaacgcaggttgtaaactaaaatcactggaaggcaaattgaagacaaaagtgatgctggtttaagttgtttggttcttcacataaattccagtttccaagttgtgttttacaactctagtaatatccagatagataattcaacctgcaacttttttcttctattcctgtttttctcttgttcacactgtaatttttgtctttttactgatactgattaaataaaataggacttccagtcttaatacgtctcccaggagaagtgaaatgagtttaactaggtattgagtatcattttccattttacttttctatatttatctgatc

SEQ ID NO: 210000 - DNA, 747 bp, Homo Sapiens
ttttttttttttttttttcaccataacatcatatttattggccctttatcaagctatgtacatggtgagacaggtcaggacaggcctccatttgtctcaggggcaaagcattgtgggcaaagaagacagagcagctggagctgatggggctccagttaaggcaatgaaggctttgccacaccatagagggctcaagggaagggtcctaaaagaccagccctgagcagcctggtgggaacagcctcttggccttctgcccagctcctggctgaagctgtgatctgtgtagctgtgactgcagggcttgagaatggcggagggcttaggcagtttggacagggtgaatcgggattagcgtgtaaacccagccacctccctgaaaaacagtctgaatctcccttttccatctgtctgatgcgtatccaatcttttggcttctctgggccacgttggaagaagaattgtgttgggccacatgtaaaatccactagcactaacgatagccgatgagctaaaaaaaaaaaaaaaatagcaaaaagaaactcataatgttttaagaaagtttgcgaatttgcgttgggccgcattcaaagccatcctgggccgcatgcgggcctcgggttggataagcttggtctaatgggaatacgaagacagccctggctcccactgtgagaacccttcagtccaagcatactggtcctttccaagctcactgttctcaccacacggccccactccggtttc

SEQ ID NO: 210001 - DNA, 603 bp, Homo Sapiens
ttttttttttttttttttgctgtttttcatcattcagctagaaagtgagaagttttatcttccatagtccttttaaatcttatgttagaactagcaggacgtaggtggaaagatgaagaaataagcttgtctagactaaagaaaggaaagcaggttataaaagccatagtagccagtccagttcattctgcagatggccccataccaatcgctgttagagtttgccacctccactttcccactgagaactgcagcaattttaaaggatatgagaaagccaagactcaagagatgagaagacccccttggcgaaatatagtgtactcttcactgccactgccaccaccaaatgggtttttagagctttgaaacacaatctttgtaaattaatcaaaacctccctgtgacccacctgccttctccccatacccaaatttgaccactactggcctaaaaggcaagatgggcttcgatatagaaggactgcaagacagtagaaagggctgccacggaggtgacagtagctccttcctctccaacatgtgatgctacacatctctgtggataatctaagttggacttttgactctaaaacagctataa

SEQ ID NO: 210002 - DNA, 693 bp, Homo Sapiens
ttttttttttttttttttgctcatttggttttacttatttgtaccatgtgaaactgaacaacactgtgcgcaggaggggcccagcggccgcttcccttcttggtttctttctccagctgaagtgcacgttggaaggaatcagaccaggttcccaggcttcctatctttgcctttgatgggtactattgtgctctctgcattgttctgctgaaactgcagtctgctgcccctgtgtgcgttgctgcgctggtgatggaggaaagaggcgcctgggtggtggcccatcacctcgctgtatgtggggggtggcccctccatcctcccgttactgctgcaggtgcttgcactgatgcccgagttgctgctgggtgggcatggacccccgctatacatagcaatgtctattaaatcactgtcaaatatggttcggttgggtggggccctcacggactctcggttgagttccatctgctgttcagggtcccggagctgcagggtgcagggcccctggtaaggaggtggctcttcaccgtcggacagggagatggtgggaggaagatcaatctcgtgctgcacataggggtaggtgggctggaagcggctgaagcgatccctctggatgaaggacggcgctgtgaacctgtccctggaccgcggggcatgcatgatctccgaggcgcccagcgcggtgcg

SEQ ID NO: 210003 - DNA, 636 bp, Homo Sapiens
ttttttttttttttttttaagctttataaagtttatgtagttaataacgatgtcatcatgttagtcatgaagttacatctcagttcataaactgcaagacatctttgagtagagatccatctcattttccgtaactacacagtgatctactaaactgattttctgtaacttaagtaacccataactttaatagcactaaacattttttccaaatttttcacaattctgcaacacatttgcttatgcatctatatttctgcacttgtgctttttgagaacataactgactaggtgtagaattgtggcaaagggtaattatattcaaaatgctgacaggtaacaccacattgccctctaaaatggctttcctctaatttaccctctcaatatttgaaaatacggtttctcacacctgcgacaatactggatattatccaaacttcacattcacataaaatttctgctggtttgtgttggtggggatgaggacttttacaatctgcacttatctgatcattagtgaggttgagaacttcttctatttaaccattttaatttcttcatccaataaattttgttgacatgctctgcaagactgtgcaccttatccttgctgctttccaacagccctttttc

SEQ ID NO: 210004 - DNA, 706 bp, Homo Sapiens
  misc_feature (411)..(411): n is a, c, g, or t
  misc_feature (583)..(583): n is a, c, g, or t
ttttttttttttttttttaattaaaatatgtcactctgaaagctgtatggagaagggacagggagtgctaaaggagtgttccagggcaggatgaaagttacttgtactatgtcagatatggtgcaagaaacagagagacattgatggatttggagatagagtcaacatgagcttgtgaccagctcaggatggagggctgggaagagtcagaggtgcccctgcatttccagcatgtgtgagaacgactggggggcagtcacaggaagacaggaagaacagcccacctcattcatcgcttagtctacaaatagtcattagtatggaatggactgtggacacaggccctaaggatataggtttgcctcggaggcaaacgaagacatcccagggcttggggagctcacagcccanaggctgggggtggtgtgggggtcagatgtttgagaatcacctctcaaacaaatattaaattggacctacaacagcagctctagggaaaggttctcaaatgagtccgtacctatgcccgcatttctgttgggcaggtgacttgccattctgtgactggatgtgtatttcctgngctatcacagtctctttcagaggactggaagccccatggggccaggtcttgtttattgttgcactccccgtactttggatatagcaactgtcaatagatgttgagagaatgaatggagagcac

SEQ ID NO: 210005 - DNA, 618 bp, Homo Sapiens
ttttttttttttttttttggttaaaaaaaaagcatatatatatgtgtatatatacatatgtatatatgtacacaaacatataatacttgggaacaataaaatgcataggggtgtgggccttttcacattttaggaagaaaaggtgatccagatggctatctagaaaggcaatgattgagaagggcacccaacaacagcaataataaaaaaactacccctcaactcctttgcactggttctgtggcttccccaggacagacagagaaatagcctcctggtatgagacaggcccggtgggcacaggcagggctttgagcctcgtaggcatataaaggctaccggtgccaatagagggtctatattccaggcccaaatgccatcaaagcaaaaacaaaatggtgacatcaaaataaaaagagtgctttccacctccagggaacgtcaaagggagcttcaggctaagacaccaagtaccagcagagagggtgcttcaatgcttactgatataaccaaaggtgatgaaaaaaacacatcaaggcatcaaaagcaaggccaaaggagtttttaaaaaatcaaagctcatgaacaactgctaagggcttctaagaaagatgtgct

SEQ ID NO: 210006 - DNA, 757 bp, Homo Sapiens
ttttttttttttttttttataatgcaaaggtttttattcatctaaagaaggtaacataagaaaaatagttgagcaagaaagagataatattagaaggcagcaaatgacaatggacagacttaaacccaatgaggtcaataattacattaaacataatggactcagacactccaattacaagacaaatagtgcaggggggtaaaaataaataactaaataaataatcatgggctgtttacaaaagacataatttcagtagaaggtaaagaaaagttgaaagtaaaaggatagagaataccagacaaacattcatgaaagaccacatggagacgccatttagaaaaattacaggatatgagtctcctgagacatagagtacacgtagacagctcacaaggtctttttcccttttttcagagacagggtctgttgcccaggttgaaatgcaatggtgatatcataccttactgtaacctcaaactcctgggctggagcaattctcctgcctcagccttccgagtagctaggaccacaagcctgtgccgccacacctggctataatgtctcattttctcatttgctgtggtgtgaacaaggaaacaataccatgccatgtatttgacttgcagcaggcacacaacaaatgtcaggtgaattaagaaataaaccacttagtaatccaagccatatccacatttacatcttacagatgaggagcaacatccagacaagtaagtaaataattgattacatcatc

SEQ ID NO: 210007 - DNA, 614 bp, Homo Sapiens
ttttttttttttttttttaaaatcacacaaatatttcaagaataaatgcattccagagatacaaatcaggccaaaagaaacaaaaatcaatgaaattggcattacacttgtaaaaggccaaatggacacaagccctcgagggtctattgtgaagtgcttgggggcaagtggcctcaaagaaacttgggagtgagaggtttgcactgagcttgggaagggagccttgggaaaacaccacacttgtgaaatcagaaaaaaaaaaaaagcaagtgatggtgcttacagcccaggacgacttcctgctggtttaggtcagaaaaaaacctgagagagattcctaaaacaatgagggctgtaaggggactggtggaaaaaatccagtggaaatattttctcaggaaaggaaggagcaaagtcatggtaagttaaaatgtggtaccctaatgtagtagtaaatttaaggcctgtcgaggaaattttaacacttccaacaggtgactatatcaggaaggagaaaaccaagtgcttcctgcttcaccttctgctgcttttgggacttttctagagctagtagctaaggacaagaccctgaacccattttttcactgggagag

SEQ ID NO: 210008 - DNA, 632 bp, Homo Sapiens
ttttttttttttttttttcaacataaatactatggtttatttctagatggcaaggaaaatcacgtgtaagaggtttccatttaaaagaattccactattcatcaaaattttcatctattctcaagactgttgatttcaaactaggtttagagtagcaaagcatatgaattttacagtagaagacatgagaaggatataaaagtttgttttctgtattctttcaaaattcttattttgaaggccttctgggcatataagctattggaacttgtcatcacttaaactatttcctataaagatgaaaatcaggctaataaaaagtatttttagaaattaggctgaaaacctctaagtttggtaaaagacataaaactgcaaatttatgaattggagcaaattccaaagggaataaaacaaggaaactcatccccaacataatgaaatggctaaaaactaaagataaagaaaaataccttgaaatctgacagaaaaatgacacactacatacagggaaacaacaatttgaatgactgcagatttctcatcaggaaatacgtaagctaaaaggaaactgctgaacagaaaacaatgtcaactaaaaatactacaagcaaaaaacatcactgagaatg

SEQ ID NO: 210009 - DNA, 629 bp, Homo Sapiens
ttttttttttttttttttcagatttgaaccacacaatttattaacaagcatgatttgtggcctcgtttataaccagcccccaccccagcacttggtgcacattctccttaagcgcagaatttggcctcaaggtaatattttaggaataaataaaaagaggccgggcacggtggctcacacctgtaatcccagcactttgggaggccgaggtgggcggatcacgaggtcaggagttcgtgactagcctggccaacatagtgaatcaccgtctctaccaacaatacaaaaaaattacccgggcgtgatggcgggcgcctgtaatcccagctactcgggaggctgaggcaggagaatcgcttgaacccaggaggcagaggttgcagtgaaccgagatcgtgtcattgcactccagcctgggcaacaagagcaaaactctgtgtcaaaaaaaaaagaaagaaagaaagaaagagataaaatttccccttaggtctggaccttttgatacaagccgatgctcagcgggtgttgttgactgacaggtggatgaatggcccacgcttgccggcaggtgacacctccaggtgggtgctctgtgggaaggggagctgacagtcctgggggtcctgcct

SEQ ID NO: 210010 - DNA, 578 bp, Homo Sapiens
  misc_feature (536)..(536): n is a, c, g, or t
  misc_feature (568)..(568): n is a, c, g, or t
ttttttttttttttttttggtagcaacagagtctcgccatcctgccagactggtctcaaactcctgagttcacgtgatcccccacctcagtctcccaatatgccgggattacagacatgagccaccacgcccaactccagaagtgctcacttctaaactcctacaggaacttcaaccaatgtgcttcctatggcaacgggcacagtactcatggccacaatgatgacaacagtaatggctgtgaatatgtgttgagtgcgtacaacgtcctgggtgttggcatgagcactttatatgcactatctcatcagacctcagtaagagttcatgaggtgagtacaattttgtccccgttttactgataaggaaagaagcacagacaggctacacacctgccgaaggacagtgacagctctactagtctcgtctggagctttctaaatcttgtatagacatgtaacgtcatgattttcttgtgtcttgctttgcagatttaagcagctccagggtgagataaatacggctctcgtgccctnccctctctgaacctagcttgcaccttgctcanagcagcactc

SEQ ID NO: 210011 - DNA, 701 bp, Homo Sapiens
ttttttttttttttttttagttgacacatttgcttttttattttttagaatatagtctacatctggattaaaaaaagttttaaataaatttaagacatacaacaacagtggaacccttcatcattctatgtacaacacgatagaatgtcagttggttccatttcggttaagtccactttctcataataatgttattattttcactgagtggcaagctacgtacaagctggcgaaatgccagcttatacacactggggtgggggtggggacgggagtggcacgaaagggatggggtgggggtgccataggactactatacagtgtaacagaaaatcattaataaagtagtaccgattaccgacagacagtgctgtttgtgcgcttatcacaatggaatcgctgaagtttcagagcaaggaggagattcgaaatacttcacacagggccaatgttacaaaaagaaatagtgcaaacaggaaaactgatgcaatcctagcaacgcctgggcctccaccggcccaaccgcagggcggcgggaggctacgcgccccgccttccccagcacccagctccgggctgctttcccaagtgtggcaacccagcgccgcgccctggtatggccccttctcgggccctctcctccgaaaagaacagaaaagaaaccccaggaaaggcacaggctgaatgcagggcgtcagccc

SEQ ID NO: 210012 - DNA, 715 bp, Homo Sapiens
ttttttttttttttttttaatttgtattgctatttattaaaatattaatatttacataatttattgatataatattcaattgtttgataggtaattaatacattccgactcacccagcaagaacatttttgtggtgacaaggtaaagagtaggatgacaattggatgacccaaaacttagacctcagtaagtgaaaaacgtgttgttatcaatgctcctaacttgtatcattatctaacaagattttccaggcagtggcagctttagaatcctatcttctctcagtttccttttcctagtagctgccagttaggatgccaaccatccctgattttatgtaggatgatgatagccaggggcaaatgaggaagactcacagaaatctaggactaaatataagaattttaaaaatgggagatttttatggtaaagaatgtgaggtttgtagttttttaatctccacaggagaaatgaacaaatgattccatgtaagaacactggaagatactaaattccaccttgatattttccaggaatgtcagtcacatcctcagtcttggttgacttcctgaaagtgtcctctccagtcttgagggacctcctgctccaagaagcctgccctgatgtcccagccagagatggtcctctgaatttcccctggccttcacctggcttctctgggagcacatcacattcattgtatattatcactaat

SEQ ID NO: 210013 - DNA, 535 bp, Homo Sapiens
tttttttttttttttttaatgaaaatacaaggcatggagatgtggaaagacaccttgctttattactgttattattagttctatagtataattcatatatcacaaaaatcaccatttttaagcatatatttcagtgtcttttaccatattccaaaagttctgcaaccatcaccactacctaattccagaatattttcataatgccaaaaagcatgcctgtacctatgggcagtcactctccaattccccacttcttacagtctctgacaaccactaatctactttctctatatatagatgtacttgttctgggcacttaattcaacaaatggtcctgggacaactaaatatccacatgtaaaagaatcaagttagactccctcctcgcacataaaaattaactcaaaatggatcagagacctaaaggtaggtggtaaaattataaatcacttagaaatagtaaatctttgtaatgtgggataagcaaagttttcacaaatatgactgaaagcacaagcaacaaaaaacctcgtgc

SEQ ID NO: 210014 - DNA, 635 bp, Homo Sapiens
  misc_feature (506)..(506): n is a, c, g, or t
tttttttttttttttcttaatacgaactgtttaattgttataacaagatttgagaggcaggggtaggtaagtaagtcaccaactggcgataagtcaccaactgttaatatgtgtctgcaagtttcttgtttttcacaatcactagatttacatacaattataggttatggttctccatgtacacatacagtgaaagacattttccaaataccttttgatgtagaatggaacctgagacaaaaaaatcacttaagaaatcaaatctcatataatggaaatactttaaccacagcattcacacatttgactgtggattccaaatgcttatctaaacagaggcaacgcaattaaactgccttcactcaaaatggtgtcagaaggcaactaccctatttactagccactgataagttatgacaacactatttcatagcctgtcactatatttcttttaaccccccagcagtaggatttaggatttcctcaacactaagggcttatctcanatgctttagtgcacgaacagtaaaaaatcagagttgcaatgccacattgagaaactagataatgacttggaaataaaagtgggggaagtgatgaactgccactacctgtttttctaagttttctatttt

SEQ ID NO: 210015 - DNA, 656 bp, Homo Sapiens
  misc_feature (57)..(57): n is a, c, g, or t
ttttttttttttttttttccttaaagtagagctccataggttattccaacacacccntataagaaagaggactggtaggttaaagccaaaaatggggacaccctagaggacatctttgggagaataatctacctaggccaagaccccactatctgagcattccacgcctataagatgaccctcttctctcctagatcagtgcttcttaaccatggaccacagctctatgttagaatcctctgggaacttaaacatatcccaacaaattaggtttagtaacatcccagaccactaaaaccagactttctggtaatgggacacaggctttggtatctattaaagctcccagtgacatcaaataatagccaaggttgagaattaatgtgctagattgacacaggtgtttgaactggttggacttctgagctaaccgattcactcctaagcatttggaattaagacccaaaagctatctagttttagcctggaaggcaaaaggcaggaaagggccacagacgcagcgtgcatggagctgcagggaaagctggcatacatagcgagtgagaatgacaagcatgcaaggaaagaggcagaaaagagacatgtattgtgaggtggggcagggtgtgagacacagctttccactggccgggtcc

SEQ ID NO: 210016 - DNA, 485 bp, Homo Sapiens
ttttttttttttttttttcattcataattattttattatgaaaatctaaagtataatgactttttagaaaacataacagcaatctcattaccacactaaaattagataattccttaatacagtcggtgtcagtttttctgattgcctcatacaaatttggttcatatatttcttcagccttttaaaatgtatagcttctcttctctctctctcttgaattgttgctgaagaaatggagttgtttatctagtagaagtttccatattctggatcttgttggttgcatccctgtgatgtcattcactgtgggatttgttagttggactccagaaaataacaataacacaaattgttaacacctatcgactacttactatgtgccagtctgtgcatgaagtgcttcatttgtaataaaatgtttaattcttcaagtccctattttaaatgtggtaggtacaaacctgacatatttcatttgattttta

SEQ ID NO: 210017 - DNA, 519 bp, Homo Sapiens
ttttttttttttttttttgacagaaggttttactctgttacccaggctggagtgcaatgacacaaacacagctcactgcagcctcaacctctgggccgtcaaatgatcctcccatcactgcctctcaacttagcctccaaagtagctggtaccacaggtgcatgtcaccatgctcagctgattttatttttttactttttttaaattttattttactttatttttgcagaggcaagatctcaacatgttttccccagagtgggctccaactcctggcctcaagcaatcctcctgcctcagcatcccaaagtgttggttataacaggcatgagccactgcgtgtgacatggcaaatttatttaaactacctgagcctcggtttcataatctcaaagtaagaatattagtaatacctacttcactgaattgttctgaggatgtagtaaattaataaacataaatcagtgccagacacatagtgaacacaaagtactggcaattgttacaattaacatgatc

SEQ ID NO: 210018 - DNA, 637 bp, Homo Sapiens
ttttttttttttttttttgatggtcacctttttattaggatattggcagcatgagggtctaagccttgacttctggccaaactcctgggccaagcactgccccacccaccccagttggctcagaactcgcagaccacaagacgcttttctccacaagccctgtcattccacttgccattggtgaagatctccacacagtcctctgacccgccatcatcgttgggctcccctggggcccagttggaatagaccagggactctcctgtggggtaggtgaacttgccctctgtcttggaatcagtcatgctcaggaaagcagcctcgttcttagctacgaccagctgttgcaaggcggcattctcagcggcagagcgtggagaggccaactgtccaccagcctgtgtgcacagcagctgtgcctccgtaaatggttttacaaagcctgctgtcttgaaaatcttctccccgacactttggccatttgggaagagctcaactttcttatactgagagaaagcagcctggaggtgctgtacttgtccctgtaaggcctcaacctgctgcctcagagaagaacatctggaagccactttctccctttgctcctttgtctccaggaatgcctttgtcccccttc

SEQ ID NO: 210019 - DNA, 614 bp, Homo Sapiens
ttttttttttttttttttcagtgagaccctggcctaaatatatttgctttatttatatagcaagaggataacattaaacgtggaagctttcaatttgtggcactgaatgatgatctacacagggcatccttcaaaggctacaattaaggatccactggccaggcatgctggctcacgcctgtaatcccagcactttgggaggccaaggagggcaaatcacgaggtcaggagttcgagaccagcctgaccaatatggtgaaaccctgactctactaagaatacaaaaattagccaggtgtggtggcgcacgcctataatcccagctactcaggaggctgggcaggaaaatcacttgaacccgggaggcagaggttgcagtgagccgagatcctgtcactgcactccagcctgggcgacagatcaagactccatctcaaaaaaaaaaaaaaaggatccacctaacttttcagcagtacaagcccgattgagatcttctggtccgtttgtttgccattcatgttttatgccttgaaattctttttgattgcatccttggagcttgtatagatcattttacttttcaaaggtgctagttctgatgccacaagaaaaca

SEQ ID NO: 210020 - DNA, 529 bp, Homo Sapiens
ttttttttttttttttttcggaacagaaaagtaaactttattaaatatgaggaggggcagggcagtcctgcaaacagcttccctgccacagcttgtggaccagccactccaccctgtaccgcttgcctgtaccctcaaatacacaggttacactgctgccaccagcaaattccacggctgaacaacacctcctgcccctaaacacactgaatgatgtcggagtttgagggttgcaggcacccgcttttaactcaagccctttcctccctccttgcgccaccccccagccctcctgctcaccgaaggtcactacccccatatgtctccttgggcttcttccccctctctttctggaacctgaccaggcagaacgcagcaactgacagcaacagcacgcccaggagcaccccaatcagagctccggccactcggccttgggagggttcggtcacagagagggtcagctcacaggatgcactgcccatctggttggtggccacacagcggtaggtgcccgaggaggtcaggg

SEQ ID NO: 210021 - DNA, 559 bp, Homo Sapiens
ttttttttttttttttttaaagtgcccaaagaaaatataatcaaagcaaaggttttccaatccacgtggaccaaatacaaaaaccataatggactaggtcaacatgcaactacattaaaatacatcatttaggtcaaaaatagcactaagtggcaaactacaaactagggaaattattagcaaaatacatgactaacagaaacccatcaagaattcttacaaattagtaagaaaaagacaaacatctcaatggcaaaagcctcaacagataagtcatttacaaaatacaaatgagatcaaaattaatcaagaaaattttaggccaggcctggtggctcatgcctttaataccggcactttgggaggctgaggcaggtggatcactagaggtcaggagttcaagaccagcctggccaacaaggtaaaaccccatctctctaaaaatataaaaattagatgggagtggtggcgcccacctgtaatcccagctactcaggagggtgaggcaggacaatcacttgaacctgggaggcggaggtcgcgttgatatcgcgacaag

SEQ ID NO: 210022 - DNA, 685 bp, Homo Sapiens
ttttttttttttttttttcataatttgtcatttattgagtccaaatgtttatgcttgcaatactaaatattttgttttttctctcaagacaaaaaaaaatccaaggcagtctgttttctcctcttaaatgtaaagtgatttcatcagtaatatttcagaaagtagaaaaaaactatgctttgattgcatcatcacaatatgggggggatacatggatcttgatccgggcattttaccataaggtagtaaacaactggtgacctctctattttgattgtgttgaaaaagggctaccaccttggcttgctgaaggtttgctagagctcaaaacaggaaaagtactagcttaaaaggcatgctgagattttaaaggtcctaaagctcaggtttaagtaacttttaaacaatcaaaaataggcattttgaattcaagtgtaagctctgaattttcaaggagtttcatattaaattactttttggtacttgaattactaactcaggacatagatggaatgcacagtgtatctctcttacactattaaaaaattagatctgtccaggggcagtggctcatgcctgcaatcccaacacctcgggaggccaaggtgggcggatcatgaggccaggagattgagaccatcccggccaacacagtgaaaccccgtctccactaaaaatacaaaaa

SEQ ID NO: 210023 - DNA, 681 bp, Homo Sapiens
ttttttttttttttttttggggtctaatacttttacttcccagcagcataataccactttggtcaggttgaaccactgcacaattttgcagctctttcagaaaaataatgaaaacaattggaaagacatgatgtacatgcaaatggtgagaaaatgatactattgtccaatcctttcccgtaaatgtaaaatatccttagttcatctccaaactgtgtatttattataagcccttacatcagggattttgtttctttcagtttttgtagcaccaaatagacacagcggctaacaagaaataaatctgaaaagtcactgaaatatttatcacatgtcagaaattttctggtctgtacctttaaccatgttcctggcttcacatattcttcttaagagtaagctataacataagattgagttcccaccctgtgtttgctactgatgtgatttgtttaccatgaataatactttgttaatatcttttgtatattactttacaatttccaagtattttatatacagtgactcacttagtgactcattcattttaatgtaatggtgtcccccaaaccacagataatgattagacacatgaactcttgtgtcagattgcatgggttcaaatcccagttccacctgctagctgtgtgaccttggacaagtcacataatatatctgtgc

SEQ ID NO: 210024 - DNA, 649 bp, Homo Sapiens
  misc_feature (558)..(558): n is a, c, g, or t
tttttttttttttttattaaacataatttttatttcatccaaggcaaagctaaatacaattctacaatgcaaaacttgttgtagaggccagactgattatatccgttctgtgctcgaacacaagtcagtgctggctgtgtgggcatctgcgcctcccagaggcactcgcacacctgaggcctcccaaggcctgttgttgcatcatttgatctatagttacataggaaaattgactatgggtattgttgtcatccaagccagaggaataaaccatgcataagatagtcaaaagcactgcatatcaggtgggaggtgggagggtagggactccaacctgggacaaagtaaagtaaagcaagttataggattttcccgagaagtccccgctcctggaactccctactgccagccctctgatggcagctgtctgtgacactgagatgaagtcatggagtgacggaatgcaggagcacggctggtcttctctgcctttgattctttctcagtctccagatgcctcaacaggcatagctcaggccaagaaagacggctcctcanatgtccagcatctgcccatcatgcatcaccccttacatgcagagcccatccactccacagttacgctgccatgcacccacactgcctgcac

SEQ ID NO: 210025 - DNA, 703 bp, Homo Sapiens
ttttttttttttttttttaagtgaaaataaacatgtttttattgtttcatgctaaaagacatatttgggcttcacacgcttacagctgggaagaatgcatatttttggcaaagaaggctcgagtaatctctgcacgttcacacggttgacccctccctgcatgaagagcagatggtgtttcatgcacagatttctggcacagtcctcctcttgtctgatgtaaaaggtgcgagtggacctctagccccctttccccttttgcttcttctgatcagtctcgcggtaaagagcaaatttagcacttcattaaggccactaacccaagtcaagctctggactctgaaagcactgagtctaccacagaatcacagaacataaaacagaattaacatgtggatagttttttgaaaaccgatggtagaaagtggtcctgaagggagggggcttagggtcatgacttctggtgtcttctagaagaacatgttaagtccaggaaaagaggacttgaaaaaaaaatacgtgctcccaggagaaacattatccagtactagatattgaagtgagagacaataactctgacattaaatatcccattagcacagttttacaaaaaatctggattgctacaaatttgagagttacccaacagtgaagacatattctgtatgtttttcttcttactagaaaattccaggccgggcat

SEQ ID NO: 210026 - DNA, 606 bp, Homo Sapiens
ttttttttttttttttttgactttgctgatggtttattaccttaaggaaaagacttacacagagaaattgagcaatgaaaacccttcacattgagcaaacacattccacgctacacaaatcatgagaaaaatgagaactgttgtgaaacatgacagattgcccaagtgttatttttcctctattggaaaattctaagacgtttcctcatgtgtagtttttcagtcacaaaaatggcagtaggaatatttaaatattaaatcacagtttgaaaatagatacatacatacatatatatacacacacagagatacatagttgacttatgattcccagatatgcagggttatcattgtgactgctttggatcaagacaagtttgtaaaaagcagcgacatagttcaacataatagtcaggagctagattacttccctgtaattgctatgcacacacagtacaaggctagcgagattatagacaatcatgtcattcgaatctactatctttgataattctgaatcattttcaaagttaaaattgcagctattgtcagtaaagcgcctcttataaaggtcatgccttttgatttgggggacagaataactag

SEQ ID NO: 210027 - DNA, 591 bp, Homo Sapiens
ttttttttttttttttgtcatcataagtgtttattatatacagttgaagcaggtggcatcatccatcatttttcttcctcttgatgtctagatcagttgtgtgtgtattttaatatagtaacacaccctcacaattatctaatcttatttcaggttagtgcttctcggaaaggctacaaaagcagccatagctcagaattacgtatctgaagtaaacaaaaataaaaacctcaacaacaaaatattaaccaaacaaacaagataaagacgcatgcaacctatagcaccatacctaagaccacaaagggcaggagggttgacagaggtcttaagaggaatccagttttgggttttctcctaggatgagatcccaaatatagaacctatttgtagagtccaatacttttaaaaagggaaagcctgagaaattctgttaacagaaatatgaaaatccatgattttccagaagacagatgatttgacactgttcttattctaaaagcatcaaagacgttataccttagaaataaactgctcactttggaagatcagttaggcaatccctgccaacctcaatgaactaaaatgatg

SEQ ID NO: 210028 - DNA, 565 bp, Homo Sapiens
ttttttttttttttttctcgggtcaaatattttatttctctcattaaataaggagggatctaacagtgatgttacaattcttgaattcaaaaaatacaaactcatagaaaaccaagagtgcctcaatgaattaccaacagatgcaaaatggactattacaagggcagtcagtaatccactgcatctgtgacacagttcatcttcatttctcaatggcagtcctgtgtccttgtcatccatctggatcctcaggatgcaggacttgagagcttcatggagggtgaacagctcaagaataaagcagtgatctactcttaatgttcaggcaccaaagttcctaaaaaagagccaagctctttcagctgacccagaaccaagggaactgctaggacgctggcatttcttgggcccattatgtggctgagtcagccaactaataactccagtctttggacaaggtttgggaggaccaacctgagaccccctcctagtggtggccttgctgtgctgtgagggaggagtggtgcttctctctcttccccagttgacttcagtagaggaggag

SEQ ID NO: 210029 - DNA, 597 bp, Homo Sapiens
tttttttttttttttattgtgtaaaacttttgttcattttttttatatatatatacacacacacatatctacaagtaatcatgtgtatattgggtcacaatgtaaaatggtttgaaaaaccactaagattccaagtcccttattttactgatgagaaaacagccagagagtgaaagctgatgattacaaatcacagccatgagagctgggctctgcactcagccctgctgggctgggtggccgctgctcacggtgacccttcaaggcaggcctcattctgtccagtagaggtgtggttactaagtcatagagctacagaggtgagggaccaggtgccctcactttggttccaagacccatctgcaccccacaaatgccaccagccacacctagaacaaaatggttttaatcaattgcgtcaccctcactctcctgggagcggagcaacaaaaaggctcggctcctgcccccagaggacagtaaggcttatgtgtctctccacactgcagggcccaggctgggcaggcagggggtgggaagcaggacagggggcagggagggagggtgggaggcacggaggaaatgggaggtggctgg

SEQ ID NO: 210030 - DNA, 667 bp, Homo Sapiens
ttttttttttttttttttacaggtgtggcaaaatacttattacaaagaaagcaactgcaaccctagagaggggtaagccttctctgggcaacagtcatggacatttacagaggggaaggaagtaaacgttaataaataattctgtaaataaatgctagtacatcataataacataccacttagacactaccatggctttacagcaggttttctctaattcactggaaccatgctattcctgtagagcagctgattctttggtcatagtaccttcaacaaataaactatagaactagagaaactttctaagggaggaaaaagaaaaatcaaagtgatactattagttctgaagttgtgccacttgcggagattttaactttagggattacagagtttcaaggttaggaaatcacaaagctctaggtctcagtgggctaaactttcactcctttctcttcctctacagaagaatattctgtttatcaccctgaacttcaaagggactgtaactggaacaagctcatgactgcaaagttaatagaaccattttgagtagacagaaagaaaggactgaaaatagatgaagtatttttaggagaaagttgagtagtagcagagtgaagtggctatcaaggagactgagacaagaatacacacagtcactttg

SEQ ID NO: 210031 - DNA, 598 bp, Homo Sapiens
ttttttttttttttttttacacagagatctcactcctttattagggtgaagattttacagccaatcatcatagttatctttcaagaaaataatcactgaataatgaatcatcttggtattccccaaagcgatgcttatacaaaggcaagacatcaaaaatctaggacttaaaatgttaaccacttgtggagtaaactgaatgcaccatattatagtgggtatttccaatttggcacaacacaaattttagacaagttttgacagaaactattaaagaaaattaataatcagttaaaagctaattatttttatactgaaaagttctaactttgagagaaagtgatgagcaacagtcagcaaagaatttactcatcatctagctcagcttcaggacacattagagaagaaaagcggggttaatgaatcaggtccagaattttctagagtgagttcagtaaacacaaagcccaaggtcacacattttggaatatgttgacctagatccaagtggtcattgccattctaaaaaggttttcctcctaaaagcatctatccatatctttcttttctaatttagctatttctctatcatcagaac

SEQ ID NO: 210032 - DNA, 680 bp, Homo Sapiens
ttttttttttttttttgtctttcaaacaaacacaatcagaagcacaattagaactatgatccctacgatggtgcatgagaggtaatgagaagaggcaggagtccccgggctggtggtcattgtctcttcagcagctggggcaggagtccccgggctggtggtcattgtctcttcagcagctggggcaggagtccccgggctggtggtcattgtctcttcagcagctggggcaggagtccctgggctggtgttcattgtctcttcagcagctggggcaggagtccccgggctggtgttcattgtctcttcagcagctggggtttccacagtggcattggcaccaaattcttcaacacactggatatcatcccaggacgtacaattactgacttggacttccccactagggcacctgctacacttccggcacatctctggggagttttcattccggaaggtgccttctttacactgacacactgtgtctctggtcatggtgcaggaacttttatgtttttgatctgatttacaaactgtacatgggaagcaagaaggttcattgttggaagcgttggtgtaatccacactctctgtgcacgggttacaggctccagtatgttctgatctatgagatcctgctggacactcctcccccttgaagctgtgcctctgttgctgtg

SEQ ID NO: 210033 - DNA, 711 bp, Homo Sapiens
ttttttttttttttttttcctgattcagaattacttttattattattagtggcagagactagctagtggcccttaaacagctttgcccttcctgggtgtacagctaaactaagtttcctggcctttcatgtgactggggtcatgtgactgtttccagccagtgaggtgtgagaagaagagaggaagcccatttccaggccagatccctcaaatggcccattgagggtcattgctgccctttttcttcccttgctgactggcagtttgtagaacaggggatccatctaagtaccctaagagaaggtagagctacagactggaagagtctgaacctctgactcatcccatggatggctgcccatttgagctgagttaggagagagaaatcatttaatgtggtaagccagtaagatttaagagctgtttaacatactattttgttatgttatgagtagcattcagattgcagatccagcttctgaataagctcaagaactttaacttctatccctatggcctatgcccaggggaagatgggacttaaagggtgtttgtagaaatcatggtagaaaaacttacatacatatgtgtatatatatatatagatacaaaaaaaactatacatatttaaaaatactgcaaggttgtggtttcctgagcaggatggattgggcagacaaatcagcaagcccctgctcctgagagaggctc

SEQ ID NO: 210034 - DNA, 563 bp, Homo Sapiens
ttttttttttttttttttcaaatcctattttatttttgaagtcagtgtccagaaagaaaccgacgattcactcaatcaacatgtaagcgactgaggcatccctacacaccaggtttgcaggctagggaccagagacacgatggttaaacaagccagagccctgtgatcctagggcttacaatgctggcataagaaaatccttctggactcactgtccccatgcttgtgactgtcatgtgccaagtgcgctttacacaatctcatttttccctcaacttggggataggttttgtatcattcccattacagatacggatgctgaggttactgagtggaagaggaaacctgaattctgctgctggaccccaaaactcatgttaattacccacagcctcccaaacatcagaggccccaaacatgcctcccaactcacttctcacaaatgggggccgttatctgccccatctctagggccgttctgtaacattctcagcgacttcccatatcttacagaggcaggccctcctttcaggaagctgatccatgccccttaataaggtagc

SEQ ID NO: 210035 - DNA, 633 bp, Homo Sapiens
ttttttttttttttttttaattgcaactggacttttattgtgcagttacaacaacaaatgttttcagaaaaatatttggaaaaaataaccacttcatagctaagtcttacagagaagaggatttgctaataaaacttaagttttgaaaattaagatgcaggtagagcttctgaactaatgcccacagctccaaggaagacatgtcctatttagttattcaaatacaagttgagggcattgtgattaagcaaacaatatatttgttagaactttgtttttaaattactgttccttgacattacttataaagagtctctaactttcgatttctaaaactatgtaatacaaaagtatagtttccccatttgataaaaggccaatgatactgagtaggatatatgcgtatcatgctacttcattcagtgtgtctgtttttaatactaataaggcagtttgacagaaattatttctttgggactaaggtgattatcatttttttccccttcaaaattgtgctttaagtgctgataaccacaggcagattgcaaagaactgataaggcaacaaaagtagagaattttaggatcaaaggcatgtaactgaaaggtgacaacagtacataagcgacaactg

SEQ ID NO: 210036 - DNA, 713 bp, Homo Sapiens
  misc_feature (643)..(643): n is a, c, g, or t
ttttttttttttttttttcagctacaaatagactttatttgatgtaatgtaataaaacattttcaagtttaacaatatgtatctgaccataaacaatcacttaaattatgaatataagtatacgcggtcacattagcaaatctgcagttcaggaatttgtacaaactttgtctgaaaggacagtgccttcttcccctttcaggaaaggcagcccttccccatgtgtggtaagaagcaatgtcaatgggagttggaagaagtccataatccatgtcgaaattccactttatcctgagaggacagcttgctttattgtagaaaaataatattctctttcagttctctcttatcaaatgaaggattgcattcattttgccccttgtaggtataggtactcttcttttctcatctactgtctttctgtctccttagctcatacttattacacagttcgtttaaaatatatatatctgcaaggagacattttctgttcccttacctgcccttcatgtctaccactttttggtgggtaggggtgggagtcaggggacagaactgctttggcacagagttgatttaagatacagagaacaggctgggcacagtggctcacacctgtaatctcagcactttgggagtccanggcaggtggatcaactgagatcaggagtttgagaccagcctggccaacatggtgaaactccttctctact

SEQ ID NO: 210037 - DNA, 706 bp, Homo Sapiens
ttttttttttttttttttggctttttaaaaatttacttattacttgttcttagcaaattaagacaattacaataaaacatcagctaactgggttcttgtgagaaaactgaggtcagcttggaaaggagttccccgagtggagttcccagcggcccgcggctgacggccagatctgtcctgaggggtcgtgggagcccagcgcctgccattttcctttgtaaagaagtcatccacctcctcccagcggtgcccattttcaagacgctgccagagcctcttaaaacagcttcttgaaagggtttttccacaacgggttctggaatgttctgcttcagctctggaggatgctctaaattagttcaccatgatgaagttagatttgcagtgagctataaactccgtcacagggtcatgctcgccttccgttttgatggtacctgcgatgctgtcattctccaggatggggaggaaaagttgcacgaagtcagaggtataaggaggagcaatgacgtccagcacctgcgtgggggagcacagggtgacttcttccgcacactagtgcggggcatccaccgacatccgggtgaaatggccatcagtttggaaaaaatccctccccacccccaccggccggtgacaccacccatctccaacattcagatgcccagggtggtaatggaggtaaagtgtgtcatacagctgctgc

SEQ ID NO: 210038 - DNA, 523 bp, Homo Sapiens
ttttttttttttttttttgtaagtagtgtattttaaatagctttcaagatacacatattttttcctttaaaaaagtctgttggagcagttttgttcttgaattttgctggtcatcctcatggtcccgagcccccctactccgggtcgtggaggcggccgagggggaggctgggggcccacgtggcccgtcctggcagcacctgcagcactgggggagccgctgaaccccgtgcttcagcgctgggggagccgctgggccccgtcttccgccacaaaccatgcatggccgccacgtgagctcaaacgtccgtttatttcaaagcagtaataatttaaaattataaaaatctttccaccgctgaacgtttagagggtgaggttagacagaggacggggaggctggggacgccccagaggggaccatgtggcgttctcgttgctgggcgagctggaggaggacgatgacgacgaggaggagaagctcaccccagtgaggccaggggggttcgtgggcgcctcgtgc

SEQ ID NO: 210039 - DNA, 624 bp, Homo Sapiens
ttttttttttttttttctaagaaagctgttttatttaaacgaatcccaaattagcacattatacttcagtgcatatgccacttttataaaaagctactatttagttttaattgtcaaaatataaaatatttcacatgatgaaaaaatagagtaacataatcccatgtaaccggtattccaaggtaagaattgttaacattttgctacagttacttaagatctagttttcgaaataaaatatgactaatagcttaagtcctcctcccatgcccactctccctctttaaagattcctcgggcctgagatgcgtgggagacttttgttcccatggtgacgctgcagctcctccacccccacgcctgtagacaccacaaaatgttgctgtttgtttttaaattccattgtcagcatcatccttctgtatccccgcccccaaggttacacttttaggaggcactcaagttggtacaagtagaatgacttcatcccctttcgccccaggggacattctgttccctgaaatatgccacgaattctttatccaggcctggagtggtggccgtggaggaggcttgcagtcttgcactcctgcaaacatgctccaggggctgctcgtccccgct

SEQ ID NO: 210040 - DNA, 653 bp, Homo Sapiens
ttttttttttttttttatataaaatattttattagagtctttattctttataagtatctaactttatatttatacgctctgcgcctcccccgcctggccagttgggttgttttgtctaacgttcattgcgttctaattcggctggcatttgactaaggccttaatgggttttgactatactcttcccatctgcaccacagacctggaatgagagaggtttttcttttcttcttgcagtaaaggctgattgaggattcagaagctggtattctatggagatgagggaaatatcatagaataatactatcaaacacacgcctggagccaagtctgcacacctgcatgtatgtgtgtgcatgtatgtgtgtccatgtgcatgtgtgtgcatgtatgtgtgtgcatgtgtgtgtatgtgtgtgtccatgtgagtgtgtgtgcatgtgtgtgtgtgcgtgtgcttgcatgcatgtgtgtgcatgtgtgcacatgtgattgtgtgtaggtagacacatatacaccatacacgcacacacacacaccagcccctgtagagcctgagctagtccacaggactgttgcaataggaggagcaggcaagggcagaggacagcccctctccacggagaggtacctgtcacgagtactctgatgca

SEQ ID NO: 210041 - DNA, 656 bp, Homo Sapiens
  misc_feature (563)..(563): n is a, c, g, or t
  misc_feature (617)..(617): n is a, c, g, or t
ttttaagtttttttttttgagaggctcatgaaattcaaaagggaccactagctaatttcaaccatgcttcacaaaacaataatggctattttatattgcagttaccaatgtaatgcaattagtgctttaaaataatctacactcaaaaaaagagagagaaagagagagacctttggaggaaatatgcttattcaaaagcttcttggaaaagaaaatttacctgaatatcaagtcatgactgatctcaagtgtaatgtttaaaagcttcacagacatgaatattacaatcttcaggtctcaggacttttaatctgagaaagtttagagtttggtttgttttttaaattcactttctaaccaaaacaaataatagaagtactcaaattttcactatttacaactctcagcctacaatctgaaatgacacaatacaagttctcttaaactgcagcattaaagggtaggcacaccattcttctgctgctcgattgtcatccactgaaacacacatagaaaatatttatgttagtaaaatgatcactccatgtacactacaatgacanaatttacataactcaactcatacatcacttatatagactaccacataggattanacctctctgaacaataactctacaaaagttgaactttta

SEQ ID NO: 210042 - DNA, 504 bp, Homo Sapiens
ttttttttttttttttttgggggtagatgctcaaagcctgtttattaaattgtattgaaattgaaacgcttgaaacagatttcattcctgcttattttctaacagtggttaaaacttggtaacttcaagttgacatggatttcagaattcaatgtaatttcaataatattataatagaacaaacttagggttgccaacatttattttgctaagcaaggctattttaaaaacaactatcaataattatcttattttaaaaaatacattttaaccttatatatacatgtttggaataaaaacagtccttcctgagaaggaagagttggcagacctacatcaataaaataaatatattcaaatgctttggatatggaagtattacaagagaaacattttcaagtattacttcgtatgtagttgtttcttatttctcagttcggggatctgtattcaacagggacatggaatatggagcctgagatggtatttttctgtttcatgttg

SEQ ID NO: 210043 - DNA, 653 bp, Homo Sapiens
  misc_feature (570)..(570): n is a, c, g, or t
ttttttttttttttttttacgttttatcacatcattttattagaaaattacataatagcaatgggttaatgtatgtcaagaacctactgaggctccataatggaaactgttactattaatagcatagtaaatagccaagaaaaactaaacactgtcaggaaaagctcagtttctcaaaaaacataatagggaaccatgaaagacaaaaccagtacctcagctcatcctacatctcagcaatgcctcagacatttctgctaacaagacatacattatgaagattacacatgctcttgttcacatgcccacaggactactgagaatcttccagagaacacaaatgaaagccacttttctaatcatcaccagcttaaactaagctttggatattaatgcaccaagtctccctgtctatgggaatgcagttttcctctctctgaatcgatacaaaataatactaatcataaaatatacactaaacttatttaaaccttttgattataagtgaaataacttttacaaaagaaactttagatacagtatatattttgatctttatcaaaatcctgngctggcagttctatccacataccaacatttttaaattaccccagctacaatcctcatagcgcacaaaatcacaatctgatgga

SEQ ID NO: 210044 - DNA, 599 bp, Homo Sapiens
tttttttttttttttattgttagacgaatttattttaaaactctgcatacacatcatttaaaatgagttaaaaacttaaaaagtgaactctgagctttggcaaagttgcaaaggtgatgcagcaaagttttctgtgtcattaaaactatgcctgaaactacaggattccttccgttggaatgaagttttcccttcagctccaagaattcagcctcccttaaccaagttgccttcagttttaggacctgcgctgtcagtcaggcccgacctccgcaacggcctccgaccaccgcctgtggagcagcacccagaacaggagcgcgccccccagcagcagggccaggcccagcctccagctcctgggggacttcagccacttccacagccgggccgacagccaggcgccccatggcctcctctgcaccctggctgccacgcgctccgccacccgccggagccgctcctcagggcctgcccagcgcagcacctgcgccagctcatacacctcgttggagtaatgggcgcccttgtgctccagcaccaagccctcgaccatccccagcagctgctccacctgggcttcctgctctcggccggtg

SEQ ID NO: 210045 - DNA, 558 bp, Homo Sapiens
  misc_feature (529)..(529): n is a, c, g, or t
ttttttttttttttttttaggataatgctgtttattaaaaatatagtcagggagaaggaagtcagtgcatttatgcaattttacatacacatctgtagtttgaggttccattattccaacagttcatataaatcactgtttcagataaaaggaaaaaaatgctttacacaggagatcagcaattggttataggtttggaaatatgagtcggcttgtagtaaaaataaaaccacctcttccattattaaagaatgtctccttcatgcagaacaagtctttagcattaagaacttttccttgcataagaattgttaacttgaagttcttggaaaacagccaatcctgttttctatatttataaatgctattttgtctggatttttttttttgaggtaacaaaggaagcatcttcagtgatttgtcactaggttatcctttaccgtgtatgtcaactactgcaatgtcaaacctaagacttatacaaaagcatttctcagagaatcataaatacagaatatgacatttccanacaattattctcattacagcagggaaaac

SEQ ID NO: 210046 - DNA, 489 bp, Homo Sapiens
ttttttttttttttttttaactgtgagtgaagaatacagtgtggtgcccttgcatcctgctagggccccagcaaattttatccactttgcctatgcaccgtaagtacaaatgtcgacacggtgaaaatggacagttaactttgatttttatgaaaacagttgtgacttcatctacactcctccctcaaagggtcttaggacctcagtggtccatggagaccatgctttgagactgctggtttagaacagtggttcttgattggtggctattttgtcccccaagagagcatttggcaatgtctagagacatttttcgttgtcacaaccccagggggtaaagggcatatactactggtaggggccagagctgcttaaacctcctaaaatgcacaggacaggcccccacaacatagaatttcccagcccaaaatgtcaatggtgttaaggttaaaaaaccctggtttagaacaaaaaaaaaaaaaaaaaccg

SEQ ID NO: 210047 - DNA, 645 bp, Homo Sapiens
  misc_feature (627)..(627): n is a, c, g, or t
ttttttttttttttttttaaaggcacagctttcccagtgtttgtgttccttgcttgcgccctgttttaatgttgtagttacaggtgtccagcagggaggaatgcagcccctgtgggcgcttgggggagctgctgggaatccaagttcaaggagcagctgttttctgttttctgttgccccacagcgccacctcctggccccttggtggtgatgattttgaagtcagcaggttctggtgggccgtgtgaactccagcagctctgggctgagctgtggaaacactgcgtcctttgaaataatacagcttcctgagcccaccccagtccctaaagactgcctctggggttgagattctgagatgcttgacagcatggcttttcccggtgttatgtgtcgtttctatccttaagcctggtaggggtggactggaggctggaccaagctccactggctgcaggaggacccttctgtgggctccaggctggccgtgtgcgtgtggggaggtgggatttgctgctaggcttcatgatcactgtgaagaagcagcccccaagaatagggtgataggccctccccatgtcaccggccgttcctagtcacatctgttgttgcagcatgttatcagtnagagctccttttactctt

SEQ ID NO: 210048 - DNA, 702 bp, Homo Sapiens
  misc_feature (644)..(644): n is a, c, g, or t
ttttttttttttttttttggaataatctaaagctattatttccaaaactttgttaccattttatagcatgatccacccatcatctgaaaaacaatactttttattctttgaatagcaagaatagtaattttaaaacagtacaaaatgtcttttgacatacactagaaaagtaaaacataacatttttggaaactctcatggctgttagggtaaaaatcatgggtcagggaggagggtggttaagagagttgaactccatgaattaccagtggagttcatggatatttcagacagccttcaaattgtgatggagtgataaacagtatgggactacacagtgatgaaacccggacatgaatccttttgacggttatcttttgacaaaaaacttctcaataagagaccattttccatctgtagaagttataattcctgcccactgcacagaaaatagtaacacacttaatctataaagtgctatatacatgttagatatttgttaggcgaaattaagcgaaatcaaaatttttgggttgatttgtttagtatggggggatgatatgtatcgtactgaaaatataaattaatggccgggtgcggcggctcaagcctgtaatcgcagcactttgggaggccgaggtggngtggattacttgaggccaggaattcaagaccagcctggccaatggtaaaacctatcta

SEQ ID NO: 210049 - DNA, 666 bp, Homo Sapiens
ttttttttttttttttttgcttttcaatcaggctgctttattctgttgtggcaggagttcccgggcccctgggtgccacctctgcccactcccatcctctccccaagctcccatttctccagggtttgtccctgcggtgtgggcagaagcagcttcttgcccgtctgcaaaagctgcaaaagaccctttgcccggggcgtttcctttcccgttggggcttccactgaccctgtgaagcaaaggaatgttgaggatggacagagagaattcaggggagtgggaagtaccggtctgtgagcttcccctcccccgagttgcctggatgaccccgcttcagtggacgccccagcgcctggtcagcgcgagcgctcctccacagcccgggcaggtggcccgagcgctcctccgctgctgatcaggggccctgggatcacacctgctcaccggaggcgtcctagatgtagtagagcggcacctcgccacacagggtgttcacggccatgcccaggaaggccgggtcccctccggagggtgctgagcctgcatctcgcccctctgcctggcccagcttagacgtaggcactgcgggcttggcctggaagttgtggacttttctattgagagcctcaagactggggatgctctctggagctatcttcatgatgt

SEQ ID NO: 210050 - DNA, 695 bp, Homo Sapiens
  misc_feature (683)..(683): n is a, c, g, or t
  misc_feature (693)..(693): n is a, c, g, or t
ttttttttttttttttttgcactttacttactattagttgtttattatgtcaaccttaaataatgagattcagaaaataagactaagtatagagtttctttgagtgcaaagtttgagaatagccacccagtaagcattgactccaaaggaatggggtgagcattccaaactggagaagttaaggtttcacttccacaggcaaagagagaggaattttagcaggattacaacattttccatacaagaccagtgcatatgttacagtgctttgattggttatagattgctacattccaaggaagatgactttattaccccctgagaaagggtggtgatctaagtggggatctaagggagtcttatctctggtgccatttggtcttcctaagtaattacagaaaaaaaaaaaaataggtggaagttgcagctgcatgccccatgactcaggctgcagagaccaattcctgtcaaggctcagaataacttaaagttccaagagctttaggtttgatttaacaaagcttgaataatagtaataaataatattattaatctcaaaatcctgggctcaagtgatcctcctgcctcaggagttagagacctggactgggcaaaatggtgaggacccatctctataaaaaatacaaaaattagcaaggtgtggtaatgtgcaccagtggtcncagctactanag

SEQ ID NO: 210051 - DNA, 701 bp, Homo Sapiens
  misc_feature (674)..(674): n is a, c, g, or t
ttttttttttttttttatgtataccaaatttttattgttttagaatttacaaattctttaaaaatgctttttaaggcatttacctatttactatattatcaatttatctacataaatcacattcattatatttttatttttttagacacagggtctcactcagtcgcacaggctggagttcagtggtgtgaccacagctcactgcaacccagaaccactgggttcaactgatcctcccaactcagcctcttaagtaactaggactacaggcacacgacaccatcgccagctaatttttatttttttgtaaagacagggtctcgctttgttgcccaggctggtctcaaactcctggactcatgcaatcctcccacttcggcctcccaaagtgctgggattacaggcatgaaccactgcccactgcctccagccatattatagatttatagccatattatagccatattatagaaatattatagatgactttatttcctatacctacatgattataactagcttaaaaataaatcaataaattacaaacaataaaaccataaaatcaaggaagatgagggctgttgcatgttcctttacattttatttgccataaacattaagataatacagaaaatactggagaaaaaaagctttttaataatttcttgatgcanagcttcacacttaaaaattatgcttgc

SEQ ID NO: 210052 - DNA, 713 bp, Homo Sapiens
  misc_feature (623)..(623): n is a, c, g, or t
  misc_feature (662)..(662): n is a, c, g, or t
ttttttttttttttttttacagatcttttaaaattttattttataggtagcttcgataaaagcttcagatagacccacatactatacagagtttgtgaaatctacactttcaaatcataatattctctattttaggctattatatttagaagcatgacatctcaaatccttttattacaagtagttcttgcacataaatgttatatcacaatagcaaaaaaatgtaaacttcttttgcaaactacataaatactataatatctaccttgaagttattctcattttaaatcagaatacactctaaatgttttacatagaaaactctcgttggtagcctgtgtgtatgaaacatcattttttctttcttaactacttgtctttcatgttgcctacttaggtctctgaaggagaaaaattcaaaatagaacccagatcaaaattcagttcacatgtaagccaggtaccagaaggatgccattaaccttgggaaaaataagagatgggaaattattctacatgctaaatccaacatgccaccagttggtatggaggtaactgaagataaggactggggtcaagctcatatttcattctatatggaagggattcagcctgctcttcantacagcttttactctgatgtataaaaaatctgttctcanatgaacacctctttctcttttcttgtacagcacaacagatcattgctacag

SEQ ID NO: 210053 - DNA, 694 bp, Homo Sapiens
  misc_feature (663)..(663): n is a, c, g, or t
ttttttttttttttttttaagtaacaatttattgagctttcactcaagtttggtattcaaagttgcaagcacttgacatttttttacaccatttaatccttacaacaacctgccaggtacatgctcttattcccatcctatagatgaggaatgagactcaatgagaggaagaacattgtttttaagtggaagaacttggattagaataaacagaactctagaatccatgcaatgagttaccaccttcactctcactcgaagacattgcactgcctacaccatggccacatctatcactaacacagagccttaagacttaggagctggctgggcatggtagttcacacctgtaatcccagcagcatgggaggccaaggcaggaggatcacttgaggccaggagttcaagactaggctgggtaacatagcaagaccttatctctctgaaaaaattacatttaaaaaaaaataaataaaaattaaataaaatttaaaaactgatgagcattcctgtgtgtagtatgcgatcttcacagcaaccctgtaaagtaggtgagacagagatcatagggattttataaatgaggaaactgaggcacagatgccgagaaatgtacattgtgggcataccctgaaagccccacccaccaggtgagaccatcanaaattctaaagaaaggaaaagtcaggaaaag

SEQ ID NO: 210054 - DNA, 696 bp, Homo Sapiens
  misc_feature (624)..(624): n is a, c, g, or t
ttttttttttttcatgtctcctttctaatattgcacatcaatagctccctagcagggaccagctgacgagacgcccccttccctcaagttggcttgaatgtggggctctttgggcaggaagctggggagggaacggggtggccgcagagctgagaggccacggggctcaggcaggttgcaggtccagcttactctggctggctctttggttggtctttggggctaagctgggatccattgttcccaaggacaccctatcccctcctacccccacccacttctactgggcagacaacagctggggtctgcccaaggacccttgggcaggggagctgcctctcctggagccatctgcccctcagtaccctccccttgcctcttcctcttccctcctccatgaggcctagagtggccacgaggtcagaggtcagaggaagcacgcaggtccaacttccaggcggtactgcttccctgatgaggcaggagggaggttgtccacactgatgatgggcagctgttgggggtcttgggtccggaaggtgaagagtgtctgatgccagcggccatcttggaccttgcagccatccatggacacctcgggccggaactgacccccagcttcanaaatctgtccattccaggcccggaagcgtacggcctgcttggctggggtctgcccagtgccctcctgccaca

SEQ ID NO: 210055 - DNA, 607 bp, Homo Sapiens
  misc_feature (415)..(415): n is a, c, g, or t
ttttttttttttttttttcagcagtcaacaattttgtttatctggggtagatgtccatgcactacaccatcaaggccatatttttcttattacaaagctgttaggaaaccctctcaggaaccaatttatactgtcgattccattcctctctctgaccttgtaatgttaacagccttatcaaaagaggaactagctgggcgtggtggcccatgcctgtaatctcagcactttgggaagccgagatgggcggattacctgaggtcaggagttcaagaccagcctggccaatgtggtgaaaccccttctctactaaaaatacaaaattagccaggcatggtgacttgtgcctgtagtcccagctactcgggaggctgaggcatgagaatcgcttgaacctgggaagtggaggttgcanagtgagctgagatcacgccattgtactccagcctgggcaacaagagtgaaactctgtctcaaaaaaaaaaaaaaaaatggaactatttggcgattacctccttttccaagtacttaaaaaccattttgctacatatacacattaagcttgtcaaaatctgcaatttccccatttctgaaaatcacctcttgc

SEQ ID NO: 210056 - DNA, 767 bp, Homo Sapiens; identical to SEQ ID NO: 49241

SEQ ID NO: 210057 - DNA, 785 bp, Homo Sapiens
ttttttttttttttttttcacacagaaaccaaccacatttttactgcatctgctccacgctggattccaacatgctggcccggagcgtggctggctggaagcaactccaacaggtttttcccttccccgtcatgtacattatttatttttgatcctactcactgtcccaagtccagaggcagttacaaaaaacactcttgatgcaaaccgtgagtggctacaacacacggatgggggtgggcgcgattcccacaacagggagtggaatccgggaagatgatatataggggcaagacgcccccttacttgctaagagtatatggagctcaaaacccacaattgctttgttttgtttctcagttcctggagtatgttgaaactacttgctcttaacattagttcgtatttttcatcagatatctgacctgatttaaaacatgtttgtttgcatacatctttttgtagtgcaccttatagttattcctactgatataggatgaagattataaatatctgcataaaaagagaaaccatgtgactctatatgaagacaaccatcacattccacagcacatcattggttcattttcgaattgtcaagcagtatttgaaatgagagagagagagaatataactgaacacaagcaccacgacaaaacaatcataacaacagaaccaaacccaacttctctattattaatcatgttaaaattttagctttgtttctaaacttttctttacttgttattttaagctccagtagcaggatcagatttctgctgcct

SEQ ID NO: 210058 - DNA, 775 bp, Homo Sapiens
  misc_feature (709)..(709): n is a, c, g, or t
ttttttttttttttttttaccaaaaacattatttaattacgtacttttacctatattttataattccaaacacaaggggcaaaaaaatcctccataaatggaagttctttaggtggttccaggtatctgcttcagtttataactatcttcacagtttacatttacagaaatataaatattatttcttaaaattcacatttaatacaaactttcaaagatatttaaacgtaggatagtagtaaggagaatcttaaatcttagaaacttgggggtatgacaagagcaattcctaaatccagatgatgattttaccattgctatgtataagctgccatttgtagcaggttttacatgggacattattgaacattttcgggggtgggggaaaaataagaatctattttatcatctttgattgcaaacatgggttcatgacatgtcacaaagctactttctctgagagcagttagtatctccaaaccaggctagaatttctaagggcagtcttgccttttggtggactattaagtattttttggtgatatttccatgtttgggggtgcattaggccattaagatgagcaccaaggcaaaaatggagaggtggcaaagctctagtaatactctcctgctcaaaatgcttttgatgcctgagaaagaagtaggtagttttgagccagtaaaatgcatacacatatataatagtcanacattataatttaatgttttctatgtgaatcacaattgaatattgtatatatgacacaataactgt

SEQ ID NO: 210059 - DNA, 776 bp, Homo Sapiens
  misc_feature (695)..(695): n is a, c, g, or t
  misc_feature (699)..(699): n is a, c, g, or t
ttttttttttttttttttgagatgaagtctcgcgctcttgtcccctaggctggagtgcaatgatgcgatcttggctaactgcagcttctgccccttgggttcaagtgattctcctgcctcagcctcccgagtagctgggattacaggcgcctgccaccacgcccggctaatttttatatttttagttgagacagggtttcaccatgttggccaggctgatctcgaactcctgacctcaggtgattcgcccgcctcagcctcccaaagtgctgggattacaggcatgagccaccgtgccggacctatttaaaaatctttttgaagtacagtactaataaactaaggactacctagagatcacacttttagatattatctattttaacatagattaaaaatactgtttatatgaaaattaagcttaaatacacgtataggtaataattattttgcccatatacaagtaatgtaaacagaggctatcaaggtgacccattatctactctaatttatatccactatgagcttcttcccagttgttatacaatgccatattttaattcctgactgaatggttaggaaagcaaaatgtaactctgtaaacttgatcagcactaatgtacaacatattatggagggtaaagtgaagcaagaatatattcaagtaaaataaaatgtctttcatgggcattcanatcncacatctctctatatttctttcccaactaagagctataattaatcccatttattatttttctatagttcctcgtgcc

SEQ ID NO: 210060 - DNA, 640 bp, Homo Sapiens
ttttttttttttttttttaagagatgggaagactttactactagatcaattgggtaacaaagtaatgtggctgctagaaacattaattcagtgtgaggccgtatgaatggagtagaatcctggaaaggagaggtgaaggttcagctttactcccaacaaggttcatttccaagagtcctactttcagaggggcgttgttgagctgtagtcccagctattccggaggctgaggtgggagatcacttgtcctggaggtcaaggctgcagtaagcccacattgcaccactgcacaccagcctggatgacagagtgagaactgggtgttgggcaccgggctaaacatttcatcttcttcacaacgcaatgaggcaggtgctgttatctccattttgcagatttgtttggaaaagttaaatgacttgccaaccacacgacccttacggctcgcaggcgcggctgggcgttcgcgggggcctggtgctctacaacctgcccttccccttgctgcttacggcgctggcagccctgactctgctcggcctgggcgcggggctgccgccaccgctgcaaaacccactcctgctgggagcagtggcgctggtgcatggtgtagggttgctcgcgacagacctcctcgtgc

SEQ ID NO: 210061 - DNA, 583 bp, Homo Sapiens
ttttttttttttttttttaccatgagtctgccttttttattgtaagacaacaggtaaaagaaaccacacaaacatataaggcaaacactcttagaacgatcacccaggttatgaaatagaagttttccagcaaccccagacccttcacgtacaccttcctcactttaaccctttccactctagagattagttttagttttctatatcgtctaagtttaataattccatcagagatggatcagttttaaaattggaatccgttacgtagaagctatccccattggatagagcagggcttggcagaccccgcctttgaatgaacaagtcgacttgctcagataatccttggagggaagagacaaatgcgaggagtgtctccacagccctgctttgctttgctttcgtcactgtcgcccagccatcgcctctgaaggcctgtgaagttggagcggccagccccagaagtggtgcccaaagcctgtctctcagtggcctcacctctggagggctgggcaacagcactggtcagaagttccgacagctgaccaccctcttcggctgagctagaggtcttggctgggct

SEQ ID NO: 210062 - DNA, 545 bp, Homo Sapiens
ttttttttttttttttttgaattttctctccctttattctgaaaactctaccccctcacatccctaatccctgttctgtccctgccacatacacacacagacgtctgaccctgcacctccaagttcccaaagatattgtacgtagaaaaaacaaacctttttttattgacattcacactcaacactgaacactccttgccaccaactgtgtgggttttctcccacactggccaattctccaataccaactggatatcatacaattcaattctggcattaatcggcattaagtgcagatccccagcaggttaagagctcagtcccataagatctcccccaacttcagacaccagtcacaagcagtaggttccaaagttactcacatcttctatctgacgtggctacaaagcagaggttcccatgatttccttctcagatttcaccatttgctagagtagctcacagaactcaggaaagggctttatttactatcatcagtctattataaaataatataactcagaaacagccagatggaggcacag

SEQ ID NO: 210063 - DNA, 645 bp, Homo Sapiens
ttttttttttttttttttggaaaagatgagaaacgaggctttatttgctccaacagatattaaaagtatgagaaccacaaccatgaaaacaacagaagctgatgtgagaaacaacactaaaattaaacagtgcagacacaggtccagcgacaatgattttagcactcatacaggtggcatttcggtcagtgcatgatgattcagtgggcgaagcatttcagatccttgtctcatatcacacctcgaaatacattcctggtcaattaaacactgaaacgtactcagagaaaaagagatgaaagtgtaaataatctttgtgtgagaaaggactttccaagcatgacctcaaaggctagagcataagagtcttcgttttaaaatgtgcaggcatttctgatttaaaaatgtaaactatagcaggttacatcaaaaaggaaaaaaatacagttaaatggcaaatgatgcatgaggaataatgatttacagtgaatatgttacaggtttgctgtgcttaatatgtacaaatatcttacaagccaacaaaatattttcagaactaaatgccttcttagatagagaacaggaatgggcagttatcacagcagaacatatatgaacagacttcaggcacggggggaaggtatg

SEQ ID NO: 210064 - DNA, 594 bp, Homo Sapiens
  misc_feature (506)..(506): n is a, c, g, or t
ttttttttttttttttttagcgttttctttatttttgatttcccttttgattttattttcatgaaatgggtgaaggtatacagaagttggcttcagagctggtcatctcggataaacctgttgccctctgagtttttcccatagtaaacgtagcgacacttccccaggacaccttggtgactggtgagttccctggaagcagaaggcaagggcgtgtagtggcgctccggggagctggcaacgtcctcactagaagccttgggcttcaccaccttcatgaagactcctctgaccaacgcctcctctcgttcttgtctggttactttctgggcatccagaaatttcaagttgggcagcttgtacagaacaaagcatctgtatctcttgtagtcttcctcatccttttccaagctgaccagctcgttgggacaggccacgttgcccagcagactgaggtactccagagctggtgtcacttctgccaagtgatccagcaggttctccanatcagtgattcggttcttgttgagggttaaggtatgcagtctgggtaaccctggcaacacaaggtcgtcccccagctgattgttgtcc

SEQ ID NO: 210065 - DNA, 722 bp, Homo Sapiens
ttttttttttttttttttaccagcactatgaatgattaaaaatacaatatttttcttactaagtaggactaaacattctaatcccctactggaaaacaaaaaacaaaaaacaaaaactggaaaacttttcagaaagtcagcagtggtaacaagtcagtaagtggaagaactggttcaaagtttaagaattcagtaagataaggtatataggagctgtcagatcttcttttgcccacgtataaccatttctgacagacagccctaaacactagctgagagcttgactgcacaggaccacggctagtgttggaaataaagactgagccggacttgacatacacaactccggacagatgggaccctggaatggggctgctccatcaggccacagcttccagaaagagagcatccatgatctctgaagagcctcttgggcagcttggcccctggttataactatgattcattcattaagaaatgacaaaacaccccacagatgtatttggaccaagtaagcacaataaaagagctaaatcacggcttcttctagggcaaaatattatctggggaaagattacttgcttctgataattaaatagctaagaggaaccgttagtgccttttctctgctcagaatatcagaacaggaacagactgtggatatcctccaattccctctgacaatgagggttagagagaggtgcctagcagttagaaagcag

SEQ ID NO: 210066 - DNA, 810 bp, Homo Sapiens
  misc_feature (72)..(72): n is a, c, g, or t
  misc_feature (677)..(677): n is a, c, g, or t
  misc_feature (764)..(764): n is a, c, g, or t
ttttttttttttttttttaggtcttaatttcatttttactgttaaaataatttttaaaaactcaaccatttngggtgtaatagctactaacttagagagaaacaggattaaaagagggagctttttcttcccttgaacaggatgactctacttcacacggtaagagcagtcgttctacgtccacgcgatcagtgggttctggggcatgatcagatgggctttcctgcggtactgtcccatacaccagggatcaccaggtttgcagcagcacgggagggagatgggagcctgtgtgtctcgcagcacattatcacccgacagggtcctacaggtgagacgtgaacactgacagctgacctccacgtaaaagcaaagcctcatcttacgatacaagtactcagcggtttcttactggccatctgacaagctgctcttcctaacttctcttagtaccttccaacatgttcctaacccagaccctaatgctgtcctaacatacaagctgcaaagagaaaaagaacaggctgctaatttcttccctttgatttacaaacagctccattaacctgctcttccaaacatactcaagggctggccttgcagcctgcgggggagacggcctgatgctgggctctgtgaatccaggaaccggactcttcaccatgtttaacttctgnacttttcagctgctggagcagatggttagtgggattctactgggcaagcgcggacatgcacactcctgtcaactctggctttattanaccaataaactcgtgcgaatctggctcgagggcaatcctaatgagt

SEQ ID NO: 210067 - DNA, 731 bp, Homo Sapiens
  misc_feature (659)..(659): n is a, c, g, or t
  misc_feature (712)..(712): n is a, c, g, or t
ttttttttttttttttttaaacacaaaatagtctttatttgtcaacgaaggctacacgggatcacttctggttttgtttttatgcttttttttttctagaaggtatctacatctgcatttatttacagccttgttggtatttacacagtcaagatacagtgttagaaacacaaaagtgttgagaaaaaaacttctcaaaattggttccagacttcaggaaaatgatttccacatggtaaggccagagtctccagtgttggtcatccagaagcagcttggtacagactccttttgccgaagctgcgggttcagaggtgctcagaacaacaggtggatttagaaaagtgggattctggtgttgggtgaatccagggctgctggggcaccgccagacacctgaggctcagctcctgccaggacggccgagcgtgctccagactagtcctcccttggctgttcgccctcagaataaatcacattttcttggggaccaggaggtcacctagtaccttgcctttggcattccagagggggtaagaaacacaacattggccctcgcctgggccttcccacactctgatattccacattcgtaatgaaacctaagagtcaccactgtctagggcagtcaagtacacaaggatggtttttgtgaatgntcaggttggagaggataaggtttctctctatcacctcagcaatgagtctttanaatgagtttgctgtttttg

SEQ ID NO: 210068 - DNA, 778 bp, Homo Sapiens
ttttttttttttttttttcaaggttataaaaattactttatttcaaatgtgaaaatataaaaaccacttacatataaaatttaagagtattgaaagatctaaaatttaattttcagctttagctccttacaaatatacttaaattgaatgaaattgaatggaattaacctaagtgtccatcaactgataagtggataaagaaaatgtggtatatatgtaccatggactattactcagccataaagaagaataatgtattttgcagcaacttggacggaactgggggctgttatcctaagggaagtaactcaggaatggaaaaccaaatactgcatgttctcacttataagtggaagcttagctgtaggtacacaagaacatacacagtggtataagggatgttggagactcagaagggaagagggcggaaggagggtaatggatgaaaaattacctattgggtacaatgtacatcactcaggtgacaagtacattaaaagccgagtcttcaccactacacaattcacccctgtaagcaaaaagtgtgtacccctaaagctattaaaataaaaaattttaaagatactatatccataacaggcatacatttgaagaatattaatccttaagaggggaaaataattacattttttcactggtaaaaagcgcagaactgcagtgttcagtttgtagactgaccaacaccctctccattccaaagggttactcagagacaattataggaacctcgttgttgttggcagtgactggtgaaatg

SEQ ID NO: 210069 - DNA, 604 bp, Homo Sapiens
  misc_feature (585)..(585): n is a, c, g, or t
aattttttttttttttttaatttccaaactctttattatgtggtttacagagcatctgaagattggtttcatgagtctgaacttagtgtgaaagatgttcaaattcaaatccccaagccagcgcatcaatgtttttgtaggcttcacagtgctgggctccgcatccttctttggccgccttacaccaaaacgctgagtttggaaatcaaaagggtcagcccagtttcagtccctcttggaaaggtgacatatgtggttgtttcctcctttttttccttctctttttcttggggtttcatattttgtcctttcttttttcccatttatttgttttctctcttctcttcttcttaatttttcccttggcagcatcttcaatacttgaatctgtctggcttcctgaagacgatgatgaggaagaaggaaacataggatcatctgaagaaaaagacgtcactgatctatgtcgggatcggtgctggttttggttttgctttcttcttttctttcgtttgtgtttaccttcatatttgccagccctggcatcttcaggatttctgtgagtggacttcttatccatgtctnataaactccctgccatgtt

SEQ ID NO: 210070 - DNA, 734 bp, Homo Sapiens
  misc_feature (620)..(620): n is a, c, g, or t
tttttttttttttttcctggttttcactaagtctaattccaatgtctactggcagagattgtgtttgcatttgaggtagtggagggcggtactttccaagtgctgttggaatccagataaactcaaggagcccagaaagacaacgggtataatggctctcctcttatgacttagcactttagttgacttttttgaaaaagtctctgggtggaatacctcagtgatgatgatttgccaaacaagcagcgttagtgccaacaccttctctaaacttgctgcatcccttccaattgacattaatcccactgcaacttcctaaaaacaggaatgagccaatgagatttgcttattttctctcacccattacaagtaagtttgttcttgccctgcttgttttttagagggagtttctatcatagagttgaaaatcacatttaagaaggaaagagtttatgtctttacatgtaactattttattttttccaatctaaattcaatcacttcttaatagatatattggtgtttgcattgctggcatcaaaaccacacatacacacacaaacacacacatacacacaaacatagtggacagaaataagtaaaaatatttctgttttcanagaaaaagcattccttagagtttaggtaccattaacttctactataatacagttccggtactatggtttctaactaaatgaacactagaacagagctgactatattttcatctt

SEQ ID NO: 210071 - DNA, 639 bp, Homo Sapiens
ttttttttttttttttttagatgggctcaaaactgcagcctcaaaatcctgggctcaagggatcccccagcctcaggctctggagtagctgggattacagacgtgagccacagcacctgtccaaatttcttaattttgtatgtttagattttatacataattatgtattttagatttcatacatcattttatacccttttccatttcccccacggctctcactctctacccttgcttgaacatctagagcctgaagcgacgggttttccctgacactgaagcaaactctaggcaccaggtcaccaaaaaaacagaaagatgtagccaccacattttcttccagtctgtggcccatgccttggaaagctattgatctgtggtgatcctgcccaagctgccatgccccttccttgaaattaaaggaaaggagcgggcatgggctggaaactgcacacttgttaccctaacactactctgttctgctgagaggggagctgtgaactcctggcttccttccatttaccccaaattaatggcagcaatctcctattttggcgctattgaggtctttgtgtttacttcagtccttttggtttttacccagtttttaggccatcattattccagaagtcaaatatt

SEQ ID NO: 210072 - DNA, 705 bp, Homo Sapiens
ttttttttttttttttttccatacatccaatttatttaacaaggtggagcctcatctgaagcatttcctcacctgaaaaatggggataaacatatgaatctctagcgctgtagaaggcaatcatattatttactcagcccacagcaggccatgaaggaagctcctcatcttcctgatagctgcaaggccgtctctgtgctgggctctgtgtggggccttatatgccctagattcactctccagccttcagctttctccaccctcttctggaccccaggaatctgtcctctatggacagtgccactgggctcccttgtcctctggtttgctgctgtgtttggccaatgggaggcccaggcttgaagagggccatttttccattagagcatcaggctgacttattggtatcggacgaagactcctctccacgagtcaagtactggatttttttcctcttgagttcctcctggaggctctctcttaggcttatttcccgctctgttgcagcatatcccatttctttcatctcttgctcactttctatctcactggacagagcagttatttccttctgttgtctccacaagaagtaactggctccggcgagaagcagcagcaagataggcagggtccctgccagggctgcgatccagggctgggcgctcctgaagaaggggtctgcgatggaaatgctggctgtctttt

SEQ ID NO: 210073 - DNA, 729 bp, Homo Sapiens
ttttttttttttttttttgaatttaaatcatttattttcacttattactaatcttactacagagaataatacaatactataatgtatcatcctcagtaaattaatcttcacttagaaaatgttactgataaaatacaacatttagaattttcatttaaaaatacaaattttatgaaaatattaagaatttttaggatgggaattataaaagtcaatgctgaacaaaattctacttttagatagtatgtatcttaaaatattatgaaaaatattctttattctgaaaacaatgtcaggaaagaatacctgagttctctaaaaccactagttctaatttcaaattgctgttttggtaacataaagaaaacacatttacaatttaacactgcagttacctgtcaaataattagaatagaataaatgttgcatatacattaggttgaacattatatatattttaaaacacagggtggtttcatttaatcttttggtgaattggatcataagtcctacattctaaaaccatctggaaacatttttctggtagccctgaaaatccattctgatgccttatcagtagtcattatgaccaaatgacattagtattttgtggccttgatagtttatacaacttaatatatttgaaggtgtgatgaagtggctccatccttccatttgtttatatggtctgaaatcacagttctgcagagtggacatgttttctctctg

SEQ ID NO: 210074 - DNA, 739 bp, Homo Sapiens
  misc_feature (689)..(689): n is a, c, g, or t
ttttttttttttttttttaacaaatccaagagaagtttattatgaaaatggcacctgcggatgaaaaaattaagttacataaagacaaccatgtatgtgacatgtatgagaatctacaaaagtataaaaagaaccctgttgtaaatgaagtatgtacatttctgatttgcagcattatcaatggtcaatgaaaaaaaatgtttcaaaataagccaggcactcaggaagttaggtccggttagcttcacacaaaacaaatgtaccatagctgtcgctttgtaacgttttaattatttttttatatatatatcgtagagttggtaacactgctaagatttttacgaacagaatatccctttccccattattcagctacttggcaccagtctcctcataaaagttttcatatatttgtacaagaaatagttaaaaacacagacacagtcttcacaggtaatgaagtttttttttttttttcattttgtaattttcaacactatgaatttagacagcagctgtgattatctgttagtttaaatcaccagaaatcattttgacacaacacagaaacatttataaaagaaaaaaaacagctgtctagctgttctttgtagctgataggtgcattcctttgattgttcgatagctagagtagagcttccaaaattaatctgtaaatttctccatcnggcttcttcacctcctaaacctacttaaatccttcaagtaagctcactat

SEQ ID NO: 210075 - DNA, 692 bp, Homo Sapiens
ttttttttttttttttgtgacttccgcttttattgcattctgatgggatgagtgattacagaagctcagcatcacagatcgctctccccgtagagtgcggaagagaacgcagcgtaatccagtgcaccaggcacactgcctgggcccgagtaggcgggcatcctcttgatgcagtactgggcctgatccgggggcagctcccgacgcagctcctccgccaggatgtatggcttatcagaagccaggatccggaaggaggcgatgacctgctcggcagtgtcggtgtcagccgtctctctagtcatgaagtcgatgaaggattggaaggtgacggtgccttgcccgttgggatctaccagggtcataatgcgggcaaattcggcttcacccaggtcataacccatggaaatcaggcaggctctgaaatcctcatgatccatcaggccattcttcctcctgtcaaagtggttgaaggaggctctgaactcattcatctgctcctgggtgatgcccttcgcatctctcgtcaggatctgagtctccacctcattgatggttctggcgatggttgtcagcagcagctcccatccaacacgaatgtgctccatcgtgtagttcgtgtgcttgttgtcaaagacaagggcctcctggatgagctgatggtctccctccagcttgtcgatgttgttctt

SEQ ID NO: 210076 - DNA, 697 bp, Homo Sapiens
ttttttttttttttacttgtaaatttttatttgattttctaatcggaccattgtttgtttgctttactcgtaaaaatttgttctgttgtcatctgaaagtaagaagaaagcctctgactcttctaggggaagagtcctgatactacaacattaaaataatcaactgccaggttgtgtggagcacttaccctcacacggcaaggtcacagtggctcgcagttctagcatccagctgggcttgaacacagctagagctgtcttgggtgtaacaaatacagcacacttacttacaaatgcattgttcagtaactgttcattatctaagagaggtgtgaaagcaaagactgaatacttttcctctttaacacaaccatgttagatgatattgacacgttccctttttgtttaatgccatgtaccacacaacttcaactgactcctcgaacacacaatattgcaaactgtgctgaagagaactttagctcttttcagcattcaagtagtgtagcctgatgctaggttattaatatgcaaaaaatattaaaagatttttgggctggatatggtggctcatgcctataatcccagcactttgtgaggctgagttgggaggatcacttcaggtccaagagtttgagaccagcctgggcaatatagtgagatcccatctctaaaaaaaaaaatttttttttaatta

SEQ ID NO: 210077 - DNA, 564 bp, Homo Sapiens
ttttttttttttttttttacatccacaattttatttaataagtatatcattaacattttcttaatatatcagaaaagatgaaaagaaacaatatagaaatattttcagctatacaaattcagggcttccatgacaaataaaggctaaagattccacctttatttacatacatttttttcttcatagaaaaagtcgatatccaataaaatgttacctaatgtaaccccaggcaaagtgaatgccatgactggacaatggagacttattcgttgaaccgttacacctaattaccatgtgccagatactgttctaagcactctatggatgttagctcatttaatcttaaaaccatgtcatagaatatggtaaaaaataaaaatgaaaaaactaaaattgctacttttctccccacctcttcatcctaccccatcatatattgtcagtaaatggacagcaggagtccaatgaaaatatatttaacttggactcaaaagatttgagttagtttctggctctatttagggttctgtgtgaccttgaacaagttattgaaaccagaacttc

SEQ ID NO: 210078 - DNA, 523 bp, Homo Sapiens
ttttttttttttttttttgaaaaaaagggattaatttattttacaattttacaaatgataaaacaataatacccggttgctatacacaaacaataagaaaacagtgttgaacagaatgaacttgaacttgacagaataaacctcatctttcagttccacaaattctataagaaatactcagtagcaattattctctgcagcaatgctatctctgtaaactctttttttttcctgctatttacatttgaaacacttgtgcttttgcctacacaaagaaacggtttttattaaaaggtgctacttaaatgagaaacacaaggcctggagccacaatctgaaaactgtaattcgaatacattgctagcttgaagcctttacttttcttctttattattaagatttggacatactagacccttactgtaactctacgtatgaacgacatagaattcagttataaagtacatacctcttaaagcacgttagtaactgaagtctcaaaagaacttctttattctaaagt

SEQ ID NO: 210079 - DNA, 666 bp, Homo Sapiens
  misc_feature (559)..(559): n is a, c, g, or t
ttttttttttttttttttggatggttaattctgcagaatggcattttatttaacagacagcatggacttcatacatatccattatcagtgccttgaaaaccaaacaactttaaaagttagcagcagtttctgcaagtacaaaaatacacatttattacataacatatggtagtaaaatttgtcaagatatattatacaaactcaaagcattttagataaagcatcagtctaatatattatagattgatggagtataataaaatgacatatagtctgtcttcaaatcatacaatataatactttacagcaatattaacaaactattcacattaagaattacaggagtatctaagggaacacagatagtaggaatggttattaaaaaacctcagcaactattttcttctatgcttcaaattgggtgaatgattttttacctgctaacatgaaaaaaaaaaaaaggcaatttcttccagaaagacactccaagccgttaagagcttcattcacatcttgcagttctgactgacagtagtatgccctaagggaaaggggagtncctgctgactttatatattataccaaaaaagaggcatatggacacttagaagtcttaatatgtaggactggttagttataaagtgaaatcgacttcacatctgtgac

SEQ ID NO: 210080 - DNA, 703 bp, Homo Sapiens
  misc_feature (91)..(91): n is a, c, g, or t
  misc_feature (683)..(683): n is a, c, g, or t
tttttttttttttttcttagaaatattttattaactcttttaaaacaacttgtatactaacaactattgtattaatattttccattacctngagaatatatattaaaatatcccattgcaattatgcattttcaggtcaactttgtaattttgtcaggttattcattatacattctaaataatgagtcagtattaccatttgcatataagtccaagtactttttttctttaaaaaatgttaaagaaaatgtaaaggaaaaaattttttaaaattcttacatggtcacaatttttctcatgaatctaatttctcatttagaataccacaggaacaaagcatgcttttgtctgtgccatcttgccagagaccactagaatcacacctatagtcaaagagtggcatgtaaagagttgtaataaggatgaacacaaagcatcaatgacggagggttatccataagagggtgctcaagaggacttcttataggatttgtgtttcttttaggtgatttcattgccattcaacaaagtgaggtgtttgtattggatgctgttaggtgaactcaattccatccttggaaaattctaatagttcttatctaggaggcagaaagaatagagtggcactaacactaattcataagaagcacaagtcatattaggagatttctggtcatttttanagtttggagtctgttttctt

SEQ ID NO: 210081 - DNA, 631 bp, Homo Sapiens
ttttttttttttttttttccaatctgtaaaaaaattttcattatgtttattataaaaatataaatgtttccactacaaatcattttacattagtaagaggccatctacattgtacaacataaactgagtaatattttgaaaagacaagtttaaagtaaacacatattgccaatcatatcacatttatacatggcttgattgatatttagcacagcataaactgagtgagttaccagaaataaataatatatgtaaatcaaatttaagatacaaaacagatcatatggtacataacatcatgtaggagttgtggctttatgtttactgaaagtcaatgcagttcctgtacaaagagatggccgtaagcattctagtacctctactccatggttaagaatcgtacacttatgtttacatatgtacagggtaagaattgtgtaaagtaaatttatgagaggtcaaggagaaaaatattaataaaatgaagaacagtatatggtgtatacaacctctactttcagatggaaaccacagccaaaataagtgaaatagattcaacaatcctcaacttctattagtttatgaaatgcatgggttttgttgagtacgctcagaatagtacctaaaaaag

SEQ ID NO: 210082 - DNA, 752 bp, Homo Sapiens
  misc_feature (695)..(695): n is a, c, g, or t
ttttttttttttttttttaaaaccaaaagcagtggacatttattccttaacttttgtgcaagagtgtaaagatgcatttgaaagaacctgatggctagagcatcagccatggctttcaggttggcctagtttacaattaggaaaagaaggggggaaaaaaggtaacttgcctagttcacatgaatgatgtttctggcaaacacagttgtttacaagtttcaagctatattttactagggtcaagggaagacttcaaaaagccacatacagtacaatttaaaattgtgtgaacatcctgcaaatgttagtgcaaagtaattatgtagactctccaaacaagactgtgctcttgtttcccaggtttggtcaatgttgctcttttataattacaatcacagaagcttaacttaccaaatagcaatgcctctgtgttttatgtcctatgtaccaagggaatgtcacaaggttttgatgaaatgcagcttagtttcattaataaagcaaatttcttattgaatttaacaatcaagttcctggaatgctgcatgtgttgtttcatggaaatgctcttaagcttatgcctctaacttgttcaataaaattactcgtaagatatcctttttacaatgtaactggaattgtttcatgatcttaaaatgcaaccagtataaatgaacatttcagaagtgggaganaatccagcactaatctcagctagacaaacttctttaaaatgaaaaagcctattcaca

SEQ ID NO: 210083 - DNA, 720 bp, Homo Sapiens
  misc_feature (659)..(659): n is a, c, g, or t
  misc_feature (667)..(667): n is a, c, g, or t
ttttttttttttttttttaagagacagcctagctctgtcacccaggccgagtgcagtgttgtgatcacagcgcactacaacctcaaaatccgggacttaagtgatcctcctgcctcagcttgccaaactgctaggattattgaggtgatcggctgcactcaactccatttttttcatcagcctttttgtcaaggactgatgagccctgccttctggaaacattcttgataatcatgacattaattttctgattcccctctaacctctgaactcccctctcacttttctaaagcgctttcttttcctgctaatctgtcagggcccagaaacaaatcaacaggagttcccattggagtggtatgaaaagagagatgcatttcagggaagggtttagatacgtgaggtccatagtggctttactaagcattaatgggtggtgaaagggagaaagcaaagtcacaatccgatacaaatctagaagaaaatcttagtttgttgatttaacagttgttggtccttggcaatgtaccaggaaaataatgccttactacaaagcaatgacttccaaaccatactccagatggggagagaaggctaatgttttaaacgtctgtcttccctgaaatctgttttaagaaagggttaacactgctttttanagctttanaagtacacttaccagtatgatataagaaacacagctgggctcatgcctgtaat

SEQ ID NO: 210084 - DNA, 721 bp, Homo Sapiens
  misc_feature (654)..(654): n is a, c, g, or t
ttttttttttttttttttaattaaggctttcagacctaatctagccatgaccaaaggccaaactccacagctttgtacaactgaagctcagcagacctttctggactttctcccactgctcctgttctatagccagttgctgtgttcaccaaacttgcctgacccttcctcctcctgtgctttcactcactctcctcctattttaatactcatctccagcctgcagcaccccaggcagtacaccttcacatgaggaaaatttacccatctttctacgctgagttaaaattcttccttttatgaaacttccctgaagtctaccagcatgacattccttctctttcctaagtccctattgctcttctgcccatcccacacatttggcacctagtcacaagttgctttgtgatatttcatgtattactctatttattatgtataagtctaattttcccatttggagatatttaccctttatgtttcaagaatgatttgacacaacttacttaaagtataaaaacaaacaaaatcagacctcccaagtaaacagtaaacttcctaaggataatacgaaatccgtaaatcataaaatgtagggtggcataattaagcttaaggactatgtgttatgcatcttattcacacatctcctcnctcttcactcatgtcttatatacagacaaagtactttggtacttgctagaaagtgaacagtataaaa

SEQ ID NO: 210085 - DNA, 666 bp, Homo Sapiens
ttttttttttttttttttaggatagtgacacccagactgtatttgtcctggatataaattactgttgcattcaggcagcgataaatacagaggggcccggtgtgcagggcacagaccccacctgggtacagactcacatacaggacaagcccctcaccacagttacacacgattcatacagaccacagtccacaccagggctcgcgaagcaaaactaatcacaaaggactggtcttgaagatgacaatgacgtaaacaagagtgcacgctggaggccacaagcggccttacaatgcgtgtgtctgtgcagtttggcagatgcggggggtcgggggattagtggcatcaagggccccccaggaggctgcagcaggctgggccaggccacactcctgaggccaaaccagagccacttctgaggtcaaagccacacccaggaaagctccgcaggattggaggcccaggccagctgtgccccacaagggaagggggagatccgcaccgtgggaccgtttctcgtgggggagtcggggcttccccacagagcgggctccatttttggtcagactcctcccggggccagtgcaccatctgaatccttgggcacgtggaggcagctttgtctttggctgggtgcaccccagcctggcccagatgcaggaccct

SEQ ID NO: 210086 - DNA, 708 bp, Homo Sapiens
ttttttttttttttgtttgcagccattttttattccaaacatgtatgtttttgtaaacctgacatttcccaaacagtgcaagtgaatcagaagtgactgcttagactttaatacacgtgacattgtgaggcagcacaacctccccccacccaccaaaattcctcagtggaaatgtacatggatgcatcagtaaagttctggaaatgcagatagcgtgggtgcctgccaagcaattaatcactcgtaaagcttttaaactcactctgccagtcacaccgtgcacattagaattaaaacaacaacatcaacaaagaaaaaaccttaacacagtctgaaatctagatcattgtgctataaagcattgcacgatgttgggaaatttgttcacttattccccccatgtgctgaaaattcagaagacatcctagaagtttcattttggccctactggctctgtattctcccttcagccactctttgaatattctccactgtgtatattattattctatatatcaaaatatcagctaaaagtgtgcatactaaagcatttctgaaatgatgctcactttctgccttttgtctactaaaggctccaagtgacaatcctttccagcacctctaaattttgagaagtttgagccaagtatacagttcaccagatgtacgtttcacacgtaacccagacataactgcatgcacctggcc

SEQ ID NO: 210087 - DNA, 653 bp, Homo Sapiens
ttttttttttttttttttaaggaatatggttgcagcaaaacagaaaggatcccaaagtggttaggggccttgtctaatgcacttctgaaagtccattataaagatgaatagaaaagcaaatggtaggttttcagttgacccagaaaccacacatagctataagaaacataattgtgcatagttatttattcattcagaatgtgatatgttggctagctctacattcccagtctaccaaagaacagggctgtctactttgctaaacccagggtcctttcgaagctcccagtaggtgtcgttagaaacccaggcttctctttgattggcatcaataacttttttaaaaaattttggtatatgttcaagattgttttcttccatatatcgtctccgagatctctggagttcctctactctttacttctctgatgctgcagcttctaaatttccttcttccaaaaatctttgatctggccggaaccgggcgtctgttggtggaaggagatcttttagtactggatctaactcattgagctcaatagcaaaccttgtgaagccatagtacagctcatagtttgttggcatggaacctggtctccaaatgcactttgcagagggggccacaccacagtagagtccttcatgccactttc

SEQ ID NO: 210088 - DNA, 713 bp, Homo Sapiens
  misc_feature (631)..(631): n is a, c, g, or t
  misc_feature (657)..(657): n is a, c, g, or t
  misc_feature (680)..(681): n is a, c, g, or t
ttttttttttttttttttaatgaagaaatcttacgttttattgaatactttggccagatcagcccctttgaagggatcactaatttaggaaagaagaacaacaaaccatcattcactttcctgcaggttcatcgttttcctaattatttctatggatcctgctttattctttctgtaaattaaggggcaggaggagagtttctataatagatcagcaatgtctggttcttatccaaatattccacctaataaggatgtaaattctcatggattggacaatcactctgcaacattcctgagaattgaataatataataatcttgaaagtcagcagagtggattatccactttttttttctggacttgaacttgtgaactcaacagtagcactgcaaaaaagcaaacgtgctaagcactttgccagagtaaccttccatgtagacttttcatcttaaatacacacaactgaaaacaactacaatttttggaaaattatgtacaaacccgatacttcttttgattacatataaatacaaattagctatttttttcctaaaaagtggttataatagtaaataaatacaaaataaatctgaccattatacttcatgtgctggggttgaacccatantaaatgtacaactaaatacattttanatctttaaggaataattctctgnnataaatatttgttttcccaacttcttttcgta

SEQ ID NO: 210089 - DNA, 667 bp, Homo Sapiens
ttttttttttttttttttgactctgataaaagtggtctttattcaataatgaattagtaagatttcatttttttttggctaatcaatggagggggagatgagtaaaaccagtatgttattgactgagttaaatcttacaagttgccttcagttgaaaataggtatggaaaattataagtgtctttttgttcaaaataacattttaccttaaaaactaaacttaaatatgaagcaataaactataatgtacataaaagttttaaagaaatattcacataaccacaatttcctaattttctctattcccactactcagagggaaaccacagcttaattttggcctgatttctacctagatgctactttgcaatgctgatgcctttccatgattttactgtagaaatgtctatccagataaaagtcaaaagtccttttagtttctcagcgatgcttacagcctgtcttagattcaatcactggttatctgttactttaaaatacaaaacacttttttctgattcatctgctcacttctgttttatacaaagattagaaatgacttataaaattatataagaaatgtattgttacacctctagaatgattcatttttgttaatacaacctgccatccccaccacatagacaacacgtacataaaagtttac

SEQ ID NO: 210090 - DNA, 746 bp, Homo Sapiens
tttttttttttttttttggctcatcataatttattttatgttaaaatgtacagcttttttttgtttgttttttgtttttttgaagtgactgactaaaaagagaacagataaatacaagagtgtcgctggatcctattttatacaaggattacgcctctcctgcttggcccttactgtcaccctgtacaggtacaaaggctacaaaaaaggaagcaatataaacagacacaaataacttttttgcttttttacatgcgatttgtaagcttagtttgagctattcacaagctacttttctatttttccttaaaaaataactccaatattttataaagatagaaaaatctacagatggaatgaaaatgtaaagttagaggcatttccataaaatagcaactttacaccaaattcactatttttttttaaatcctgccaagtatttggacatatatgaaatgtttcaaaacctgacagataaacactgagatatgcttcattcaataaacagaagtctgcatttataaaacagaaagctgccttttttccccaaagaaatctgtcaccaaaatggaaaagggtctcaactttacaccaaacatttagcaataaaacccttttgactaaccaaatgggaatagcttttatagctctttacagttttataattaacaaaaatatagttttttttaaaaccctcaaattagggcacctaatcaaggcaaaaacttaagaatggttactgttag

SEQ ID NO: 210091 - DNA, 634 bp, Homo Sapiens
ttttttttttttgtttttcaacactttatttcaagcattaaaaaaaaagaaaaaatcaattaccttcaatagaacagaaaatctgaaaaattaaataaggctaggcatggtagcagatggaaaggaattactatcctgtatgattttaatgacaatgaccatgccaaataatatcacccagtgggataagggagtacacagaaaggcagaagttgaaattagtttgaagactacattgtatattacacaatatacattgcttaagcatcagcaacgtgaagcaacatcaatgccgtttctggatggttacagcagttatgtcaaaattagatttttaaaagtaaaaaggcaaagaaatttgccacatatttaataattactcttgggaatgactgcaaattagagatgttaggtattattgattcatttattctttagcaaatgtgtattgaacacatactatgtatcaggcaaatggatatcacctcccctactatggaagaataacagtaatcagataattaaaaattatatactccagggtggcagaatgacaatcagtaatcaaaattattacaaattatatactacaaggaaaacaaagaaataaaggaataatggaggatttacccta

SEQ ID NO: 210092 - DNA, 589 bp, Homo Sapiens
ttttttttttttttttttgctttccttttttttatttttaatttatggctttctgttacctggtatgctgtgtggcctgatgacatttaagtaatctgaaatgtaccagttcaatcaaagattgctaaaaagggcaatccattcttattagaaagtacagctgaaagtaacagaatgcgcaaaagaaagccatgttttcaatggacgttaaatagcaacaaaacagaaaagagaactcagttaactataaaattttatgaatgtccagaaacaatcacaccacagcacatgactgaaaactctatgagaaatagtgtgtttttctctactacataaattattgaaaggggtcatgtgattcttgtaggcagaaagatgcactttcccaaggaaagttcatcatgaaatatattatttaagactagatcatcttcaagctatttttaatcctatcgttttgctgccaaaattggccataagcagccaatcctcagacactagaaaaatgatgctctttcatgtaatttgtacactggcatgagaatggtattgctttccagttactcaaatgttttgctggatgtggact

SEQ ID NO: 210093 - DNA, 677 bp, Homo Sapiens
ttttttttttttttttttacaaataattatgttatttattttgaataaaaaagtggccaaaataacaatactaatggctctgtatacaaaccacaacatattcaaggttatctcacatttacaaaactgccattatgtacagcactacatattcacagcaactctattagactctaagtaccagaatcatgtaagcaattgaggggaatcccaaatgagaaagagctaaaaccaatggtagttcatcaattggagaaatggccaaccagcgacttggtaaagaaacagaggttctgttacccttttaacaagtaataactaaaatatgattaccccacagggccttatactgacaaaccaccctccccaaatttccatttcattttctccataatcttccccacttcaaaattttcctaggaacctcagctctaatattagataaaaacgcaggacactgatatgtaatcttcaggaaaagaaggttaagtagtgctaaggatgtgggatgatctggttcaacccaaaaaagccagttcaaacccaagaaagaactctgccctcttctggcaggagtagctttgtagtgttgaacacaggggaagtgaaccacattacatcctgatgaggcaggaagttactcactcattctacacgtcatgagcacctaccctgtg

SEQ ID NO: 210094 - DNA, 686 bp, Homo Sapiens
  misc_feature (602)..(602): n is a, c, g, or t
  misc_feature (611)..(611): n is a, c, g, or t
ttttttttttttttttttggcaaaatatattttatttgttcatacaaagaaatagtatgaattaccagaatttcacttgcctagaaacatctttctctgtgtaaaattaatttgtgttatacataggacaaaatacttgatttaattttttgtacatattggctatcctaacatccaagttatcgaagacatactgctagaatttgcacagtattttagattacttggttgaatgagactcagtgataaattaatgtcacaaaagtgagaaaacatctaaccacacctttaagttttattggccatcctcttgataagctgaaaagtcacattagcttctgtgtcagcatcttagatacgtactgtttctagtttattggaatcttccattttccttttttacaaaaatatcctggcaggatctgaaactgtttctccaaatgtctaaaatatatctgtcacacaaaatgacccccaaagagaatcctgggaagaaaacaatttctcctcctccatcatccaattaagtatttattaaacagtcactatacttaaaatacctttccaggtaccacctactaagttaacagactactgttcanacaccgcanagaaagcatgaactagatagaaacaagaaaaactcaatttttttttggttgactttttgtttgtttttacatgag

SEQ ID NO: 210095 - DNA, 640 bp, Homo Sapiens
ttttttttttttttttttcaaaaaaatggatttattgccaaactttaagaaaggcgcttcataagcagaagacacagaatgccaccctcctcaaggaggcaagcacggaatgccaccttcctcaagcacgcaagctaggcaggccctgcacgttctcactcctctcccagaagccagcttcctgcctagggcccagcctgctaaaggatggaaattaatagcatttggtcacttgaggtggccccagagctacttgcctacccaccaggccccagggagagtggctgggcctcaacctgtgacctacatgcagggtctctgcacccacagactctgccctcagtccagctgctgcagttagctacttgacacaggagggaactgaggctccaattcctggcagtaggtggcttggctaacgccccagccagccatggctgctggtgggggaaggctgttcctaaggcaagatggcaggggatcacatgactgggcaactgatgtccttcttgctcttgtcctggggcagatggagggaaagccagactgtggcatgggggcccagtttgcacaaggaggctgatgggggctcccgaaccagtgcattgctgctcacctctgctccggccccacgcagccc

SEQ ID NO: 210096 - DNA, 693 bp, Homo Sapiens
  misc_feature (617)..(617): n is a, c, g, or t
ttttttttttttttttctggttcagttcattgcaatttatttaatttaaaaataaaaacagaaacaaaaaccaaaatgaaacaaaaatcagtttccaacgaaaatacaaacactttgggtggttatccagcttgtttttcccctgtaggctgttctgggctcaaaccaatcaaatgagtgaaaaccaattttgacaggagccataaagcatgttgcaccaattaaattacaccaatatattattataatacctttgaaatgcctttcagaccaataaataaaaaagacaaattcaaataaaaaagtcaactttttattaccaaaaaaaatagaaattaaataaaagtcacaatgtggatttttttttttttaatgtgcagtcaagtttctctctttttttcttctaggaatgataccatgccagtaaatccctacagaacatttccagtttggcaacaagcagtcagtcgatcattcacatttgtactcaagacagcaggcctgggcaaaactcgcctgaatttcaccctgaaaagtgctccccatcatctgaagaagcagcacctggtaacaggcatggccattcagagggtacttagcattttcatttcacctgnggtcttgaagcacttcctgaaaactgattgtgccttgacatttacctgtaaaaagaagtgtaattctacccctttg

SEQ ID NO: 210097 - DNA, 696 bp, Homo Sapiens
ttttttttttttttttttaagcacaaagaaaggttatattttatcatgttaaaagtttcacagagataacaggtttacaattcaaattcccatgtcctgaaaactggcctcttaaataactcacctctcaaatcacagacgtgcaataatctgaaattattataatctaaagacttaaggaaataaccaattattacaattcatgttcactgtgaggaatatctagctatataaaatatagctacacaaaaccagaactcagtgaaacataacttttaagagcaagaaatctgcttgagattcgtatcagtagtcattaaacgaataaatgctaaaggtttacattcaagtgcttgaaggactactgcagagaaattcaattactaaaaacctttgctcagatgcctgtcaggcatattaaggatgggatgatgtgtgaaccaccagcagtggtattaaaccccaatcattttcaagacaagtaagatttagagctgttaagacattccagaatttggttcactgacactaaaagtggtattttaaaaaaagacctcatacagtctgctagcatatcatactaaccattagaggaggtagtgacacaaagtgttggcatttataatataagatcagcattaactgtaaaccattctaaatcactgtaagctactctttaaaacatatgtagtgaaa

SEQ ID NO: 210098 - DNA, 683 bp, Homo Sapiens
ttttttttttttttttttccatttcattaggactttatctcttgtgtctgttctttcccacccttagaatcccagttggcctcttcaagtagctttgttactgcctatctatacttctcgttcttctcctctagaccataagttccttgaaggcaagactgtacctttattaatttcctcatccccagaacttagcagagtacacccaacagagttcacaggtggtcaaagaggcagacaagtaaactggcccttaatgcacaacccagcaagtgtccttgaaaatgcacattttcaaggtgcttccagagccagaggagatagagaggactcacctccctatctgggcagtcgagaagcttcaggaaggacacaggcttacgcattgcttatcctttgattgggggatccaaaggaaagtcccatacaatgcatagattttttttttttttgagatagggtctcactctgtcacccaggctaagtaaagtggtgcaatgaggggtcactgtagccatgacctccctggctcaagtgatcctctcacatcagtgtccggagtagctgggactacaggcattcattaccatgtccagctaatttttttttctttgtagagatggggtctcactatgttgcccaggctcttctcgaactcctggtctcaatcctcctgcctcagc

SEQ ID NO: 210099 - DNA, 464 bp, Homo Sapiens
ttttttttttttttttttcactttttgtacaacttttaatttctaagacatttaaaaagtcacactaaaagtatctcatagaaacaaagactaacaatttgtaaacaaaacaatctgtaaacaaaaatcaattactagtgtgtccaaatgttatttttaaaagttaacattataccagttttttcaagtttaaaaagtcggtgctgcatctatgttcacattaaaaaaaaaaacttgtaagaattctgcctttatgcattaaataacgtgctaccaacaaaactagcacataagagcctgtaaatgatgaaaacctgtgtccctggcagacgaggtcatcactgaggctgcagggagggccatgggcacccagcagatggggaggccgcactgccgctgagagcaggtacacgtgcgcctttaacacatctgagagcaaaacgcgagaggctccgtccatctct

SEQ ID NO: 210100 - DNA, 486 bp, Homo Sapiens
ttttttttttttttttttgcattatcatcacatttaatgttgtgaaggaggtgttatcattattttacagatgaggaaactcaagcatagagatgctgacagacttatctgaggtcatattatattaaatggaaaaaatgggactggaacccaatcatctgaccactagcccagactctggacaaggcccaacagacataaaagtcatatccataaagacattcacaacaatgtaaccagtcccccaacaactgtaatacataggtactcacttaaatgcccaatgcagaaagcttaagcaaattacagttcaaaaacaagatggcatgctacacagccatttaaagtatttatgaggacaaagtaaaaatggggaaatgtttgaaatatacatgaaaaaagcagaatgcataaaatacatatatctactgattattataatgcaatgtctaccagggcagagatttttgtctgttttgtttacag

SEQ ID NO: 210101 - DNA, 592 bp, Homo Sapiens
ttttttttttttttttttccaaatcgaagcagctttattgcaccattaagtacatcactgcatcaaagacagtgccacaaatgcaaatccaatcggagaaggtagccctgagacatgtggtggctgcgagggagaaggacccccaacccttgaggagcagcgctggaagagaatcattccttaatatggctccaattccagaactgggctttatcatcacagaaggaatggccttgggctaaggctccaacataggtggagtcaagggcagttccccataggctgtggttcccctgctcctgtctcacagcctaagacagcttccagcaaaaggcagttcatccctttcaccttccatccaacctagcccacccttaataatgccggcagatgagaaattccattttaacagcgccaaagtttcctctcttggttctgctcagcacccatccctcacgtccatgagttgttcaaagggtgaacagcagtcagctctaccccagaccctgggctacagagaaatacggacctggaaataccaagtcagaggcagggaaaaggtaagggcaggctcatatacacagaagggaga

SEQ ID NO: 210102 - DNA, 742 bp, Homo Sapiens
  misc_feature (685)..(685): n is a, c, g, or t
ttttttttttttttttttagtttttatagttttatttcaggtaaaagtgcatttcttaaaaaaatgtttcaatatccagtttccattggcaagtgataacagttaaccctcaatgattcatgaaaagttttactgtgaatcaaacatagaattctgcccccctcaacagtcataaagaaccagaaatagtaactgtaagtgtgcctacttcaaacactgtataaagcagtggtcccctaaccttttttcaacagggaccggtttcgtggagacaatttccacagacacaggtgttggggtagatggtttcaggatgagactgttccacctcagatcatcgggtattagattctcataatgagcgcacaacctagatctcttgcatgtgcagttcacaatagggttcacgctcctgtaagaatctaatgccacccaggggtttgagacccctagtataaagcattacacaatcaaataaaactgactgcaccattatttccattatttgcaggtaactgaggaatgaacaagtacttctgttaggcttcaacttaaatcatttttaagacttatcaaatacaaatacttttgtgaatgtaaaactaagctctcttagcgtttaccaaatgatcgggacaacaatattagagggttaataaatgactgatttggcatctatcagtcnttttgtaagtgctatcagtcagggctatctacaggaggtagtgcagaaagcactgat

SEQ ID NO: 210103 - DNA, 687 bp, Homo Sapiens
  misc_feature (586)..(586): n is a, c, g, or t
ttttttttttttttttttggatctttctcttcaattttttgtcttctttcagtcttagtttctctaggctagaacatttctgtttcagaataggtcttggaggaaccttttcttttatgaccttgtgttcaaattcacatttaacttcaccaccactgctgaagatgataatcttagaaatgacaccttcacagtcaggggtaagacatattccttgtagaaaatccttgtcaattttatcattaaaggttgtagtttttaacttcttccagcaattcatgtgaaattctattttacagtactggcaacagctgatgcgtataaaacccttaaagtctggatcagttatgtatatctggatcttagaatatccatggcacttctgatagcaacaaatggcatctggcactggagggaacttgcattcttcaacaaatttctctaacagcatctttattttttgtggctgagactcttcaataatcacattactcgtgggccaagttaacactccaggaagacgataaatcaaggttcttgctttctcaaagtgattgagagcttctagaaatctgttttttttcanatacacttttccaattccacagtaggccaagcaatcaaggccctcactggggtagtgttcaataatcctcttaaactggttttcggcttcagataattcct

SEQ ID NO: 210104 - DNA, 714 bp, Homo Sapiens
  misc_feature (703)..(703): n is a, c, g, or t
ttttttttttttttttttgccattagaaatgcttttatttataaaagaactacttaaatataaacatctctacatagaaacactcttcacaaaaggactcttgcattactgccttctgaccacgaccagcagacactgtggatgtaaggactccacggtgtctcccgactcccaggattttaaggctaaatgtgcacttggagggaacaggggctgtaaggctatttcttccctttcttttaaaagacaaatttcatggtttcccattccaagataggcttcatagctggggaagatcttaagattcttggtctaaggggtaagcaaatatcttcctgagactgggaggtatgatcaggcacttgggaatctggctttgaatgtcatctctgaagcatggaagttagtggtgaaaaaaatcttatttccaagtctaggataagctacttctggaatggcttatcccaattcaagtaagtcacaggtgttatgttgtctgcatctatggatgtaactaaacagtcattagggtgcttggatgaagaagaaagacatccagtcttccattaggctcaactggtttcagctcaaagcagaactaatacttttaatggaatggctggagctctcatactgttactctaggaaaatctatcaattattgagtccagggcaggggggccaccagacatcacagactgtngtaagaccatc

SEQ ID NO: 210105 - DNA, 699 bp, Homo Sapiens
ttttttttttttttttttacatttttgtgttgttttattatatgattttttaagttacaaaaaaaaaaagagggaagaaggaaaagcaataaggcaaacttgccaataggttcatgaacaaaagtcaattatggaatgtggcagaaggcaaatataaatgtattcaaagttttacctttaacaattacacttgtggttccagttatctgttgataatataaattactccgtatttagtgactcaaacaacaattttatttctctctcatgggtctggagtttggctggattcagctaggtagttcttgctgagggtcattcatggggttgtcatcggatggtggctggtgatggaagcatctgaagacttactaattgcagccgggcatggtggctcatgcctacaattccagcactttgggagactgaggtaggaggattacttgagcttaggagttcaagaccagcctgggcaacatagtgagaacccatttcgatttatttaaaaaaaaaaattaaaaccaaaaagaaatgaaggcttactacttgcatatttggagcctgggctgggaaggctcacacatttggtcctcttctctctctctgtggttcttccacatggtctttccagtgttgtggcttcagggtaggtggttttcttccatggcagctcagggctccaaaggcacatgttctgag

SEQ ID NO: 210106 - DNA, 751 bp, Homo Sapiens
ttttttttttttttttttcccatctctatagctttattatttaagaatgttacaaaaacagaatcatacagtgtgtaaaactttaggattgtccccccaaaccacccaagcataattcccttgaggtccatgcaatttgttacatgtatcagtagtttgttccttcatattactatttagtattccatggtgtggacatactaaaccattcactctttttgaaggacatccaggttgtttccgggttttggctattataaatgaaggtgctatgtaacatttgtgaatgttaagttttaacttctcagggataactgtcaagtagtacaaatgccagttatatgttaaatgtatgtttagttttataagaaactgccaagaatattttccacagtggctctactatttcatatctcaccagcaacgtatgagtggtccacttatccaatttctcttgcatcctagcaaaacaactctaaaatttatcatttggaactgccttttctttctgcaatggtattacgtgtccttttagaattgaaatcaagggtagaaaggttagatttagtccagcctcccatttcatattagctgtagtaacaatcccctttacaacatttgatcattattgccacttaacacttccaggattagggagtagtatctttctttctgagggagtttatatcagtttgggtaacagattctcattggtcatttactgctttcctatttcttcctcatcttccat

SEQ ID NO: 210107 - DNA, 700 bp, Homo Sapiens
ttttttttttttttttttgcattgaccagtttattataaaagatacaactcagcctaatggaagagatgtgtagggcaagagaaaggagtggggaaaagatggagtaggtagttaaccctgggaagcagctgtgatgaaagaaatcccccttcctttttgttcttcaagagcagcttactgcaaagaatcttcttcctgttatgacttagatgatgctccctgttttaggtatcacaaagccacaaactctcctatttcctttttttccccctcataagcaattaaataaagagttttatcttcgatggtcaaaacaaaatatgtgttaaccaaagttgcttaaatttctccccttctccaaggtgcctgaggtttgtcccacccacagcctgagtcaacattcaacccctctttatgcccctcctaagaacaggctgacttcagggtgaaacattctctgatcagggatctgatttagtccaggagtcgtgcccttcccctcccaccttgaatcatgtttgctcctccctatgaaagaaaggcttttctgcttcaactgtgagatccacaaatatcttacagttggtgctttcctcctcttgcaatactcctttacaattaaggcacttcttacctatatccagatgttttatttgaccaagtcaagaaacagccccaggacactaacaattccaccct

SEQ ID NO: 210108 - DNA, 687 bp, Homo Sapiens
  misc_feature (655)..(655): n is a, c, g, or t
ttttttttttttttttttgcggggaatcaggtaggggcctttattggccagcacacatctacctcctggcatctgtcacaagcatttgcaggagtaggcggccccttcctctccatgtccccatccccaacctgagatgcgggagggcctgggggctcagagggaagaactgaggcaagaagcccccggtgatccagtcagaggattgggcagcctgacctcggggtggggaacccagcactggacaacaaggagggaggggcacaggagggctccccgaggtttggtcggggagggggaggaagactgccccctgccctgtcatctctgcatgtgccgagccccagctcctgactccctcagtgcctttgggcctggatgctcagacagcagatgagacgaagccttgtacctctatccctccttgaaggcctgcctccccccacttcacagagggaaactgaggcccaagcctctcctctcagcccttgctcagcctcagacatgtgcatggtgccaggactgagacctgcttacccctaaggcctagatggcagaagggaccctgaggacattaataaatatggacgggcggtccctggaggcagctggccgagtccaggtaggaggggaagcctggcctggtctgcctcangggccgccacaccctcagcctctctcgtcccg

SEQ ID NO: 210109 - DNA, 671 bp, Homo Sapiens
ttttttttttttttttttggatgaataaaaaggtttggatttaatgaaggggaaaaaaagaggcagaggaggtgagcctgaggctagaaccgctcactcgaccccccacccccagcctacagttgtggggtcttgctctgtaagcccaagtccagaagcttgttccctgcctggaggaccgccgtggcatgtctatacctcgttggggtcatcctggtcggcatagattaggaagcccgtaaagaggctgtctgtccagtaagggtcatagaagagcccgttctgctctgagtagaagatctgcagccaaacttcgtcaccctgcttgagagccaggatggtggagcctgaggccacatcgtggttgccggtgttggcatcaaaggtccggatgcggtactggccgttgtgcaccaggccgatggccaggtgcttgttggccagcgtgatgtcgtaggtgaagtagtagatcccaggcacgccgcagacgaacttgccgctggaagcattgtagtggccaccctcgtacatcagaatcttgtcaaacttgatgggcagccgctcccgtgggtagctcttggtcactgccaccgagaaagctgacttggtatggccactgccacagctgcaggggcctgggaggcctggctcccccttcttgcccttgggcc

SEQ ID NO: 210110 - DNA, 693 bp, Homo Sapiens
ttttttttttttttatttaaagccaatttttatttaagtagtcttcatttttgaagcattttcccctagtactctaatttcaaaatcagtatctctcaaatgctgatgccactgggaaaaatttccaaattggtaatggaaacatatgctatgtgcatctgctcaaactagcaacaacatgatgtcaaataaaaatggatggcattaaaaaaaaaatccaaaaacctataatggcaactcaaagcagcaataataagaagaagagattaaaatctctagttaaaaacaatcaagacttgcagattaaatctgaactttactccttctgttagtacaaatcagaaacttcttgctactcaaattcaaacagggtgcaatgaatgtgttactttcgtattcccagtaactacctttcctcacctgctccctacattctggctttcttctaaaaatttccccctcctttgggtgaattcctctcttgattagctcaggaacggaatgtgatccaatctgggcaaaataaaagtacttctccaaaattttacatagcttgctttataaaagctttcagccttgttatgctaaggtaagctgaaaatgtcaattgctgttatccaccatcctctcacctcactgttcctcatcccatacagaatatccccaaagggaaaatctgaaaagaaaacaatc

SEQ ID NO: 210111 - DNA, 796 bp, Homo Sapiens
ttttttttttttttttttgcagaaaagaacacaaagatagttttattaatttagaacaaattttgagaactttacatagacagaaatcttctatctcctttttttctaattttggggaatgtcttccactagtggtcgctaaaaatgtagaaatatcatagggagtgcaaattacattgtctctttacctgccacaatctggcagcactcatcatgtagcaaatgcccaaataatagactacagattatagtgacttcaccctaggttaacattatttctaggtaaggtactagtatatctgaattgaaaagtagggcagctgttgactcagattcggcattttaattacattgtttccaagtatgatattctgagagtgtctatagcacttagtgtctgcttcatataaactaccagttattatatatttatgatgcaagtagttttccaaatgtggtgaaagtctgagtctttttatccccatgggtaaaatctgaatctggctctctgtgtctctcagtgcttgtttattgctggtcagagagtaaattcttgataaaagctgttgacttggctctcacagtttatgcagacattggagagacatttggttatttcaaacatcacaggatttgagtaagaagactggttatgaaacaaggtctcataattactagttatgactgttgacaagttacttttcttgtttacaagttattggctctttgattacttgtaaatagaatagggatcttcttgatatggacacaatgagtattgatgaatacttgcact

SEQ ID NO: 210112 - DNA, 762 bp, Homo Sapiens
ttttttttttttttttttaggcagaatcaacccatgcttttattttcattgcatataaaaatttcatatgaaggtattgatgtacagtactatccccgtgggctgtaagagaggctaagaaaccactaaaagaataatcatttgtaattctcacacacaatttaccactctgaaaatatatccaaagaaataaaaacaactcaaatcagttaaggatgtttttgtaattatagtgtcccctttgtactgtttaaaacaaaagtaatcaaattcctttgggccagggctgctaaaatctacagtttgtgtcaaaaaataaaataaaataaaataaaataggctcatttttcctagaaaaagaatctttcctttcactgaaaagccacatgattcaagggctgggcaagtactgggaggatgtttccatataatccattataaatgtttcctgctttaggggctggccattgtacaaggtgaaattttaaaattctaaagcaatgaaagttttgcagaaacaaatcttagaggatagtgaatgctttctgctatgtaaactgacatcaacccaactttgcgtttaaatagatgggtttacatatatgtaaggacatttggtttatcttagtggaagaaaattttaggattaaaaacatattttctctttaatgtatctcttaacatgtcaggaagctgatgaatagataacaacacgagtaactctggctccatttcaaatcaagtcattttcctatgagctct

SEQ ID NO: 210113 - DNA, 622 bp, Homo Sapiens
  misc_feature (599)..(599): n is a, c, g, or t
  misc_feature (619)..(619): n is a, c, g, or t
ttttttttttttttttctggctcacaactttaattgattgctttccctccactgggcccaccgggtcggcttacatagctcatagctcagtgctgctgaaatagacccagggcaagaaaggtatgaacaaccagtgaatgccactggagcataaatgttcacaaaattgtagagaaggggtgacaagaagcaagcagtggggcagggagtgtcactgatgtccgaaaccccgggtcagaccaacacgcagcacagccactcggccagagagagctgaaccatgccatccttgtcttcgtccagaaggctgaatagtttgaagagggtctccaggcggatcatacaagccacgaagctgtcaaagttgatgccaagcttgctgcacgcataccgcagggcaatggtctgctgcacctggctgttgagggtgaaacctgccttcctgagggctgtcctcatctcgtgggcatcgatggtgcccgagtggttataatcagtttcccaatagatctcctaaagcaggaaagaaatcccaagtagaaaacaaccattcacggcccctgccagaaccatctccctccaccacactgctttctcanaaggccagggacactttcanaag

SEQ ID NO: 210114 - DNA, 631 bp, Homo Sapiens
ttttttttttttttttttaagctaatcagctatcattagtgttagtgtactttatgcgtggcctgagacaattcttattcttccagtatggcccagggaagccaaaagattggacatccctgatttaggcagtctccagaggaaaaattcctgactcacctaaatcacactgaagaatatatcaatacaatggtcttattaccttaaaattaacctgttaaattttctttccatgttctctaacctttcctagtcaaactggaaaatatccaataaaattagtgtagagaaaccatactcaattctataacgaataatctctcatcttctcacgaatttcctggaagtaatgagtgtggactgaagaagcagacatatagcacacagactgggtcccaagttacaagcacactgacgttatctagcttcaaaggcatactgcctttcagagtctaaaacagagcgatgtgcatcataagagatagcctatcagatccctaggccccaaatgtaccaaaggtcagttttctaaaggcaatgtctatttttaaacgaatataagttgggttctaaatctgacctccatttaaatgatcaactggggaggaatgtctggctggactcctaagca

SEQ ID NO: 210115 - DNA, 694 bp, Homo Sapiens
ttttttttttttttttttcacattaatcataacttttttaattaacaagtagtgaatcggacactttaagatattgtttactacatactgaaataaacagatctgtttaaattcagaaacccaaacatttacagtaaaatgtgcttacacataaatatgaccaaatttatttaaagcccctattagatagatcctaagtacatgcaattaccatgtaaaaacaagaccatgaagttgatgtaaaaaatgacaaaatcactaagtcaccaaaactagaaaaaaaaaaatgaaatggaaactgagaaaagacagttaataaaacataaggaacctaacaaagcagctttaaaaataggccatactaatccttccattttcaaaagttcttatcaagtaattccaaaaactgccatttataaaatgacattctaaaaatctacacttggaatttcaaagtatctcaattcagaaagctttgactactgtttctccccagcccacaatttcaaataatgcaggaaaagtattgacgtaaggaagaaaatactccaacagaatgttatagtttttagaaaaatgaacttactgctttccagaaccttttaagacccacagtcagcattaacaatcatttttcctattttcatccattattttccaatatcatgttagagatgaataattctttgagccc

SEQ ID NO: 210116 - DNA, 685 bp, Homo Sapiens
ttttttttttttttttttaaataatgagaattagttcatgttaggagtgcatggatctatgattccacccaacactcccccctcaagatcttacggggtagatgccatttgaagcaaagggagtgtgatggttgatcctggtataacatcaggagctttaaatcccaaaaatgtggggttgctcatcttggcccagtagtttgccgctgttgctaagtttgggaacattcgtggtgacagctccccaataatggggtggcaaagtacacccccaaactcaaaatatttccccaatgcctttttaaccattgttttttttctcctcaaagactgggatctcagacacaatggcccgtagagcaatggagccatccatgcactgatctagaaacattctcacagcattaataggttgtcatctgtgctttcttggcaactaacttgacttgcgtagcttgtgtagaggggattcaaagtctccaaatagaagtgtgaacattaattctccaacccatggtcttgagctgatccaacctatggctgattctgcattgcagctgattagcagatcagcactctcaccatgtgaaagtcttccaatagatgccatcattgccttgaatcgtctctgaacttggagactgctggtgcaatcttatcacttgatccagccgcaatgcctatc

SEQ ID NO: 210117 - DNA, 722 bp, Homo Sapiens
  misc_feature (656)..(656): n is a, c, g, or t
  misc_feature (700)..(700): n is a, c, g, or t
tttttttttttttttattattggaacatttattaatatttgtaaggtgcagactatgatacacaaaaagacagtgatgtgaaataacaggcatcttcatcagaggtctgctttgcagcctgtgagtttagttgtcagcagtacactcaaggctgaggacttggcgccttgggttcctttgcctctgacacaaagcaaggaccttcagtactagctgatgctccaatcagttttttgttcatacacactgttggccattgtgaatctttcttatcatgccttccaaggaaaccaatacctacctccaccaccatcacattgcaaacgaccaaaagcacatatgttcatgatgctttgttcagagctggcccgaaaatgaatccatatgagagtcacgtgacaggagctggctatgagacttacttaagacagcaatgggaatgtccccaggttaataaactagagcatgttcaaaacagagcagggaactaccaacctcttccttctaagaagatctgacaggctctttggctgatttgaaagcagtccccctgaagctgacccggttctaaagttgaaaatgctaagtttaccttgccatgtcctctgacattttgataggggtttattttatgctggggttgctgattcttccanaatctgggtttctgggatttgctttattcagcaggaacctacanagtctgtgtttattcttgactg

SEQ ID NO: 210118 - DNA, 730 bp, Homo Sapiens
  misc_feature (697)..(697): n is a, c, g, or t
ttttttttttttttttttagaggctggaagaaaacatttataccaagtcagcagagaaaagattgatcacacttattagagtcaaagatttccaacaaattaacaagcaaagggcaaacatcttaaaacaaaaagacaatgcagaaaagaaaatacaaatgtctggcaaataagtggaaagatgacttcattcatgattaaggaaatgcagcttttaaaatcggttttcctcctaaataggccaaaaaaaaaaccaaaagtctgagaatgccaagtgttggtgaaggtgtaaaaaaataatcagtctcctaccctcttgggagaaatgtaaattgacaccaccatttcagagagcaatttggcagtttctctcagaatactgaatgcccataccctttgccccagaaatcccgtacggaaatctacctcgcagaaatacttgcacgccatgcaatcatgttcatggcggcaatgtctgtaattgatgaaaaattggagctacttaaatgttcatgattatgggaccagctaaagaaaatatgacacatccctgccttggaatttcatgcagtcaccaataaagattgggtcaattcagatggctgatacagaatatagttaataaagtaaaaatatagtgagttgacaaagcatgaccacactttcattttttaatttgcatgtagtgtgacatgantacacacacacacataccaccgctagggagttt

SEQ ID NO: 210119 - DNA, 608 bp, Homo Sapiens
ttttttttttttttttttaaggttattgaaagattattgaaagtatgacctagacacggtgagaaatgtgatttcaggagtcagaattccgatgcagaaaggacaactcaacaccaaatgcagaaaccgcgcaggatggagcccctggctctgctgtgactctctctccagccatttcacttagaaaccgcgcaggacggagaacctggctctgctgtaactctctctccagccatttcacttctaggattttatctgaaattttaaaatcaggcgtggatcaagacatatgcacaaaggtgctcgcttcagcatcactttaaaaaccacaggcaccgcggaattttccacagttggtaaatagattatgacgtgagcagtggaggattttgtgtatcttcagagaatagcaaagctccgttccaaagtgtccttaatgatccaaggcatgacggccaatgaggaaagctggaaagtgaaaccgagtgacttaatccaggtttcgtttgaaacaaataagaatgtgtgtggatgtgtggtgagagtgtggcatttggagtgtggcttgtgagactgtgaccctgtgtcatgtgcacacatggctgtgt

SEQ ID NO: 210120 - DNA, 699 bp, Homo Sapiens
ttttttttttttttttttcccaaacactctatccttttattccttcccaggctattgcaggaaaagtcttgtttcccaaacgctgtgcctttctcctcttgccttcaaccctggaggggcccaactacacaagtggcttatttggagaagggaatgaggttgaataaagaaagctcagcttccagaacaccacactctcttggttttctctgaccttaaggtaactccttctcagtcctttggctgatttcccatttcccagagagcccaagggctccatccatggctcttttctgttgcttctcagtaatactcagagacaatctcagtggcccctccagctgcatggctttaaatgccactgacatgctgatggttcagtagggggcgctgtggtgccctgccagatcccttcacacagccagtgcccaggacccccacccccaacacactaccatgcatggtagctgccagatgcctacagcctcttttccagagacttgccctcaactgaagtcacttgccttcaaatgtacccacactcccagagaacttctcacagccaataaatgactgataaaggctttcacaggttccttctgagagcacccccaacaataaccaagtgcattcagatccctgtctcgagctctgctgcagacctgacctgagagaactctccactttgatttgcagcca

SEQ ID NO: 210121 - DNA, 739 bp, Homo Sapiens
ttttttttttttttttctattaaaatactttatgaaatgatatgtaaaattattatacaggatgaattttattagtctctgcttttaaaagcttttaacaagaagtctgctgctagtcctggggacagggccccaatgagaaccttttgttccagaagtggaatctgttcccggactgtggggtgggtcctgaaatgctctaacacactttcctgaatgagattccacatccaaactttctgttgcttccgtcgtttggcagtcagctccccactggcaagcattaggtcctggaaatctttcattttatcccacatttcagagatcccctctccacttcgggcagaaatacgaattacctttggtttccagacttgtgaacgtttgcggagtaatttcagtgcactcacatattccgcttgtatccttcgagctggcacaatcaagtctccatcagatttagttacagctaccagatctgccatctcgattataccccttttgataccctgcagctcatctcctcctgctggtggcagtagtaaaacaaacatgtcaaccatgtcagcaacagcaaactccgactgacccacacctgaaattgtaaatcacaactatatcctaaaatactcaccattatttgactttctcaactacattgaccatttccattctacttcatttactcatactcatggtcacacagtcaacctggtcactccctttaacatctcacttt

SEQ ID NO: 210122 - DNA, 721 bp, Homo Sapiens
ttttttttttttttttttaaggaaaaatagctttatttttaaaagaaataaattctctatttaaagcatacatgagatagtatctttcatttagtcctaagcttgattatttatgctcattgtaatattccagtgacattctggacataaatttcaagtatatcaccatatacttattgttaaatatcaaacaaagctactgactgtgagggaaaaatttcagtgattttttttgtttgtttttttgttacttaccctgagatactcatcccacagtatatctgagatttagctgaacatttacaaattttaacaaattttttttctttccattgcatgcatcgatatgccaaattctgcacttcaatccaggtaaaataatgatagtgtttgtaaaccagatagtgaaaaccagtgtgttttctaatactgcccatgatagacagagtgaaatcacagcataaacagtagccaggaacctatactgcaaacatttggcttcaagtatcttgcaacaaatagctactaatatgaccatacacggcacatagaacaccacagtcctggattgtagcatgcctgtaaaacccattaaagcatttttttctcaaactttttgttcattattaccctccttcccaattacagaaattaaattcaaattacattaaatagttttaactacaaatttcttcccaatgagataattaatactaaggaa

SEQ ID NO: 210123 - DNA, 738 bp, Homo Sapiens
  misc_feature (21)..(21): n is a, c, g, or t
ttttttttttttttttttagnttagagtcttttattaatcattttgtgtaaaacaacaattaccacaaaaaagctagatttctgacatacttagaaactaactcatgctgaaattatataatccttaggacaagtttacaaagctatgcaatgacaaaaaacattagctatcccatcaagttaaagaaacgccaagaacgaaactgatataatcattaccatgttaaaaattcatgattttttctctctacttttctgtattttacaaatttttaatgtgaatactttaatacaaattgttttagaaacaactgactcatttcagacgtaagaaataatatatattttatatctcaagagtaatgtagacagtaccaagatatttcttatgaacagttctctatctaggtaatctttggaaggagagaacattgcatatacctcttccctgaaggctatgattctgtctcgatcactgctgtacctactggagcaccccataatgtgctttttatacagtggatgttcagtatatactggctaatttttaagctgttgataagaagatctttaaaacatgccttacttataatgatccagcatccttcttttgaaaaatttaaaatctcatgctctttaaaaagtgcttttttttccctttaagaaatgatgaaatagagacaacagttaataattggtacaggttagagccctaacatgaagatgtggctccccctg

SEQ ID NO: 210124 - DNA, 632 bp, Homo Sapiens
ttttttttttttgtctttaaacacagactttaatggtaacaattcctttaagctcaattaacttcagctattacaagtcttatgcagatgtcactattagacaatatttagtgacttgcactgggttcctcataaaagacaaattcacttaaaagtgtaatcaacaatcattaacagttttgttatgccaacacaaaacatggctgagttacccccctccccgcccaaattactaacacagcatgatcagtaccttaagtatacttcaactaagccatttcaacaaacaaacaaaaaaaaacaaacaaaaaaaaaagtgagtgtttcactacccctgagaccactagttaactgtggttcatactttaaaatgtgagtacacccacacaagaaagcaaattaatcagttttaaaaaatctgattatcacattgcaaactcgcccaggaaaaacaaactgagtcatttaaaatgtaaatttaccattaacaggccaactggaccctaattcggtttatgcattaaaagatttaggaaatacaaagacatagtcaaaactgattctaatactcagttgggtcctatacatggcactagtaatgtcaaattactgggtggagtggggcaaagagg

SEQ ID NO: 210125 - DNA, 693 bp, Homo Sapiens
ttttttttttttttttttaaattacggtaactttttattataccaaggtgttctaatgccatcatatgaagacagatgcttcaaacaacctgcattaaattatatttttaataaaattaaaatctatttttaacctatttgtagtcacaaaccgaaaacgtgtcgtctttaccttagagctaaaggcttactttatgcatacggtatatttaatagtctacaaatcaaagatttaaacagtcccttaaaaattccatatattctcataccaactcatctacatagaaatgaaaatctctattgttctcacaaaccattaccatgagttcactataacaactggatcaatatggcttgcctttcaaagttaaagaatcagaaaggggcctgtaagaagtcatttagcccaattccctcaccctgtgtgttttccctcaaagccagtgcaatttttttttaaccaaaaaactggacatgtttaatacatacagtttgacaaatttggatttcactctttgttttgatgtagtaactcttttataaaagggaacagattcagacaagctcagtggcccaactgaagacattcagcaattaatggcaggacttcagtaatcagtggcaggactacaacatacatctcttcatgctagggaaaccaggctctctattataaagctgaccagggctatt

SEQ ID NO: 210126 - DNA, 731 bp, Homo Sapiens
ttttttttttttttttttagggtaaaactgtatgcctttattcaacatagaatgagtcagtaaaatatggtttgtctatgtgcagaaacatacattcaacttcgaagaaggttgtttttatacgaccaatgaaacagcctaaaagtgacaggaaagaagacaatagtgaggagctaaaaggcagagtttatttgtcaaagtgctaaggcctatgcgcacaaagattttaagtgaataagaattacatacggtaatttcttccattccgacttctcttagtgctggtgaagggtgcaatgcagtcacagaattaagacaggtttttttttttttaaaaaaaataggtcaaagcacttacagctaagtgtttttttttctttcaaatttctagagtttcatttgttatgttctctagatctttcatggattctagaaattttgtgaattctctgagaacttgctctttaatcagtactttattattagagaataaattaagatgtttgtcccaacctagaatctgtctccttatctaacaaaggggtaaccaaatccaagactctggaagcatctgattaacttaaaatgtgtgcaaagtgattatatgtaggttaagctggggtcactactgaagaagtctccaaactactgaaacttgcctgaaaatctaaaatgaaaagaactgctgactttcgggtcaaagcccaactctattataatttccaagctct

SEQ ID NO: 210127 - DNA, 789 bp, Homo Sapiens
ttttttttttttttttttaagacaggggtcttgctatgaggcccaggctggtctcaaactcctggactcaaacaatcctcccacctcagcctctcaaagtgctgggattataggcgtgagccactgcacccgaactattggggcataattacagtaagttaaaagacaaaaaaaggagaaaaaacggtcaatttgaatccttgaagatagaaaggcgaattattaactttcccaaatttgttttcttcaaacttttgtaaatgtcaattttacagggctaacatatttggtgaaacagattgttttaataaacagttacctcttaaaaaagagcttttcaaaaatagcatgtacctggcataaagtctagccatgtgtcagaaaatgagtgtgttttcagaagaaccaaacagcctcacttgatactataaaccccattttgaagacttaggcacataaactcagttaaaacattggggaatatccagttcttcaaaccacaatctaacctgttctgtgatgttttaataggtgcctaacctgctttcagctccaactaccccataaagatttcttgtctcgaccagcagggttgaagacatttttgaataagttgacttaaaccacagtctatcagtcagctttgaccacagcaaaaacaggctctgcaattgctagaaaagaattcatacttgagaattttctacctaaaaaattcagacctgagaaattcatacttgagaactgaattaagaaagcctgaacaatcttaattcatgtatatcatat

SEQ ID NO: 210128 - DNA, 792 bp, Homo Sapiens
  misc_feature (766)..(766): n is a, c, g, or t
ttttttttttttttttttaaatatttatgtggagtttttaatccatattagaattcagttgttgtaacttgaccataaatttaaacagaaaccatcttctgagacatacattctaataaatgtatcaacagtactgatagtcaacgaagggtcaatttaaacttattagtaacatttcatttttctatccaacagaaatctatagtggtttgccccattacatatctgaaacattgtcttatgaaaacaaaatgaaacaaaattaaataaaattgaagataaaaatactctggaagcacaggatatctgacaagaatcttcagcacaaagcacatgtttgaaaacgtgaaacgatgactctttggaggacaatagctaaatatccaagaatcatcaggtttgagaaatattgcttaatcactttccaaaacacagctgcaagaattgaagatttcattaaaactatcaaggtcatcatatttattgcatctttagattgcattttgaaacagaaaattaatagtgcaccacagcttcaccaaaatatatatttaggggcagggaggacctaggatatttataaacaaagtatagactgtatgtgcttttcagaggggctgaattaaatataaccagctgccaactttgtgctctgacatacttgaattagtgggtatgtgtatactaaattcattatttttgtctacaataaatgaaataaaaacaccacctatacatccactattagcagtgagtacaacagcanaaaaatattgtacatttacacatact

SEQ ID NO: 210129 - DNA, 759 bp, Homo Sapiens
  misc_feature (730)..(730): n is a, c, g, or t
ttttttttttttttttttaattttaaaatgttcttttttggtcagtagtcttagtaagagatttatatgaaaagaggtaggagtatataaatagggtgttaaatatatcatgtcaccaaaaaatttacccgagaaatagaagtttaaaagcaattttaaaaaaccttcaatcaacaatatataaataacttaatctgaggtaagagggaaaaatgccctgcaaacactttagaaaaacacatctctgccacactacagaaatagacctttaccacatcttctgaatccccagttccctccatctaccaaagattttgggcaccagaactaaagatgagaatctctcccacccctaccacttccaggtaaacacaaagttcatgttcagccaggctaaagtacaagaaaactgaacccactctccatcccaccccatcctaggataggtggggccagggcagaaatcatggaatgctcaggactccacccctcccaagtgcactgaggtaagttctggaactgagcttcctcccaacaagccactcacctcctctgggagttcattcacctcctctcccttcctcaaaggacaatgtttaatctctgaaattcctcttgccttgtcagcagccaccatctggctgccactccaaccagtcctcaaaagaactcagcctccaaccctgaccccaaatctgtccaacctggttctatagtgtcttccatctgnacgagctctagagtgacagctccatatca

SEQ ID NO: 210130 - DNA, 685 bp, Homo Sapiens
  misc_feature (499)..(499): n is a, c, g, or t
ttttttttttttttttttaagttgcgaccatttattaaaatggggaggagtgtgcaggcatggccaggcacctctggctgagggcagggcagggccttagccaggggagcagcttgtccacttactgccagccttgttcacgccccaaaaccccgccccacgggcctgtctcagccagcgtcaggggccagaggccgccccggccaccggtccgtgtcctaggcttggaggcagcttccaaacctcccaggggctccgatctgctcaagagggaaaagcgatgccttctgggagacagaaagctgctcttccacccggagagcaggatgccgtggggagggaggtcacctgaaggccgaagcagctggtgagcaccaagtgtggccgcggccagagtccacccacgcctgctcactcatgcagacgacgcttgagggtctgcagagaggccgggcagggcctgcgaggacggaccccggtggggaggatggacccgcanagagcttgtggcagccgggcgagctgggagcagcaggcgtgcagccggggcagctgggctgggcgcgggcacagaccgcaggggtctcggcaaggatgagcaccatgttggggcgggtggggacggcacaggcctcggtcccgggggacaggcgtctgtctgtctgtctccagtgggcgccaggca

SEQ ID NO: 210131 - DNA, 706 bp, Homo Sapiens
ttttttttttttttttttacacagtactgagtccccatcaaggagacatttaacagaaactcctactgacatccattggttccttggggattactgacaatgtaacaaatcaagacagcaacttccctggctgtgaccaccaactgtggaaaacagcagcttgatagctcaatgctgtgatggagccgtccggaaaacgactcctcaacaatgaaccaaaaagagaagtggtgatctgtacacaaacgccaggagtgacaagaaccaggtgcaggagtccactggctttcccagctctcctgggttgaggacagacggctgaactggctgtgctatttggagatgggccccaccgccccttttcaactgtacggctcaggctgcttaaccatagcaactccatgggctggggtgggggcatctacagggcttcctgggggctctcccgactgccgccccccgcccttgtcttatttggaatcttttcctaatagacctcaactgaaggccgcatctccttctcgcaacacttcttttctcctccgcattctcaaatttgagacgcttgatgcgtgagagtcaaaccagctagcaaggacagcctggaagccgatgaagaaatgacactcaggatcagagctggacggcatcggggagaaagcctggcagagagggcaggggcacagagcagtggttatgttgggaa

SEQ ID NO: 210132 - DNA, 589 bp, Homo Sapiens
ttttttttttttttttttggaggaggattcagagcagttttattctcaggagagcaaaggcgtaaggagctttcctggagggacaggtgacagatccctgtagatgaacacagccgagctccgaggcccgagggtgtgggagcagtgctctgggccagggctatgctaggaccagggcgggcacagccacccccaaactgggtccccttggggcacagccttaaaataaacctccacatctgggtgcaggcacgcccacacctggctggctttaaatactccgagtgttaaaactgttaacaaacctgctttaaagacgaaatggtaatcacaagccaagtgacaatgccgcaggtgttttaaaggggagcaagggagataaaacggtaatcacaagccatgtgacgatgccgcaggtgtttaaaggggagtaaggcagataaaaggttcccagaaagcaagctgctgatgggaagggagcagaaagctctccgaggggtctgctcagcaggcggctggaaagagaaggggggcctggcagggctcccgaggatgacctgggcatcaccccggcggggtttgcctggcg

SEQ ID NO: 210133 - DNA, 726 bp, Homo Sapiens
ttttttttttttttttttaatataaaacaaatcctttaatttttcaagtgtttaaaaaacaattttatacttaagccagccttgaagataagcacaaaatttaccagtttacatttaaaaaacaaacaaaaaacgacaacaactcaagcacccgctctgtgcatagcactattctaggtgcaataaaagggaatcttaaccttagaaatatgagttcactttctggaattgtattatctccttttccagagagtaaaaataaataaaatcaccattgtttactacagatctgccccaaaccacatctggttcacagaaaggctaatttctgccaaattaaagatgtaatgaactcagttcctgctttcccaaaaacacgaaagcagaattccttttcactgaaaaaaataaacagttttccatgcaagggcagtttgcttctaataagtattttttaaaaaatttttttttcctctagcttttctttaaattttcttcctctaatattgccttttcttgtacaaggcagaccaggtatctttttatgctgtttttcctttactaagaaaagtattgcatcttgaagacaaaccatttcccagagtagtgataaaaaataacactaaaaaaactttaaaggtgagtcacttacatcaccttgatgaagtaaaaaaataaaaagcagttggcactaagatagctaattccaaatatctgtgtctaaac

SEQ ID NO: 210134 - DNA, 686 bp, Homo Sapiens
  misc_feature (552)..(552): n is a, c, g, or t
  misc_feature (600)..(600): n is a, c, g, or t
ttttttttttttttttttcagacaaaaatttaactttttatgagatttcagtttttgaaatacacaactcttacagcacaaacacagtatttacatttcaagttctttgtacaaaagatgtatgccattttggaagaatattgttgagatcatgatctaaaatacctgtcagagttactcatggaatctgctcttcacaaatccattgtattatgacataaaatatggctagacgccaaggtttaaccatacataaaaatactaattctcggctgggtgcactggcttatgcctgtaatctcagcactttgggaggcagaggcaggtggatcacctgaggtcaggagttcaagataagcctgaccaatatggtggaacccccgtctctactaaaaatacaaaaattagcagggtgtggtggcatgcacctgtagtcccagctactcagaaggctgagacagaactgcttgaacccgggaggcggaggttgcagtgagctgagattgcgccactgcactccagcctgggcaacagagagagactctgtctcanaaacaacaacaacaacaacaacaaaaactaattctcagtgattggcanatgatggcctgagggtcacatctggctggtgggcagtttttgtacagctgcaagctaaacatggtttttacatttttagagggttg

SEQ ID NO: 210135 - DNA, 754 bp, Homo Sapiens
ttttttttttttttttttggttggagagaacatggtttaattaaaggcaaagctgattttcagcagctgcaggtcttgcacagacaaaaacaaaaaacaaaacccagaaaacaaaacaaaaaaccacaaaagaaagtttactacacaaaaccagtttctgataaagattctcctccccctcattactccacagtgaggatgataaggcgaggaatcccgccccaagagtcagaaaacattccaaacaccaaattctcatgcagaatggggctttagataggagctgggtattactgggagtgagatggtaaacctggttagcttgtctagggcgcaagaatcagtgacagttcaaacactggaatgttgcagctgcctgaatgcagagctcaaacacacaaactgggtaaaggtagtaggaaaaaggcttgggaagaggagagaaaggtggacacagggaaggggctgaagagaagcacaaaaggtttcatattgccattgggtagggggcttcaccttttcagacctttcaaaaaaacaaaacccaaacaccatgtcaaactaaaagagcaataatgtaagcatacggggcggggggggctccaaccactctctctgaagagcaatgagcgttatctcaccccttttcattgctggggttgcccagactgcagtgacaactggggctcctggatgtgctttgctctacagctgtcttccagctcttaagttcacactaactccatacactcgc

SEQ ID NO: 210136 - DNA, 815 bp, Homo Sapiens
ttttttttttttttttttgctggtgaattattgatttattgcacatcaggagaaacacaagattactgctataataaattcactcttacatgctttagcaaaaatcagtaaaaatagaaaacatggtaacaattaaagtgaaaaaattggggtcattaaagaatgtctgactgattagcttgcagtttttgagacggctgagaactaccatcaatgagatcaccttaaacaaacactcttaatgacttgaaaaagtccccatcccaaagtcaactataggtattcaatattgtatatttaactgaatttaaagttatgttaaaacccattttattgaagtaagagaagaattccttttacattatcattctcaagccatatatcaagaaaaagattgaaattacattcctttttttttttttaatagagacaagttctcgctgtgttgcccaggctggtctcgaactcctaggttcaagtgatcctcctgccttgtcctgccaaagtgctgggattacaggcatgagccgccacgcccagctgagattacattactttgagtgtttaatttcactatgacaggaagtagcctaatacatacttttttgtgttaattttctggattcatcctgatttttagtcttcgtacctgagtacaacaataaaggaaatcacttcttagatacattaaaattacttctaaacttgccccccacacatgaactgttttcagtttgctatttttaatggcccatgcttatttatatagacatagcataacactgctaacacttttatggctactgtcctctttc

SEQ ID NO: 210137 - DNA, 729 bp, Homo Sapiens
ttttttttttttttttttaaggaacagaaatttatgagacctttatttcacacttaaaagttcttgtggttattttcatgattctgtaatgactatttaaataacatggctgcagtgaatatgacagtaaaattataaatggcattttggtctctttgaggatatgagcttgcagactacagcatctgcccttgtttttgtcccatcctgtggacagaggacattgaaatggtcaagaaccctgcagttactgggaactacttcagacttttgtgaattgggatgtccaaagagatgatgtagtcatttagtatgggtggaaatgatgcattctgaagaggctcacctggtcctcagcgatggggccggttttgttagttttcagtctattcccaagacttcaactcaccttaaaaaaaaaattttgaaagtggtaacaggtacataggtaaccaaagtatatagcttatttggtgaatcttcatcctcattacgttttctggacagccgcacacggattcggtatggcacattccttattcctttggcccagacagctttgttgagcctggtgtcaatgcgcacatctggagttcccatctccttcatggcaaatttccgaatctctttgagtgcccgaggtgcacgcttcttgaagcccactccatggatgcgcttgtgaatgttgatggtgtattctcgggttacacttcgttgatggcagacggc

SEQ ID NO: 210138 - DNA, 753 bp, Homo Sapiens
ttttttttttttttttttaagaggcggacacggtacctttaatgattaaacacagccagtaccccgcttcccgggaaagaatcagacttcagtagaaattccccacaccctaaccagccttttctggtttctcctggaccagagttgggggaaagggtgggcttcagagaaaaccaaggagtattctcacctccatcccctacccaacccatgccagagagaatggtgacgacatggccaacacggggctgcagcagccatcatggcacatggtggcccactgacgttgtcacctacccagtatgatgtccatcaaagcacccaatgggccaaaaaaggtgttacacagaatggtggccaacttggcacctactgtgccaagtacaccaaaaaagaagtgggcacagcacctaatggggggggccaaagaagatgtcactgaaatgctatcaccatcacacccaaagggccaaccgagatggtggccatcaaaccatgcagtggattagccaataacatccatcaatgtagcagtcctcacagtacccagtgggccaccaaaatgtatccatggtggttatcacagtaccccgtggatcaacaccatgcccactgagacagcagtcatcacagtaagtaatagacccacccagatgttaaccaatgggacaagtgaagtgtcaccagaaggatcaggccccaagagcttcgtggtgtgagctccagcataccaccacatgttccaaccctgct

SEQ ID NO: 210139 - DNA, 717 bp, Homo Sapiens
ttttttttttttttttttgaggaagaatttctttaattttatcggaatccaggacacaacaagaaaaacacccaaaaaccacatggagacagaagacgagacacaactcctcccccactgcctccctgctctagagtggggacaaagtgggggtgagacagctggggggagacctgaacctcagtccagccctacaggctccaggcctgcagggaaggagggtaacggggaggcagggcccagccccccagtgtggggaaacagctgagggaaggcccccctcaaaaggctccacctcctcaccagcactcctgcccagggacagggagcccacagcagcaaggggaccccggggccatggccacattcatgactgagaagcagctgagtggaggcaggagacacgattatctgggcagaatcagttggggcaggggcctgggagggccccatgggccaaaccctgaggtcacaggagggggcccaaagcggggctagtgagtgaggtcctgagtgagtgggtcagcggctgggcccctttctccagctgcctgtagcccctccaatactgctgccaggggggcccgcctccagggaaatggataagaaagcagcctgcccctgctgcagacagagccaggtggctaaggccaggaaggaaggcccggccaggccttgccacctgcccccagaggcctgtgggaaaaggacaggtca

SEQ ID NO: 210140 - DNA, 675 bp, Homo Sapiens
ttttttttttttttttttctgcatcaggcacacggggaaccacgcgttttaatcaacgtatcgataaaaaacaccagggcacggacactccaggggaaatgcttattgagtaaagtatccgaggaagtgatgcagggcaggtaaacagctggtgctcagcagcgagaggacgcgtcactctgccgttctgcagggtgacgccctccccgtacctcgctgagagccacctgcagacacagcaggccacagcagaatgcacaggtcactgttgtaggggaacaaatcgtaatgcccagagaaaacctgatagtgaaatgtaaacagacaggacagggtggttccaggtggccaccaccgccaggcccttcccgtgattgatctgagagcttcacagccggcggcactgggacccatttccagaaacactggaacaccaggtctctcagatgcccgcgggaggggccccagggaggcctttctcagcatcagcttttgggtgacaaaccccatacagcaaaactgtacaaatacacacaacggacccccagctgacagtgagaccaggaccctaggaaggtcaggtggtggtgaagtcatcccctctccaaccgagcagagcctggggttgggctctgatgacctcccgggcaaagtgtccaggtggaggaagcaaac

SEQ ID NO: 210141 - DNA, 761 bp, Homo Sapiens
  misc_feature (669)..(669): n is a, c, g, or t
ttttttttttttttttttgcacctaaatagctcatttatttaaaaggactcttttggaggggccctaggtaatggggagtaatgactccccttctcacccccagccctggcaggggttctaggcaactcaaccaaccctcacacacacacacacacccactggggtgcacccaaaggtggcctcacgtgggagtcagagctgttatggccgttggagctcaggggccaccccagctcctgctgagggtggctcaggtgccctgaagtgagggtacagaggtggccccagtttgggttcggcctctgcgtctccacgtggcagggagggtggcctgagcccctacagcttatctggcaggacctctcgccgtgccccgtctgcccgagggcaggatcccctcgtcctggttgcgggtcttgtgcgacttctgcatccaggctcgccactggtcgtagaggcggaagctgaggttggagcagtacgcgtgcttcttgagccagcccaggaactgcttgagctcgcgccgcaccggccccgagctcggctctccgccccgcggttcgcacgccccgccgcccgggcccgggcgctcactgcggggagtggaggcggctgtggggtggctcactcactccagatcccggctttcttggagccatagatgccanaggggttgcagcgcacttgcacgaagtacacggtgccgggtttcaggccggccatgcggcaggaggtctggttgctcacatcgtccaccctc

SEQ ID NO: 210142 - DNA, 676 bp, Homo Sapiens
ttttttttttttttttatacatgaaatgaccaataattttattttatatttcaaataactagaattgtacagagtttaattttacagctttagggcaaggataaactcatttttatttttgcagtaaaaggtataaatattgaaaattatgtaggtttaaaactttactatgatatagacacattctcaaattaatgaattttactgagctttttatatcaaacttactgatatttaatgcaaaataataaatattgagattcttggttgtacattataaaatgcatcacagagcgatttattgatgcaaaggaaccgttttggctcatgtaagtgaaaagtctaggagtcacatctttaggcatcgctggatccaggtgctgaaatgatgtcatcaggcccaaaatgtctctttattgcttgattctgctttcctgagttggtatcaactaggagactctctctacatgctccatggcagctccaggctcacacatacttagtattaagattttctcctcttctttaatataaaggaaattcagctagatgatctttagttcaaaattctgtgatatataaataactcgaaataactgctaacagttaatgaaacatctgattcagtaaagataatggttatttacaattgagtattgcatattaaaaagttcat

SEQ ID NO: 210143 - DNA, 708 bp, Homo Sapiens
ttttttttttttttttttacaaagaaaatgttttaataaaatattcaatacagtatttccctgtggggattctaaaaaaaaaagtgagatgctgaaggaagtgactgtcactgtggggaacccagtcctaaatgagacaagacttagctttccttcaaagacaccttgtccagctctgcccaacaggccgcaatgagatggaccaggaaaccttcaggagtcaccgacagacaaagcgaatgaactgaatccacttacaaacagatccacttaagcagtttttgcctcaggcttcctaccaaatgcagttatcatggagacaggagaaggctgatgtacaaaacgcattaacatgattttgttttttcccctcctattctatttgcatttccagagtgatcattagtaacacagcgatctgggtttcaccaactaagcatttcaaacagactcatttcttgaccaaattttgtgctcaaggcctgttactattagtgtaattcttgtgtttcaaattgagagaaacgagcatacccacccctgcacataacttaagtatatcactgcgaattctacatgtatgaaacaagcataagccatgaatcctccacttggggtgttactttttattactacagaaagtgctgttgcttgaatatgaatatcatttagtgtaataaaatgtagaaggacacattattgtgttcc

SEQ ID NO: 210144 - DNA, 677 bp, Homo Sapiens
ttttttttttttttttttggtttgataaagcatttatttacagcagtacttgcaacaaagtaagtgctatataagtatgagccatttttattaccataagcaaagctttctacattggttgacttgacaaacttctggcaaactttttttctctttggaaatcattcagcaggcactgtttacatcctttcgctgccatatctctagctttcactaaatctgccacacattcctgccttctctgttgacctcgcttggattctcctacatgcttccagttagccagccagaggattttcctgtctctgggaatcttgtggaaaatcttgcattttggggcaccttctccttcagttataatgatataccttaaaagttttacatttacaaatgtctatttcacactctcattctaaagtagaatcgatgatgaccttttctccccgttcagccccataaaaactcattttcccctcttttcttttcctcccagctcctagacttcctttggaggagtggcctaggtggtggggcccagggctgagtaactgatatttccaggagttccccgaagaaggcagggccagagggagagctgggaaggtggtgacattacaaagacaaatgcatgttatagatgaggcaacagcattatccaaggctgaggtggagagcca

SEQ ID NO: 210145 - DNA, 721 bp, Homo Sapiens
  misc_feature (628)..(628): n is a, c, g, or t
  misc_feature (704)..(704): n is a, c, g, or t
ttttttttttttttttttaactttaaaacttattttttaatccacatttgaaatcttggaatgtagaggttgacaccatctttatataaacacagtttttatcaagagtcctctatatcacacacgggttcgatgggcccactccctggagattctgtatactctagggggtaggaatcagagttctcattttgtacattttcaaaagaatatgaggagcaactttagcaagggctcaagtattaaataaaccgagtaatattctggatttaaaaagcaacactattccaaggcattgctaatctctgtacttcagcaaacactgaaaagtcaacgtaactctataggtcgcatattcttgaatgacagggaaaggcaaacatctctacagaggtgtgatcgaaagcattttacattaggtacacagaaactttaaactcacactatgtaagcctctaatcagcctgagcaaaatccattgcctacacagtcatttaatttttccccgtcacttaggataaaatgcagaagaacaaatctagcagccagtggcaaccctctgcctccccattcaataagttcttctgcctctgttgacagaaactcaaatttggagatcttgtagcanagaagagacaattatgcatatgttgggtaggctgtgccacatatctgctggaatgtgagaatgccctttcatatgntattgattttcttaaaa

SEQ ID NO: 210146 - DNA, 676 bp, Homo Sapiens
ttttttttttttttttttaaggttttcattctgtactcaatttttattcttgtttgtattctaacaaatgtactttctatatttatatatttatctgtctacattcagagcctgaatatatttacttattgaccagtagaatgcatacacttaaaactttaataattttgaaacaagtcaaattacataactgtaacatacagcagatcaccaattcacaatcatctctaccttggttcatctttacacaagtacttgaattccctttaatgtctctttagaagttcataaactatatctagatctctgctacaattttcacaattaattgaagttataccagatagtaacttaatacagtatattctcccaattttctagagtagctagtctccatgaccatttcaaaatagctattcataattcacaaaatgcctttattctttggcccttcaactaactgatttgtacacagataataaatccaacaggtaatattgtaaagtaatattgtaagaagaaagttttaagacgattaagtagttgctgtccactggaaataaaagtagacttataaggtcttattttttaaatgaaactttatgtaaccttcaggttgtattttttaaataaccttaaatgctgacaccatcattgagaggcagtgtaaaattca

SEQ ID NO: 210147 - DNA, 682 bp, Homo Sapiens
ttttttttttttttctttccaaaggtatctattaacatttacaaattagacatttcctacaacccgtgcaagcaagctaaaccaaacgatggaatccaactgaatgttcttggcagatggaggctctgaggactcacactgaggatgatggagaggacattacaatccagtccctttttggtaggttttgattgttttgtttggctgaagtcagaacccatgatcttaaggaattttgaatggctctaattgagcgtggatttggtcatgagacaattatcctgataaaacaattttttaaggcactctgtttgagggtttgggaaaaaagaaatggaattatccagattgtttatctgcatcacccaaactcactattgatcattctcttggcattgcttatggagccaatgtcttcccaaggtcatacctatgctcaggtgcctatgcaatacttgcttttttctttatcttctggtagaatttattcttttttgtactgttcatattcatcccaggaaaatttggaggaacagctgctctccactggcctgctcctgcaagaatgccctggagcttctgaagaaggatctatatttaccttatagggccttaagtcctgggatggaactatatactttgggaaccactttcttcacaagaagaactgggcatgttgcaa

SEQ ID NO: 210148 - DNA, 697 bp, Homo Sapiens
ttttttttttttttttttaaattttgaggaacaacttgaagttggctaggctgctcaagactgtagttgatgataattttggttgttccatcttgatcaaccaaaggaagactgatggctgaaataacagaatggccaccttgttgtatgggtgaagcattgattgtttcttgttctttggatgcaagattggcttgattattctccaacacttgccttattacattaccatctaccgccactttaagtacattctgaatatcacttaaattgatacttatgggagacaccaaaccaactgttggcagaacaacagcttgcaccatgccctgaggagaactggttgcctgtaatgggccaccaccagtgaaaaccccattttgtaaaggggttgaacagttgattcctgaagcaaccactatgggtttgaattcataatccacaggttcagttttaatttggttaacagaaagttgttcttgaaggggtttattctctatcttttgccgtatctgtggtcgtgtgggactgcctggtgatgctgaaagagacggtgaagaacactgagatgtcttgagtcctgttcttggtcgcccattcacaggtatcaagctgatacatttcttactgcttatgtgtgagctataggagccagaatgggaaaagcgtttcttgcagtttgggcattcatatggct

SEQ ID NO: 210149 - DNA, 695 bp, Homo Sapiens
ttttttttttttttttttaaggtaagctcagagtgacttttaatatgccaatcaatgttaataaaacacaagtcaaagacaagtgcaaacatgttttagaccaaaattaatgagaaaacaaacagacaatttttttcaacatctgttagccagtattattagtcaaatggctaatcacagataaaatatattttgtgaaaaacttggaatgtcagaagtcattctggcatttcaaacagctatgtacagtatcacgaagatcggtttatatacacaaatattgaagagaaaaaccgggcaaaacatttaaaaacagactaataatacaatcaagtataaaacttagggggagacatttaaaaagagtccgggaaggacattaccagaacaagttacaaaaccagtaattattatactacattaatacagcattccaaaggagggaaagggtgcatttttccaatgcactagcttcaaagttcaaaggaaaaaaaaaaaaaggcaaatagctgcttttcatcaaaagcagctatacatttcacataattgtttcaaaaagaagacctattaacaacaatgattgtttaatgctacaagtttacagcaaagacaaaactaaaatagcagcaaattcacaaggcaatacctccacagaatcatcatcccatggttcatgcaatgcctacaaagtgctc

SEQ ID NO: 210150 - DNA, 702 bp, Homo Sapiens
  misc_feature (598)..(598): n is a, c, g, or t
ttttttttttttttttttaagcaaaatagtatttttattataatgaaacatcagctaacttgatatttttaaactgtaagtctgggttacaaagtaccaactgctctgtaactgaatgcctactgcttgaagggtcctgaactcagtccatttttgcctacaatcttaagcctacatgaagcccataaacatttttgtttgcagaaaacaacaatgacaaatatgattgttaaggaggtgtaacttacagtatctaggtaaaaacctttcatttccagaaggtcgacaaatgactttactgatgtaaaaacatgctttaacatacattttgcttaaaatcaaatagaatgtttataaagaaatacttcagtccaacatacatattacatcagtaatcttactgctcacaattattttctaatgcccaacacctttagttgttttcagttatccagaatacataagaaattgttactaaaactatagatataactctgcgaaatgtaaaaaaaagaacaaagaaaaggaaaattatacaaagaatcattaatctcttagttattttaaggcaatagagccagtaaaaaaatcatttcanaactgagtaaaataaactaaatgtagttttttagatattcattaaaacacagaaaatgcttggttgtctttgtagctacatacatttctatgttttgtaataat

SEQ ID NO: 210151 - DNA, 697 bp, Homo Sapiens
ttttttttttttttttttacaatcacacactggtgtctccactgggaggcctagatgaaacaagaagaaaatttggctttgatgatgaaagggggagtccagtgcggtggcgcatgcctgtggccctcaccacgtggcaatcaagaaggatgaggcttccaggcccctccatcacactggcctcagcgtggggccaggcaggacctgacagccaccaggagatgccacggagcccagccctgcagagcagccaggcctctgtccctcctacctccctcctccctcccttcccacgtcagcctggcccgtaactgtccctccttcctcccttcccacatcagcctggcccagagctggggcgacagcatcccggtcacctcgggctgccccagccaaactcctctgtcctgttctgagaaagcaggcaaagtccctgcctacagggttcccccacgtacctgcaggacaccgtctgtcttacggcacgaagcccagggcctccgtagggctcacaggcggcttctagagaagatgcccgccacaggtgctctctgctccatctcaggtgaccactggccatctcggaagaaacctgctttgatggttttcaagcctgaagctccttcctctccagcccctgccacccggggcggggaatggggacgggatgcagacagaggtgggcccagccctccag

SEQ ID NO: 210152 - DNA, 604 bp, Homo Sapiens
ttttttttttttttttttcagaggtgaatatttatttaattcatatataaattttacataatattcatggtgctataaatataggcacattttttaaaagtccagatacatccaaaaattaccccctcactgtagcctactccaatcccctcaagacggaatatctaacgtgtttggaaaacagggtccagaaaggccctgcccattaattttaaaactttctgaccatcaagaccattctttcctgcttcaaccaagcagagtcaacaaggatcatgtgttttcagggttttaattgcactagttgatgaattaagtaaatgcctctgcctgggtagtttgtaataggtttatggtttggtttctcctacttagttcaagtcagagaaagaaaaaccaatatctatattcctattggccttctttaaatccctatgagatggcttaaaaggatgtcactgcaccagaggactcacttaaccacatctactgacaaataggcaacttcccataaagtacagattaaaacatcattcatttatattggttttcatttggggacaaacattgtaaatttaataattcatgggattgagcacagagc

SEQ ID NO: 210153 - DNA, 777 bp, Homo Sapiens
ttttttttttttttttttaaaatatacatcatccaatttattttctttatccagaagaaatctgttaacattttcccaaaataacaattcaagtaaaaaattcctaccaacgagatgaagttgccaccatttttacacaagcacactcacggcttgagacatcctcatctagcattaaacctgtaagttacagctactaaataatgttaagctattatgatgcatacagaatagagtaccccaacccagctcttaatgaatgctgggtttacctgcaggtagggggttggctgagattaaaaggagaaacatagtaaaggagatactaaattgattcaaatacttcatttctaaactctacataaaaaggcctgagaatagcttgagacacatcagacttatcaaaagtcttccagcaatgatgcttttagagaaacatggcataaatgatcctttcagtctcaatccctggagtacaggcctagggattatggaactggtttaagcatggagaatgcttaaagaatgagcctggtcaacaggaaatgtacatcagtgtgcaaaagtgacaatattaatacgacagctaacatttgagcagtaattctgtgccaggcactatgctgagggccttacatgcattattttattatccaaccctttaagatgagtgccactgttgccccattttacagatgagaaactgggctcacagacacacagttagttaatggggagcctgagtttaattcaggaagctgattctaatcagtactc

SEQ ID NO: 210154 - DNA, 727 bp, Homo Sapiens
ttttttttttttttttttgcaaccatttatatacagtgttacataacagctctggagtacagtacatgcagcagaatatacctgttgaatataaaatactttccttaaaatcttcatcattggaattccttgaagtctaaatcatagaatgcccattactttgagaaaatggttgaggagtacaaatgtctgcatatgttggccactgaaataatccaaggctaactggaataatattcatagcacaccaggagtgcataaataatttacttacattattaaaatacaacccataaaattcaagttcaagatcttataggattgtctatgtaaatcctttaagtggttgcctggaaatgcattgtttcttctttctcttctcttctttttaaagtcctatataaaatcttcagctgaagtttatttcttcatcaaacaaaaggaccacctttatttgtgtctgctgcctcttctcttcattgcagcagtgcactgtggacagtaccatttgccttttggtgcctctgtcaatccaacgcagccataatggaaccattctatagggcaatcttggttatcacatcccaccatctcaccataagatacctgattacaaatgcagtatcgaggttcatttgggtcgtaagtccaatcaacctgactatttgaatcagattctggcactacagttgtttgttgagagattcttgtacacagttgatgatga

SEQ ID NO: 210155 - DNA, 728 bp, Homo Sapiens; identical to SEQ ID NO: 53407

SEQ ID NO: 210156 - DNA, 704 bp, Homo Sapiens
  misc_feature (671)..(671): n is a, c, g, or t
  misc_feature (684)..(684): n is a, c, g, or t
ttttttttttttttttttgaaatatatttatgtttttatttaggaataatcaaaaggtttgaagtaccattgaggcccatttcaaattgtacaagcaatttgtccgtgttcccctcccttatccaaatccacagatacaaaatctaggaaatgtgcaatttgcatcttagaaatagcagcatccccacaggggacctcgtgaggcctggagattcagccccaagagggcaaccccactcctgcctcagcacgaccacagtccaaaccgaagttaagttccatttttttgttaaaacgtttacccagggtaaagaattcccattctacccaaggcttaagtgatagagtatgctgttttctcggtttggtctctcacacctggccatggcaggagatgggaccctcttgcagagtttggctaaagtttcattgtgcctcaaaacaaacaaaaacagggcagttgcctcttacttgtttagcaccaagatgatcaccttttcagccatctctcctgacagcagactgctcaacagtcactccccagtcttattgcccagaagtccggccacagggaacaaggctttgtgctgaagaccaaaatgcaaatgggtgctagaaaaccaggaatcaagaccttgtcaggaggcaatctacaggcctttggaacctcnctgacttccacanaggctgccctcaagtaaact

SEQ ID NO: 210157 - DNA, 647 bp, Homo Sapiens
ttttttttttttttttttgaatgcatttttcagacgcttttactgtaccttataaccaagatcgggtgaggtgtgcaaaccaagggccctgtcccctccaaaccagcagagcccggggcatgaggatggcaagcgaagtgacaacataaacacaggtgtctccatcatcaaggatgggagtggaacggacagcaagggccaggtcacccccagagcattcgtcagttgtcaagtccaaagctaagaaatcagttcataaatgttttttgatttgcatgttggctcaagccctctttttaagtccaaggaggcagtccacattaagtgtgcaggcaaaaaagagatggaaaaaggagtcagtttctcccctgccctccctctctccctttatcaagctgagcaccttgagttgcatttgaggaaatgaaaactataggtgacgcaaccccattgtgtcgaattctttctttacattttttgggttgctacaaggaatcagtattttttttttttttaatcaaatggtgtgtgtggtgggctggggcgggtgcggggtgctcttctccatgatgcgggccacgtcctccagggtgcggccctcttcttccaggaactgggtcagccgctcccgaaattctgcttccttg

SEQ ID NO: 210158 - DNA, 697 bp, Homo Sapiens
ttttttttttttttttttcagtaagaatatagatttttattatacaattaacaaattatatttggcatcacttaatacctaaaactcctctgggagtaataataatgaacatttctcaaagccatactatattcttacactatcctatgatgtatacaaatatactttcagtgaattttcataacaactcttccaattttacagctaagaaaactgaagcacagaaagtcaagaaatttgcccaaaatcccacagctaataaatggcagatctagaattcaactctcaggaaatctgattctagagcccagttctgaattcctatgctatttttcaacatcttccattttctctcccttcttgagtcaattttggtatttttcatcttcatagaaaatcatctatttcatttggatgttaaaatttattggcatgacttgacttcaaactttggtgtcaagtaccagaatttatatcagaaataaaactatttttagccctatattccttttcctatatcatgagccttataaattccatgaaaaaaataatcatcctctcatctgagacccattattgatcactataggtttctgaaaacttgatgcttcaagattaagtatcactagcattaataacagtaaacattaattaaacagaaagcaatttttctttaaaacagtcttaagcattacta

SEQ ID NO: 210159 - DNA, 662 bp, Homo Sapiens
ttttttttttttttttttaacagtacaatgtttattaacacgtttcttcctgaattttcttcaatttttttaaacaaacacacaaaaagcttttctgtacttagattgctgtttgctgtttttaatgttgttaacatgcatatcattgcatttatggatagtagtagatagtgtaatatacatgaaaccaacatctagggatggctgccttctgagtgctttacagatggcacgttctcttattatccagcttaatcacagctcctccaactgataacttcacatcatctgcagtatttccaatctgtaaatctggttggcacaagttggttttagcgtatttggaaccgtattttaaatcactggaactactttgccttaatgcccatgggctgtcagctcccaagggctaagaccaagtttttcttaactttgtgcatatagcgtgggacctgcccagaacaggtactcaacaattttgctgagcagaactgtcctcaatggagaaaagaaaggagaaaggctttactgaagactgccccaaatacaaacaaattccattttaaatggaatatatacactttagcccccaaatgcagaccagtgcacctctgtgtagtttccgactagtcacctggtaatagatcattcctgtcattcac

SEQ ID NO: 210160 - DNA, 561 bp, Homo Sapiens
  misc_feature (522)..(522): n is a, c, g, or t
ttttttttttctttttttaaaagtttattattgttgccaatatataatagcttactatgtgtaggtatcctacctacattatctctaatcctcaatataaccccatgaggtaggttgtgttaattacattttgcacgtgaagaaactgaggcccagggaggctaaatgattttccctgtcatgcattcagctgcagacatggaaactgaacctatgtatgtctcacccagagcccaaattaccaatcctcctgttggtagttgtataaagacaaggtagtttaaacagatttccagactgagtcacaaaacactgacaactcaagtactgaagaaaaagaaagacaaaggtgtaaatgtaattatggtgggaaatattaaacatgtattttttaatgtccacaaacccactaaaattaaatcaactcaataaatagaatacacatgtagtaaatcatgcctgacatataggcatattctggtttcagtggttaactggatctaaaaactgattctttatganaatactaatgaaatacacatactgaaggtaaaggttttc

SEQ ID NO: 210161 - DNA, 527 bp, Homo Sapiens
ttttttttttttttttttaataataactctaacatttattgagcttttgcttaatgccaggaactgttctatagacattatatgtattaactcacttaatcctcgtaacaatagtatgagacaggtatttccattactctcattttacgtctccacagtaataaagcagagaaggagtacataaccacccaaagtcactagaagaaggtggaagaagcaaaattcaggtggaggtccgagatgcttctcttccccactgtgtctgccacctctagagtgaatagccatgaccctgagataagtcagttacacacattgtaccaccgatttctaaaacaaccatatgagagaggtaccagtattatgcccattttatagatgagaaaaaggaggctaggaagggtgaaggaattcatctatggacagaggatttgtgccctctcttttctcttctacagagaaattgagccaggatttaatcccagcatgccggtttacaaagcccagctttataacctttatttatt

SEQ ID NO: 210162 - DNA, 493 bp, Homo Sapiens
ttttttttttttttttttcaggtttttattatttattattattgtttgttttgagatgcaatcttgctctgtcacccaggttggtgtgcaatggcgcgatctcggctcactacaacctgggtgacagagtgagacccaaattcaatggcttcactccaggagctccaattcaagatgcggacgtctgcagctctgatcttcacactgtgttttgctctgggctcagagcttggaaagttgtatctattttccaaatcaccagaaacattaatcagtaggttttccgtgccaggctgggtattctttctgtggacgtccagctggtactgaaagtccaggtacgacagcttctgataggtcctgggctgtttccaccgtacgaggcagtgcgtcgtgttgcaacgtacggtgacattgctgggagggttgaatcgttctattttctttgtgtccaaaagtgaatcaaagaattggatgccaatttctcgggtgg

SEQ ID NO: 210163 - DNA, 496 bp, Homo Sapiens
ttttttttttttttttttcatcaccaacattttattgatttaatataccataataagttctaagttactgaagacaataggcataaatgacatcagtgagcttgttccctccccatgctccagtgctacaaggagcccatcaacattgctaaggcattttctaatataagcatgaggattgaggtgctcccagtctgctctgctcatactggctgtaaacctccccattgtccagaaacacaggcccacagaagagggggtcaggcaaaggtttagagctcaaggtctatttcctgtcttctccatataaagagtgttgcactcgtgtccttgtaaacccccagggcaagaaaataactcaaattataaaagggatcaggattataacaaatatttgcatatctacaaatgccttctagccacacacatagaaaatttaaaaacattaaatgaacctcatagactacattggaaattagtaaatatattccttaac

SEQ ID NO: 210164 - DNA, 417 bp, Homo Sapiens
ttttttttttttttttttgatctagccaggatgactcctggaacttttattaattttctacattgaacacagctgagcattactcacatctgacatctgttcaaacaataacatttctcccctcctggcagcaggctaaaagcaatatgggtaatagctaagtattatttgagacagggtcttgttatgttgctcaggctgatctcgaactcctgggctcaagtaatcctcccgcctcagtctccttagtggttgagtttacaggtgtgtgtcaccgcacccactttagctgattaaataaaagggtgtgtgaaaccactttctgcctcttagtgtgaagagggatagtactctagtttgggcaaatcttcaaaaatcactatttgaaatttgaaaatcgtccatttgcagctaatg

SEQ ID NO: 210165 - DNA, 441 bp, Homo Sapiens
ttttttttttttttttttcacagaaaactccagttcattgttgggagaagttgaagatgaactcaatacctggagtcatacatggcagtcaacgcatggacaccggagactgttaagacgccgactggagtcacacacggcagtcaacgcgtggacaccggagactgttgagacgccgactggagtcacacacggcagtcaacgcgtggacaccggagactgttgagacgccgactggagtcacacacggcagtcaacgcgtggacaccggagactgttgagacgccgactggagtcacacacggcagtcaacgcgtggacaccggagactgttgagacgccgactggagtcacacacggcagtcaacgcgtggacaccggagactgttgagacgccgactggagtcacacacggcagtcaacgcgtggacaccggagact

SEQ ID NO: 210166 - DNA, 536 bp, Homo Sapiens
ttttttttttttttttttaaaatgataaatgatcaatagatagtttatttatcacagcagtgattatattttacatcaaaaatgacaaattaaaaatgaaatatatcactatctatatacgtataacctactgatctcccatattttaatccattttatgacccagagactacattttaatagatactacaagatatatcataacattaattatttcttagaattttaaatatggcttatgtatcaggcttaacgagtcagctaaagtctttatcagctccctcaaaactgattccagggtaaattggaaagatttgaaatctgaatagcatataaaagcataatgtctatgttttccatagttaatttatttgctgttaggcagttcttcagccaacatcctctgtttctgaccaaagtagtgtatctcaagcatgaatagtaagacaagcagggtcatagatctttattgtttcatcccaagaacagtcaggcacctgagtggggctctgaagactgaagtctaaaccacaagt

SEQ ID NO: 210167 - DNA, 512 bp, Homo Sapiens
ttttttttttttttttttgccagtggatagggtctaggtttccaggatagaaaggcactcataagaccccagctttgcagttcaggtttcgctcgggtgcctgagagggcaccaaggtgcaccgtcagcagaagtttccatcacaaacccttgttttggaaccagtcagagtgcacacaaacggtctcgactcagttcacttttgtctgagtacagagctcagcgatgatattctaggttactgaggcactcattaggccctgggcaaatctaaacatgcagttcttttccgtacactctacatctgcctgtgtcacccccggctcggagactgggaaggccacatgcagatatgcttcttagccttgtggggtggaactatggctgtagctacttctgctgaaactgcccttaggacatcatatgcatctttgaaagccaaatacataagtgaacacatctgcgtgtatgtgtatacaccatacatgcacacattcatacgcatgcatata

SEQ ID NO: 210168 - DNA, 384 bp, Homo Sapiens
ttttttttttttttttttccccttttattttttatttattatactcattttttgttggaatcctacccgcccccctccgccccgcccacggcccctttaaaattgacagccaagatttgctggcaaacattctttttgtccttggatgctacaattccaggttctgccttttatctcccaagctcagaagtttcctggggccaatttttgcagctcaaaattgtccgtgcgattttgttcttcaccgctttgaaacaggaacaccttgccctgttgctttgccactccccattttctttggggatgactgcctccaggaatactcattttatattagtcaaaggggtgaaagtttgcattgacttcttaggtggtgtatggggg

SEQ ID NO: 210169 - DNA, 555 bp, Homo Sapiens
  misc_feature (24)..(24): n is a, c, g, or t
ttttttttttttttttttgggagnaatgatcataaaaacaacaatagttattatttattaaaattacacaatattccagttacactttcaaagactttacatgtaccaaacatttaatttccatgatagcagtctcaggtagatgtgattatccttatgtacaaataatgcacatagtgtctgtgtgctggacaacgcacaggggtagtgagcctttggcccagtgtctcacagggaggagggcgggggatggtggggacaactggtagagtgggtggcatgaccaaaggctttctcacgtgttacattagcagggttattccacagatgccacggagtaaagacagaatggtactggtagtctttatgtattcattaaactaacccacacaataaaaacatctacaccaaaaacaagatcattcagaaaaagtgatttttccactcttcaaatttgcctctagaatgacttctgatattctgtaagcagaagagtgatcagtgggctaggtgcagtggctcacgcctgtaatcctagcactttgggagggcaag

SEQ ID NO: 210170 - DNA, 537 bp, Homo Sapiens
  misc_feature (424)..(424): n is a, c, g, or t
ttttttttttttttttttcagtgtccataaatcaagttttattggaatatagcacactcattttatttacatactatctgtggctacttttggagttaagtagccttgacagacaccatatggcccacaaagccgaaagtatttaccctctggccctctgtggaaattgacatctgttctataaagtaaaaatactggtatttcaataattgcacttatttaaaagatgattgtcagtgtagggctggaatcctaacaattttctcactttagaaaccaaaacccacagtgttaagcataaaattacgtacaattttgataatgtttacagtaatagcagcaacatgatgctttaagaaccttgacttccacctatagaattgaagtaatcacaaatgaaggaaccattgggaacaaacatcanacattctttacctcgtttatttcattagatcttctcccttcaaagccagcaaacacagcactctcttccttgctaggagtcagaggaataggtgaagatgatctgctatgcac

SEQ ID NO: 210171 - DNA, 457 bp, Homo Sapiens
ttttttttttttttttttagagtggcgaagatgcatttattatacaaagactgaagcacatcagtcatgtcccaaatggaaggcaaactgggtaagtttccaagctttcttttctggagaacaacttattgctggatataattgaaagtgaagattatttgttagcagccttggatagttttttttttctctaatatcatttaaccaaaaagaaatgtcttattctccagatgcaggtttacacatccctgggctggttttaatgataaacaatgtagccaaaatagtaatcttcctcaggacccaatagagcttgaactgggcaacagcccatgaatagcctagttctgggtattcatcgcatcttttggaataacagcacacagacccagggagggtatttatagtccagtgtgaggggtgggcaggacgagatgagtcatgctttattcttcgc

SEQ ID NO: 210172 - DNA, 460 bp, Homo Sapiens
ttttttttttttttttttagccttgctgagacctgttttatttgtaaaacatctcttggagttgctgtgaggataaaatgacaacatatataaagagccaggcttcttctagaagaatgtccttgggtagcatgtacatttccatccttccttttagagagtgggggtaataggataccccctcctccaggggtatcccctctttctagggacctacccaagctaggcctttcttccagtgaaacgtgcatcccgagggcttctaggatgaagtagtccactggaaggcaccagctcttccttttatctctccagagctggacagtgcaccaggggccggtactggttccccagctaggagacaccttgggcggggctttgctcgccggaagcacgcagagcgtggggaggagggccccctctgcctgtgtttgtgccaacagcacccgcgctgccgcgt

SEQ ID NO: 210173 - DNA, 515 bp, Homo Sapiens
ttttttttttttttttttaagcatacacttcctttatttatttttcttaatttaagtattgtgtggttatggatcgtttacagcagtgtatgaaactttaagatacctagaaaaatgcaagttaaattaagacattataggtatattttaggtttgtgtagcacatagcaaatagtctagatgaacagatgagacacgtaacaacactgaatagttacagctgtgcagtattttaaacgaatgaccagacactaaaatttgattattttttccatttgtagttatgcagaagttagggctgaaagacgacgagaacttggcattgaagagtctcttcctgagacagctgctgacaaagtatgtttcttataattaaaaaaaattatttttaatttctccccaataaaagatgaaactcaataattaataggaaaactatttttcaaaaatactttatttcctcacttataacagggatgtgattatactgtactacttatttttaatttaatatt

SEQ ID NO: 210174 - DNA, 502 bp, Homo Sapiens
ttttttttttttttttttaaccctgtgattaacaggacttttattggtagtaaactagagcaaacaatcagaataatacatatgcagtattcagtacacacaataaaagttaaagaaattcaaaacctgtataaaacaaactggagaaaaatcatacagcttaagagatacagtggtaaaggtcctctccatcctttgattacagcttgtactctgtactcaatagaacttaccgcacttactgaaataagaaataaacactttttagtactcagcgtatttaagattaagtacattttctaagaatcttgcaatgacaagttggtgaccctttagctgctaaagctaaagggaggaaagtgggaaaaggaaattaactaatactttgtaaccatttttaatatttcttattttccaaacactgcttttataacagaagtgttttacacttgcacaatattaattactttattatacatggaagcctgcggtaggctgatta

SEQ ID NO: 210175 - DNA, 640 bp, Homo Sapiens
  misc_feature (500)..(500): n is a, c, g, or t
  misc_feature (590)..(590): n is a, c, g, or t
ttttttttttttgtagagattaaagttgaatcttcaaacctaaatctctacacaaaaggaaaaacttcactattaaataacatgctcccaaggagattcttatatataaactgctccacaaatgaccaagtatctctttgagataaatgaagcagtaataacccaaaattctttgcaatgtttagcagtatgagccgatactacctgaagatcatatggattgtaaagggatttaggacttttccgaggaaggcaataaacaaattctccatcatcttccaaaggtttctttaaagtaatcttctgaattgcaattttggagcttccgtatttcaaactgtgctgcggtaatatagtttgccaaccaagcttttctcgtagcctaataatatttcttatcacatcatcatcttttggttctgttctatcataggacacaggcctggctttcctaacatttggacaagcatgagtttgatccttttttctccttgacttcnctttctccttaagggaagctggctctggagaaacatatgttgttgaattatactttctctaaggtaatcttctgttttctctgacttcanagattcagagaatgttctaactgttttatattccaatgtttccttttctg

SEQ ID NO: 210176 - DNA, 538 bp, Homo Sapiens
tttttttttttttttttgatttttcaaaattaacttttttattaatttaaaaatccagaaatacagtgactacataaataagtaccataattaggtacatgtcctgtgagaacagtgaaagggtaatactgttatgttactcttacttgtttacatgagttaactagaaaatggctacaactgctaaatgatgcttatggtctttgttgttccaagtgtttatgatacaaataaatacacaagaagaaccacatccattcttctctactaactacaggcagcttggcctctttaccctatgtcctattctctacacaacaccaaacactggagggtttctactttgacttaacacagctccccagctcctgcttcccacagcattttgcaaaggtgtgtcccagcacctggaggcaggagtatatctagggaaactctctgcgtgttctcttaaggctaagctttcagagaacacctgggtgggaaggctttgggatgaatcatccagaaggagaaaacctctttgccttcctcgtgc

SEQ ID NO: 210177 - DNA, 623 bp, Homo Sapiens
  misc_feature (589)..(589): n is a, c, g, or t
tttttttttttctttttatatccttctatccctttataaaacagcatacaaagcagttaggacataaaccccccttccccaggacttttgtcttcccatcaagctggaggatgagctgggtttgttgtctttgaagaaaaagtggtttggctagcagccattttaacaaggctatgacaggtcaacttgaatcacaaagaagtcagaagccaaggagatgcatttttgtaagcctttggtttcttcaggagtgtagcttcctcatgccagtcagccttacaagaaaaataacttggcagtcaagagaaaattgacggcaacagtctttgcaaacagcattcgtagcccaagcactgtgagggacatcatgttcaccttctcggtatgaactatggctttgggtttatggcagctctttgaaggttgctttgtgttttcagtttcctttggttttacgtgatctgtagaatctgtcttcacttcaaagtcagtggagtgcacagttttattgtcgtgttgaactgaacatgtcactgaatttgaatcttcatatttaccaagcttgacagcattgtacttcccactgggnagagatgacaatagcaggatcaaactctgttatc

SEQ ID NO: 210178 - DNA, 720 bp, Homo Sapiens
ttttttttttttttttttaaagtagcagtagaaaagcagtaaagaacttacttattgaaaagcgaaagcttaaagacctttctggaggaaacttctcagaggccatgttaaggctattggaaagtccaatttaaatgacaaggttactgaccaaaaatcaaataaaatattcaagtcaccattactggcagttctggttttggaactgatcccagaattctaccttgcaggctaggagatctcttaaaatggctgttagtagctagtaatagtgcatggtggaaatagttgaagcctcaggggcagtgatgtggcctcacacatatgtggtgcctgcagttcctgtagctgttttgaagagggagggagaggtattaactctgctctaaagcagtttgggtccagaataaaggggtcagtgcctcataccccctactagggtgaaatcctaaaactgcccagggaaggcaaggaagcccttggcagataccaagatcagtggtattggaaataacttacaatcagcagcctaatgccctcacggaaaaaaaaaaaaaaaaaaaaaagagagagagagagagagcatctctacaaaagaaaaacatttctagcataactttaaaataaactcagtaagtgcctcctccttaaccattatagaaaaagtttggggtaccaacatacagttaggctacttaagttgtagtgacttaggactta

SEQ ID NO: 210179 - DNA, 734 bp, Homo Sapiens
ttttttttttttttttgtctttcacacactggatgtttattattagaaaatagcttctatcagctgtcagtaccaaacaagttgaaaggagcgagcttctcaccatatttttttttctccttaatgatatttaaataaacagctcactgtgtgagctcacgccctttttccctttaaaaactgaataattaaatgaagtttagtacaaaacattcttcaaatatgacttgttctgcatctgttatgctgtctccttgagtaatggacgcgaaagagatgaaaaagaccactcaggctaccaaagtaccccaaagaatccatacgagaaactgagaaacaaactaactcaaataagacccaaccaaaccaagaaaccagtttttacgttgactttttgattttgattatcatctaagtttaatatatatatatatgtgtgtgtgtttgaaatagtaataaaaaaggaagaattgaattgcatccgtagcaggacaaccttcctcatacgttaaagaggtgttcagaaaattccatacagtatctgctaaataaacatgtttggcagcttagcaaatatcatatgattgcagcatccatcatttgaagtaaaacagcatttgctttcttctggcggaggttgttgcttggagtgatgtgctaatatgctctggatgttcttagacccacaggcttaaggaagggcttgggggtcgctcagtgcatgaccccagtgc

SEQ ID NO: 210180 - DNA, 627 bp, Homo Sapiens
ttttttttttttttttttagttttaccatcttttattataaacaccatcacatttcaagtttcctctttttgatcacaaatataggactttttcttctcctcttaagtatacagcatgagacacagcgttggggctttccaggtttcttacagaaatttccttacgacaaacttagggttagcatccacagaccatgctctcggtcacatccttcgacatctggattgcccaagacggttgcacaggatgcagactccaaagaggatgaggttggtacataacgttttgaattccaggataacctgaaacagaggcccctccactgcccacattaaaaggctgcacaaccaggagggcgccactttctgagtgtgggcttagagctgctgctctcgggctctagccccacttcttgtttgaacacatggctcaaggtttccctacgggtggaaaagatgaagaggacactggaggttaagaacccagcaggccgagcagtggcagcaatctccaccggaggcccggcctgtgcttcccctcctgggatggggtgaatgggggctggtcaggggtgccagatggtggtcttatttttacttgaattattctgcattttataactcaag

SEQ ID NO: 210181 - DNA, 732 bp, Homo Sapiens
  misc_feature (645)..(645): n is a, c, g, or t
  misc_feature (698)..(698): n is a, c, g, or t
ttttttttttttttttttcaccttaggcagctttttattttgcatcctttttttcaactttgtcttctattagctgtgcaagaaatacatgtctgctaaagttacacgatcttcgcacaacagcaacctacacattagtctacaaaggggaacaaacccaaattcctcagaagtctgagtccactgttgccttctttctggccatctggcagttacaatatagcacagaatgactatgcaagttaaatattcatcttagacatggacatttgctttgggactcctaaagtggagtcaaatttgatctctacagaaactctacaatgtagcagagcactgtgcgtacttattgactcccggacaagccgaaaccccgaatttgtcatttctatcagtttttatataaattgttcttacctacttattgatgcttacaatttggcaattataaggggcaaaattggagcaagtgttttgggtaaataactccttacaatatattaaaaatacttacaaacaattcttagaatcaaacacttacgtaaatacttttttaaaaaaataggtccaaaagactcagcccagatcggctttgaagttatatcaagatttaagtctacttcatgccaatgagctactcctcancaggggctggttttgccatttgaggaatgacagccactatgttgtgtacacangagagctggatggcatcgacagaatctttatcgt

SEQ ID NO: 210182 - DNA, 697 bp, Homo Sapiens
ttttttttttttttttttaactggaacatgctctaatctttagtttatttctggttaaaaatatagcaatccagtgcagtgtagtaaagaagtctgctcgaaaggtagcagagaaacagctaaacataagcaaagcaaggcagagtccataagacgggctggccccaagacgaccggatggggaatccctgcagcgcctccccgggcacaggggtcctgcgtatggccgtgcccggacccctcaggcacgtccatgcacacgagagccagggccagggggcactcggacatcctggcaaaccttgttcttttgtttgggtgatggagcgaccctggtggagaaggcagaaacataaggaacctgtttttgttggactgaacaagttacattgtacattttagggggctggatatgctacagtttctcaggaagtttcaagccactgggtttgaaccgcattcctgtcctgggaccaggcccactgtggtgtagcactgaggcatctggaaggaatatgcatatctgttaggggaagttgaggcaggcacagtacagagatgtgaaaacccgtggagatcagtaaccatgggagaaggcgtcctctagggccctcactgctggggacacggaaccccacgcgtccaccctgcacgccaagcgcacacacccagagccccggcgcgagcccagctccac

SEQ ID NO: 210183 - DNA, 796 bp, Homo Sapiens
  misc_feature (680)..(680): n is a, c, g, or t
ttttttttttttttttttcaaatttttgttttatagtttatttttgtaacatttcagatgagtttacacagtaactatgattaaacagtgcaaattcactgaaatattttgatgctgagtttacatttacatgccaaacatttagaaatatattaagatatgactcactgctacatggtttcccatataagatgagtcaaaccatgttccctaaataaaatatagacagatgaattttggtacaacacagtcatcttataaaatctattttactcatggccccaatatcaactttaaaagggttccagtatatctgaagaatgaaccagatttttcagtttttaagcctaatatttggcttcatacatggccacgtacatcctcccccagaaataggataaataaagagtattaatgagaattaactgccttgagacatttctattatttcttgttgagagaaccattcctaaagtcttcttgatcactattagcatatggacattataaaataaataacctgacaacttgacctgcagttcctggaggatgagtaaacaaaactgatgttaacccactgagtccactcttgtaagagtaatactgtagtgatgagagtactcccacatacacaaacatcacagtaaaaggtgcctatgattttcaacttcattgttcanataaagggttcgctaagtgatcacaagacagcaggcttggttgcttccacatattgacttcctagagatacatatgaagtttaatctggtctggctgtacactatatgtgtatacg

SEQ ID NO: 210184 - DNA, 710 bp, Homo Sapiens
  misc_feature (672)..(672): n is a, c, g, or t
ttttttttttttttttttgcatatttatgaacttcttttattcaaatatattttcacacatcttatctaaatacataacacagaagcctgtgtgacttgggcaacgtggtccaggagggcctgagactaacacatccacctcggcaaaaggacatcaaatatctcttacagtcggaaaaaacagccttttgtgtatttccttagtttacgaaatatactcgaaatgctattattagctgaatttgtggtttccttttgagtttctgagttattcttatttatttttcccattttgtttttgcaccaaggagaccggagtcaaataatactcagcgactgatttcctctctttggactgaaaaattaaacagatactaaatgatgacagtgaatttagagagggctccaagggcttgaaagaacatgtctgggataatatggtgcttctaagagtattgcaatcacatcgtggcaatcaccggcgcgtgccgcgtgactacctcctcggctaatatgctttcttctcggcgatgactaatcacgttctattaaacagcagtaatgcgggaagaactctcggctgtacaagtgtaatgaagccagtattctccctggacagattagctacaactgatttgacacacaccatcataggggcttcatacctgacanactctgtgcttgcttctgatttatgccgtcgagctcct

SEQ ID NO: 210185 - DNA, 705 bp, Homo Sapiens
  misc_feature (660)..(660): n is a, c, g, or t
ttttttttttttttttttacaaggatagggtgacactttattactcctgaagccccaccggcagaacccacaggccaggcagaccccgcagaccccgcagaccccatggacccaggtgcagaggcccgacggcaaaaagcacagggtaggtgggtgtgggggcaccagcagggacaggaggctgactgtggggacaggatgtctgggtccccaggctttgactgtggggacaggtgtctgggtcccccaggctttctcgggcgtggggggactgccttgctggccctcccccacaaaggttagacgcaaagcagagcccccagtccctgccccttctcatcggggcagggtctcccgtggatgaactcccagctccctccaagtccctcatgatctccctccctccacccacctggctcaggcagggccaggcatgggggcctgtattttgtcacccttcggccttgggggccccagagccgggcccaagccagcaggatcccaggaggactgggagtggggcctggtggggactggaggcttctgggaggtcggagggagcttaagggaccccaagcatgttgcagacagaggctgtacggacccattcctcactgcccccaccctacgccctccacatcttcacggtgtgcagcctgngctggcctctccggcagggacacccaggcttctcgggggcaggcc

SEQ ID NO: 210186 - DNA, 740 bp, Homo Sapiens
tttttttttttttttatttatgagcagacaataggttatatctctaaggagctatgtcacacagtgctttaaacacagaggtgaaatgaagacaaaagaaagatggaagtgtggagcccggggcaggtgcttagctcagttcaggcctggcacacccccttccccattttgtccctgtcttggctagacctgttttctcctcagaggcccacagaccagacctttgaggaatagagcaagatgaaacctgaagttgctttccaccagacctctgggtgacccctgagtcttcagttgttccccacattcaaaagaggccacagcttcccttcacagaagctggggggacagatgcagtgatgtctcccacactctggatttctcaggacacagagctaccaggggtgtggagggggcatttccagcaaaaaaaaagctggcatggagggaacaatagtgtccctactcatttccacctgtcagttacagtccacacccactgccaggcgcccactgcaagtcacccgccagcatccaccttcccctccagagaaagcccaagacttggaaaatgtgtttcacagaaacccatcaaccccgttcccaaactatctagaaacccaacagaggtaggaaccactgccagcatcggaactggagacaaggaaggtgaacgctgaagaaaaccaactctcagctgttttaagaaagaactgggctgggtgcagtggctcatgcct

SEQ ID NO: 210187 - DNA, 761 bp, Homo Sapiens
  misc_feature (709)..(709): n is a, c, g, or t
ttttttttttttttttgtcataaaaatgtgaaaacattttattctatgtacaataatgtacacaaatttaaacaggtcaccaaagagaccagaagtaattaaagaggtatatttacagtagcacatcacagtaaacggaaaaccattcacagattcaacattgatactgtttttgtgcttggttacacactgaaggtgaaggatattactccattttggatgaactgaattttaaacaaatacctcaatcattaataaatgctattttcatcagtcagtatcatcattaaattcttcagctgctgcgcctgtgtgctgaatcactccatttctttctctttgaacatcatcatcacaatctgtactgtcatcttcgttcaattccctgtcagattcagcagcagcttctcttacagcttcctctggagtttcattgggtggaataaatccattgttgttagatacatttgaattatccttgatatcatcttcgatgtatactttctgatggcacattggacaagtatcttgaatgtacagccatttccgaaggcaaagtgcatggaaataatgattacacggtgtaatacgagcagatgttgtaaactcatgatagcagattgcacatacatcatttatttcttgtaagcggctccttttatttcaggaagtgaattaattttcttcacagcagtcctacgattcatanatgtcttccagccatttttgggcttgttagtagatgttaaaatatgcatgta

SEQ ID NO: 210188 - DNA, 734 bp, Homo Sapiens
ttttttttttttttttttcgtggtttaggccccatggcctacagtcctttattagagcgagagtcccgaggcccagcccccatatatgatgggtccacttgagtctccttaggcgccccatgagggagtaacagcttgggtagagagctagggaccttgcccagcctgaccctggggcaggcaagcggccccccagcccccaccaccaccccaggagagggcggggtgagaaccggagtcaaatcttgggccgggtccaagcgcctgagcgcccggtttacgcaggaaatagtccagttctcagaagtggtctaaccagccccagccccagcccggcaccacctggagggttcaagtacatggaggagaggagtaaggcggacttaggccctggtatggagaaagggtgaagggagagagaggacctgcgctcaggagggagcgtggtctagtggcgggaaccacgggtcccgcagcgggcgtggccgactgtgcgggaggccccggatccaccgtgggcgaggccaggccccagcgccatcagggcgcagggtgcgccgccaggtggcgctccagcagcgcgcggtgcgagaagacttgccgcaggcggggcagggcgcgcgctcgggccggtgagtgcgcatgtgcacgttgagcgagctcttctgcgtgaagcgcttggcgcagacggcgcactggaaggcgcgcacgccggtgtgcgtgacatgtgtttg

SEQ ID NO: 210189 - DNA, 619 bp, Homo Sapiens
ttttttttttttttttgtaatttaaaatattgttttattctgtaacacagaaggaagtgctatttcacatccaagcttcttgtgtcctctgcttcccccgtgtttgctgaatccttgggcatctctttcaggaaggttctgaaggctgcatggctatgcccatgaggggaatgctggaggccagccaaggacatttactttcagggggagttcaccagagcagttcctttgtctctgcagaggtgggctccagtcaccggctgcgggattgcggagtccgccgcggcctcggctcccgcccggcgcccggcctggccccaccgccgctcactcggtccgcatcgccgccacctccggagctggtggggagcccggcgagggagggcctggaaggggccctgggcgccgagtcccccgccggcgccgacaccgcctgccaggagcagccggcctgctcgaggtgactgcagccgcgcggttctggcgcggcttcttcaccaacatgagcgggtctctgcgtccgagagtgagcgcagccgggcagcgcctagtggattacagcagacgcccggaccgaccgccgcctgtagctcggcagccttcgggtaagaatcgcccc

SEQ ID NO: 210190 - DNA, 620 bp, Homo Sapiens
ttttttttttttttttttagattagtacaggtttacttttaaatatttaataatataaaagacttgcatagcttcaattcatttaagcttcccaataatgggtaaattttaagtttcctgaaaagtgagatcatccatgtagacaatcctgtttttgacataattgtccaacgtggaggaggaaacttgttaaggccttccatttatcttaccatcagtgacagctgagtcgattttctcttctggtgggtatgctttgttccttttggaaaatgcctggctgatttctgcataggttctgtttttggtctcaggcagcacaaaatacaggtagatagcacctgtgatacaaattgtagcaaagactaggaaacagtaggtgtccagacttttctgaatgaatgggaagaggagcccaacagcaaagttggagagccagttgacggtgcctgcaatgatgaaggcagccggccgctgagattgctggaagaactcaccagtcaagatgaacgggatgccacctggcccactgcagaaagaggcgatgatggccagaatgcccacgatactcaggtaggggacccagggggcgtggtcctgcagggtcagcgtgatggtga

SEQ ID NO: 210191 - DNA, 781 bp, Homo Sapiens
  misc_feature (712)..(712): n is a, c, g, or t
  misc_feature (729)..(729): n is a, c, g, or t
  misc_feature (775)..(775): n is a, c, g, or t
ttttttttttttttttttaacgtttgagtagatttattgccaatgatgctaaattacaaatctaacaaacaaaatgattcctttggtcatttttgatttggtgttatgtcatcttgaagcctattgtttttaacaggaacagttaaaatatattagataacttccattaaccaattattttcagaaaacatagatcccataatatgtggccaactatatgagtaattaactaacttgtaatacagtcaaatgggcttatggacactacttacagcagcaacacttcacttcacacaaacacacacatatacacacacacacacacacacacacacacacacacagagcaaacacccccatctatttgttactgataattagccctacttgctggtttctttttcccctgcaagtctgtttattggtttaaattaagacaagatttatttttgtaaatgactgagatttatgtaaatgtgtatctctgttgtgttttatatatggggtgtctataagggcatttatccctatgaaggatgtcaaatactttcttctaatatatgtttagacatattgcagaggggtccttgttatttgtaattgagttaggtcatttactttgtgtctggtctcacctgtagcatgggaagaggacagcaatgatgagctgcatgtagtaggtacctgtgtatcaagaactgttggtatgtantgctaatttgcatacanagagtttgtctgtctgcattgtagtttgtgtttatatcatttgttnaatcac

SEQ ID NO: 210192 - DNA, 698 bp, Homo Sapiens
  misc_feature (679)..(679): n is a, c, g, or t
ttttttttttttatttttagtcattttttttttgtcctttaaaaaaaaattagtccccttctaataagagtttacatacagcttacctaataccttaagaagaacagagaacacaacaggagggaagaggacacagcaccatagtttcaaacattcacacacaaaagaaaaaagagccagcacagactagagtgagaccaagtttcccaacagacagggacaagtcccaacacacaaaggacatataattatctatatgaacaaaagcaaaatggaagatctggtcaggctgggatggaggagggagtgctaactccttgtactacaaagaaggaatgggattttttttttaaagcaaaaaagaaaaagcaagcccccaaatggatttttgatgttgaaactctgtcatatgctgctggtaacagtaaatatatatatttatatattcatatatgtatattaaaaaaggaaaaataatctatgtatagaacagtcagtagtcagagacatttagaaaaaagtaaaaacaagtccttttttttttttaaaaatggatttactaaaacaacttcatcacccagaggtactacaaccccacatcctctgatgaagccatggtgttattcaacagcatctgctgtgggccgtagttagaaatcaccagtgttggaaacagcanacattggggtcagggctgc

SEQ ID NO: 210193 - DNA, 612 bp, Homo Sapiens
  misc_feature (382)..(382): n is a, c, g, or t
ttttttttttttttttttcagagcttttctttgtttttattttaaaggaaaaaaacaaaaaagaacaaaaaaaccaaaaaaaaaacagtgcaaaaacccattttccagtgtcagccttgcccacccccacccccaggccaccccagctgtgagcctgactcttcctcccactcagcaccccctcccccctcatgcatcccctaggggctggaggctccacttccctggagggccagatcccaggaggaactgtggggtggaaaaaacggaggggggggaacagccccagatccacctgccccccaggtctccagccaccggcaccaggtgcaccaggtactcctcttggctctcattaaccctctcctggtcatgctactanctggggaggggtggggggtactgatctgggggaactccctctgcacccctctttgccccggggccggctcggggctctcctcactgaggttggggggctccctccctccatcatgggggagagcagtgaaacccccaagtttaaataccttaatgaaagcaggggctggggaggaaggggctttagatctaataaattattagcgttttactgtccgtgggagtgggggt

SEQ ID NO: 210194 - DNA, 693 bp, Homo Sapiens
  misc_feature (596)..(596): n is a, c, g, or t
tttttttttttttttcttgacattttgagggcttttacttcaatttgaagcagatggttgagcacagacgtgaacagctttggccatttgagcacaaggaaggggcgggccttggctttgaacacgcaggccccatcctccacatactggcccagtcccctggtcccttccttctctgcccctgcacaccctgtaacagaccaccgccctccaagtggggcgccatcttgcccagtaggacggctccagccaacccagcctctactccttcctcaggccacgtgcaggctgaacaagagaaaaactctttttctgtccatggcagggcctgcccatggtgctggctgcctgggacgggggcccatgggggtgggtcacagtgaggagaggctggctggggaagcaaagacccataggtagctgccctggggcaagtccctggtgtaggggagggagtaatattgcttctctccctgcttactcccttctggtgatgcttagggcccaaggagcctggacccaagggacactgagaactggggccagtggcctgggcagccaatgaaggggagagagtgggcagggatctcaggtcncactcccagccccgcccaggcacccagcctctctctcacagcccctaaggctagtcttgcactcagccagcacaaggcccagtggagagagagcacc

SEQ ID NO: 210195 - DNA, 699 bp, Homo Sapiens
ttttttttttttttttttaataaatccaaagaatttaataattagcttaatgcacagggtttttttgtaccttgcccattcgctgaacttttaaaccctcctacatatgaaagaggaacagtactctttagtattacatcactgaaattatagaattgctcagacttgagacttttgacagtttttcatgagaagtcagttacattaaatcaccctttgtttgcttttctggacctatttttgctcaatcccagataaaactcctaacccaggtttgggctcagcactgatttggaagctaaaacgttttgagataaatacaaaatagagtcccgtcccaaatgacacaggcctttttaatagcaacgaaggtaaaataaagcaggacagcacgtcctgaggatgaagtgttttgcagactcttctcatcgatctggtcaagaagggagaaaggctttggcctccctgatcttctgcctcacgcctctgcaggacaaagtgaggctagcgtggtggcgcttcagggattccaggcgccggtgaagcagttcggtcttgtccaccttttcttccaagtcccgaagaagtgagtccttgcctagaaggccgcacttctgattcagtctgatgttgtccgtccgcagcccctctcgggcttgcttcgtcttggacaggatgtctcttcctagggcgggctgg

SEQ ID NO: 210196 - DNA, 667 bp, Homo Sapiens
ttttttttttttttttttaaaaaaaacggaggtcattcctcttgctttcaggagcttgaaaaataaaccagagcgaccaagggctgcaaggctttgaccttctggtgaagacagcctttagcaggaggaacctaatcccaggaagttgtctgtactttgctttctgctaccacactagaagattacttgatcaaacaaatgggcatttttccccatgatatctctgtatcatgaaaaagtacatttgtcatttaatttttatctaattgtattgccgtttccttctccgcctctttctcccacctacccccacccctcctacactggaattctctgtggtcaaagaatctgtttcagtattagtgttcaatatagcaaatgtcaagtaaacactctacacatttcctgtgctatttaaagcaccctaagcaattatttgctctaaagtattaaactgtaaattttcttagctggtgccaattcctatagtaatagctgtcacagaaaagtactttagagtactcaaacacggcttttaaaccggcaacactcatgctacatttgccaagacttttctagttgtcatatttttatagcatgtttttgagacaatggactaactgcaacaaagtgtcatatgtagctcttttttcatatttgaagcttc

SEQ ID NO: 210197 - DNA, 618 bp, Homo Sapiens
ttttttttttttttttttcaaaagactgaaacagatttctgtattaccaacagaagacaatttccaagctataagtgaaaaaagcagtcagaacggtggtatataatacagaaccatttgtaatcaaaatcaatgtatacatgctactcgtttacaggtgtatattcagtcgctgaacaaatctccgttaggggcgctgttcgtgtgctgggaacacacaggtcaatgaagagcagccagaaagccccaagctctggaggcttccactctcgtgaatcagcaccgcttgatcatctccttccacaggggcacagtcagcggcgatagctgaggctggcagcctttgctgggtgagtcacagaccagaagttccgtcgagtctgaagtttctggaaggcgttgaagtttctcctcttctctctcttaaattttttaattttcttttccttccctcggtcaaactcttcgtcccagtcatcaaccacggtctcagtccgggcctgtctgctgtcttcaatagcatcctgactgaccgccgacatcttgccatcccaggtcagaacttttctcccgtaagctttatcagatgagtatttgagcagttcctggaccacatca

SEQ ID NO: 210198 - DNA, 702 bp, Homo Sapiens
  misc_feature (656)..(656): n is a, c, g, or t
ttttttttttttttttttagctcatcagctatggttggtattaagtctattttatgtgtagccctcgacaattctcctaatgtggcccagggctgccaaaagattggaccccctgcgctagaaagtacttaatataaaccagtggctctcaaaatgtggtctacggattcactggggattccagagtcctttttgggagggggttgtgtaaggcccccttttttcatctatttgtgactttggattgtcttcatatacctccaccaaaatgatccgccacagcaatcaaatgtgtttaagtaaaattgccttaagacacatgttgaatatctgtaaaaatgtaaaatgctactcttctcagcttttttagaaaagtcattttagaaatttgttttaatttctactgttagtattgataattataacccatataaacaaaagctctctggggatcctcaataatttttttagagtataaagaggccctgagaccaaaaaaagtttgagaaccaatgatatcaataaatcctttattcctgtcagagttttacatcaatgtcacaagctctggagtcacactgcctgggtgagaatgatggacctaccccacttacgagctgtgtggctttgggcaagttaattaacctctttgtggnttaggttaataaaacagaattttagtatctactgcacagatatttc

SEQ ID NO: 210199 - DNA, 624 bp, Homo Sapiens
tttttttttttttttttgattttacaattttttattaaaaagtgttccaaaccatttttcttaaatgtgattctgcccgtgccatcagtcctacaaaaggaagctttaaaattaaaatgctgtcttcattaacaaataagcaaagcattaaccaatactctaagagacaagcccattttttgaatggtgaaaagtggtaacaactgccttttcttcatctatgtgcaggtgtcagaaattactattaaacacaacctatatatagtaaaaatctgataatccacatttcttataagctactttttacatttttaatgtctgggtatcctaaaggggtttttccctgatacttgactattacatccgcctttgcttctgcatgaacacgttttacatcgtgaattatctaattaatatagaaatattttgagataatgcatgatatcatatttaatttatgaactgcctcatgacaaaaggtaatgagagctgatacaatccctctcctgaagtggcagcgagtaacccgggcaggctttgctctgggtcactcagccctctctccaccacaatctgccaccagtgcccttacagtaatctgcttgtgctcaaggtcctcggagg

SEQ ID NO: 210200 - DNA, 602 bp, Homo Sapiens
  misc_feature (22)..(22): n is a, c, g, or t
tttttttttttttttttaaaancaacaataatttattgtttcttttcaaatcgctagaacaatggattttgaattttcccaaaacaaagaaatgttaattgtttaaggtaatacactaattacatcaatttgatcattacgtattatatacacatattaaaatttcataccatatcccatatatatgtacaacttacatatcatttaaaaataatgataaaattatatccagattcaagcgcctcttgtagcgcttcccacagtcctcacatttggatgagttttctccattgtggtctccttgttggtctttacagaaagaccggtgtacaagcctctttccacaatcctcacatttgaagggttttttccggcagtggagtttcttatgattcaaaatacttgaagcccggctaaagctcttcccacattccttacaattataaggtctctctccagtatggaccctctggtgcaagttaagacctgacttactaatgtagcccttcccacactcctcacatctgtatggtttttctccactgtggattcgctgatggatcaaaagatatgaggaccatctgaagctcttcccctcgtgc

SEQ ID NO: 210201 - DNA, 626 bp, Homo Sapiens
ttttttttttttttttttaattatactcttttattgaaagaaaaaacaatacaatggactttaaaaagctacatttgttatggttcataaggacagaggtttacacaggttttatatatgtacacactgacaatactatatcacaacatcagaggcaccatttttgccacagaattaggtaatgaataaaacttctccaaattaatctgtttaaaaaatatctaaaatggtacagtatatttgaggattatataaatatgtgagacatatttagatattttttaaaaatagtgtttatatatatgcatcacaatcttctctaattctcaaaatattatggcaccaaaattctgtttgtcaaataaaacacaagatgctgtaatatgtatccaagcaccagcttagcacagtatttaattctcccccaaactgaaagactgctaacaggtacaaactgaactgaatatttcacacaaccattgaaataatttaggccctcaaattttttttttattagctgattgtttttagagaaaaaagagggagctaaaccatttacattaatgttgctctgtgtgatagaatcaatcctagggctcagagaagatattcctaggcactggaga

SEQ ID NO: 210202 - DNA, 647 bp, Homo Sapiens
ttttttttttttttttttaaaatatttgtttaatgaaacaaattgactagtttcacagatccctctgcataatacaaagttctgaaagtttatggtcctggttttcaattaatcctccacactggcactggtctaaggaaactgaattgacacatatgtgtcccacattccaccattacagtattagccctttcccaccaactgccccttatgaagcttttcagtcactgcaacactcccaacaccaattatctcatctgttttaaaaattcacagtacttcatttcctccacttaaaagtacttgggcttcctttactcatttaattgacacagtcgagcaattgctgtgtatgtgcttaggttaacatcaaatttgcctgtgtatcacagcatacattttaataggatgagtttatcaggctatctcagccttatacatgttctctcagtgtatgcttttcggccacataatgaactacaaatttttgctcaacccttttccacatagatctgagttttcttcctatgggttttctgtaacataaaataagacataattgatcacgggaggcacaacacattcactgcattcacaaggtttctgtcctgtgcaaatccactgttatctcctgaggctgcacatct

SEQ ID NO: 210203 - DNA, 655 bp, Homo Sapiens
ttttttttttttttttttgctttttataaaacaagtttattcacattttgagaaaaactaattccaggacaggaaatggcctccctataggatccctaagagatcaagaacagaaggccagagggaggggcttgggagggaaggagtggggaaggggaggcacgtctcccattctgggtagtgggaggtcaaataaattaaaggaagagtggacagagggagagggtgtccaggcaaccagaggagggcttggagctgggccggaagacagtcgacacctgcaagacctggggagtaagggatcaccgttttcgaagcctcttcatgaagcagcaagtgatggtaccaaggacagtggcaccagtgactagggccacccctgtacccaccagcagaggcacaaatagggtgtccagggcatgcatgtaggggtagactgtaacaggccctgagcgggcactgcccgcctggtaccagctgtagtcggcatgctgcacccaggcgctgggggcacagtggtacacgccttcatcctcgggccccaagctgtgtagtctcagccgatggcttcggggccccaccagctctacgctgacagggcctcctccaggccggactctcagctctgccacaccatcctgggctacgccaccca

SEQ ID NO: 210204 - DNA, 655 bp, Homo Sapiens
ttttttttttttttttttaaaagctgagaagtatttattgctgaaaataattgatctttaggaaagaacagtgcaaatctatggcaggttcctgtcacagctaacatagcctaagcaggcacccttgggattagccctatcctcccaggccctggaagaaggaatctccaccagaatcatgaatccctagagttggaagctggaagtaccagggagtgatatttgattgtgggaaaagatggtgagtgaagggtgtggaaggaagactaaataagagagatagagaaggaaaagattaagtgacaggaagagaaatagagacacagaagaagagcatcagagacagaaatagagcctcagggagacagagagattgaggacacagcagaggagagacagaaatagagcctcagggagacagagagattgaggacacagcagaggagagacagaaatagagacagagacagagtgagaaagaaagtgactaggagacacacagagaccaaaaatgagagtcagaaatagagcagtggaaatagccatggcagagcaaaggagaggagagaaaaagacactgacggagagccagaaacaaaaacacagattgaaggacagaaagataaacagagaaatagacctcgtgccgaattct

SEQ ID NO: 210205 - DNA, 693 bp, Homo Sapiens
ttttttttttttttttttcagggcttgaaaggactttattgtggctgtggtgaagcaggccctggtcttggcagatgataccagaagggcactgagtgccagcgtgcaacttgaatttgatcccataaagtcaggcatcaggaagccattcagaatttttcaccctgtcagatgctcagatttgctagagaactctggtagtggcaagaaccagagctgttactcagaattgggacagaggcattgtcccaaaaaaaaaaaaagcccaaatcagagcagtggcaatgtaagtgcagggaggacatgatgtgggattatttagaaaacaggccaaatgacatgcaactactctgcggatacagacgaagcaggaatcagggacccaataagtctcaggtgctttcaagtaagagcatgtaggtggaaaggggcaggactctgggttccattctaagtaactgagactgaagcaacagaggaacctccagatacagataacccctgacagactgaaatacgatctggcgacagcaaggaggtggcagcttgagagaggtctacaacccacctaatggtttagagccacctgactaccaggcctgtgtgtggacgggaaagtcctgaggattggactctggaaaaccatcacacttaagagacagaggaaaaagagcagtcacggaggtaggtcac

SEQ ID NO: 210206 - DNA, 639 bp, Homo Sapiens
ttttttttttttttttttggatttaaatattttatttaaagaaatattcttaaggctgcagtttattgataagaaaaatataaagcatacatgtttatagattatgtattgacattatagtatatagattctccaaataacataattaattttgtagtgctactagtggaatgcattctgcagaaacatggctttaccttcaaatctaagcacaatacccttacatcaaaaatgaaggataataaaagcacaactttgattcatttaaattttggtagaccacatctgatttgttgaagagtaaattcgtttatttacctcttcaaggaagtcattattttttgcatctctttctgtgcctctttatcctctttggtaacagtaggaagcaataaagccaaattacagaacttcaaagcattctggttttcctcaagatcagtataacactttgctaagtacatgtaattgggattagaataaccagggcatagttcttcagccttaaggaaattgtgtaaagcttcttgtacagttgaagatggtatttttccaaacagagtagcagccatttttttctcaatccagctcagttttgagacagtatagcagtatctcccctttgaggtaatatagaaa

SEQ ID NO: 210207 - DNA, 685 bp, Homo Sapiens
  misc_feature (661)..(661): n is a, c, g, or t
ttttttttttttttttgtccagccagggctccttttattcattcaggggtgggtttttgaaacgcagtgcaacttttatataaagtcgagggtgccaggaaagtgggcctgccgggtgcagagaagcgcaagaagcttgctggaatgttccagctttaagggcgcccttgatacaccggccacagctgctggcccagaaggtgccatgtggacctcagaatgagatcagggtgcctgctccgtccagagctcaggaccatgtccacctgtcctccatatgcaaaaaaaaaaaaaaaaaaaccctgaaaatatcttcacacaggatcacagactaggctccgcatggtgtctcttggcctaagaagcgttcaggccgtgcgggaactgttgaagtggaagtgttgaagtggaagtccttccacaggacagggtatcaccagctacctctggcctctctgctgcagggtccggagagcccagcattcatactggtgtctcctctgccaccttcttcaggagtccagctgccagtggagaatgctgggggccctcggggctgtccgcctcccggatcttcaggcgaactttctggttggtctttctccactcggagtacagctggcagtggtagcggaaggagaccagcgtccagaggacatanatggtgaagagggcgatggtgagg

SEQ ID NO: 210208 - DNA, 691 bp, Homo Sapiens
  misc_feature (579)..(579): n is a, c, g, or t
ttttttttttttttttttaatttaaaggtttagtttatacaattgataattctgcaaaccacaatatgtcaataactacatactgtaataaaaataaacaaagtcatacttaattctataatgcattaagaataacctaaaaaaacaaattgtgaataaaggcatatttaataaattagggaacatcttaacttctaatagactgggggaaatttttaagttttctatgtacacaaaggcagtgggaacaaatgaaaaaaacaaattactacattgttgcagcacattaaagactggatggtgtatattattcacaattacatcctctttcccatagcctggcagaggaaagtagttaccaagcacaggaacaatttcaacatctcactggagtctccaaaagcaagcagatactgcaggatgtcattaagcaacttactgtcacttcacaccatatgtggcagtaagaaacttaaaaaaaaaattaaaaggcacgcataagctgatttcaaatattttaagtccaggctactctctttagatacaatgttttgaacacttgtatagaacagtttttanataaacatttccaaaaacttgaatacagaacttaggaaccatgaatcttcaccaaaaaaagttacattaaaaaaaaaaaattcatgaaataattacagctaacctatattta

SEQ ID NO: 210209 - DNA, 715 bp, Homo Sapiens
  misc_feature (635)..(635): n is a, c, g, or t
  misc_feature (699)..(699): n is a, c, g, or t
  misc_feature (711)..(711): n is a, c, g, or t
ttttttttttttttttttagaaatacttaaaggatatttgttttaatatcaaggtacaatgattgaaaaaaaacttttccatattttttaggaattattaggatctggaaataaaactgccctaatcaaggtaatcaataacattctacctttttaagttttaaaaaagaagtttcatatccacatgagatgatttatattatgcatatacaaaagtattttgtatgtgagcttgctacaccaagaggctacagtgacatgtgtgacaatcatttccttgaaactctgctaaaatatgcatttgaccaaacaaaaggccttctgcagctaggacaagcaatcacatattatacagaatgcttagaaccaagattcagatcttaatgagacttattgaaaagttctctgccccataatgaggcacccctttaaaaatatggtctgagtagagacataaaagatatacatttaaactgtgatggtaaaataaccaaaaaaagaaaaattatagttcaaaaaaaggaacaattctttgaaaaaacatacatagaaacagtcaaactatgaacacctttacacattcacaacatctgcactaatgcatagaagttcaaaacctagaaggcattttctcncccatcccttctctgaaactgattcagaggtcactgtgtgaagaattacttcagtcctgattgntaatgtcatganatta

SEQ ID NO: 210210 - DNA, 707 bp, Homo Sapiens
  misc_feature (643)..(643): n is a, c, g, or t
ttttttttttttttttctgggaaagcctctctgccagctgaagctgccgcagcagagctcatgagaagccctttcctaaggtggctccaggagccctaaccgggctgctgggcagtgcagcattttacttttttgctttttgtttaaaaaagggagatgagtaagcccccgaggacccagcggctgcaacttaaccagcctccagttcaccccagccccagccaggaagagaagcccctctcctgtgcagacaggcaggactactgggtgggcgtgggtgagcaggagctagagggggatccaggcacagcccaggggctgtttgccagatgacccctgaaggccatcatccccagaacatgtgacctcgggacgcccaggtgtgtctgcatgtgtgagcatgtacatgagtgggtgtgtctaggtgcgtgcgcgtgtgcgtctgacagtcctaccagagcagacgctgcccagctcggcgtgggctgggctggcctgcctggccccgagagcccagccctaggttctgacacctgcgaagtgggaaggaccttaaccacccacctgccccaggtgctcacccagttcccgcccttcacagaccccttgtccacgccaggagcctatgtggactgacaggtangtggacagacggacggatggacagacagccttgccttccttccttcctcggtccactcctttct

SEQ ID NO: 210211 - DNA, 692 bp, Homo Sapiens
ttttttttttttttttttcttgtggaaagatgataggtttatagtgactcaaaatattttagaaaaatttctgtagtgtcaagttctttcaaacttaaaattttaaccccagaggattttcgctgaataaatgagaattggctctatttcttctacttctggatagcccgagtaaaaatactaataatttctagattttagtggggaactacaattattaggacccatggatattgctgcagttcaaatacaatacagtaattacaaaatatagaccatctctttacaaatacaaattatagtatattacaagtcatgtacagtaaatctataattttaaacaaactagtgtatctaagtttacctggttgcgagtgcattattattccagtttacagttgcccttagcgtgacagtcagaaaccgaccatcggagtgatattctcttatgtaaactggcgtcacatcacagaaaaccttatttatgaggtcccattgccctcgcaataatcactggtagctgggttctgacttacttacacaccgtatttcagaacagctaaacaggaaccaggacgcagtgtatttgggggaaagggtttacaaatggatatgttgggcccagtgactgatatgctagaccgatggctgaggtaacgacacaggtgtgatgatcgtcatcacctttaact

SEQ ID NO: 210212 - DNA, 666 bp, Homo Sapiens
ttttttttttttttttttcttcttttttttttgcaggtacccaagttcaatggtggagtaccagcaaaaaaagctttcaatttttttcctggcttctgtaagaggggacttttccttcaccctcaattctaattctgacttcacaatggggaactgagagttttcttcaatgagccattaacaaattgcctccagtactgaccacaatgtcaacctggatgtagaattatcaactgtctcagcctcaagccagtcctctcggttgacagatggagaaactgaggtccagagagaagtgagttgtctacaactgcctagggagtacccaacagacaagcactccagctcctggtctggtgcattcaaatggcctgtcctgttgggatgttcagactggaaagcaggaaactgactctgggctgggcatggtggctcacacctgtagtcccagcactttgggaggccgaggcaggtggatcacttgaggtcaggagtttgagaccagcccggccaacatggggaaaccccgtctctactaaaaatacaaaaattagctaggtgtggtggcgggcgccagtaattccagctgtttgggaggatgaggcaggagaatcgcttgaacccaggagggagaggttgcagtgagctgagatcattccactgcac

SEQ ID NO: 210213 - DNA, 647 bp, Homo Sapiens
  misc_feature (53)..(53): n is a, c, g, or t
ttttttttttttttttttgaggagaaagaccatttatttctccacccacagtngggactggtaggttttgaaaagagcaatcgctggcatccctttaaatcttggctgactcccaccgtggcagccaatcagcagaggcggagctggtgagttgcctgggcaacaggcccctggttggccgaagacaattagccaccccactgcccactcccaacgaaagggaaattgactctctgctgtccactctgctttaaaatacatcggcccaaactaggcctcctcctttcgctcctgaagtcagaagcgccagcctttggctctcaaaattgggagcgatttggtggagaggatggggtagggaggatgggagaacagcgcctttatctgggacagacagaaggcctggagatgggaagggagaaggagatcagagtccagagagatgaagaggcacagacacaaaatcaggaccctctagtccccgctcgtgctggccattttttgtagaactgctcagtcatctgggggcttccaccccatgggcccacaattgcccaatcagtgggtggcagacatgggtgatgacacggaatgggtgaggcatctggggtacactgagtttcccgagtccctctttgccccccgag

SEQ ID NO: 210214 - DNA, 717 bp, Homo Sapiens
  misc_feature (690)..(690): n is a, c, g, or t
ttttttttttttttttttaggtcaaacccaattaaagtttattactctctcagaaaaatagtccaggtgattcaagtcaggtttatgtgcaggggtggggcagggaggtcatttagggtcccaggatgactggattgtgtcttcaattacggcttctaggaactctctggacatcgacacccaacttccttcctcccaggcactgctggagttgaggcttagttaggacaccatattggcagttgtggggctgccaggttatttctctccagtcacacgtcctgttgtccgaacaactaaggcaaggcacaatccactggcctttcatgtccccagatggacatctttttagttcagactgtaaaatggcttcaatgtagtcagaagaaataggctgtaacccacaggtttcctctggatgaatcagcaaaccacaatcctgcacaaaaccacatgctgtgaaggcctcaaacaagggcagacttgggcggtcttctctatagatggtgagtttgtacgtgatcagagtctcaccgtgtgctggagattcatccacaacaaatattgagattttgttcattcctaagcccagagggtagctggcaaagcttggccctgcctgctcgtacaggtgcaccttgcacagacacttaggagtttccactccaattgtcactgttaccacatcanatgggacttcacagtaataatctttga

SEQ ID NO: 210215 - DNA, 674 bp, Homo Sapiens
  misc_feature (548)..(548): n is a, c, g, or t
  misc_feature (598)..(598): n is a, c, g, or t
ttttttttttttttttttgcttgtaaattgtgctttaatttctgcaatcagatatgatgcagtgagatacaagtataaactttcattgtgcatccagaaaataaaaagcacaagtatacaggtttagctcaacagcttattcccttataaagaaaaaaaaagttttgaattaaagctagtttatcttcagtgtaaaaacttggaggtataaacaaactcaagatattatatacagtaaattaatttacatttccaaacttgcacagtacagcattttaaacaaagtaaatggtctcatttcagctctcactgttaagcataatccacatcccaatctcagataaaaatttcacaatatataaatccattgagaattctgtacacaaatacgagttatagaaatctgatttcaaatataaatacaaaaattgtcatgaccttacacgttacaacagcttatttttctattgtaattttaaaaaatcatagaaaaatatgtcaatgcacattcaactgctatgacaaaggccatgaccttgtgcctttanaccatactttgtagagtgtaaagcatcacaccgggcatttttggaatganaattacaaagcctgaagaggctactgtatacatattcacgttataacgtggtaacaaaaatagctccatagcatat

SEQ ID NO: 210216 - DNA, 567 bp, Homo Sapiens
ttttttttttttttttttcactggaataaagattttaattgtctctgctcatggtagaagcaaggcatacaggcccccaacccttctgcgccacccctcttctcccctgtgcactgtgtctactgctgggtggagggggtcgggggagcaggtattgtgggccagccccagatgtgggctcccctgccctctcttcacctagtctcttttcatgttccccttcaggtgactctttctcctcccagtaagtcacagggtagcaaggctgagggaggagagcatggggaggggaggggatcaggaatccacagcccagcccggcctgagtccaggtggagagcaggtgcgtgtgcctgtgtgagtgtccctgtgcatggccgtgggcttggctcagcctgtaagctctgagatccccccatgccagtcccctctcagaggtcctatctggtgtcttcactggggtcagcacacctgagctattcaaattacttccatcctttggcgatggggctgctgtgggtgaggctgaggcctggcacctctgttgcttctggcacagggtaggga

SEQ ID NO: 210217 - DNA, 636 bp, Homo Sapiens
ttttttttttttttttttgagacaaaacaatggcaaatttatagaaattaagtaagagaaagcaagcctactccaatcaggtagaaaggagatgttattcagcaaaaaattggaggaagtaaacaaaatttcatcaattcttgtcatttttcaaaggatcacctgcaccaattctgccatatatatatgaagtaccctttctgatccttgactcctaggctacccagtcaccttctaactggtttcccaggtatttcagactcaggaaagagaaaccctggatcggtgacacaagtattccaatcactggaaaagactatgcctcactgtaaattacacttgcagcgtgacctacggtaactacgatatgattaccacacagacctggtgaagagctaatctcgagcaaggctcagacccagcctctgttactgaggtaggcaaaggacctcgaaagaccccatctacagccctactactaatctaataacactgaaacagttcttaaaattagaacatagtgtctccaaattccacttgaacatagaatattagcatatacaaataacttatttttaaaatgtctgtaaagatactatcataattgaatgaattactgtatttcactgaatctaa

SEQ ID NO: 210218 - DNA, 619 bp, Homo Sapiens
ttttttttttttttttttcattgctgcaaatattttccttttactttaggagttttctgatgtacaacaatttttaggctttgtgaattcaagtttgctgggctttccatctactgcacaaagacttcccgagctgcaaatgaaggaatctactcccggcgtgggggtccgcagcgcatcacctgcctctgtagacaaacttcatgggctccacggccagtgcggtggccacaacgtcatctgcattgtgtctgcgaactccagtgaccatcagcccgtccagtttgcccacgatgaagaccaggttgtcaggcccgatgaagcccagcaggcctgtcctggtgaatggcctgtcaaagatgggtgctcctcctgtggtgaccggaactgcctcaaacacattcttcgtgattccaagcaatccatagtacgctgtgccagttgcactggaactgacgcatatttctcccacttcatcagttttacacagataaggggtaccttctaacttcacaacacatacattagctccaggcatcacgtgaccaacgtcctggaacagtaaggactgacaccttttcttaagtatccactctgagaacaccataacttagaccgt

SEQ ID NO: 210219 - DNA, 569 bp, Homo Sapiens
tttttttttttttttcttattacatctttattatcagtcaaggtcacagtcatattaaaaatatataatttaattctcaaataatgtctttgttcctctttttcctaaagtcctttgtcaaaagaagtcaaagttgatatattttgtagctgatatacatatgctgacagacagcacaatgttctgaaatgaaaacagagatattattgctttataaaaagaaacttggtcccagagaggagaaaaatagatagtacacaagagtgacataagaaaaaaagcaaagcattatcggagaattgtttccatttaagtgaaagcagtatctgtgatttttggctgactgctccaagtaccgtgtatctcctacatcagtgctttgaatgtattcttctataaatgcatgttaaattaatgtaacagtaataataaaacaaaaataactatacagcaattagtccaccattaccaaaagggtaacaagttcacaaataatctcctcccaaatttccaaccatgatgatttttggaattgtagtaaggcttccctttgtagatttacctcgtgc

SEQ ID NO: 210220 - DNA, 688 bp, Homo Sapiens
  misc_feature (632)..(632): n is a, c, g, or t
ttttttttttttttttttggaaatgtgcttttattttcaaactcaggtatgtgacactctacagttcaatgctagcacacctgtgtgaggcttaacaacatgaggaactgatagccagtgatacacaaatccagcacttcctctccatttactctgtcaggctgtatatggggagcaacacatatggctttgtggcagccagaaagtgaaggtctttttaggaggtgacatcaacaatgacacaaacacatcactctgcaactgaaggcagggaaccagactcctagggctaagcagagatgtcagacttcagaggcatttgggggactcttcagatccacatcctcactgaaaatccagggcctgtttctctccagttcactaccgcttgggcagcagctcccactgcttcaggctggtctttgctttccagaaaagatggactcatgagcactttttcagcccctgtatatatggctattcttatgctcccttttggagatgtccttttcctcgacctcccttgcttacaaatggaatagggtgggagagggcctgtgcctggaagtactcttgcaggcttttctgtggggcagctggaggtgcaggagctctccataactgccttcctnggctttgactcatccagaaacacaggtaggaaacttgtgaccaagtgaacaatggg

SEQ ID NO: 210221 - DNA, 696 bp, Homo Sapiens
ttttttttttttttttttcagtgactgataaatctttaatataaaaattgtacaagaattttgatacaaattacaagaggtatttggacaaaatatgaataaaattccatttacatccccaaacccttatgcattttatgcaaaagacatactgtaggcagttatagtacagaaaatacaaccaaagtaacagcaaattaaaaaatttaattaccttagcctaccaataaaaacaaaaagcaaaacagaacaaaacaaaaataaaacccttgttcaaggtacatacagtatttaggaagctaccaacgtcacaatgattagatcagggtgatgcacactgtcccatcccttggtgcagttaccttttgaagtacagactttgattctgcggcaggcttattgcaagagactggttttatgcagatgagaacaatataaacaaaaaaaaggaataaacagctaaactctgggagagggagaggacatatcttagtgaaaattccttttcttcaagatatttcaactccctctggccacttttgctgtcaaatatggaggctgagtccaataattttgttactggagacacaccaatgggtctggagtaagaaaggtgtgtgttctcccagctgtgtgagggatcttgctagttctaaaaggcctagtccatcaccagcaggagagaacagagaactg

SEQ ID NO: 210222 - DNA, 642 bp, Homo Sapiens
ttttttttttttttttgtctttaaaaagttcatttattgaaaatcatatgtataacctagcatacgaatgagcagatttaaacacataacttcaagccatttctgaaaacatacaccaggagctctgctcagctagagtcagactccagctccagcccgactgcgtgcggggacagcgcccgcgttgatgaggaccagccccactgcaggctgaggcggtgtcaccctgggaaggtcgtggtgcgttgtggcatattaagtctaaaccagatgaatgtaaatatctctttgtaaatcatttatttcactctgttccatccaggtcagcaatcagattgtggcatgctgggtaactgggtccgcagccggtccacctcttccgacaggctctgcctctccaggagaagctggttctgcttgctgaggagctgcaccagctgctgggctgtggcctggctgtgcttatccagctgccttagcctttgcttcatcgtctcatgtactctcccatgctggacacactgttcctccaattcttcatttcttctctgtaactttcccaatttatcatatgtataccttttttcttgactgagttgagctatttcagatctggttttttgagagatttgttcagtttct

SEQ ID NO: 210223 - DNA, 651 bp, Homo Sapiens
ttttttttttttttttttgcttaacacatttccatttattatttttaataaagagtttaagatcccattttttaaaaagtacaatacagttgattttttaaaatgaggttctacaaacacttttggacagtctaacatacatataagctgtccctttcaactaggatatggggaaaagaagtcaacccagtgtttccactttccatgaaggacttctcaagggcaaggtaataagcaggaataaagcttccaaaaacctggaaggactctttcaggtggactaataagcatcatcatcacctgccttaaactacagtaaagccaagattgttaataatatagttccttgcttttagctagtatagaaaataaaattgaatcacattgttgatggtaattttacttttgaaactcaagtcacagaactgactgtgggccacttaatccacttcagacattgaaaagccacaccgcgaagtgctcgtaatgaagaaatatctatgacacagatcatgaaacatgagagagaacaaggtaagggggaaaaagctgagatgaaaaaatcttcaatcgcaggctctcttcagcacttcatcttgaatgcactgaagtgttccatcctctgctcttattgtgaaagtctcacctgga

SEQ ID NO: 210224 - DNA, 691 bp, Homo Sapiens
ttttttttttttttttatctataaaacttttattaaaattggaattagaaactataccaaaaactttaaaaatacattaagacattgttcttttttcttacagaaaagagggtgaaaataagacccatggcaaagagccatccctgataattttgttcctttcaaacattcatgaacatttaaataaaattacaaatatttaaataaccctaaggtattacccacaggctaaaacttgccagtaattccttagccctgctatttcaatatcaattccacaaacatggaaaattatggtaactgcaggctgtaacagtttctaatattcacattatgaactatttgttatgttgtcataagaatgtgctcatgctataggcaaattcagaggtgatttcaccattttcaaattatcatcaagagtgtgaaagaggaagatgacacacacgtgggatggtgtggaaatccaaagccccacattttgggagtctgtgaccactcccatctgccactaaagctacgagttggtgttggcatgaatctgctttgtttattcccagcaggctctggctcgtgtcacataaggcaccaacatccttttcaaggtagtaaccatctagaatcaactcaattgtaacctgaattcataagcttaagtcaccaaaagacatcactgggtcataattatata

SEQ ID NO: 210225 - DNA, 731 bp, Homo Sapiens
  misc_feature (569)..(569): n is a, c, g, or t
  misc_feature (628)..(628): n is a, c, g, or t
ttttttttttttttttttaaggagggatgtctgtttatttacagtgcacccttttgtgccaggcccttatgttcatgaccttacccaactctacaatcttgcaaggcggtttacatcatctccactttacagttcaagaaacaaaggctcagattcatagcccctgaatagtacctcatagtccctgagttcataagtagtggttatagtacaatctaagctatttaattccaaagccagtgatttttctggccttgagctataggtccaaaggctccaacagggccctccagactcaatggcagggtggtgtctgcacaagctggaagtgtccttgtgatgagcccatcaggagcggcccggattgagcatccccctccacatctgcagcacagagtcccggcgggtggtgtagggtaaatgtttgattcggaacaagtgtctggggacgatgttcccgctgggtgtatacagcttctccccctctttgcccaagagactgcgcagggccaggttgcccgacagaagcttctcatagaactccactccaccacaggcataggctgcanagagggaggccgtgcggcggtccagccaggactccacggcatgagtgagagaatcctgngagaaggcgtaggccacaaagcctgccactgctgccaccaagctgaaggcagcccgtaaattcatggggcctgcatggagcccaaggtgtacttggcaccacg

SEQ ID NO: 210226 - DNA, 518 bp, Homo Sapiens
ttttttttttttttttttggggctaaagtattttattaaattaagtatgtaatttgcaaatggcttcataagaaaatttaaaagcaaatttataaaacattttcaatttaaaaagtacagagttaacagcaaaattacattttctatacagtacaaataaaaacatttttctgatatactgtctgaaaattttataatatattctccaactgatagctgcaatattgtattttaatgagaagcctcacagttaactcaatcatttattaataataagttcatcattggaccataaaagtcaattgctcaactttaaggaaaataatgaactttgtcatcatataatatgaagttataaacggctcttcaggatgtagatgtgttctagccttgtttctctattaaattctgtaaagaagcattaagtaatactgtaaacttgaattacattttaaaaataagcaccatgaacatacattctacataaacttattttaccttttaaatgacaccttttg

SEQ ID NO: 210227 - DNA, 618 bp, Homo Sapiens
ttttttttttttttttttggaggaaataatgaaattcatttcagttcaacaacaaacttactgagaacagatgaatgaaaccttgcctgtcctataaggaatacagtcatctgccagaagaaaaatggtgattcttcccagtccaaaggtgaagatggtgactgtgaaagtatcagctttagccagaccactgatgaagctcccagatgtcacagcatccatgggcttgtgatctcaggtgaaggcgttgaaccctgagccctggattcccatctcttcacttgctccctccaccaccccacccccatattcagaatggcctctaggcttctaggtttgtgtctttaatggcacctaggcaataaataaaaaatacagtgcagtgctgactgcatcttccctacagctctttgaagtgaatcgatgtctctgggaagaggaacagagtagtgtgagtgtgaaggactggattcttgttgctttctcctgatgcccattccagggtttccccaggcaactaggaagaccatccatggtgaggcctgcaatctaggcttcttgctgatcagtcaggtgagtcacttctttaggagggataccagtgtacgccagtgccca

SEQ ID NO: 210228 - DNA, 708 bp, Homo Sapiens
  misc_feature (688)..(688): n is a, c, g, or t
ttttttttttttttttttcatatttgacttttgcttttattttataagaatataacatgctgaaacaggaaaatggggattgcaaacatcattcatatctaggaaaccagctccatttgtcacaataaataaatatttaaacagtgaggagttcctgacaggctccaagaggttcccagcacattcagaggtagagtctggtagagaaagggagacagtcaggctgaaacccctgctgagattctccagtagaggcaaactgaaattacaataataaataacaacagcaccaacaataacaaaaacaatgttatgacaatcacagaaaaccaatgataatacacttaaataatctcctggaggagctcatggtacagagagaacagtgttgattatcctgggccacaaaggggctgccctgggtagttcacttccccagcctgggctctgccgcaggagttcccatcaggaaatgtttgttcagtgatgccctgaggtgacaggcaggttctgattatccccagtcctgcccttcgaagcagcctctccccccagcttctgcactctaagggtgccatggtcctgggccacctctgcccactccagtgttcatctcacgtctgcaggaaagaaaacaaggctcccttctatctcggggcatctctttttgcctgttctcataccacanaaaacactggctggatttca

SEQ ID NO: 210229 - DNA, 659 bp, Homo Sapiens
ttttttttttttttttttggttaaaggcaatctaacagattggaaccctgataagatcatgcctgtgcagccctgcacaggcacgaggagactgtgatcaagtctgttactcgttacagtactgtgaacgtcaacaagaagaattgctgcatggaaaacactgaatataggcagaacaatctctcgcttacgatactgtgtgttgcaaataatgcctagaccagagcaatgcaggcgctatgattcatcacaggcaagatcaacaaaggaattgttaggacaaagaagaggctgcatgcagacctcccctgtcaaaacacctcgcagctcattggcttcatacagcctgccaaatgcaagggaagcagagagagggatggtgggtaggaagagaaaacttttttgcctgacaagcaacagccctcttccccacaaagcaggacagttccttataactaagagtaagttcacttaaacatgattaaaaaggaagaaagaaatattaaaaaggagagaggaggcggagtttttcaaaatcgacctaaagattaactttcaggtcagcacgagtgaagcgtggtttcctgagcttgaagggctctgaattcaggaaaggatgagtactttttccagagaacactggagcctgtggagttcca

SEQ ID NO: 210230 - DNA, 636 bp, Homo Sapiens
ttttttttttttttttttgaggaagcatttctttaattttatcggaatccaggacacaacaagaaaaacacccaaaaaccacatggagacagaagacgagacacaactcctcccccactgcctccctgctctagagtggggacaaagtgggggtgagacagctggggggagacctgaacctcagtccagccctacaggctccaggcctgcagggaaggagggtaacggggaggcagggcccagccccccagtgtggggaaacagctgagggaaggccccctcaaaaggctccacctcctcaccagcactcctgcccagggacagggagcccacagcagcaaggggaccccggggccatggccacattcatgactgagaagcagctgagtggaggcaggagacacgattatctgggcagaatcagttggggcaggggcctgggagggccccatgggccaaaccctgaggtcacaggagggggcccaaagcggggctagtgagtgaggtcctgagtgagtgggtcagcggctgggcccctttctccagctgcctgtagcccctccaatactgctgccaggggggcccgcctccagggaaatggataagaaagcacctgcccctgctgcagacagagca

SEQ ID NO: 210231 - DNA, 587 bp, Homo Sapiens
ttttttttttttttttttgatattataaaactgcatatatttaatgtatacaatttgatgagtttagacatagtcacatacctgtcaaaccatcaccacaatcaaggtaataaatatatccatcacctccaaaagcttccttgtgtatatgtatatggtaagaacacttaacatgagaggtaccctcttaacaaaatgttaagtgcataatacagtattgttcattatacgaactctgctatacagctgatctttagagctaattcatcttgcatactataattttataccaattagacaactccctatttcctcatttctcccttcctccttttccctaggaaccactgttctattctctgcttctatgagtttgactattttagaacctcatataaatgaaatcaggcagtatttgtctttctgttacttgctcattttacatagcataatggcctccgggtttattcatgttgtcataaataacaggattccccctttttttaggctgaataatatcccattgtacgtatatgcacattttctttgtccatttatttttcaatggaaatttgggttgtttccat

SEQ ID NO: 210232 - DNA, 678 bp, Homo Sapiens
  misc_feature (345)..(345): n is a, c, g, or t
  misc_feature (657)..(657): n is a, c, g, or t
ttttttttttttttttttaattacctggtaacctttattcgggaagtgaaagtaactgtgaaacagtgcttcataaggcgtggcatacaaggccttggtttccaacgccggcgaggatgaggcccagtcccacactccctcgcaggcacccttgctaagatgtcctcctgggtgaccaaaacggtggtaacatagccaaggttacttttacttgggtaggatgactgcagaaggaatggctacacagagcttccagacctttccatgcgttgtgctctccagaggatgcgccaggtgtatcagatttgcatgcacaaagacaggtgtgcgccccacccaccctgnggctgggcagcaagaggtctgctcacctactgcaccagacttcctagcctccttccacactccgaatcttcaagcaggatgaaaagagaccacagaaactgaagcaagactaggatgctgcaaagaaagatgctctgatacacaaaagccaaaacataagacaaggagggaagagtaaaatgagggagacagacaggaagttaaactatgcagttacactgccgatttagaaagatgttaagacacacactagatacaaatgaaacccatcctgctcccttcctccagaagacgttgtaatgcagaaagcanaatactaatccttcttgtagt

SEQ ID NO: 210233 - DNA, 626 bp, Homo Sapiens
  misc_feature (571)..(571): n is a, c, g, or t
ttttttttggtattttttaattttttatttttttgagacgaagttttgctcttgttgctcagactggagtgcaatggcgtgatctcagctcactgcaatctctgcctcctgggtacaagcaatgctcctgcctcggcctcccgagtagctgggattacaggtgtgtgccaccatgccctgctaaatttttgtatttttagtagagacaggatttcaccaggttgcccaggctggtctcgaactcctgatctcaggtgatccacctgcctcggcctcccaaattgctgggattacaggcataagccacagcacctggcctgttgttgttttagagatggtctcaatctgtctcccaggctggagtgcggtggtgcgatcataccccactgcagcctcaaactcctgggatcaaagaatagtcccacctcagcctcctaattgagactataggcatgtgccaccacacccaggtaattttggggtgtactttttgtagagatggggtcttgctatgctgcctaggctggtcttgaattcctggcctcaagcaatcctcccacctcagcctctntatgtgttgggattacttgtgtgagcctctgcacccagccagtgtttcagagctt

SEQ ID NO: 210234 - DNA, 706 bp, Homo Sapiens
ttttttttttttttttctgtttcatccaattttattctttttcataaaagcaatgcagtaaagataaaactaaatgtggaccctgggaacaaggagtccagaggttgcccaaagagtcgcaaagtgcatcaggaaacctgaatgtgaagatcggtgaccgagagcctgatgccagcctcctcttgggtcttgactgaaatcttcccaggttgctattggattttgcatgtacgagcctccatcagaggatagacttaggcatatggtttgcccagtgaattgaagaatctccagagtttatgaattgaagagtgggatgaatacgatacacagagcaccgaagcaaacacatcagaatcgacgcaactccctgtttcgttcaccatgaagaaacatctgtgaaatcaaagtcatccccggtggaatcaggctgcttggggtttggatttggctttggtttgggtgggttcagtggtgctggctcgtagtttcctttgtcatgtaaggcatctgctaagtcaaagtcatccccaatgaatccaggctgctcagggttcgcatttggcttcagcttgggtgaattaagaggtgctgggtcgttatttcctccatcacgaaaggcatctgctaagtcaaagtcagcccctacaaataggaaacaggctgttaacaccaaagttctgagaaaatgaggaaggaatgagct

SEQ ID NO: 210235 - DNA, 695 bp, Homo Sapiens
ttttttttttttttttttaaagtattctgggcctgtataagttgttcctgcattgaattgagttccaatttcaactgatgagaagcctccttctctttttcaagtgactttttcagttccttctgttccttaagtgtgttttccatctgcacttgaagttgatgctttaattctttgcaagttttttccaagtctaatatagcggcttttcctttctgattctccttttcaaattcacttttagagtttttcaaagaatcagaaacttttgatagtttgtcctttactgtagaaagctctgtcattaaagcttctttctccattttcactttttgtagttctgttactgttgtttgaattctgttattcaattcctcatgctgaatctttgtttcttgacttaaagtttcaaaatcttgtttcaggatttgtttttcttcctcttgcttggtaagcttttgcttgatactttcaagggcttcagattttttctgtagatccaatcttgtactggatactatttccttttccatttcaagttgtttactcaattctgtggctctgagctctaaatctgtgttcagctgtctttgctgttgtagatcttgcaaagcctgctccttgcttgctttaacttcaagactatcagcttctagtttcttaatttgaccttctagctcttcggttttctgttc

SEQ ID NO: 210236 - DNA, 693 bp, Homo Sapiens
  misc_feature (673)..(673): n is a, c, g, or t
ttttttttttttttttttgctttgaaatttagaaacaaattttatttaagatctgaaatacaattcctaaaatatcaacttttccagaaaaccgtggctacacaataatgcattgcctctatcatgttagaacgtgcattagactcaaatacaaaaaccatgaaacaaatcaccatccttcaacaatttgagcaaagatagaatgcctaagaacaacatagatggacttgcagaggatgggctgttttacttcaagcaccataaaaaaaaaaagagcacaaatgcatgggttttcaggtatatacattaagttgaacctttggcactaggaatcagggcgttttgtcacatagcattaacacatattagaaaattgtgtagtgtcaaagggataggaaccaccagcattcaagcaatgttgtcaactaggcaataaaatgttctactgaatgtttcttctttgttctaattactgcatacactggtagcaactttgaaatgagaaaaggagcttacactccttttattttctgtttaaaacagaacgggaaacaaactgaaacataagccctgttatacattaacgattttaaagaacatcaattttacaagaaaaagactaagaacaaaaagtgtttacagatacaggacaaaaatggtgagctgtctgtanacgctcacagggctttgcgg

SEQ ID NO: 210237 - DNA, 653 bp, Homo Sapiens
  misc_feature (30)..(30): n is a, c, g, or t
ttttttttttttttttttgcaattcatttngggaatttatttttttctaaagcggaacaaaacctaattatgaataagaaacatttaaatggcaactcttaacctatagtgcaaacaccagattccacaaaactgaattcctttgtcagtaatccaatatttagtagtagctgctgcttttgtggttgttggttagttaaaattaagtaatgattccagtttagaagataaagtttcagtgtgaattttagtagaagtcataaaaatacctgagacatactagaaaataagattttccctcctatttaaaaaaaactctgcagacttttatttgaagcccatcttttgaaaatcactaacatttcataatcatttcctagtgttttgtttcactttctcgatgaataatatttccccatttaagtttctcaaggcattgattgctggaaaatttcccacgtgccctctaaacgtcccccgtggacatgagtaaattaaacttcgtgcatgtcagctacacgttcatcgtctcctttctcagctgaggccatgagtggacccatcagtggctccaaagtcgtagaagtactaacatgttaagaaaaataatttttaagggtcaaacacattacacagaagcaatatcagggaag

SEQ ID NO: 210238 - DNA, 649 bp, Homo Sapiens
ttttttttttttttttttaaatatgaaattttactcgacaacagaaaaggagaaacaggaaaaaaggtgcctcgagcaaagtcaatgacttggtggtggcagagattgtttcctccaaaacgagaatggtagtaactagggcaaatttcacaggcctaccaccaatctcaccagtccaggaattatataggaatggtcacattcctaatgatggtgaagcagaaagccctccccacagagagacagcccactggggacccagctcaagctcttcaaaacgtggcagctacaggtcacaagactttggcagagatgtccgaaattcttcaaggaaggcgtcacgatcagagggacggatccagctcaaatagctttctaggtacagggggagagaccacagagcatcttcatgtgaccccttagtttgggcctccagcctccaccagagtgcagtggcctcatccctccgatctagcctcttcagagtctgaagcaggtgaaagtaagtgtctcgattacctgggcacatctgcacactgaggaggaagtcctgtaaggctttggtatcctggccgctggctacccattccagtccacgactaattagggcggctgcccgaagctgctgcagtgccgcatctcctcgtgc

SEQ ID NO: 210239 - DNA, 566 bp, Homo Sapiens; identical to SEQ ID NO: 49985

SEQ ID NO: 210240 - DNA, 657 bp, Homo Sapiens
  misc_feature (638)..(638): n is a, c, g, or t
ttttttttttttttttctgttattaaaaaaaatcttttattaaaatgctcctggaagggagcaggtggtattgcatagtttgttcagatggcagtggtacacacacacatacacacacaagtggcctggagcaaaagtgcaaaatccgtagctggcctgtgggtcgggaagcctgtaggactgcaagcatgtggtcttgagtagttcacagcccccctctgacctcagctcctccatttacagaatgagtccgaagactgggtcagagatgctgtttgcaatccaacagtagtcctgagactgctgagaggggaaggagcaggcttccaggcccagaatccccttcccaatccttccacccaccaggaccctctcttttccctgcttgtctgctaagagtctgtgcaagacttccctgggacctggcgtgtggtaaacaaaatcagacaactaccacactgcctgccttggacagccttttcttgctaacagtgggatctcaaaggtgtgtcctgatcccatgtctgagccatggtgtcttggtataagctgcggtgacaccaccaaataacataagcaaaattttgctttattaacccacaatgctttaggttctaaagtgggctttgaacactcanactcattgctgagggtcct

SEQ ID NO: 210241 - DNA, 607 bp, Homo Sapiens
ttttttttttttttttttagaaacaaaatatatttattagaaatattacagtcatttatcatacactttcctatgaatagttaaatacatctaattagcatgtcatatccaaaagtgctgggtacaatctagtgtgctctttatagacacgaggccacagatgtatcaactacactcaactaatgtagttaaagttagtgtgctaaaaaaaaaaattagtgtgctattcaggatgctacagatttagcaaaattctaacctggatcagaggagtgaaatgccccgtgaattgaggcaactgtagatattcgaaatgcttctaaaaaggctgtgaggttatgtcctttactgcatgtcattggtaggtcatctcaaaatggcactcgagctttggaagggtgagaactattgctagatttggtagggggtctgcatctatgggcccgagtcctccatctccacaagctgcccctcagtggggaagaggagggggaggctaagggagtctccgtaacgtttgtgggcagcagggaagagaacatggcagagattcctcaccgctggatggcttgtcccctggggatgtgtgtttttatctaacacccac

SEQ ID NO: 210242 - DNA, 460 bp, Homo Sapiens
tttttttttttttttttcattcaacaaatatttattgaacaactactctgtgtcaagtcctgtaccaggcactgaggatacaagaataaataaaacagtctctgccctcaaggagcttacagtctagcataagaacttaaaacacctcagaacctactgagaaaagtttctgggtatctagtatattgtctggaatactccaaatttcctaaaaatgtgaatctaaaatttatcaggaaacacagttgggcaattgaagatgcagtgaaatttaaaagaaaattcaaatattcaccctttatgtaaaaaccatgaaatctaaatgagggagaaacttaagaaagctgaaaatctacctattttaaagactttggaccagatttaaactttaaaaattattttattatctctgggtgacattttcatttatagtggcatttatatatacacatacatatag

SEQ ID NO: 210243 - DNA, 532 bp, Homo Sapiens
tttttttttttttttttaaagaaaaagatatttgcatttctttacttagacttattttttcattgatacttcatcctccctccatcaaatcctgctcctttactggtttggtgtctatctttggacaagtaatttggccttccagatttgccttcctcatctgaaaagtgatggtaaatttatgggttgtcacctggtttcttggggttccaagaatatagtactgcagttccaggagtcatttttattagagtaaaagccctagaatatattttgcaataatgttagttagtttaacgcaattggctccagccctctaccaagcctcagctttcaagtaactcatagtcctgtgttctggaagtagggggatgagaggattcagaagttactgcacatggtatctggcatgcagtagaacgtctgcgggagatggagaaaggttggcaaccacaggactgagtgagtttctaggatctgctgcatctcaaaaattatgtaattgtttatgtttcatagtccttactgacaa

SEQ ID NO: 210244 - DNA, 516 bp, Homo Sapiens
ttcttttttttagtttttaatagagacaggattttgtcatgtttcccaggctggacttgaactcctgggcttccccaagtgctgggcctcccaaattgctgggattactgttgtgagccactgcgcctgtcccctcttggcaactgctgtcatgactggttgctgttggtgccataacttatcgcagagctctccataaactgaacttacataaatgtattaaaacatacattttctatttcttataaataggaaatcaggattgatgcaataattgccagtaataatattttaaaaatcaaaaaatgtttttgcatgctagccaatgacttttgactgcctactcatggtggcccaagacctgatctttgttaaaaagggaggttggcaggtacttaatagtgttggagagaagctagccccaaatggtggcattctcctagacacagggaagggagtagaaaaaggggacaccatcccatagcacaactcactgccactgtgtgccaggtctga

SEQ ID NO: 210245 - DNA, 597 bp, Homo Sapiens
ttttttttttttttttctctcttaaaccagtcaatgttgtctttgtgtaataagaaatatcaggtaagtcttaggatgtggacatcatgtttggggcaatgtctccctcaccgcctctctcatcctttataccataaaagagtgatggcaatatgctagctgaaattcacccttcgatggtttcattttcttgtctacaaaggcagggtgagcgactgctgccctgtgatttctggcactcccagtggaaaggaagcagaggggccaagttatggcagagtgcgcccagttaggccttcgactacaaaagtatcatggtttcccttcctccccagttaccattctttccctggttcccatccccttccacatccagcagtgtgggctaaccttcctttcctcatcctgggaaaacacatcttgctccagtgcaaagttagattggacaaacagccggtgtggagggggctgtgggaggtacggcttgccaggacaacttggctgaatgggttcctgaaacaaggcatctccaaatgctccctgcccctcaaacagcagaggagtgtgataatcatgctgtcaacatttttagagcat

SEQ ID NO: 210246 - DNA, 529 bp, Homo Sapiens
ttttttttttttttttgtattttttgtagaggtagggtctcactttgttgcccaggctggtctagaactcctggcttaagcagtcctcccacctaggcctctcaaagtgctgagattacgggcatgagccacatgcctggcccgtattattttttagtaaaatcactttccaaaatactgcaatatgaggaaacctttattccaaaaagtctactcataataacttataaacatctttggaagttaaaaattaaccacatcaacctgcttagcccacataacccacattaacccacatcaacctgcttagcccacataatccacattaacccatattgtggtttatgttttaaaaggagaaaaaacactgaaactaccatatgtcttaccttttaggcatacatgttaaaattttggcagatgaaacataatactgatagatgacgcttcaaaataatgcagggaagagtacaagtgggtagagattgttaaatcaagtttagtctaaagcagtctccttacatatttg

SEQ ID NO: 210247 - DNA, 524 bp, Homo Sapiens
ttttttttttttttttttagagacagggtctcgctattttgcccagcctggtcttgaattcctgatctccaggatatattgaggaaaaaagcaaagtaaagaacagtgtatagtgtgcttcttcttaaagggggatggggaggtagagaaagaatatatgtacgagtatttttatctagcgtatctttgctaaaatatacaaggaattgttaccagtggattgcctctggggaagagaacttgaaggcaaaggccaggcgtgaagagatttcctttccaaataagccatcttgtacagtttaaatattacactgtgtatatatcaccttccctccccacaaagaaattaaccttttagaaagagtaaatatgtaaataaaggggccattatataatgaaaatatgctcacaggaaggttgttgacccatgccaggagaaagaaaacactgggaatgagattctagaagtgtttatctaacagtgacagatattggagtaattttaaaaaatataattaggcatt

SEQ ID NO: 210248 - DNA, 530 bp, Homo Sapiens; identical to SEQ ID NO: 57879

SEQ ID NO: 210249 - DNA, 386 bp, Homo Sapiens; identical to SEQ ID NO: 53782

SEQ ID NO: 210250 - DNA, 492 bp, Homo Sapiens
  misc_feature (468)..(468): n is a, c, g, or t
ttttttttttttttttttacaaatgacagaatatttattaacaatacctttaaaaaagattacatatgctagatcactggtaaatatcatttacactggggttgggaactccctgggtgtcattttttttcgttcattttattattttgctgatttttttttttgcatgtgattttaaattttatttcaacatagaagtaaccatatcaaactaagaaaggaacacagcttgaaatactgacaatatttttttccggttaccaccctagtttttacacaaatggaatcccgattatgactttattggataaatataactagaaggttgaaaagttatattatttgtaagcaaaaatgacaaactatagcaaatttgagttctctgagaaagaagaaaaggtggcagcatgtttacatgagaaaatgtttatagaaaattccattgccttttatgtcactgtccagtanggtttactacaaaacctttctcat

SEQ ID NO: 210251 - DNA, 495 bp, Homo Sapiens
ttttttttttttttttgtatcttaattctatttaatgacaatttctgttgccatgatgaaaaatcagtagacccagaaatgataatcataccaatttttggtaggcaattgagaatacattcaagatgaatcgacatttaatataattaattaacatagtgctacaatatatttaattgtgcctcagaaatgatttaccaaagtttgattcctgtgtgctatttgaaatgacttgtagattttgttgtatcccctgatcttagaatcagaaataatttgtgggtttcttcaacaataggtatcgcttgcattcaacagttttgcctcttcttcagaattattaatatttagatggaaatttgctcacagtcttttgtaacagtgcttgacatagaggaagggagagatgattgtgtccagtctgctcaagatcctggaagctcccccagtgagagacacctcactgtaaaaggaactctgagctacacacacctg

SEQ ID NO: 210252 - DNA, 602 bp, Homo Sapiens
ttttttttttttttttctcttgtctcccctaatgttaatgattctatattgttacatccacaactcttaaaccagaaaccaaataactaaagggcttgttttaattttaacaatatagatgaaaacttatcgaagacactctttatttttattagcattccatcaaactacataagcactagcaatcatctaccttcacataaaaaaggtaaaaatataaaagctataatttatattcttgctttatcattcagaagagagattggaaaactgtatctactgatttccagaagtgaaagaggatcctcaggaacggtaaagcaggcaaaagatgcaaaccttgaacaatcctacatcgaagatactgattcccataaaccacatgtgaaataaatcaaagtatttctgagtctaggtaataaacacattattggaaatgaggaggggatggttactagtttaaaatatactatttgaattactgatttttctggttaaaaagctgagtttagattatgttcctgataaaattgctgccaaataaacactgcacacacacgtccacatacttttcacatagtaatccactaaagaatccacac

SEQ ID NO: 210253 - DNA, 561 bp, Homo Sapiens
ttttttttttttttttttgaaacaaatccccattttattgatgactgataacttcaaatgtgacaagaggattcatttccttattcaatcattccacaaatattcactgagcatctcctacgtgccaggcaccaggctggactttaggatcaatcataataattttcaggttatggataatgccaatgggcacttaggatgatcagggagggcagttctgagaaggggcatatgagctgtgttccagttgtctattgctgtgtgacaaactgccccaaaacttaatggcttaaaacaatgacagaaattacattactcatgaatctgcagtttaggcaggtggggacagcatgtctctgctccacctaacatcagctgaaggtgggaactggaatcatctggaggcttcctcacttacatgtctagtggttgatgctgactgatgttggctgttggcaaggacctctgacaggtctgttccccgaaacacctgcatgtggtacatggctttgtcacagcatgatggctgggttccaagggtgagcctcacaagacagagaa

SEQ ID NO: 210254 - DNA, 614 bp, Homo Sapiens
ttttttttttttttttttaaacattattttcttattcacatgcaatgctaaagggaaaaaaataaaacagaaggaagtcaaaatgaatagtaaatagggagcctaagaaaaagtggaaatggagaagaaaactgggcattagcaagtggaccaagaggaggagaggtgaagagatgctcggtggtattatttggacatcaatggatcttataatattttatagtaagaaaaaaaaaggtatgggaaaggctgtgtgtttatctggaattctggtgacaccacagcacaaactcaacatgagttaagatgtcaaaagatttcctacccagttaccttggatctgtcttacttgacatctaggtatacctcattttagctaaaagctgtggtttaacaagattcaatgtttcaggcaaagggttggactgataagaatgaaaccatggctatatacagaaaaggttcagtttataaacaagtaactggtaccagaaaactggagaaaagcaccaaagcgtttcccaagctgatagatattaattgcataactcccttttttcttatataactaagtataaaagacaacatttccataataactataaaaatgaaag

SEQ ID NO: 210255 - DNA, 533 bp, Homo Sapiens
ttttttttttttttttttaacctggagggtggtgatggtagtagtggcttagttaagcctgaacacccattccctcctgttagtctgtcaacactgagggcacagcaaccacttgggcctaggtgaagcacgtggctcttgccatttatggcctggcttttgggcaattgccctatagtatttatggaggaaaaacagaatcatctttgagaaatttttcctgactaaaaaactcaggccaggtgcagctgactggggaccagaataacagtgcacattttgttgggaaatattttgattgtgaaactatatcggtccagtgtatgcccccagataagcgctgtgtattggttgcagtctttcagcatggaccctgtgaagtaggtgcctacagatatcccttgacctcaccatgtgatggtctttcacttctatcatcctgagttcatagttcttgggctatactgctgagcctcagaactgctggtacacttttagttctttagctatttgagaaactacctcgtgccgaa

SEQ ID NO: 210256 - DNA, 485 bp, Homo Sapiens
ttttttttttttttttttgattagcaaggttttaatggaaagcataaaacactggaaatatggacagaaatcagattattacccttttatttttttccctgcccctttcacaatgagactggagggaattcaagaaccacttgaaataaaggcgaaatgattagatttttttctcctaattgcctaacgctgatgtcatggtgtacgcaaaatcaacattgatctctaagtgaaagaggagaaacagaacaacatcaacagcctttcgaggtaaactgtgggccagaatctatttaggcaacccgcagggaccaaaatctctgaaaagcccaacagtggagccagtttctgatgctcctctgctggtgatctgatctttgagtggggaaatctgttagaaacagcctcctcgagggagccctccccctggcactgcccctgggttcccaatcacatccacggagacgtgctggtttcatcacgct

SEQ ID NO: 210257 - DNA, 330 bp, Homo Sapiens
ttttttttttttttttttgagacggagtctcgctctgtggcccaggctggagtgtggtggctccctctcggcttactgcaacctccacctctcggcttcaagcaattctcctacctcagcctcctgagtagctgggattacaggcgtgcaccaccatgccctgctaatttttgtatttttagtagaggtggggtttcaccatgttggccaggctggtctcaaactcttgacctcaggtgattcacctgccatggcctcccaaagtgctgggattataggtgtgagccaccatgcccagaccatatatatatatatatatattttaagaag

SEQ ID NO: 210258 - DNA, 478 bp, Homo Sapiens
  misc_feature (23)..(23): n is a, c, g, or t
ttttttttttttttttttaaagnttaatttaaaaatgctttattgctaaaaaaatgctaaaatcatctgagccttcattgagttgggatctttttgctggtgtacagtctcgtctcaatgttgatgactactgatcagtatggtggttgctgaaggttgaactggctgttgcaatttcttaagcatccttaaatacattatccaagagtattaactgccgagtccgaccttcttgcaccataggcagaaccccttcctctctccacactgagtggcagcgtcctcgcagtggagaacagatgaccagcaaagctgtctgttttcggctgagggaagagactcctccctgaaaccatggtacaggtgttttctgtggctctcagcttcattgcagcttgaagatagacggcagtgtctgtttgaactgagacacatgagacccgggacaggagtatgatagggaaacgttcctgcctat

SEQ ID NO: 210259 - DNA, 583 bp, Homo Sapiens
ttttttttttttttttttgattgtaaactttggtttatttttatttgagttctcattgtacagcaagcatgaaaaaaaagagagtggagtccgtgaggagatgaactgtcagtctgtctttaatctggcatgatgagacacctggtcagtcaggcctgctttgatagagtttgttacagactgccttatgttttcctccatcaaattatcacccaggggcttcaatacctgtggtatgagaaatgtgcaaaacaaacaaaaacatgaggtaaaaaaagagttacatataaaaatagatataaaaattcaattcaaagcaatgatgaaaataaccaggaatatgggaaataaaaagatgcttctctcaaaaaaacttatgatgctactagacattttataatgcaacaaaaattactttcctcttattcaaaccatttacaattcctatgagatggatgtgcaattccataccctatatgcagcatcaaatctggtatgtatacagcatttatgcagaccggcccagacggtcctgcttattgtcctacatgtgtaagtgtgaacacttcagatagagaaaaag

SEQ ID NO: 210260 - DNA, 505 bp, Homo Sapiens
ttttttttttttttttttgagaaggcagtgggcccaggagacggcgctcagcatacggaggacccgcaccggccccggtctctgagttccctcagtatttattcattaccattttcactatctttgcatgaggaatgcggcagcagagcagaggtcagcaagaaaatgtgagcaaaggcatctgtgtcacaaatagcttgaagggaaggtgctgtgcccggatgtgcacgtaggccagattcatgcttctctccacccaaacatctcagtgtagcagagtaacagagcagcattgccgccagcatatctcgcctccagccacagggcggttttctcctgtctcagaatagaactaatgtacgatcgggttttacacggagacattccgttcccaggggcatgtcggagacagaagccttcctcttatctcaactgcaaagaggcctccctctttcactaatcctcctcagcacagaccctttatgggtgtcgggctgggggacga

SEQ ID NO: 210261 - DNA, 397 bp, Homo Sapiens
ttttttttttttttttttgcgagacatgtatttttatttttataaaattgaactggactcctaccaaaagcccccaatgcagagtggcagaaactttatcggagtccattttggatcatcatttcccttgggcttgtaccagggcctggaaccttctgtgaggcccacccagtagacacttccacaccacagagagactgagcatgagaaggtccgtgcttgaaaaaggcctaacagtgggatctcggtgcaaggatgggagagtggaaaccgagtggtgaagagatgactgtggcacttagcagggaattcctgggagggtgaggcttcgggaagtttccagggagacaaaccctgttaagaatgggtctagggccggacgtggaagctcatgcct

SEQ ID NO: 210262 - DNA, 674 bp, Homo Sapiens
ttttttttttttttttttcaaattcagagcatttttattaaaagaacaaaatattaaggcacaaaatacatcaatttttcaaatgaaaacccttcaaacggttatgtcctacattcaacgaaacttcttccaaattacggaataatttaactttttaaaatagaaaaatacaagttcttaaatgcctaaaatttctcccaaaataaatgttttcttagttttaatgaagtctcttcatgcagtactgagctccaatattataatgtacacttccttaaaaatctagttttgccacttatatacattcaatatgtttaaccagtatattaaccagtatattaaccaatatgttaaacttcttttaagtataaggcttggtattttgtattgcttattgcatgctttgatcatacaaagacacaagtaccagaactagtgattataaatctagcatagcatctgtcaactttagtcatgtacagcctagtgcaacagactcgaacttttttttaaaaaaaggatacataactcaaaatgtatatgtacattttttatactttcagcttgacagtatagtaatgtaaacattgtactgtaatacaaggggaaaaggtggtattttctacaggatgtgtaagttaaaatattattttctttacaagaaaaatatggga

SEQ ID NO: 210263 - DNA, 695 bp, Homo Sapiens
ttttttttttttttttttaagagaaataatagtaacgataatagctagtatctacttgagtgcacactctgtcaggaatcatgctaagtaggtctcattcaatcctcaccacagtctacggggttgggtatatggagagaaggggattctgattaagcccccgtgactctacaaaggggtctcctgcaatgggcacctgaaaaagcctcgactagtaaaggaagaagctgtttaaagacgaaacaaggaacccaaatttctcaggcagtgtgagcctacacacggaaagaagtctcaggcctgaagcacaggcacctttctattctcctgacagcccacccgagggacatcaagagccacagatgtcatgataggtgtgtgagtgctatagaaggaatgtttgtgtccctccaaaattcatgttaaagacctaacctccaaagtaatgttatttggaggtggggcctttgggagacgattaggtcataagggcagatccctcgtgaatatgagtagtggccttataaaacaggcctaagggagttcatttgcccctttcaccatgtgacagctcgatgagaagacagaggtctatgaaccaggaagtgggccctcaccactgaacctgctggcaccttgatcttggacttctagcctcctatagaggctgtcagcaatgaatgtctgttgtttat

SEQ ID NO: 210264 - DNA, 626 bp, Homo Sapiens
ttttttttttttttttttagactatcaaatgtcctttaatttcacagacaacaatatgatgcatactgtgtaagagcacacaatagttttgcagtacaattttaaactgtatacaaattggaatatagatgttaaacgctggtgtactgacagtatttttgaattttagataaactgcatacaaaatttacaatgcaaatattagccaatctgaaaacgtcccataatataaaaatgatactttgagatgcaaattttactaaactatataaacatttaaaataatcattaaaaactcaacattagaatttataaagatcagctataaaaatatattggcagtcacttttcttataaaggtaccactcactacattacaaaatagtctctaacataaaattgccttaataactatactattatagaatctgataaaccttacattattaaattgattataaaatcttcttggaaaaactttggtatgtatcttcagaaggttttttaaaaataatattttaagggcctgtaaacattccattctattaaagcacagcagaataagtaatggatattcaactgcatacagaatatagaatcaaaaaaaaaaaaaaaaaacctcgtgc

SEQ ID NO: 210265 - DNA, 575 bp, Homo Sapiens
ttttttttttttttttttgaagaaacacacaaattttatttagaaaatgaatgaccatgtttgcaataaactcccaaaatatccgccataagatggccataatattctgatgatcaaggagcacacatatacaaaagttattggattactgcaattctcagaggcacaaaacctgacatggtgtgatatagtatataatcagtcacgggggggggaaaagaacattaagtctttaaaaaggcttaggaagacataaacagtaaatctttgtttttctaccttcctttggacagtgttatatttcactttcttctttgcaaaatgtttccaaattcatttgctcaggatttatttaagataataacttaaaacaactaacagttgtttatgctatatgcatatcatgcatgttctactggttcaaggacaaaattaaaacaagatcttctctgtaaagcaaatatatttattatgcactttcatatacacagggattttttgagtaatatcatacaagggataaaataaaacttttacaatgtgaaattcaatgttcatttttggctatttacata

SEQ ID NO: 210266 - DNA, 714 bp, Homo Sapiens
tttttttttttttttttcaaataatccatctaacagccatgagaccactcaagtatttgaggtcatcagctgcgtccatcaagacatgatattgaacatggacaccatctggtctgttggtctgtttttgttggcaaaggactccaaaaggatgcagttgtatgtgtttcagctgaaccacataccatagctcctctcccctcacaaaagggtttctctggggggagaaaagtaactgattatacctctcatgtctcaaactgaaattctgagaagcaaatggtcagttgagggccccattccagatctgccgggacgtcctcagatgtccagagctggcaaaaggtggagcaggcagcagccttgggcaccagcctgtctctttctgttctgataaggccacacacatggctttttgtgataagcttccagcccatgccactgaaataacgtttaagaacctgctgcatttcacagaaatagcgtaatggaaatcattatgtaattaaacaaagcatgaagctcattatctttttctttttaacaaaaccttcaatttcacattttagtgtacactgtggtttccagagaaatatatggatctcctatattctgagtcagaccaaatttattgcctttattcttaccctagtctatggggtcaataacgttttcctgaatgctgtcaaaatggtgcctgaaaatatctaaatc

SEQ ID NO: 210267 - DNA, 628 bp, Homo Sapiens; identical to SEQ ID NO: 57816

SEQ ID NO: 210268 - DNA, 611 bp, Homo Sapiens
ttttttttttttttttctcagactcaaaatccatgaatcttctatgagaaaatcttatttgggaattcttcacatttttttggagataaattaaaagcagaatgttaactctaccacttcagaattttataaggaggaaaacctccaaaagttctgtacaacataatcatttttgctccagatattatgtatgtgtatacatatttgtatacacacacatataaacacagacacatataaagacgttagaggaagaaagttcctccacctattttgtattccactaacttcagtggaaagtgaccctcaatttagtgtctgtatgtgcatgacagcaatcataggaacaatctagcaacaggcagcactgagaaaattatcattactgcactataatgtcctactcttaaaataagattactaatatttctgagaataaattataataacttcagggataacatttcatatcttcacatatgccagaagtttactctatgatgatgataccgacttctgctccagctttaacaaatattggttttcacacttgggcatttggcattcaaaaaagggatattttgtgcactaaatgtacagccaaaatatgt

SEQ ID NO: 210269 - DNA, 721 bp, Homo Sapiens
  misc_feature (638)..(638): n is a, c, g, or t
ttttttttttttttttttaagattgactaagtaaccacctgcgaagttccacataaattactatgattaacttcctgataaggatgaaattttccaccctctactcagacaatttctcatggccagaaaaaaaatgattatttttgccacatctgaagtcttcagtggactttaaaaagctgctctttttttctttctccctcacccaaggtttagattacaataagttaagagacctagttgcagccatcactggggcatttatgcttcctagcttcacctccctgttttgagatgtttacgcagtctaattcctcctaaaatcatcagagatgtagcattgttaagaagttaacagtgccttcaattaaacataggaatatgtgggtcaaaatttcccacatagcacaagcaatttagggtgtgagtgtacatgtctgtgcatgtgtatgcacgtgtgtgcatgtctcagtaccgcaatcctggctgggaaaacctctgtcctcgctgctctcaacagctcactcttggcaccctcagttataactggaggttcagctggctaccttccccactaggctgtgagcatcctgagggcagggtttatatatggtcctccctcactgagcacataatanaaaaaagctcaataaggtattaaggaatgaatgagtcaatgcattccatcctagacacacagggtgccaccatgatgctactc

SEQ ID NO: 210270 - DNA, 645 bp, Homo Sapiens; identical to SEQ ID NO: 57811

SEQ ID NO: 210271 - DNA, 680 bp, Homo Sapiens
ttttttttttttttatttagaaatttttttaattgaaattttgaaaattttttgactctaaaaaggtattaatgaaacataaaacttaacaatgaaggcagaagaagaacatagtagaaacaattactacaaacattttagcttccaatttcatataatgttatacagtttagaaggagatagtctattcgttaatagaaatagtaagtgtacttttttagcttctgctgtgggagcatggcatacaccagcttgggtggtggggaaagcgggtctgtaatgttccagcctctggttggctccatcggctgcttttgggcaacacccagctttagagatcttttttgttactttctgactttgcttattctttttcttttccaaccaagaacatgctaattctttgaaaattagtttgccaagcagccaatttagtgaatgaccaatttacttaatttttcaagtttcagtttgtgaaaatgtggttgttttatctgtatataaagtttacagttcctatttaatgggaagttttggttgactagcttttatttctttatggcactgttaataagtatttgctgtgttgctctctgagggttagaaagtgggtgttataaacatttaatactgagaaaaatttcatattttatcttccatattttaggatttcctaagag

SEQ ID NO: 210272 - DNA, 650 bp, Homo Sapiens
ttttttttttttttttgtcattttataaatatttatcagttcttttcttatataatacagattaatctcattcttgtgtacaaggtcaacaaaacggtaaaataattagcttagaaatcttaaaacaaagctttttccctacccccaattaacattttatccagtttaattttatagatcacaaagaacaaggtatacaaaaaatagttaccgtcacttaattggttaattctctgacttccatgatggcaattaacaaacatgggatcactatctgcattattctgcatccatttctcatctatttccaacgttcatctgtgtctcagagaaagtcaccaaatacacctcaacctttacaatttcttaaaatgagtatagaaccatgagttagtgccgtgactcatttctaataacttgaatgacaatgattggaatttataaattttaaaaatgaaatatcaattacagttattttttacaaagcagcagactgaaattcaagaaagaaatacactataattaaatttaacaatggtcacattcataaatagttatgaatttaattacatatcaacacagtggtgcctattttatccaagtgcagcctgtccaaaaaaagggggtttaagatacacctcgtgccgaat

SEQ ID NO: 210273 - DNA, 630 bp, Homo Sapiens
tttttttttttttttttcatttaagtcttgattccttccccaattttattgccaaataaactggtctcttgctacaggtatgtaactggttgaactaataaatgtgaatcactggaaggcaatctgatacaagttattcttgattacaatcaatcttttaagtatgcttaagggtcctaacatccagcagccttggagttaatgatctttaatgatttctcccatttatactgtgtttttaacaagcataataaaggaaaatataccagaggtttattaagtatgacaaactgtactttaaatgttgctattgactttaggacttcttgcacaaagtttatagattagcaatactaataccttaaaaatgctttttgaaggataattcttacacgagcaaagtaagcccttacagtctacagaataatgatggacgttatgaacaatactatgataacgtaaattgtccacatgcccttagaaccttatctgatttaaaaacttcccatctatatagaagaataagcttacagaaataatgtttccataccttcggggaaaaggatctaaaataggagagaacatgatgtatttaaggaaaagaaaggcaagccagtgagggcgaagcac

SEQ ID NO: 210274 - DNA, 656 bp, Homo Sapiens
ttttttttttttttttttaagaatctttaatcgttttatttttttggctttttaaaaataaattaagagatgttatattcatatttcttaaagacagaacacaaattttacatttttttctgaatctcaaaatacatgaaataatgagtcagatatcaaaaaagttacaacgcctatttataaggtaataacatatcaaataccattacaaagaacctctaaagggctttcaattttaggggtcacaatactttgttactgaacttggcctcaagtaagtgaatcatctgctaaattgtggtgatttttagttagacagagattacattgtaacaggatttgacctgagtacttaaagcttgcctaaccaaatgcaaaaaaaaacccaactgaataaacagttaatatcacttttactgctatgatcaggatccctgagtatagagatattgttacttaaaagactcaggaatctgctacacaataggaagactgtttcaaaactgtgttatactatgtcataaaaaatcagggatggtacgactaatggcttacttatgtgcaattgttgttaaccgttcatcgtttactgctctccgaacttcagcacggtggcgttctgttgagatgctaagaattttgatagttctccaaga

SEQ ID NO: 210275 - DNA, 673 bp, Homo Sapiens
ttttttttttttttttgtcctccaaattttcctgtagcaaaatgaaattgttgtctcctatcagattatagcaatcctggcattattataaaagatttcccttatctaattggaactaagaagtgatatgttttaatctgagatatttctagactgacataaaaagtaaagttttgaatttggctatatcacttaacccataaacaagcttagtacaccttacttcagattccttatgaataaattctgactttgatagaaaaattaacacaagtttattgtatgttttgtgtgtcagaaattgtgctacatgatagaaaacacacagaaacataagattctcataaggctaaggactatgaaatataaggaaatcaataaaattagccaaaatgcctcatgaaaatgcaaatcatgttttaaatgctaaagagagcttcatattaactgtatagaactttatattccaacacattatgaagtgatcaacagtgaagacagaatattgtcaaacagactcgatttcccttttagtgttttccaagcacgactacataaaagttatagttctccagtaaccaagatgctaatgtttacaaaattcgtttctttgtgtctcattgctgtagaataacttctttcttcagcattattgttggcattctttgatatc

SEQ ID NO: 210276 - DNA, 706 bp, Homo Sapiens
  misc_feature (649)..(649): n is a, c, g, or t
  misc_feature (652)..(652): n is a, c, g, or t
ttttttttttttttttttagtattacattttatttttactgcttcttccagtattgcacaatcccataattattgctattcagctaaaaacatgcctcgaggcattgcagaagatgagaataataattttaaaaactggagtcagcaacacgaactcttgaaagcactagtataaaagcattcaagaaataacttcctctggcttccttggacttgtttaagagattactaatggcaaaatcaagtggaaattttaatggatcagtaggtctttatgaactataagttccccagatgaaaatcaaaatgctgctcgtgatgtatgccttagaacaggattgctgacctaaggtctgggaacctgctaaggctgtgggcttatgcactgagtatttgagagcatttttctgaaaaggggagcacatagctctcaactactctccaagggggtcccccaaatgttaaatttagagtttgcttagttgacagcagagtttcccgatcgggttcccttttgttgttctagtgaacaggtaaaaactcagtgaaaggcagactgggaatgttctcctgggaggtggaggttgcagtgagccgagatcgcaccactgcacacccgcctgggcaacagaccgagactccatctcanaanaaaaaaaaaaagaaaagaaaagaaaaagaaaataaatattgagcaccctaggca

SEQ ID NO: 210277 - DNA, 604 bp, Homo Sapiens
ttttttttttttttttttacataaaggcatgaatatacaaggtaatgtcagcagctgtactccactctttattcgttgcaaatctacctatttgtttccaaaggatgtctgcaaataaataggtaacattgtacagctttcaacagtggatcagaacatagatgtctcttctaattcacaagtaccaatggctcaattaatttaagggacattttctgagttgtgtgatttcacatgtatttatcgtgtctagaagtgtgcaaacttttgtttcatttctctcttagatttctgtaggaagagttaaaggatgtgaagtagtcattttacttattcataacacattttagggaaaattgtgctgttgctgttggggagaaagttaaagctatcaactataacctggactccagtccaatttttcacatctggttgctacttttaaaaaggatcattttaatttttaaatgcagaatgtgttgcactttacctttgacattccaggtttcctcatggtcatttagaaaaataaagcaggaaattctaatgccttagcatctactttaataagatgtttgcatttataaaaataacaagaaactga

SEQ ID NO: 210278 - DNA, 750 bp, Homo Sapiens
  misc_feature (658)..(658): n is a, c, g, or t
ttttttttttttttttttaaagagacagtatcttgctgtcaccaggttggagtgcatcctggagtgcagtggtgcgatcacaactcactgcagcctcaacctccctggctcaagtgatcctcccacctcagtctcccaagtagttgggaccacaggcatgtaccatcgcatctgcctaattttttttaaacgtattttctgtagagatggggggtctcactatgccacccagaatggtcttgagctcctgccttggcctcgcaaagtgctgggactacaggcataagccactgcacctggtctaaactaaggcttctaaagcaaacatggaacttctagaaatcatctactccaatctcacctccagatttaactgtccaaggatcaagctaacatttatactaacatttacagagcactttctaagtattaggcttttaaaatatcttattaacccttcatatcaaccctaggagatggacattatttccacatttacagttgggaaatttaaggctaagaaagatgaaatgacttatccaggaacaacatgaggaatgaagttatcaaagcccttgttctttattccacacctcactgcctgcctttccaaccacactaactccacctcctgaactgtttaaagttccacatcatnttacaactaaaactaaggagtcaaaagtgcttcctgccaaacccagttggtactcacttccccccatttacagaattaagacaatggggggg

SEQ ID NO: 210279 - DNA, 659 bp, Homo Sapiens
ttttttttttttttttttaaatagtaaagcctttatttttgtgttaagaacagcattttgaaaataaaacctatctgcccatgctttacagccttttaaatttgtaatatttatatagtcgtttatggtacatattgattgtcttgaaatttctttaacttcttttttataagtatgcaacagtcagccgggggaagataaaggtacattataaaacacacattaatgcatttaataaatatatattatctatcaaaagtgagccttagctcttcatcagttaataaaaagcacctgctgagaactcctgtaagctggtatcatcattgcatcattggattataaaagccacaatgctccctttcaacttggggtttggcctgaggcgttcaactcagccttggccaaccgagaccaccacccgagttcacccttgttcagtgggtcctgacggcatctgggctaaaaaaaaaaaaaaaaaagcactgggcgcccagcttccaacaaccagatcttcaactctggaatccctggagatgcacagaacttcccagtttgtaagctgtcagagctgactcccttctcttcccaccctccacctccagtggggagaaatcaggctagaatgacattttctattaaaaggggggacaagagtg

SEQ ID NO: 210280 - DNA, 479 bp, Homo Sapiens
ttttttttttttttttttaacttctcactacttgtgagcatcaatgacacaactaccttgctctcttgtctcccattaattaggagcctgtccagaagaggtgtgaaacaacatttataagaagtcaaagcttaactcacaggagaagcaggaaggcaccccagagctcctttcccatggtctccaaatcttatgttgccctctggctaatcaaagagagccctctttcatctatattcttctcaggactcccttccccctactttcctcaccccattcccttcaaaacaaccataaaaccttcaaagcactttttggcatggttccctttgtgtcagtatcatccccttgtgtgctgatttcagcctggtataatgggggctgcaatctgtttcaggtaattcagttgaaggtataaatattcaatctcattcctttaacattcccaaggacatttcaatttttataaaagatgatta

SEQ ID NO: 210281 - DNA, 547 bp, Homo Sapiens
ttttttttttttttttttcagaatgaaactaacaagggtagtaaatatctatgagtacagtaacaaaactatgtatttccatgggcacaatacattttgtaaattctaatttgtattctttgtcttggggttagggaggaatgattaagataaagaaatagatcagtaatctctctacttcactaagatgagggaagggaaaagtgtaatgtacaggtcaaaataatgctgaaatgcagaatgcttttcagaagtatgccattagaccttcaaatgtgctgtaggtgctaatagtacttgtctaacaagaaaatattgagtcattgtcttttgaaggttttaaactgttttatgtcccaaacacatccctaccaggcgtagtaagagtagtccattaatgttttcattgattagaggttgaagtaatagaatattgtggaagtgttttattgcattaacttttattttaattcctcttctaaatttgggatcttttaaaggtaataggtaatttttaaaaagcagcacagaagaagattgtgacttt

SEQ ID NO: 210282 - DNA, 497 bp, Homo Sapiens
ttttttttttttttttttgagtgtggaaacaatgggattgagcttttatcttagggaaaacttttacaagaaacagttcactgagagggttccagaaagttattgtagacctggaaactttacaactgttcctcatgtccagcaaaagcaataacatctttcatctttaaagctttaattctttaagcaatctactttaatcacttcaaggcggtgatatcattagatgttacaaaattaaagagctgggctacataatttttggaactctgcaccaaagaagccattcacaatggaaactgtggagtttcggtagatggcactcttttctctgagtgacaactcaaggtccagcatgtgaccgtagatgtagaacaggggctttcctgaggagctgtcctttagcctcaactataatcctggtaaactcacagccaatcattcttgatttttaaaaagaagcctgtagataagacatcaatccaggaatctgaagt

SEQ ID NO: 210283 - DNA, 546 bp, Homo Sapiens
  misc_feature (530)..(530): n is a, c, g, or t
tttttttttttttttttaatctctacagctgtctataacaaaactttttaggaaagtaccacaaatatgttaaacagaagaagcaaatctcaaataatgtgcaaaagctgtgagtttcttcttacataaaactggtacctaagcaagtgagggttcattttatttttcactcaccaatccccatatcattatacagtaacaccatacagccaaaacggccatgatattcctcccttctcagccaaaattgggcaagagagaatgacccttgtaggggaaaagaaacctctacgataaactgaaatgccaccatcagggtttgttgaaactgtaggaacagggtctacgactcacttagctgctaatgagtttctatgattccagatggagtagttcaaagtaagaagtgaaggggctggacctgtctgtgaatcagaatgagcccacgtcctccaggaaggttttttatagcctcctctcccaaatggaaaagccaaatccatcattgatgcttccatcagaacctgtanaggtactatcataaca

SEQ ID NO: 210284 - DNA, 545 bp, Homo Sapiens
  misc_feature (531)..(531): n is a, c, g, or t
tttttttttttttttttccaaattaatttattttttcttttaccttgattctttccttcttcctaatttccataggcttattttgctatttcttagatttaatgcttagcttactaagctaactagtagatgactagttgcccaccaatccctattctcccctttgtccttataagcagagaaccttgcagacgtaaaaaagaacaagatcatgtcctttgcagggacatggttggagctggaggccattatcctcagtaaactaacacaggaatggaaaaccaaataccacatgctctcacttataagtggtagctaaatgatgagaacacatggacacatagagaggaacaacacacactggggcctatcacagagtggagaatgggaggacggagaggatcaggaaaaaaacaaatgggtagcaggcttaatacctggatgatgaaataatctgtacaacgaactcccatgacacaagtttatctgtgtaaccaatgtgcacgtatacctttgaacttaagagttaanaaaaaaaatacaga

SEQ ID NO: 210285 - DNA, 638 bp, Homo Sapiens
ttttttttttttttttgtcttatctacatacttcagtctgtcaaattgagttctggggaagtatcattacaaaaattggtatatgaaactttgtaagcactgagaatttttacatacttccgtgtttgggtggagaaaaatggggagatgatggtgaaagtttacagaacctcagttagacaagaggaataagttttgttctgcttttctgagatctattgaacagcattgtgaatatggttaataatagtgtattgtacattacaaaattgctgaaaaagtaactttcaaatattctcaccataaaaaaatatttgttacctgttatctgttatatttattatcatttgaatacgttaattagtttcatttaattattccacatagtattcataaatcataacaacacctgatacctcataaatgtatgcaagtaaaatatgtcaatttacaataaaaataaagaaagtaaagaaaaatcagatggttttttaaagttaagtctgtaaagggacttattcatagttatccaaagctcctcctacaaagtagcagagttttctaataatcttgtggaagacattattcctagaatgctgggtaccaagaataatacttttctattattttacttttta

SEQ ID NO: 210286 - DNA, 566 bp, Homo Sapiens
ttttttttttttttttttagtatactgataaccacaaagctctgagtatctccccaaagtaagtgatataggcagatatgataaggtatacatacatatttttcaaagtaacagtaaaaaaaaaaaaacaaaaaaaaaacacaaaacattcaggccaatactaactaagccttatttcaggatagatgaccaaggtgagggtacagggatagtgatggtgggggagggggtgtgtgtgtgtgtaagacaaaaaaaaaattactgttaacttttgagggattaaaccacagatttttatactctatattaactgaggtagtgtttaaaatgaatgtctaaaatatgttaatcccattatgaataagattacattacttcctttggaggttttaaccactatttggtctagtaactctgacatttggttctctggaaaggcagtttagttatccaagaccaaagaccacgatgacaggcaacgttcttagaagtactgttgacatttaaataaacacttgggttcagtgataaagtataaaaaaattatttatcttcaactggatttt

SEQ ID NO: 210287 - DNA, 584 bp, Homo Sapiens
  misc_feature (568)..(568): n is a, c, g, or t
ttttttttttttttttttggccagagataggtcctgttttgttagtaagactgccatttccctatgtttcacaatgccgtcctatgcacaaacatcctcaaagagttgaggcagctgattttaactgatgttacagagagctgtgatagcaagaatcaagtttgaaaagtaaggtggtctggagaaaggaacagctagggtggtgatcaaagtagagaagaaaaggcaaacataaaaccagccttcttaacagaggtatgcctttataaaacacatacacgctttttaattttatgatcaaattcaccaaaaaggtcctaagaaatgttttagtagtttatatagattcttcataaaagagccctctggatggcaaccaaacaatttttaagagaaactataaaatcaagcccaccaaaataatatattatttttggttaagtgtcttcacttcacaggaagcatcccagaactgcattccatgcatttttactagtgtctgaaactgtcaggattttattctcattctctcgttcttttcacataaaccccaggtagaaaggcatantaagatgaacttgaca

SEQ ID NO: 210288 - DNA, 663 bp, Homo Sapiens
  misc_feature (611)..(611): n is a, c, g, or t
ttttttttttttttttttgaaaattatcaaaatgtcattctggtctttatttttggacatgtagcatgttttaacaaatcagtttttcataggcaaccttttgaaacatcaaaagaaatacaatatatttttcacaaatttctcatcactgtaaattcactttaaaatcaactaagtagcagggtagagcaatgtgtttccatataccgaccagtgcaaactgacagttacaattaaggtatccagaaaggttgaaaattaagatttacgtgaaacaaatttacttccatttgttaaaaaaaaagaaaaataataatttgcaaatcacatgttttacaggcaaaggcaactaactttagatcttatttccatctcaaataaatgacagtttaagaattaaatgacaatttaaaaaaattaagcaaaaatataaggaaaaaatggtggcatgcctctaaaacctgttgaatagaataatggccaaatattacagtttctcactttcctatgaatactggcactgtttatttcatgtttatatgtgagtttctatgcataaaaatcccagtaagactgaatagtttaaagatcagtccatttttctccaacanaacccctaacttctagattttaaaaattgcactcttgcttttgcattttagt

SEQ ID NO: 210289 - DNA, 654 bp, Homo Sapiens
tttttttttttttttattgagaaaagcacacacatttatttactgtaagttttacatgacaggaatcttcagaaatgaagacaaaaaagaaataggaaaacttgtgtatttttatgtacagtcttatgcagaagtataatcagaggacaaaaggacataatctaatggtaataaactgtggagaacttagcaagtcctatttgtccagattcttcttggtgtctctgtatctgtgaggataaagggtacctatggaatgaaggttttatgatctacttcagggaacagtcacttagggtttatggcctgcttcaggggagaaggggtaaggggaaggtatgagaaaccttgcttctgcagttttctcaaataacagggtgcaatattttggggttatgtgtcctgaatcccatcaacgttaagatggagagaccagcccaaatctttagttggattccagctaagtcttatacacctaagggacagaggagtagtcatatatatgccttcatatctggtcaccttcacaatgagtcagaaaattggtcagacaccgaaatcacaacagaaaaaaaaaatctttatttctaccaacttgtcccatcaagagagtaagatatacatatgtaaagagatggagtccactctgtcatc

SEQ ID NO: 210290 - DNA, 774 bp, Homo Sapiens
  misc_feature (653)..(653): n is a, c, g, or t
  misc_feature (664)..(664): n is a, c, g, or t
  misc_feature (709)..(709): n is a, c, g, or t
  misc_feature (724)..(724): n is a, c, g, or t
tttttttttttttgttttagcaacgacttttttctctctgaatattcaaaacattgcaatacagtctttaaagagttgagatgatacaaggtttgtaaataatctagttgaatgcttagcacacaatagctaatacacattagtttctccccttcctcattctggaactgggattgtttccacttttaggctattatgaataacgctgctatggacatttgtgcacaggtttttatgtggatataagttttcatttatcttgggtatatacctgggagaggaattgctggatcatatcgtaactctacatttaaccatttgaagaactaccagactttttccaaagtggctgccccattttacattcctaccagcatgttatgagaatttcaatttctccacatcctcatcaatactagttattatctttttgattgtagacattgggtgtcttgtggttttgatttgcattttcctgatgagtaatagtactgaaaatttttaaatgtgcttcttggtcatttgtatttcttctttgcagaaaagcctgttgagctattttgcccatttcaaagttgtctttttataattgagttacgagttctttatataccaccaagatacaagtcccttatcacatttatgatttgcanatattttctcncattctgtaagctgtcttttcactttcttgatggtgtcatttcanacaacagtttttagntttgatgaagtcagtttgtgtatctcttttgttgctatgctttgggtata

SEQ ID NO: 210291 - DNA, 702 bp, Homo Sapiens
  misc_feature (578)..(578): n is a, c, g, or t
  misc_feature (649)..(650): n is a, c, g, or t
ttttttttttttttttttggaattttttaaaatttttattacaaaaataatacatactgtaaaaaaattcaaacaatatagaaataaaagcacaatatcccacccagcatacataacaaacacagaagccccctcccctccaatcccattcctggggggttatcattgtgaacagttagcatatatcctttcagacttttacctttgcatacacaagtatatatataaacacatataaacacacatggttcttttacaaaaatgcgatcacatatgttacatgattcttcaatttctttcttcattcattcattacacagatttctaaaacacaaacctgattatatcactcctctaagagcttatttcccataatataaaaatcatacacattaacatcaaacacaaagcttgtgatgatatacttcctgcccatctttcagtctcatctcagcccttccagcattaaaggactggaatataaaccacattaaatccttcctggaacaaggcaggtacaaacaaacaaacaaacaaactaggaacacactctgccatttctagactgtggcctttcncattcatgttacactttgcctggacttttccatctggcaagcttctactaattctaaaacaatcagcttannaattacctctaggaagactttcctgacttttcagacatgattactcctctat

SEQ ID NO: 210292 - DNA, 699 bp, Homo Sapiens; identical to SEQ ID NO: 58098
  misc_feature (597)..(597): n is a, c, g, or t

SEQ ID NO: 210293 - DNA, 674 bp, Homo Sapiens
ttttttttttttgtttttctgcttcttctgtagccgcttttctccgtgccctcatctcagcatctgtagctctgccatctattttagcaaatccctcaaaaattgttttgtagagaatgttcctgcgtgtgttgctgtcgtctggaggaaggtactccaggatggaagcctggtgctgtctgtacatgtccaaaataattcgaaccgccgtctcgcggacctcatacactctatgctccagggcactcactgaaaacttcatcacgttgtcaatggtgaagcccgagctgccagtgcccaggtctttcagcagccgggccaggaggcccatctgactcattgccaggtgaactgaagagtttgctttcaatggctgcaccaggtaggatggaataatttggagagacttaacttctttaaacaaggccatttcctgaataaaatttgcagctgtgacgcggaggcgggcagaagaatctccagttctggtgagcaaaacgggaatggtcctctccacacagtgagctgtttcaagtttactcagtttatgtttaggaatatattgtgtaatgatcattttcaacaatttcaaagaagcctgaaaaacggaggtcacaatgtcctttatggctcttctaacgagaaagaggatgctctcagtgtgttctttaaat

SEQ ID NO: 210294 - DNA, 604 bp, Homo Sapiens
ttttttttttttttttttaaacataccaggatttttttatttttcagtgtaaaatcaaacatgataaacctagaaaactatcagcagggctatttcttacagggttccagcaagggttagcattgttacatttcagaagctgactttctttaaaccatctttacagaggagtaaacttcacagttccacacatggctgggctccaggtagaactccataggagtgacgagggaaagtcaccactgggcagggagggcatttctgagaaatgcagatgagaggagaggctgtgagcacaggctgtgtcaaaacccagggcaagggctccctcccgccttccctcccatgggaaggccaccctgagccccaaaccacattctgttccttcctcgtcattctgcagacaatggtcatccacagaccacacgtgtggtggctttggcaaccagaaatttaaaataagctatggtttttccagtagccaaaatgatcctgcaccaaagctcatagactgagaacctgagcatgcaaaaccacagtctgggtgaagggatgtctgctttgtaaatgacctgctaattctttgcaaaccacagtaatttgg

SEQ ID NO: 210295 - DNA, 673 bp, Homo Sapiens
  misc_feature (630)..(630): n is a, c, g, or t
tttttttttttcccctgccaaaggaaaatagaagcttaagaatgtttaggaaatttcctggcgaatatgattttagggttttgaaaaactttaagatttactacaatttgaatagtacttgagaattaggagtgacaacatattgcttttggggtatgaacccaaacatttaatttataatcgtgatcagtttatgagagaagctaataagtgccaaattattagcccaatacagtgagctttgctatgctattttgaatactttagtccaaagatccagatttggtcagtgtggtattccagctcattctggtcatattagacgggagcaaggatcctctgtacagagcatagtatgtgaccctcgtagctgcgttgggccagctaggttgccaggaacactggaaatgggacagatcaccctttctgtcactatcacattttgtgtgagaagtggatcaaagcctgcagtggaaggttgcacgagggaaccagaagccgagtaagtctccgttactaaatagttaccatgctgcagagggtcagggatggaaacagctggctggacagacccagaggcggacaaagcagaagctccttgacttcctgacaaagtctggcacttaacanatcctgtctgctggacttctatgggatggccacaggattcaat

SEQ ID NO: 210296 - DNA, 642 bp, Homo Sapiens
  misc_feature (533)..(533): n is a, c, g, or t
ttttttttttttttttttaccccagaaatgtgtttattaagttggactcgtattgctgtgtggtcccagtgcacgcgtgtgcacccgctacaagatccaggaaagatggcacacggcagacgacgacaggaaggacacctgctccccacccttcccgggaccccgccatgtgcaaaattcgagctggggtctgcagctgcttggagagacccagggcctcttgctccacagcctgcaaggtctgagcaggcaacggccctggggcggtgaggcccccgcctggtcactccccgcgccccccatgcaggcagtggaggggaggacacgcaggaggaccagacgctaaaggtgtaaacgggcagccgtggcactcctcacctctcaataaataagataaataactaaataaataaacaactaaataaagacatgaaggaatggatgcagagacgtgaacggatggcgcaggacgtccctggtgggggccacggtccccttaaggcatgtgggaggctgcaggcctctggtggtangtgggtcagaggctggtggaggacacggacagcgtcggggaggatggcggcgggaaattgagcagctccaggaccgccacacccacactgctgcgccgggtgaacatgc

SEQ ID NO: 210297 - DNA, 621 bp, Homo Sapiens
  misc_feature (544)..(544): n is a, c, g, or t
ttttttttttttttttttaaaaatttagtagtgtttattatacacagtcttctaataaataaaagaggacacgtaataaagattcagttttcagtaattttcaatcttcaagactaacagccttaatctttgattgagtttctaaattctccacaatatctttcagataatcttcatcttttaaaaaatatacatagaattctctttccatttgatgtaatttattatttgccaaagtttttctttttgtcttcacatcagcaagaatatcagtgaggagatgatttagcttattcagttgagattcaactttatgaaactgctctgttaactcctgatcactaagcaaaagctgatttcctccttgatacaaagtatcacaaagcatgtccacatccttattccgtttggacagaaagaaagaatgttcttgagcagatactgccaactgatcttgtactaaagaaatattctgtttcaatttctcagccacttcctcaaggtttccatgagttagaaacaattcttttttcttattctctcnctccaaaacttggtaaagcctatgagtagaataaccttagtatcaatggtattccttggatttatctgttgagaaac

SEQ ID NO: 210298 - DNA, 692 bp, Homo Sapiens
ttttttttttttttttttagtttggcacacttttatttgggggaggtggggtggtcacaatgactagcatcagtgggtaagggccagaaaggctaaatgaatcctgcaatgggatgacaggtttttatcctaaagaactgtctcactcaaaaggccaatagtgactgtccatggagggacactcagctgttgtcacctggtacagtaacaaagacagaagcttcactttactcatgtaattttttctactagacaggaagataatttttgcattttattaaatatatttatatgccacaaaaattattttagtgacaactaccaggaaagtacaaaatcacttaataactggttttctacaccttgatttgtcaagaaactcataagcaaatggaaagtagtaagtactgattgcagttacttacagcaaacagttttgagaagaagaagaaaacctgtaacactgaaaattgctttatatcccattcatagatctcttcaaaaggtctactttaaaaataaatcacataaagaattgttcagacttgtttggtgatgcctcaacttcagaacatttgcaaggaaatcacatgtaaaagcaatcatctcatacaattaaatgctattaaagaaaaaaaagtttcctttaaaacagtggttcccaaaatttagcaggcatcagaatctcctga

SEQ ID NO: 210299 - DNA, 652 bp, Homo Sapiens
  misc_feature (20)..(20): n is a, c, g, or t
  misc_feature (451)..(451): n is a, c, g, or t
ttttttttttttttttttanaattgcaatggaatattttaatatatccttgcagaaaattaaatagacaagtgatagcatacaagttatttgaaaagttaataaaatatttctaagaaacatctacagaagcttttgttcaacaaaaacatacacatggtttttaatcacatataatgaaacaaaattgaaaatgtactgagagatgacattcaactgtaataggaaacaccgacaatctgcttgatattaggaaggtgcttattcttacactgtaggactgggtaagtgcattccctgcacagtgcagtggagaagcaaacacccatgtagttctttttgactgcaccactgtagttgtcacggtggaatcagaaacacatagtcactggtactgttaacaaaacatggtgtttattacataaataataccttggataaattcaacctanagatgaggtgagtcagagcatcagagaatattcccaaccttaagagtctaaatggttgcctggtggacacattagagtttctaggaaaatccaaactgcagtgcatctttgagtagaacttttgaagacaatttgtggaaaactacatctttgaaaatatggcagctggggccatgcacagtggctcacgcctgtaatctc

SEQ ID NO: 210300 - DNA, 698 bp, Homo Sapiens
ttttttttttttttgtttgtttttttcctttttcccaaagccaattcattttacaacgaaggacaactgagcagtcggttaagttatgcctttgttttcagagtggagtttatagcctcactagaagatttacaatccataaggccataagatgatgctgtgcttagatgaacaattttatagcgtgaagatactaagacatcccccaagagagtttgggtgctagatcagttatttattggtaattttttttctcttacaaaaccaaacaaaaaattctgctatggttcccaagcaacttataaatacttatctgtattttctcttagtgccttagtatttatatcagcaagtgccatcttacaatacaaaacaagccaccaaagaaactgcaacaacagaaacaaaaacaagaaatcaaaaaccttcagcactaaaatgatttgacaaattctacatattccacggtatacaaaatttaaataaggcttagcaaaagtaaaaaggatggtcacattcaagcaccaaatagctccagcgagtctctttgttacaaaaatgctgctctgtattaagacagtattttttgcatacaaataaagagatcaggttatgaaatgtgtggaggtactagatgcagcagaaatgaatgtgaaacccaggaacttgctaaaaacagcaagcttcatctacaacat

SEQ ID NO: 210301 - DNA, 514 bp, Homo Sapiens
ttttttttttttttttttggtttacgcaagttaaaagtttatttctctcatatgaaaggagtcaaggcagacagaccaggatggggagggagatgtctacagggtcaaggacccaggctcttatttcgctgtctgacgtccttagtatgaggctttcaccttccaggatggctgcttggcctcctgccatggtctttgcattccagccagcaaagaggaagaaggcatgaagaaaggcctgcctctgactttaaaaacatttcttggaagtcccatactattttgcttaatctcctcgggcagaatttagtgttgtggccataccgagcttcaggagaagctgggaaattaaatctttattgcagatgcccatgtgctcagcagagaactggggtgcttcattctcgttgcttcttccaccggcctctccgcgagacatagctaaacttgaacttggcattccaagggtctggaaacatcttcgtgggacccatcgagaggttgttcctcgtgc

SEQ ID NO: 210302 - DNA, 624 bp, Homo Sapiens
ttttttttttttttttttggcttggagagagtttatttcagttacttcaaaatacaagtaggctattattttcctttggaagaagaaaccagaaaaaaaacttcctgattgtaacattgtgacaaatttcagattatataacacataacacaggataaatggctgtagcattaatttttttctccagttacattcctttatactaaaagactagtattaaatcttagaagaaaatttcaattgttcttacgtgttacatattaaacacaaaagcaatttattattatttggtacaacatgaacctcagtatttgctcaaatgtagaaaaggattccttaatatgctgagaaatatccttagataaatccaactgtgaaaatatagaaaaactccttactgtaattactgggaaccacaaagttaatttttacagggtagaaaaactccacaaaaatggagattcatacttaaaaccttcttttactgatagaacattctttctggtattataaaatgaacaaaagtgtacagatatgggcttggggctagataatatccatagaactcgccattttaagcaataaaaattggcatgtgggtgcatgcctgtaatccctgctact

SEQ ID NO: 210303 - DNA, 632 bp, Homo Sapiens
  misc_feature (39)..(39): n is a, c, g, or t
ttttttttttttttttatcatttaataaatatttattgnaggacctactaagtgccagcactctgctaggcatggggatcagatggcgaataaaaaaatacagtgcctgcttgtaaagatatcccaggccagtcagggagggtggtccctcctggaggggaagcaaagtccagactcagagagggcatgcatgcacctggtgaagaggaggagggtggaggcagaggccaggcacacctcacccccggagctgagagcagaaatgtcttcattcttcaagaatctctgagacgtgctgcacagctggaaatgcaacaagcagatccagctgtgacctccaagcttcatctttcttgtcctcaaactctcatgtattggacattggcacccaagaacaggaagtccttatggatctgcagcccaaggtcgtagagctgaacacgcttcagcagaggaagggggaagccttcggccaacttatcattgaacttggggtagaaggtgttaaggatgtaatagttgaggagcgcttccaacagctctgcattgaatagtccaactttggattctttcagttccacttttacctttcctggcttcaggaacccagtgatcttgctggtattgaaggt

SEQ ID NO: 210304 - DNA, 651 bp, Homo Sapiens
ttttttttttttttttttgaagaatatttattgacatgggaaatgctcacaatatgttaaagaaagcaggatacaaatctgtaaatacagcatgatcccaatcttgtagtaaaataaattatatatgcatagaaaaaatacaggaaggaaatacactaaaacattaacagtgatgatctcaggatggtgggatttggggtaaattattaattttattttctgcattttccaaactttccacaatgaacatatattacttttataatcagaggggaagaggtcaatacaggtgacacctagtcctgggaggtggcgagactgatgtggcactaagggggtgtttagagtcacttgtactgcctcattctgtgtcctcatttataaagaagggataataacacctgccctgcctgcctcccaggactactgggcatctgaaagggtcacaatatctggtgattgttcctctgtagcagcagctcaaatgctttattttaggacacacgcctccgtaccctgcttccaaggtcaggagagttgtgggcagagaggccagcctgcagccttggtccctggcctatcctaacggattccaggtcttcattggaaatccagtgctgaccatgcaagtttcccactcatacttccact

SEQ ID NO: 210305 - DNA, 677 bp, Homo Sapiens; identical to SEQ ID NO: 57798
  misc_feature (46)..(46): n is a, c, g, or t

SEQ ID NO: 210306 - DNA, 634 bp, Homo Sapiens
  misc_feature (588)..(588): n is a, c, g, or t
ttttttttttttttttttaacagtacagtattacgtgcctatttttatttgaatgaatgccaggaaagaaaatgggagactaagttgtcttctgaactccatttacaatattagggcttagatttaaggtcatatggaacacacatggcttaggtaaaagaagcgaaagcattaaaaattactccgaaggatgtgttggatttcaagacttgatcagcaattttccctgggattatcagctttgcttaaaatatcacttaatctttgtctcaggctccttttctgtgaaatgggggcaatgttcctgggggtgtggaggaagtggccagagggcaagagaggatgcagtgtggtttaacggtttcctgactttgaagtgttctaaaaatacagcattttcatcgcaaacatgtgatggagtatgtgtcagcacagcattctgtgttgctagggcagcccgaccaatgggttttcatagactcactcagctctgcggctaatgcagggggagaaagcacagagcgataggccccactcttatctcctgagcattctagccgtctggaagacatgtggcaggccctccanagactgattagtctaggttaaacaatcaaactctgccatttgacga

SEQ ID NO: 210307 - DNA, 656 bp, Homo Sapiens
ttttttttttttttttttagtataataactttttatttgacatctacaagattttggcatcttgcagctttttaccaggtttatacaatctcgatttttcaatagtgcaacctgtggaagcaaaaaaaaaaaaaaaaaaaaaaaagaaaaaaagaaaagaaagaaaaagaaagaaaagataaaaagaccaactgtcccctcacttgtttttataaacatctattataggcgaaacaaaacttacccatattatatagataagtgtctattcacatttgtacattaccatttttaacagcttgagataaactctacgtcttacaacacattaaacaatattcaagttactgagtaacaacaataacaacaataacaaaagaacacacagcagaagcctcaagtgtttcctcattgtctacaactcaggtatggtttcctttttatgagtgacaaagcaaattaagataatgaagtaaaaaacgattgtttgcaagatgaaagccaatttgtacttccttctaaaactacctttaagttgcaaatgtaaatttaagaggctcatagccatttctgcagcacacattaggaatactattaatacattaaaattaacttttaagagttttatcacagaaaaatgtatgtattcattacct

SEQ ID NO: 210308 - DNA, 592 bp, Homo Sapiens
  misc_feature (20)..(20): n is a, c, g, or t
ttttttttttttttttttanattgcaattttattttatttctatttatttatttatttttgagatagagttttgctcttgttgcccaggatggagtgcaatggcgcgataccggctcactgcaacctccacctcccgggttcaagtgattctcccgcctcagcctcccgagtagctgggaccacaggcatgtgcaccacgccctgccaattttgcattcctagtggagacggggcttccccatgttggtcaggctggtctcgaactcctgacctcaggtgatccacccacctcaacctcccaaagtgctgggatcacaggcgtgagccattgtacccaagcaagcaattttaagtggtagtcaggaaaggccccattgcagaaaaaaataaaattgaaggaaatgagggagggaacaggtggataactggggataagcaggcaggaggaagaggcagtgcaaaggctcttgggtcagaacaagaatttaagctgttcattcaaccaaaaaatgagtgggtagctgggtgtggtgttgcacgcctgtggtcccagccacttgggaggctgaagcaggaggactccctgaaccc

SEQ ID NO: 210309 - DNA, 613 bp, Homo Sapiens
ttttttttttttttttttgtcattttacaaccataacttttaaaattatactggaggcgagggagatgcatcttcctagccatggcactcctggggaaaggctgacttggcttatggctgtcagtgcacagcagcgccagtatgcagaatgcctgtgcctctgctggagcagctcagtgaggcggacaccaggtcactttaactagttttggtgccaaactagttttgtgagatagctgcagaagtgctcgtttctgtctgttgccacttcacttttggagacagggtcttgctctgtcacctaggctggagtgtaccagtggcgccatcagagctcactgcagccttggcctcccaaagtggtgggattacaggcgagagccactgtgcccagccagcttcactttcatttgttttaaaatttggtgttctgtccacatagttcagaattcaaaactgcttacaggggaaaatttcctcctacctgtgtccccagtgcagccagcattagggcttttgtatttctgcagagattatgtgcatttgtgggcagctgcgcccgtgggcttccaagggggaacttgctgtgcagtgggtccttgccttgcttttc

SEQ ID NO: 210310 - DNA, 508 bp, Homo Sapiens
  misc_feature (485)..(485): n is a, c, g, or t
ttttttttttttttttttaggagtccaatgggactttatttaacatgtttgctcaagttatcagctctttgcaagtgactgacagacaccacctcctttgtaacctcaaagcaggttcacagactatctcctggttcttagggatttcttctgtcgaaaagagttctcaaaaataacagcaacctgagataccatctgttaaatccttaagcaatttcgcatgccttatgagaccctgctgattaaaaacatctagttttgttttctttttttttgagacgaagtctcgctctgtcatccagcctggagtgcaatggcgcgattttggctcactgcaacctccgcctctctggttcgggtgattctcctgcctcagcctcccaagtaactgtgactacaggtgcgtgccaccatgcccggctaattttttgtatttttagtagagacggcgtttcaccgtgttagccaggatggtctcgatctcncgacctcgtgatccgcccacctc

SEQ ID NO: 210311 - DNA, 439 bp, Homo Sapiens
ttttttttttttttttttccatcaaagttagtttttattaaaaccaaagcaccaatctgcccccaaaaattaaagacgaagactactgcctcagatgtccctctcaataagtaaaaccttcatggagaaaaatctgtgatctgactgactagcattattctcactcagaaacatgacaccagtatgtgaattacaacagtaaattcacattcaagatgaatatgcaataaacatttataaaaagacatcaactattaatttacatagggctataaaatacttttaaaaatatgtacatggttattcaaaaggaggagctcaatttcagtaagaaattatatggttgaacgcatggtcaccatttttttttttttttgagacagagttttgctcttgttgcccaggctggagtgcaatggtgcaatctcgactcactgca

SEQ ID NO: 210312 - DNA, 370 bp, Homo Sapiens
  misc_feature (79)..(79): n is a, c, g, or t
cttttcataccttaggcccctgagtagctgggtgggactacaggcatgcatcaccatgcttggctaatttttaattttntataggtggggtcttgccatttgcccaggctggtgtcaaactcctcaagtaatccttctgcctcggcctcctaaagtgccgggattataggcctgagccactacacacagcccggagtttttaaaaaatactcaattaaaatgcttcatttaagtgtatgtctctaagaaaatttaataattgattaaatattgttgaatagactgaaagcacaacatccaagcacatggatttaagcaaataatgcaagcatagctcccacactccacaatgttttctagtccattccaa

SEQ ID NO: 210313 - DNA, 649 bp, Homo Sapiens
ttttttttttttttttttcacatatttgaatttgttttattttcatccttccttgttatacaaatgtttctattttaaaagcatatagaaatttacaaaatttgcaagaaatatctttttaaatgtacaacttcaacaactaataaaaatatgaacatccagatacagttaagtttcaagtcgggattttttttttatgatgggtttatgaaaaattaaagaaatactttcttaagtttcaaacatctgggtactggtgctatcaaagtgatttcactgccctcagtggccaccgtgataacagttgactctcggattgctgtacctcatatgtcaacaccgcagacggaggcaggaagtggcatgttcagtgattttgctaattatacttacgtagatgcagctgtatggtttaatgcttatatgaaagttgcatgaatttgtgtaacatttagttttaagatgatatctttaaatagataccttagctgttaaaactaagtgatatatctgcactatatgctcaacaataaaaaggaacaaactagtgatacatccaaagccttggatggatctcaagggaattatgctgagtgaaaaaaagccagtctcaagagggtatatattgattccatttatataacattct

SEQ ID NO: 210314 - DNA, 730 bp, Homo Sapiens
  misc_feature (689)..(689): n is a, c, g, or t
ttttttttttttttttttcagtcgacagttcattttattgatgcccactccaggctgcatagggttgaggggtgtacaagaggagaaccagattcagtccatgcctggaggttagtctggggggtcggcgggatggacacacagacagacacatagatctggcatctgatagcagggcatacagtctcatgtaggggcactctgggcacaggtagtcaggaaggacttcctagagaagtcctcacagggggtgggggagcaaggagcaaggcagccatcagaaccttcgccttttgtacatttgtaggcaggtgacttttgagaccagtggaaccagggtgagcacaaagggctggggtctgggaatggcaggcagcaagggcttccctctcgcctcgtcatcccatagtggggaagccatctcccccacccccaattcttggcctgtactttgccttctgccacatgggccctttcctggcatccacctccgtggttttcaaggcttccctgagacaatccacgtggaccaggtgctctacccagtgcctggcacctcatcaccaccccatcaatgcacattcttgtcctaagtgctatctacggactatctagatcttggttccagctctgagtggtgtcagcggtcatgacacccaggtcagggccctagcaccgcagagctccangagcctaggtacttcatacactgtgaggcagacttggtcca

SEQ ID NO: 210315 - DNA, 358 bp, Homo Sapiens; identical to SEQ ID NO: 58295
  misc_feature (69)..(69): n is a, c, g, or t
  misc_feature (264)..(264): n is a, c, g, or t
  misc_feature (328)..(328): n is a, c, g, or t

SEQ ID NO: 210316 - DNA, 624 bp, Homo Sapiens
ttttttttttttttttgtgtccgctgcatcatttattgaaccaacgtggcctacaaagtaaaccgcatttctgtacacctgagagctggaaatgttggtttgggttccggggcgtcctgcgccaagaggaggggacgggccgccctatcgcagtgcgggaaccctacagatcccccggagacgggaggcctggaccgcacccccggcggcctcaggcgagcagctgggaccttgggccactgcggcctaggaggtggctcttaccctggggccggcaagggagtggtggactcgcagctccagcccctgcccctcggccatgcccaattctagcaggagaggcctctcacaggcctgctcgggtgaccaccccccacccccgtgcccgcgggaaagcctggccctaaggaagggctggggagccggaccctccctccccaggccaaacccagttgggggcctaaactgggttccagcctctgctgcctccctggctggtcccagtcccccactcccctccaccaagagggtcctccccagggccaggcactccttccaccccccaacacacccgcccaggtattctgtgctctgtgaccacatatgtgggcaagtcgtggcccc

SEQ ID NO: 210317 - DNA, 667 bp, Homo Sapiens
ttttttttttttttttttagcattggtaactatttcttttacatcaaattatacaatgcacgaggtaatattgctcacattatggagggagattgttttatttctattttttcccaaagagatcagatttgtcctgtgtgcacaatgaagaaaactccagtaacactgaaatgacaaatgtaaaatatacatcactaccagatagaaatacacatgttcttcataatcattttccacaattaaataggtaagtgatttaaatcttgggatttgagaccattacaacaatccatcaagattcttatggacggtttgattttccttcccgttgtcagaatctccttgaggtgtgtactggacttggtattcttggagaattttaaatacatcatggtgtccaaagtgcagtgcttcatccatgggagtgttattccacctgtccttggggaaagggtttactttgcaggcttccagcaaaaatttaacaacttcaacatgaccctctgcagcagctacatggagtgctgttctagaatcatagtcccgctgttccatgtccatagctgacaaagcaaatcttcgaagtgcagacacatctccagtatatgcagcaaacaaaagatttatcactgacttaccctttgatcaccaccttctcttcgaggat

SEQ ID NO: 210318 - DNA, 682 bp, Homo Sapiens
ttttttttttttttttttaatttatgaagaaaaagaggtttaatgaactcacagttccatgtggctgggaggcctcacaatcatggtggaaggcaaaaggcacatcttacatggcagcagacaagagagaatgagagccaagcaaaaggggaaaccccttattaaaccatcagatctcgtgagacttattcactaccaccagaacagtatgggagaaactgcccctatgattcaattatctcccaccaggtccctcccacaattatgggagctacaatttaaggtgatatttggatggggacacagccaaaccatatcattctctccctggcccctcccaaatctcatgtcctctcatttaaaaatcaatcatgccttcccaacagtcccccaaagtcttaactcatttcagcattaactcaaaagtccatactccaaagtctcatctgaaacaaggcaagtcccttccacctatgagcctgtaaaatcaaaggctagttagttacttcttagatacaacggaggtacaggcattggctgaatacacccatttcaagtgggagaagttggccaaaacgaagtggctaaaggccccatgcaattctgaaatccagcagggcagttaaatcttaaagctccaaaatggtctcctttgactccatgtctcacatccaggtcacac

SEQ ID NO: 210319 - DNA, 670 bp, Homo Sapiens
  misc_feature (619)..(619): n is a, c, g, or t
ttttttttttttttttttcccagagggcaggtaaatgtattcagagcacatggcgagtaagaggcaaatcttctgccagcaagtccaggatttttttcaccagaggacattgcttggtccccagagctcaggaccctgtgttttgtctcactcccacccacagagctcctgtatccaggcatcaactccaactcccactcctggaggccgaggcaggaggatcacttgagcccaggagttcgagaccagcctgggccacatagtgagaccttgtctccacacaaaaattttaaaaatagctgggcttggtggtggcatgtgcctgtagtcctagctactcgagaggctgacgttggaggatcactttgagcccaggaggtggaggctgcagtgagcagtcatcactgtactccagcctggtgacagagcgagaccctatcaccgccccccgccccaccaaaaaaaaactgagtagacaggtgtcctcttggcatgataagtcttaagtcccctcccagatctgtgacatttgacaggtgtcttttcctctggacctcggtgtccccatctgagtgagaaaaggcagtggggaggtggatcttccagtcgaagcggtaanaagcccgtgtgaaaagccatactccaaggggctccaagtccagcgcacagt

SEQ ID NO: 210320 - DNA, 1000 bp, Homo Sapiens
  misc_feature (721)..(721): n is a, c, g, or t
  misc_feature (892)..(892): n is a, c, g, or t
  misc_feature (897)..(897): n is a, c, g, or t
acaaaaattagctgggtgtggtggtgcgtgcctgtaatcccagccactcaggaggctgaggcaggagaattgcttcaaccagggaggtggaggttgcagtgagcccagatcgcaccactgcactccaacctagacaacagagtgagactctgtctcaaataaataaataaaatttaagggttttgtttgttttgatgcacacatcatttacgatgcctaaaaagcacatagaaactttaccaataattttctcaatgcaaaattctcctcccccaaatttctaatccccttcctaatggataactccctgtacaaccattttagccaccacgacagaaattagaacttttcacccgtttgaaggttcctcccctttgaatgcaaaagattttccttccccaccatttgtcttgcctcaggggtcaactccgaatcgcgccacactaaaccctcttatctcacccttttatcctttctaaccacaccctgttatggggcgcgttaaaaaaccaacactgttcccgccctccaaaataataacctcgcctccccgatactatcgccctcacactaccccctaggtggcacctctccctcacactgtgtcgcgtgttccccaacagactgatatttcctctcccattcttcgtggcgtgcgcgggcggagctcccccccaccacaaagtcagaatattttttcatcacccacctcgcgcgcggntttctcaccgcccgcgacgatcttacgccgaacccgcgacaaatacccttctagtcttctcataagcgcacacacgcttcatcgcatgtcaaaaatataaaagagcatccgagaaaaagagactgcgccccccgtaatctttattctctacccaccaccacctccaatacnaaatnactgccgcgctctcccacgacaattgtttaagaccctcctcacgctgccctccttcccccatattatgcccctccccacaaccccctcatccacgttatatag

SEQ ID NO: 210321 - DNA, 993 bp, Homo Sapiens; identical to SEQ ID NO: 50539

SEQ ID NO: 210322 - DNA, 1000 bp, Homo Sapiens
  misc_feature (682)..(682): n is a, c, g, or t
  misc_feature (694)..(695): n is a, c, g, or t
  misc_feature (726)..(726): n is a, c, g, or t
gtggccatgtggctcagccagcccatggggcagacctgcagaagcaaggtggccagcaaaagcaggctgcatggcccactgatatgggcccatccacccatagtaaggtgccccatgctgaggcatcactacaaagcacaagctggcaggggcctcagcttggaggagttaagggtggctggcatttacaagaaggtggcccagaccattggcatctctgaggatgcaaggaggaggaaccagtccacccaggccctgcaggccaaggtgcagaggctgaaggaggaccgctcctcactcatcctcttccccaggaagcccttggcccccaagaagggagacagttctgctgaagaactcgaactggatactcagctgacaggaccagaaatgcccatcggcaatgtctacaaggagaaagccagagtcatcactgagtaggaggaaaacttccaggccttgttagtctctgtatggcccatgcaaatgcccagctcttcggcatataggcacaaagagccaaggaagctgtagaagaggacgcttaaaaaaaaaaaacaggggtaggctcgagccgctgcatcagcttcgcgctgggtctctcggtcccgcagccatgaggaggacgctgcccagactcactacccgccctctcggtcccgcagccacgaggaggacgctngccagactcacnntaccgccggctccctccccccgcgtccctgntggtggtgggcgaaaaatgacctgtttgtgcatcagatgccctttggagacataacaactgggagatgtgaagatagggaaatttgaaatgtaaagactgggaaacctccgccagaaccagaacctcttgaacaagcgtggcccttccaggaattgccaagttgcctggattgaaagtggttgttccccatttttttttatgtaacaatgaagaaagtttcgctaaaaatggccttccccaccccccggaaaaaaaattcccgggaaaaaaaaa

SEQ ID NO: 210323 - DNA, 1000 bp, Homo Sapiens
  misc_feature (884)..(884): n is a, c, g, or t
gacggaagatgctgcccgccagcaagaggagatcacacacctgctatcgcaaatagttgatttgcagaaaaaggcaaaagctctgcgtgagctggaggacaagtacgcagagtgcatggagatgctgcatgaggcgcaggaggagctgaagaacctccggaacaaaaccatgcccaataccacgtctcggcgctaccactcgctgggcctgtttcccatggattccttggcagcagagattgagggaacgatgcgcaaggagctgcagttggaagaggccgagtctccagacatcactcaccagaagcgtgtctttgagacagtaagaaacatcaaccaggttgtcaagcagagatctctgaccccttctcccatgaacatccccggctccaaccagtcctcggccatgaactccctcctgtccagctgcgtcagcaccccccggtccagcttctacggcagcgacataggcaacgtcgtcctcgacaacaagaccaacagcatcattctggaaacagaggcagccgacctgggaaacgatgagcggagtaagaagccggggacgccgggcaccccaggctcccacgacctggagacggcgctgaggcggctgtccctgcgccgggagaactacctctcggagaggaggttctttgaggaggagcaagagaggaagctccaggagctggcggagaaaggcgagctgcgcagcggctccctcacacccactgagagcatcatgtccctgggcacgcactcccgcttctccgagtcaccggcttctctggcatgtccttcagcagccgctcctacctgccctgaaaacctcccgatcgtgaaaaccccctggaaggttctgcccaacctccccccctggcaagcanttggcccaaacctcacctttgggggcatcctggaccccccgggcccggggggggcccccaagggctttcccggacccttgaatgttttacccggaacaacagtgtcttgcccttca

SEQ ID NO: 210324 - DNA, 993 bp, Homo Sapiens; identical to SEQ ID NO: 54542

SEQ ID NO: 210325 - DNA, 1000 bp, Homo Sapiens
  misc_feature (767)..(767): n is a, c, g, or t
  misc_feature (789)..(789): n is a, c, g, or t
ttcaacagaagatagttcctcatcacatataactgcagcagccattgctgccaagaagcatccattctacaccagtcctgctgttgtcatggcacacggtgaacagcccatccctggtctcatcaattattcccatcattcaacagatgaacggattccagactccatcatttctcgtggtgttcaggtgctcccacgagacacagcctccctcagcactactccttcagaatcgcctcgtgctcaggctacatctcgcctctctacagcttcctgcccaacaccaaaagtccagtccaggtgcagcagcaaggagaacattctcagagccagtcacagtgctgtcgatatcaccaaggtggctagaagacatcgcatgtctccttttcctctgacatctatggacaaagcctttatcacagtcctggagatgactccggtgcttgggacagaaatcatcaattaccgagatggaatggggcgagtccttgctcaagatgtatatgcaaaagacaatttaccccccttcccagcatcagtaaaagatggctatgctgtccgagctgctgatggcccaggagatcgtttcatcattggggaatcccaagctggtgaacagccaactcagacagtaatgccaggacaagtcatgcgggttacaacaggtgctccaataccctgcggtgctgatgcagtagtacaagtggaagataccgaaacttatcaaggaatcagatgatggcactgaaagaacttgcagtgcgaanttctggtgcaagctcggccagnccaagatatcagaaccatcggccatgacaataaaagaaggggaaatgtggtttgggccaaaaggaacccacatggggcccctcagaaaattggtcttctgggcaactgtaggtgtccaccaaaagttgaaagttaaataagtttcccaaggggttgcaaaccttgtcaaccagggaaatgaaaccgcttaaaacccggaaaaaagaccttc

SEQ ID NO: 210326 - DNA, 966 bp, Homo Sapiens
  misc_feature (689)..(689): n is a, c, g, or t
  misc_feature (792)..(793): n is a, c, g, or t
gacgcggcaagcaaggcggaaaggcccgagctaaggctaagacccgctcttcgcgggccggactccagttccctgtgggccgcgtacaccgcttgctccgcaagggcaactactccgagcgagtcggggccggcgcgccagtgtatctggcggcggtgttggagtacctgaccgccgagatcctggagctggcgggcaacgccgcccgcgacaacaagaagacccgcatcatcccccgacacctgcagctggccatccgcaacgacgaggagctaaacaagttgctgggtaaagtcacaattgctcagggcggtgttctgcccaacatccaggctgtactgctccccaagaagactgagagtcaccacaaggccaaggcagggtttagaagttcgcaatggctcgtaccaagcagactgctcgcaagtccacgggtgggaaagcgccacgcaagcagctggccaccaaggctgctcgaaagagcgctccagccaccggcggcgtgaagaagccccaccgttaccggcccggcacggtggctctgcgcgagatccgccgctaccagaagtcgaccgagctgctgattcgcaaactgccattccagcgtctagtccgtgagatcgcgcaggacttcaagactgatctgcgttttcagagctcggcggtgatggcgctgcaggaggcctgcngagcctactggggtggggctgtttgaggacaccaacctatgcgccattcacgccaagcgagtgactatcatgcccaaggacatccagcttgctcgccgcttcnntgggggagaaggcgtaaattgtccttgtgaaatgtgtggctaaccaaaacccaaaaggctctttttcagagcccaccacctttttctataaaaagtttgctggttttactggttaaaaaaaaaaaaaaaaaaaaactcaagattcctaatggtccgggtgccgggaaaaaaga

SEQ ID NO: 210327 - DNA, 1000 bp, Homo Sapiens
acagaatttcacatttattggataaatacatgcaggcactgtgcttggcactggggctccaagttagcagacgtggttcccaccttgagctcagtctttctgtgggggccactgcacaggcgtgatgggtcctgggagagggtgtggagctagggcagggcagagcctgagaagacagcctccaagggtggggatgtcacgggcccgtgcccgctttttatttttattttttccttgagacggagtctcgctgtgttgcccaggctggagtgcaatggcgcaatcttggctcactgcaacctccacctcccaggttcaagcaattctcctacctcaacctcctgagtagctgggactacaggtgtgtgccaccacgcctggattttgtatttttagtagagatggggtttcgccaggctggcctctaactcctgacctcaggtgatccaccctccttggcctcccaaagtgctgggattacaggcgtgaaccaccgcgcccagcccagcccctctttttctgtatcttcccactggctctgtcattaattcagtgaaattatgtcaagcacctactagatgtcccacgccctgacatatcatgaggcatcatcccaaggtgaacaagacaagtatagcctttaccctcacagttcactgagagatagctgctaagtacgtcaatcattaaacagggaaaaaacatccaggctgccggatgaagaaacatgacgtgtgctttgagggagtattgcaggctggtggaaatgtgaaagatgtgaggacccaacccagtgtgacgtgagctgggatctgctgggcaagaaagaggggtgcccaaatggaaaggtcaggcccagggaactgtctgggtggatgccaggaaaacggaaagagcctggcctgggaaaaaggttggggttccccgagacttcaacgggaaggatcccggcttctaaaaaaagctgggggaaaggcccaagggccctcattttgccagg

SEQ ID NO: 210328 - DNA, 753 bp, Homo Sapiens; identical to SEQ ID NO: 40734
  misc_feature (731)..(733): n is a, c, g, or t
  misc_feature (736)..(751): n is a, c, g, or t

SEQ ID NO: 210329 - DNA, 1000 bp, Homo Sapiens
ccgggggctcctcggcggcggtggcggccacggcctccagcaggcgctcggcgctgttgctgcggctccgcgcgctgagctggccctcgacggggcgcgggggggcgggccccgacgcggcagaggacgacgaggcggaagacgaggaggcgccggcggcgtcggagggcgaggcacgcgggcaggcggccgcggcgaggctggagaagtagtgctggccgggcgagtcgctccagcaggccggggacgcgggcgcggcacggggcctggggcccggctctggtggggggccctgggcccgcacatagctgccaagggtgatgcctccccacccccctgactccagcgggatggggtgcgtccgcaaacgccccacccctttcctcccctcctcgccagcggcctgccatctcccccaattgcgcccccgccctcctccccggccctcccccacccggcctgcctttctcccattgtcccgctttctccccccccccccttaattcccaccgggcccccccctatcccttccgcccaatctccctttttttcgtccctcttcctaccccccccaacgcccgcccttcccccctccccccattaaacgctctccgtagccccctctaccccccattcgccccccccgacccccctctggcttttcccgcctcgcccttcttcccatccccccccccacgatgtcccctccatgatttatcatatgccgcttgacccccccacaccctggagcccggtgatccctgtcgccatattgttgtcgcccaacttcgcggacctttttcccacaccttcttttttttacccaccctccctcccctccttgttgcccctctcgcaccgctttcttcccataatcaggcgcatcttctatatctagccacatttggcctcccccgcccctccgttcatctttctcttccctcaataccgtccccctcccaacccgcgatcccccttctttcccctccgccccgatacg

SEQ ID NO: 210330 - DNA, 331 bp, Homo Sapiens; identical to SEQ ID NO: 58267

SEQ ID NO: 210331 - DNA, 314 bp, Homo Sapiens
aataatccctttcatttaaggctgttgtgaggattaaatgtgttaatgtgcaaataactttacacagtgcctggtatataataaatgcttgctacctattaactagtatttgtttctaaggctaatttaagtcctagaattgattgcaaggattagatcaggagtatagtggacatgttgggatttaaatatttaaatatagagatgctttttaggaccattgttagaaccagaagagattttttaccaagttcacacagaaatgtaggtgcattggctgggcatggtggctcacaactgcaatcccagcactt

SEQ ID NO: 210332 - DNA, 979 bp, Homo Sapiens; identical to SEQ ID NO: 46486
  misc_feature (877)..(877): n is a, c, g, or t
  misc_feature (908)..(908): n is a, c, g, or t
  misc_feature (931)..(932): n is a, c, g, or t
  misc_feature (938)..(938): n is a, c, g, or t

SEQ ID NO: 210333 - DNA, 1000 bp, Homo Sapiens
  misc_feature (966)..(966): n is a, c, g, or t
cgaggttttcttatttttactggtttataataatcttaaaaaccccatcacacccataaaccaccacaggtgaggtgagagagatggagaatgaatgctacagtatgtggatagaatggggaatccaggtattccctagggtagtgtaggatggagacagggagtgtggagaggaggccctggcttggacccttattgctggctgggggttggctggcagaggggagagggactcaggctgaactccgaaagaaggaacatctcacaccaaaggcgagggcagttgggggcagggggatcacagtacattttccatgcagactaagggtgggagtgagagcttcagaggcttgcacccctacacaggaagagatgggtttgaggttgtttgacttaaagcccccaagttggtgtctggtccagtttcctaaaatagcagctcacctttcagggagaggtattggggaggaaaaaaaaatacagcaagaatatctgctttggagatcaagcaaggggtagggggaagacagtggggctctttaaatctgactcaaaaaagcaagaactggaagagggccctgggtgaaatggcggccaacaccttcggagaaggattgaggcaaaagctacaggtgctccggggggatcaggacagggaggtaccctggtttcccaacggcaggaaaaacaactggggaacaataaatttaggacttcctgtttgccttcatttggcataaacccaatcacggccttttttttttttccctttttcccttttaaaaataagggaaaccttgcccacaccttcaccttaaaaaggggggccttagggccccttttgcttccaaacccctaaaaaaaatttcgggggtaaacaaacaccgacaggggaaatagggaaccaaaaagtggaaacccctgtaaataaaaaaccccctctcgcaccggtgatgatgaagggancaccctccccgggggttcttttttgtccggaggg

SEQ ID NO: 210334 - DNA, 1000 bp, Homo Sapiens
ttcagatccgtgggcgtgagcgcttcgagatgttccgagagctgaatgaggccttggaactcaaggatgcccaggctgggaaggagccaggggggagcagggctcactccagccacctgaagtccaaaaagggtcagtctacctcccgccataaaaaactcatgttcaagacagaagggcctgactcagactgacattctccacttcttgttccccactgacagcctcccacccccatctctccctcccctgccattttgggttttgggtctttgaacccttgcttgcaataggtgtgcgtcagaagcacccaggacttccatttgctttgtcccggggctccactgaacaagttggcctgcactggtgttttgttgtggggaggaggatggggagtaggacataccagcttagattttaaggtttttactgtgagggatgtttgggagatgtaagaaatgttcttgcagttaagggttagtttacaatcagccacattctaggtaggggcccacttcaccgtactaaccagggaagctgtccctcactgttgaattttctctaacttcaaggcccatatctgtgaaatgctggcatttgcacctacctcacagagtgcattgtgagggttaatgaaataatgtacatctggccttgaaaccacctttttatacatggggtctagaacttgacccccttgagggtgcttgttccctctccctgttggtcggtgggttggtagtttctacagttgggcagctggttaggtagaagggagttgtccaatctctgctggcccagccaaaccctgtctgaaaacctcttggggaaccttagaacctaaaaggaaatcttaaccccatcccaaaaccttggaaggattcacatctctttggaaaatgaaggatcctggaatccccccaaaaaatttggttttattgctccaggggtccaaaattccctctttttccctttaattgttatctctcttttttccccc

SEQ ID NO: 210335 - DNA, 1000 bp, Homo Sapiens
  misc_feature (955)..(955): n is a, c, g, or t
tcagaaatagttggctttttttttttttaattgcaagcatatttcttttaatgactccagtaaaattaagcatcaagtaaacaagtggaaagtgacctacacttttaacttgtctcactagtgcctaaatgtagtaaaggctgcttaagttttgtatgtagttggattttttggagtccgaaggtatccatctgcagaaattgaggcccaaattgaatttggattcaagtggattctaaatactttgcttatcttgaagagagaagcttcataaggaataaacaagttgaatagagaaaacactgattgataataggcattttagtggtctttttaatgttttctgctgtgaaacatttcaagatttattgatttttttttttcactttccccatcacactcacacgcacgctcacactttttatttgccataatgaaccgtccagcccctgtggagatctcctatgagaacatgcgttttctgataactcacaaccctaccaatgctactctcaacaagttcacagaggaacttaagaagtatggagtgacgactttggttcgagtttgtgatgctacatatgataaagctccagttgaaaaagaaggaatccacgttctaaattggccatttgatgatggagctcccccccctaatcagatagtagatgattggttaaacctgttaaaaaccaaatttcgggaaaagccaagttgctgtgttgcaatgcattgtggttgcagggatgggaaaggcacctgtgcctggttgaaccttgctttgattgaatgtgggaatgaattaccaaaatgccatttcctttttttaggacccacaaagagggggaaacgtttcattcccaaaaacctgcttttatttgggagaaattccccacccttaaaaggccaattacgctttctaaaaataaccattggggccattgctggggttccncgaaaaagggaaatggtaaaccaaaggcgtgccctttattgggtc

SEQ ID NO: 210336 - DNA, 1000 bp, Homo Sapiens
gatggcccccacttcacctccaggtcccagcactcagcagggcaggggctcagtgcggaaactattttttttgaatgggcttctcaagttctaatactgggaaattcctgctgcttgcaaacactctggaaccaacctacctgggtttcagcccagtccagctgggcgactctaggcaagtcactcgaacctctgtgtctcaattaacttatctgtaaaaatggggggaagaccacctacctaatgcagttgttatgaagattaaatgagttaataacatgtaagtacttaatggtgactgctacatagtcagtgtcatggattttttttttcaaattactttcagttggtgtgttctacagtgatgtttttttccaccaaatacttccctgatgccgagccccttcatggggatgaagtagtacaaggtccttgtcctcaaagaactcagtcccctctcctggttctcccaggttgccatctttgaagcacttaagacattcatttaaaaaccagggcctctcccattgtggcctccgatgttaaccacagacttcctggccttttccggggttggggccaaaaaccatccttccaagttagtaaattttcaagggcatcccagccttttcaaaaatttcccaccacccctttccgttcccccataaaaatggtccctgccaaaatggccttggaaaaaaataaaaacaccctagtcgcctttcaaccaaagaaacaataaagaccttacagagatgttactcgtcactccacacccgcgggccgcctcctcttctgaaacaccacttaactggtagacccgggcggtggcccctaataacaccccctctagtgagagagccccatgcaccctttccgtacgccctcttctttccctcacggtcgccccttgccaccaaccacctaaatcactctctctcacacctctacacttctattctcgctcttttaatatctgattagcacaccaccgggtcca

SEQ ID NO: 210337 - DNA, 1000 bp, Homo Sapiens
  misc_feature (750)..(750): n is a, c, g, or t
  misc_feature (752)..(752): n is a, c, g, or t
ctatccgcgggcacagcggcacctgcagcctgaggaaggtggcatcctctgcttctgaggagctccagagcttccgagatgccgcactctctgcacagggctcggaaagtcctctgctagaagaccttggtcttctgtccccaccagccattcccccaccaccccctccaccctcccaggctctctctgcaccaaggacggcctccaggttcagcacgggcaccctcagcaacaccgcagacgcaaggcaagccttgatggacgccatccgctccggcacaggggctgcgagactgagaaaggtgcccttgctcgtgtgaatgaacagaggccagagaattgcagaaacccacctgtaatatgcccacaggcgtcactcaaggagtctgcatagccaggaacatcaagttttggtgttactttcttgtctacaggccaaaatgcgcacagttgattttcggtgtgttcctgtataacggcttgaaaggaaaggagaagatgctgtgtcgctgcgcagctcgtgtgccaaggaaatgtgttttgcctctgaatatcttaagttgctaataaacgattcttgttggcaggttaatgggactataaatgctggagcccagcactcacacttaattatatttatgggcaaagtaaaaagaatcatgccttagactgattttggacctttgagactttaccacatacagatggatgaaactacttactggatttaagatcttttggattttagananaacatatgaatcagatggaacaatctgaatgtgatatgcttcatgatggctgtggggttttggtagtaagaaaaaaaaaattggggaggtttttcaaaagtgggctttgttaaggtaagtaaaactgcctggattcttcttccctcaaatatttgggggctaacaccttcacagaaggggtccccggtccatgaatcgggaccccactaagcttttaaaaaatccactattacccccccgaaaaacag

SEQ ID NO: 210338 - DNA, 1000 bp, Homo Sapiens
  misc_feature (13)..(13): n is a, c, g, or t
  misc_feature (765)..(765): n is a, c, g, or t
  misc_feature (858)..(858): n is a, c, g, or t
  misc_feature (942)..(942): n is a, c, g, or t
gtccggaattccncgggatcaaaaatgaatgttctactccatgctgaaggagctgaaagctgccttcttcatattttgcactttctggtagttcccctgttttttctaattccctaaaattgtgtgggtggagtggagccctgcagttggggggtaacatggaccactgattttgccctttgaccctgcacaatgacctttgcatcagccaaactcattgccatgacaactctttgtactgtgtccgtgccacagatctgttggtcacattgttaatagtaaaggggacaagttggagacggtcaatttttacattttttgttgcaattttttcttcaatggttgtaagtagttttttttttttttttaataataaaagggttcactagttaatactctagaaatatctgtgtgttgcaattcaaatgtatgttgagattgtgaaaagcgcttcagtgccactagcttaccggtacactagactaagcccttgatgacttattgcatgatacagtaccaggaacaacaggtggcctaaatacatgaaaagcagtgtaagctagtgacactaaagccagtcttgtattactgtatttttgacagaatggttttgaaaactgtgctacagggactgatgtggcaaatatatctctttatgcagaaggaagtctttttttttcttttttttttttttaagaagtatggctttttatgcatccttcatcgagggcattgaagttgcatggactgataaaagttgatgcnaaacaagaaagaaacaaacaaaaaaaaaaaaaccagcaaaatgtttacccaaaaactcaaacaaatgagcagtgcctgtttcaatttcacagntctctgtttgagttcagtttgtaaatatgttttcaaaatgaaattttcttggggaaaaaaaaatctcctacaaccatttgtaanaaatgtggaagggggtaaattacattcccccaggcaataagggttttcctccaaaacc

SEQ ID NO: 210339 - DNA, 1000 bp, Homo Sapiens
gttacaagattttttttttcttaatgtagatgaaaattagcaaggatgctgcctttggtctctggtttttttaagctttttttgcatatgttttgtaagcaacaaatttttttgtataaaagtcccgtgtctctcgctatttctgctgctgttcctagactgagcattgcatttcttgatcaaccagatgattaaacgttgtattaaaaagaccccgtgtaaacctgagcccccccgtccccccccccccccggaagccactgcacacagacagaacggggacaggcggcggggtcttttgtttttttgatgttgggggttctcttggttttgtcatgtggaaagtgatgcgtgggcgttccctgatgaaggcaccttggggcttccctgccgcatcctctcccctcaggaaagggactgaactgggcttgggggaagggacctcaccaaggtgggtctgacccctccccagtgactctgcccaacaactgggggcccccagggctaccctaaacaaagcccctccccaggccccccctaagctgcctcctcccttggggctgggcgtcccaaccccgctgcaaaaaccagccagggggtcccccctccggcccatcttgtggccccagtgtcccagaacccaggccctctcctccagggtccccctttttctggggcctttttgccctgaaggggtaaccaaactttcttccccatcttggctttgggggacctgcctctgggggttttaaaactgtgcaagccccccccaacccttggaaaatcccatcccgtttctcccacaaaacctaaggcccctgggtacccatgtggccaccccacagcgcgcgccctctgactacattcgagggcactttataagggacattcacagagccccctccccttcactttgagggcacctgttgcaccccactcgcccattacctatgtatcaaccccccccccctacaaattaaaacgcctctatcacacccca

SEQ ID NO: 210340 - DNA, 1000 bp, Homo Sapiens
  misc_feature (732)..(732): n is a, c, g, or t
  misc_feature (872)..(873): n is a, c, g, or t
  misc_feature (876)..(878): n is a, c, g, or t
  misc_feature (895)..(898): n is a, c, g, or t
  misc_feature (901)..(905): n is a, c, g, or t
  misc_feature (936)..(940): n is a, c, g, or t
  misc_feature (952)..(952): n is a, c, g, or t
  misc_feature (957)..(958): n is a, c, g, or t
  misc_feature (977)..(977): n is a, c, g, or t
gagatccctggtgcagggagctcaggctgtcgtctgtcctctgtggaggctaacaatccgctggtgacgcagttactacagggcaacctgcctttggaaaaagtgttgccacagcccagattgggagccaagcttgaaatcaacaggcttccattgcctcttcaaactacctcagtgggtaaaacagcaccagagagaaacgttgaaattccgcccagctctccaaatccagatggtaagggctacttggcagggactctggcaccactccaaatgagaaagcgagaaaaccaccccaaaaagagagtagctaggactgtaggagaacacactcaagttaaatgtgaaccaggaaaattgttggtggagccagatgttaaaggggtgccttgtgtcatcagttccggcatcagtcagctaggacacagccagccatttaagcaagaatggctaaacaagcactccatgcagaacagaattgttcacagccctgaggtcaaacagcaaaagcggctgctcccctcgtgtagcttccagcagaacctatttcatgttgacaagaatggcggcttccacactgacgctggtacctcacacagacagcagttttaccaaatgcctgtggctgccaggggccccattcctactgcagctctgttacaggcctcttccaagaccccagtggggtgtaatgcatttgccttcaacaggcatcttgaacagaagggattngggagagttagtctttcctcagcacctcaccagctaaggttagccaacatgttatcccccaatatgcccatgaagaggtgatatttaaggttgggaagcactgcacacacaatgccaaacaagcactagtacatcgcggnnggnnnaaaggggtttccctttnnnnttnnnnnattttgggttttttgcccgggtttttccgcnnnnngggtttggtttntttcnncttttttccttttggggcngaagtccccttttggtttccaac

SEQ ID NO: 210341 - DNA, 1000 bp, Homo Sapiens
agttgcctgttaagcaaaatctgccctcccaattgaaaaagccaaagagaattgttagagggaaaagcatgtagccattgcagtctgcattgcagccagcgttgtccagagagtacacgctcagcacttagcttctactgtgtgttgtggtctggtgagtgttgtttcccctgagcgctctattatttatttatttattatcaatcagtgaccctgaccacatagtgtgataggtgcagcattcttccctgtgggaaagaattaaagatggttccatttcctaggctacagacaggaatggggctctaaatggttttcatagactggctgttaaaggccaaaaattttggtaaatcaatgctatattatgctcttgaactattaaaacagccataattattgtcccaagatagaatatagtcctttttcaaagatgattatacgtggctaggtgacagacattaatgactgactctggagagtaagtcatacctgcactctgtggacttgatggttctttttctagagcaaacagagcgtggcattttgttttgacttgttcttccttggggtcaaatttatatatatatatataaatttttgtttgggcgaccaagatctaataattaaaacccaggtggaccatggattcagacctgcctttttatgtttttgactcttaggttcatcgtggtccagactttcttcacatatttcgtgaaggtaagatattctgggtggcgcttgggcctcccttttcacgcattatttcattgccctctttggatgaagtggttaccaaaaacgttaaaactaccttttttgtttccctgggggtaataagggccagtaacctattgaagcgcccttcttctcctccatggtaagagtttgtggttaaataaaaaccccttttttatggggtaaaaaatttggggaagggagggcccaccccaccctttataaattgaggttggggcccaaaccaaaggggccacac

SEQ ID NO: 210342 - DNA, 1000 bp, Homo Sapiens
  misc_feature (754)..(754): n is a, c, g, or t
  misc_feature (968)..(969): n is a, c, g, or t
acaaagccaggggccacggggtaccccaagctgcccattttcctgggaagggcacagtggccctgaccggagctgtcattttcggctggggttggtcagtcctgccctccttgccgtggctgctgtcagcacatgtcattcatgtcgtaaccattcgtggggctccttcctgcggcagcgtggcggggctgaggccatgcacaccaatccgagctgggctcgggcgccctgctgaggacaccaagcagccacgttgcctgtgctccagcagctccgaggtctcttcctggaagtctgttgggtgtcatcctgcagctcagagccagggaaatggcagtggggagggggcttcctggggtgacagcaaagctctgtgtccacaggcaggcaggacgcatgctgcagccctgtggggtgggcacggtggaagccttcctctgtgtggcagaaaatgtgtctcagatctctgggaactgggacaggaaagttcccagaggggcatgtatggggaggctacagaaagtgtccccccatttcatgtttgtgatagcagctcaggacagacaaacaccaagagggtggccttgggcagcagccagtgaggagaggcaagatggggttaagcttcccacattgaaggctgggcacagtggctcacacctgtaatcccagccccttttgggggttgaggcggcggatcacttgaggccaggaatttcaagaccagccctggcccacatggtggaacccctgntttttctaaaagtacaaaaaataaccccgcgcctggtggtgggttgccttgtaatccccagcttactcggggaggcttaaaggaaaaaatcccttgaaccccggaaagcgggaacttttcaatggaagccaaaatcccgttcactgcactccaaccttgaaacaaaaaaaatgagaatttttgtccttttaaaacccaccaccgcacaccggannacatccagggcatcttttttttcggggggcg

SEQ ID NO: 210343 - DNA, 1000 bp, Homo Sapiens
  misc_feature (908)..(908): n is a, c, g, or t
cccacctcagcctcccaaagtgctgagattacaggcataagccaccgcgcccagccagatgtgtgagcttttaatctctggctgatcttaacccacatcagcctaagcttgggatgattactcttgacccttttttttcagtgattagcaaatctccccacaacccaggtgtggagagaagagaggtagaatggtgctagtttcctattttatttttgtggtaactgtacagcactttaaagttatatactctatgtttaaatatctcccttaaaaagcctgagctgtacaacaatctggatgtgactctgttacccttttcccacaagataggagggaatcccctttgtaaaactatgaatcccaataaatgtttacaaagtggctcttgtgataattgggaaattaaaccattaccaattttatttttgaaaaggcaacactgtaatagtatatgctgtcattgccctggagcctgatctgaaacaagagtctagtttgacctgtcttctaccccagggaatttttccttgttggttgatgggggtatcctaagaggcttaaacaaccttctaagggaacaaatttgccaggtttataaaaaaaacgcctccctttttttttttttttaacttaaatttttaattttttttgaaaaccgggcttccccttctcttgccccaactttggaaagggggggggcaatgaaacccgggtttcccttgggagcctggaaccttcctggggggagggttggccttggaacacccgggagatttttaaaacaccccccctgggggcacaccttaggccaagaacccccccttgccttaaaaaaaaaaaatttaaaaaattttccccccgcggattgttggggggggggccataaccctggtggaggccccccngcttacttcttagggggggggttcaagggggggggagaggggttcctcctttgtaacccccccgtgaacattttttgggtgggggggcttcc

SEQ ID NO: 210344 - DNA, 872 bp, Homo Sapiens; identical to SEQ ID NO: 40403
  misc_feature (842)..(848): n is a, c, g, or t
  misc_feature (851)..(852): n is a, c, g, or t

SEQ ID NO: 210345 - DNA, 291 bp, Homo Sapiens
  misc_feature (76)..(76): n is a, c, g, or t
  misc_feature (108)..(108): n is a, c, g, or t
  misc_feature (113)..(113): n is a, c, g, or t
cctctgtccccagagatgatgctgcgcgttggagctttcctgcttttttcccgttttccagatttccttataagcnatttgacttcacagcgtgacctttttatatanatttnatatctggtatttgtttagaccttagaagtgttctgaggccgggcgtgtggctcatgcctgtaatcccagcactttgggtggctgaggtggacggatcacctgaggtcaggagtttgagaccatcctggctaacgtggtgaaaccccgtccctactaaaaataacaaaattagccggg

SEQ ID NO: 210346 - DNA, 598 bp, Homo Sapiens; identical to SEQ ID NO: 39980

SEQ ID NO: 210347 - DNA, 1000 bp, Homo Sapiens
ttttaccaacgaggatcatttggctgtccataaacataaacatgagatgacactgaaatttggtccagcacgtaatgacagtgtcattgtggctgatcagaccccaacaccaacaagattcttgaaaaactgtgaagaagtgggtttgtttaatgagttggcgagtccatttgagaatgaattcaagaaagcttcagaagatgacattaaaaaaatgcctctagatttatcccctcttgcaacacctatcataagaagcaaaattgaggagccttctgttgtagaaacaactcaccaggatagtcctttacctcacccagagtctactaccagtgatgagaaggaagtaccattggcacaaactgcacagcccacatcagctattgttcgtccagcatcattacaggttcccaatgtgctgcttacaagttctgactcaagtgtaattattcagcaggcagtaccttcaccaacctcaagtactgtaatcacccaggcaccatcctctaacaggccaattgtgtaagtgattcaggccaatcattgaacatatacatgaattaagtttgttttgtaatgatttttcctaagacatttgattattcaaactaagatcttagttctgtatgtgtgtgcatgcttcaaattttggaaaaagtacttgcgtagtcttctttaatataaatattaactaacagagtgggagataaatacaactaaaaacaaatatagaatgtgaatttaagatagtcttattttcatgctatttcacacaaaatataaaattactgcatcaccagattccatttctttcagttcttactggtagctcccaagagctctctgatgacagtttttctcattttacaaattggagattgtcctaagtaaatccataacttttctcttcttttcaatactgctacacaggttatgcatttatgatgcaattaaaaataattaaattttcaaaaaaaaaaaaaaaaaaaaaaaaaaaaaa

SEQ ID NO: 210348 - DNA, 327 bp, Homo Sapiens; identical to SEQ ID NO: 40415
  misc_feature (321)..(321): n is a, c, g, or t

SEQ ID NO: 210349 - DNA, 598 bp, Homo Sapiens
ttttttttttttttttaaaaacaaatctaggtatttatttaacacttaaaagagtacttactctgtgccaggaactattctaagcactttgcatatattaattcatttaattctcacatcagctctctttgctctccaagtcaatacattttcatctagagctgggattctaagccagacttcattaaccacccacatacccccttaaaaccacaatgctagattacctctcaatgagtgtaggaaatggatgtgatgaaagacagaaaaaagcatgaggcctaaatgtgtgaatggcttgaggaatgaatgctctgactgaagaaagaatgcctgagatccgcacactccttccactggcctgtagaggcagcagccgttgcccaaatgaggcagacgaacctagctttgaatctcagctctagctgattcactgggtggcactggacaaatcactcctgccacctgagcttgagcgtcttcatctgagataggaatagcagtccctacactgaggaggtattaaagctaggaggagccaggctaggccttctgtcaacattgatgcccggtgtctctggccacagaaacaggcctc

SEQ ID NO: 210350 - DNA, 531 bp, Homo Sapiens
tttttttttttttttagtagagacagggtttcaccatgttggccaggctggtctcgaactcctgacctcaagtgatccgcctgccttagcctcccaaagtgttgggataacaggcatgagccaccgtgcccagcctccgcatttgttttaaattaagaaatagccacacatatgaaaggatatatgtaacatacatgtaaaatacacaggctcatgggaaaatgagcagcctgtatcacggctttccaagcacgcagcgcctctcccagcctgctgggatttgctgagcgtgggatttagcacgcaggcctgcgtttcaccctgtcattttcaagaagctccacgtgccccatcactaagatcatcaactaacatcaacagagatgagacccagaggaggacccgaaaccacaccctgtgccttctgaggaggagacaggcaagctgctctaactccaggagtctcaccagctttttctcagagagcagcttcttccccgggagttcctgatgcttggcgaggtccgcacg

SEQ ID NO: 210351 - DNA, 524 bp, Homo Sapiens; identical to SEQ ID NO: 41849
  misc_feature (14)..(14): n is a, c, g, or t

SEQ ID NO: 210352 - DNA, 556 bp, Homo Sapiens; identical to SEQ ID NO: 46668

SEQ ID NO: 210353 - DNA, 242 bp, Homo Sapiens; identical to SEQ ID NO: 52183
  misc_feature (121)..(121): n is a, c, g, or t

SEQ ID NO: 210354 - DNA, 451 bp, Homo Sapiens
  misc_feature (33)..(33): n is a, c, g, or t
  misc_feature (68)..(68): n is a, c, g, or t
  misc_feature (230)..(230): n is a, c, g, or t
  misc_feature (294)..(294): n is a, c, g, or t
  misc_feature (302)..(302): n is a, c, g, or t
agaaaattagctgggtgtggcaccacgcatctntagtctcagttgtacaggaggctgaggccagaggntcacttgagcccaggagattgaggctgcagtgagccatgattgcagtaagatgtgatcacatccagttacatttgattttcagataacagaagtttagtggaggctgggggcagtggctcacagctgtggtcccagcactttgggaagctgaggcaggtggntcacctgaggtcgggagttcgagaccatcctggccaacacggtgaaccccatctctactaaaantacaaaantgagccgggcgtggtggcgggcacctgtggtcccagttactcgggaggctgagacaggagactggcatgaacccaggaggtggagcttgcagtgagccaagttcacgccactgcagtccagcctgggcgacagagcgagactctgtctc

SEQ ID NO: 210355 - DNA, 708 bp, Homo Sapiens
  misc_feature (644)..(644): n is a, c, g, or t
ttttttttttttttttttatatgtgtacacaatttattcatgggataaattggacagaatcagcattttgtgccatgaaatttttccttgagtatattccttgtatgggaaagcatcacattcttttcaagaacattctccaatcctttcctcttatgtaatagggtagtggtggtagggagaagaccagatcttcagggaaaattagaagtattaaaagggagtcagcctgggcttgggttggctctagcccaaggacccttccatatgcttcaagtctagacctagaagagactgttatggcaaacattagtatgaccattgggtgccctctctagatattcaaatccagggtgccaatgtcccagttcggcagtgtaacctcctctggaggatcacccttgggccactggagactcctcacctggagttttctagggaatgctctctcttggctgcaatggaagccccagagcacagttgggatcaggagaaatctgacattccagagccccccataggtcaagctgaggctgaagtcccagaatttcctctgggattgattgagactccacttgtaactgcattctttcttgtgtttatcctgctaatatgtttctcctaagaggatttccttttaatanatcatgtatacacagctccctgtgtcaggcgcagcctctagggagcacatccaaagacaactaa

SEQ ID NO: 210356 - DNA, 682 bp, Homo Sapiens
ttttttttttttttttttcatagaccaaaatagagatttttatttccaaacacaaagcagatacatttttaaaaacatgaaacaacagcaaaaacgtcaaaccatcttttagaacactgctacttccaacttgcacaaaaggaaggggaggaaaacgtcaatgcaactttaaaatatagcactaagaagaaactccggggtcctggtgttcctccctggatggcggggaaggctccattagctttggacttgatatgaaccgagataacacacacatgttccgagacagtcgtttggctccaatactgcttgccttcccagaaagcttaatttattgcaaatgcatgttttaccatcacaaataatatgacaagagtagatatggtccctctgcgtattgtttacataatagaatatttaaaacaatggaatgtgtttgtctttgacatcaaaaatcatttatgcagcatctacatgcacatatacacacacaagtgtgaacgcatacacaaacacacacacacagacacacacacacacacacacacacaccccatgccattgcttggtccacactgcatgaaacacaccattccagctacatgaacaggtcagtatcaggttagtgtaaccaggtctccaggtacaaaggatgaagtgggtttgctcacatagacttagc

SEQ ID NO: 210357 - DNA, 674 bp, Homo Sapiens
ttttttttttttttttttggaaagcattttcaaactttatttacaactgtcacagtgacaaaaagtagtttggaaaaaaaaaaatgctagtttctccctgagcctcaaaaaagaacagatagaagttacaggaggttcatctcacaacaggcatttttactgaaatactaggaattttttcaatacaatcagttagaaatacacacaaattacttgaaaaaaaaaaaaaagaggaggccagataggagctcagccacttgtccaagagcagctgggtccccccagcaggctccaccgctgagggtcctgacattagctgtcagcccctggcctgctcagactgcaaacggtcatacaaagtggtctagggaccagcaaaaataataaaccacccccataaacagacacatacacaaagtagatttgttacgcagtttacaagcatgttcccatcacacagcaagaccaggacaggtgattcagggtagcagataagggaagacaccaaaacacaggaattgaaaaggcaagacccccgtccacaaggggaggcgagggaatgagagtatggatgaaccactctctgcagccaaaacagaacgaagcggggagcaagagagaggaaagcccctctcggtgcaggctggcggcctctcccacttctgcgaggagtt

SEQ ID NO: 210358 - DNA, 633 bp, Homo Sapiens
ttttttttttttttttttacattgcattattcataatttaattgtttgaaattacattaaataaatcaactaattaaatactaaagttttgttcctttttaaaggaaataaccacaagatttttcccagcccaaattccagcgccaattttaggccaactttggctgttttcttccaaaagtgcttatgtggaattgggatccccagtgtagtgacagacagtcatgactgctgctgagtttgatctgtgaaggtagtgaaatgtggccctgatgtttcttaaccctgatttggtaactaccagccctgacaccatcagtgcttgatgtagcctggaaccccaggcccactgacgcactgggcacggggctctgggtcgaaggctggagccgtcactgttgttcatgtgcatttggagcactgtgggaatagtctggcagctgtgtgctgattaaatgtctttggcaaggcagggggcaggaaaaggccttgtggaaacaaaggcaccaaggatcaccccagcccagtgaaggcagaagaggtcacgtggatcagcctgtgtctttccagcagaatctgattaaagcctgtaatgctgtagggtgaaggttcagggcagatgtcagcataccg

SEQ ID NO: 210359 - DNA, 657 bp, Homo Sapiens
  misc_feature (608)..(608): n is a, c, g, or t
  misc_feature (627)..(627): n is a, c, g, or t
ttttttttttttttttttgagatggagttttgctcgttgcccaggctggagtgcaatggcgcgatctcggctcactgcaacctctgcctcccaggttcaagcaattctcctgcctcagcctcccaagtagctgggattacaggggcccgccaccatgcccgactaatttttgtatttttagtagagacggggtttcaccatggctggtctcgaactcctgacctcgtgatccacccgcctcggcctcccaaagtgctgggattacaggcatgagccactgcgcccggccactaatccatattacaaaattaaagcctcaaaattaatgttttatctcaattatagtcattctgttgcaaggaacttttaagaagcaatgttggttaccaatgtgaccaaataaatgcaacttaggtttagattacccaagtggttaccaactgatagcttaaatgagggctgagggtgacggaaaaaataaagattaattccacgtcactaaacgggtattttaaagttccagaggcaacaaaagtgacaattccatcgtaatgtgtctcatcatatggactcagaacatgaatcaactctcaatctgaagcccagtngtgaccaggtattctgtcncctgacaaaggactataagggagctctcct

SEQ ID NO: 210360 - DNA, 710 bp, Homo Sapiens
  misc_feature (688)..(688): n is a, c, g, or t
ttttttttttttttttttgaaggaggctgaacactggggagctttaatggcctgttacagggtggcagaaacagtggctgggtctgggagtcacagcaaaatcaggcgcccagaaccatggtggaaggtggggttgctagttcatgaaaacttgaaggacattaggaagaggcggcatttgatgctgtcaagtaactacacacagaacaagggcatgataaaagtcctaatgcacatagagaacaaagccctgctcagaaatgctgtcctcaccagcagaaaggactctgtggagaaagctgtcccttacataaaaaagaagaacatactgggttagcacttgatatccaagaagtgaaatggtcgttttcgaagattaacagtttgcttcaccaaatccctctgaggtaggtaagaggcaggtgacattagccccattttacaaatggggtaaagtgaggccccaggacctgttacatcacgaatatgcatcaacagccacaaacagcacgctctcagatcttccccttcacttagcttagaaccgtgtcagcaggtaattggaaaaacatggaccatttcgctgataattttaaacttggatgtactggcaagaaagggctctatattttgaaatcagccaaagccaggggacctgggacactgtgaatgggggtacccactccantagtacatggttttctctgggg

SEQ ID NO: 210361 - DNA, 726 bp, Homo Sapiens
  misc_feature (705)..(705): n is a, c, g, or t
ttttttttttttttttttcatattttctatctgtagtgttcattattttaagacaagcaataattaaaggaagttgggatgggatgctactttaaatacatgtaaaacatactgtacaaacatacttggctttactatttttttcctaaccatcaagagtgcctcccaaaataagaccagtgaagacaaagtatactatcaaatatggcttccagaacaaaaaccctctaacaagaatcaaacctatttacaaaatttttcagtcttttaaagtttcatttgaaacaaaatgtctatatagcagttgtaattaacatagaattttcttagtttcattcttcctctcttttaaacagatgtcacaaggtaagacccagaatggcgcttaggactttgggttccactggattctgtgctgtcagttttggaatctcgcttctttgtgttgttattcactggagttgggatctgagatggccgagctgaagtgctatctgcgctgcttttcctagggcttgggttgtaattaaaaggagtcactctggcagcaacagtcccactaggtgaactgtgtttgcttgagctgctagaactgaatggggtacgttccactatagaactttcattagtctctgatacagggacaggattattttgtcctggttttatctcagttcctttttggtcaggggcatccacctgaantaaggagttcaggcgattttc

SEQ ID NO: 210362 - DNA, 615 bp, Homo Sapiens
ttttttttttttttttttccagggaaatgtcatttgaactttattaattcgacaaacactaaataagtacctattatgtgctcaccatacagaatgggcgagaggactgggaaatactccgttaggtccctcccagtttcagctgctgttctcaaattggtgcaccataccttccagtaaggatctgtagacagcttggggatctcctcttcttaggtccatccaacatccctttgcttccttctgcatccttctgcacagatgctggtatatgggtcttgagatattgatgactcattctcactggctcatactttggggtccatgggagtatgtcaaaccttgacatactagatttgttgcggatgttgcatgtggatatttggtttccctctcttacttgctcttttgtttttttatgagaaagatccaaaaagtacactgctgccactgttgttgccatcttcctaaaaccttgtcagaacagagttggaccaaggttctctaaaacaacagtcatctctaggaaataatgactcatccctctcacttttgggaatctttgtttcctggggccctcagccccaccctgtgccagggtgtgttgtggaggtt

SEQ ID NO: 210363 - DNA, 635 bp, Homo Sapiens
  misc_feature (561)..(561): n is a, c, g, or t
ttttttttttttttttttgaaataacacactagcatttattgagcagctacccatgtcaggccttgcgctacaagaactttccattttcatttcctttcacccctaggaggtagggattctttgcctccagcacacacagcagcctgggccaatcaagcctctaggattctctaggaacagaagctcaacagtgacaaaccatgtctgtggctgagccccaaaagtcgctggcctgtgttgggtgtgaatggatgttaggtgcctcgagtcagcgacagagaccaacggcaagggtagggatctcagagtgcattgttagagcctcggggtctggtccaggaggccagcattgttgacattttgtgatcttggaacccttctccctgcagcagagggagcattagggaggccgggagacagtgggagcaccccctcactgtaatgaacacaagtcccgtagggggctgatggagcagggccacctcaatggacccactttccctccccagcccctgatttgatcagggccacagctgccggctagcaggggtggatgctcncccgcccacttcctggaggtccctgaatgtccccatgagtagggctgaggaacaggccagaggtctggcccacc

SEQ ID NO: 210364 - DNA, 698 bp, Homo Sapiens
ttttttttttttttttttcaaaactgtatcattagatcacaaaaactttaatagtcaaagctttgtaatttataatgttagaatttctcaacatactgtcttgattacaagttctgatggccaggcatggtggctcacgcctgtaattccagcacttttggaggccgaggcgggcagatcacctgaggtcaggagctcgagaccagcctggccaacatgatgaaaccccatctctactaaaaatacaaaaaaatagccaggcgtggtggcaggtgcctgtaatcccagctacttaggagtctgaggcaggagaatcgcttgaacctgggaggcggaggttgcggtgagccaagatcgcgctattgcactccagcctgggcaacaagagcaaaactccatctcaaaaaaaaaaaaaaaaagtcctgacggcacctcagcctcccctcaaattccctccccgtcctgcagaagcaaccctccaagacttctcccttactaaaagtacactcttcttatagtcttattaataaaacaatgttataattgctaaatgtaacacattaccacataaacacactaaggcacgccgattactaggctccttagacagtggtcaatttgaacaaattgatgttcctaaaccaaaaactcagcagcttttttcattcataaaaacatgtatcttcccgctggaatta

SEQ ID NO: 210365 - DNA, 362 bp, Homo Sapiens
  misc_feature (284)..(284): n is a, c, g, or t
  misc_feature (298)..(298): n is a, c, g, or t
cagctcctctgcttctgccgaactgtccgtctctctccatggctacgtcttcagaaactcccaagcccctctaagtccagaaggtcacagctttcgggtgcctgtgctagaatctcttcaaaggtgaacaggagccaacacaccctttccttgtgtgttaaaggcaacctcgttaaaatatgaatgaggctaacatttctcaagaaaatagcccagctgaattatttagagatcctggtggtgctccctttcctacactctgaagaccactttccagtattggnatgaacgaatatanctcatccattgggaattggagtttttcattcaggaattgaagtctatggcagaggatttgcttt

SEQ ID NO: 210366 - DNA, 734 bp, Homo Sapiens
ttttttttttttttttttgaatagtttaatagttattatttaaataaggctttggcgtgcttttccacatttttaggtttttttctctatgtgtacaccttgcaagatgtatcattaactcatgaaaccaccagctcctcaggcaacgaaaagggaggtagaaagaacgccagaaaggtgggtctgtgtgttctggggtgcgtggggcccgcccccgaggaaggtgccaaccgtccctggagagcagaatcaccaggcctgggaaagccatgcgggttcgagagcctgcgccatggccatgctgggcagggcccaaggggtgcccaggcgtctgcccactgagaacactgttagtgcggagggatccacaggaggggagagcggcgccagggtcccggacacaggcaagggtctctagcccgccacccacccactgccctgggggtctctgtcaggcttctaggagacacagagactctgaggtcatgtctcgagggtggctacctggggaggctgggcagagtctggagacatttctggctgttgtctgactgggagctgctggctagggatgggtggaggccagggatacctttaagcatcctacagtgtgcaggacagctcccaccaaggaggacagcccgccagagacacagcacagtgggctgggattggggagggctgcagctggtgccatcctcacattggcaggcgggcgctgcaggaggcttgcg

SEQ ID NO: 210367 - DNA, 552 bp, Homo Sapiens
ttttttttttttttttttgagaggtgatataatttatttttcttttccatccaaattatcagtaacagtggctaaatggcaagataggctaaaaaactctaagtgacccaattttacaaattaaagaagtaagtaaacattagaatgaatacagttaaacaggagaggctgggcacagtggctcacacctgtaatcccagtattatccagtaaaagtttagcaagcaaattcaaagaagtctgttgtgcaaccatagcctttgcagtagaatctgctatacagcctattatgagggatcaatttctttctttcttcttttttttttgagacagagtcttgctctgttgcccaacctggaatgcagtgggcaaaagaacaagactccgtccaaaaaaaaaaaaaaaaacctacagggaccggacacagtggctcacgcctataatcccagtgctttgagaggccaaggcgggtagatcacttgagcccaggagttcaagaccagcctgggcaatgcagtgagaccccgtctctacaaaaaatacaaaaattag

SEQ ID NO: 210368 - DNA, 634 bp, Homo Sapiens; identical to SEQ ID NO: 45504

SEQ ID NO: 210369 - DNA, 624 bp, Homo Sapiens
ttttttttttttttttgtaatatttgaaaataaaccaactttatttgaatcagtcaataccaatcaagactggaacacaaattggtaattggttcagattcatgaggaaaacactcagctgtatcttcattaaaaggcattttacatttattaaggcttgaaagcaagtcctgttattcatcaccatagttaaaggtctcgagaaaatcaagtaactatcatttggagtgtctttgtaaaatgaaacacttgttcttttacaaaagctaagcatcttttgttaagctagttaactccccagcttataaaataggacaacgaggtggccaggaaagtaagacaaattcaaacatcagctggataatttatattttaaatatatgtatagtcaatattgtgaaatctctaactctacataaaatacttcagatgactggatccttaaaagtacattttaccaaaaacagattgcttctatagaaacacagaatagcccaaaccttatattgaggcaacgtattttatttatttttggttgcaagaaaggaattggatctatttctttaacgttaaatgaaattatgcacactttggatcatacataattatgaatcgcctcgtgcc

SEQ ID NO: 210370 - DNA, 505 bp, Homo Sapiens; identical to SEQ ID NO: 57789

SEQ ID NO: 210371 - DNA, 702 bp, Homo Sapiens
ttttttttttttttatttaacagtagctttaatgaattaatgcacaatattttgaaaaatctttgaccttgctcataagcagatgcctgccttgaagaaacactccaagtctgccgtgattccgagcgaaatgccaaggcagagtcaagacaatcattacctttagggctgaaacctgggcatgaggctgccccttctgggatgcctcctaaccagtctgatgtactggggaaggaggagtgaggtggggtcttcctcgggtcccagaagctgaaaacccagcccttcctttgccatcagttctgtgccaaggctggaagatgctgctggagtgcagggcttcccccgtgtgggtgctgcagctcacacaggagcttggtggaggaatgaaggatggattctgggggtagctggagggcagggggctcactgggagcccagagaacatggctggacctccctgtgaggagccagatggtgtcgcagccccatgtgggggcttgagcacgtggagcaggaaggccgaggcctggaaccccaagaactggtcctcagggttggcaaaatgtaccatgcagaaccaaaagaggcagccactgctggcctgggccacagagccctgcctcaggctgttgggatataagccgcctccagaaggcagagcctgctgtccatcagccaggcaggctggtgggctcctcg

SEQ ID NO: 210372 - DNA, 542 bp, Homo Sapiens
ttttttttttttttttttcacggagatttaagaatctttaataaggtacgaaaggttaccaaacagttctggaaactaaagtgtacatacgagttcttctagccataaatattgaagagctgtaacatggataaaccggccctttacatgcggataaatatggaaactaggaattatatacattatgtggttgtatcttttgccaaaagtaacggacagttatagtttatatcttttttaatatcactttacataaacaaatggaacagtttgacacgcagatccaggctcgtactatacgaattcttgacaggacatgaaacaacattttactgcactaaagtacttagactttgggacgaaatgtttgcactttatacaaaaaaagcacattaataccaataatattgggttaggtcgacgtggagactgtaatcgtacaaagtaattcacattttggtacacatttactagaacattcttgccattcagtacaaacagttggctttcggccgcccacccctccccctccccctcgtgcc

SEQ ID NO: 210373 - DNA, 686 bp, Homo Sapiens
tttttttttttttttcttgtcgacaattatatttagtgaagatactagatgttatttacagaagatatacatacatacaattcctacacattaaatgtagtctaattgtgaaaacaggaaaaaatgtacttcaaaattacgtactaaataaaataaataaaaagtaattatttggcacagtatctattatgtagcaaataaataactctataccattgattgaatgaactatttacaatctttgaaagtgcaaaacaattactgaaaattaagatatttgtaataacatttaagtccagaaaatatgttttcatcaggtacaataaatttgtagccaatagtaaaggtttttaatgcccaggaaaatatttcaattttgaaaaatgttttatgcatattgtgctcttctgaaatgttattttctactttaacgctggcaaatttaagaatcttggcatttcttagtggaattcttatgtatataatcctgatttgtaaattttgaaaagttacattgtaaacataaatattattctatatacattcagaaattacagaccagtcctccctaaattacataaacagccataatgtttcataataatgtggtcaggttctattccttcagaggtaagacaatgaagatggaagaatacaacctataatttggacttctatagattcct

SEQ ID NO: 210374 - DNA, 690 bp, Homo Sapiens
  misc_feature (578)..(578): n is a, c, g, or t
ttttttttttttttttttgtagtttaagaaatatttataaagcaggtaacaagtggggagccgggaggggcgctcagctggggtgcagaagggtgggggtgcccccgccttcccctgcatgtgctcgggcttcctgctgccccccaccctctgctttccctacccccactgccccactcccaggggctcgggatggacatcagggaggacggtcttgggaaaggcagcccctgcttgaactctgtcccttaatgaccccatcccatcccccactcagaggaaaactttgagttcctgatcgtgtccagcacgggtcagacgtggcactttgaggcagccagttttgaggagcgggatgcctgggtccaggccatcgagagtcagatcctagccagtctgcaatgctgtgagagcagcaaggtcaaggtaagagtttgaggtggagtggaggactggccgcaggaactgaccctggtgctgacggccattggcaacgacacggccgaagtcgtgtgagaggagagcagaggtgtctgagaaggaggtggggcttggaggcagagtcagtgccaacccanaccctctctgcagctgcgcacagacagccaaagcgaggccgtggccatccaggcgatccggaacgccaaggggaattcaatctgcgtggactgcggggccccagtgagtgcc

SEQ ID NO: 210375 - DNA, 630 bp, Homo Sapiens; identical to SEQ ID NO: 46958
  misc_feature (574)..(574): n is a, c, g, or t

SEQ ID NO: 210376 - DNA, 590 bp, Homo Sapiens
ttttttttttttttttttaaattctgcacccagtctggcaaacatttattgactgctttctctgcatagaacaaccggccagcccctggactccagaggcccaccatcattgttaagagacctacatgcatgaaccaatcacacacgtgctatgagaatagagaaaagaaataagtaattctcacagacactgacaaactggaaaaaacttctttcatcccaggtactttatggctgggatcaaaggggtgactcacttgtttgcacaggaaacaaaaggcaaaaggaagtgttggcatcagttttccatctgcacatataacccccattcctccatgaattgcatgagataggtttcattttctcctggtggcctgtctggagccggctcctcatagagtctagatagaagaccctcctctccgagcccatccccctcagaaggctcgcagccctctgaatcctggtcgaagctggacagcgaaggaatacacagcctgccagtttggggatcccagtcgaccagggtcgtcgatggctcttcctccggcccctcctccgagtctgtgtgctcctgcgccagggggtct

SEQ ID NO: 210377 - DNA, 657 bp, Homo Sapiens
  misc_feature (508)..(508): n is a, c, g, or t
  misc_feature (629)..(629): n is a, c, g, or t
  misc_feature (637)..(637): n is a, c, g, or t
tctactccaatttcctccggggaaagtgaagctgtacacaggggaggcctgcaggacaggggacagatgaccaggtgtgtccacctgggcatatccaccacctccctcaccaacattgcttgtgccacaccctcccccgccactcctgaaccccgtcgaggggctctcagctcagcgccagcctgtcccatggacactccagtgccagcaatgacatctcaggggccagaggaactgtccagagagcaactctgagatctaaggatgtcacagggccaacttgagggcccagagcaggaagcattcagagagcagctttaaactcagggacagagccatgctgggaagacgcctgagctcactcggcaccctgcaaaatttgatgccaggacacgctttggaggcgatttacctgttttcgcacctaccatcagggacaggatgacctggagaacttaggtggcaagctgtgacttctccaggtctcacgggcatgggcactcccttnggtggcaagacccccttgacaccggggtggtgggaaccatgaagacaggatgggggctggcctctggctctcatggggtccaagttttgtgtattcttcaaccctcattgacagaactganaccaccanaaaaaaaaaaaaaaaaacgg

SEQ ID NO: 210378 - DNA, 583 bp, Homo Sapiens; identical to SEQ ID NO: 49010

SEQ ID NO: 210379 - DNA, 584 bp, Homo Sapiens
actttagaggtttttaagcctgttgaacttagtatataattatctcagctgtgctttagacaattaaaatggttctttaggcagagttgttgagctcaggggagtagttggtctttttgatttttcttaggaagtaccagatacaaaaacccatgagggattcctggatatagaacagggattcgataagagaaaatctggcatcatttctttacaggacacattatagcttcaggaggcccttggtctttgccattgctgttggcaggccttgtaacaaaccattcttggagggccttgtgggagggatcagttgtgcaagtgaaacaaagacttttggataactgactaacatcaaggcatattgatggcaatcagcaatttgagtcaggaaaaggactagcctttgtatctcccttgtttcctttctcctccatgtaattttaattcctgatatttccagctatatttgtctgttgtcacctgactctgtgtttgcggacgcagttctgggtctgaagcagcccttgacctctctagacagcatcaaagaacttattaaaaaaaaaaaaaaaaaaacgcgg

SEQ ID NO: 210380 - DNA, 647 bp, Homo Sapiens
caagttctggcatttctacatcctaaatcttttaattttattataattttttattgttgtttttcagagacagggtcttgctccgtcacctaggctggagtgcagtggcacgatcgtagcttactgcagtaagttcacttgaactcctgggctcaagtgaacctcttgccccagcctcccaactagctgggactggaggggtgcaccactgcacccagctaattttgtcaaaattttttgtagagacggggtctcgccatgttgcctaggctggtctcgagctcttggcctcaggtgatcctcccaccttggtctgccagagcactgggattacagatgtgagccactgcacccagcctaatctttataaatctccatccccattactctggttcaccccctatcgtttcttagactatttaacagcctcctaacttcactctacttttaatctcttccctctccaggtctttctccatattttaaaaaactagtttcaccatccattcctctctgcccttaaaactttctggtggttttccatggcttaagagaataaagcccaattctttgatttgacatgctaggcattccataatcctctccgaacctaactccccacttcctttccctcctttacacctcat

SEQ ID NO: 210381 - DNA, 610 bp, Homo Sapiens
tttttttttttttttttttttttgacagagtctcgctctgttgcccaggctaacagctaaaccttttggataggatctaggaactgaaaagaattttgcagacttgctagtttaacttaatcattttgcagatgaaggaaatgagcctacaagaaataaaaataagtactagagtttaaatatgtatgtcagaatgttggagaaagacctcagggtaatactaagttcattagcagaaaaatcaaaaagcagaagaggcagaacagaaaaggaagtgtctagggtgctttttaaagaaaatcacatgcagtaccaccaaggaagtgaaactcagaaaaagaactaagtggcctcttatattacagtagtccctcggtatctgtgggggactggttccaggacctccatcagataacaaaacctggggatgcccaagtctcttaacataaaatggtgtagtatttgcatataacctatgcacattttccaatatgctttaaatcatctctagattacttataatatctaatacacatcacttcattcctgtggattcaacgaagtacttggcacctggcaaactcaagttttggaacttgatggaatttct

SEQ ID NO: 210382 - DNA, 737 bp, Homo Sapiens; identical to SEQ ID NO: 54925
  misc_feature (677)..(677): n is a, c, g, or t

SEQ ID NO: 210383 - DNA, 698 bp, Homo Sapiens; identical to SEQ ID NO: 40469
  misc_feature (678)..(678): n is a, c, g, or t

SEQ ID NO: 210384 - DNA, 685 bp, Homo Sapiens; identical to SEQ ID NO: 54369

SEQ ID NO: 210385 - DNA, 575 bp, Homo Sapiens; identical to SEQ ID NO: 45480
  misc_feature (15)..(15): n is a, c, g, or t

SEQ ID NO: 210386 - DNA, 727 bp, Homo Sapiens; identical to SEQ ID NO: 50742

SEQ ID NO: 210387 - DNA, 592 bp, Homo Sapiens
  misc_feature (57)..(57): n is a, c, g, or t
actacagacccaaggatggagaaccattgagctgaggctggttagctggtagccccntgagctccctcatcccagcagcctcgcacactccctaggcttctaccctccctcctgatgtccctggaacaggaactcgcctgaccctgctgccacctcctgtgcactttgagcaatgccccctgggatcaccccagccacaagcccttcgagggccctataccatggcccaccttggagcagagagccaagcatcttccctgggaagtctttctggccaagtctggccagcctggccctgcaggtctcccatgaaggccaccccatggtctgatgggcatgaagcatctcagactccttggcaaaaaacggagtccgcaggccgcaggtgttgtgaagaccactcgttctgtggttggggtcctgcaagaaggcctcctcagcccgggggctatggccctgaccccagctctccactctgctgttagagtggcagctctgagctggttgtggcacagtagctggggagacctcagcagggctgctcagtgcctgcctctgacaaaattaaagcattgatggcctgtggacctgc

SEQ ID NO: 210388 - DNA, 658 bp, Homo Sapiens; identical to SEQ ID NO: 55426

SEQ ID NO: 210389 - DNA, 688 bp, Homo Sapiens; identical to SEQ ID NO: 45856

SEQ ID NO: 210390 - DNA, 548 bp, Homo Sapiens
  misc_feature (399)..(399): n is a, c, g, or t
  misc_feature (458)..(458): n is a, c, g, or t
  misc_feature (470)..(470): n is a, c, g, or t
  misc_feature (524)..(524): n is a, c, g, or t
gctatcgtaggggggcttacatagcctagaaaaattagaagagtttctctccaatttccaaaatgccagccacacacaactttccaaccctccaaataaggctgttacagcatcctcatttacactttccaaacataacttatgacagtgatacgcctaccctgctctgtattttatttttgggaaaccttaaatgcattacaccttagaaatggtctaggtaaatttccagtttgaagatgttagtgagatttctgtaggtggctggggagtttgttctacactttggctttttccagaaggcttcaaattctaaagaatggagggaggttactttacttgggtcttatataatggtttcccagaatcctaagcctttattaatttatctgtggccanaggaattcagaacatggtacctgacgcacttgatagcatcaatagtttttctactctgntactatgagaanactgtctttctctacctactgactgaactactggagacctgccgcctgaactanaagcattttcttgtactttcactt

SEQ ID NO: 210391 - DNA, 582 bp, Homo Sapiens
  misc_feature (528)..(528): n is a, c, g, or t
ggaagaccttttactgtaccctggtcaggtctggggctcgattccatttcaccgtcagaaaggtgagaggcaaaagttggccactgttaggtcatctatttatctcggagtcaaggcatagacaccagcagcttgctgcccccttgcccacttccctgccctgacagctggggtttgccggtcttggctctggcatgtgaggcaggacagcctgccagcttagggcaggaagccactccacgtctggccagtgacagcttttccccagatgccaggacataggggcatgggacgtgctgtgaaccctggaaggcctgaccctgtctgagtgttctgggctgcaggcaagccctggctactgcgcgacttggcaaagcagctgccaccaggactccagctttggaacagcccagcgaggcggccccctccagatggagaggtcaggctgggaccacagcatgcatgtgaggaactgcgcagggaggcccaggcatgcagccagttgcttgctctgcaggccagctctanggcccacccagtgcacctctgcagcatagaggtcactgggggctttgggggatg

SEQ ID NO: 210392 - DNA, 729 bp, Homo Sapiens; identical to SEQ ID NO: 52319
  misc_feature (439)..(439): n is a, c, g, or t

SEQ ID NO: 210393 - DNA, 1000 bp, Homo Sapiens
cgatccaccccacctgagcctcccatgtattaaaactgcaatacttttgcaccagctaatagctggggattacaggtgcatgccaccatgccagtctccttttaaaattttttgtagagacagatctcactgtgttgcccaggttggtttcaaacttctggccatcttcctgccccagccttctgaagtgctgggattgcaggtgggagccaccatgcctggccatttttaaaaaaattcctacaaataattaagtaaaaacaatccagtttttagaatgcggaaaggctataaacaaggcggttcactgaagagggacagggaatagccagtatagatatgaaaaggcgttcaacctcaccttgttagtaactgggaaatgacatttgacactaggcagcctcttcttgcctattagatggacaaagagttgatgctcaagttgatggttgagtcaggacttggctaggatgtggggtggaggaggtgctcacaggggctcactcctctgctgttgggaatggaaatgggttttctgaatggcagtttggccatttgtatgcaaatgtgaactgcgggcatccctcaagcccgcagttccatatgttggcagcttcttagggactacaagtacacaaagagtaacagaaaaaaacattgaaaatcacataaacaggccaggcatggtggttcacgcctgtaatcccagtactttgggaggccgaagcgggtggatcacctgaggtcgggaattcgagaccaacctgaccaacatggtgaaacgctgtctctaccaaaaatacaaaaattagccaggtgtggtggcgggcgcctgtgatcccagctactcgggaggctgaggcaggagcattgcttgaacccgggaggtggacattgcagtgagccgagatggcgccactgcactccagcctgggtgacagagtgagactccatctccatctaaaataaaaaaaaaaaaaaaaaaaaaaaaaaaaaaaaa

SEQ ID NO: 210394 - DNA, 811 bp, Homo Sapiens
  misc_feature (811)..(811): n is a, c, g, or t
ctacatccgggttaaagttgatgggcccagaagtccaagttatggaagatctcgatctcgaagccgtagtcgtagcagaagccgtagcagaagcaacagcaggagtcgcagttactccccaaggagaagcagaggatcaccacgctattctccccgtcatagcagatctcgctctcgtacataagatgattggtgacactttttgtagaacccatgttgtatacagttttcctttattcagtacaatcttttcattttttaattcaaactgttttgttcagaatgggctaaagtgttgaattgcattcttgtaatatccccttgctcctaacatctacattcccttcgtgtctttgataaattgtattttaagtgatgtcatagacaggattgtttaaatttagttaactccatactcttcagactgtgatattgtgtaaatgtctatctgccctggtttgtgtgaactgggatgttgggggtgtttgtggttatcttacctggggaagttcttatgtttatcttgcttttcatgtgtctttctgtagacatatctgaagagatggattaagaatgctttggattaaggattgtggagcacatttcaatcattttaggattgtcaaaaggaggattgaggaggatcagatcaataatggaggcaatggtatgactccaagtgctattgtcacagatgaaattggcagtattgaccttatactaaaaggcaggggtttaaaatgattatatacattttcccttaaacacctgcaaacattttattcagttggtctttagctacaattgcttn

SEQ ID NO: 210395 - DNA, 1000 bp, Homo Sapiens
  misc_feature (1000)..(1000): n is a, c, g, or t
cccttctttaccttcatttcatcctgttggctgctgccaccaaatctgtctagaatcctgctttacaggatcatgtaaatgctcaaagatgtaatgtagttctttgttcctgctttctctttcagtattaaactctcctttgatattatgtggcttttatttcagtgccatacatgttattgttttcaacctagaaacctttatccctgcttatctgaaacttcccaacttccctgttctttaagacttttttttttttttttctttttgaaacagagtctcgctctgtcccccacgctggagggcagtgggacgatctcagctcactgcaagctccaactcccgggttcacgccattctcctgtctcagccttccaagtagctgggaataccaggtgcccgctaccgtgcccggctaatttttttgtatttttagtaaagacagggtttcaccatgttacccgggatggtcttgatctccctgacctcctgatccacccaccctcaccttcctaaagtgtttgggattacagggcgtcacccaactgcgccccgggccaaaaactttttttttccaccttaagccagggcggggccttctccatttcttctttctccctcccagaccggggagcttccccattaaaaaacaccgcaacgccccgggggccctcttaaacctctttcgtttgggggcgagatttgacctgcgcacgttccggggttctctttaaacggggcgaaggtcccccaacacaagccgttgtccttcccgacaccgtgattccccgaaactatccctctggggggcccgagaggaacatccttcctccggcgcctttgaaccggcgtttcacaaaataagcccctgggccccctacatgagcgaagtggagacccaaccaaaacaacccgtggcgccaaggaaaatccgcggttatctctacaaaacagaacaactctgtcgcttgtgacccaccccctgccttatctaaccccn

SEQ ID NO: 210396 - DNA, 879 bp, Homo Sapiens
ggacgcgtgggtttggacttgggagagccgctatacgacgcttcggaatgtgggaaatgaatccgacatcaaaacacgaagatctgaaagtgagatcctcagactactgcaacctgggccttctgaacattccaaaagttttggcaagtggacgactaagattaatgaatgtgttatgaaaaaaatgaataagttttatgaaaaaagaggcaatttctacgagaacactgtgggtgatctgctaaagttcatccggaatttgggagaacacattgatgaagaaaagcataaaaagatgaaattaaaaattggagacccttccctgtattttcagaagacatttccagatctggtgatctatgtctacacaaaactacagaacacagaatatagaaagcatttcccccaaacccaccgtccaaacaagcctcagtgtgatggagctggtggggccagtgggttggccagccctgggtgctgatggactgatttgctggagttcagggaactacttattagctgtagagtccttggcaaatcacaacattctgggcctttttaactcaccaggttgcttgtgagggatgagttgcatagctgatatgtcagtccctggcatcgtggattccatatgtctataacaaaagcaatatataccccagactacactaagtccataaagctttaccccactaactggggaggacattctgctaagattcctttttgtcatttgcacccaaaagaatgaggtgccttgaacccctaatgcctgcataatgttacaagttctctcacttaaatttttccccaatggatctttgcaaaacaggggattattcctcccccattttaagaaactggaaggaaacctgagaa

SEQ ID NO: 210397 - DNA, 871 bp, Homo Sapiens
  misc_feature (791)..(791): n is a, c, g, or t
  misc_feature (858)..(861): n is a, c, g, or t
ggaggaaaagagggatttttctcccttttatcagaacaaagagccctcggtggtcttggcaggagacgcttgggaaaaatgggtacaatctccagggattgaaagtgtatggacctgtaggatgggccacaggttctcaggaaccaccacggctgctgaggtctgagtcatacaggcttccccgggaaggactggcagagccccacacagggtggttctgtctgtggatcaatggtaaagcaggatggctctgccctgctgttcttactggtccacaccctgttctccacaccagctcccagaaaagtagctgtcctccctgctgaagtgacagtgcttggtgcctttctccgagaagaggcagatctgaggaccgaactggcaggaggatgcccatggctcttcccaaaggtctgaggatagaaaatctgtttcttcctctttcctcctccttgcaacgagtatggctcagggaactgagcctcaacccattgaatactgcactgattatccggaagcagaacagagagggttggggtgtgactgcactcatgaagaggcaggaggaagccagggacactggcatcctctgctgcctgactcttgtcctgcgtgtaacagttttctacaatcagctctggcctgtggcctgtgctcacacactcttgctcacaacaacctcaatgacttggatgctattattattattcccattttggagatgcagaaacaggcacagagcggttctcatgtctcacatggggtgaccccttggggtgtgagaagtgccnaaaccaaggaaaagggagcccaagcggtcagctccagaaccctgtgcctcttacccaccactaccannnncaaccctggg

SEQ ID NO: 210398 - DNA, 851 bp, Homo Sapiens
  misc_feature (648)..(648): n is a, c, g, or t
ccacgcgtccgcccacgcgtccgcagagaagttggtaactgaccactaactaacaaactataaattcacccattgtgggttgacctggtaagttcccccagggctgtgtccttggcccctcctttgatattagtgacagatgactttttttatgccttacccattccacaaaagaatttgaagccatttacacaagagatagtactagtaaattaggagtgctgatcaaatttttagataataagaaacccttaggaaggatgacaatttagaatccaaatttaggatccaaacaaataccattacaaactataaaaatgagcagaatctaaatgtaacatttcaataaatgcagattgataataacatctgtgcagagttgaggactatagagtactgtgctgtcactaacagtattgtgtgctactaagagtttaatggctgggtgtggtggctcacacctgtaatcccaacactttgggaggcctaggtgggtaaatcagctgagatcaggagttcgagaccagcctggccaatgtggtgaaaccccgcctctactaaaaataaaaaaattagctgggcatggtggcacgtgcctgtaatcccagctactcgggaggctgaggcgggagaatcacttgaacctgngagacagaggttgcagtgagtcgagatcacaccattgcactccagcctgggcaacagagcaagattctgtctcaaaaataaagtttattatgcccagagggccaggtgtggtgccacacccatggtatcccagcacctttagagggctgaggaggcaaatcaccttaagcccaagagttttgagaccagtctgggcaatgtgc

SEQ ID NO: 210399 - DNA, 686 bp, Homo Sapiens
cagcagccctcagggatgaaggagggtgtcaagaggtatgaacaggagcatgctgctatccaggataagctcttccaggtggcaaagagggaaagagaggctgccaccaagcactccaaggcatccctgcccacgggcgaaggcagcatcagccatgaggagcagaagtcagtccggctggccagggagctggagagcagagaggcagagctaagacgccgtgacaccttctacaaggagcagctggagcgtattgagaggaagaatgctgagatgtataaactgtcttcagagcaattccatgaggcagcctcaaagatggagagcacaataaagccccgcagggtggagcccgtctgctcagggttgcaggcccagattctccactgctaccgagatcgcccgcatgaggtgctgctgtgctcggacctggtcaaggcataccagcgctgcgtgagcgccgcccacaagggctgaggagcagacatcattccctgccctggcagtgacttggagccctgaagaagggaccaatcatgggaccacagccactgtgccctgccgtttcctgctgggcccctgcatatgcccctgagcctggggctgccacgtgtttaggaaacaaagtatgcgctactgtctgaaaacaaataaagcagatgcctttgttaaaaaaaaaaaaaaag

SEQ ID NO: 210400 - DNA, 856 bp, Homo Sapiens; identical to SEQ ID NO: 40538
  misc_feature (752)..(752): n is a, c, g, or t

SEQ ID NO: 210401 - DNA, 837 bp, Homo Sapiens
  misc_feature (771)..(771): n is a, c, g, or t
ggacgcgtgggtcgcgagcggcgccctttttttttttttttctatttaaagagtaaacatttacggtataaattatgcacacataatagtagacacagagtaatgcataacggtgtgacggggcgaggggacctcaaggtgacaagaaagctggtcctgggctggtcaggaggagtcatcaccaagatactcactcataaagttcacccatgataatctaattactgcacatgtaatatattaaaatatattaaaacataagaaaataggacaggcatggtggctaatataataaaatatattacaatataataaaataggccaggcacggtggctcattcttgtaatcccagcactttgggatgccaaggcaggcagatcacctgaggtcaggagtttgaaactgggctggtcaacttggcgaaaccccgtctctacaaaaaatacaaaaattagctgggtgtggtggtgcctgtctgtaatcccagctattcgggagtctgaggtacgagaagtgcttgaacctgggaggcagaggttgcagtgagctgagatcacaccagtgaactgcagcctgggtgacagagtgagactctgtctcaaaaacaaaaacaaaaacaaaaacaaaaacaacagaaataatgataccaattaatatggcactgttaagggccccacaaccctgtattggactgaacaaagggcgaacgtgggaataaagagaaagacaaaagagtatatttggaacaaggggtcaggggggcttcttgncttctcgtgaacaaggggctctgatcttccacagcccctttcgtattttattgggtattaggagaa

SEQ ID NO: 210402 - DNA, 872 bp, Homo Sapiens
  misc_feature (766)..(766): n is a, c, g, or t
  misc_feature (770)..(770): n is a, c, g, or t
cagcgaaggaggccaaggatggcatgctggcgggagaagcctgcgaggacccgtccctttgaggatccatccctgcaaggactggctctcgacaaaaggcacgccgtgtgctctgcctgcttcctggaggctggctgccctccccacagggggtggtgccacatcagggctcagacaccatcctcgctgttggaaagatgggcgcccagctgtccatgctgctggaagggtctggtgggggtgaataggctacggagcctgtgtggccaccatgcctgtggcctcagccactttgtgcaaaggactgcagaggcgtggcaaggccatgatgtgtccgtccaccgaaggcctccctggttttgagcccctcctctgcagggaatgcttccagcattttcatggattacaaatgtcttagcccctgccctttcaagcagttccttagctcccctccccagtccacagagccatctcctgcctgtgagttaggcctaatcaacgtaaatctgtcctccaggccctcccttccctccagatgaggtgcgcaaccagtggtgctgctggacgtttgaaaatacaaaaggccgggcgtggtggctcatgcctgtaatcccagaattttgtgaggccgaggcgggtggatcccaaggtcaggagttcaagaccagcctggccaagatggtaaaaccctgtgtctactaaaaatacaaaaatcagccaggcatggtgacgggcacctgtaatcccatctactcaggaagctgangcangagaatcgcttgaacctggggaagtggaaatttcagtgagcccgaggtggggcccaatgcactcccaccctggggtgacaaaaccgaaaactcctgtcctca

SEQ ID NO: 210403 - DNA, 844 bp, Homo Sapiens; identical to SEQ ID NO: 46548
  misc_feature (563)..(563): n is a, c, g, or t

SEQ ID NO: 210404 - DNA, 865 bp, Homo Sapiens
ccacgcgtccggttttagatcgcgacggccgccctttttttttttttttctggacaacagagcgagaccctgtctcgtcagttttatttttaaaaagggcagaagcacagctgaaaggtgtggtgctccaggaactacctcgcctcccttcccaaggctgagtgagagaggccaccccatcatcccatcttagagaggctgggaaaggaagtcccaactttgcagccatttgcaaagctcccgggatccttcaaacctggggcgggcgggttgcgggggggggggggaccttcgggagtcacctgggacatttcctgggaatgggggctctgatctggtccctgtgcccacagccccgatccccatcgagccgcagatctgccaggccacctgtgctgttatgaagctgtcctttgatgaggagtaccgccgtgccatgaacgagctaggtgagtgtcccaggtcctctgggaagccatcctccagcccccgaacaggtggtggctcctcggccgctaaagggacacaggctgggtcatctgagcttgggctggggattggagcccggagagggacagactccctggagtcacatagcacctctcatgagtggaccgtcaccctgggccctctgtccccatgagctgcgtgtggcctcccgatctggtctgaggcttcgggggtgactttcagccctaagttccctggggctcagaacagggaacggaccagaagggcaaagatagatagaagacaggcccaaaattggaactgtaagggggtggttttagttttgaaggacattgcaaacattcttctctttggtcaataataaaaggtaaattggaggcccgggccaaggctt

SEQ ID NO: 210405 - DNA, 855 bp, Homo Sapiens
aagactccagaggcagcagcccaggtggtgcagtgggtgagctttgctgattccgatatagtgcccccagccagtacctgggtgttccccaccttgggcatcatgcaccacaacaaacaggccactgagaatgcaaaggaggaagtactgactttgttgtatgacccttgtctgaactgttactttgacccccaaacagggaaatactatgagttggtataatgcctccttccggggcagagagcaggcactcccagctggagcagaatagcagttcagggtcgcttaaggagtcaccacaacttatgtgttgggtgaccacaaaatcaacagtaactgagagaaacgaattcattttgtaaataatgttcaacgttaagaatacctatattccttttgtagatgagtatgattttgaaactgaagaaattaatacagaggcaagattttaggagtttgaattggttcttgtttgttctcattctacatataattttgtttatttcagataattttatgtaaacaaattaagagttattcattcaaattttttgcagtgttaatctgtaaatgatggcttgatgtacagaaaatgtatttttgcttaaaagatgcctgggtaccttttattttatggcatttgtattaaaaataaagtatgatggtaagaagaatagcttttaaactgcttcttttcattcaccccactttcttttccagaatattcctatatgatactttccttctcttcgactcttagaaaaagaaacattgtgaactggtcagactttatgatcacattttattggcactggacccactatttccatttcattattgttcatccagagtttg

SEQ ID NO: 210406 - DNA, 885 bp, Homo Sapiens; identical to SEQ ID NO: 54505

SEQ ID NO: 210407 - DNA, 885 bp, Homo Sapiens
tcagctcccacacacacacccgcactgcccaggtccctcctcagacctccagccctgggacagggcaaacaactgaacttgctatggaaaggacagtgtgggaggctgggggagctgtgtcctgcagttcccaggaccccatcctctcagaaggtaggggaagggcgggaggattgagaagggacaagccaccttgaccgtaggggaaggaggaatgtgggctgggggaagatgccctcaactcaccccctacacacacatgagagagagcccccacccagttccttggcctaggtctcccctccaggctgagggcctctctacttccccagatgcctgggtgcaaagaacggcttggcttggctcctcctctggaggttaaaatttatagtcattctaactgcactttggaaaccaagcaaggggagaagacaaatgaagaaaaactagacggagagaaaaatacaaaaaagagagagcgagcgatagagagagatgatattaagttattaactgaggctgaccagaggggaggaccccccctttaccaccccatgcactttgcgagctgccccttcttcccccacatcagagagaaatgcccccacaccagagccccaagggtagggctgccgatcagagctgtgagttaacacaacaggggtcctggccaccccccttgccataccccgccctctgtgcccctttggcaccccccaaccctagtatgtcctctgctttctgccactcgtgcccgctgagttccatctaccctctcatgctggatgcccagctggccccctcaccagccctgcccctgctgcccaacacaggcttccccttttaagtggccccagccccctaagggggccctcctccccccat

SEQ ID NO: 210408 - DNA, 885 bp, Homo Sapiens; identical to SEQ ID NO: 48334
  misc_feature (738)..(738): n is a, c, g, or t
  misc_feature (760)..(780): n is a, c, g, or t
  misc_feature (782)..(800): n is a, c, g, or t
  misc_feature (802)..(807): n is a, c, g, or t

SEQ ID NO: 210409 - DNA, 857 bp, Homo Sapiens; identical to SEQ ID NO: 50394
  misc_feature (793)..(793): n is a, c, g, or t
  misc_feature (807)..(807): n is a, c, g, or t

SEQ ID NO: 210410 - DNA, 958 bp, Homo Sapiens; identical to SEQ ID NO: 41750
  misc_feature (596)..(600): n is a, c, g, or t
  misc_feature (607)..(611): n is a, c, g, or t
  misc_feature (630)..(630): n is a, c, g, or t
  misc_feature (649)..(649): n is a, c, g, or t
  misc_feature (651)..(655): n is a, c, g, or t
  misc_feature (679)..(679): n is a, c, g, or t
  misc_feature (700)..(700): n is a, c, g, or t
  misc_feature (706)..(707): n is a, c, g, or t

SEQ ID NO: 210411 - DNA, 580 bp, Homo Sapiens
gcccaggccgagttcctcttccgcacggagactcagtgagatggggctgggcagaggagctgggggtgggggaagatgggcagccgagaaaagaagtgagaccaaggcagaaaatgtgtccagaagacagccacagcctcatttagcccattctggactggggaccaccatagagaaattcagactcctaaaactaatggataacttgcaggagattggggtgggagagggtacaaagtcaccaccgaggcttagcatctattttatactctttactcaagagggacaaggtctgtgtagtatcagaaaggagaaggactggtatggagtgagcaaggaattggaatactggtatctgtgagcacatgcctccatgcctgaggcagaaacccttctatgccccagctggtgggcacagatgtgaataagacaagtgctgggtgacttttactttctgtgctcccatcttccaaaccagtcctctattgaccagaaatccatagtgttgagaatgctgatttgctcatgttttcaataataataaaataaaatacattcacacagaaaaaaaaaaaaaaag

SEQ ID NO: 210412 - DNA, 965 bp, Homo Sapiens
ttctccactatgaagtgggatccgtgatctcagccttaccagggctgtgaggattaaatggtccagcccagcctggggcctgcctggagtaggcagcctgctcaggatgggctgtggaaggagggctggggtagacctttcaagtccacttgggcatggggagctgagagctagcatgccgtttaacttggcaggaagcaggccgggcgcagtggctcatgcctgtaatcccagcactttgggaggctgaggcgggcggatcacgaggtcaggagatcaacaccatcctggctaacacggtgaaaccccctgtctactaaaaatacaaaaaatcagccgggcgtagtggcgggcgcctgtagtcccagctactcgggaggctgaggcaggagaatggcgtgaacccaggaggcggagcttgcagtgagccgagatcgccccactgcactccagcctggggggacagagtgagactccatctcaaaaaaaggaaaacaaaaaaagggcgccgctcgcgatctaaaactagtgtagtcgaccgtgtccgcgcgcctgggagaccctgcctccggcccggacacgcccgcgccccccccggtttggagggtgggccgcccactgggaaccctgtgaacccacgaagtgaatccgggaactgcccgcgcctggccaaggccattggactgtgcaaggtccaccaacgggttcccacgccccctggggaatgagtggcattccccaaacctacctgggggtttgggccttcccccccaaacgctgtttcctgaacaaaaagctttaccccaagagaactggggaccgccctgggggcccagaaagctgtgccagtggggtggcttccccaaatgggggagagggcttccaaaaaaaattagcagaacatagatgcgcaacccctgaagtaaacctatttcccccccttggggaaaacaatcaacgggggg

SEQ ID NO: 210413 - DNA, 947 bp, Homo Sapiens; identical to SEQ ID NO: 41163

SEQ ID NO: 210414 - DNA, 882 bp, Homo Sapiens; identical to SEQ ID NO: 42304

SEQ ID NO: 210415 - DNA, 898 bp, Homo Sapiens; identical to SEQ ID NO: 50054
  misc_feature (619)..(619): n is a, c, g, or t
  misc_feature (648)..(648): n is a, c, g, or t
  misc_feature (671)..(675): n is a, c, g, or t
  misc_feature (680)..(680): n is a, c, g, or t
  misc_feature (687)..(687): n is a, c, g, or t
  misc_feature (692)..(692): n is a, c, g, or t
  misc_feature (728)..(728): n is a, c, g, or t
  misc_feature (732)..(737): n is a, c, g, or t

SEQ ID NO: 210416 - DNA, 925 bp, Homo Sapiens
  misc_feature (858)..(858): n is a, c, g, or t
cggatatcgtcgaccccgcgtccggcgcccaggagttgggtgggcaggcaagtgggtgggttgcaggcccactcttggccccaggagggcatgccaggtggtgggggctggcccaggtaggccaaggggaggcccaggcaggaagggtggcccaggcaggcagacccaccaggggtccctgaaggccagcccttgagaaggtgtctaagccagggggtgagtgcccaggccagagcctagcccagggaggcagggttgggtcccggttgggggctcttggagcctaggggctggcatcactgggggcctccccgagctgctgctggaactccaggcgtgtctgccggttggactccagcagctcctggaggcgggcgtggaggtggtcattcttctcctccaggtggtccagacaggagttgatctggtccagcatggagttgatggcagcgtattctgggaggaaggcgaaagacagagcccagatcctgtgtctccttggggctaatggacaccctccctccactgtttcccagcctgcttcccaaagggctttgtgcaagtccctactgcttcctgagcctcagtgtcaccgtctggaaaatgggtggaataccaaaagaggagtggctttgaatgaatgacactttagtactgcatccttttttctagggttagggtggtcatagggtggcgagccagtgtcctacatgggaagtcctgcccgatgccaagtctctgcacttcctgcagcagctgcttagtggccagaggcccacattcctggagttgggcattccagggcctctgtcccccaatgggccctggttcgccaaccctttttggggctccctcccngataaaccccccagcggaagttccaaccccctgccttcctaactaaccctggcctcccgggctcttt

SEQ ID NO: 210417 - DNA, 892 bp, Homo Sapiens
  misc_feature (697)..(697): n is a, c, g, or t
  misc_feature (864)..(864): n is a, c, g, or t
cccgagtgattgtcatgacaacgaaagaagtggagagaggaaagagtaaatgtgtcaaatactggcctgatgagtatgctctaaaagaatatggcgtcatgcgtgttaggaacgtcaaagaaagcgccgctcatgactatacgctaagagaacttaaactttcaaaggttggacaagggaatacggagagaacggtctggcaataccactttcggacctggccggaccacggcgtgcccagcgaccctgggggcgtgctggacttcctggaggaggtgcaccataagcaggagagcatcatggatgcagggccggtcgtggtgcactgcagtgctggaattggccggacagggacgttcattgtgattgatattcttattgacatcatcagagagaaaggtgttgactgcgatattgacgttcccaaaaccatccagatggtgcggtctcagaggtcagggatggtccagacagaagcacagtaccgatttatctatatggcggtccagcattatattgaaacactacagcgcaggattgaagaagagcagaaaagcaagaggaaagggcacgaatatacaaatattaagtattctctagcggaccagacgagtggagatcagagccctctccccgccttgtactccaacgccacccctgtgcagaaatgagagaagacagtgctagagtctatganaacgtgggcctgatgcaacagcagaaaagtttcagatgagaaaacctgccaaaacttcagcacagaaatagatgtggactttccaccctctccctaaaaagattcaagaccagacgcaagaaagtttatggtgaagacagaatttttggatttggaaaaggcttgcncatgtgggtttggacttaccctttttgg

SEQ ID NO: 210418 - DNA, 883 bp, Homo Sapiens
  misc_feature (19)..(19): n is a, c, g, or t
  misc_feature (28)..(28): n is a, c, g, or t
ttttaaggcagggctaatntggtgacancatctctcttgggaaagacacatgtaccacaaacaaaaacaggatccaaccacttgtatctagatagttatctttctaggcagaaaatctaacattcagtaactaaaccaaatcccagagcctcagcagccaaaatggccctagctgacatttcatccagcctcattttatagaggagaaagtagaggcccatatcttgtccatagttgtacacctgggatccaggccagaattcttatagctacacgggcctgggatccagcattttaggttgagtaaaatcatttcctgctaggtccctgattctattgagaaccagggctaaggctttatggatttgggaaaacttaagtttctattgcaaacttcaaccagtgggtcccagaggtgctttgaagtctccggcttccacatttgaccacaaagtgctgcttatgtcctgatgcttacatgattcagttaaggtgctttccaaacccggtgacaacagctggggccttcatctccagtaagtttcctgatgagcagcagaggtctatacttagggttcctgtgaaaaacacaaactcccagtctcacatttggtcacactgaaggtttggccaaattatttcatacaagtagttctcactggccaaacaggtggtttttctcctggaaaagtgggatcaaagtgactttggtcctgattgttcttgcttccaagatgtgtaagaaccagatcaccaccccccaccaaaaagcaaaaccaaatagatatagcctccgggccagtgtcgtgggacttcgtactgctagggaactccctagtcccccgacgagaccagaagtggcatgaataaccggataagaaag

SEQ ID NO: 210419 - DNA, 867 bp, Homo Sapiens
  misc_feature (575)..(575): n is a, c, g, or t
  misc_feature (717)..(728): n is a, c, g, or t
  misc_feature (734)..(734): n is a, c, g, or t
  misc_feature (736)..(736): n is a, c, g, or t
  misc_feature (740)..(741): n is a, c, g, or t
  misc_feature (745)..(745): n is a, c, g, or t
  misc_feature (752)..(755): n is a, c, g, or t
  misc_feature (765)..(766): n is a, c, g, or t
  misc_feature (771)..(772): n is a, c, g, or t
  misc_feature (780)..(780): n is a, c, g, or t
  misc_feature (789)..(790): n is a, c, g, or t
  misc_feature (793)..(794): n is a, c, g, or t
  misc_feature (799)..(799): n is a, c, g, or t
  misc_feature (807)..(807): n is a, c, g, or t
  misc_feature (812)..(813): n is a, c, g, or t
  misc_feature (817)..(817): n is a, c, g, or t
  misc_feature (840)..(843): n is a, c, g, or t
  misc_feature (846)..(846): n is a, c, g, or t
gccctttttttttttttttttttggttttacaacttttttaatatatatttttataaacaggtcacgtgataaaatagcacaagaaacacttaccaaatataaggttatatcttccgcatatacaggagaatgaggtcgttatgtacaataagaaaatgattttaggggttggttggttttgttttcctctctccccttaatttttcctcctacagtcgttggaaatatcacagcttcagttgcattaatactttgggcaaatggacagctgcccctccccactaagggttgtggggaggaggggctggagaaactggctcctgaccactcagccctggagcttcctggggctggcactccagggacaggaaaatctttgggctgttgatctgtttctgattcaacagcatctctctctctctttctctctctctctcactctctttctctctctcactctctggctctctggaaactggttactctcttccaaccagatagggagtgtcccaagattgggtgtgggcgcggtatctcctggggctcaaggttgggattgggaaaggggtcccanccccctcctcagcaacagctgagatttgccagcatcccccaggacttccaaatgtctcgggccgacagagcacggtcagagcccatttgggcagacagaagtttgggaagctggggaggggtgaaatggggggttggggggnnnnnnnnnnnngggggncntccnncccnggggggnnnngggggggggnnggccnngggaaggngggaaaccnnggnnccggngggggggncgggnncccngaacccgcggggggccccgccgnnnnggnaccccccccgggggcccccgc

SEQ ID NO: 210420 - DNA, 904 bp, Homo Sapiens
aaaaacaaattttaaaattaaagtattttatacatttaaaaatatggaaaaacaacccagacgattctcgagagactggggggagttaccaacttaaatgtgtgtttttaaaaatgcgctaagaaggcaaagcagaaagaagaggtatacttatttaaaaaactaagatgaaaaaagtgcgcagctgggaagttcacaggttttgaaactgacctttttctgcgaagttcacgttaatacgagaaatttgatgagagaggcgggcctccttttacgttgaatcagatgctttgagtttaaacccaccatgtatggaagagcaagaaaagagaaaatattaaaacgaggagagagaaaaataatattaacacaaaaaaatgccacagacaatgatttctctgagaaattattatggcaaaactgtctggactgctgacagtaaattccggtttgcatgttacttgtattccattgatggtgtgtctcctcccacccccttatctcccatgcactcactccattttcatcttcactatgaaaaacaataccaaaagtatctggaaattgatatatatatatccacatatatatatcatatatttgccatatatatatatatatatatatatatatatatatatatatatatatttgccctgtctttgatcctggggaaacaaaaaaaaaaagtcagaaaggggaaaaaattacactcattgccctaaagaagacagaggtgggcaaaatatgtggggggaaaggaaaaaagaaaaccagacccaccaaatgaaaataatggaagggtaccagcggcctctcctgttgcccagacacagatagggcggctcaatccagtaattaggttccccaaccatttccccccttttttccttgggggtcccca

SEQ ID NO: 210421 - DNA, 856 bp, Homo Sapiens; identical to SEQ ID NO: 41475
  misc_feature (800)..(804): n is a, c, g, or t
  misc_feature (806)..(816): n is a, c, g, or t
  misc_feature (818)..(839): n is a, c, g, or t
  misc_feature (841)..(842): n is a, c, g, or t
  misc_feature (845)..(845): n is a, c, g, or t
  misc_feature (852)..(852): n is a, c, g, or t
  misc_feature (855)..(855): n is a, c, g, or t

SEQ ID NO: 210422 - DNA, 973 bp, Homo Sapiens
ttttttttttttttttttttttttttactttcattagtgttttcaatagtgtgggcgcaggctcaaaaggtggagaggctggcctcagaggacacccaggcttggggctaagtcccagtgtccatatgaagctgtttctggccttgtccgtttttgttgtcccaggctctgtgcccctcactcagtcaagaacttgtctttgtgttgcttcttggggacatgctcagggcagaagtcagagcggaggaggcgggaaaagtagattatgatcatcacgtccagcatgagcaggatacccagcaggaaggtgcccagggtcctctggttcacataacgcaagaagaaatgggtgaggtaggcctgaggggccaggcggaagaaaaagtacatgaccaggttcacatacttgttaacccggtagaggagatgatcctgggcattactgattttcatcatcatgcgaatggtgaggaagatgttgctgacttccaccagtagtgttaagacacccccaccgacaaagctgctccaaaagatgccggagaagaaggcacccatggccatgacgtgatggacaaggtattcccaagaggctcgtgtctgtccgctagccacgatgtccacccgtatcgtggatgaaataccccgcagagaagcaaaccgaccaaatagccagaaagtgaccacggccggtctcaatcctccacctaacattggcagggaatcctgccaataaaacacaagccagtggccccaaaattccccccaacacacattgggaggttggagcgaaagggaaaacaaacccagggtttttggccaacacgccccagggtgtggccccaggagggagttccggggtcccaccacatattgtacacagagcgggtaaggggggccccagcgcccgcaccctcacatccccccccgccccccccgggaaacacccccccccccccgcaggagagggggg

SEQ ID NO: 210423 - DNA, 883 bp, Homo Sapiens; identical to SEQ ID NO: 41156

SEQ ID NO: 210424 - DNA, 1000 bp, Homo Sapiens
ggaacagacagcctggtgtgccccttgcactggggctggctgggttggaaagtgggctggacttcagctgcctttctacccccaatggcagctgcccccttagcactcactgtgttggggagagggtgacgattgcaatggctggggctggggctggggctgggggtgggattgaaggaaaccctctcctctccccttcccttctctctcctgtccatgggaagcttttccccctctgcagggctccctcagctggaccatcgtccctgcttctcttatgatcgccccacctcatttccatttcagtctggggaccccatttctccctcctttccaacttccttcctttcttgtcctgtttcccttcctgcccttgcagtcctgaggtcctgcagccccggcccctcctccgtgacctggtgtggccaggctgcggggacgggaggggacgtgggggccccgggtgtacatatataatgtatattttttcaatgttgtcgtgagtgcagcccatgttcctgcgtgcagctcacggccttgtgtgtatgtgtgtgtgtgtgtgtgtgaagcatcgtcatgtcctggggcaggggcgggggggtgggtgtggttaaaggaagggacatatcctagggttttccaataaaaccatccgaagcggcaaaacggcccccctccagggatctatgttcggggggcggggaaaaaaaggaataaaatggcccccgggccctaacctggtttccggaaccagcttttccttgaaaaaaggggataaaattggcccggccttcccataaagggacggccaatttatttttcaaataaaccccggcttaacccgggcctctaactgaatcccggctttcacaaaccccgcggcaattttaaacccccccctaatgagaccgccctcttttttttctgtggaaccccaagaagatactcccttagaaaacacctgtttatttacgcgagagagataccccgtctcccgtgt

SEQ ID NO: 210425 - DNA, 500 bp, Homo Sapiens; identical to SEQ ID NO: 50716
  misc_feature (472)..(472): n is a, c, g, or t
  misc_feature (475)..(478): n is a, c, g, or t

SEQ ID NO: 210426 - DNA, 529 bp, Homo Sapiens; identical to SEQ ID NO: 48654

SEQ ID NO: 210427 - DNA, 580 bp, Homo Sapiens
tttttttttttttttgaacttaacagatactttattgctcacctttcacacaaagcacacctccagccattttctttcacagcttgacaatgtttacatgtacaaaaacccagcaagaagcatcatgtcatgtagatttcagtaagggagaatgtaaaacatcaactcagccaggcttttgttttctgcagcaataataaagggcctcctgcacttagcaaaaatctgtcttaactttgtagtgcatttcttccattacaaaaaaagttacctgcttaaagcaaactaacttgtatttgctgagccagtggtattaactcatgcataaaacaaatttcggtttgctatttcttctagcaaatttcaagtaaaaataaggttgaaggaggaatttgttttggatggatgcaggtcagtttgaattgctatacttaactaaatgcctacatgtactatagcttcacaacttagtttgcttttataatctttatggattttggccgtgttcaaggttttcagagttgagcatatgatacagtattccatcaacaaaataaggctactgaatgtgctatctgca

SEQ ID NO: 210428 - DNA, 562 bp, Homo Sapiens
tttcagttatttaatattttattatctatctcttttacataactacttgcaaaaaaaactaatatgacaaagccaatgtattatatggttataaacagaaacatatctgtaaacattagtattataagcagtgtaatattaaaggtggttatctatttgaaaactcagaaggcagtgacttctacaattaaatttcaaaaaatcaaaacataaaacattattagcttcagttactataaataaagcatccgaatcttaattttagagctaatggtaacttttaaataattcctaaatttcatgtaatctgttaagatatattttgttaacatttagaaaagacaagagaataagagaatcaaaaccaacgaattaaaggagctttataatttagcaaaactttcaacttacatgtctctcaaacattactggcaaacacaatgactgcttatgagaaaatctgcatatgtcattctacaaacagtaatgtcattaatattctatttttagtttccaagggaagatcctaaacataacaaatccttccgttagcatttcttcg

SEQ ID NO: 210429 - DNA, 596 bp, Homo Sapiens
ttttgatagagatggggtatcactgtgttgaccaggctgatctaaaactcctggccttgagtaatcattgtgcctcaaccttctaaagtactgagattataggcatgagccactgtgcctggtcatactgttttctgcaatagaacttacctcctctctctcatgcttctgtagcaccaagtatcagaaaacataatctagtcatttctagataagcttacatcattctgattttcctcagtaatttctgcatatgctcatcttaagaattcatgacttctcatccttctcttccctaaggtgagggttacgtggtgagggaagttcacacagcagccgcatggtatcggtgagaggcattggacctgtagcactctgatttggcacctgtcaagtctctagtcacagcatttgtgtgatcgggttttcagtgaactatctgtagtcttagtagactctaatcatgtattccatactaccattcctggcttcttctcaacattactgtgaggtcctttaaagcactggtcttgcatccagctcccttgttctgcccaaaagtgcatgaagtctcaactgccttcctgggcccatag

SEQ ID NO: 210430 - DNA, 608 bp, Homo Sapiens
ttaagaattgatgagtaagtttattgaagagctataggttaaaaccaacattaggtatatgtaaccaatactctaaatatgggataccttcagaaagcatctttctgtctccctctattcctatatatttggtggatgaatttttcactgtttaggataaaaacaacaggtcatatcaggactcttgaacattctcaggcaatagaatgccccacagtcacttgaaattgtttttggtgcatctaatcccatgtcataatcaaaacttaagacttggtttaaagttaagttgtatcttttccccgactgagaagccatgtgggggtgggaaggtgaggaaggggagcgtcttctccttgttcctggcagcttctgatccttgtagggttgcctgttttcataaggcttgagtacttccttggcttcatcacaaagggggcatgggtcctttgtgaataaggtcaacacaggcagagttgtcttagaggcagagcaatttctcaagaagagtccaaaggaggatctggcaagttgcatgctatttccttgaaaccagagcatcttaattctgatccagatgatttctccccttcgaaataattgcaaac

SEQ ID NO: 210431 - DNA, 571 bp, Homo Sapiens
atgtatgtaatggagacagatagtagtcacagttttaattataatggcaagtcatgggaggcaagccaatgtttaccaataaaacattagttaataaattatgatacaaccaagtagttactaaaagctaagtttccaaagaatatttaaaagtactttttaaatgttcacagtacataggagaaaaaagggttaaagaaagaactgcatacatattctgatctcataggtgggatcaacccaaagaagcctggaaaaacatataccaaaatgttgaaattgattatttctgggagtagataacaggtgattttctgcttttcttttacttttgttttctctgagatcttttttttgcatgtaatgcttttatacttgcggagagaaccataaatggtatttttttgggggggggcgggcgaccacagaagatagaaaaatctagttatgctttttcattcttcccatttttagactactaacaatcaagatacttaaatctatgtgtgaaaaaaaaaagaaaatgtctggggagattctttagtaataaaaatatttatcaaatctaaaa

SEQ ID NO: 210432 - DNA, 582 bp, Homo Sapiens; identical to SEQ ID NO: 42383

SEQ ID NO: 210433 - DNA, 601 bp, Homo Sapiens
tggtattttacataagatgtttatttctctctcacataaaggaggtcgggtgatattccgtttgttaggatggctctgtgatcatcagagatccagactcttcctatcttattgtgccgctcaaacattgccgctacttcatggtgccgtatggctgccagagctcccagccatcatatcggcggcattgcagcccgctaaagtaaggaagtgggggagaagggcatgctgccccgacacccgaaagtcacatcccatgtcacccaggacatgtctctgtataccctattgggcagaattaatcatatagctgcacccagcctctagggtggatggaaaatgtagtctttagtttgggtggacatgtgcaaagcttaaaatcaggggtcttgctaccgaggacgacgaccaaagaatggagtataactagctgtccttgccacagcctgcagcgtgagcagaaggttccagatgctgtatgattcccatgggtccctctggatagcatccttgctgtggggagtgggactctggctcccggtcaggtccctgtctccagctttgggacttgaagtcttccttagagctgtggtggcagcag

SEQ ID NO: 210434 - DNA, 438 bp, Homo Sapiens
  misc_feature (217)..(218): n is a, c, g, or t
  misc_feature (311)..(311): n is a, c, g, or t
tcgaccccacgtccgccaacttcctgatctggcccccgtgcgtggaggtgaaacgctgcaccggctgctgcaacacgagcagtgtcaagtgccagccctcccgcgtccaccaccgcagcgtcaaggtggccaaggtggaatacgtcaggaagaagccaaaattaaaagaagtccaggtgaggttagaggagcatttttggagtgcgccctgcggacnncacaagcctgaaatccggatttattccggaaagaggacacgggaaggcctagggagtcaggtaaaaaacggaaagaaaaggttaaaccacctnagcagcaaccagatgtgaggtgaggatgagcgcagcctttcctgggacatggatgtacatggcgtgttacattcctgaacctactatgtacggtgctttattgccagtgtgcggtctttgttctcct

SEQ ID NO: 210435 - DNA, 420 bp, Homo Sapiens
aggaaagagacacaaacgtatttaacacagatttgctggatggaagctgcgtgtgtgaacgtgtgtatgagtgagtgcattttgattttttttttttttttttttgcacagttaagagaaaaaatcaaacaagcagaaaaaaaaaagaaaaaagacttatcacggttctgctgaagcttttattttttactggatgattattgttattgttactttggcggtacaggactttattttattcatgtttttgttataagaaaaatttcaaacacctcagagaaatagaaaggttaggaagaaagaggagacaaggacagacaaattttctggctgtccccatttctcctgggggaggggtttggggctggtttgactttaattggtgggtgggttgtttctgccgctctgtttgctgcagtc

SEQ ID NO: 210436 - DNA, 450 bp, Homo Sapiens; identical to SEQ ID NO: 50695

SEQ ID NO: 210437 - DNA, 438 bp, Homo Sapiens
gttttaaagaaacaaatttaattgatttccaaggcttgagtgtgattaaaaaaaaaaaaattaaaaggtaaacttcactgtgcaggaagaagcataggaaaagagagagagaaaagaacaaagaaaaaaaagaatagcaagtctctccaagtactatggaaacaaacagaaagtggaattaggaaaaaagagaggaagaaggtctgagtagtccaagggacacgggaggccagttgggaagaccgcccgggcgagaccaggaagatcaaggccacagtgaatcacgatcccatccctctgctcaacctgaattgtactgctgctggcgagagagatctggtcgaccttagacatggcaaggcgagaggtgaggtccatcaggtcgaccttagtccaacgctcacagccgacatctctctcaaaataaataaacaaatc

SEQ ID NO: 210438 - DNA, 416 bp, Homo Sapiens
tttttctgcttagcaaatttttattttttatttttattgttcacatcaggcaggtaatgtgccaatgacaaggctcaagggaggcacatctcacatgtggacgcgaaaactcaatcatcaagcttatgaaccacaaaaggatctagaaaagttttaaacatatgacacaattctgtgtccatgcttgtgtgcaaataggtcacactgttgtataactttttgacttaaaatcatctaacagtggaaatgctttccaacattctttttcaaaacactctctcaacttcatgaacataatgaagagaacaacatacactggggcctatttgagggtggagggtgggaggagagagaggaggagaaaaagcaactattgggtactaggcttagtacctgggtgaggaaattatctgtac

SEQ ID NO: 210439 - DNA, 505 bp, Homo Sapiens
tttgttattcaaaaagttttaagttattattaaagaatttggaaacttaccaaaattttgagaagttaaaggtctaaagggggaacatcaggttgttgttaccatttgtcaaactatttcttctgatacagcaacatggtcatgagatcacagttatcgtaacatgataacaaaccaatataacggtcatcaggtgaaaattcataaaagattacccgaaaaggactaactttccccatcattagggctggatatagtctctagccataagcaaacattttgctctccctagtctcttgcattggtcccagcaaaagaccacaatgaggggccactctgcagatggctttaagctgagcctcctcactcactaggaatttcacacaagaacttcagacgagcctgatgtcatgttttatgatcacatcagtcttgctaccgctgactcgggcactgtgttaatagacctaccggtgctgtaattttttatgcatacttttagaac

SEQ ID NO: 210440 - DNA, 570 bp, Homo Sapiens
aaaaaaagaaagaaaaaaaaaaaaacaaaaaacaacatacccatctaacaaacctgcacatgtattccctgaatctaaaagttaaaattagaaagcagcagatcccggtacaagaacacatggaacaagtggagtgaatgtatgctgtttgcttaacattcagtgatattgcaatcttcccatttcctagaagagaagaaacatgcatgcaggcagtcctcactttataaaagtctttggtaactaaatttggtgttggttacccctgagtcatgcatatcaagaacatgattttatctcagttaccacagtgagaactaccctgcttctggttatacagacacgatcctgaatacagataatattgattcccttagctccctccacaaatgttctagggcagtgaactttacttacaataccatctaaaaattgttgatccttgttgatgagtgactcatacatataatcccaactgcttaggaggctgagacaggacaatcactggagtccaggagtttgaggtggagtgagctatgattgtaccactgctttccagccagggtgata

SEQ ID NO: 210441 - DNA, 515 bp, Homo Sapiens
  misc_feature (347)..(347): n is a, c, g, or t
ttttgtatgaaatattagttttaataaaacagaaccagtccatgtatggaggcatgggcataaggtcaacttgcactaaatgtaactcgtacgttttttctaaaataatttcttgagcattgtggtggccttatgtactaacccgaagctgaacttcctgggaagctgatccaatggagcacttggaattcaggggtggagtcttcttcctgggtcagagctggttcagggtcacatgctcttgaggtccctaaaggccacatgtgctgcatttcgcccagcagctcccatcacacctcctccaggatgagccccacttccacagagatacaggccctggagagggnagcggtagcacgaatgcaggggcacggggcgggcgaagtagagctggtccagggacatggcgcagtggaatatgttccctccaggaagcccgaagattctctccaaatctggtggtgtgaggatgtctctgccaaccacagagtccttgaacacagccttcactgttc

SEQ ID NO: 210442 - DNA, 533 bp, Homo Sapiens
tttttttttttaggcaaagtgttctttattatcaataaacacaaaccattaaagaaaacattgataaattcgactttataaaaattaaaagtttttgctcaacagtattaagagaacaaatataagctgcagtttgggagaaaaacagtggaaatcaccaatatgacaaagggcatgtgtgatagttacttgtacttgtcactgtgaccgagcaccagggtccacggacatttggccaaacatgattctggttgtgttccagagagtctttcagatacgattaacattgggatgggcagactaagtgaagcagattgccctccttaataggggtgggcctcatgcaatcaatcaagggccaggagagaattaagaggcctaatgggaaacaaatgctttcctgggtatccagctttccttccatcttgggaatttcagcctccataatctcagaagcaaattcatgtatatatatatacacacatatacatttcataggtatgtggctaagattgtatttttacaagttcagc

SEQ ID NO: 210443 - DNA, 495 bp, Homo Sapiens; identical to SEQ ID NO: 62051

SEQ ID NO: 210444 - DNA, 580 bp, Homo Sapiens
ctgtcattccctcttctcttttctccagaagagtgccctcccggccaagctctgccaatgaatccactggcaggactggttccacctttgcttctcgccttggcccatgggccatgcatttccaccccactcactcatcatgattaatcagcatccttgcaggccctggatgagatgggcctttcagtggcgagggaaagcttccatctcaccctttctcttccccattaaacatcagatccgagaagaactgaggctgggggccacttccagtgcttgctctgaatccagggtgcatccattttcagttgtcttcaatgagaatctagaaatcattccttcatgaagttctgccccttagggcaggcagctattaaattttggaaaagcattccaatttaaagctgtagctcctctcaaagctatgtaaaatcaaagaccctggtttctcccttagtgactagaaaggaatatcacaagatagatcacagagattttaactgaagaacagatgagtaactgcaagttccccacctccaagattctcaactattaagacagaggaggatgacatggggca

SEQ ID NO: 210445 - DNA, 548 bp, Homo Sapiens
gagatggagtctcgctctgtcccccaggctggagtgcagtggcgccaatctcggctcactgcaaactctgcctcccaggttcacgccattctcctgcctcagcctcctgagtagctgggactgcaggcgcccgccaccacgcccggctaattttttgtatttttaatagagatgggggttcaccgtcttagtaaggatggtctcgatctcctgacctaatgatctgcccgcctcggcctcccaaagtgctgggattacaggcgtgagccaccacgcccggccaatttttattttatcttatttaaataaccacatgtggctagtggctaatgtattgaacactacagctgtagacaatatgaaataaatataaagcagtctcaactttggaaaaacagaagactcttactgcctcataatatagacgaaaaatgaaatactaagttaagtaaaatgttctttaaagaacaaaaacaaaagaaaacctaatgaaagctataaaagtccattggataataatgctaccagtactaaggaagtacagcccc

SEQ ID NO: 210446 - DNA, 446 bp, Homo Sapiens; identical to SEQ ID NO: 58292

SEQ ID NO: 210447 - DNA, 605 bp, Homo Sapiens
tttttttttttaaaactcttgcaagcacttttaattgattaggaatgaactctagatgcacaaaatgattggaccgtgaacagtaatacaactatatctaagaacaattaacttttgctggccaaaaaagaaacgtatgattgcatgaaaatgtgtataaaacatctatattcttgtcaaatataaatgaaattaactttattatagaaatcattctgaggatttctagggaagacaaatacttacattttgacataaaacaaattggattatatcgaagacacactctaccttttagctatcaactttttttcttccttgaatttatatcttacccttttttgcacataaacttcatctgttaacaacctttggaaaaccaacagatatttctgacataaatctagtgcatgttgttccaggtttaattatatgcaaaggaatgatacaaacttggaacatcagtccataaactatgaacagatgggtagaagtattcgatatatcttgataaaactcttaaattcgtggcaaagcttgttgatcatggttttctttttaaaaaaaaaaaaaccacttcatggacaacacagatcaaacatcca

SEQ ID NO: 210448 - DNA, 561 bp, Homo Sapiens
  misc_feature (375)..(375): n is a, c, g, or t
tttgccagaacagagactcaagccaggtttaatgatcattgtctagttttcagagcccagaggctccaagatttgccagcctaggtgtacacaagtgggaggaatggggtcttggacacgggaggcctgcttgctttgtcagcagagctacgaggaagtacagaggtaagaacacacagaaaactggatccatctgctttgctctccccagctggggtgtaccctctcctggcccctttcttgggccccataaatacaaaataataataataataataattacacagattgtagagccctgtcatcctctgtctccagggacacctgcttcctgggagacatgtctggtttatgggtgtggggtagggtaagagngaggtggtgatctctcggccttttcttatacccacacctggcagttttcaacacagggttctagtgcgcttacatatgctgattattcaattctccaattaaaaagctacctttgggttctatcacctgaaaccacgggaagaaacaaatcaaatctcttggtagggcagccaggtacatctacca

SEQ ID NO: 210449 - DNA, 479 bp, Homo Sapiens; identical to SEQ ID NO: 54891

SEQ ID NO: 210450 - DNA, 414 bp, Homo Sapiens
ttttttcggatttttttttttaacttgggttctaattaggtacacaaacctctgcagtgcaaggcttgaaaaacaggccatcccaccaatcagcaggcctccccgggaaactcgctccgcccctcagccgcattgggccgaggcgcgctcccccgcggcccgccgggtcccagccactgagcatgcccagcgcctcgactgctgagtgcccagccagcatcctgcagtgcctgggagcctgaggccgaggagggtcccggcgtagtaaaggggcggcaaccccaaacgggccaggcatcaaaatgagacagcattaaaccgagtgacatctctgtgggtccttagtgccaggcgagcaagcagggacaaactgcttgtttataggtcggcttaaaaaataaaaaaactctgggg

SEQ ID NO: 210451 - DNA, 507 bp, Homo Sapiens
tactgtttatttcacattatctttttcacagatgtatgagattctcaaagatctgtgccaagggaacataacttcaactgtattaataccccacctagccatgggcccactaaacaatctccattaatctctacagtccattgttggaagcttattccaattctctaccagtagccacaggtcttgtatgtttctcccaggctgcttatctctaatcataatggcctaatacagggatatcctcttttccaaactttcctaacaccaaagtgttctaccaccagcaaccccacgatgcagatacagccactgttgttcaagcctgaaagggaccaatgcaaaggttaagtatttccattttctacccagaagagattatgtaaacacggtctttaaatgtatatagattataatggagtttatgttgaaacagctgttaacacatgtaaggtgatgaaaaaaatacaaatgaaactcaaattaggttggaggctgggcacagtggcc

SEQ ID NO: 210452 - DNA, 582 bp, Homo Sapiens
atgtttgtggaaggtaggtcttatttatatttctgcattccatccagtttcctacattccagcagccctctgtcccccaatataatgaactgactaaaatcaagagagcaccccaaagttatttgtaaatagctgtgatggaaaaaaaaaagacattttaaacttgaagctaaaatgtgaacaattatttttgggattcatacttcttttgctatgcacaaaaacattcacgttttaacacaaagaaataataagtgttagcatcgtgtgtcttgaagtatacttttgcactgtaacttgggtaacgttaaagagagcttagcaccaaaggtagataatgaagaaatggcataggaaagtggagatgataaaaagttgattgttgaaccaaaaagggtttgaagggaagcttcgactgagtatcagaaattacttaaggcacataggacctgaatcaggaaaccagcacttcttacaactgccagttttaaaagaggaaatgattctgagatgtgctcattttattttaatttggtggttggaggtatccaagtagcctgtaaaatcctgcaagatacacag

SEQ ID NO: 210453 - DNA, 1000 bp, Homo Sapiens
acgggagccacacagtcccagcagagatggggtgaacgagagggatggggacttccccggagcagaagccagggtcacccaggagggatgacagagctgccaagagctctcctggcccagggagcagccggcaccatgaaccgagcacctccctggttccaagccctgggccaggctggaacatgtggggccagaacccaggaggatcctgaggagacagaaaacagcaaagaaaatcacacgcaatggtgaaaggtgctctccctgacccacggagacccatggtaggacccacaggagggtggcaggatggagggcccatgagcctccccaggcaacacagcaccaaatgctgggagaattaggggtcctggaaactgtcatccaggtctgctgggaacatgacatggcacagccacattggcagccagttgggcagtggctcacaaagctcagtggacttgaaccacacatccccatggtgtcacagatattgaacccactgatttgaaaactgacatccacatgaaacctgcatgccaggttcactgcttgattcctcatcactcacacatggagccttcggggatggccttcaacacgggaatggggagagacaggctggtcctcccttcaaacggaagacccagtgagaaaagggaacgagccagtgatgcctgcacgaacgtgggtggatcctagatgcattttgctaagggaaagaagccagacccaataagctaccatagtaggattcccattcctaggccattctggaaaaggccaaaccatagggactgagcagcagtctgggtggccaggggctgacggatcggggagaggctgggtgcataggggaaaccctggagatttggaagatgatggagtcgctccaggaggggctggagcggtggccgggagactgcacattggtttggaaccatggaggaactgtgcacccaaagactgaactggtgtgtgtgcaaaaaaaaaaaaaaaa

SEQ ID NO: 210454 - DNA, 1000 bp, Homo Sapiens
tgcttttaactttatcaacataattagtcattgagaacttttctctgtatttttatttgatatgtactgcgagtaaacaaagtcctatattctgaaaggggacacgtaagggagagttgaagaaaatgataaatattgaagaatgtaattaacatgttgagagtttgcattcctgttgtatcagattggagctattttatagaattggatctaaatgaagtatacattttatggatgctaaaaatactctttagcaatgtttctattcagaatgcatcatcattagagaaaagctattaaggttgcagtgtgaatcaccagttggaaaaagagaaaacatatttcatttccagtccggaagcaatccatgcatgcaggcagtattcattttaacagtctggatcagttttttaccatgaacttctgctattagaaaaaatgcctttgtctaatctagctttccttagatgtgatgcaaactcagaactatatgccccggtcaatgttagagaccctaaaaccccagctcatttggcatctgttcattcatattccagctgaatctcagaaatgtgcttaagggaaagcatctgatattagcagtttctcagccaagtcacaggacgggacatcccagagtcatggcctgctgcacttttaaaagggaaattcaggaatcaaaaaaaaaacaaacagagaatggaatttatggaaagtatggaatgaaaagctgacattccctgggacttgaaatgttaactctggatttccttaatagctataaactgtgcctttcctactgtggcaattgttgtgagctagaacatgtttatacctttttatgtataaatattttatctgagactcctgctactattgccacccgatgcatcttccaaaaggtaaagcttccatctttgcatcaccttctcagaaatctgaattggtcccattgctttcagaatgaagttaagttcatatgccaaaaaaaaaaaaaaaa

SEQ ID NO: 210455 - DNA, 455 bp, Homo Sapiens
cctcctgagtggctgggattacaggtgccagacatcacgcctggctagtttttgtgcttttagtggagacggggtttcgccatgttggccaggctggtctcgatctcctgacctcaagtaattcgcccaccttggccgcctaaagtgctggggttaaaggcatgagctactgcacccggccaggagtcagacacttatgatttcatacttccaaccaatgcttacctccattatattattgagcagattatggttaaaatgtttgcatgtttgtcttccctcaaagactgtgaactacttgtggggaggaatgatcttttgtatctgtattcacggcacctagcatggtgtctcactcatagtagattcttggtaaatgtttgttaaatggatgtgaggttaagtggatgtgtatacagcatacagaggtggtggcactgatgggagcaagagcg

SEQ ID NO: 210456 - DNA, 522 bp, Homo Sapiens; identical to SEQ ID NO: 40524

SEQ ID NO: 210457 - DNA, 556 bp, Homo Sapiens
gcctactactactactactactactaaattcgcggccgctcgacttttttttttttttttttccagagatactaaaactttaattcaagtgatcatgaagtattaaagacttttcccactttatataaattggtaaaatactatgtggcatgaactcccattcttctcatgaatgacaatttttttaaaataaaaattccctctaataatgtagataaatacaacccaggaacactaagcatagtaaaatgtgatgctttatacaagattagcttatctgccaaaatgccaaacctaagtggaaatctaaggaacatacctggctgctggcaatgctttcagagatcatttttgtctacatctgtggtagttttctctgaaaaactgtaatccacaatattctgagcctgtacactaacccattccaagggtggcacagttagggactcctgtaagtgttctgccttggctagacagacttcacctacagcagtctcttgaaaacttggttgcccatctgaattattctgtatttggggagaaaatattagtcatt

SEQ ID NO: 210458 - DNA, 410 bp, Homo Sapiens
tttttttaaagttcaaacctagagaagagttaaaagagcagtacaggaagtatccttatccccttcatgtagattttccggctgttaatgtttgccacattgactgtaccttctttctctcaccctcttttttttttagaaccatttgaaggtaagttgcagacatcatgacactttagcaagcatttcttaagaataagaatgttcttctttataatcacaataccattatcatatctaggaaaattaacactaattcaataatattatttaatatacagtctgtatttcaacttccctaattgttcttaaaatgtctttcataacttttgctttttgattcagtatctaatttaatctagtgtgtgaaggttcatacattgtatttggttattttattttttaatgac

SEQ ID NO: 210459 - DNA, 674 bp, Homo Sapiens
  misc_feature (638)..(638): n is a, c, g, or t
ggattcggcaggcacgagtggaatgggtacattgatgatctgcttgtcagtcccgacacgacggagagctggctcacactatagagaaaatatgcatgaacaaattcgtatcagtcacagtgagaggtaacactctaaatagcccatttcatgctcaagacatccaagtcaaagaaacccaatagcacagctgagtcccctctgttcccccccaacaccccactcacatcagggcccctgccctggagtgtcacctttattagctgtgagagacaccccagagccctgggcactgtcagtgattggggtagaacaaaaataggacctggtcagagcccacagatgtggctagaggaactgtggggtgggtgagctccctcataggctcctgaccacaatatcccaacaatctcagggatcagcctccttcatcttacctgcagcctgagagtagctccctctgtttctatctatgggaagaaaatgtcctgtgagaggccagaaaggaggcagggccataaggtcctagagcaaacccctagtctttgatcccagagaagtttccagaaaagtgtaactgtagatccagggcaggatcaagaaatatgaagaaagcagatgtgggtcctggaacaaantggcctcctgaagtctgtcatcagcagggaacttcc

SEQ ID NO: 210460 - DNA, 421 bp, Homo Sapiens
ctcggtatcacggtttctcaaggactgaagcagcgtggttaagcattcttgtccacagtacttgcggacttctggttagaatcagttcttgtacatcctagctctgactctcccgaaaggttgaaatggtgtttgtaacccaaaggagaagtcggtgtttactagtctatttgagagacaaatgcatttcaaagggtctctgtctacactgctcagccttggccctcatatgatcacagaggttgggcttctctttccctctcctctgttctccttcccgtccagtggtgaccagttacaataactcgctgatggggagaacataccaatagtctctatttttccctctattttcccctgcctctgagaatatcacacaatgctgcttccaggggcttagagacctgaagaatatgtgtat

SEQ ID NO: 210461 - DNA, 1000 bp, Homo Sapiens
gctgctatgaacatggctggacaaatatctgtttgagaccccgctttcagttcatgtgggtctattcctagaaagatccatgcttttgttttctttttcatgcattagctgtttcttgaggtcttgttctgcatctggtgccatctgtcctggcctcaggccgggccctttgcagacccagtgtgtgtagggggttgcgcagggtgaggctttgccccaggctggggtagagttggtcatgggtgggctgctcagtctctgctctgacctggcaggacatgctgaagaacacccccaggggccatccggacaggctgtcgctgcagctggccctcacagagctggagacgctggctgagaagctgaacgagcagaagcggctggctgaccaggtggctgagatccagcagctgaccaagagcgtcagtgaccgcagcagcctcaacaaggtgagctgggcctcccacctgcctgccctcacctgcctgccctcacctgtgctcctgcccgtgcccctgccccacgccacccacactaggtggcagtgttctctgagggaggggaggccttgctcttccaaggatgtgaccttggggattggatcctcagcgggacccccacgttcattcctgttcatgttattttaagataaaagttcattttgtgcatcagtgtgatttccagtaaagtctccagaaatcaaagcctagttaaatgaacaggctctggagagtcagaatctgggtttagatccagattttgccataggtgcttgctgtgtgccctcaagggaatcacccaccctctctgaacctcacttgctccctttgaaatgaggagcatttaatagcaccggagccctagggctgctgccgcaaaagagggagctggcaaagtggcttcgtgattgtccttaacacaagaagaaagatgaaaagtccatgccatgttttggggttgccgcttaggaacatgctattaaaaaaaaaaaaaaaaaaaa

SEQ ID NO: 210462 - DNA, 233 bp, Homo Sapiens
tctctacacactggaggctgggaagtccaaggtcatggcactagtatctgatgaggggcttcttgctgcatcataacatggtgaaaggcaaagaggatgagagaaagacaaaaaggggccagactcattctttttttttttttttttggaaaggaattcccactctgtacccgggtgggaaaaagccagtgtggaaagaggggatacggagcctcaaattgcgaaatcggggc

SEQ ID NO: 210463 - DNA, 346 bp, Homo Sapiens
gagctgtgatggtgagtagtagttacgcggtatgcagggaataatgagcaagaaaaagagtgtctatacatgtgcagtagagacaattttttttctgaatacttttgatctacagttgatcgaatctacagatgcagaacccatggatacagagggccagcagtacactttgagaagtgtattcgaatccccggggacatgtcctttttaactgcattctcctccgccaaaaaagtgaccaagcaggtataagtggagaaacagccaaagctgaagtgtattctttttggtttaattgtacttcagtggatgcaaatgaaattttatctttggaaagtaagaggaa

SEQ ID NO: 210464 - DNA, 431 bp, Homo Sapiens
catcacatggtgaggggactaacgagagacagccacattggcttttattacagacccactcttgtgctaactagccccttctctgaataacccattaatctgagaatggctcaagcacttcctaaaggtctcgcctcttaacacgcctgcattgggcaccaagtatccaacagatgaacttctgggggacacattcaaatcgttgcggggtattaaagcgaagtacaaagaagagagatttgctgtcaggtagtttgcattaaacttggaaataaatatgaattggtaggttacctattaaacaagtgtgttagagtagcctagcagttttcaaagtgtagtctgtggaatcctagagaatagactcctttcatggagtctgtgagatcagaatagtttcataataatactaagtcatcatttgccttctt

SEQ ID NO: 210465 - DNA, 336 bp, Homo Sapiens
  misc_feature (234)..(234): n is a, c, g, or t
agcaggctgtgtagaaggttgacaatatagtttggatgtgtgtccccgcccaaatctcatgtggaattgtcatcctcagaatcggcggtggggcctggcgggaggtgactgaatgatggggacagagttctcatgaatggttgagcaccatcccccgcttgtggctgcggagggagtagcttctcacgagatctggttgtttaaaagtgtgcggctcttcctctcctctctcgngccttctcctggcaagacgcctgctcccccttcgccttccaccatgagcaaaagctccccgaggactccccagaagcagatgctgccatgcttcctgtgcag

SEQ ID NO: 210466 - DNA, 391 bp, Homo Sapiens
ccaccttggcttccaaagtgctgggattacaggcatgaaccaccatgcccagcctctttctttttgttgaactggaaaccttccctaaagttccctcaagcttccctcaagttcctactgagatggatttcccacccttagagaactatctgggggttcaaattccagtctttgacttactggttgggcaggacacttagcttcttcatgtccttacttgtcaaatggggatcctgattttcttcctgctttctctttcctgacccagctttccattgcttctttcccacttctctcatttttccagtgggccttgtggaagttccttgttaacaagctcccttacatcttcccctctttaccgaatgtttctttcacttccccctcctga

SEQ ID NO: 210467 - DNA, 559 bp, Homo Sapiens; identical to SEQ ID NO: 52046

SEQ ID NO: 210468 - DNA, 227 bp, Homo Sapiens; identical to SEQ ID NO: 40589

SEQ ID NO: 210469 - DNA, 447 bp, Homo Sapiens
tttgccttggtaaagaatttatacaccatgtgttcacagcttcttgacaggtataattatcagtgttgtcttttactatgtgctgggattctgaagcacggtttcaaatttgtgactatcggatgtttgatcaagtagctttccctcaagggcctatgacatgtggttttgttgtgtttgttgctgctgctgctgttgctgctgctgaattagcaattgctgctgctgccgacgcctggctgttcgtagcttttcaaagcgagcctccatttcttccagaacttttggggtgtatcgcaccaccagcttgacgctgtctttagcagccttgagtagttccacagctttctcatggtgttctccttccacactcactccgttcactgatagcagctggtctcctcttttgaggcctccgtgtctttcagccaaccctccaggaattat

SEQ ID NO: 210470 - DNA, 662 bp, Homo Sapiens
tcataaatgagagacaggtctactagatccatacagatgcatgtaaaagatagtgcttctgttctgaatcctccaaagccatctgcacagagctagcatggtgactcagtgtcctcaaagagtcatagtcagcaggattggccagcaaatgactggtattttctatccaagcctcagtgctcttcagaaaggtcactatattcctccatcttaactgtggccttattcaactgtgaggttctacactctgctctctgtgatacttgctgatactgctggaaaggaatcatcaagttatccatccattcttgagcctgtcctgggtcctgttcaacaatgtcctgaacttcagaatccagctcatttagttaggaatgccatagatctaactcgtcccacattttctttagaatttcttgagctttctcaatattttcgcttttctgctgcaacatcttttcaacattatgaagcccatagttaatttcttctatttttctcctcattgcatatgatggtgagctttttaagacttcattgcttatcttctcatctatgtcttctaaaagcttactgcattcttcacctggggatcaatctctgcgggacatggggccattcggaaatgaaacgagattccaaattcccaaggtagtccttaa

SEQ ID NO: 210471 - DNA, 1000 bp, Homo Sapiens
agctccagggcagagacaatttgcatttttctcaccacccagggaatgctaactgggcagcccagggtacccgggagctcaggccatccagtgtcctttgagatgttaggaggaagcagaacagccagctgccaaatgaaacacggcaaaatgctcacccttcaagggtctgcttttgttttgtttttgttttttggggcagtctcgctctgtcgcccaggctggagtgcgctggtacaattttggctcactgcagccaccacctattggattcaagcaattctcctacctcagccttccaagtagctgggactgcgggcacgcaccaccacggtcggttaatttttgtttttcgtttttttggtggagacggggtttcgccatgttggccaggctggtctcgaactcctgacctcaagtgatctgcctgcctcagcctcctaaggtgctgggattgcaggcatgagccaccgcgcccggcctccctcaagggtctgaatccagccagtgtcctacgtcatacctgcttcagcctatgcaatggagagagcctgagattttatttcaataagaaaatctactgagttgcattacatcaaactaaaagggagaaacacaaatataaaaaataaaaatccagaaattccaacactaggcaaccctccaaaatgtggcaaagctctgtgtatattaaaaatgtattgagtccgggcacggtggctcacgcctgtagtctctgcactttgggaggttgaggcaggtgatcacttggggttaggagttcggggccagcctggacaacatggtgaaaccccatctctattaagaagaagaaaaaaattagccgggcatggcggcaggagactgtagtcccagctatttgggagattgaacccggaaagcggaggttgcagtgagccaagatcacttcactgcactccagcctgggcgacagagtgagactctgtcgcaaaaaaaaaaaaaaaaaaaaaaaaaaaaa

SEQ ID NO: 210472 - DNA, 573 bp, Homo Sapiens
gaagggaatagaaaatcgactcttgttttgactgtctcttagcttactttccacatgagatgcttgtaccggggagctgtgagcaggcctcacgatggcttgggagcactcgttctcccaaggtctgagtcttcatccagccctgcctgtctgtcgcagccttcctcactctgttcctcggccagttaacaagaagatggtgtgaggtgttctccaccagtctctcctgtttgagactgttgacgttatcatactgaggtgttagatcaaatatctctaattgaagaacatgtgaggttgaaagagcaccagccagggcaacatagcgtgaccctgtctctacaaaaaattaaaaagagaacatacaaagttgacatatgagaccctgttgtccccgcctgcagctttgccccagtaacagatgcccgttgctcttgggctggtttcccctgaacacctccaagaggctgcctgccttgccagcacccgtgtcctgagctcctgcagcccagtggctgctgaagttgtgatccctcactcaccctgctagctttgcccttctgtcgtcttctc

SEQ ID NO: 210473 - DNA, 417 bp, Homo Sapiens
gagtttattaaatatgcatcaatagcagcccacaaataatgggggaagaggtaggcttcttagcctcaagccacattctctctttactaagacacttataactgtgcaatgacccatgatttcctattataataaggaaaatttcttttgtaagaaattctcagtgtttctcaagaatctcaaaacttcagttgagccagttttatttagcaacctgtcacaaccacttaagctttattgcaagtttttcttccttttctcctgatttcagattagaaaatgagactactgccaacgaaatgcccaaggggtgaaatatctcaagaaagcaaagtaagtccaaatgtttgttaggtaaagctgcaggttaattttggcatgctgagaactaccctgtcatacttcacagacacagca

SEQ ID NO: 210474 - DNA, 1000 bp, Homo Sapiens
  misc_feature (847)..(847): n is a, c, g, or t
acccaaaagtagctggaattacaggtgcccacctgccagaaaactcagttttacttaaattatttattttcaacgtgtagctcatgaagatactaactttaaatggcagggagtagattgagaatcatcatggaagacctttttttttttttcttgagatggagtctcactccgtcacccaagctggagtgcaatggcatgatcttggctcactgcattctccacttctgggttcaagtgattctcctacctcagcctcccgagtagctgggattacaggcatgcagcaccacacccagctaatttttttatttttagtagagatggggtttcaccatgttggccaggctggtctaaaactcctgacctcaggtgatccacctgcctcagcctcccaaagtgctgggattacaggtgtgggccaccacacctggcccatcatggaagactttctgatggtgatgtttgaattgggttttggagagtgaattagaatgttttgaactaatacagtaaaggacagtagaaagaaggaacaacatggacagagaccttaaggcatgaaatgtcattctgtattcagttagacgtttagtcttgatagaaggattttttccttagaacagattacacctatatgataagattttattttgtttttatttaataatagttcagttaaaatataagcccaaaattgctccataaaatttggcagcagttatgctattgacagcatataaaaagcactcaatcgagctaggtgcagtggctcatggctgtaattccagcactttgggaggccccagcaaaaggatcacttgattcaaggaatttgagaccagtntgggcaacatggcaagactctatctgtatgaaaaaaaaaattttttaattagctgggaatagtgatgtgtgcccttgcagtgagctgtgatttgctctactgcactccaccttgagtagcagagtgaaactgtctttgaaaaaaaaaaaaaaa

SEQ ID NO: 210475 - DNA, 561 bp, Homo Sapiens; identical to SEQ ID NO: 57751

SEQ ID NO: 210476 - DNA, 1000 bp, Homo Sapiens
gacgtactatatacctatagtatctctataagtacacaagttcccccattaatcatctgttttcagttgttaaccaaataaggtattatgcaggctcatctttttatataagaagaaaagactgaatgctccctatgacttcattttctccctgttcccactaccatgtccccaaacatactgacacacaaagaaaatataaatacccctgattcttttagccttaaacttagggcctcatcctaaacatcttaagctcagcatctattccaaaggaactctttaatgataacgtttctttgtaaagagacgaatatcatctggggtttcctctgaaatgtagatgaacctcacttcagttctttgtgtactaaaaagacccacccttctcacccatgtggcttttgtctttccttgtgttatgtaataagtgatggggtagaaggatggggggtggaggaagctacatcatggagagaggaggtagaagacagctgtggaaaatttggatggtggaagactagaatctactaccatttacatgctaatgaaaaccagaaatggtcttttttcccccgtttgatctgatttgaaagtttgtgacttttgtctagtatgtcattttaccccctgtgtttttctcattgttgttagctataaaaactctttgaaattctcaaaataaaggaaggtttctttcaggaataggagggctgaggtcaagctgtgaaactgcattcttcatagtgggtctattggggtggaaaacccgcctttgaagtaatagaaggtagaagcccggaaggaaacaggtctggccctggatccaggaaaataaagaaagaaataattggagatgtagcttagtacttagaattatcccagaagtgaacaacatcagtaaggtctgggcttccccctaacgtaacctcttatgagggtttcaacctcacatccatatatcttttaaaaaaaaaaaaaaaaaaaaaaaaaaaaaaaa

SEQ ID NO: 210477 - DNA, 1000 bp, Homo Sapiens
ctgggtcgccatcctacatggccactctcctgccgatgctgcccgctactcagcaggaggggaagtcgagaccacctccttaaccttacagacattgattgtgagcttggagcaccttccgtgactggaccacccatgcagtggtcctttgctttttgcatttttaactgcaattttccccaagagtcttccctaatacagtctcttaggaattgacggtgggattaaacaaggcatgtttctgcactgaatatggtctatgggttgccactttgcaacctcagctttaaggcttatttcctcccaggaaactgatgttaactttttaagttaaaaatgtgtatataagtaatacatgtttattttggaaattagaaaatacaggccaggtgtggtggctcatgcctgtaatcccagcattttgggaggttgaggcgggaggattgcctgggcccgggagtttgagaccagcctgggcaacatagggaaattccatctctacaaaaaaattaaacattggctgggtgtggtggtgcccacctgtggtcacagctactcgggagactgaggtgggaggatagcttgggcaggggaggttgaggctacagtgagccacgatcacaccaatgtgacacagtgagaccctgtctcaaaaaaaaaaaaaaagaaagaaaatataggtaaacacaaagacaaaaaagcagggcatggtggctcacacctgtaattctagcaccttgggaggctgaggcaggaggatcacttgaggtcaggaactcgagacgagaccaggctgggcagcatggcaggaccccatctctataaaaagtacaaaaattagcagggcacggtggtgtgcacctgtggtcctgctacttgggaagttgaggtgggaggatcacctgagccctggaggttgagggtgctgtgagccatgatggcaccactccactccagtccaggtgaaagagccagatcctgtctcaaaaaaaaaaaaaaa

SEQ ID NO: 210478 - DNA, 1000 bp, Homo Sapiens
  misc_feature (594)..(594): n is a, c, g, or t
  misc_feature (660)..(660): n is a, c, g, or t
gccgcagctctctgaacaagcgtgcacttactccatttcatctttctgtttcttgttggctcctctaccacccggttgataattcaggtttctgcgaccagtaactttggaatggcttatgcttgttttcaataaatggctggttttgaaataactaaaccacgttttattaccaatcccttctcccgatcaacccacataatataccggcgtaccaccttctatccacccatcatcccccacgctatatacaatcaatagggggggggggcccgtttcaaagatgtaatccccctgtgcgggaggggtccccttggctttttaccccctttataccccacgtttttcctttctgaccatccaaaaggtgggagccctcctctctatcccgttacggcgatgtcggcccaaactcctaccgtacctccctctaactgacgcccccacccctgggcgcgactccgcacccattcttacttctcgatacagtatgacatggggccgcccttatttaacacactatgggtggcgggattctcaaatttcctcgccctctttaaatactcctttgtgtgggacaatactcatatatcnttctgcgaggtcaaacaagccgaaaaacgccgcctaataagaattccttctcccttcggcaggacnacgtgtgggcgaaagcaaattttttaatcttctggcgccgatcagcaaaatttatatctctcccctctatcaccggtctactttctttgcttacgatacgtcgttcccatccaccccgtgtatgcatatataaatacgcgcacacttctggctcgtaaagtatcggcgcgacgcgctataatacggccgtgcggatacacacacgacggcacactctgagtgaaccccattatcgctccatgagccgattgcgcatcttgatagcacaaacgcttttcgcgtctacgccgcgtgactgggagtgcgtctccttttttcgcggagaaaatagacactcaca

SEQ ID NO: 210479 - DNA, 905 bp, Homo Sapiens; identical to SEQ ID NO: 40101

SEQ ID NO: 210480 - DNA, 904 bp, Homo Sapiens; identical to SEQ ID NO: 45003
  misc_feature (824)..(904): n is a, c, g, or t

SEQ ID NO: 210481 - DNA, 898 bp, Homo Sapiens
gctaagacccccgaaacaagacattaactagagctcagttggctaaacaaatttttcactcaaaggagagtatagttgcaaccactaaatccaaaaaggacacgtttgttttagaaagcgttgattctgctgatgaacaatttcaaaatactaatgctgagactctcagtactaattgtattcctattaaaaatggcagcctgttaatggtttctgatagtgagaggacaacagaagggacttcgcaacagaaagttaaggaaggaaatggaaaaacagtgcctggagagacaggtcttccaggttccatgaaagatacatgtaaaattgtacttgcaacaccaagacttcatataacaatacctcggaggtcaaaaagaaatatttcaaagctttctcctccaagaatatttcaaactgttacaaatggacttaaaaaaaaatcaggtagttcagctacaggaatggatgattaaaagcatcaataataatactgctatatgtgtagaaggaaaattgatgatatccaaattatctcataaggaaatttatgtttggatttccagaaaattggaaagagcacattgataattttctggaacaattaagagatggggtttcgtcatgttggccagactggtctcgaactcctggctacaagtgatccgcctgtctcagcctcccaaagtgttgggattacaggcatgagccactgtgcctggcctgagggctggtgaaaagaacagggaaaagaccaaacaaaaacggaaaactggaagatctgtccgggacataaggaaatcaatgaaaaatgatgcacgaggaaaacaaacagatactgctcaaagagcccacaccacttaccattttgattggataatttgggaactggagagta

SEQ ID NO: 210482 - DNA, 884 bp, Homo Sapiens
aaagatggagtcagtgccgctgtcataagtgcagagttggctagcttcctagcaaccaagaatttgtctttgtctcagcaactaaaggccatttatgtggagtatggctaccatattactaaagcttcctattttatctgccatgatcaagacaccattaagaaattatttgaaaacctcagaaactacgatggaaaaaataattatccaaaagcttgtggcaaatttgaaatttctgccattagggaccttacaactggctatgatgatagccaacctgataaaaaagctgttcttcccactagtaaaagcagccaaatgatcaccttcacctttgctaatggaggcgtggccaccatgcgcaccagtgggacagagcccaaaatcaagtactatgcagagctgtgtgccccacctgggaacagtgatcctgagcagctgaagaaggaactgaatgaactggtcagtgctattgaagaacattttttccagccacagaagtacaatctgcagccaaaagcagactaaaatagtccagccttgggtatacttgcatttacctacaattaagctgggtttaacttgttaagcaatatttttaagggccaaatgattcaaaacatcacaggtatttatgtgttttacaaagacctacattcctcattgtttcatgtttgacctttaaggtgaaaaaagaaaatggccaaacccaacaaactaacattcctactaaaaagttgagcttggacatattttgaatttttgtaagtgaagatttttaaactgactaacttaaaaaaatagattgtaattgatgtgccttaatttgccataatcataaatgtatgtcctctctggaattgttttaatggggcttgaatatc

SEQ ID NO: 210483 - DNA, 609 bp, Homo Sapiens; identical to SEQ ID NO: 52160

SEQ ID NO: 210484 - DNA, 608 bp, Homo Sapiens
ccagaataagaacatgtttattcagatgtgccagaagtccagggtcacgcggcttcgcatttaggagatgctttacaagctctcccattttcttttcagaacatacactgggggaattcacaaactaaaacaatttctggtgacttccaatctatatattatactttacagcttcaattgaatttttttaaaagttaacttccaagctggcttgcctaacactgtgagtcaaaagtaaccctaaaaaggaaaaacacacagcactgaagggtctctgggtggtaatgccagcgtgggctggggaggtgagactaagcacatggctagcagacctcaggatgggccctggggctcatcatacagaaatatgacaagatgatgaagtcacaacttcagatgtcatcggagctatctgtatatgacacacacattataaacaaataacctggaacatttcacagtgtacgacacctgttctacctgggaatgcaaaccctgagctgcaaataagaacacagacgtgggagacaccacggcctgaagctgctctcctcttccccgctctcctctcctccggtcccgtgatgggttacgctgagccagcaatg

SEQ ID NO: 210485 - DNA, 645 bp, Homo Sapiens; identical to SEQ ID NO: 44596

SEQ ID NO: 210486 - DNA, 545 bp, Homo Sapiens
ccgttaaaacttcaccacatattttcagctaaggtaaatctgcttggtccaaacaaaacaaaacaaaacaaaacaccagactgcaacaataacaggaaaagatcctcttcagtgatttatgttgttctcttactttcataactagtttgaatgcaaggctggtaaagggatacacagagaatcattattttaaataacaaaagccattcaaaactctctctacctgtcaaggatgttttatgctcccattcttatttgtttggcagtaaacataccttgcccacagtcgccagcatcaaacccacaggacaagacattgcatgcttggtcacagaacttatcagcgagccaggaattcgcacatccctgattacagtaagagacactgtttattcctccaccaaactgccagggctgtccaactccaatactcccagtacctccacctcctgcaatatagcgactccctccactgtttcctgtagatcggaggaagaagagggattcttgctgtaattacaattttgaaagacagttctggactg

SEQ ID NO: 210487 - DNA, 606 bp, Homo Sapiens; identical to SEQ ID NO: 53006

SEQ ID NO: 210488 - DNA, 445 bp, Homo Sapiens; identical to SEQ ID NO: 60836

SEQ ID NO: 210489 - DNA, 543 bp, Homo Sapiens; identical to SEQ ID NO: 60424

SEQ ID NO: 210490 - DNA, 884 bp, Homo Sapiens
gctcgccgcccgccgccgccgccgcccgcgccccagccccgggagctctgctgatccggccgagctcagcaccgaggcgccccccaacctgcccagcccccagcccaccagcccagcccagtcccggggagccagctggcctggggttcggtcccggggggaggggagtttcgggggtactgggcggggtactcgtgagccagaggggagggggccgcgggttttcatgtacccagcatgagctcctacttcgtcaaccccctgttctccaaatacaaagccggcgagtccctggaaccggcctattacgactgccggttccctcagagcgtgggcaggagccatgcgctggtgtacgggcccggcggctcggcgcccggcttccagcacgcttcgcaccacgttcaagacttcttccaccacggcacctccggcatctccaactcaggctaccagcagaacccgtgctcgcttagctgccacggagacgcctccaaattctatggctacgaggcgctccccagacagtccctttatggggctcagcaagaggcgagcgtggtgcaatatcccgactgtaaatcctccgccaaaactaacagtagcgaaagacaaggccacttaaatcaaaactcgtctcccagcctcatgtttccatggatgagacccccacgctccgggggaggcgcagtgggacgggccaacttaccgccgggtatcaagaccttgggaactagaaaaaggagtttcccctttaaccctttatttgaaacgcaaaaacggccggatctgaaatcttctcattgccctggggacctgacccgcaaagaacaagtggaagaattctgggttccccaaacgcgaagcgactgcatcgcgccaaa

SEQ ID NO: 210491 - DNA, 736 bp, Homo Sapiens; identical to SEQ ID NO: 40239
  misc_feature (692)..(692): n is a, c, g, or t

SEQ ID NO: 210492 - DNA, 561 bp, Homo Sapiens
  misc_feature (529)..(540): n is a, c, g, or t
  misc_feature (542)..(552): n is a, c, g, or t
gggagttacaccaggcatcctggcccaaagtttcccaaatccaggcggctagaggcccactgcttcccaactaccagctgagggggtccgtcccgagaagggagaagaggccgaagaggaaacatgaacttctatttactcctagcgagcagcattctgtgtgccttgattgtcttctggaaatatcgccgctttcagagaaacactggcgaaatgtcatcaaattcaactgctcttgcactagtgagaccctcttcttctgggttaattaacagcaatacagacaacaatcttgcagtctacgacctctctcgggatattttaaataatttcccacactcaatagccaggcagaagcgaatattggtaaacctcagtatggtggaaaacaagctggttgaactggaacatactctacttagcaagggtttcagaggtgcatcacctcaccggaaatccacctaaaagcgtacaggatgtaatgccagtggtgggaaatcattaaagacactttgagtagatccaaaannnnnnnnnnnnannnnnnnnnnncttgtcggc

SEQ ID NO: 210493 - DNA, 853 bp, Homo Sapiens; identical to SEQ ID NO: 53147

SEQ ID NO: 210494 - DNA, 933 bp, Homo Sapiens; identical to SEQ ID NO: 42202
  misc_feature (21)..(21): n is a, c, g, or t
  misc_feature (654)..(654): n is a, c, g, or t
  misc_feature (898)..(898): n is a, c, g, or t
  misc_feature (915)..(915): n is a, c, g, or t

SEQ ID NO: 210495 - DNA, 652 bp, Homo Sapiens; identical to SEQ ID NO: 54885
  misc_feature (613)..(614): n is a, c, g, or t
  misc_feature (619)..(619): n is a, c, g, or t

SEQ ID NO: 210496 - DNA, 710 bp, Homo Sapiens
  misc_feature (583)..(583): n is a, c, g, or t
tgatactcagcttacagtatcactctccccatttaaccataaactataaaatggggagaatgatactcagcttacagtttatggttaaataaaaatttctaaagatttccctttgtgtccaaggctacatatattttggaattcattctttaatgctaagaacttaaaatacactactctctatgaacactccctggtagtactagtaattctttctatattcttgtatttgtgagtcattaaatctgtacaaaacataatttacaactaaaaaccaaaaatgtctagacacaaaatatttggtcaatacaactctaaaatacatacattcactattattttataaagaaattggatggcctagcatatgatctatatggagttaaggaaccaaatgggtgattctaagatacaaagaatgaaagataaattaattatgtttttaatcttctatcagtgtaatacattgccttaattgtaaagcagcagaatgaatcaatgtaggtgcattcaatttttcttttggaaatggaaattacattttatcattgtcatcctaagagtaatacaagattttgagaanagttttggtaaaaacagaaaaatgttagaaaaaatttaaaaagtaaaaaaaaaaaaaaccttcctcatagcagaaacaagggtaaagaagggagggaaaaggggagaaaggaaaaaaaaaaaaaaag

SEQ ID NO: 210497 - DNA, 843 bp, Homo Sapiens; identical to SEQ ID NO: 48638

SEQ ID NO: 210498 - DNA, 983 bp, Homo Sapiens
  misc_feature (17)..(17): n is a, c, g, or t
aggctgtaccggtcggnatcctaggtatcgtcgagcacgcgatcggagacggagtctcgctctgtcgcccaagccggactgccgactgcagtggcgcaatctcggctcactgcaagctccacttcccgggttcacgccattctcctgcctcagcctcccgagtagctgggactacaggcgcccgccaccgcgcccggctaattttttgtatttttagtagagacggggtttcaccttgttaggcaggatggtctcgatctcctgacctcatgatccacccgcctcggcctcccagagtgctgggattacaggcgtgagccaccgcacctggctaaaaattgttttagagatagggtttacgctatgttgcctgggctggtctccaactcctggactcaagcaaacctccctcctcagcctcctgagaagccactgtgcccaccatgattctatcctagtattttatcttttttcttgttgttgtagaggcattatcaaccgtttaaaccctcaagaccaaattatctttacatttttttaaagagaagatatccatccaaggttttccaacattgcgtatttgtcctccttgccaaaaaagagggtagaataagtaatgtttaattaatactgaattttttaatgtgcaagaatctaactctgcttttttaagcaaggagaaagagtgacaatatggcgccattccaatagtccaacaccgatgaaagtggcaacaagtgccacaatctaaaggaatttcaaataacaacgtgctgggggttataagccccccggggtgacttggatcttcgcggggagctcgaaatttcgttctgcctaaaggaggcgccacaacgggtggcatgggaacccgacggtctgcgaagctctgggtaggggggtaagagggaagaggggtgccgatttatacggcttatacccgccgcggtgggaggcccaagttttttcaggctgtgtgcggg

SEQ ID NO: 210499 - DNA, 852 bp, Homo Sapiens; identical to SEQ ID NO: 52893
  misc_feature (823)..(823): n is a, c, g, or t

SEQ ID NO: 210500 - DNA, 487 bp, Homo Sapiens
  misc_feature (456)..(458): n is a, c, g, or t
  misc_feature (460)..(461): n is a, c, g, or t
  misc_feature (463)..(464): n is a, c, g, or t
  misc_feature (468)..(470): n is a, c, g, or t
gggatgagtcatatggttcatcctgatttaggctgtaagcagattgcatcatggcgcggataccaggagaggaacatctgaggctgcgcaatctctaaggaaaagaggtttatttggctcactgctctgtgggctgtacaagaagcatggcaccagcatctgctcctggtgagaggctcaggctgcttccactcatggcagaagcttgctctggctaacaaccactatcatcaaagttgtctgaggaagacctcctgttgctgtgactgacgggactcttggtggaagccctattcccatgtgcccatggctgcagctccccaaggaagcaggacattgttggattctctaagaagctcagaggaagttacttctcactgtggtgccatatgggatttgaagtcgttctactcatgctctgtttttcaataaagctgcttctgcctctgtaacaannnannannaaannnaaaaaaaaaaaacatgt

SEQ ID NO: 210501 - DNA, 888 bp, Homo Sapiens; identical to SEQ ID NO: 52531

SEQ ID NO: 210502 - DNA, 884 bp, Homo Sapiens; identical to SEQ ID NO: 43107
  misc_feature (814)..(814): n is a, c, g, or t
  misc_feature (825)..(825): n is a, c, g, or t

SEQ ID NO: 210503 - DNA, 906 bp, Homo Sapiens; identical to SEQ ID NO: 40242
  misc_feature (680)..(680): n is a, c, g, or t
  misc_feature (757)..(757): n is a, c, g, or t

SEQ ID NO: 210504 - DNA, 933 bp, Homo Sapiens; identical to SEQ ID NO: 54125

SEQ ID NO: 210505 - DNA, 882 bp, Homo Sapiens
ctttcagagcacaggatggaacaagaactccagccactgactgtctcatgtatctgcaagggccgaggaaattaatgacccaaggaggctatgatatggtccaaaaacttttcctggattttttccgtaggcggctgagccagaggccaactgcagaggaactggaacagaggaacattttgaaacctcggaatgaacaagaggaacaggaggagaagagagagatcaagaggaggctaacccgaaagctcagtcaaaggcccacggtggaagagcttcgggaaagaaagatcctcatccgcttcagtgactacgtggaggtggctgacgctcaggactatgaccgcagggcagataagccgtggacccgcctcaccgctgcagacaaagctgccatccgaaaggagctcaatgaattcaaaagcactgagatggaagttcatgaattgagtagacacttaacaaggtttcaccgaccttaacagtcgaattcctcttgagtgctatgctgtcttcaaaacataaatttataagaaccataagtgctggtatttattcacttccccattacgatgtaaatcttctgaactgccttttttttaaaaagaagaaaaatcaaggaaacacaatcaggattttatgtgtgaaaacgcaaaagtgatgggctcggcggtcccgagctggctggtcccacttctgacaccaaaatgcatccaaacccccggcagtgccaaggggcaccagcagggcccctgactgaagaactgtctggccaaggtggaaacgggtcccttgtccctctccagcccaggccccagcaggcacttaaccccttcatgaaagtctcccagcaaacctctttccttcacaagtgtccctgtc

SEQ ID NO: 210506 - DNA, 842 bp, Homo Sapiens; identical to SEQ ID NO: 55581
  misc_feature (698)..(704): n is a, c, g, or t
  misc_feature (709)..(714): n is a, c, g, or t
  misc_feature (716)..(716): n is a, c, g, or t
  misc_feature (718)..(718): n is a, c, g, or t
  misc_feature (734)..(734): n is a, c, g, or t
  misc_feature (739)..(739): n is a, c, g, or t
  misc_feature (747)..(747): n is a, c, g, or t
  misc_feature (750)..(751): n is a, c, g, or t
  misc_feature (758)..(758): n is a, c, g, or t
  misc_feature (769)..(770): n is a, c, g, or t
  misc_feature (781)..(781): n is a, c, g, or t
  misc_feature (786)..(786): n is a, c, g, or t
  misc_feature (789)..(790): n is a, c, g, or t
  misc_feature (796)..(796): n is a, c, g, or t
  misc_feature (806)..(806): n is a, c, g, or t
  misc_feature (809)..(809): n is a, c, g, or t

SEQ ID NO: 210507 - DNA, 729 bp, Homo Sapiens; identical to SEQ ID NO: 47443

SEQ ID NO: 210508 - DNA, 1000 bp, Homo Sapiens
  misc_feature (612)..(612): n is a, c, g, or t
  misc_feature (771)..(771): n is a, c, g, or t
  misc_feature (825)..(825): n is a, c, g, or t
  misc_feature (912)..(912): n is a, c, g, or t
  misc_feature (952)..(952): n is a, c, g, or t
ttcagtcgctcatttcaccaggactcccagcaaccgataaaacagaccaaaattcctccccttgtggccttaataccataagccttgtaggcaggacattttggtcccctgaggtaatatgaggtaatatgaagattggttcagcaatagcagagctactgtacttgggggttaatatgcaacttttctgttcttcaagtggtcataaaaattcttagaatcccctggttatgtctcatggttctttcatttactcagaaggtatttattgggcatcttgtgttgatcacagcactgtgaatccagaaataaaagccagtgcctttgccaagctacagagttaaagaaaagaaaaatgaaatgaataaaagtaaaagaaaacctgtgcctgtctacaaggagctcaggtcagacgagggcagggattgtggctatcaagcacctcccatatgcctagctaggagccaggcttgggaactctcaaatgggtaattcccggtccttgttatcagctagctcacaacatgctgacctcaggctttctcttactctagcagaaacaggtatgttttactttgtgtcccactatggatagactgctgaatacatcangtatgttcaagcattaccacatctctatttgtttccgtatctcagtaacagcagagatgagctgagaatgaatcagaacgtgccctgtagtgacattgatatatttccctgaggtacatcacgatagtctaggggacaaaaggcgcagggaaacccagngtactccttatgtctacactggatcttagccagaaagctgaaaagtgatacttnttatggcctacctccggtttctggtgactacagataagagactcatcccttggatcacctcatccaccaaatatgactgaacaccgnctctaacaggacatttggcctggtcctcaaggaagctaanttggcaaggaatcttaaaagcagccctttcttggacttgacatgacct

SEQ ID NO: 210509 - DNA, 833 bp, Homo Sapiens; identical to SEQ ID NO: 44739

SEQ ID NO: 210510 - DNA, 827 bp, Homo Sapiens; identical to SEQ ID NO: 40875
  misc_feature (487)..(497): n is a, c, g, or t
  misc_feature (676)..(678): n is a, c, g, or t
  misc_feature (680)..(682): n is a, c, g, or t

SEQ ID NO: 210511 - DNA, 847 bp, Homo Sapiens; identical to SEQ ID NO: 53250
  misc_feature (676)..(676): n is a, c, g, or t
  misc_feature (680)..(680): n is a, c, g, or t
  misc_feature (784)..(784): n is a, c, g, or t

SEQ ID NO: 210512 - DNA, 902 bp, Homo Sapiens; identical to SEQ ID NO: 53729
  misc_feature (763)..(763): n is a, c, g, or t

SEQ ID NO: 210513 - DNA, 883 bp, Homo Sapiens
  misc_feature (804)..(804): n is a, c, g, or t
  misc_feature (814)..(814): n is a, c, g, or t
ttttgtggtcattaaaatggcaatttatgtgcagcactttattgcagcaggaagcaggtgtgggttggttgtaaagctctttgctaatcttaaaaagtaatgggtgatttaaaaagaaaaaaggaaaaaaatctttggctgaatatgttcattgcttgtatttttaaaacaacagaatttccagtatgaaacaggctgaaagagcaggaagaaatgttctttgtataataatgggaagtttggaatataaaagtttatatattatttatctattggagaactggtgtacaggaggaacattttcttactgtgttgctgttttccatcatgtgttatcctaagagttggggttttttaaaatctgtttcaccaggggaaaataaaagcatccctaatgttcttcctctagtcagtttgctttgctgaaagctccctggaaattagtacagttctacaggaagccagaagactgtactgtctgtccacaccatggtctcctcagtcccctccacgccagcccctcttccccacacctagtaggtgtgctacacctccctttgccagtcatcccgccatggatggggagcctacttggtgccctggcaaacctgtttacactaaggagatgcccacagggagcgggaagctcccaaaccctcagtcattctccagcagagacctttgctcttggccaggtttgaaacgatgttcaacctcgccacgtcaatgtctcagtaaaagacactatagatagttatggacaatacactccaagaatactgggcttatggggtggggttgggntttttgtttntgttttggttttccaagtcatgtcttttatcccccatataaatgggagaatgtgccccacttgggctaa

SEQ ID NO: 210514 - DNA, 845 bp, Homo Sapiens; identical to SEQ ID NO: 43432

SEQ ID NO: 210515 - DNA, 413 bp, Homo Sapiens; identical to SEQ ID NO: 46060
  misc_feature (385)..(385): n is a, c, g, or t
  misc_feature (390)..(392): n is a, c, g, or t
  misc_feature (394)..(394): n is a, c, g, or t

SEQ ID NO: 210516 - DNA, 905 bp, Homo Sapiens; identical to SEQ ID NO: 46804

SEQ ID NO: 210517 - DNA, 890 bp, Homo Sapiens
  misc_feature (767)..(767): n is a, c, g, or t
  misc_feature (852)..(852): n is a, c, g, or t
ccacgcgtccggcacagcctcagatgttcatatggggcacatcttaaaagccactaccatagcttttttactgacagaccttggctaaccatcagagatattttgcagatgggccccagccagtgtgtaaccacatgcagcctcccccacaccactttgccagcatgcgttcatctgcagcatcgcccaccagtttgccagcatttgcagaccctgctgctgtactcccactggagcatgtgtatgtgtggaccctgctgctatgccagcgctggtgcacatacatgtacatggactcaactgccaccactctgacaaagcactgttgctgcccaccccccataccccccattggagtgttgttgccagcagactggggacacattggcccctccagtgatagcaggtcagagaacaaagccatgggtctagtcccagcacctagggttagagcatgcagaccaagagtgctaaactgagccttggccccctgaaatcattgagaaatgaagccagttgatggaacccaacttataccatagtcaaagggtcaaaataatcaaaaaatataaaagcaaaaagcttcatccaaaggacagcaacatcaaagattaaaggaacatcagcctaacagatggaaaagaactagcacaggaatcctggcaactctaaaagccagtgtcctcttccctcaaacaacccactagctccccagcaatgggtcataatcagactgaaatggctggaatgacagatatagaatttcngaatctggatgggcatgaagatcattgaaaattcaggagaaagttgaaaacccaatcccaaggaaatctactgaaaatggatttnaaatgctcgaaagaatgaaataagccatttttaaagaa

SEQ ID NO: 210518 - DNA, 903 bp, Homo Sapiens; identical to SEQ ID NO: 52445

SEQ ID NO: 210519 - DNA, 877 bp, Homo Sapiens; identical to SEQ ID NO: 45639

SEQ ID NO: 210520 - DNA, 869 bp, Homo Sapiens
tattttttaaatatactatatatgttaaggataaggggtgaagttttcttcctttgtaatacctgttcaagagtttaatggattaggagattagtgttaaccttgaggataaaagtacaaatttgtctcattaggacacttctaccaagcatttcttaaggctatagtttaacatttggtttcaaaaagaaaaaaaaaggtttcatttaaaaaataatttagtgaattacattctttcataacttccaccctaattagttacaaagataagtctaaagattcttagttttgtgtactaatttacatttatatttaaagattaattttacttgtatcttaaaacaagaattttatgttggaaaaaagagaactaaatacatttgtataaaggctgtaaatgtcccatggcaaatgctctgtctcaatattttctaccacaattagaaacagggctctgcagagagagacttgggttgttcaggttcacctttcccgaggaattgtgggctgcacatctgaagaacatagagaaacaactcaatttctctttttacaactgtaccagaacttcacagctacaatgatagtatgaacacatgaaaaaatgacttcactcaaacaagatttagaaaagtcggggtgacctcggggccagggcaccaccctgtgtggtgaggtttacagtcagtcgttcgataatggagagagagtgtgtgtgtgcacatatgtgtgtgtgtatatacagatatctatatatataaataaccatgttcagtccttttacagcctgtaaatatgatggttgtgctcccgtgttcactattttgaaacttcaaacacacaggccatggcagaagtaaagttttctt

SEQ ID NO: 210521 - DNA, 624 bp, Homo Sapiens; identical to SEQ ID NO: 41871

SEQ ID NO: 210522 - DNA, 786 bp, Homo Sapiens; identical to SEQ ID NO: 51628

SEQ ID NO: 210523 - DNA, 1000 bp, Homo Sapiens
gacggtggaaatggaggatggtgatggttgtacaacaatgtgaatgcacttgatgtcactcaactgttcacttaaaaatggcaaacatagtagtttttatgttacatatattttactacaataaaaaaagaatgaaaagcctataaaattctgaaaaataaaaaagggggctttagccctgccagagagtagaatccatcatagaacatcttgctatgggcagttgactggacacacacatcagagcaggtctgtgtgatcatttagcatgtgattaatggggcatttaaaatccacgaggggccaggcgcagtggctcacgcccgtaatcccagcactttgggaggccgaggcgggtggatcacctgaggtcagcagttcgagaccagcctaactaacatggggaaaccctgtctctactaaaaatacaaaaaatagctgggcatggtggtgggtggctgtaatcccagctactgaggtggctgaggtgggagaatcacttgaacctggaagcggaggttgcagtgagccaagatcgtgccacttctctccagcctgagcaacaaagcgagactctgtctcaaaaaataaattaattaataaataaataaatccatgaggaaaaggatgtcatttaaaaaagggtgtggccaggcacggtggctcatgcctataaccagcactttggaggccgaggcaggtggatcacctgaggtcaggagtttgagactggcctggccagcatggtgaaactctgtctctactaaaaaaaggacaaaattagctggatgtggtggcgcatgcctgtaatcccagctacttgggaggctgaggcaggagaatcgcttgaacctgggaggcagagattgcagtgagcctagattacgccattgtacttcagtctgggcaacgagcgaaactccatctcaaaaaaaaaataaaaataataataaaataataataaagggtggtggagcgaaaaaaaaaaaaaaaaaaaaaa

SEQ ID NO: 210524 - DNA, 816 bp, Homo Sapiens
  misc_feature (772)..(772): n is a, c, g, or t
ttttttttttttttttttcaaaagtaattatttttttatttcaactctataaagtatacaacaggcactcagcaattacagctgcaggaaaaatacagagcaaatcaaagcaggtaaatttatgaaaaagtttttaatctacatcaaaagagtgcaagtggtcaatgaccatttgatgacagtttgttgcattctgactaacaaagaactctttcatgtagaacaaattgtaagaggacaatcaaataaccatagctgtaagaatacaaaagaactgaccagttgtaaaaacatcatacattgaaataaatttgatagatgatgcttaaagaaatgtccctttactcagaaagccccaacctctgagtcattgccaaggtcccagagctctgtctgttgattcaggggcagagaggagggctaacaacacactttcaatgttttgctttctaggtctgttgaaaacttgcctcgtaaatgatttgcatatacaagaactcggaaaaagcatcctgttttgttgagaggtgcaccaagtgactttttcatcattggtttcataacgaggtctggttagcagtcatttccaatttttcttttcggttggaccattgtcaatggagtctataaaatgagatatgttagaacttgactgcactaatttatttttacagaatctgcacagcttagcaaaacaggaatacctgtatacagactgatagaatgtcatatattaatttgacctgcacatacatttatacatttcacaganatgacgctgtatctcattaacagatacacagctctggtacattt

SEQ ID NO: 210525 - DNA, 653 bp, Homo Sapiens
ttttttttttttttttttaatacatacatacatttatatttatagaaatctcaggaagaaattgcagcatgggaagatggacagcaaagcaccgatgtcctgctagaacgtcctggcaggtgggggctggcagagttggggcatgggctttaaaaccctttctggaagcaaggggtggggcaaggatctgatgattgtttccacgtggcagggaaagaggaacagaggaaggatgatcctgggagggtggccatcctgatgaccaacctgttgtggttctgattgacttgggggggggggggtctcagcaacagcttctccaagaggagctggagggtggggaaggcatgaaggctggggagaggctcagccttccttctccccaggacactgctgggtggagctgggttggtagtggagtgcccgaggccccctgccaggacgtgtctaggtgtaggcagctctgtgcatcagcagaggctgtggggagaaggtatgggtggaggtgagaaggtcagtagtctctccggtggaaggcagaggccagtcaccaggactggctgggtcagaacctgtttaatggcggccagctttcttggacctcttggtggggaacttgcagctgcggaaggcgtccgtgtcacggatgtgct

SEQ ID NO: 210526 - DNA, 703 bp, Homo Sapiens
ttttttttttttttttttaaagtgacccagttttattttggttttggaggccagacagggcattgctccacgggttcgggctgtacaaccttcccctccttgaggtgggaggcccagcaaccacagggcccaggcagcggggtgggaggctcaggagatggtggctctggggacccgatcccgaggagagagggggcagcaggcagaggcctgcaatggctcagattgggggaagagggcggcgagggggagaggacacgatccaagaaccagagtccgaaagctgaagctggtccggtctctttcactttacggccgaggctggggtcagagaagtgaagccaaactgtcctcccgcaggaggcaaggcctggagggacgccagggtcccagtccggtgccgggccctgcgcacacagccgccgcctccaccctcgcggagggcgcgcgcggggcccagtcgctgggtgcagggtccggcgggcagtcgggccctttctcctctccggcacgccgggcgggcgccggccgccctcagcagctcacggagccggcgggcggcgcggaccccaagtccgagaagcagtcgaactcgctctggcccaggaagagctcgggcagctcgcgcacgcggtgcagcccgagctccagctccagcgacgtcagcgcctcctcgtcgatgagttcggcgtccacctcgtgc

SEQ ID NO: 210527 - DNA, 723 bp, Homo Sapiens
  misc_feature (604)..(604): n is a, c, g, or t
  misc_feature (701)..(701): n is a, c, g, or t
ttttttttttttttttttgaagtatctaatttataaaatgtcacaatttgtgtcattgtaaagaggttgatctcaaccaggttgtaacaaaatttccacagcttattccaaaagaaaattttaatacaagagatcttaaaaaattaaacacatttgtttaaaaatcctattatgtaaaccttaacataagagggtagttaagataatactacaggtttcagggcgtttccacagacttctagaccttatgaacacacagactatcagactctagatatgtggcctgcttacccttaagggggtgcactgggagccgatcatgggcgccccctagtggggttaccatcgctcctccattcaaaaaagactcgcttctctaagaagtcggtgtcaggtgagtaagcgttctacctgacggctaagccagggatgaagagaggccaacattcttcttaggatgagtcctggataataaaaattccaattagctctacccccatccccttcactccgggaaattaatggtctctggggtcactgagcgtttagtagctctgggtgcaaatgtatgatccaccattccgtgtgctactgtcctcagtcncaatttttgcaagggcatcctctgtcttacctacactgacagtgaatgagtggtggttcccttgccgttcatggagaccagcggcagagctgagaanatttgaggggaagtgggggaag

SEQ ID NO: 210528 - DNA, 676 bp, Homo Sapiens
  misc_feature (586)..(586): n is a, c, g, or t
  misc_feature (611)..(611): n is a, c, g, or t
ttttttttttttttttttagtttcgattttgccttgatgggttcctttagcttttcctgctttggggttcgatttagttcggctttgagggtgtgtcaaaacttgctacagtcgtagacgaaagctccggacgtgcggtacagagactggctggaagggaaggccatttgacagctactattcccgttcactggagagttgttcaagccgatcctctgtgactcgaacatctcccgcaccgagtggaagttctgctgctggcccgggtagcctgcggccgccgccgccgccgccgcgctcgccaagtggcccaggtctccgcccgcctggttcaggtaccacgaggtgaggcggccttggtgggccgcagggtggtggccggcctcctggcctcccccgccgccgccgccgccgccgccgtgactcagggacgacgagctgctgctggtgaccggaggcagagagtagtcgggcagggggtcgtccacggccgagccgcccgcgcccccgggcgcgccctgcaagtggcccccgcgctcgccggccgcgtacaggctcatggcttgcaggttgcagtggtaggtcncggcgccgcccgcgccccccgcggnccccgcgccgccgccgccgccgcccgagctgcccgcgctggaggtctggctgcagggggagctgt

SEQ ID NO: 210529 - DNA, 669 bp, Homo Sapiens
  misc_feature (633)..(633): n is a, c, g, or t
ttttttttttttttttttacatgctttgtttcactttattggatacaccgggtgtgggatttacaaataggaccaacaatgtgtgcggggcacagacggctgcctgtgggtctgtgtgtaacaggggctgtaaaatgaatggacctcatgtgcacgtggtacagagagaagcaaaccaagaccaactggatcccaacgtgggtaacataaacagttaaattactaaagtcatcttaagaccaaaatacttcaatgaaaatggcatattaaaaacatataaattacatttaagctctgtacatgattcttaacaaaaataacaataccgtgttctgtacaatactgcttcctctgaacattccaaacccaagaaacactttcccttgaattcccaaaaaaagtgggcaaaatacacatggagtataattaaaaccatttcaccaaatacaaagctgtcagtttctttgaaggcacacattttgttgtatctcaggaactcccatttcagaagccccttgtcttccgaccccaacaggcagcagagggcagcctccgttccagcgaatctttggctgctaaagggagaatattctcagcagggaggcagcagaaatggagccccttcatcctcanaccaacagaccagatcggttgtcaggaacctcaaga

SEQ ID NO: 210530 - DNA, 707 bp, Homo Sapiens
ttttttttttttttttttggtatgttaaagtatttattttgaatttcagaaactacagaattctggatttttaattaagaaaattagacattttagaatttctagataggactttgaaaataaacatggcacaatatacacaaaagtaaatgacaacatgacattaaattttacattgttttgcagtttcaaatttcgtattaatgttctacaacaaattttaaaattcttttcagtgttttgcttcccttggtgttcattattgcctatttataaagtcataaaaggcctaaaaataacttgttactcatattgaaagtctgattttttttttattcccttaagatggaggtctctcactatgttgcccaggctggtttcaaacttctgggctcaaaggattccccatctcagccccctgagtagctgggaccaaaggcatgcaccactgcacccggctgaaagcctgtatttttatctttcgatggacaacagagggatatctcccactctctaagccggtctagttctagtactaggcctgtaaatgtagaccacaatcctggtgaagtcatgggttccatcagtgttatcctggcattctcagcataattgtcatgaacatatttaaaatattttaggccactgagcaggtgtgggttgtcctcatagtaacaggagaaagggaagccagttcctgtctaact

SEQ ID NO: 210531 - DNA, 646 bp, Homo Sapiens
ttttttttttttttttttgaaatcaaagacatttaatcaaataagcaaaacacaaggaagaaggtgagcattttctctagccagattcaaataaaatttcatgaaaatgatttccctttaaggtgctaattagcataatggccatttagagagggctcttcacatgccaggaatggtgtgaagcacttttcataattctgatttttctcatcggccacatcaaataattcttgcaaggcaggtgctattgtcatctccacttaatgaaacaaggcacaaattgctcaagtcactgatctgaaatcacagctaatagttgatagaaccagagttcaaatccaagcctgagttcaaaaggtatttggaggtcagggtggtggctcatacctataatcccagcacttcgggaggctgatgcaggaggatctcttgagctcaggagttcgggtccattctgggcaacatggtgagaccttgtctctatcataaagtacttgtcctggaaagcccgcttctcgatgagccgcatcactgtgttggacaagcccagcatgttggcaatgtcaaggatcttcttctgagtccccttcaaggtgagtctctgggtcctcagtccatctaaaatattgtgcccatctaaaatgag

SEQ ID NO: 210532 - DNA, 696 bp, Homo Sapiens
  misc_feature (626)..(626): n is a, c, g, or t
ttttttttttttttttttgaagttccaacatgctttatttgaggacgagcgctcacccgggatggagtaagaagtgggatgggagaagcgtagggttcaaattttctttgtgtctctgtgatccttaaagcatctcagcaagctgtagagatggtattaaggggagagaaaactttgagatgacaagaggaaacgttaataccattctcactccaatgaaacccatgaccactttttaaatgtcctacagagtcactgggtgagataagtaagatcactgtttcaatacagatggggaaagataataaataaagaagtcttggttttcttcatttgcagggaggattaccagggtagaaatgggtaaaaatcggtaaataactatttactactgtctctggtgttttctcataatcaagccacttaaatacctccctacttttccctcaactcccagaacaaagccaagactttgataccaatttcttcgtgcttttcctcaagcaggtaactaggagtatccctactccagccttgtgcccctagaactgggctggagctcagagacttaaaatgactcatggcagctgccttccccagctcagtgataaggtcgcccctgccanacactggagaccaaagcccaggtccatcactcccatagtgactcctcccataagctctgcctcagctgtg

SEQ ID NO: 210533 - DNA, 619 bp, Homo Sapiens
ttttttttttttttttttacggggggatacgttttattgagaagtgtcatgacgaaggatatctaaatcagggaagtctatcaggacagggtgaaagaggcagtctgcctgggagctgctcaacccccttccccatcagcctagcccctctttgaaccatgccagttctaaacggcctacaggagcgcgaatgagtgaggaacttggcacagagcacctttctgtagtaatccccacagtgaggaacagagggatgtggctagagggcagaaatgaccaaggaaatttatgaacctgcctgatcaccacccccaacacacacacacacacacccatccactaagctctggctgtggacaacagaagacaaaaaaccacccacaattcgagcacagtcctgagtcaagggagcctcagggaataagacaagacatggcaggcatggttcaggctttactgggcatcacacggagctggggtagggacccagcaaagggagcagggcatacagatggtctttgaggacagtgctagggagctcagagatcagtctggcttctcaaagaagagaaaagcactgacaggaaaagcagtcaggttggcgttagtgcagggaaag

SEQ ID NO: 210534 - DNA, 710 bp, Homo Sapiens; identical to SEQ ID NO: 57852

SEQ ID NO: 210535 - DNA, 714 bp, Homo Sapiens
  misc_feature (390)..(390): n is a, c, g, or t
ttttttttttttttttttggctgcaagggtgtctggtgtttaatctcaggttgctgccgcccgaagagcggtggccaggaaggggaagggttccagtccagctcgctcccgtttctagatgctcctgccgccgccgcagcctcatccaccaagattctccactctctgcccacagatttgctgggctgccggcctcagggttcacagtgagggctgtaggggcaactagggcgggtctcgggaggcaaggtaggcggccagggtcaccagggcagccgcatacgtgcacacgcccagcccgacggcgaggacccccagcaggaaggcacggcgggaggcggcccctgccccctggatgtcccccttggcccaagccttgttggtctgtanaggcagtgggcagcagtgacccaggcatcccctcagtcccagacccttcccctggtccctcccccacccaacatacccattcattcattcatgcatgtattccaaaagcagatacgtagcacctactataggtcaggcactggggatgctgagtggttaataaaaacattaaaatggtaaaaaaaaaataaaaataataaattttaaaaaataaataaaaacattaaaatggtatatgccactattctaactcatttgattctcacattgacccagaggtagcaattattcgcactttacagatgaggaaagtgaggcacaggg

SEQ ID NO: 210536 - DNA, 714 bp, Homo Sapiens
ttttttttttttttttttcaccattaacgtcatatttattgttatttaactgctcaggaaaacatatacaggtatatacaatatgcaggaatacagaagactgcactttacatatttttttaaaaaagaaagaaaaaaataacactcaatttcatgagctattgtcacagtcttccaaccaagcatttcagaaatgaatttcttttaagagtcaaaaaagattacaggattgcctaacacacagcagagttaagttttcatattttacatgtgcaataacattttcgttttctttcccaaagagtttgctatgcagtactgattaccagtgttcggagtctagtgtgtagggtgtgtttttcatttacttttattctttccattaaaccaaatttaatgaaataacatccttttgcttaaggctatttttaaagctgtttcattctggggtcgtggggagcgagaaagtttttaaaacttcaggggtttctgaggttgccaggaccatgagctaattggcaaagtgttgatgactcaacgctgggaaagtcaaagacagaagttaagacactttgctccccggccttaagcaattaaggagaaatcattcctgtttcaaaagtaaaatgatgaggctctcaaacagctgtacactgcagaatcagaggggtcatggagtcttgcccagaatacggtcaactctcccacagccca

SEQ ID NO: 210537 - DNA, 754 bp, Homo Sapiens
  misc_feature (677)..(677): n is a, c, g, or t
ttttttttttttttttttaaaaacaatgtctttatctgtatgaggatcagaaggaaaatgtgaaaaagggaaaagcttatgattcaatatgtaaagaactggcttaaatacatacatgcggatgttaatcacatatatatcttggaaattatacaacacaatttgttacccattttcacataaatgtatttaaataccattgttttaaaacatctcaaatcttaagtcagccatgtaaatcttgaaaaagcaaatgccaaccttaaaattatctaatcttttaaaagataatttcatatttttcacctatttatacatttgcttagtgcctgctatatgttaagcactatcccagttactgatttggatttttaattttagacaaggaactctaactcccagaattctgctgactaaatcatttgttttttgttcaacaagttggactaagaaatactaattagatgctactccctttccactactaggccataattatcttgaactcagagataccaaacaatgatggttattcctgttgggtggtttcattctttctctaacctgccagacctaggtttggagcgatgtttatgaaagttgtggatgataccgcagaacatcagtaaccaataaggagtccggtcctaacagcagggaggggcccccgagagtanggaaaacggaaggagcggctcttgcccaggctatgcaggaagatgtcacggctggacaccggtcattccaatggtct

SEQ ID NO: 210538 - DNA, 732 bp, Homo Sapiens
ttttttttttttttttttcggtgtttgtgtctttatttggagaccaggagacagattacagcttaatgagaggaacaacgactcaagtgatctgatgggaagggtgagtttcctggcccttaggaagcaacagatgtgatttctaatcaacaaaaactagtaagtctggaacttttcagacaggaagctgagaggctaccaaaactaaaagtgaaagtgtctgccatcaatgtgtaagtctaaattacaaataaatacattaataaagcccctaacaggggttacaaaatttgtatgactgtaataaagcacagaatataaaatctgaaaagcttaactacgctgggctttttgcaccccattctctgagacaggaaccacacatgaaaggtcactggaacccccacatgcacctctgggaactgtgacttaagagaaaatggagacttcttgaaagataaagcagaaaccacaatttggcaaggacagcattttatctcaattcctttacttttcactcccttggcctacaagggccactgacgtaaaaacccaagcctctgtgtctcagaaggcttaccatcagctctcagcgctgctataaagtcacataacagaactgttccaggaagccagaggtaaagcagaaacaaatgaaagatcggcctgtggggacactcgaggagaactctcatgggaagggtcactcaggaatcaacacagatacattca

SEQ ID NO: 210539 - DNA, 664 bp, Homo Sapiens
ttttttttttttttttttccagttaaattgagatatacttacactaatcattattcatagtttatctgaaattcaaactgaactgggtgtcctgtatttaattctcgcagtcctgggcacacacgaagcctcctatgagtgctggcagtccagcctatgctccttccaaagcaattctcctttcctactgccccgtcaggggccctgtctgtgctggaatcatcattgtcctcaactgcaaaatggaaaataaaatgatagtggttcctccctcccggggttgccaagatgattaaataacataacaactaagatgtatccggccccttctcctctacttgcaaggcatcgatcccttcattcctcgcaatcacaccacgtgaaggtgccatgaagccaccccattttgcagaagaggaaactgaggttggagaggtgaaagcactcagctgaggtcacacagctatgtcccactcatctttgggtgaccctcaggttcggaccctgaggtctgaacactgcattaagctctccagacagaatcaacttcggaactagcgccagagaccactaagtcaatcccaggtgacaccatcagcactcaataaatggtagccactgccggtgtcgcagacggatcaatgggaggtcaagcgttgtgggt

SEQ ID NO: 210540 - DNA, 689 bp, Homo Sapiens
ttttttttttttttttttcggagggatttagtaggagtttattgccagtctgtgtctgggcagcggtcaccggactttgtccttcctctggggcataggtttcctccagaggaccaggaggacaagggtattgatagcaacctgcacgtggccgaagacggggacgccaaagctgcggtacaggaggccgccgaccgtgggtcccagagttcggagcagtggttgtacagaggcgcagaggcccagcatggtccctgtgtccgaggtggagacagccttgatcagcatgctgtcggtgaccacgttgagggtgcagaggctgaacaccaggccgggcaccaggaggcagaagtggaagacgctggacatccaggccatggccaggcccaccacgatgaagaccagcacgctggcccggagcagcacctcctccgagaagtggctgctcagctgcccgatgaccaggccctgggtcaccatctggaggagcccgaagaaggacatgaggtagccagcttgggcggcctccagctggaagaagtccatggagatgatggagaacatgaccatgaagagccctgtggggcagttggaggccaccttcaccaggaagatcctcgggacgtctggcagccgcagcagggaggcgatggccttcaggtcgaacacactggcccgggggccgcctg

SEQ ID NO: 210541 - DNA, 563 bp, Homo Sapiens
ttttttttttttttttttggcctttgataattttattggatcagtaacaactttttgtgtttcaactaagatagctaaaattctaacacttatatgtaaaaattacactccattttagcacaaatgttaacagaaattaacagcacagtgccatgaagaaatgaaaaatacacagctttggtagggaaatggtcctggaaataatgtaatgccaagtttctgatcatttaacatatcactcacctccttcttcatctgatgttatgaaccactttatttatttatttaagacagagtttcactcttgttgcccaggctggagtgcaatggcatgatctcggctcactgcaacctccacctcccaggttcaagcgtgaagttatgaatcactttaattcttcttaacaacccacaaaagtttaagtgaaaactagtaagacttcatggacacagatagaaactcataatttataaaacatgctggtataaatgcatgcctacaaaggttatagattgagaaagaggtcaatatcttggagctatgactttgatcctcgtgccga

SEQ ID NO: 210542 - DNA, 690 bp, Homo Sapiens
ttttttttttttttttttaccggatactttttaatacatctagtctaaaacttacaggaaggcatcctagcaccttcttttattattgtacagcagtgacagtgacgacagtgatgatggcatctctctatttttatggaaacatctccaggaaatcccaagctgcacagtggagaattacaggaacagaagaagtggtgtgaagtctgtcggtctcttccctggttcaatgaggagctgaactgaatcatactagaggcatgagtgtctgcgctatttttaaagagctctggggaagtgtggttgtcccaccttaggctcctaatataacactcatttctatttgtgggatggttaacaccatcttccatttggtctttcctccactaatatattatccttcactgaagtcttatttctacagtttaattctttttaagctccagatgtgttatgtatgccctcaaagaccctatcatgggtcagggggcaaggtctgggcccctcatgcgttcctctctttccccaggccaagtaaacaccttggcaggaatccagaaaacgatccacgcagaacattgcaatgtcacagaaatggccgcccactggccacgaagccctggccccaccctgcgaggtcacttcctaccctaccaacagcagcaccccacctcactcccctacgtgctg

SEQ ID NO: 210543 - DNA, 662 bp, Homo Sapiens
  misc_feature (582)..(582): n is a, c, g, or t
  misc_feature (636)..(636): n is a, c, g, or t
ttttttttttttttttttaaaaaagtagggtttattgactcttatgcattgttaaattagagggtagaaagacagagctggtagtctttccctgaaggctgtaaggttatttttgtggtttggtgacttctcaggttggcagccgtcttgttgatgtcccctatgtcatccagagggcaggagcgggcagctctctaccttggcaactggttcctctctctccagcttcatcttttccattgttttttgtttgtttgcttgtttttgtttttcatttttaccttttacagattgatttaaacattttttaaaccacatgcttctttttctgggctccagccagatctctgggggaggagttgttggcagtggtgatggaattgggaagggtctgtgagaaaatctgaggagcttcctgcctcccccagatctccctcacaagactgtctctctcagggttgcttgtgagaatcatttaggaactgctgcagtgttttgatgttttctgaacccctccccagaaagcccaggagtttgtaattgaaacaagaagtcaagggaaagacccagaatcatcttttncccaaagtcattagaggaggccagtaaatgtgtttagggggcacaagttcccanacgccaccccaccattccttcctagg

SEQ ID NO: 210544 - DNA, 624 bp, Homo Sapiens
ttttttttttttttttttccaaacaaagaattttttattgacattgtaagaaacattttttttttctttgttacaaaaggactaagtggttctgaaagcaaaggtagagttcatctgtggctgggctgcagcccctgggcttgaggtgggcgtgatcacggggaatgcaggcttgtccgaggaacgcctgggccagtcacatctgaacgctatgcctacaatacttaaatgtatttacatgtgtttcttttaaaaaaaggattacacattttattttttaaaaaaatctaaaaaaggtgaaaaaaatgaacttgtattttattttacatgtctgcaggatacacaagggtaacttgtcagaagagaacatcctcctatcagttcaaaacaacacatgaaaccaggatacaagacagcctcgactctgctaccaccgtgcgctctctggctggtgcacacacagccttggagtgctgattgggcaacaccaactggtccctctcattgacaagattaacataaaataaggcacatacatcgcaagaatcaaaacttttgtggctcaagaggaagagccaatgtgtgaggagttgggaggggttaatttttcagaaaaataaacaa

SEQ ID NO: 210545 - DNA, 615 bp, Homo Sapiens
ttttttttttttttttctagatctataaatatatttattataatataacaagaacttaacagtaaacatatactatgtacaataccattacagagaaccctgttttatatcattcacagaaatagccagttttgctccagtgtgatagatgaggagagaaacgaatttcaatgtcatctgtgttgagtctcgctgacaactagaacctcctttggaggcagacgcacaccaatgctaacattagccctgccccaggcagttaggaatttgtgctccagtccttgggttcacacttgcaccctgtttgacataaatactttaaatgacatacaatgtatgtagttttgtgcttattactttttaaaataataaataatattaaaaactgcataacgaagctcggtatcttgtccaagtgggagccacactcgtagtgctagaagttgatgcccaacgttagaactggaattttgtgtcatcaaatactgaacgatggaaagcgtgtcctgtctttttctcttataaatggttgttatcatgaaacgatggcaagttgacttcccagatataaaagtggtaaatgtgtatttggtaccaacttcaactcaacagcgc

SEQ ID NO: 210546 - DNA, 628 bp, Homo Sapiens
  misc_feature (517)..(517): n is a, c, g, or t
  misc_feature (602)..(602): n is a, c, g, or t
ttttttttttttttttctctacatggaaaaactgttcaggcacaaagattaaacaagcccgcgttgcatcccttggattgtactgaatcactgggtcccccagcctccctacctacccctgcaccccagatctgccttccccatattcatggcctcctcctccaaagcagcccaaagcagcaatgatatttactattttatatcaatctcttgctatatatatatatatctatatatctatatatttgtctatcctatatatacataggattttaatgctttgaatgagtgaaggagtgaatagggaaagagcacatgagtgaggtgtaaatgtcaccaaatgcattaagggacatatttgtaggagctggacatgggaaagggactattaaccaacgtggccttgccaggctggagaagtttttcactgtgctggataaggcagtagcaagcagggttgtcagcagtaccacagctaaaggcagccagggggccgaaggagtcaggtggcatgaanaagaggggaggacagatattcagatcccacctggggagagaccctgtctaccctcctcctctccccttaactccagacacatatnaagcctccagacagcctcttagcttg

SEQ ID NO: 210547 - DNA, 623 bp, Homo Sapiens
ttttttttttttttttttggggggaaaagccactttattaaagattctctatcacagtcccccatttctggaccagtcagattggctttgggttgaagtttctgattgtctttccttccagtttctctctttgtccatggctttctgagattcagtgtcctcgatggcatctggggaaaggtaggtgaccttggggtcctggaccaatgcagggtgagctggcagctggcagagggccaaggagtggccagccccacagcccacaaggagtcctgacgatgacagcagagcctgcaccggctttggggcccagacgttggcttcagtgccatctccgcacatgccatgctcattccagccccaagagtaacacactccaccaattattgccaaattatgctctgagccacaagagacctgtctgagcaaccaggtgtgtccatccactccagatggcagtgaccttttcattctggaaacaatgtgcttctattttctggggcacaggaaggaaagcagcctcattagccagttgcccatgcttgttgcttcccaaacatacacctctcctgcatctgttaatgaagctgagtggtctgagccagcaagaacacacattgctt

SEQ ID NO: 210548 - DNA, 777 bp, Homo Sapiens
  misc_feature (623)..(623): n is a, c, g, or t
  misc_feature (713)..(713): n is a, c, g, or t
ttttttttttttttttttgcttttagaaaaatgatcttttatgtgatccatgatttattcatagaaaagcactgtgaattcacacacttgctaaaaaagggcaactgtgatacagaaatgagagtggcttctctcttttttttaaccaacccattgggctgagacgtaggggcccttggctggacagtaagacttgagtagccacaaatggcaaatacaacttcttggtcagtttggagtaaaaaaggtgacagtttgtcgaagaaagaaaaagtaaagcagatggagaagttcttagttcacattctagctataccaccccttccctatcaaaccccacccccaactcaggaactaagacatgaaacagtaaacaccaagacactggttccaactgacttttctgagtgcccttgctacctcctataacaattccaggctgagcacaggggtcaggaaggtagcaggaacatgatacactatggaggtcagccagggctaagacaggactgcccactagggctagaaattaggaagggagaggctaagtgcagaccagccctagcctccaagtcagcgagcaatgagactgtgacaaaagccggcgaggaagcttgaggtanaaaggcaggggaagaaagcaagtatgaggcgagaagagaactatggagctaaagcagccaatctgatggcagagggagattggtgcttanaagcttgtttggtgagagatgaatagaggaggacagagatggggaacaacgtttagctggcgag

SEQ ID NO: 210549 - DNA, 708 bp, Homo Sapiens
ttttttttttttttttttagcttttctggcttgtttaatgctgcgggatcctcaatgatcataattccatgaggatggcacatatgatcctttctactgggaacatcactaattattatcttgctactggcagaataagaaaaatcaggaaaatgactacatttgtgatcttcttctaactcttcctttctaatttctttgggatcttccatttttatagccattatgtcatctatttgcaatgcctcaaaatttctcaattccttagaatctcttaaattttccttagccgatttttcaaattctgcttccttctgtaacctagtttcatctgttttctccattttaatttctttttcttcctttcccttctctaattctttaattcttccaccatcggattcttttgcttttattagctttgattcttccattttcatcccttctgatgccaggcacatctctgccagttgaaagagtgcagactttccacagcgttttacaggctcagcaccacccaactgcgaagtgtttgaagaaatctctgcaaactgaaacaaggcagatgtttgacactgctttgtagaagcatcagagtgggacgtacttgaagatatctcggcaaactgaaacaatggtgacttctgacgtaattcaggagattctgaaacatcaggcctgcatgtgccagaggatactctggtgtgc

SEQ ID NO: 210550 - DNA, 761 bp, Homo Sapiens
  misc_feature (742)..(742): n is a, c, g, or t
ttttttttttttttttttgagtgtgtctattttatatttaaacccagctgtttggaagcaattataaaacttctcccacacaccaagaaccccagaactccccacccagaaggaaaggagacttagggtcctggtcccacagtctttaatgctgtagagtaggagaggggacaggcagagtgagggtggtaaaggactactcttgtccctgagaaggcagaggtgctggctggcctgcccttccccaggcttggataccttgggcctttcccttattcctgcaccaacagcaaactcagaaggaaaaaacaaaacaaaactctaaaggtaaacacggtccttctccctctctcatgtggctcctcctgcccctacctgggagaaggttcaagtattgcgctgatgggtttgggcaaggaccacagaggctggcatggagaggccctgcctcctcctactcctcctgtctccttacctgaaaaggaggggagggatggataaaggaatgggtaaacaaaattaattggtaacacataaagttagtaaatgaataaatacaattaaataaatgaataaataaacaagcgaagaaaaaaatatcacacaaggattcagccatttgcccctccaccgggggggatctaggctggcatattaataaggaggtgccaactaccccttaacttttagggggtcacgactggggcagagggtacagggaagaggagctcgcagtttacanaagatggtctacacaggac

SEQ ID NO: 210551 - DNA, 604 bp, Homo Sapiens
  misc_feature (547)..(547): n is a, c, g, or t
  misc_feature (571)..(571): n is a, c, g, or t
tttttttttttttttcttcgcttctagggcatctgctttttctctttttaatttagccttttcaaaagccagtgacttcatttcttcttgtttcaaaagtttatctctttctttagtagctttgctcctataacttgcaagagtctgtttattagcaacattgtcctcttgactaatatgtattcgtttgggaggtctccctcttcgtctgttagcaggactgaagataaatgtgggtggatcatcagggaagaaataagaaaaatcttgttctgctattttatacgttgaaagagatgatgcctttattttaatgactccatcttgtggttcacagtgttgcttcagaaaaagctttagtttatcacgagaaaataggtgttttctccggctgatttgtgttgctttaacaatagcagactcatgtaattcttttttagtgggttgcactttatacttgaatagtaagggatcaattgcatcttttttcttcccattttgaaaagaacagctttgtgtttctgaatcatcactatcactgatgatnatagtttctccatccacactgttnacatgtccattagcaaaacattttgatgtgatg

SEQ ID NO: 210552 - DNA, 690 bp, Homo Sapiens
ttttttttttttttttttaaaagataaaagatgaaatttaatgggggggtggggggagcacaagagggtgattgaaaaaaacacagataatttctggaattggatctgttaagccttacacattagtccccgccctcggaagtaagggcctgtcattctgtaaagggacgcagccacacgcagagaaggtggaggtctccaccccttccctcttcgtcctcgcctaggagggaccgtggtgccagtaaaacagggactggctggcccagagccttggggatcccctcctttgtctggaaccctctggctcaccgcatccttcctcggggccgcatggccctgccccacaaagcaggcgtgctgggggctgcttggccaggaaagcggacgcttgcagggaccacgctgctgcctctcttctgcccttttccccttagttttacaagttccctgttcgttcgttctttctctctctcctctctctctctttctctctcctctctcccgtctctttctctccttctccgtcactctcttccctccctctctcctctctcctctctctcctctctctctctctctctcctgcgaggagcttcagatttgtgggttgtttttaatgcattccggatgccagatgaaattttggcccgggctcaccagttcctctgctattgggactctccccac

SEQ ID NO: 210553 - DNA, 585 bp, Homo Sapiens
ttttttttttttttttttggctagtaggattttttttttttttaatttctaagtcatgttctggtttttgcatgcaaaaacaaaacaaaaccatgattcaaaacactggtggctaggtctaaaggaaaagccagcgagaggcaggtgtctaaagggagcctctcagcatgcaggctctctacgatgagaagggagcatgtgtctctctagcacattactaagaccccctctggcccagcaagctgatccgtgagcccaggaggccacacccaagctgggagcctcactcatataaggaaagccaagcttttaacaggtatttctgctttaaatttgtggtctccaattgctcctgaggaaggatcaggtctgagcctgtcacaacactcaccagttgcccaacaccaagtacaacaaagttcacaggatggtgggaatgtgggctgcacaaaggaaagatgacctagagcaggaattagtgacatgagaacagagggtactttgccaagccaactgaacagagaaggagattcaaaaattgaaagggaaatgaccagaccccaaaccagaaagtcatgtgagtct

SEQ ID NO: 210554 - DNA, 666 bp, Homo Sapiens
ttttttttttttttttttaatttaatgtacatccagtcacaaagtctagccaaactgcaaatttgaaccatctgtgcttggagcttcttggaaaagttcaccagaaagtccccttgaagttatgtatggagaataagctaaactggggcttcagcttgcagccctgtgattggccacagaggaaacttgcactacacatttatggtgtgaataccatatttgcaccaggatgatttaccccatctataggcatgcaaccactgagcctagcagcttccacttgccttggtaaaactgttcctggttgtcttagtgccttgaattctcttacttactctggcttcagtctgcagatcacaactagtcctgggccaattagcagaaccatgagcaactggcacaatgaacgctataaacgtattttagatgatcaattcagttcatctgtagtgtagacagaagtcacttgtgggtcttaaggagtcccacaaaaattagcccatatattgtaactagcgataagtgttatttatcttaagtagtgtcatctgttcattcattctacacatatttaatgagcaccaattatgtaccaggcatcatgctcaggaaaaacagtgataatcaaaacagatgtgaagctcgttcatgacatttattgtccat

SEQ ID NO: 210555 - DNA, 696 bp, Homo Sapiens
ttttttttttttttttttaatacatgattatgttaatggtgaaggtgtcacaacatgcaagatgggagagttgagaagggtcacagaagaaattaggaatttccacatccttgaagcaggtcacttgtaaggcaatcaagttgtgcagctgggagtctaaaagactgagaaaaaaaaagacaacaaaactagaaaggcacagaaacacgggttcatgatggtgaatgatatagcgggtgacagatggctacaaaccagtcataggccatcacactcaggagcatgtctctcttccatgcctccaaaaatggcaaagagagacatctgagtcaggcagcctgcataggagatgactctgctgtgagactggatgtccacaatcatcttggggaccgtggtggaggtgaaaccgatgtcaggcaaggacaggttggagaggaagaagtacatgggggtgtggaggtgggagtcagggctgatggccaggatgatgagcaggttccccagcaccgtgaccaggcacatggacaggaacagcccagcaaggactggctgcagttctggatcccctgagacttctggcattgtgtctgcattttgaatagaagcattcacaagtaatgttttcagatttcagagcatccacactcagcatattttgcagttctgacagactcattgtcttctaatgctttc

SEQ ID NO: 210556 - DNA, 650 bp, Homo Sapiens
ttttttttttttttttttgctttgggacgagtgtggccccaggattttatttgggatcacatcatcattagtcgatgacaccaccaccctcatcagcagtactgcaatgactgtagcttggtcaaaaagacacagtcaacaaatggctgagccaggattttaacccagctgcctctctcaaaaagagagaggagttggagatggttctgaggagtataccttgttaaagatgagcctcatcttgggggcccactcctagcctgaaattcaagtcacagcaacagtgtcccggggcagggacctcttggctctatggatcttccactgcaggactgacagcatcaccttcctattgcataactccggagcacttgctgcaattaagagcgccagcacctcttctccgatgccctccacgtccaccacgagtgccagctcgtatttctgtacagtgttggagcataatgtcaccctgatagcagcaaatccctgggggcgaatggtgccacagtcaggagagatggtgaattcttttggtttcattgaggatatttcttccttggtccaagacggtcttttgtagtccacatgctgctcacaatatgaaatgcttttatggccaaggccatccccagggatacgcagtttgt

SEQ ID NO: 210557 - DNA, 691 bp, Homo Sapiens
ttttttttttttttttttagagaaaaatacatacaatttattcattaaatagggacaaaatttctgtaactctggaaggtcaagttacatcatcaaagttgtttatttaaaagtagaagtatgtgttggcaatcgttttcgtaagagtcagaaaaattaggccggtttcacaatatggagtgtcctttctggtcaacagtattgcttcaggacagaagagcatttcacagatctttcctgtaacttctagaaaagtcatccagccagatttaggctcaagcttctttacaaagccattttcctgaacctgggagacagaggttgcagtgagccgagatcgcgccattgcactccagccatgtgtggcagggagaaagggtcagcacggacacgacggtagtcttcaaatatgtgaaggggccattcgtgtgaaaacggggttatacttggaaaaagcaaaatacagtgagaacagcatgggctatgatgtataaagacccagattcaaatcctggtgccatgatttactgtgtgttatttggcttggagacagattagcatccttacctagaaaatgatacttacctcataaatgtataaaaattagaggcaaaaaatatttataagctgcctggcacagactgacacactgtgatgcacagtggtgttagttctcatccctagactttct

SEQ ID NO: 210558 - DNA, 653 bp, Homo Sapiens
tttttttttttttttcctcaggtatttaattaaggggcttccaccagaagtggtttcccacactctctggtagaaactaaggtttcactcccaggagaaaggggttgggatcgggatctctgagttcaattttctcaattttttcagagtcatgccaccttaagatttattttgctttgaatcatacttctcagttagactgctcaagagcagttaaaagatggattggaggaaaagggcaggatagggagaagaccctatgaagaacagcagatggaattatagaggtatttgacctagagaaaaggcaagtcccaggagtcatgattcctgttctcaaatagtctgaagacgtcacagggcagagggagcacagactgtgaagtctctgacagcagagctggtaccaacagggagggaagaagaagaagaatttccaggaggcagatttgagctcgatacaaggaaaactttctatgagagttgacaaagatggtgtggaaaatgagctcctgtccctgcctagaaggtgtgctttaaaagaaagagatttgattgttaggcttgacagtcacttgtcagaaaaaggaaggttagaactgactagtcagactaggtaaatttgggcatcccgtcaaatctaaaatcctcag

SEQ ID NO: 210559 - DNA, 671 bp, Homo Sapiens
ttttttttttttttttttttagtgagaaacaatttatttttctgatttataagcatattttacatattctggtcaatacatcaaatgtataatgtggaagttcccttaagaataccaagaccacacatgttaaactcagctacatgttgtattaggctattagacaaatgtcacttttaatatcacaacacatacatgtactttttttcattgacagaggaacatgcctttcaaaaatattttattgggtgaaactttcttattctcaggaaaacttttggttctttaatataatttattatgctctttaaaattctgtttgataaaagcattggtatattataaatacctgtaaagaaaatatagtttaaaatttcaagggaaatagtatataagttttctctttgacattttcacaaaaatccacacaggcactaagaaagactgacaaaactgttttatatctgaatattatactccaggttggaaacattcaatatgattttatttaaatattaaagcttcttgagagtgaacctttggctacaacccaatgagttggctggggttttaacccagaaaatattttgttaggaagaatcaaaagaaagatttatacatctagcactagattgggaatggaaaagtaatgagttttcattctaactctt

SEQ ID NO: 210560 - DNA, 413 bp, Homo Sapiens
tttaagaactgaaggtttaccatcttgatgtaggccttgcgtgcctgaagagcactcgggctcatgtgtttcattcactcacatgttaaatatgaagccctatgtacaacatagcctgtgggaactgtggcaggggtagctgtctccatcctccagaaccttgtcacaatcaagaataggaaatgagacgcacaaatcactaccacctgtcgaagtggccttgcagtgctaaatctaagtgctgaggcaatttgcctgcagtccttgccacttcttgttgattagtccagcagcccccagctgggaggcaattctgttcaccctcactcccacctcaggacatctggcaatgtctggaaacagttggttgtcaccacttggggaaaggggagtgtgcttttggcaggtagagg

SEQ ID NO: 210561 - DNA, 1000 bp, Homo Sapiens
aggggcgttcgtcactgcctataaagattctaaacgtgggccaggtgcggtggctcacacctgtaatcccagcactttgggaggccgaggtgggaggatcgcttgagctcaggagttcgagaccagcctgggcaacacagcgaaaccccgtctctactaaaaatacaaaaatcaactgggcatgggcgcatgcctgtaatcccagctactagggagcagagacaggggactcgcttgaacctgggaggcagaggttgcagtgagctgagatggttccactgcacagctgagatggtgccactgcactccagcctgggccacagagtgagatcccatctcaaacaaaacaaaaccaaacaaaaaatctaaacgttacaatacaggtagtgcaagcccagcattaggaaggctcacgcagaatgctaggcactgtacattacagttgatgacgtgtttaaagtgtaatcgcttatgtaccagacatagaaacataccatacaaacgcataaactgatatatggtgacatgtatcaagtttagaaatatgacaaatatataaaagtattataaatgaccgtttatacaataaacattgcataactgcataaaacaatacaacaaatgaatataacaaagattataatttataaaatgaccaaagttatttgataaattcataagtagatataaaatatgtaacagatggccgggcacggtggctcacgcctataatcccagcactttgggaggccgaggcgggcggatcacgaggtcaggagatccacaccatcctggctaacacggtgaaaccccgtctctactaaacacacaaaaaattagctgggcgtggtggcgggcgcctgtagtcccagctactcgggtggctgaggcaggagaatggcgtgaacccgggaggcggagcttgcagtgagccgagatcgcgccactgcagtccagcctgggcaacagagcgagactacatctcaaaaaaaaaaaaaaa

SEQ ID NO: 210562 - DNA, 492 bp, Homo Sapiens
ttttcaactaagtttgtgatggtgaagaatacaatgactactagtacagactggtgtcacagcactgattcatgctgaggcatcagcagttttacccatcatgtggttttctgttttcattgttttggtgtttgcttccacattatcagtacaaacactaaaacaatgataacagaaaaccacatcttactatgatgaaaatagttttgaccttataggatcaacaggttatatttgtgaaacactacactgtactatgctaccaactccttgcatcaggaagttaatttacttattaaaatacctagctacaataaggtgttaatattgaatgaatgaatgttttaacataagaacattggtaacaagggtaaataaatatcaactaacttagaggctaaagaaagtgatagcattactattttaacaaatgcagagacaatagatgacaaagtcgtatctatctgaacattcccattcctcgtgccgaat

SEQ ID NO: 210563 - DNA, 560 bp, Homo Sapiens
ttttttttttttttaaagatcctccgctgcagatagtctgagaactagtttggattaaattacatttaattacagagctgctgtggctctgagatgagatgagagctgttcagtgaaaactgattttagtagatgactgctgggtacagtaagtttaaaaaggagtaagggatgttaaaaataatttcccaggctcacaaacagaatctcctaattccctgagaagactggacgaaagaagagggcattaaaacaacagccgcggctctggctgtgaccaaccctcccttcctgagcgaaggcgaggcccacctgaagtgctttgtgctgtactgctgaggggaacgttgtagttggaggcacgaatggatgaccaggcactagttgaaggcagcgtggtgttcaaggatgaggatgaccctgtgtgggggaagagtccaatcagccaccagagcaagggacgtggaggttcagaaaaagcaaaagcttccagagaaatcaaagctaacagtatgccacaagaaaggaaacaggtccactcagggtaagatggtgcccga

SEQ ID NO: 210564 - DNA, 622 bp, Homo Sapiens
tttttcaaatttattttaaattgtggtaaaatatacgtaacataaaattgaccattttaaccacttttaagtgtacagaagaaccaaatcttgattagttttagccccagggcttggcacagtgacactcagcaaatagttgtgaaaggcatggaggaggagggaagggagaagggtctgcccctgtacctgcatgttgacgcacctggttgtccagcaagtctgcgtcagggaaggacttgggggcaggaggtggctttacccaggggtctttagctctcttggttgtgccctgctttctggatttgggctcagggcaatctcatctcttcttttttctcctgctcacaccctgcaatgattaatttgatgtgccaacttggctgggctttagtacccagatagttggtcaaacattattctggatgtttctgggagggtgtttttgggatgaggtttatattgaaatcagtgggctttgagtaaacggatggccctctgtaatgtgggtgggcctcatctgatcaactgaaggctggaatggaatcaaagactgagcttccctgagtaagagggaactgtgcagcagacagcttttggactggaactgcagtataggctc

SEQ ID NO: 210565 - DNA, 678 bp, Homo Sapiens
  misc_feature (373)..(373): n is a, c, g, or t
  misc_feature (381)..(381): n is a, c, g, or t
  misc_feature (386)..(387): n is a, c, g, or t
  misc_feature (392)..(393): n is a, c, g, or t
  misc_feature (399)..(401): n is a, c, g, or t
  misc_feature (408)..(408): n is a, c, g, or t
  misc_feature (414)..(414): n is a, c, g, or t
  misc_feature (417)..(417): n is a, c, g, or t
  misc_feature (425)..(425): n is a, c, g, or t
  misc_feature (446)..(446): n is a, c, g, or t
  misc_feature (450)..(450): n is a, c, g, or t
  misc_feature (458)..(458): n is a, c, g, or t
  misc_feature (465)..(465): n is a, c, g, or t
  misc_feature (488)..(488): n is a, c, g, or t
  misc_feature (491)..(491): n is a, c, g, or t
  misc_feature (559)..(559): n is a, c, g, or t
  misc_feature (643)..(643): n is a, c, g, or t
ttttttttttttcctcgtaggagtcagcaaagaaagacaatttctctgccccttgggatggaggggcagaattgggctaggggtcgcctggagcccacccccctttgctcagtctcctctgtcctcttctcgcggctctgtggtggagggggcgcggctccggctgcagggggtggggccgagagggccgaaggggccgggtggcctgggttaccctcctgctcaggcgcctgggtccactgggctgtctggaccccaagctaggggactggggaggagaaaggcagcttctgggggtttagggtggggtcgaggatcgagggggtctccactgggctctagcggggcttgtcggggaggggaaagggggggntggggaantgggnnaacgnnacctcnnnccttggngattanttnggggcganaccccccagcaccaggtaccnattnatccctanagagagntcctacgcgccagcaacccccanctnatagcgcaacattacagacttacatattacgcaagcatgacggacacctcgacactaagagagcaatntaaacaagaacaataccacaccactcaaaatctcatgcagagcacatcagaaacatagaacagcactattgcggtcgcgtgtgnggggttagggttaattgtcgaatatacaagcttcg

SEQ ID NO: 210566 - DNA, 716 bp, Homo Sapiens
ttttttttttttttttttacatttagccctttattgaaacctaagtttgttataagtgtaattatgtaacagtcatatttccaacctggttcccatggctgacttaacccaatccataatctggagcaagccttggctagtgtattttgagatgtccgttgtgtttcagctgccgttcctcactccgcctgcttctccaagcatggtacttcttgatgctcttcctccatgcaaagcgccagatgctaaacatgaaacaccaagacacagcatacatcgctactcccccagccttcacaaaccacttaggcgtgggggagaccatttcacagaaaaggaggcaagctcccacaccaatcctcactcctgtgaacagagccacaaagaggaagtccactacatctccagtgaaactgtgatagtgccctgtttcccggagaaaccagcgcatctgtagcaaggggttggtaagctcacttccaaagaggactgcattgacctctgtgccagactccccaagcacaagggccatgataatgcccaagatactcaatgtgtgatgagccagcatcaaggcaccctcagactgaaagtagacgcaccagcccaagtcgaagatgaagtagcccaaggtgagacacaggacatgaacttggagaggtgtattgggtgagcctgggtgggtaaaagggcatgggtcatcaatgaagcaatat

SEQ ID NO: 210567 - DNA, 690 bp, Homo Sapiens
ttttttttttttttttttactggatgagtcttccgttttattacaaaaatgaagatcagtttgatcaaaatgaaagcttgttcacaagttttacatgaatattctaaatacaaagtctcctgaaacaacatacttttgatatgattttcatttttaaagggatgcaaacattccattttctcatttataatctattccaaggcaaagtattttaataatgtatcctttctgcagttagatcacaattcacaagtataactgaaacagacaaaaccttgtcagcaaaggttaaaagtccttttttctttaaaaaaaaaaaaaaaaaaggaggtaaataaccagcccttatgtgttttcagaattttgtactacactgacatgatttgcagtcaggtttttcttcctaccccttaaggctacaaaattctgttgcaaatgcattgcaaaagaattctagaccacttaatgcaaaaatcaaaaaatagtttttcaataaaaagtaaattttataaatggtaggaaacagtatctgtggtaagctactaattgacattttccccctattactaaacaaatcatgttacacagaaacaaggaagacaggttatcaaatacaacaagcttatactgtttacatccctcattaaaaaaaatataatttcatacttttcacacactgcatttgaaatt

SEQ ID NO: 210568 - DNA, 799 bp, Homo Sapiens
  misc_feature (758)..(758): n is a, c, g, or t
  misc_feature (777)..(777): n is a, c, g, or t
ttttttttttttttttttcaagtgacttcaattttttattttttcttataatctttagaagattggagaagtatcatgtagaatatctcccctcccctctccccaccattcctaatcattcaagaaaaactgggatctaggaaatgcattagtagactatcagtggtattattatgtacaattggttaaagcaccatgctaataataaggccagggtcctaggactgatcattgcgagggccaattagtttaaatttgttccatggacccagactgcactcctaaccacagacaactttcttacaatgcatcccgctggtcacaagctagggtactggcaaggtggtagatggatgaaaacaaatctccactaatgaaagaaaaaagaaaagaaatcccacgtatgctgacagtgggttaacagagtcttatctgtaaagaaaagaacacatattttcttcgctctatgataaacacgtttcaagtctaaaatattcaatgacagtaacatttgactcttgcattttagaataacattccacataaagctataataaaggccctgataattgttacccaatttgtgtaactgttaattccacacagaaattcttttctctttacggttatatctatgcaccatgatttttgcatatttaccattcgttatttggttcagaatattgtgaaaattcagctcgaaattatccataaactgtattctatattttatttttcaaacagccagtgtccacatnttaaatgcagaatttgcanatattagtctaatattcaattt

SEQ ID NO: 210569 - DNA, 743 bp, Homo Sapiens
  misc_feature (711)..(712): n is a, c, g, or t
ttttttttttttttttttgtaacagagggctttactgaaaaggttgacaaatgaaaagagatctaaaacccaacaaatcttttagttaaaaggttacttggaaacagaatatagtataaccaagttataaaaatgcaaaaaacagcttataagaactttctttcgacaatgtcattgtttaagaatgtaactaaattacttttgaggtatttcataatacatgttgggtattttaaatagtaaaaaaaaacatacatatgtgaattcagtaatggctcaaatattttctatttagtctgataaattaattggcacttaaaataactatactttattcataaaatatccaagataaagaatatgctatataaaataaccaaccatttaatagtaacatgcttacagtggctcaaagctgaatgtgacaaatgtactccaggaaaatgtatttaacattggacctagctatattctaatcctaaacttacttttttggggtgtggaggggtggagtcttgctatattgcccacgctggtcttgaactcctgtgctcaagttatcctcccacctcagcctcccaagtagctgggattaaaggtgaacaccaccacactcggattaaacttacttctatatgaaaaataaccagactaacttttaaggattagtggttcaccaattcaattttaagactactaacagaattttanntatataacgcctacgatacgacagcatacat

SEQ ID NO: 210570 - DNA, 638 bp, Homo Sapiens
  misc_feature (620)..(620): n is a, c, g, or t
ttttttttttttttttttcatggccgaaataattttatttatccagaatatacagtttaattcctctatctacacttatttacatggctaaaataacattgaaaaaagtcttttgaaaagttgaggtcatagatttcaaggcaccattgaaagtgtccacagttgcgcaaaaaaagtcctctgtaaaaaaaggggggggtcttttgaaatgcaataacttacatgcaaaaaaaagctttacacatgaatctttttcagttttccgaacttccccatatgaattcctttctttatgattttctagaacagcaaaacacagtagtcccaaaaaagagagtaagagagagcagcccatctaatagagtgtcccggaggccagcgccagcgggtgctgtaaggagcccggcggcggcaggtgggaattgattgagctggctgcacttgtgtaccaggatgcagagttctccaggtagctggacgctggggactggttggaggtcggagggtgggcatgagggtggtggctgagcgagcgggacgagccctggggctcccacaccgctggagactgcggcgagttacacgccattgggtcgctggagctgggactgtgctccggnggcatctccccgtttttc

SEQ ID NO: 210571 - DNA, 687 bp, Homo Sapiens
  misc_feature (21)..(21): n is a, c, g, or t
  misc_feature (387)..(387): n is a, c, g, or t
  misc_feature (605)..(605): n is a, c, g, or t
ttttttttttttttttttagnaagaagaatcacatttaatgagtttctttcttgcagtttcagatgctcaagtacagctgaaaaaaatctgaaacagctatagacccatgacagactgatacaaagagtactgcattttaaaaaaatgataaaaaaatccacacacttacacacacacacatacacactctcgctctcaaattagaccccccccccccacaaatgtacactttttggaaactaaactggttttgaaaccccttcttccaaaaagaagggcagaagagaaagatgaagagaggaaagaggatcgcaggtgcccaatccccgctccccccacaaggtcacgtgccgaatgttcaatgggtgggccaaggcagtctgtanaggagaccgcctggtgctgctgctattgccccaggggctccagcaagattcccagctccatggtaatactgaatgcgtgcagagtggccaatgaactgcgcggttaaaaaaacaaaaggcaaacacaaatctaaagacatggataaagcccaagagagcccaggcccacactgggtggggccctgggggaggggaggctggtgggagatggtgtgcanacaaaggaggtctatacagcaaatggtttatattacagatgactggcagtttagagtctcttcccagttcaacagctgctcc

SEQ ID NO: 210572 - DNA, 650 bp, Homo Sapiens
  misc_feature (579)..(579): n is a, c, g, or t
ttttttttttttttttttggggggcaggatcaccagaaagcttttattttaacccagggccagggaggccgaagcttcaatcctgctgcttggttcgggaggcctctgcattggcccggagcacagcccctggggatggatacggccgctgctggaagaggggcccagctgctgtggtgtcagcgccagtcttggcctcattccgcttggggagtcctgttgaccacgtgccccggggggcgtctgagtatgagctagggtccatggggtctaactcttcatcctttcggcttactgctgtggaagtggcagggcaaagtcttcaatagaggcaccaggagcccctgatcactgagccccaccccacaagaagaaatgaagcccctggctgccatgtaccacagcaccctcctctagccccaggtccaggcatctttttgagggaaggcttcctcacgcagtgcaccctgcaccttgttggtctcaccgagccccattctgcccagcttacccttcttgctcttgggatagggagccagctcctcccggcgatggtggcgccgttctttgccctcttcncggtctgccttgtcatacccgcggtcccgatcccgttccctgtctcgctctctctctctgtctaccttgtc

SEQ ID NO: 210573 - DNA, 714 bp, Homo Sapiens; identical to SEQ ID NO: 49639

SEQ ID NO: 210574 - DNA, 671 bp, Homo Sapiens
ttttttttttttttttttaaggtaaagcgaatgtttaatgaactcagaataacaacataccataaaagtttttcttataaaaactgaatgtggtatgagacatttgttggccaaaaaaaattctctttgctaacattaccggcggtgaccaaacaatgtgtttgggcagaaacaaaatcaatatcaaatattaatatttaaagctgaaggaatcttatagcaatcaagaacttctggaatttagacgcaataaaattgaggctaagagaagtgaactgatcatttagctagaaagtcaagaaattcttcataagctcaaataaaaacaaatgttatcatttatcaccctctaacaatacttgacagcattactgaaaacaacaactcaaataagatactctccatttctatacacacgaaatatatacatatcacacatacacatacacacttcaaaatctgaaactactgtagttctagctgatgcaggaggatcgaatgagcccaggagtcccgacgccagcctgggcaacacgacaaggccagtctaaatggcaattcctgtgaagtagatgatgatgaagttccaggtaattctagcatgtttcctaatgtactggtactggaatctggatcatccgaaagggctgtccttgtcttcaggggcatct

SEQ ID NO: 210575 - DNA, 680 bp, Homo Sapiens
ttttttttttttttttttcaacgttttcaagttttatttttaaaatatattacaacatcacattaaaaacagtagaggaaaacaagcaaacatgatagaattacttttttccaactcaatagtacttagctttacctagaattttcatacagttgatgctaacttcttctgaaccctttctgactagtattttaccttatgtattctttatagtatttccatataatctttaccgagacctattcagagcataacatagacagggcagcacaagcaactgacacctttgttggtagtacagtgttttttcaaccagtttatgagagaatgaaaagaatgaaagtgaaaattttacttaacttagggttatgtagctctaggtaatctcttcagaactcccctgcttcaccttctcaagttaatcaacagtggctagtttataactagaaaccacttaccaaattgcctaaacaagaaaactttttaaaataacaatttgctgatctgtccaataactccaataaagttgaatttgctttatttttccaaaaattatgttgtctagataaagactctttgtaagtgtaaatgtatgatatattgagttgatttttagtccctattagagagttgttagacaagttattaaagtttaagaaaatttggattctaaatttcca

SEQ ID NO: 210576 - DNA, 731 bp, Homo Sapiens
ttttttttttttttttttcatttgttattttcttttatttgtgaatatgtgtggggttgggagactgggtgctagacatgagctgaggtccaggctaggcacagggagctgacagctgcaggacatgctaattggtctgggaaggcctttggaatctagggaattggctttctgagctgaggcggggtccaggcaaggaggcaacaggctgcaggaatcacaaagggaccggggacctccatgtacccaatatctaggtctcatcagtcggagaaacattctcagctcttggtgaccttgtcctccctcaacacggtactcactgcatatggactcatttgacaattgccacaaaggctttggcctcagaggcactttaaggatataacagtaggaaagggaggcttggggagccagagagtcacccacacaaagccccacacgtgttcctagcagaaccaggatacacacccaggcttcctgaggccacatgtcctccctgtggctgcctggtcattccccttcacctagcagctgtcttgctcccatgtagaacagcagggcccagcggccacctgcacctcgccatttcctccagctctgtgctagaaatgatgcaagcaggaaaatcatttgcttgtggacctactatgtgtcaggcacctgctgaacagtagcatttgatgctctcgacggccttaacaggtcggcactgatctgttgatgctgca

SEQ ID NO: 210577 - DNA, 508 bp, Homo Sapiens
ttttttttttttttttttaataatgcagcatacttttatataagaaatttgtatataacattacaattatccagtataattaagctaccaatgatcttacacaacactttacatgcatatgtatgtacacacagagttatttctctcacagaatttttaaggactaatttgccatttgtatgagtcaaaatgtgtcagtttgtcttagtacacaaatttctgtgaaaatgctttgttaaaactgacaggatggcacatggtaagaattataccacatcttacttaaagtgaatgaaaagacaattctttttacttatttactagctactatgtttttagaaagagaagtaatcaccatattatgggtgataaggtcccagattaacgtaagaaaacgaggactaaactggacatccagaattcctttatttcaaaataattttggcttagatttaccaactgtaaaatttcccattttcccaggggagacaagggaaaaacagaaaca

SEQ ID NO: 210578 - DNA, 737 bp, Homo Sapiens
ttttttttttttttttttgaccatcaacaaggctgtatcacttgaggtattattcatacaacagaacaccatatagcattaaaaatgaactccaggacccaacaaggatggattatacaatgctgagtgacaaaaacgacacaaaagcacatacacaggattccatttatctaacactcaaaagcaaacacaactatgtcgtataaggctgcatacaagaatggtaaaattcaaacgaaagcagggaaatgactgacagaagacgatgacctggaatgtgccccaatctcagctgcacatcaaatgtacctgggatgaggtgggtggagctttgaatctaccactatccaggccacacacctagaagctctggtttcattgtttcattgatttcattgttttgattgatgctgaccttaggcagcagagttttcaatgctctccaggtgtttctaaagtgcagacaagtttaggaccgtgcttgagggtgaagggcaggactgtgatggggaggggcaaatatggggcccttggggtgcaggcaatggttttccttgacctgaatgggggtctcacaggtgttgcatatacatatacgtacacatgtcagctcttccctttctccacagcatacacgtaggtgttccacggcccacaggtgacagcctttacttggagttgcttatctacaaagtattccacacggcgagggcgatccaagctggtggtgtcctcgt

SEQ ID NO: 210579 - DNA, 729 bp, Homo Sapiens
ttttttttttttttttttacattgtctaatagacttgtttattattttaagctggtaaaaagagacttatgattcatgttgaagaaagagttatttgtgcttgatacattgaagacactgttcaaaagcagtttgtccttataaaaggatgacccctgtagtatttcttaggcaaggagggacaaattcaaccaacgaaaagcacatctcgccccgagttccccatgatttctccacatatagcaaaaaaatacacatcagtaatttatttgaacatgcacatcagtgagtagcatagttctaggctactcaagaaacaaaagggagaatatcagcattacctaaataaaaaagagaggtgaatcacaccattttaattgtcttaaaaacacggataagaagagcaattaaaatatagtcctaaacagtactagctaatgtagattacataagtatacaatatgattcaactaatagtgctctgacaagcataaaccaccagttctagtaaacaaggaccagatcaattgctgagaaaatgttagattcaaatgtagaacaagttacttttatttcagtactgaatgcaaaacacaggtcaagtgtgaggacagtgttctaaaaaaggtggctctattaaagcaaggaggccatttccttttgcatttttataattttggaattctatttttgacgttcactttctctacttttcctccctgagcacta

SEQ ID NO: 210580 - DNA, 749 bp, Homo Sapiens
  misc_feature (456)..(456): n is a, c, g, or t
  misc_feature (633)..(633): n is a, c, g, or t
ttttttttttttttttttgatttttaaattttctttatttttgtagagatgggggtctcactgtgttgctctggctggtctccaactccggggcttgagcgatcctcctgcctccgcctcccaaagcgctggcattacaggcgacagccatcgcgcctagctgcgctggtaaaactggctaacgcgatctatcttaattagccacccacagctgctaccgccgccccatccccagggaccacacagacccaggggacaaagaagggcgcgggagacagcggctgaggaagcctttactgcggggcggccggaggatcgccgagctcagggtcccccaccgcaccgcgcccggcctcgtcctctgccccaggcccggccccgcccccagcctcggccccagcctcggcctttgccggaacgtcgccgaacacttcccggtgcatggcggtgacgtanttggagccgctggggtcgtccaggcgcatccgcagcaggggcaggaagcgctcggtggtgaagtagcgcagggtcggcttcggggcgcgcaaagcggtgaggaagacctccgccacctcctcagggttctgcgccgcctcgcgaaagacttgcttgctgtgggcgaggtattggtanaagcggtggaaggtgtggatgtccgtgcggtccagcacctcctctgggctgcccaacaccttctccatgaaggcggtgtgcactgggccgcactcgatcaggctcaagtggacccc

SEQ ID NO: 210581 - DNA, 739 bp, Homo Sapiens; identical to SEQ ID NO: 57775
  misc_feature (24)..(24): n is a, c, g, or t
  misc_feature (627)..(627): n is a, c, g, or t

SEQ ID NO: 210582 - DNA, 693 bp, Homo Sapiens
ttttttttttttttttttgtgtaaccctgcagtttattaaaaaataatacaaatgcttataaatttttatttatctaatttcctgaggattttgtttctccatatcaaaccctttcaccatggccaacatgaactttttttttttttttttaaggcagttctctgctaggcattaaactttaaaacatttgaatcattagaccataatgcttcaccctaacgatatttatataaaaggaagagaaagacattttcttttttttttgagacggagtttcactcgttgcccaggctggagtgcaatggcgcaatctcggctcaccgcagcctccacctcctgggttcaagtgattctcctgcctcagccttccaagtagctgggattgcaggcatgcgccgccatgcctagctaaatttttttttgcattcttagtagagacggggcttctccatgttggtcaggctggtctcgaactcccgacctcaggtgatccgcccaccttggactcccaaagtgctgggattacaggtgtgagtaaccacgcctggctgagaaagccattttcaatacagagtgtcaaattagatagcctctattaattaattagattttggaaagaaatgcagctttttagttagcattgaggcaaaacagggaacctgcttctttccaattgcacttgggtctttgca

SEQ ID NO: 210583 - DNA, 708 bp, Homo Sapiens
  misc_feature (639)..(639): n is a, c, g, or t
ttttttttttttttttttctggaaagcactgtgtatttacacaacagtggacgccttttacattgcagaggggcgggtaagagcgggatggctaggaagctacagcacctatttggttatgaacacagcattttcagatggctgggggaatagatgccacttcccactcaagacagggatttgctcagcgggaaagcaggtaataaaggcagcacatcctgcactttgaactgcatccgtctcatcctgcagccaccctgtagctcaaagcacagttctggagcctattaggtccaaatctcaatctacccttgagtcagcgaggccttaggcaagaggtccctcgaagtctgtcttcctgtggcagatgaggacggccacaccacaaggcagtcgctgggccggggcccgtgtccgaggtggcagtgtgcttgggctccatgtgcctagcccgtgcgtgtgttcatcactggcagcggtgactgcgtgctgcttgggggagagcacttgagctgcctcagaacaccctggtgagcggaggacacttgcatggatggaagcaggaccgaggcaccgtgttggtccctgtgagactctgggtgcactgagctttggggaggggtggtggcacagacctgngcctttctactctcctggcacacagcagtcagcgctccacttcccttctcactacggtgtttctctctg

SEQ ID NO: 210584 - DNA, 692 bp, Homo Sapiens
ttttttttttttttttttgaacagtaattcatttaattgcaaagcattttgaaataaaaaaaatcaaacttaaaactgtgttctgttcctggaggtggcctgaggcctccccgacagcccagcacctgcgttcctggtgcgaacacgctagcacagggcctgccgcagggcctggatgcgggcaacgcaggcgccaatgggctggcgctgagcctggagctcctctgccagcagctggatctgcatttccacctgttccagctctttctgcacctgctgctctacttcctggtcctcaggccccggctcctctctgttcagctccagccacctgcgcaggctgctcgcttgccgccgacaggaccagaggttctgcttggtggtctggtagtgcagtagttgctgctggatctcctcaagttcagcctcaaggtccaggctgcctgcagttgaaagtccaggcccagccctggtggctgagaagtccccaggaaggagtagatgggggtcagggacactggccagggatgaggggaccgggggcttatccctaggagtagcccgctgtgctgacaccctggctggtgcagccgccttgcagggcatgaaggaggaaagaggcagcagcagcagctccgggcctgtgcttgccgtcgggggctgcttcgggccaggggcgcttgacaggcccc

SEQ ID NO: 210585 - DNA, 681 bp, Homo Sapiens
ttttttttttttttttttgtgatttgctgccatttatatactatagaaattttacatgctgtatatttacagtggggcaagtgcttttttaatctttagaaaaacaaagatcaaactttaaacatctctgaacaacacaaactgtataaaccatacagattattcagatacaaactgtattaaatacagttttccccactccatctcctgatgcaggaccagtgaattataagtgtatcacagtttgatagcatatccatattaaaaataaaatcacagtatgattgtgtctgtaactagaaactcgaagggaccaagcagacaacggagactccagtatcagtgaagacaagagacgctgtatcaaaaagtgttgtgtaatagaaacatactgtcggctttacaaatcatgtctgggttatacattcataatgtaaatactcatcataactgggaaattgattgattggaacagttccacaaagttcaaaaacagaacttgtctataaaatacatcttcaaatcttgaatacaactaaaataagcaaattagtttctagtatcagacattacagaaaacagactgctctccaaagtctaggtgagagcttgtgagtttttacataagtctttacattaaatatacacactgtcagtttgtacttttgacaattccatggt

SEQ ID NO: 210586 - DNA, 623 bp, Homo Sapiens
  misc_feature (597)..(597): n is a, c, g, or t
ttttttttttttttttttgctgaaaacacaattctgagtttaatgttttctggaaagagctggtggagcttaagcagcgagtgtggcgctctgcttccgggcacgcccacagcaactcggcttcagagtctgacccgcagaagttctttaaagagagggacttagggaccccagatcccggcagccaggcccagagagggaagcaggattagtcaaaaccaggtgggggatggggggaaggaagagaggcagcgggggtttgggggcccagcgggtagcaagagtgaccctgggcatcaacatggggtgaggtggagaggggctatggggttcctggagatcagagtctggggtggccatgggcagggcgagagcaccgcggagacaccgcaaccctgctccagctggtcctgcaattgccacaggggctattgcctctcctgccacccagctcctgagagtgaatcctgacacgggtgattgggatgtgtacttcctcttgactctggtctcaggactgaggctcacaggagcctgagaaacagacaagcgggagctttctagccccttccagctctcccctgctctgaagcctanaaaaagcccctctcaggctactggtc

SEQ ID NO: 210587 - DNA, 726 bp, Homo Sapiens
ttttttttttttttttttcgtagctcagttttattttctacagaaacaaacatgtaagccgtcctcctccagcgacaaacaatcaggcccccacaatgaactggccactcgtgctgggaccattccctaggggaggaggcatgacctaggaaggggcgccaggctgggcttagcgcctctgccctgagggaggctgagccaaaaacacgggcagaaagcactgcgtgatccacatcaacagggaaagctgctggagacaggagctgatggagagctgcagttggcggtggtctgcagcagtcagtcggatagtcagtatgttgccggacacagtgaactccttcagaagcacccctggcacgggaagcggtggggcatcctgggccaggctcctgcgggccagctctgcttccatgggtgtcgcgaaaggcatggcgaggtagaactcaagcaggcggctctccggccccctggccccgcatctgcagcatccattcagccctgaagccgcgccgccatgcggaccccgcggggcgcctcctcccggccccgaggcccttgctgcccctgcgccccggggacctctgccgcccgtggcacccgcctctcctgggccgccagcattgccccctgggccatcaggaatgccagggcctcctgggccatcagcatcgcccgtcgaacccctgtgcccggccttcggcctgcatggctccggagcctctg

SEQ ID NO: 210588 - DNA, 753 bp, Homo Sapiens
  misc_feature (697)..(697): n is a, c, g, or t
  misc_feature (711)..(711): n is a, c, g, or t
ttttttttttttttttttccctggagatactcagacactgtattgttattggcgctgtcctgtgagggcagtgtccaggctgccctgcttgtcatatccatgccctggctctggccccggtgagcacttgtgctgcatgaggaaaggaggatcaggtggggtcaaaaccaaagcatcgaggctggcactggccaagacagactctggcagggaggggagtggaaggaaggagccccaaacctggagtgagacctttgactttctgatgatgtggccaagaactaggagtcacctggccagcacagccaagagtggggctgggggcgcagccagctttaaggtgtcaacacctggcccttgcggggaaagagccttcagcagcccccacggcctggagcctgggtttattggagggtgctttcttaccctctgaacccagtggaggagggggcaatgggatattcctgctctgtatggcctctgggtcagctttttgttgcaaaatcctatcccccgctgctagattctttgaagcaagggagaagcaatagcccagcctcagaatgattctcaggaaagcaattccactgccagtggactgggtgccaggaggcctaggtctggatctggggctgccactaatgacaggaaagtgggcttatcctcaacctttctgagcctcagtgtcattatctgntaaatggggatgantatacaggtagagtgctctgatgactggagacatggagcgga

SEQ ID NO: 210589 - DNA, 736 bp, Homo Sapiens
  misc_feature (642)..(642): n is a, c, g, or t
  misc_feature (663)..(663): n is a, c, g, or t
ttttttttttttttttttaaacatgacttttgattttatttgcttctcataattattttagagaacagtaaatatgaagattagtataaattaataaaatgtattagaatttaggctctctgagaagattttaactatgtagaccataaaacagatacagcagtgctctgccattaaaataattatgagttatcacaaactctgtaaaaacaatgatttgcatgcataaaaaagtcaagtcaagatataaacatgttggtgacctctggggttcttttaatgagtgtttccacaggggttgtctgagatttggcagcccatgttctggctggttacttgcaccttgaagagcgtcccatcagcacacatgcagagcttgtagcgtacccagtcaccactacccaactggtctccactggaggaactgggtaggcgggtggtgctgaccatcacagatccatttaggatgatactgttttccgcctttaactccatattaccacccatgtgaaattcaatggttttgcccataatgaatacaccttcatttccacgcacaatagcacgcccatcaacttttatatttaaatcactggtagcattgctggtaatcctttcagtagatgccttttgaacattcanacttttcactccacttggcanatgaaactcatgagtttcatagtctgtgctgaataagaattttgagtcctcgggtcaaaaactgcatgccgat

SEQ ID NO: 210590 - DNA, 688 bp, Homo Sapiens
ttttttttttttttttttgtgtgccagtaaaactttatttacaaaaatattatgtggaaaagaacacaaattgtatgatcccatttataggaaatgcccagaacagacaaatccatagagacagaaagcggatccatggttgccaagggctggcgggagaaggcaacgtgagttcataggagcagggtttcctttctgggtggtaacgttctgggattagaccatggtgatggtcgtcgtacaccttgtgaccactgagtcataaagttcaaatgggcaaacattatgatatgtgaattctctatctataaagttgttttaaattaaacaaaacaacagtcaggctggaagtggtccctgggccatagttttcaaccctggtcttagtttgaacaaagaacacctaagatttagcaggcactttcttcctaagaccgttcatgcaatgtctcatttgtaaatatactaatctcaagggagaaagagatttctaagagtctaacaaaaggaaacctgtgcatgaatccaaaataacacacatccatacatttctgaggccataattacctcagacttcccacctcactttctgtatttttatgcgtcagaatgccaagctcttcttctgaggtgcctctgagtccctggctgtcccccaggcttgcatacggcatcctcggggactcct

SEQ ID NO: 210591 - DNA, 745 bp, Homo Sapiens
ttttttttttttttttttgtgacatgatgagtgcatttaatctacaatctacaaaactatacaaattaccaattatacatataatccatttacattgaagctccatgaggtggtactgaataaacactgaggcatcaaattttcaacaatggaacaaggctcacggaacagcagcacattcccaccttttagtctagcatcacaacacttcccctgggatttgtacttatttatatattatctaagtcctaggaagttggtaacaaaaattttaagtcaaaaggataatgaattaaacactccctaaaatctattctaaaacatgcgtgtgaaatatgaagagatcaagcactttgtaaatgtgagattttacagtcacatgttcctttaaacttatactagtatcttcactagtatctgcacaattttctgtaattaggcttttcactaaaacttaatagaagaggaaaacaacaaagaaaaaaaccttatttgtaaactgtacagtcttagaaaagtggtactatttatttttaaaaccaactttctctgctaaagaaatcacactgtgtggtcatcagaacagtttaagtcactttggcaatacagagatttatttacccttattttgaataacaataatgatgatgataaactattgtcacggtcatatatttttcagaacttacgccaccatggaggcaatgtgtacagatatttctaataaacctaatttatcacagtt

SEQ ID NO: 210592 - DNA, 647 bp, Homo Sapiens
  misc_feature (125)..(125): n is a, c, g, or t
  misc_feature (614)..(614): n is a, c, g, or t
ttttttttttttttttttgatgttcttttgtcatttattcattcattgaacaagtatttacaaaacagctgctttatgctaggcattgtttctgggcactgggaacacattggtgaacacagatngaaatggtcactgaccttgtggaactttccatccaatgaaactaggatcattattcaaatgactggacaaatacataggaaataactgtgttaagtgctctgaaggaatgatatatagtaccatggaagtgtgtaactgggggacttgactgagtctaaggagttgagaatgagtttgcaaaggacacagagaaagacaggtcagagcaataggaggagaactggcagtgacatcagagaatcaaaggaggaggtggtcgactgccgagatatggggagctatgagacacctatttgccttgactcctcacccgctagttgtgagtacaggtatggaaaggctctgccattgtacctggttcacagttggtgctctgcaatgttagctcccttccccctcccaaagcagagcctccctccagggaccttagatttctggaacaaagtagctgcccgggcttagcctcctctgtcaactcaggctcccanactccagccatccagtcctcagggaaaggccca

SEQ ID NO: 210593 - DNA, 735 bp, Homo Sapiens
  misc_feature (670)..(670): n is a, c, g, or t
ttttttttttttttttttcattgaaaataagtttaatgattattaagtttccaagctagattacagaagtctttttagcccatatcataaataaaatagttctgaatttttcgtatggaaaaatatactctgagttccaagcaaacaacttaagaaaatttttagaactaacacattcctatattgggaagagctcaaaagtctgttcttcctccccatccactgttgtttaattaatctcttaatatcataaagtccctcatgtgccaagtgtagacagtcatttttgaatcagggctcactttgttagcttttttgtcaattaaacctcttttctatataaattaccgagtctcaagtatgtcttcatagcagtgtgaaaacagactaatacaggaatttggtaccaggagtggggcattgctataaagatacttgaaagtgtggaagcacctttggaactgggtaacgggtagaggttggaagagtttggagggctcagaagaagacaggaagatgaaggaaagtttggagcttcctggagacttgttgaatggttttaaccaaaatgctgacagtgatgtggacgattaagtccacactgaggtggtctcagaaggagatgaggaacttattgggaactggagttgccaatagatcagcagttaancagaagcttgagttgagtatggacctgacatatggatagacatattgacatcttatgctagtgtt

SEQ ID NO: 210594 - DNA, 613 bp, Homo Sapiens
ttttttttttttttttttaggagaggattcagaatttatatttcagtgctcactagccagttcccatcctccgcccccgcccacccccgcagtagagaggaggtcctggctaccatcaagccgtccctgagcgcagtgtctctccagcctgggtgtgtgaagggagcaccttccttcaagggtctggggcgaagacaaagtcgagggcctggcgctcagcccctgccacgttggggtgccagaggtccacgatgaagaccactcgaggcccatcttcgggggagccattgtgagccactgtgtgtagaaaagagtcgtccaccagtagacagtgcccctcagcccagcactggggctcaccgccgaccaccagctcacagccaggagggatctttaggcccagatggcatctgacccgggcattggtgggcccacagcggccctcgagccgggccccaggcaggagaacggaaaagccggcattgccgaaggtgttggcactcataaagcttcgaagccccctcagtgcccgataggcccccgggcaccggcggcagttgctgggttggcaccggcctgcttggtacagcaggagctggtagcacccgggggc

SEQ ID NO: 210595 - DNA, 755 bp, Homo Sapiens
  misc_feature (608)..(608): n is a, c, g, or t
ttttttttttttttttttatttcaaatagctttttattcacataggactagaggaaaatctaattcagtagaaaacacaaaacaaaaggggttattttattctattcaaaggagagtcatgacattaacaacaccaacaataatttggaacacaccattgcattttcaaatacaaaaaaggaatcagaagaaggtggacattccatgagcatgttcaacaatggtattgttattagatattaatcctttattagattattatttttcacatctgggaaaataccactggcagcacaattttaagaaaagtttggcaacatgtatttttctcagcagctctggatgacagatcttggtgatgctagccaaaaaaaattaagggcaaaaccactggtgcacagaggacaacaaactgatcttattacagaaacggatatcagaccacaatagaaaagacatttttattttacactaagccaaaaattctaggctattggcatacatatcaacaagcctggtctagaatgtttaatcacaaaagtactaaatattggtttcctgcctgccctgctcaccttatttaaaaatatcaggatatttgctttcanatgacacagattgctgaggctgtaacctacaaaatggtcactcatttttaacggcttgtttgttatacctagaaaccactgaaaggacaatttcctatatcatagttactgtggaggtagaactgacgttgcttcccagaaagattt

SEQ ID NO: 210596 - DNA, 587 bp, Homo Sapiens
ttttttttttttttttttggctatgggaatttcaatttattgcataaataatcttttagacctcaagatacacgtgacctagggacagtttacatcaatgggcaagacttaaaaatagacaccaagttcagcaagtatttgagcacctactaaaaattacacaactcccacaacaacgcattttgcgtttctaaagttgtaagcagcatgttcggacgcttgatgcaatttcccaagttgtttgggccccccccccaaaaaagtcttctcagtaaaaggtggggggaaggagggtattttgggggcaacaaaccaaactggtctgtcgcatgttaagtcaatttcacgttcacctactggtcaccacgaagccgaggaaagttttaaaaagaacattccggggtctccagagatcatctctccaagtccgctcggcaccggcgcctgagctggggctaaggtcccgcgtctctggttctgtcctaatagaatccgggacatccacagggattccccggggcagccttcagtgaagaccagggagaggggccgcccgggtctcacggatgcttcccgcgctggggatg

SEQ ID NO: 210597 - DNA, 699 bp, Homo Sapiens
ttttttttttttttttttgctttaaagttaatttattaaatttttgttgtacataaaagaacattaagtattagacttgcaaagcacttgcatttcttatctgacatcttttaggacaatttgattcattgtaaatccacatatatgtcattttaaaatcaaagataatattaaacaatttcagaaaattgttttaataatatacagcactcctccttctaaaaatattttaaaacataagtattgacaaattataacctattttaaattgtgtagagtttttcatgtattaaatttattttactctagcaagtagtataaacaaaataaacatttaagccaaaaagttcaaacatcaatgatcactgatttagataaacaaatgaagtagagtaataattactttagataaatactaaagagttttatgtgatcattcattataatttaaaatagtgctacagagaatgtcatcttggcttgctaactttttctgaattcaatatgttaatatgagtatctaattatgcaatacaagtaaacaatagtttgcaagattggcaaatttaataggttaaaaaatgcacattctaagggcatgtaattcctgttcacataattattgccattcttttatactaggatcaaacactagataaatgttgtgctttggtctttgaacagttttaaacttctact

SEQ ID NO: 210598 - DNA, 773 bp, Homo Sapiens
  misc_feature (683)..(683): n is a, c, g, or t
ttttttttttttttttttcacacacaaatcctgatttattccctgtttctcatacatcgttggcattgttctacttaaacagcgacagtgatgactccaaaaaaaatgtttagaattagaagtgcatgttaatctgagtaacttaagtacagaaaagagttagtacaccacaagcattttctacacttttattttgtggtgattgtgagacaaacacagtccaaacaatagacttcttgtcctccccctcccaacaactatctgactccatagctcatgcaccccaattacagcaggtgtcgggctggcataaaggcttcttaccaggattccagtttatccttctcaatccttttctcatctctaacaaaaatgccacacatacatgtagttgtgagaggcaaagtcttctttacactcaccaccagggggcgtatgggagcacaaaagcctcacaaaactgctccaggatcctgcctcttccagggccggaatccgcggccttcccaggaatcctaacctggtctgggaaggggcatcacaaataagctggcactcagtcgtgtattaaaaggatctctaatgctccctttaagactttcacttctacgccatctctaacagggccatgcaggtctccatgagatcaggcttttttggtccagtgtttcccaggtctttcnctacactgtttcagggcacttgggtacctttcagtgcagactgcttcagggccagaaaactcactcgcacgtctttcacactaatgaatt

SEQ ID NO: 210599 - DNA, 744 bp, Homo Sapiens
ttttttttttttttttttgctgatcatggagacttttattattgagacctccctatactttggacacttcaaacttaagaccctcagtacttttggctaacctgggttgcaggcaccctcatccaaggtgtaaaggtcctaaggggcctgcagaggtttcaggaacatctcagctgctatccaaggagccagtgcttagaataggggctcggctgaagcagttggctgagaggcttctgtcttctcccttcctgtcactatttgccacactcttcccccatgcagcttctgcaggctcaggtgagcaggtccagcgcagaaacaggccttgccacagccgcaggctctggggctccacagatggccaagggattgaggaggtagagtgggttctggagtctttgttgctcttttggctggttgagcccagaccacagggagtgcatctgagtcctcccttcacacggcattttcctggatccacttccactccaccagttcctggaatccagccatggtcttgctcaaggggtccaggatgagttgggccagtgaagtcacaagcagggtgctgtctgtgcctctccatgccctggactgccaggcaggtggtgctcagtgcctgctttacatgttacagtcagcggcagccgtccagccgactcagccagttgtccatgctttgctccgagtcccacaggcctccacaggcgcatgaagctctcctgcaggggacgcctctga

SEQ ID NO: 210600 - DNA, 755 bp, Homo Sapiens
ttttttttttttttttttctgtatcacaagttttcaaatcaacataggcaactaacaataattctccatactttaatttgaaaacttgtgatacagaaaacataaatcatttaaacataaacatagaatgtgcacatatatctaattcactacaatagaaaaagagaaaaaaaaaagacatagtgttttgatgatgacttttagggtaagtccgttgcaaaaggcagggataaatacatttcacctaaaggcttatttgtatattgcacatgcaaaggaagatgcaagcaaggacaaacaaacgaaaaagtacatctttaaagacctccttattcttccgattttgctgaacaggaaactactgatcagtatttttcttagttataatacacaatagctacttcgtcagccactattgcatattttaaatgtgggtcattagtctgaattactataataaggaagacaaaaaacacaaaacaattagacagaaaatcatctaaacaatatgaaataagcctgggcttttttcatatattatcattgcttctaaatataatctcttaggaaatttatctttttatttgaaaactttagaatagacagatcctgaaaattttaatctctgtaaaatgtatataaattgtaataatcaatctagttgttacaatagttcagtgcttttagttacatattactagagttattgcacaggcctcttatatactatcaagtctataaatcacctcgtgccg

SEQ ID NO: 210601 - DNA, 637 bp, Homo Sapiens
ttttttttttttttgtatttagcaggtactataattttataattaattttacaattcatgtagcaaatggaaaatcatacagagaggccaatgtatataaataagagtttatacagaaactgccaattcacaaaacagcactgcatggtttctatattgcaagcacaagacatggtcacatggttccactgtacaggtagaaacaagcccacagacaatacatagagtaccacctgaaacgaggcccttggagctgctcagcttcttagaaaatagagaactttcaatggtcataatacattttgattcaaaatgtcttctaaaatgttttcattgtgggagaaaattaagaaggggcaaaaatccatctatggaacttctgaattcatttttggttctttttcaattattttataaaaataaaataaaactagaaaaattgataaaactaagggttaaaagccctcaatatgtattaggtaagtaatctgaagtgtaccagaggtaagaaaaagctggatttagatactacattcttttcctgtatttaatgagtaattagccactttgctgcacagaaacttataaattattctctcaaaactttttaaaaaataaaaacttgcttgcctctaca

SEQ ID NO: 210602 - DNA, 1000 bp, Homo Sapiens
ttatatgggcattttaggcacattgtaaataaacaaaagatgaaggaggaatgtaaaagtccattataagtcatacttcaagatttttgtgggttccaacaagtggattagtaagatcaggcttcatcttttcattaagatattttacaaatcatttagtaaagatttttgaatgaatgaaaaatattagcctacaataatatgtcattaatcactggagacatttataacagaactatttataaaatagaattctcttaagttttaagtttctaattaatattatgtgagtcatcctaatatatatatatatatatatatatatatatatatatatatatatatatatttcagtaaacatattttgaaagttcgttttttaattacaggctttatatattttttaaaatagtagtatttagtatatacatgtaactacaagaattaaaagtgaaagtttatactggctaaaattaaaaaaactacatttcatttacattgttactttttgcccttagaaacatcaagaaacacacatggctatatgtttgtataacagattacatggcttctctagcttaaaaccaaaactttgtgtattcttaatttttaatagaaaattttatttttaaaaaaatcataaggggttctttttcaagtgaaaatcttcatctttcatgaaatgttttccttacacaattctggtgtacaagagatctaaacagagagctacagataggcttatggagatgagtaacttcacaggctgagactcttatgttgtcatggtgcagctaacagggtgagtgaactgtttcatgcttcatcaacaattaagttaattagctcatttgaaattgcactgctttgttgccaggatgttggcagaaacatcaaaaagatgtgtttacaaatggaagactgactacagggtatagagcaaaagcaccttaacaaccaggcacaagtacttggcatcacaataactttataaatgaat

SEQ ID NO: 210603 - DNA, 444 bp, Homo Sapiens
ttttagagaaaagagggaaaaaaccaaggaggcttggtaaaaacagggtcagggtcacatccagcccattcgagaaaaacttccaagtccacgtgttttccatttttttggtgtcaagacctatttacattcttagaaagtatggagaaccctaaagagctttgattatgggggttatatccattgatactgaccatacttgaaaattttaaaaatatttacttattcattaaattagcaataggttcacttcatgttaagtaatattttatgaaaataaccttattttcaaaaagaaaccagcgagaaaatggccatgttgtacatttttgcatgtatcttcaatactcaacagaagacaggcggatctgccgacatgcttctgtgttcaacttgctgtgatatgctattctggttcaagtatatgtaaagaaacaccccagg

SEQ ID NO: 210604 - DNA, 516 bp, Homo Sapiens
cacaaattataaaatgaagactttttactgagtcagcagaaacaactgttcaattctcctgtaagtccccagttacttacagttttctgctgaggtgatcatctcatgtggcatttattgccctctactaaaatgagctattatctgacactctgctctgtacagacgtgtttctgtttccattttcagttccttctccacatggtctaagtaccagtagtttagtcagttctcaccttttttgaggggaaggcggcaatggtggtatcaaaatttacacctggaaaacaggtcataaagaaaatcaatatagaagggaaagtgctttaccacaggaattattatttaattgctggttgaattcttgacttttggttaaaaggtagatataacaaatatgtaaaccaccctcaaagccaaaccaaaaccaacagcaacaggcttttcaatcaatgtaatttatacattgggttctggaaaacagaaatgtcctataaattttatataaatgctata

SEQ ID NO: 210605 - DNA, 483 bp, Homo Sapiens
attttaaaaatcttttttcttgatggtgaacaagttttgtcctatgctatggaggaggcatagcacagtgattaagagcttgggctctgtagttggactatgtgggtttaaactttaaacccagatcaattgtatattagctacatgagctaatctctttaagcttccatttcctccctggtaaaatgaaattggcaaataactttctaaggttagtgaagataggaaatactcgaaggctgcttactatccttattacattaaagttatgggtatcttgaaactacaaacctgatgtataatttcagttttctctcatggtcttgttactaccatcatactcttgatattttaggatactttaggattacctttgaagaaccctttctagttaattctttgaatatgttttatacttatttgatggtagttgtaactgtgtacatttgaataaaatttctaaccataaaatttcgccattgc

SEQ ID NO: 210606 - DNA, 402 bp, Homo Sapiens
tttttgtaattacaattatttttatttttttgtttctctacgtaagtacaatttataaatacagatatgtatttgtagatattaatttcacatttacatataacaatagctaccaattcattccttaaactatatttttttttttttgcagcacacatctagttactaggaatgcagcaatgggggaaaaatatgtccccactctcccaagctttctggtgcagaggaccagaagaggacctcaaaggtgtcttgtcttgtcttttctttgagatggagatttgctcttgttgcccaggctggagtgcaatgacacaatctcggtggctcactgcaagctccacctcccaggttcaagctattctcctgcctcagcctcctgagtagccgggaccacaggca

SEQ ID NO: 210607 - DNA, 1000 bp, Homo Sapiens
gtgagccctgatccaagccctgtacatacctgcctatttctaactcacagaggcctgagcagcttccccagagcttctgggagttctgcacccaggccgtctgactccagcacctggacctctaaccactgggtaggcactgccttccctcacgagcccagcgcctgcctagcatctgcttctgtcacagtgagggaaagatggtggctgccatttgagcttttaaaacagaaaaatactttgtcccccaaatttcctccctttattacaaacatgatttatgataaatgtaaagaatctaaaaaccaaatcaaagctagaataaacattatctgtagtgccaccccctaaaaagaattacttctagtatttttgtcagcttttctagtcctttttccccctatagaaatatacttaatgcagccataaatatactaataagtttataggcagcagcactcattagaaaagagcaagagctttggaataagacttgggtttaaatccatttactagttgtgtgtatttggacaagttattttatttccctgtgtctccatttgctgtctgtaaaatggggataataacacttcattggattttgcagtagcctagcatatgtaatgtgcttattcctgtcagctggcacacagtaagtactcaaataactttaaaaagtagcagttttgggctgggtattgtggctcatgcctgtaatcccagcactttgggaggccaaggtgggtggatcacgaggtcaggagatcgagaccatcctggctaacatggtgaaaccccatctctactaaaaatagaaaaaattggccgggcatggtggcaggtgcctgtagtcccagctactctggaggctgaggcaggagaatggcgtgaacccgggaggcaaagcttgcagtgggccgaggttgtgccactgcactccagcctcggtgacagagcgagactccatctcaaaaaaaaaaaaaaaaaaaaaaaaaaaaaa

SEQ ID NO: 210608 - DNA, 641 bp, Homo Sapiens
ttttttttttttttttttcactacttttttgatattttttattataaaagaaaagagaacaacataaaactagtggggtacttgacattgtttttgagaaactaatccatcagtatctggcttgatggaagtagttgcaattctcagtgagttctcaaggtgctcatcagatattttggttctaattttactcttcgtgttcttcatccttgaaaatagtagctcacaaatgtaagtgctgccaaaaagcaatgacatgaacaaggtgtgattgtgaagcaagggatatttgtcattgggaagacaggtcttacaaaagtccagtaaagaggcaaaatcaaatttttctataagttgaacatcagattgcagctctaggcattccatttcaaaattgccaggtaacatatatatgtcgactgaaaatggagttgcaaatataccaaaatattgatgattttttcagaaatcttgaaatacctgttttcaaattcctgtatcaaattgaaaagcaaggctgcgtatttttggctgttcacaggaccatgtttagccaacatgtcgaaatgcataaaattgtttgccttaatttgagcttgccataatttcagtttcatatggaatgctgttatggtttgaaa

SEQ ID NO: 210609 - DNA, 385 bp, Homo Sapiens
ccaaacatttgtggcagtcaagcttaatgaattccttttgattattcatctctgaagaagtgctggttgtccagaacctgatatttgtaggaggtttatgcagaaggccagagtgcctccagttctggactgacaactttttcgtgattcagagatttacctaagagacagtttagcattttacttctcaacagccaatgcagacaggcagtctggaggtttttcacaatgcagtcatctcctccccaactgctatagagatagacacatattacttcctgcaaaaatggcttgtttatgtgactccttgtttggcttcatttccccgacttcttagaattaaaccaggtgcaggaaagctcctgccttgagctgaagaaaccca

SEQ ID NO: 210610 - DNA, 1000 bp, Homo Sapiens
ttagaaggtgagcttcaccgaggcctcctggtgttgtggagagggagccccgggaatggctggatgcagaaggtgaaggttgagatgcaggagagggagcagttagccttctggcttgggctgtggtgggtggtgccctccatgagattccaaaaaggactagtttggggaggaatgaaattggcatttggagagtgtaagatactagtggagtctccaagcagagctgcccaggagacaggctggccatgaggagagtagcattcacctggatatagatttgggagccactcaccgggagagagattccatctgtgtgtccctgggcagcgtgatcatgggaataccgcttaacctcaaatccttggctttctctgtaaagtaaatgtaataagatctccacagggtttgctgtgagggttgaacgagctcagtgcacatgaaaatgccctatacactcgaaaccagctataaatattggttattattgttaggatgctgacgttcaaatataaattgccaaaatcatttgggaagcattgcatactccattcccacatggagagttgcagggcatgtgattatctgtttgttcatttagtcacaatattgatcaatatagaacaaagcagtatattttaaaaatcaaccaggagcagccattctttgaagtgttatgcaaccattaaaaattaggtttggccaggcgcggtggctcaagcctgtaatcccagcactttgggaggccgaggcaggcagatcacctgaggtcaggagttcgggactagcctggccaacatagtgaagccttgtctttactaaaaatataaaaatcaggcgtggtggcaggtgcctgtagtcccagctattccagaggctgaggcaggaagatggcttgaacccaggaggcggaggttgcatcgagccaagattgtgccactgcactccagtctgggcaacagagagagactccatctcaaaaaaaaaaaaaaaaaaaaaa

SEQ ID NO: 210611 - DNA, 1000 bp, Homo Sapiens
agggggttgagcatgtattgtcagttgctgtgggtgctgtgatgtgaaaaaggtgggaagcattgctttaagcccctcggggtcagaggccccatggagaattgggcttttgcggttttgttgtgcagtttggggtttcaagagattagatctaatggtatgaaaacaaagccaacaaagtagctctccacgggggtgtccgtttccagaaagagcacatgtgttggcagctgtgggtgctacagaggcctcagacacaacagcaatgcttcagcaggagagggacgcagttacaaagaaacaagatggaagaccatgtgtggctcttaaaaattaaaattcctgattctcagctgtatttcctttctctctgacaggcttggctttgccctaatttggcacacttgggtcagagagcagctttccttgccctcagcaatttgtcattcctcttttggtttctgagcacagctgctttgcatgtacggaggctgggctgtctgagctctcaggggtcccccggctccctgggtagaacgctctcctgcccagtgccggccaggacctcctggatgcgttcttgctctcttcaagaacagtgtctttctctaccatgttgcagtgctcagcccagtgcctgctaccttgtaggcatgcaacaaatacatcttaaggggattcatggccaggcagggtggcatgttcttgtctgtaatctcagtactttgggaggccaaggctggaggatcatttgaggtcaggagttcaagacgagcctggacaacacaacaagacccccaattctactaaatttttttttttaattagccagatgtggtaatgcatgcctctgtagtcccagctactcaggaggctgaggtgggaggatcacttgagtgcaggaattcaaagctgcagtgagctataatacaaggcttcattgcactccagcctaggcattagagcgagaccgtgtttatttaaaaaaaaaaaaaaaaaa

SEQ ID NO: 210612 - DNA, 433 bp, Homo Sapiens
ttttttttttttttttttttttttgacaggtgcaaaacagaggctttaatctgaacagcaatgagggtgcaaggggctgggagaatctaataatgtggtaactctagaaattagattcttcctccccttgccctaggtttgctgtttttgttatttttatttattgttcttgttttgattgttgcaggctgtttctgtgcagaggatcaacccaagatggaaatttaaggtctttccagatcttttttgagctgtacctttccctgagcatgcagtcactgtctaattttctaaattttcttattttccccatagttgttcatgaatttcctagtcttttaatgtctggctcccaaaaggggaaaaagagaaaaatgaaagaggggggcaattggtgctggccctttaaatactcttgaagatacttcagctg

SEQ ID NO: 210613 - DNA, 550 bp, Homo Sapiens; identical to SEQ ID NO: 46744

SEQ ID NO: 210614 - DNA, 458 bp, Homo Sapiens
aaacagagggagcaagaaagtcaaatggctcgtcttaaaaaacagcaggaagaattggaacacatgagactacgttaccttgccgctgaggaaaaagatacagtaaaaaccgagcgacaagaattgttggatataagaaatgaattgaacaggttaaggcaacaagagcaaaaacaataccaggattccacagagattgcaagtggaaaaaaggatggcccccatggcagtgtattggaagaaggtttggacgattatttgactcgcctgatagaagaaagggatactttgatgagaacgggtgtgtataatcacgaggatcgaataataagtgaactcgaccgacagatcagagagattttggcaaaaagcaatgccagtaattaataacatttggaaaagctttatagagactctaagtctaaattttaatttctttgtaaaaccctcaaaagtga

SEQ ID NO: 210615 - DNA, 592 bp, Homo Sapiens
tttttttaatttttaaaaattttaatttccaattttgccaagttcagaaatacatacaacttaaagcaaatagggtacaatgttaacaccaggtgagggttacatggtgttcactctactactgttttacttttgctgtagatttgcaatttttcaaaataaaaaatgaaaaaatgtttataagacaaagtctatgtcacagagtatcactagttttagagttaaaaggtgccctgtcttataggtaaaaacttttctgctaagagaagcatgggagaaatatttgacatgcattaaaggacaaaactggtttagaagccaataaagagagaacacactgcatgtaccaccctcatcatctcgagttttcaaaacaagcatgttcctcttgctccaacagactcccatgctaatcatgcaaaaacacagcaatccaccaacttccacatttacaaatgatgataaaagtttaaaaacatatctctcaataagatgaaaatgttttctgactttgacaaataaagttttctcagttgaatgccttaaaactgtctaatactctgaatttctcatgtactatttaatttggcta

SEQ ID NO: 210616 - DNA, 649 bp, Homo Sapiens
taggttaaaaatagattttaattttattaaaaatataatttaatgcaggttgtttgaagcatctgtcttcatatgatggcattagaacaccttggtataataaaaagttaccgtaatttatgattatttgaatttatccattctgaaaattaataagatctaaaactggcatgacaatcaagatttgtatttagtgaaatttaaaataaatgtaagccatagttaaaactgttgctgcattcatgaatgcccttaggaaaaggtccacagtaaaatcagaaagctgaacctctcctgctgtttataggatatgtttatgctgaattaattgccagggtttcttaaacttttagggaattatactttggtggctcaatagtagattctacaaattatttttaaattgatttcctttccttagagctgcaggagaatatctggcaaggtgcatttaatatttggaaaaaagatatgaccagtaacctactttaggaagaaaataagcatcacctggcatcaggtaggcatcgtaaggttgagctgtcctatctgaaaaaatatgcgatataatttattacagaagttactttatactaatgcttaacatttatgtttttagttacacaccccttccattttaatctgctga

SEQ ID NO: 210617 - DNA, 648 bp, Homo Sapiens
ttttgattctaacaaaatttattatgcagtaattacaaaggttaaagactcttccatctcaaataaaaataacagttataattacacacataatatagtaccttatagaatgattccaataaatatcacaggaaatacagtgcattttcaagttggagagacaaatactttctcattcacagtgtttgacataggaaagcctatttacataacaatctgtataaagtcatgctcttagtaacagtctatacagagctgtgccaacacaattctttcagaatgtgaagtaccgggcaaaccactcctggcgctggggatctggagaagccactggagaagcttcactctgagcaggactcaaaaatgtcttgggccctttaggtggcactggctgtggaagtggtttgctgctgttgaactcaatatcgtggactggagaattaggaatgggatccaggcggttaggatgtccattgcccactccaccagattccagagcacttagattgggaacactcacaaacctgtttgttggtgatttatcattcttcttcttttgcttagccaatggattaataacaccaacagtaggacttgagttaaacactttgttgaagttagtttctcgattgactaattccagctgat

SEQ ID NO: 210618 - DNA, 549 bp, Homo Sapiens
tatttagtgaagacagggtttcactatgctggccaggctggtcttgaactgctgaccctgtgatccgccgacctcagcatcccaaagtgttgggattacaggtgtgagccaccatgcccagctgcagatggatgatttaaaaagggttatggcattagctcctcttcaagaagccaaagtactactaaggcattcataaaaagctcctgagagaatttagttatactactaatgttgggattcagtctgttaaaccttaattttatgaaacgatgtcctaggcagaatgcttgaaaataattaagtggctactaatatcattaggtcacttaacccagtagtggttaactgggaatatataacccagtctatcaggtaaatggttcagaaccatagcagaaaaacctcagttgacaaaaaaaaaaaaaaaaaaattaacagcttcatgcccacttgcaaggtgactgtccttacagctatcaccttgccaatgggtggagagtctattgtaaagatatggttcccatccagcagggatactatggtagt

SEQ ID NO: 210619 - DNA, 465 bp, Homo Sapiens
ccgttttttttttttttttttttttggattttagtagcgacagggtttcactgtattgcccagactggtctccaactcctgagtaataaaaattcttattgtgctaaaacactaagcaatttttcctgcagatttttaatttaccacagtacatagttttaatttagaaaaaaagcaattagtagcatgcttctttaagggtggaaataagctttttaaaaatacagtggttatccctctatgggttggaagtttttacttttgggattctcatgtatgatcatttcaaattttatacttattcatactgatttcatgtttgagaaaatttatggttcaaattgtaatgtttacaaatctcaacttttaatcatggcaaagtggacattcacaacagcttcagaagagaaaagaaaatcagtgatataacaaacatttaagtatcatttacggcagccctataag

SEQ ID NO: 210620 - DNA, 582 bp, Homo Sapiens
taatatttaatcaactattaatcccatccagtgcattcttcgccttaatcacatttttcatctttaaaactttgatctggtctctatgtacctctttacagaatacactcataataaatgttttaaagtccttccatgcttattctaacatctgtgtcaattctaggtcagtttcagttgattattttcctccattatgggtcactgctttcctatctttttgcatgcatatttgactggatgccagacattgtgaatttatattgttaggtgctctttttttgtttatttctaccaattttctagggctttatcctgggatgcagttaagttagttggaaagagtttgacccctttgggtcttgctttcatgatttgtaaggtgggtgtggagcagcacccagtcaagggctaaatattttctgctaatgaggcaagattttcctgagtacgctactcagtgcccgtgaactacgagttttctggtgtggctgataggaactggcactgttcctggccctgtgtgagcaccaggaaccgttccctctaatcgttttagaagcttctatctccagccttgag

SEQ ID NO: 210621 - DNA, 1000 bp, Homo Sapiens
gaggcagaagaatggcttgaacctggaacgcggaggttgcaatgagccgagatcgtgccacagcatcctagtctgggcgacagagccagactccatctcaaaaaaaaacaaaaacccaaaaacaacaacaacaacaaaaaaacactttagatgccaattctttaaatagattaagggttaaaatattaagaatccatattcttaatatgttttaaatgtctatttacctattgaaaaggcagtaccattaaaggctctgagaagggtttgtaaaactttattgtgagtgatgctatcggtcatcaaactaataatagagattagacgttcttgttctgggatgttaaaaataacttaatctttccagattcttacaaatgtaaaagctatttaaattctattatgaaattatttgaaggttttctcttctcaattattttctaaagtgcctgattttgatataggtaaatatcacataattaaattagatatgaaatgaagcaaccaaccttctacatttgcccagaggttatacagtattacccatcttcataatctgatagtggattatgactatgatattcacatttctaccaggttgggtgatggtttaagttttcatatttcataattaataatatttttaaaaaagcatttttatgtttacactgttatatctcaggtcttatcaacctcagcttaaaaagttgaagtatcggctgggcgtggtggctcacgtttttaatcccagcactttgggaggccgaggtgggtgaatcaccagaggtcaggagttccagaccagcctggccaacatggcaaaaccccatctctactaaaaatatgaaaatcagctgggcctggtggtgggcgcctgtaattccagctactcaggaggctgaggcaggtgaatcacttgaacctgggagcctgaggttgcagtgagccaagatcacgccattgcactccagcctaggcaacgagagcaaaactccatctc

SEQ ID NO: 210622 - DNA, 1000 bp, Homo Sapiens
tgcattattaagtatatggttatataagttttgacaaatgcatatacctatggaagcatcactaccatcaagataaaagaacattccatgacccctaaacactcccttgagcccttttgcagtcaatcacccttttcttaccaccctaggcaaccactgttctttctataactaaattctatctagaatttcatgtctacaggatcatacagtaggtactcgcgtctatcttcttttactcaccaagtttttgacactaatccatgttgttgcatgtgtcagtttgttcctttatactgcagagcagtatagtccattatatggatataccacaatttgtttatgcattcatctgttgacagacattcctgtaaagctactataaatattaatgtgtatttctgtaaacaaacgttttcctggaattgctgggtcacagggttaagttttcagaaactgtcagttttccaaagtaatgtaccattttactctcccatcagcaatatatgattatttcagtagctccacatccttgctaacaagtggtattgcctattttttcatatatttttattagtgaattgtgcttttaaaaaaaaagcgttatgtaaaagatttgtgaaattctctatatactgatccaagtcctttgttaggtattttctaatagtattttctcccagtctgtgagcttgccttttcataggtgtatttttaaaaccaaaacctttcaatattaatgaaatagaattttttccctttatgattcctgttttgtgtgtactaaaagtctttacccatccttgatcatgaagattttctcctgttttcttctagatgttccattgttttatgtttaaatctatgacctacgttatatgccttttaaatatatgatacatatagaaaaataatgactttttattccatacagaaatacagctgttttgttgaaaaggctccctttacaacggcacctttggcaaaaaaaaaaaaaaaa

SEQ ID NO: 210623 - DNA, 1000 bp, Homo Sapiens
atagccaagaaacttctagaactcaacaaccttcattctctcatgtctgtggtatcagcattacaaagtgctcccatcttcaggctgacaaaaacctgggctcttttaaatcgaaaagacaagactacctttgagaaattggactacctgatgtcgaaagaagataattacaagcggacacgggaatatatccgaagcttgaagatggttccaagtattccctatctaggaatctatcttctggatttaatctacattgattctgcatatcctgcctcaggcagtatcatggaaaatgaacaaagatccaatcagatgaacaatattcttcgaataattgctgatttacaagtttcctgcagctatgatcacctcaccaccctgccccatgtgcagaagtacctgaagtccgtacgctacattgaagagctccagaagtttgtggaagacgacaactacaaactgtcgctcagaatcgaaccaggaagcagctctccaagactagtctcttccaaggaagatcttgcagtctcccatctcagcagcctgtcacatcaaggtcaagcagaagaggcaagactcaaacccacctctggccaacaccctgcctggatgtggcccagctcctcacgagtaccagcggctcccccagcatctgctgctccgcgctccccgtggcctaggaatctaagaaatgatcaaggtcaaccaggtgcagtggctctcacctgtaatcccagcactttgggaagccgaagcaggaggatcacttgagcccaggagttcaagaccagcctgggcaacatggcaaaaccccatctctacaaaagtatataaatgatctgggcatggtggtgcgtgcctgcagccccagctcctcagggcttaggcgagatcgcttgatcccaggagggggaggctacagtgagccgtgatcgcgccaccgcgctccagcttgggtgacagagcaagaccttgtctcaagaaaaaaaaaaaaaaa

SEQ ID NO: 210624 - DNA, 1000 bp, Homo Sapiens
gggaagggttgcctttgcccaaggctaaagatgacatgtccctgcacactttcagccccaggttttcctaccttgtggggaggtgagaggtcagggtgagtgctgggtttgaggctcagctgtgctgtgtgaagattgagaggagcccacctgatcacatggacagaacgcacaggctcctgggtggccctgcggctccagtgacatagcacatggtcgggcatacaacagtgcccaggaaaggttagctggtggtgtttccagggtatcgtgctgagcttctgagatgagaatgtcctgtgaaagcctctgtctggaggtttcattggaagtaaagtttacatacaattaagggcctaaaattgtattttcatttaccttaacccagattcccagcaagctagagagctgccctcaccccaaagagttcctcatgccccgtcctggataggcctgtcagggccaggcagtgggcgcttgtccctcgccccatcctggacagtcctcacctgtcgctcacagcctgttctgctctggtttttaccctcagtccgttttgcctattctagaacttgatgtaaatggagtcatgcagtctgtactctcgcaaaagtcttcttccactcagtgccacgactgtgaggttcatccatgtctctgcatcatttctgccctttgtatttttagggttttaaaagtaatacttttggctgggcacggtggctcacacctgtaatcccagcactttgggaggctgaggcaggcggatcacaaggtcaggaggtcgagaccatcctggctaacacggtgaaaccccgtctctactaaaaatacaaaaaattagccgggcgtggtggcaggcggctgtggtcccagctactcgggagactgaggcaggagaatggcatgaacctgggaggcagagtttgcagtgagcccagatcgccatggcactccagcctgggggacagaatgagattccataaaaaaaaaaaaaaaa

SEQ ID NO: 210625 - DNA, 1000 bp, Homo Sapiens
aagaatgaaaacctacactgtttgtcatttgctttggcagagcaaagactgcttacttagaattctatttgtaaattaaactgcaaacccagtttgtcataaaagacatctgatccttttgaaatgacgaaaactgtcttttgtctgtaaaggctgataaattaagtgccagttctcttctggtctttgatcttgcggagggttgtgtgtgtgtgtgcgtgtgtctgcagcttataatgggacatattctgtatgtcacgttaaatagtctccaaaagtgcattatttttggccttcatattcctcagtacaggacaaaaatgcaaactagtactgtttctgtatatattttaatggctacttaaaaatatctttataacatagttctaagttaaaataacttcctttttaaaaaaacaaagcatttattctttatatggatattaaaatttgggaataaaaatgccttcagagcatatttttctgtaatattgaactactttgaaatccattattaaggagtttgagaaagtgaatttaaaaatcctaaactcaaaaatacactaataccagccttgattgtccttctgtctaatgataggaaaaatatgattttaaagtcaaaatcagattatttatgcccataataccgtaaaatacttgctgaccttgagacatattaaaattcaactaccttatcttactgtagtaaaacttatgctatgaatgtacaaatctaatcctaggccagtgaaaaattacatctttttagctcattataactagattacctcattataaaatttttgcaaaaacaaaatcacaaagaaattattagagttactcatttaaaaactaatcaaagtattattcaatggatagagaaataattatgaaaatagaatcccaacttttaagaatgctttccttatatgcatgtacttcctaccgttaatgccttagggagaaagattgttaaaaagaaaaaaaaaaaaaaaaa

SEQ ID NO: 210626 - DNA, 1000 bp, Homo Sapiens
agtttccagcattgtgttatacttttatgtgtaagagcctgaagttgaacagaaaaaaaaaaaaaaaagtcggggcggagctgtcttttcttttaaaaatagacgcatggaagcatgtgtttgtttgttcctacttggtgtttttgttttatttataaaatgaaaacagctgaaataatttctggattgttctgaacttttgagcacagactcccagatggtttctgtggtctgggccctcaaaaacccacctgatgggggatggcgcccatctttggaaaaagctatttgaggctctgtgaagcagctctagtttgtttgttttcccttgtatttgaaaatggaagtcaagcatgctcccagggcagagaattccgcaactgtgaccatcttgcaaggggcaggaaaagatttacagtgttttgctagaccaatcgccacttccttctggggtaaaaatccttaccagcaactccttaccagcgactcctcttctggctaaattggagtagcattttcctatcaaagtcatttaagatacagattattcaataacctgagagaagggtggagtattcatttctaatgacttcacagaattccagtcctctctgagcccgaagagttgttgactatcatcaggtgttaggcctcacatctttcatttgctaacagtattttactgtctatgaaaatggttaactggtcgggcacagtggctcacgcctgtaatcccagcactttgggaggccgaggtgggcggatcacttgaggtcgggagttcgagaccggcctggccagcatggtgaagccctgtatctactagaggtacaaaaattggccgggcgtggtgacacgtgcctgtgatcccagctgctcgggaggctgaggcaggagaatcgcttgaacctgggaggtggaggttgaagtgggccgggatcgtgccactgcattccacctgggtgacagagtgagactctgtctcaaaaaaaaaaaaaaa

SEQ ID NO: 210627 - DNA, 1000 bp, Homo Sapiens
caggggaatagaaagtgggtaggactgaaaagaaaagtacttgaagaactaatggttgaaaattttctgaatttggcaaaagaaataaacctacagattcaataagctggctgaatccaaagaaaactacagcaagacacattcatagtcaaatttttgaaaactaaaaccagaaaaaggttgaaagcgatgagaaatgacaccctatgtatgttagtgaaacaagtaaaatgacagcatatttgtcatcagaaacaacaaaggccgaaaggaagtggcatagcatttttctagtgctgaaagaaaagaagaattaacccaaaattctacatccagtgaaaataacctttaggaatcaagggaaaatgaaaatattcttagacgaaagaaaactaagaaaatttgctgccagcaggcctactctcaataaatggccaatggatgttctctaaacaaaaagagaattctaaaacaataccaaaattctaaaaaaaaaaaacaaccaacaaaaacaatgaggaaaagagaagaatggagaaagtaaaactatagataaataaaatacttttcttcatcttttgagttttcttttttcccatttttattgagatataattggcatctctttaaattttccaaattaggtttgagtgttgaagcaataatagtactgtttaatgtttctaaatgtgtgtagagagaatatttaaggtaattcattataagtgagggagggtaaaagaatatcaatggagataaggtttatctacttcagtcaaagcggtaaaatgataatgccagtagactataagatatataaaatatatttatagattatatatatatatataaaatgtgtgcatatatatgtaatgtagtacctaaagcagccacttaaaagctatacaaaggagatatactcaacagtactgtagatatataaaaacagaattctaaaatattcatgtaacccacagaaaggccaaaaaaaaaaaaaaaa

SEQ ID NO: 210628 - DNA, 1000 bp, Homo Sapiens
ctttgttgctcttgtctgacttaccaagttctgtggtccacatactttatgaaagtggagctttcctaagctggggtggtcttggacaggcagatgcacatggttaagttaaacgacatggtcgttttaagctgcattaagtacatctgggcaacagttagtaagcccttcccaggataaggtgaactactggaacatattttattgccttttaattttgcctttggattttcatgatttatgttagattataaaagaaagaaagaaaaaaggacttataataggttaacctattttttcctcgttgctgaatttgagtttgaaatccttcatggtattcctgtgtggctccaataccttttgattgtcagatccaagaaaatctaatacagttttgagtcgtaaaactgtggaaagggaaaatcggccctgacatgtcaagcaagctgtatttattatttggatctgaatagatttttatctgatgttccttaggtgctctgatgcttcttaggtgatctaaatgtagttgtttactctactgttaggtatcaaacaatgaaaggatcttcataccagatgggccctaaagaccacctgattccatttttagccaaaagaaaataagtgactaattgaaaattacgtgcttgttcatagcagagctagcatcatagaggtcttcttgaatcctggattggtgctgtttttgcactatgccatggtagccttgtagtattagaagtttgcctttgaatgatttggtattttattttctagacaagtttttttttttgtaaaattataccttaaataattcacagaagaatttaatagatatccataggtatttttcatactaacatgttcttaagtataaataagttcatgttttacctagctaacaaattagtatatccagatgttgaatatatgaaattcctaaagcagggaagcaaagaataagagctagagctgaccaaaaaaaaaaaaaaaaaaa

SEQ ID NO: 210629 - DNA, 1000 bp, Homo Sapiens
tgtgtatgtgtgctcttcagtgggcttagacagcttccccaaccttcatcagtaagcaagcaagcacactgaccttggtgtcccacgatctgagcactggtcctggtcatcttggccacctgaccttgttcaaactcaatctgagcaccatagagggacaatccagccaaatactccaaaggttgtaagagttagtgagataaggtatgtgactcgacagaagtactttgcaaatctaagaaacagaactttaccttattctttggagccttaaggagacattcactctgcttttgtttactcagacaatggagtatttaagtacctgagcaccatgctttggattctggagcagtgatttccaaagatgagttgtactgtgggctcagaattcattagaaaatgcaagatctttctttggttcctaagggcaaataatataaaggctgccatttttcatttttaatccaaagggttgcttactaataaactataaatttatagaaacaattttctagcaagatattaggatgcctacagttcttgtctgtgttgcaaagtgtctgctgggcttctgcacacataggtaattggaattcaggaaatgatttgggagcacgtggttgtcagtatatactattatatcgagttggttctgatttttcaagtactgctatttttaaaaaatccaccagacacagtggctcctgcctgtaataccaacactttgggaggctgaggtgggaagatcacttgaggccaggagtttgagaccagcctgggcgacatagcgagagaccctgtctctacaaaaaataaaatttaaaaaattagctgggcgtggtagtggcatgcacctgtagtcttggatacttgggaggctgaggcgggaggatcgcttgagcccaggagatcaaggctgcagtgagccattattgtgccactgtactccagcctggacagcagaacaagaccctgtctcaaaaaaaaaaaaaaaaaa

SEQ ID NO: 210630 - DNA, 1000 bp, Homo Sapiens
gcctgcattcacatcactggctctgtggttttcagactttggttttagccatggaaccctttgaacatcatatccttacacatatgaattatatgaaagaaggagccttctggctcaagcccacctgatgagccctgtttcccactgctctgagttaactccaatggccgggggctaggttgctgaggaggacagtgtgaaggctaccttatgagtctctgaattcccttacacccttgggtgcaggacttagtcacccccttgtcttttggagtcctttttcaagtgcagagttctggacttcaagacagtcttctctgaaaatatttgtgttagtgtgaaaaaaaaggcatttaatgagggctttaagaacagaaggaaacaccagagagaatttaaataagacgatcagcatttcgttttcatgacccaccatgattgcattggaaacttgacaagaagtctgtgaccaagagttagtgggtttcaggagttcaggctccccacatcccatgttaaacaattcatctgagtgaaagttgacgaatagcccttcttagatgaccacacacagtcttccaggcaagagtttcaggaggccattcaaagagtaatttggcataactaaattaaaccttgtttttgctactactaagatctttatatacatacaatatttaaaacaatctcaaggccaggcatggtggctcatgcctgtaatcccagcactttgggaggctgaggcatgcagatttcctgaggtcaggagtttaagaccagcctggccaacgtggtgaaatcctatctctactaaaaacacaaaaattagccaggcatggtggtgggtgcctgtagtcccagctactcaggaggctgaggcagaagaatcacttgaacttgggaggcaaaggttgaggtgagccaggatcgcgccactgcattccagcctgggtgacagagtgagacttcgtcccaaaaaaaaaaaaaaaaaaaaaaaaaa

SEQ ID NO: 210631 - DNA, 1000 bp, Homo Sapiens
taagaaaagcagtcctttctaaaagactggagtgtggtgtgtgtgtgtgtgtgtgtggtgtttgtgtaaccagagtgtttggaaaagtgagtccagttacaggtgtttttacctagcgcaggaaaacatctgtcataatatttgtcaaatctcagagccaaggctgtgcgagtttgggtggtttccaagcagaacaggttgaaagttgatagaaatggaagctgggcctcctggttcaatgggaggctgatgctgccccaaagcgcatctgcccacatctgccctgctcctgcgatcaccccttggacaccagctcaataacctctctgaagaatcattactggtttcttaggcgctaccgggtaaacattcttctatagagccctgtttacatttgagaacttgctgagctgaaaaccagacagcaaagaagctggtgagtcaacagagctacctcaccctgctacaaaaaagacttggcatgggggattttcccggaatgctccaagtttatccacccatctttgaggagtgtgcatgcaccatgagtggggtagcatagtactaacaccacataaggtcatgttgttcattacaacaaggggaggaaagaaattggcaaggtggcttaatcctgaggcgctggccaggcgcagtggctcatgcctgtaatcccagcaccttgggaggctgaggtgggtggatcacctgaggtcaggagtttgagaccagtctggccaacatggtgaagtagatagagtagagacatggtagtctctactaaaaatataaaaattagctgggtgtggtggtgcacacctgtaatcccagctacttgtgaggctgaggcaggagaattgcttgaacccaggaggcggagactgcagtgagccgagatcgcgccattgcactccagcctgagaaacgagcaaaactcggtctcaaaaaaaaaaaaaaaaaactgtgtctcaaaaaaaaaaaaaaaaaaaaaaaaaaaaaa

SEQ ID NO: 210632 - DNA, 1000 bp, Homo Sapiens
cttttagaactttgggttgtggtaaagaaagaaaaatattttcttgacaatttttctaaaactgctaagtgactgaggggcatgtaatatggctttttgtctgcccaccaatcagcttgtttttgttgaaacctgctgcgtgcccagtcctgtgttagatattataacaatgaaaggcagtaattgactaaatcatgtggtacagactcttaggtgccgtggcaactcagagattagagattgctgtaggcttgagcaggcactgagggacagatagggtgtgaatagcaagaggggatggaagttgcctttcttaggtgggtagtaaggtagcttgaataagcaaggcaaaaaaagaatagaaacatatttttcatccttgccattgttagtttatcctggaacttagaacatttactgtgtgaaagatgaaggagtaaaaggaatttctcatgtaatatacagggagtcctctctgtaatgccatgttcaaaatctgtgttgcaggactctggtggtggtaggatagtgttaactgcaaaggccctccgtaggtcctctgtaagttccaccagagtagctccagaagaggcgcatgtgttagtgttactacctttcctgccatagtacacgcatttaattaagagtcagtttattggccgggtgtggtggttcatgtctgtaatcccagcactttgggaggctagggcagaaggattgcttgagcccaggagttcaagaacagcctggacaacataacgagaccccatctctacaaaacaacgacaacaacaaaaattagccaggtatggtggtgcatgcctgtggtcccaactacttgggaggctaaggcaggaggatggtttgggcccaggagtttaaggctctagtgagctgtgattgcaccactgcactccagactgggtgacagagtgagaccttgtttcaaaaataaataaatttctggtgcttagagtttgagaaaaaaaaaaaaaaaaaa

SEQ ID NO: 210633 - DNA, 1000 bp, Homo Sapiens
gcccaggaatgactaagggcggtctgaaggttaaaggcaagatggggctaggttagatcagatctctttcacggtcataattttcttactcttacaatttttgcaaaggcagttttaataactgctatttagcaaagacagttgggtaagttactagagggagtattaccttagatggggccaggagggtttctctgaggagatcccatttcaacagatctagaaatgtaatggagccagtcctagggaaacaggactaccaggaatcctcaccagccccgcaaagacgagggagcagcaagttccaaagcccgtggcatgtcaagggtcgatgaattcaccaactgcaaggggctttggtgaccccagtgaacagatgagaaaggggaggaggctgggatcagtgcacagctttgcaggctttgggaaggaatttcgagtttatctcatttgtccaggtatttggatgaagccctggcatactaaccctatgaaagtttatagttcccaaattgcaggataacaaggctctgtaatcttcatttcctcaaagttttacaccaggattctatggccaagtgtgtggcagtgtcacaacttaagagccagtgtaattgcccaacgggttctccttgcccgctgcctaagcaaagccgatttatcaagacagggggattgccataaagaaagagtttaggtccaggcacggtggctcgtgcctgtaatcccagcattttggggggccaaggagggtggttcaactgaggtcgggagtttgagaccatcctggccagggtggtggaaccccatccctactaaagatgctgatattggccaggcgtagtggtaggcgcctgtaatcctagctggtcgggaggcagaggcaggagaactgcttggacctgggaggcggaggctgcagtgagtcgagatcacaccactgcactccagcctgggcgacagagtgaaactctgtctcggaaaaaaaaaaaaaaaaaaa

SEQ ID NO: 210634 - DNA, 1000 bp, Homo Sapiens
ttgggattgtttcgtacttaattttctctttggaattgtttcattgatatttatgtaacttttgcctggggctctgatgagaaattaaagcatatggatgctgttttgataaaaacaaaattgaaacttttgcactgagggtgcagggcatgggagtggagggtactttatgaccagctcttcctgacccaattttcctcatggtctgggtgttcctaattacttcgaaaaaacaatttctaaaattattttgaaaaaacaacattgaaaagaacattagaattcttgatttcttatgtataatttttattctggttagggctcatattagcctgtttgcattgctgtaaaggaatacctgaggctggaaaatttataaagaaaagaagcttatttggcttggtgccagtatctgcatccagtgaggcctcaggatgcttttaatcatagcagaagcaggcatgtcacatggcaagtgagagagcgagagagaaggacgtgccacgttttaacaaccagatccgcatgaaatgacagagcaataactcacccattacctcgggaagggcaccaagacattcatgagggatcggcctccatgacccaaacacctcccaccaggccccacctccaacactggggatcacatttcaacatgagattcaaggggcacaaatatccaaaccgtatcagggctacaatttttttcctataaaaatacttcaccaacatttaagagaaagtcaggtggaatatattgtatatttttaaatgtatgtatatatatgactttaaaagcggggtacatgtatatactatgtacctgcaaacaaaatgcataatgttggtaatgcttctgtacatatatatgtacacatacacattaaatacatataatatataaaaaaaaaaaaaaaaaaaaaaaaaaaaaaaaaaaaaaaaaaaaaaaaaaaaaaaaaaaaaaaaaaaaaaaaaaaaaaaaaaaaaaaaaaaaaaaaaa

SEQ ID NO: 210635 - DNA, 1000 bp, Homo Sapiens
caagaacttaagtgtaatggtgttttgattatgcctaaccactgtcttttcatttttttgagacagagtcttgctgtgttgcccaggctggagtgcagtggcacagtctcagctcactgtaacctctgcctcccgagttcaagcagttctcctacctcagcctcccgagtagctgggattacaggtgtgcaccaccacacttggctaatttttgtatttttagtagagacagggtttcaccatgttggccagactggtcttgaactcctcaccttaggcgatctgcccacctcggcccacttgtcttttagtgttagatgaatgagttggcattacctctaccttgcatgtatgtgttcgtaatagttaatgttcacaccttgagtttttcactcatctattccttttgttcagatttgacatggtcctttgaatggtcctttgaccacatgtatagtgaagcagggagaaggaatatagacaaaatacatcccaagcaacaaggaaaactttacctcattcctttaatttctttccccatctacagtcctgacagcttgactggcagtctggtcttttgaatgatcttgaaggggaaaaagatttcttttgagttctgtgggattaaatttgatccaagcttagcaaatatccattctactaagtgtattttgtatgttctacagtttttctgatgtttaccataaatttacttattaccagcttgactttagatgggttgttaatcttctcaagccttaatttttatcttcttaaaatggagatgataatactgtacttactgtgttgtgaggattaaatgaaataaagaatgtaaagaaaagttgtagtgccttgtacatgatatgtatcacatggtagttcctcctattccattgctaatggctctttgttcctttggggatatttccgtgttctcttgtaccataaaatgtgcaattaaatgtttgttccagttataagaaaaaaaaaaaaaaaa

SEQ ID NO: 210636 - DNA, 789 bp, Homo Sapiens; identical to SEQ ID NO: 58186

SEQ ID NO: 210637 - DNA, 1000 bp, Homo Sapiens
ttaggattaaaacaggatgaaaataagccttacattatatctgctcctttatacctagctttaccttccgccctcttcccatgccaaacccagtctctcattgggaaacacacacacatgcccctagagaaagcatctatgaatacaattctgtgaacgtggaggaggtaggtgattagtaacttttgactggccaaagggtgatgtaggttaaagcaagaaatgagggtgagaaaaatctctgttcccctagatagaggggaagggagcaaacactagaacatggcatgattgagtataatagaagtgagaatgtttagcaaccattcttttctcctttgtttctggcatttccacccctccccaccccccgacaaaattcctgtctttgatctatgcagtaatatgtctaaatatcctagaattggtaactctgtctgtatgtatgtgtgtatatgtgtctgtgcgtgtccttatcacccctacttcagcagcagcacagaaaactgagccaggtgttaatgaattcatctctggcaaagtttattgctctgtgtgtgtgtgtttccatgcatgtacatgtgcacacacacacacacaatacacatacatatacctacatacatgtggctgatgacttctcacagtgtatctcaaagcattattgcatgtcccacttggttgatagggcatctctagcctgacagatttatctgttgagaacaggattatgcatttgaaaccagtttaattcttagcaagacaatgcgcatgtcttatgtagattttgttgttggtttttttctccttcgtaagttactcggggaaagtcatgtcaatataaatcagtggtaatgaaatcaacattatagcatctttgataatgcatttgctaaagcctttctggacgtttacccagctctcaatgattgatattacaggcagtggataaacatttttgatggatctgtttgctcacagataaaaaaaaaaaaaaaaa

SEQ ID NO: 210638 - DNA, 1000 bp, Homo Sapiens
tgagtcaccgtgcccagactacatttactttcttgattgcactttgaggtttaggggctaatgcctgatgctttttttttatctgtatgaagcagcggccacacagatcttcatcaaaagctgactgttctcatttctccccaagtaatcactcttttttttttttagcttgtgctaaatcattttttaaaattgtagctctgaggcattttattatacaaagttagtactcatatacataaactaataggaacttaaaactcattatacctttgcttcattttttttagcttgactccctcgtaaatctttagcttcattgatttggctgctatgtaagcttcattgatttggctgcttaaatcactccattgagtgatttaagagcataatttagaagaatggtgtgtccatgtgtggctcagtttacagtaccatttggagtttgattgcttctgtgagttgggtgatctctcctcttgaggtccagatcaaccccaggaggagcctagctgctgctccccattgggcgccccatttcagcagaagtagccaggagtcgtcacccagaaccccctaacagcagttagtgtggcatctccacagtggggaatgttgtaggagttattaagaaattattttggccgggtgcggtggctcacgcctgtaatcccagcactttgggaggccgagacgggtggatcatgaggtcaggagattgagaccatcctggctaacacggtgaaacccgtctctactaaaaatacaaaaaatacaaaaaaaaaaaaaaaaaaattagcagggcatagtggcgggcgcctatactcccagttgctcgggaggctgaggcaggagaatggcgtgaacctgggagacagagcttgcagtgagccgagatcgcaccactgcactccagcctgggcaacagagcgagactctgtctcaaaaaaaaaaaaaaaagaaaagaaaataaattattttaggcaaaaaaaaaaaaaaa

SEQ ID NO: 210639 - DNA, 1000 bp, Homo Sapiens
tactatttaatagtagcagaatgtctgtgtggttccatctctgcctcaatagtaaatgacaaatactaatataatcaagttgatttggggttctcaataagctctcacaagctggaactgccaacgagatgctttaaaaatattcccttttgtatagtgaaacaactttggaaattgtaacttaagaatatgagtatttatttatagcccaccttttggctgagatttgacatgacgtttttctttcaacaaaactctgaagtggcacaccatgatttgtaattttatttggctattgtctgcatatgcagacaattgaaatgcagaaagttgaaaaattattcaaattctaccaagtgtatttacagttacttttctgtgactcagattccctccttcaaaacattttaaagtctccatatagaatcaagattggacttttcagagaagggaaaaagtaaatgaaagagaccaagtttttgtcttttctcagaggatgatgaagtagattttagagtcttaaactacattgaagggctgggttggcaataaatctctacttgcaacttgaactactgagtctccatagatgtttcagacctgtgtctgactggctcataagaattaggaatactcttcataagcatcttagagtggatcagaatcagatcattacccgaaagggaaaggtagtttactcctgagtccttacctcattacaattttttcttatcaactgacccaaatttagactttgcagatagaaatgacatgtatccgacagcatattagcctaaatgattcaatataaaggtcaaacctcacataaaagaagagtccaataaagaagtttacaacattccccagaattgctcttctcatttaatttaataatcccagcactttgggaggctgaggtggacagatcatgaggtcaggagttcgagaccagcctggccaatatggtgaaattctatctctaccaaaaaaaaaaaaaaaa

SEQ ID NO: 210640 - DNA, 1000 bp, Homo Sapiens
tcgcacctcttctccgagctaaccttctgtgtatatcctaatctgtacccttttgccaagccactgctttacttccaagtgggaagtaaagcaattcatggagctccaattgctatgctcttggttacagaggccagggaaatattactttggagatggcacctcgggccacagtgtagcagtatggcataatcatgcctgggatctgagtgcagacctgtgttggaatcctggttctgtcacttgccaactagatgagtcacttaactacaaaataatgtagggaaatcatctggctaagaagaaatagctaaaacagaggacttattcagcaacttcttgattatcagaactacacaatgacatgacaaagttcatcttatttttttttacactagcgttttaaatgtgggatggttttacatggtccatagactttgggaagttagatgagaaactagtcatggtggctgcctctaggaatggagactgaggtagaaggaatatttagttttctctatatcccctttttaagcatttgaactttttaccatattaagaaaattaagcaaaaatggacttatgtacacatgattcaaaactaaaacaacataaagtatattaaaaggaaagtaggttccattccttagaaataaccagtgttaacactacttgtgtatccttctagaaattttttatggctaggtatggtggctcacgcctgtggtcccggcacattgggaggcggaggcgggcggatcacctgaggtcaggagttcgagaccagcctgaccaacatggtgaagccccgtctctactaaatacaaaaaaattagctgggcatggtggcgcgggcctgtaatcccagctgcttgggaggctgaggcaggagaatcgcttggacccatgaggcggaggttgcagtgagccgagattgcgcctttgcactccagcctgggcaaaagagtgaaactctgtctcaaaaaaaaaaaaaaaaaaa

SEQ ID NO: 210641 - DNA, 1000 bp, Homo Sapiens
ccctcagtatccactggggattggttccaggacccctgtggataacaaaattcctagatgctcaaacccctcatataaaatggagtaggagttgtatataacttctgcacatcctcctgtatattttacatcatctctagattacttataatgcctgatacaatgtaaatgctatgtaaatacttgttatgctatattctttttttaaatttgtattcttcttggttattaatttgttatttttaaattttttttggaatattttcaattcgtggttggttgaatccacagtgtgaaacccatggatgtagaggcaaattgtacctgcatgtaaggtgaaagtggagaaaagttaggaaatgatatggtaaatggtctttggaagaccctagcaagttatcgttaacatcagcattaaaataccatttatacagagcgtggtgcaaagtgtgggaaataaaggagcatcaaactgggtttttacacttaaggaagtagattcattgtctttttcgctgtgaaatttatactcaagtgaggaatgtacctaggacaataattataagtctgtttggccaacactgtgaaggcaaaatggaaggtacttccagagtgtatgacctaacatagccttaagagctcaagaaaagtttcctataggaggagacattattactgtaacttactgcaccatactaatacatgaataagtgcagcttttaacccttctcatctcacagggaacaaatatatatttggtaattttggcacttgctaaaacaaaatcagaaatagattttctgagttgcaatatagtcaatttcgcttattctacatatagtcatgggataatactgatccatttctcagctttacatatgtctaaaattgattagacatatgtagacatatgcaatcagttaatcataatattaacatctccttaataaacttgagtgtattctggcaacccaataaaaaaaaaaaaaaaaaaaaaaaa

SEQ ID NO: 210642 - DNA, 1000 bp, Homo Sapiens
tgtgattgcagatcttttctcccattcctgggttgtctttttactctgttaatagtatcatttgatgaataaaagttaatttggttaaggtcaagtttatctctttttacttttgttgatggtgctttttgtgtcatagccaagaaatcattgctaaatccaatgtcatgaaggtctccccctgttttcttttaagagttttatagttttagttcttctttttagatacttgaacccttttgagttaatttttgtgtatggtataagggtccagtttcgttcttttgcatgtgtatatccaggttttccagaaccatttgttggaaagactgttctttcctcattaaatgctctttctgcccttgttgagaatcatttggccttgttgaaaactatttaaccgtatataagggtttatttctggtctctctattctattccattggtctatatgtttatctttatgtcagtaccacacagttttgattattgtagctttaagtgttaaaatcaggaagtttgtgtcctgcaactttgttctgccttttcaaggttgttttggccagttggggccatttgagatctcaggtgaattttaggatggggttttctatttttccaaagaatgtcattgggattttgatagggattatactggatctgtggatcactttgggtagtattgttattttaacaatattcttcccaactgggtgcagtggctcatgcctataattccagcactttgtgaggctgaggtgggaggatcacttgagcccaggagtttgagacctgcctgggcagcatagtgagactttgactctacaaaaaaaagcaaacaattagccaattgcaattagccacacctgtggtcccagcttcttaggaggctgaggtgggaggattgcttgagcccaggaagtctaagctgcagtgagtcatgattgtgctactgcactccagcctggagacagagtgagaccctgcctcaaaaaaaaaa

SEQ ID NO: 210643 - DNA, 1000 bp, Homo Sapiens
gttcaagtgattctcctgcctcagcctcccaagtagctgggattacaggcatgtgccaccacgcctggctaattttatgtttttttagtagagacggggtttcaccatgttggtcaggctggtcttgaactcctgacctcaagcgatccaccagcctcccaaactgctgggattacaggcgtgagccaccgtgtccagctattgcttttaaaacattgttttactttatttttaatttttttactatcatgtaaaacattgctgggaacagtcttgttcatgtttcctggtggagacacacccttcctctaggtacatacctttgaatggaattgctggatcataagctgtgcttatcttcaatattagtacataagtatttcaaaatagttaatactaatttacaatttcaccaatataccaggagtccatgaggatttctgtaactcaaattctcaccaacacttggtataatcagccttttgaattttagccgttctgacagatgttcattggtatcttattatgtttttattaaggtggagcacaacttcatatgtttttggtcatttggatttttttttctccacagggaaagttctaccatttggattttattttttgaaaatttcctgttcaattgtattttctgttgcctttttcagctgattttaaggagttcgttatatattctagatgtaatccattggtggttatatatattgccaatatcttcccccactaatgtacatggtattccttttattttctaagtgatgtctttcaataggttcttaattgtaatgtagtccactttatcaatctgtgttaggctgttcttgcattgctataaagaaataactggccaggcacagcagctcatgtttgtgaccctagcacttctggaggccaatgcaggaggatcacttgagcccaggagttcaagaccagcctggagaatgtggagacatcctgtcactaccgaaaaaaaaaaaaaaaa

SEQ ID NO: 210644 - DNA, 1000 bp, Homo Sapiens
acttatcaaagtctgttttctcatccatacaatcaggatgataattcctagctgattggtggagaattgcgaggttatacgcaaatttattagcatagcatctgtcacatagtagatgtgacacttaatctcacttttcacatgaactcatttttggtacaaaatatctggagagaacataaaacaagactaatttacctaggttcaatttcaatgtggttattttttcttcttcaaaactagcattatcctctcaaatcaaaatactatttttaggctcctgtggagatgctttctctgttataatttagatgagaagacttacaaggacttagtatttccaaaaggtagcttttaataaagcttttaattaagaattggattaggaaattccagctagcccctgaagtttccttaggtgagtgacatctttaaaggaagtgttacacactacaccgtatccacagattcggctcaggaaggagaacctaatatgacacatgaaataaattcacaattaggttaaaatgccagtaattcattcatcttactacctgatagttcagatgtttagctcagatttttctcccacaacccttcccttggcaggtaaccttgagaggggatccaatacaacttagctaaatttggataatctcaagtgttcaaattgatttagaaatcttggtgtgctcagctaggtgcagcgggctcacgcctgtaatcccaccacttggggaggctgaggtgggcagactgcttgagcccaggagttcgagaccagcctgggcaacgtagcaaaaccccatctctaccaaaggggaaaaaaaattagctaggcatggtagcgtgcacctgtagtcccagctacttgagaagctaagagtgggaggatcacttgatcctggcaggtggaggttgcagtgaacagtgatgatgccactgcactccagcctgggcaactgagatcttgtcttgtaaaaaaaaaaaaaaaaaaaaa

SEQ ID NO: 210645 - DNA, 1000 bp, Homo Sapiens
gttcataggcttacattttctcctggcattattctgatctttggcttactactccattgcaagatattggggatataaaataaagcatgttacaatttcctttaggtacatttatagttgtgttttaagctttgcatgtgtatcttggaggagaaaaagagaactagtccactcacaccgttgttgaaaatgaaattcctttcagtctagagtgtttctccagatgataattaacttgcaggtgtgcaccaccacaaaattcacaaacacttggttaaataaatatatagtgatattaaagcttttctacatgtaaagggaaaggatggtaagaggaggttactacaggatatgagatttaaatggtaaatacaataataaaaggacatgtaaacaaaagcaaatttgggaatgaaattcagcatctaaactttagaaaatagatatactattgaacactgagtcttgtttcagtagtaaaattatttactctcaaagttggataaacttagaaatcttttgaggatttttttctgcctatttatggcatcttatcatttaaagtcaactggaaataatagccaattgattccagctgattcttttacttgtaaataatttaattcctatccaataaagtacattttgtacattacgctacatttttgttcatttatcaaatacttagtgatactaaacatatgttactacatcccagaaatatattgcacagggctctgactttcagtactttctcacacattttggccaagttttggagtctgataatttcacattttggccccaccccttatgtaatctagggacgtttttacatcctttctgtgactcacttctccaacctgtaaaatgagcctacttcaactcactctactaacttgttgggaatgatacaacgtaactatggaaactattaagatgtgtagaacatcctatgcaccttaaagacagctatccccttatgcaaaaaaaaaaaaaa

SEQ ID NO: 210646 - DNA, 1000 bp, Homo Sapiens
aacagagtgagacgccatctcaaaaacaaacaaaccaaaaaaaaaaaaaaaatttcatagttacagaaagtagtatggaggccataccgagattttcgacatggtagtaaaactctgcattatggctctgttctgcatcatctctgttctgcatcgtttcactccacatcagaccctggatagctttggtgtactggttgatcttgtggcagtaaggctagtgtaattaagaggatattttaaaacttaacatataattgctctagttgttgtctcttttttgctggttaagaaaatcaaatttctatcctatctgaatctcatagcagactttggagatttctgacaagtcatttcttactacctaggggaatgtacttgtactcagctagagtctgagtatcttctacatccagggaattgggctgagtgtggattttggtcttggcagtttttacttttattaatttgcaaaagaatagaagacttggaatgtacaagaagcataaaaatgtgtcaggtggttttacatgcgttatttatcacgttaatatgtcttaagatattttccacgtgtaaatttatgtaaaggcaggaaactagtgagatttcatattctagggatcaagagattgttttagtaactagcctcagaaagtatcttgaaaggtattatataaggtcaaggaactaaatattagtaaagagtcaggccaggcgtggtggcttatgcctgtaatcccagcactttgggaggccaaggcaggcagatcacttgaagtcagcagttcgagaccagcctggccaacatggtgaaaccctgtctttactaaaaatagtagtgtgtggtatggtggcgcatgcctgtaatccagctcctcaggaggctgtggtgggagaatcactcgagcccaggaggcggagattgcagtaagctgagattgcaccactgcactccaacctgggtgacagagctagtgtctgtctcaaaaaaaaaaaa

SEQ ID NO: 210647 - DNA, 1000 bp, Homo Sapiens
tgttacttattttcacagtaaccaaaggtttgatagtttgctgcttggcaaatgaagtagcttttttttcatttttttttttttcaattaatcatagagcattgtcttggcatgtgtatggtgttagttgcatgcagttgctaaaggaatttatgtaaacccacatcagaatagatttttgacagctctgggctaatactgtgttagttgctaccgaaagtaccattattgtatttgctttactatcagattagattcaacatagaaattttgatctttggaataaatgggggactgatttctgtaattgtgagttttcaagtgaagtataccagaatttcccctttaattcattacaccacttcaaagcaacatgtttttggtttgctatctaagagatgacagtctcactataggcagcatattctaaatgggtcatataggttaagcacttgagaacccagttccttaatcacttggtgcttctattatctgtctactttttatttaccaaattaggaatatggttgacaaacagtgggtagtgatagaaaataaaagaaggtacattatagccacttgaacgtaggttagtgctagagcacagctacctacttctgtttatattatctggagattgaatttctgtgcctttgtcaatgcttactaaagtgacttcattttgactgtgttgtttcctgaggttgaatcctattcaaagattagaaaaagtgatagaaatgaaatgcagctaattttatcctggtatttattgggtagattttaataatcgaataccgtaaatactgtaagttttagaacttgtgtcaaaatgttcccttatgtggtggcatgcgcctgtagtcccagctgctccgggggctgaggcaggagaaatggcgtgggcccgggaggcggagcttgcagtgagcagagagcgagtcactgcactccagcctgggcgacacagcgagactccatctccaaaaaaaaaaaaaaa

SEQ ID NO: 210648 - DNA, 1000 bp, Homo Sapiens
tggatcaatctattttgtagtagttacaagtgaaattcaaggctgaaagggccaaaggagataaaccatgctgtttcacattgagatattggtagctgataattatgaaatgacaactgcaaaatattaagaagattacctaagataataaatttgcaactttcatagaaagtattggtattttaacaatttgagtgaccagttttaaatgtgagggaaaatatctcaattaaagttaaagattacacaactgtacaaaatgttatttcagaccatgtgacaaacctaacatacccatagctggagaacaaagctgtttcctttggcttaaattcatgtcagttctgagaataacattcagcagctactttccaattgtttccttcaaagccactctttggctatcaaagttaaaagtttaaaacttaaaacaagttttttgaagacctgaagtgtaaaaatgctatttaaagccaaactctttgaacttctataaaatatgcacacaaagattcaagctttttgaggagtggttagaatcagaatgcaattgaggaaatacaaagacagggagactttgctttataagtatctagacataaaccatatctagtgtcttagtggagaagacctcttgatattaatggaatatgataggttgaaaatgcctttctagaatttagataagatgctacacttctgctagctgtgagagtttgtcaatttgaaatttattctatgaagttcaaaactgaagaatatttggggacttttaccctatttttgctctctagtactttcacatttgagaacacataagtgtgcttattgtttttcaaatctgattgttttcttgcttatcaatatgtctgtcttagaatttcttatccccaacctgctttattttttaacttacttttattgtgttgtttaagtgataataagtgatcaataaaattataaaaaatgataataaaaagaataaaaaaaaaaaaaaaaa

SEQ ID NO: 210649 - DNA, 1000 bp, Homo Sapiens
agatgagaaaataagtcagacttctagcagtgtagctttaaaaaccctttgaattacttccagacttgtgaagatactgaggtcaaaattacaggatattcttgcttcctaagcataattacagattaccttacactcaaacataataaacgaagataaatgagatgaaattaatgtagtaaattcattttaattgcaattggcataattattagattatatgaccatgtaatataaatttaatggaagtaaacttttaaattttatttatgcacttagaagtaattaaatgtgaatgaacaatgtgactataagaataattaatttctcatgtgaattaattaagggtgtttttaaaatgttctctgtagtttacgatagaaaaaagattgtaaacccatattattacagtatagcaggcaaataaatagctgaaaatggtagatgatggagaggatgcagtgagaagcaatttgcacctggcctggcccagctcactccctcgctcctccaccagaaggtttctctgctttcctccaccacagttcctcccaccatagctctctcaaatgatgggagaaaggaccctttccctcctcaaactgttcaattagtgggttcattcttccttacataccagtttcacataccttatgtactgggtgttgtcttaggaggaccactaacctcaagaggctgggtgcggtggctcaagcctgtaatcccagcactttgggaggccaaggcaggcagatcacctgaggtcaggaggtcgagaccagactggccaacatggtgaaatcccatctctactaaaaatacaaaaaaattagccagacgtggtggttggcacctataatcccagctacttgggaggctgaggcaggagaatcgcttgaacctgggaggcagaggttgcagtgagccaaggttgcaccatagcactccagcctgggcaacaagaacgaaacttcatctcaaaaaaaaaaaaaaaaaaaaa

SEQ ID NO: 210650 - DNA, 1000 bp, Homo Sapiens
gtatttaaactgcaccctgaaggaagagaaagaaggagccaagcgtggagtcaggtgtggagcttttcagactgggcaaagacgctaaggtttggtgtgtttttgaaacaggagctcagtgtggccgcagcttagtgagcaaagggactagtgaccagaagtggtcttggaggacagagaggaagagccagatcatgcttgaccactgaggctgaagtgaggagattggactttattttactgtaaattgagtgcagagccttgggagggttcttagtgagatgatatcactgaattgcattttaaatgagatcatggttttcttattgcaaaatgaattttcagggaattgtgtggggatccattgaggtagtcgattgccttgccccgtgtttgtggttagtagactgttaggaatatcaggactggcttgtatgttaactgagaaagtacaaactgaaaaccgtgtgtttggaattcaagttttgcaccatcgaagacttattgctaacctttgcttctattttgaagctacttatctgtccttgacaaagcagttcccgcttatttactgatcagtttgttgttagaatgacttttgccttaggtcttcaaaagtcaagattttttcaccgagaatacatcacggtaggatttaagataattttatagccagagaaaccttcaagataaagtgcaaattttagtttaaacagtaaaattaaagcgccgctcagctgagtgccgtgatcaagatcacacatattgggaggattgggctggagtccaggtctcctaccacccagttcactgccagtgcagaggatcaagggagggtacaatgttagcttggttaagacacaagaaagcccagagtgacagaagcatcatgcacaagaggaaagacgtgtgaggtgagtttggagagaaaggcaggcgttttgagttatcaataaaatcacaatgacatataaggacaacaaaaaaaaaaaaaaaaaaa

SEQ ID NO: 210651 - DNA, 1000 bp, Homo Sapiens
cagccatggggaatgctgagctggagagtcaaaatcgaacttgggctggctaagaatactgcagtcaggcaggagcatatgggcttatctggatcagctgaaggcttgcatttaccataaactctgaaaggggagactgctaagagtcaggggagtcaggtccaggagagggaaatggatacacttctaactaggggagccatgctggccaggagttagagataggaccatggtatatagggcaaggcttcatcgtaagtacaaattaagcaacatagattgatcttagatgtaggcactacatctcagcacctggaatggctgggcttgtcttcacaaggacccagtcagggaatgagtatagggttgtttcctttctgccctagttttaagcaatcttaatagtataggctcatacagccttcttagttctagtgtagactgtttgctctaagtgtggcagggttctagtaggtactgatgatttttgcaaaaaaaaaaactagattgtctagaactaattagaatataacaagattatcaacaaatattatttatagagcaattcagaatatatatacctttagaatttttttaaaatggttattcccaacttgccaacagtccctaaaaatttacacattaccagtaatgagttatgaggttgaaaaaagactccttttgttttttgaaacaggagcatactctgtcacccaggctaaaatgcagtggcaccatcttggctccctgcaacctctgcctctcaggttcaagtggtcctcctacctcagcctcccaagtagctaggactacatgtgtgcaccaccatgcttggataatttttaatttttttttgtagagatgaagtctcactatattgcccaggctggtctcaaactcctgggctcaagcagtcctcccgccttggcctcccaaagtgctgggatacaggcgtgagccccccatgcctggccaaaaaaaaaaaaaaaaaaaaaaaaaa

SEQ ID NO: 210652 - DNA, 1000 bp, Homo Sapiens
aggaagcagaggttgcagtgagccaagatcgtgccactgcactccagactgggcaatagagtgagaccctatctcagaaaacaaacaaaaatccccaaaaaaccaggaagtgttttcttagggtctagttcccaggcgaatggtatatcctgattctaggtttataaaaatagtatattattcataacatttgtctaaagtgacacatttacatacagtatatagtattgagtaatttccaactctttaaaaataatggagaccctttcatgtagtagtaactatgtttttagtatctgttgactgagaaaatacgtaacagcaaaagctactataaaactttgaaataagttcttgtaaatgtaaaaaaaattctcatatatttggaaagtatacatgtggaaattatgacttatagagtctatggacacttgatttcttgctttatggatactctcaggaagttctggtctcaactttgagtatctcattgtcctcttactttagaatgtggggtatgggggaaaacttctatttgaaaatttgagccatagcggaaattttggaatgacagggaaacaccttctcagaatcctcttacaataaaatttatatatgttatgccagacaatgtactttatactaagactggacttttaaatagtctcatggattagaagtcagatacaataaataaatactttttaaaaattatatttttaggtatatgagcattgttgttgggactacagtgctattttaaagtgaaatttagttgatttgcatgtgagtatacacctacaggtctctgttatagccgtgacatgtcttctgttactataaattacataacaaatccttatggtttcttgggtcacttattttatttaaagacaaaaacatctttcagtacatatgtaagacttaaggcattattgaaaataagcctgtgctacatggtagaatctattaaaaaaaaaaaaaaaaaaaaaaaaaaaca

SEQ ID NO: 210653 - DNA, 1000 bp, Homo Sapiens
aggcagctctgtggctaaaccttgagtaattcagaggggaccataatttacccgcttctccttttaccatccagggaacagtcactgaggataagaacaatgcctcccatgttgtgtatcctgtcccggggaatctagaagaaggtgagacctgggttttcctgtccacttgagtggatggtttggactaggaggcagaggactaagatcaccattcagtacctgggctcctcctcttctttcaatcttgaatcctcttaccaccttaagttcctattaccaagtcccctgctacaacaggagagtgcattagttagggcttttgtacagtattttttttgtgtccccctttagcttatatctcccccttctcttcctctatccccagaggaatgggtacgaccagtcatgaagagggataagcaggttcttctgcactggggctactatcctgacaggtgaggatgggttcctggggcaggtttaagtataagagccagacccagaagccctaggacatctagcagagcaagaggccactctttcagagttatttttagatcacttaatttgttttcctctcacctagtaagtgaacctctgtcttgggggaggtttggacttagtggacaagccttgggctaaaaggattgaggctttatgtgtgaattgattatcccagcatcattttcgataagtaaatgttagaaacaatctaaatgtctaacagtaggaaaatgtttcagtaaatttgtatatctactcagtggactattatgcagtctttaaagtgatataacatggataatttataagtgaatattattaataattgcaaaaagtagcatgtaggcctggcatggtggctcacgcctgtagtcccagcactttgggaggccaaggcaggcggatcacctgaggttaggagttcgagaccagcctggccaacatgctgaaaccccgtctttaccaaaaaaaaaaaaaaaaaaaaaaaaaaaca

SEQ ID NO: 210654 - DNA, 1000 bp, Homo Sapiens
agtatttatggaatacttagcctttgagtaagtctttaaaattgtgctaattgagatttggaagtaggaagatagtagagaagtgaagtcatttctcatgaggggagtttctgacataacagggaataaaaccactggagtgaagtgtccacgtgagaagtagcaaatattgggaaataaggttcaagtagtaggttaggaccaatctagggaaggctgtcaatgtccggctaaaggctaagaacgttattgtctataatgagcccttgcacattgagatcacatgccatgagaactgctctgtggatagtggttaaaaacatgcactccagagccaggatgcacttcttaccagcaagatgaaatcaagaggcaaaggactagtgaaaagaactgtcctttattgttccgtgctttaaacatttctcaagcaccttctctgtgcctgctactgtgctgggtgttcaggacacccaaatgcagaggctctgccctcatggggctcacgggttcctaggaaggacaagagagtcacagatgtcaaggattttagtgcagatattagcactgtgttgggtgtgactgagctgctatgtgagagtccataagtctgcctgaggatgagcggaaagaatacatagcagtgtgtttgcatcagcagggcctgacccaagagcgataaagtcttctcttcctttctgtcagagttttacctttggcctattctggactgcaaatagcattgccaagcacttcccttaaataacttctcttttttgcaggactatcctctcagccctgccaaaaccccatcacctactctttctttactactttgcctatttaatgctggaatttttatttaaactgtagctgatttactgaaggtaattaagtgctttcatgctgtagatctcctgctagactacaggctgtacttgggagtgagagtgaaccaaatgtaaataaatgatgtccacagaaaaaaaaaaaaaaaaca

SEQ ID NO: 210655 - DNA, 1000 bp, Homo Sapiens
gatgagtcttacaccactgtgttagttcatttgtgctgctgtaacaaaatgccacagactgggtaatttgcaaacaatggaaatttatttttcacggttctagaggctgggatgtccaagaccaaggtgcctgcattttgtatctgatgagagtccgcttgtgccttcacatggcagaaagtggaaagcaagcaggctaaattcacgcctgcaaggccttttacaaggggctgtaatcccattcatgagggtggagccctcatgacttcatcaccttccaaaggccccacctctcaataccaccgtcatgggaattaaattcaacatgaattttggagggaacgtcaacattcaaaccatagcaaccaccaagcaataataagcaccaccacagggcttttcatttcttttttttttcgtttgcttgtttatctatgatttaaatgtaaataagcattaggtttcagtagtgaataaggatacaaaaggcatatgagaattgctgtcttagtgacattaacatttttggattatgaggtatcataagggatatttacaaatatgtacagtctttatacttcccctcgtagagatacagtggtcagacacctttcatgtctagtctctgcaaacttaaagacataattttcctgcttgttacttttaacaaatcatatttttagattattagaacttaacgtggccatgcatgatggcttacacctgtaattccaacactttgggagtctgaggtgggaggattgcttgggtccaggagtttaagaccagcctggccaacatggtgaaaccctgcctctacaaaaaatacaaaaattaggcaggcatgatggtgtgcacctgtggtcccagctactcaggatgctgaggtgggaggatcacttgagcctgggagatggaggttgcagtgagccgtgatcatgccattgcactccagcctgggtgacagggtaagaaactgtctcaaaaaaaaaaaaaaaaa

SEQ ID NO: 210656 - DNA, 1000 bp, Homo Sapiens
aaagccacttctgtgtcttgtctattctgaatatgctttaaggttaaattagccatgaatctgttcagatcagtcattcctgaaaatgatgatgatattagccatcctttaccgggcaccttactcagtgcccggcattatactaggtctgcaggtacatttgctcatttaacacctagctcagtccaatgaggtggatgccattgtcatctccattttatcatttaatcaactcagccttcctctctcctgttccccactctgcttctagctgccactcacctgactctcctcttgatctgggctgacgtggctgagtgggtttagcagaactcttgtgtcctctttacttggtttgtttcaagttcatgtcctgcttcatcttttccctaactcactgcaaggtgaattttcttctctgcaatcgacaattccccaaatcacatcaggtcattaatttattcactcatttgtattcattcattcattagttcatccatccatctattcattcattcatccaatttactgagtgcctcctctgtgccaggcactgctggctttggaattaaaaaccctggccctcaaggaatttctattcttctgggagcaggatatttacatgggtgactgcagcttgatctgtgtggtactagtgggaaacataggatgttgggcacaaaagagtcacaaaacgccgggcgcagtggctcatgcctctaatcctagcactttgggaggccaaggcgagtggatcacctgaggtcaggagttcaagaccagcctggccaacatgatgaaaccccaactctactaaaaatacaaaaaggaataatagctgggcgtgatggcgggtgctgtaatcccaacaactcgggaggctgaggcaggagaattgcttgaacctggggctttggaggttgcaatgagccaagagcgggccacttcactccagcctgggtgaaagggtgaaactctgtattaaaaaaaaaaaaaaaaa

SEQ ID NO: 210657 - DNA, 1000 bp, Homo Sapiens
cttttccccggaataaatctataaatgttttatgtatttttccataaatttcatatgcatatataaacccatattcatttacatgtttatgggtttatatatgcatatgaaatttatggaaaaatacataaacccatattcatttacatgtttatccatttttctttttaacacaactatacaaaactctcctgagatcttctttttcagctaatttatctgagcacatgccaacacacagatatacctggatctttaaggctatctgatagtccagtgataaaaatgtaccatcatttgttttctagtttcttgatgatggctaagatagtttccagtttttttcctcctacaaatgtataatgttgcaacatccttgtttgaacagtgcatatatctttgtatactctacatactgatgattttattcataaggaaaattcctggcagtttcaactgtgatagacattgctaacctgttctccaaagaggctgaaccaatttctgtttcctcaacagtgtatgactgtttcccccatctattctccagcactgaggattaagtaactttcatttttgtcagtctgacagatataaagcagaacatttctgcataaggttctacagtaatttttagattttatgaccctttggattatgcctacataatgatgatcaaatattcagaaactacattgtacctggccttaggcttggaattggatacaaaattaaatgaaaccagcttttgccctcaggttgatcccatctcctggagttggcagacaaatgaacaaataaaatgagagcaaaactgtatggttcacattgtgctagagaaatgcataagcttagctaacttttgtttgataaactctatattcattaatatcacaaatgaattcataaaataccgtatgcattatgtcccagggtgtgaggaggcttgaaattctcaaaagaaaacaacttgattagaagaaaaaaaaaaaaaaaaaaa

SEQ ID NO: 210658 - DNA, 1000 bp, Homo Sapiens
cctttttaaaaaatggactattttctttggaacatgactcatcaaatataccatgtgctttgattttcttactctatgccatattattacacctagcagcagttgattttttttaaaaaagcttgtggagttcagtgatattcctttttatttggggaagaaatgtataagactgtcatagttggctgttgaaagtactaaattgtgggtttaaatctgttttcattaaagtatttctatgttatgtatcttaagtttgtgtgcaagtgatatcttgcattctctgcacatgtttagccctctggtcttacatcaggagttgtcattttagtgctgatacagactaaatcctattacttcattgttgataatattttcttactatttaaatgtttacaataacttgaaggtgatattattgtactccttaaaaaccaaatataggcaggacactgtggcttatgtctctaatcccagctttttgggaggctaagatgtgaggattgcttgaagccaggagcttcagactagcctgggcaacatagcaagaccttgtctgtagaaaaaaaaaaaatttagctcggcatggtggtgcatacctgtatagtcccagctactcagaaagccaaggtaggatatattttatatattttatatattttatggcttcgatggttccttttttcttttttttctcagctggccataacctatgctgtttaaaaatgtgattgtgtgggattcctttttatttttttttatgcttcatgagtctaagaaggcttgtcagtgatacccactccccgttaccaccacccaaaaatcatatgatattaatacagatataatctgtatgtatttgggccagggacggtggctcatgcctataatcccagcactttaaggaggccgaggtgggtggatcacctgaggtcgggagttgaagaccagcctggccaacatggtgaaaccccgtctctactaaaaaaaaaaaaaaaaa

SEQ ID NO: 210659 - DNA, 1000 bp, Homo Sapiens
agaggtacttgcagcatggaccaggctggggttgctgaggacctgctgagaggggcctgcagcgtggaccaaggtgcagccacaggttaggcagctgtagccaacgtccaggtggaccatggaggtagaaccagtgggagctgccgagtggccggtgaggcactgggaggaccaggtcaccgcgaggaggaggaggggctcccagaaagatagggtttgaggtgagaggccctgcccagagcgcagtgctgggcagctatgcaggtgccagtcagacctcaggttccagctgaggctcaagagggccatgaggcccggagtgcagggaggagagagatcagggacagtgagtacagatgcccaccaggagcgtggccagggaccatgagaaacgacactggaggaggaagcagggcccgcgggcgacggaagagagaggaggggccccagcaggaaggtggcagtgctcctgagaaggcacctgtgtgtgtggagagggcggcgttggccccaggcgggcatctgtttctggtgggttgtcaggcctcttacagcaagtacttaacaaacttagatttccataatcagatttatctcaaaccgcaaaaaaaagctgattttattatgttaaactgataggagatttttatgagagatgaaagtaagcgattttaactttttaatttttttaatttttgctctgtttctcacacttgaggcttttctgaaattcaccaaaagagttttggcagttgtggggaatttaccagaaccccccattattaaaacaattggtttcttatattaaaatcatcagacaggttttgtgtacacagacatttatgttaagccactgatagaactaaactgtgtgtaggaacctgttttctctaagaaaggactcctttgagttctgtaggatatgtgcttaaaggttttctgtgtcaagctattttatgaaataaaattttacaaacaatgaaaaaaaaaaaaaaaaaaa

SEQ ID NO: 210660 - DNA, 1000 bp, Homo Sapiens
gattcttctgcagagcattttcatgtaggttatcatgttaaaataagctagattaacataatgtccttgggaaatgatgatagcccaatgaacttaatgtttgtttttctgaaggattcaagggatattcttgaatctgagaatatgtgatttcattacactcctaaaccaccaattctgtaaggtgaaatttgaagtcctattatcaaataggcctatctctctagaaaaataaagtcatgatgctaatttgtctaaaatcttgattaatgccctgtaaaatactaaatttatttagtgtttaggaaaactctgaaaaggacacaagctttagtattgcagtttccagtgtctaaaattccatgtttttttcattttaggagggatagtttttggttgttgtttgggcttggaagagaggattttaaaggaagagatacaaacagcccatgatttaagaagaaaacattaagcctcgttaatggtaggtgttaggggaaaaccctaacattagcctctagcatgagggagtgaaattaacatagtcacacatccgcaacacagcagtagtgtattcatttattaatagctgggtacaaaaaaattgtgaagacatgtgcttggcaatgactacgatgagaaggggactatgagaaatagacacacacaataagaatatttacattttgggccgggcgcagtggcttacacttgtaatcccagcactttgggaggccgaggcgggcgaatcacaaggtcaggagtttgagaccagcctggccaacacagtgaaaccctgtctctactaaaaatacaaaaattagctgggtgtggtggagggtgcctgtaatcccagctacttgggaggctgaggcaggagaattgcttgaacccaggaggcggaggttgaagtgaactgagatctcgccactgcactccagcctgggtaacagagctactctgtctcaacaacaacaacaacaaacaaaaaaaaaaaaaa

SEQ ID NO: 210661 - DNA, 1000 bp, Homo Sapiens
gaaggatagttcacacataaactgtaaatcaagagaaggtaccagttaaactagatgtagccctacagtactcatactgggtatcatgcaaaaattagtaatacaaaaacctatttaggagtgccatttcagcagttcagtgaggagcttttaatagtcataaagttaagaaaatattcaaagaagttcctgttcatatggtttatgaagggaggcaattattgtaatacaggaagactgccaaaaccctgtgttataatagtactatgatactgttcttggagctcaattcctagaacttgttttcttctccttcaaatttcccaggatgatcttgtcatgcatgtaagagccacgtgtgttcaggtgattgtccatggtttagtgttggacttcagtagatgccacttgtgatttttcaacttaaatttgtgagaaggataccttgtactgtattttcatgttgaaaagttaatacttttgtttcagttcttaataaaatactagtaatcaaatatggaacaatgctacattttctaaatgaaatttaaaatacctttcttcttcttactaattcttttaggttaagtttaaatgctaacagatataatagtgaactctgaataaacaccccgtatataaaaagggaaagaacataaaaacatgtttttgcatatgttggattattaaaaagcttcagaccaggcactgtgacttatgcttgtaatctgctttaggaggctcaggcaggaggatcacttgaacccaggaatttgagaccagtctgggcaatatagggagatcccttctctagaaaaaataaaattagctgggcatggtggcgcttgcctgtagtctagctacttggggtgggaggatcacatgaacccaggaggttgaagctgcggtgggccatgtttgcagcattgcactccagcctgggtgacagaacgagaccctgtctcaaacccaaaaaaaaaaaaaaaaaaaaaaaaaaaaa

SEQ ID NO: 210662 - DNA, 1000 bp, Homo Sapiens
ccacgtaaaaaaaaaatatgtttgctggcttaaaattttaccagtagaaccgtgattaaaaccaaggtgaggggcaatgagggaagccagagaatgaagctttattagttaacaaatcttggctagccattgagaaagttgccttttagtgtatcttgcatttaaatgaatgtcattcttcataaaagtctttcttataataagacatcttggagtttataatgttttttgtgttccttctgaattttgtttttgtttttgagttttgccatcagctaaaatcaaggtagaaatgtgttgagcaatgtgatattcgttagtatcttccagttccgtagttcagtgcattgagctaactgctcatacagagtcagctagactcctgaaattcaaaaactttagagtcctactttttttttgacatgctttttacctgtggcctacatttaacctattaaacacagagatgtgtatgtcttttttctttccttgactgcgatcattttattcacttattttctctttataatattagttgctgtcattgctagttgttaagctggtggaaaagcttccatttgtattgtcatttctacattgttatagctaaattccagttttttacattgcagccatatatgttaaatttaatgtgtaatcaagtatcagtgatcatagggtctaaaaaggaaaggagggccgggcatggtggctcacgcctgtaatcccagcactttgagaggccaaggcgggcagatcacctgaggtcaggagtttgagaccagcttggccaacatggtgaaaccccgcctactaaaagtacaaaaaattagccaggtgtggtggtgggcgcctgtaatcccagctactcgggaggctaaggcaggagaatcacttgaacccgagaagcagaggttgcagtgaggcgagaacgtgccattgcactccagccagggtgacaagagaaactccatctcaaagaaaaaaaaaaaaaaaaaaa

SEQ ID NO: 210663 - DNA, 1000 bp, Homo Sapiens
ctcagatttctttgtaattccagctgcatctaccaaagtgctagataatttttttattttaagcaaataatattatgagaacattatctttattgcaaagtgctcctccagaagaacctctatgctggataaagacaaacatttgattaaggttatgtaagagtgaaatcaggatggctcacaacccattagccgtcattttcttactttaattgacaaagaaattgaaaaaatgaaagaagcatatgttgtgcttgaatgtgaagagtgctagactagaatcaaaggcctcttagatttggctgtgtcatttgggctcatgaaaacacctctggaaatctctttcagtgcaaaggagctggactagttgatctctcaggtttcttccaactctaaaatatctccagtctgtgccttggaaacatcttaggtgaaaatctaggaacagttaacctaatttgcacccttaaaattctgccatgagctgcttacaactcaaaacaagtttatcttactcagttactaattataaaccatccagatttcagagctgtgagtactgggtgaagcattgaaggtatgcttttgaagccattacatatggcagttactgagctgaaaggattaaatgctgcagcttccccagttgcccttcctccatgagagcagtgcctgcccccagcattctgtggcacttggaagacaagacagaggccaaatgcagatttttaccctgggcttccctctacagtgtggaactcaggttgtttcttctttcctccctgaaatgacatgagtttgcagcggatggtgaactgaagaaaccataggaggctctgtcttcttgcctgaatttcagttggaagcttggagatttggggttcaacagagataaggaagtgtaagccttcatcccgtctggtggttggcgatcacacaccgctctgtgctgaggctaatggccatgatcagagttgacctaaaaaaaaaaaaaaaaaaa

SEQ ID NO: 210664 - DNA, 1000 bp, Homo Sapiens
gatagaaatcttggtgctgccgatacaagcgcatcttcagagtactcccgatgtctacctgaatctgaggattactatcttttatcggttctgaaaaattcttagatattatatttttgtatacttcctatcctcattctctctttccgtagagtagctgctctttctggaaccccagttacatatatgttagaccttttcactctctcttccatggctgccaacctgtctttcatattttcatatcttctatttctgtatatttgtatgtacttttctgcataatttctgccttctgtcttctaattgacccatttatttttcttcagctgtgtctattctgctgctcaaactatagatgaatttaaaaccttaattcaccctttttttacttcatttttttttcttttcttcataactacttactccttgtttataatctcttggttcatttatcatattttggcatccacttttatttatcaaacacatttgctttatgttatgtaaatgatggatctgattctgctattggtgatttctgctgccttttactcatgatggcacatttctagcgtgttttatgatttatcattgggaaaatcttggggccttagccacagaacagttttgaagcttggttctaacacatgttcatcaagagacaacatgaatttccttttaccagatgtataagagcactactaacttttggcccagcgtggtggctcatgcctgtaatcccagcactttgggaggccgaggagggcagagatcacttgtggccaggagctggtgtgcagcctggccaacatggtgaaacctcatttctactaagggtacagaaattagctgggtgtgatggcacacatctatggtcccagcttctcgggaggctggggcaggagaatcacttgaacccaggaggcagaggttggtccacagcactccattctgggtggcagagtgagactctgtctcaaaaaaaaaaaaaaaaaaa

SEQ ID NO: 210665 - DNA, 1000 bp, Homo Sapiens
tggaaataagatttccttcagaagttaagaactgcttgtgattgtcttatttatttatttatttttaatcctaaaagcaatacatatccatttaaaaataattaaaagtagaggtagtatgctccacttgctgtgaaatcatttagaaaattgtttttgtgtacacatacaacacagctagaacaagtgtggctaaaaaaagcaatgcagttggtaaataaagatgaagtttgttaggttgttcatattcttttaactttctgtatgtttgaaaatttcaaaacaaaatggtggcgattttttttttaaagtaacaggagtattcgcttatcttccatccccaacctcattctcctctccagagttaaaacctctgctagcagtgtatatagattttcaagtgtcttttcaagcatgttttttaaatccatttacagaaaattttttttgcacaaacggaatcacagtatatacagaatcatactacagtcaccagtcaagggattttgtccaagaccccaagagcaggttcttggctctcatgcagggaagaattcagggcaagtcacagagtagagtgaagttaaaatgatttactacagactactgaattacagaatagggcatcctcagagagcaagaggagggtgcacccatttcaatataatgctaatatgggttattaagaaaagtgtactttggccaggcgcagtggctcacgcctataatcccggcactttgggaggtcaaggcgggcggatcacctaaagtcgggagtttgagactagcctgaccagcatggagaaaccccgtctctcctggaaatacaaaattagccgggcgtggtggtgcatgcctatagtcccagctacttgggcggctgaggcagcagaaacgcttggacccgagaggcggagattgcggtgagccgagattgtgccattgcactgcagcctgggcaacgagcgaaactccgtctcgaaaaaaaaaaaaaaaaaaa

SEQ ID NO: 210666 - DNA, 1000 bp, Homo Sapiens
aagttagactgaggctctcaaatgcctgttgtgtgacacgaggggccctagtgagcttagaaatagtcatgtgccgcataacaatgttttggtcatcacgaggtcatagcacagggcattgctcactgcctgtggtgatgttagtgtcggcaaacctactgtgcttccagtcggataaaagcccagcacatacaggtatgtccaatacagaacagttgagaatgacaaggagcgattgtgtcactggtttatgtattgactataccaagctggtccaatctgcgggctgcatgcagcccaggacggctttgaatgcggcccaacaaaaattcgtaaacttttttaaaacatgagttttatgcacggacctttttattttctttttttcttttttttagctcatcagctattgttagtgttagtgtattttatatgtgacccaagacaattttgttcttcttccagtatacccagggaagccaaaacattggatacccctggactatactataatttttattgttgttttagagcatattccttctgcttatatattaaggagttacctgtaaaacagcctcaggcaggtccttccagaggtgttccagaggatggcattgttgtcctaggggatgacagcttcatgcatgtaattgcccttgaagaccttccagtgggaaaagatgtgggggaggccagatgtagtggcccaggcctgtgattgcagcactttgggaggccaagacgggcagatcgcttgacatcaggagctggagaccagcctggccagcatgaggaaacgccgtctctactaaaaatacaaaaatcagacaggcatggtggcgtgcacctgtggtcccagctgctcgggaggctgaggcgggagaattgcttggacctgggaggcagaggttgcagtgagccaagattgcgccactggactccagtctgggggacggagtgagactctatccaaaaaaaagaaaaaaaaaaaaaaaaa

SEQ ID NO: 210667 - DNA, 1000 bp, Homo Sapiens
gaaaggaagactgggacccaaggggccaaactagtgacaatgactgctgtcatgaagggtgacaaggacaatacctgctgagctcaaaccaccctttggacccagtgaagctcagatgttgcttccagtgcaggagtagttaagctcaactgttttacaatatccagttatttggctgggtgtgatggctcacacccacactcctagcactttgggaggccaaggtgggtggattgcctgagctcaggagttcgagaccagcctgggcagcatggcgaaaccccatctctactaaaaatacaaaaaattagccagacgtgatggcaggcgcctgtaatcccagctacttgggaggctgaggcacgagaatcgcttgaacccagggaggcggaggttgtagtgatccaagatcatgccgttgcactccagcctgagtgacaagagtgagacttcgtctctaaataaataaataagtagcaaaaacaatccagttattcctcaaatatttatgagcacctcttaatgtttcagatactattgtgacaagagaaaaatgtgtttgtatatgtaaatagaaaaacaaaagtgatgtggaagcgattacttctgtcattttggaactaccttcctcccatattaagtccatattatgacaattcaaaaataatcaaacttcgtaagatattacctgtgaaaggaataagtatttaaaaatgtattttagatggccttttagaaatctagtccgtggacacaatctagcatcatgcagttgccttcaaaaagaatatcctaaagttcttgtttgttttctttttcctttcaaagtgttctgttgaaaataacccatttgtcattttagttttgatatgacttagttatacatgccttttgaagcagtacccacccacatagtaattgcgactatcttgtgttttgaaaaaaaaaaagcgagacaatttgactttgatagttttaagttcaaaaaaaaaaaaaaaaa

SEQ ID NO: 210668 - DNA, 1000 bp, Homo Sapiens
ttactgtccaaatcagaacctttctgagagtcgacgtgggtactgctgataattagtctggatacccgaaagaatggaaagcagggacccagacagatccttgcacaaccgtgttcgtagcagggcgaggcctggaggtgcgatggggatctcaacggggcagctgccgtcttgctggagcccacggtctttggggggggtcacaggtgttaaccgcatatcatacaagcaggagtgtgaaatttcagggttgccaaattcagtgagggtcttgtgctggcctggccacttacagtggcatttcaggaaaaaaaatcactctatggacctcagtttccccattagtaaagagtaggttggactggaattctgtaccatccagtatagttgccatttatgaaatgtggctatttaaatttaaataaaaatagaaattccgttcctcagttggactagctcagtgtcaagtgctcagaagtcacttgtgaacacactgtggcaattcctcaaaaaacgaaaactagaaccaccgtagcatcccataattccacttctgggtgtggattcaaaagaatgcacagcatcttaaagagctagagatatttgtacacccacattcatagcggctctgttcacagtagccagcgggtagaaacaacccgaatgcccgcggtcaaatgaatggagaaatcaaaggcgggacaggccgggcgtggtggctcacgcctgtaatctcagcactttgggaggccgaggcgggtggatcatctgaggtcacaagttcaagaccagcctgaccagcatggagaaaccccgtctctactaaaacaaaattagccgggcatggtggcgggtgcctgtaatcccagctacttgagaggctgaggcaggagaattgcttgaacctggggaggcagaggtttcggtgagccgagatcgcgccattgcactccagcctgggcaacaagagcaaaactctgtctaaaaaaaaaaaaaaaaa

SEQ ID NO: 210669 - DNA, 1000 bp, Homo Sapiens
tgatacagaaatgtattatggaaattgaaaagagaggctgtcaggtattatcttactatggttccctactacttcctttattgattgattaattgtaagtcttgggggaaggaattcaaggtaatgtaaaaaaatcaaatttagatattttaccattcctattctttatttttattccattactgtttagggtataatttttaacttgactcatgttgtccattattgagagcatgctagatgattccacaaatttatattgcaacacagagcttcatgggtcttataattagaaatcaggattgcttcaaaatggcattaaaaggaaaagtcagagctgataacataggcaaaggatattgattctttatactaatttttgtgatacatattaagactaaaaattacgttgagttatttctgctttagtactatctgaatttataatattggttgaaaagttaagttaaaagacaatgagtaaatattataaaatctgaaatatttatttaataaacttaagcttaacatggaaactatagaaacagcctaagttaatggaattttgcattaagatacagaatacctggattctggtttctcctccattattacttagctgtgtcatgttgggcaagtcacttaatctctgtgggtcttacttgcttgtatctataaaaatagatggagtggctgggcatgggggctcacgcctgtgatcccagcactttgggaggccgaggcgggcggatcgcctgaggtcaggagttcgagaccggcctggccaacatggtgaaaactgtctctactaaaaatacaaaaattagcccgacatggtggcgcatgcctgtagtcccagctacttgggaggctgatgcaggagagttgtttgaacccaggaggtggacattacagtgagcccagattgtgccactgcattctagcctgggcgatagagtgagactccgttgcaaaaaaaaaaagaaaaaaaaaaaaaaaa

SEQ ID NO: 210670 - DNA, 1000 bp, Homo Sapiens
ttttataaaatgttcctctttatctctagtaacagtttctgtcttaacattgtccaaaaaaggctatttagattttcttgagttagtttttggtcatttgtattataactcaagagtaactagttccttttttgtaaaggcaagcacctaccaatgctttcttaggtaatgagggcagttcatttacgtatacccaaacctactctaggaagacaacatcaggttagtaagcctgcagagatgctgagttctttaataagaactatacttgatatgattgtgatgcccttcattctaagtgcatataattgtagttagaccatggttcaccagaacaagtgtcactatggttcacaattgtcatgatgttctaattgtgtgtaatatgttgattaacttttgagctaccctttttgtcattccataactcgtcctacttgaagaaaacatcatacacagaagcctgaacttgttagatgacgtagggaatgattttgtccattgcagcgtgtgtagacaagtttttttatatatttaagaatttcatcaattcactattaaatgttcaatttataaaaccactgtaagttttctaggaacacatatttaacttaacctaactttaaccatgtaatgtttaccttgaaccagtgagtccccgcttcattgtactcactttcaatagtagaattatcaaaaaactttctttttaaaattttttataaattaaaattttattattttttcattttttcactcctttctggagctgagaaaaaaataatgttaaggttaaaaattccaatttgcttttctcctccagtaattcacagtgtcctcaggtatcagaatgcaaatggatgaacgagtataactttcaataaactgatctgctctcccctccattttgcttcctacaattgtttatttgtgctcttcactgcccgatttcagagcatgtactaacttttgcaagttacttcaaaaaaaaaaaaaaaaa

SEQ ID NO: 210671 - DNA, 1000 bp, Homo Sapiens
cttctttgaaaagttcttttcattaataaaatggtttttttggtttcttttggatgatttaaaaatgattctttcagagatgataaattatgtgcttggggaaattctgtaattctgatgggtttgtaatgactctttttgactttgcgaattgatccagtagagcataaacttcgggagtgccttaggccttaataggctatgttcttgttttaataattttgacagaattgttgtgggaatcataattagagtctctctctcagtgaatttgattaatttaaaaaattaataacatttctacataaacaaaaggtattaggatggtgcaaaagtaacttgcagttttgccattaaaagtaattacttaccacaattactttttcaataacctaaatgtaataaggaagagaggagagcctatccccgagcagatgtgcactttagggaaggagttgatgcttgtcctgtgttgtgaggctttgtgattgaatcagctgctcaggatatcaaagaatcttcaacctgaggaccagttacattagaatggtattgtctgcttggacccctctgttgagaagaattgtaacgattctctgagttcaggtgggaaaaagagctgtggtatgggcataggaaaggtggatgatggcctactcatagcacatttattggtacattgttgtttttgctgctgttattgctgtttcctgtttcattgatgaatcaggagtcttctattaaaaactatatgtactacttttacacatgttcacagtaacataacaacaagcataggtcttatcatccacttattccaaggctaagaataggagtcagggaagttaagtgactagtctgaggacacagggataaaatttggcagagacatggatgtggctatgcccaggtatatgtggctgaaagctggtgctctgtctctatgcaagacaggcagaggaaaacctctggttaccaaaaaaaaaaaaaaaaaaaaaaa

SEQ ID NO: 210672 - DNA, 1000 bp, Homo Sapiens
attgtcatttatttagagattcaaacactccttttgaaaatgaagctttatgagggatctagctatgttgtccctaaatgttcttttcttttcaattgcattaaagcaaaacatttgctccaactaagtgaaaacactgaaagagaatgaggatgctcagttgttacattttgaggtagtctaatttctgtttagttttttggccgaccagctctgccaggtctctgcattaggaaatcccacatgtaacagtctttggatttagctctgataccaactgttcattaaaaacaaagtgtccaaagagcagaagagacaaaaattcagttcttacccattctagccgcagtagctacatgttgacagcaagaacctccttttccccctccacagtctgcacagttacaattacactacttattctgtgtgtgtagtcccttgaccaacagatccacaggcaaatttgctgcttataaatgtaatttttttctgaaattttaacttaacttatgttttatcttaggactcttaaacttccaggactgctagcattacctattctgaggaaactctttttgttcatttcggttttaatgtgtctctgtaactatgattattcagcagaagaccacagaggcccttatgctgtgttttggtatcagaatgctttggggtagcttacttctttttagagaaatttgcaaaagtaacatgccatatttaatttttgtctatttgttggaaaaatgaacatgcttgagtcctggttgtggtcagtttatactggaggaagcaaaacatatatgtgaacatcgtttttagctgtctttagagaaaatagatgttttgtcattgctgtgcttaaacacattgttgtgttggcagtagttttgagcaatttggtacaatcttcgtccttccagtcactgttagaaatgctttattttggtcagtatactttcctgtgataaaagaaaaggaataaaaagaaaacataagt

SEQ ID NO: 210673 - DNA, 1000 bp, Homo Sapiens
gtgggaagtgagggagggaggagggggaggaagtgagggaggaaggggtggagagagagtcatttgtatatctttagagaaatatctattcagatcctttgcccatttataaaattattttgttattgttgaattgtaagagttctttatatatgctggatacaagtcccttatcagatacatgctttgcaaatggtgccctttaacacacaaaagttgtaaattttgatgaagtccaattttgtcacatgtttttgctgtcatatgtaaggaactattgtctaatgtgaggtcacaaagatttgtgcctttgttttacagttccaagagttttatagttttagcacttatacgtaggtcttggatccatgttcattttcatatatggcatgaaatagaggtttaacttcattcttttgcatgtggatatccagttgtcccagcacccatttgttgaaaatcagtgactgtagatgtaaggatttacttgaggactctcaattctattccattgatctatgtgtctgcgtctttaaccagtactacactgtcttgattatgtagctttttagtaagatttgaaattgggaggctgggcacggtggctcactcctgtaatcccagcactttgggagcccgaggcaggtggatcacgaggtcaggagttcgagaccagcctgaccaacatggtgaaaccctgtctctactaaaaatacaaaaaaattagccgggcatggtgtcgggcgtctgtagtcccagctactccagaggctgaggcagaagaatcgcttgaacctgggaggcagaggttgcattgagctgagattgccactgcatttcatcctgggtgacagcaagactccgtctcaaaaaaaaaaaaaaaaaaaaaagaaattaggaaatgtgaatcctccaaccttgttctttttcaagcttgattggctattctgggtctcttgcacttccatatgaattttatgatcagcttgttaatttgtgc

SEQ ID NO: 210674 - DNA, 1000 bp, Homo Sapiens
ttcttttattttccagtctttaaaatgtgattatttgtttctcagataagtttgattatgcaaactgtgataagtaaaaaaaataccccattacttcatatagttctgacaacttatgctgtaacacatttaaatgagtaattttgttttgaaataggttggccttggggaggcactattagaggctgaaactattgaagaacaagaatctccagtgaactgctttagaaaattatttgtttgtgatgtccttcctctaataattaacaaccatgatgttcgattacctgccaatttattgtataagtacttgaacaaagcagctgaattttatatcaattatgtcactaggtctactcaaatagaaaatcagcatcaaggcgcccaggatacatctgatttaatgtcacctagcaaacgtagctctcagaagtacataatagaagggctgacggaaaaatcatcccagatcgtggacccttgggagaggttgtttaagattttgaatgttgttggaatgagatgtgaatggcagatggataaaggaagacggtaataaatagcttatttccagaattgcctattgattcttttggatccttataaaaacaaaatcatgctttttaaatctgtgtaatgcgtaagtatagtttttgggcaaattttgtgacactcaatgcaaaagaggatggtttttcattttatcaaaacatttctgactgggcacaatggctcacgtctgtaatcccagtgctttgggaggctgaggtgggcagatcacttgaggtcgggagttcgagaccagcctggccagcatggtgaagccccatctctactaaaaatacaaaaattagccaggcgaggtgatgcgtgcctgtagtcccagctacttgggaggctgaggtgagaaaatcacttgaacccaggacatggaggctacgatgagccaagatcacaccactgcaatccagcctgggtgacagagtgagaccctgtctct

SEQ ID NO: 210675 - DNA, 1000 bp, Homo Sapiens
cggctcagatgaggcttcaggcttgaccaaatctgactggctggctgccggagacactgctacccatcggcccttaataaatggcctcatttgatcatcatgtgatcttcagaagctgggcttgattatccttgccaaacaaaatgctgaaaccaaaaatctgaaagtaaatcaaaggtttcgccatcatgtaaacccttgggcgacagagtctccctgtctccccctgatattgttctatgagatttcgatgctatcttcattgccagcagccctgacaaagatgcactgcagacggatagcctctcaggaacctgcttacctcagagcctgctgcggactgagttgtcttctccaaaatccatttgtggaggccctcatccccaatgggagagtatttggagatgaagcatttggaggtgattaagcttagatgagctcagagtggagcctcaggatggcatcgatgccctggtaaagagggacactgagacctggccctcccttgctctccaccgtgtgaggacacaatgagatggtggccacctacaagccaggaactgaaccctacggggccttgacactggccgttccagcctccagaatggctaggaataaatgtctgctctttaagtcactgggcggtggagctttgttatggcagcaccaggggctggttgagagcctttgcatggctcttgttccacctggaatgagatttctaactcttggctacctcacccccttacctcattgtttcatgttgcaaccacccacccactccccatgtctctggcattctcatttattttttctttgatttcatagaacacatcacaaagccatttgctcatgcatgatgtttattgtctattttctatctccctgctagagggtaagatgctcaagaacactgctctgtctgcctccctggacccagaaaatgcttggcgtgtggtagaacttagatatatttgtgttgaataaattaattgaaggg

SEQ ID NO: 210676 - DNA, 1000 bp, Homo Sapiens
tactggactgtttgtgccttgaggttgacagtcttccagggcgggaattttggctgcttggctggggtgtcagatgtctccttggttgtgaaattattcagcctgcttactatgagcagaatcatggcacttttctcctgaaggactcaggcagttttcactcttctggagaagatccagacaattgaatctcagttcccagccaggctgaaccgtgagataggacaccagaaacctttctgttctagccttgtaggaagcagtaaagtcggatggctacgagcagagcttttggagttggatggacctggatttgattcctgtttccactactagctagtgctatgatcttagctggtggggacatctcgttatcctttccaagcctcatttttatcttcaaaatggggttaattatgaagagtgaaggtatgtaaagtgcatagcacttggcatggcgcaggtaataaatgttaatgagtactttaataattcattttattaaaaggaagcctgttctttctctgataccttggagaaagctgaagccctcagaaattaaaagtgctatcccaaattgtaccgtaaatatcaaccacccgttatctcagtatttatccttaacttgtgtttgttttatggtttaggagtcaaaggtagaatttttatatatatatttacttaaatcttaagaaatgaactggtggccaggtgcagtggctcatgcctgtaatcccagcactttgggaggccgaggcaggcagatcacaaggtcaggagatcaaaaccatcttggccaacatggtgaaatcccatctctactagaaaatacaaaaattagctgggtgtggtggcatgtgcctgtagtcccagctactcgggaggctgagccaggagaattacttgaaccggggaggtggaggttgcagtgagccaagatcactccactgcactctagcctggtgacagagcgagactttgtcccaaaaaaaaaaaaaag

SEQ ID NO: 210677 - DNA, 1000 bp, Homo Sapiens
aactgaggaatctatgagccattaacctgctaaccctggcatagagcagtaaataaatcttgaagacaacaatacagggaaggaggaagtgagtaaaggaaatccaaactttatcttttaaaagatgcattcttctttttttagtcatccctctaatcaatggaaaaagatgcattttttttttttttttaattgagacggagtctcaccctgtctcccaggctggggtcagtgccgcggtttcggctcactgcaacttccgcctcctgggttgagatgattctcgtgcctcggcctcccgagtagctgggattacaggcacacgctaccatgcctggccaacatggcaaaaacctgtctctactaaaaatacaaaaattagctgggcatggtggcaggcacctgtaatcccagctactcgggaggctgaggcgggggaatcacttgaacccgggaggcggagcgtgcagtgagccgagatcacgccattgcaccccagcctgggtgacaagagtgagccttcatctcaaaaaagaagaaaaaaaattgataagccttaccgtcatccatcatcacaacactctgaaagtgactgctgaccactcaaaggctaccagccattgatatcttctcagtggagttctagcacccctgtggaataacagcactgtcccattttctcattttcaattcaaattcaaagatttgaggccaggcgcagtggctcatacctgtaatcccaacactttgggaagccaacgcaggcagatcgcttgaagccatgagttcgagaccagtctggccaacatggtgaaacctcgtctctgctaaaaatgcaaagaaaattagccaggcatggtgatgcatgcctgtaatcccagctactcgggaggctgaggcaggagaatcgcttgaacccaggaagtggagattgctgtgagccaagattgtaccactgcactccagccagggtgacagagtgagagtccgtctcaaagag

SEQ ID NO: 210678 - DNA, 1000 bp, Homo Sapiens
agacccccctgaccttagccgctcagctggacgactctgtggaggtcatcaaagctctcaaaaatggtggagctcacctggacttccgtgccaaagatgggatgaccgccctacacaaagctgcccgagcgaggaaccaagttgccctgaagacccttttagagcttggtgcatccccagattataaagacagttacggcctcaccccgctgtatcacacagccatcgtcggaggtgatccctactgctgcgagcttctcctgcacgaacacgccactgtgtgctgcaaagatgagaacggctggcacgagatccaccaggcctgcaggtacgggcacgtgcagcacctggagcacctgctgttctacggggcagacatgagtgcccagaatgcctcggggaacacggccttgcacatctgcgccctctacaaccaggacagctgtgcaagagtgcttctgtttcgaggcggaaataaggagttaaaaaactacaacagccagactccatttcagatggactctcactctgttgcgcagagtgcaatggcacgatcccggctcactgcaacctccacttcccgggttcaagcgattctcctgcctcagcctcccaagtagctgggattgcaggttcgtgccaccatgcctggctagtttttgtatttttggtggagatgggttttgctatgttggccagactggtctcgaactcttgaccttaggtggtctgcctgcctctgcctccgaaattgttgggattgcaggcatgagccttcatgtctgacccagtctattaagttttatcatgaatctatgttgtcatatccgatgtgtcttgataaaatatttatccaaaatccgatcctgcaactgtcaaagatgattatgtagatttcccctgcttatctgctaatgcgatgaattatatttgtcaattttcttatttctaaaataaactcacctagccatgaaaaaaaaaaaaaaaaaaaaaaaaaaag

SEQ ID NO: 210679 - DNA, 1000 bp, Homo Sapiens
gtcattaatgtgggtggagatggggatgattgtaggtcaagagactgaagcaatagggtaggcttgggtgttagtacggcccttcatgggaatgtgttgatgtcatccagggtcacgggaggcttctgagtgggaaggaagctgagagcctatgattacggtcttcactgatgaaggcagacagtaggaggttggcagatggtgggcactgactagactggaagtgccaagaacttcagtggagcaaggttttacccaagacacagaggttgtggtctagagcagcccagggatgaaggatcacccattggagaggactgtggggaaagcagagtcctgggagatgaaccaagcatcagttgaggctggaacagttaaaatgtatacatcaaattctctccaaggacactgtacccttggctgaaaattccctccttagtctacttcccatcccaaattctacccatccacactgtggcatcctaggtctctctagcagctgaacaggcaggcctctgtaacaactgtttcagcgctgactgagtggttaagttaaatattaaaagttgaaagagccagtaaccttatacaaaggctggaatagaacaaaagcccaccacaagtttttgcctaagtctttcctgtgccttgaaccatgacaagaggaggaaggaattcttaaccagacccatttaggattaagtaagtttttattggctgggtacggtggctcacacctataatctcagcactttgggaggctgaggcaggcggatcacctgaggtcaggagtttgagaccagcctcctggccggcatggtgaaactctgtctctactaaaagtaccaaaatgagccaagcatggtggcgggagcctgtagtcccaactactcgggaggctggggcaggagaatcgcttgaacccagaaagcggaggttgcagtgacctgggatcacaccactgcacttcagcctgggcaacagagtgagactccatctc

SEQ ID NO: 210680 - DNA, 1000 bp, Homo Sapiens
caacacatttcaagttaaaagatatttcctgctttgagaataaaattatttcaagttaaaataaaaattaatctaatatacccttaagtagtaatgaggcatgtagttagtgcactgaagtagttatgtgcttcccaaagtgggaacttaaaacaaaggaatcttttaagcttaacaattccttatgttagtcatataattatcccttttctcagaagcctggggccaaaaggatctgttcctaggagaaaggaactgtctctcctggcttaacaaagattcagtttaaaggctagctaccctctgagtcatactgctttctgatcttggagtgcttgcctctgtcccatgagaaagaaaggtggatgaacagcacttgcaggaaggaactttcatctttcttgaagccaatccaaggcctcagatgcagaaagaatgcctaccttacctcttcaggggaaaaggggtttgataaaggtgctctacataatgcgaatctgttttcattaattcatgcattcatctactcttttattatgcattcaattcctcaaccatttattgagtatatacctggtgtcaagcactgtgctagctactggacacgtcaaaaggaaagaatgagattttgtcctctgccttgagattaaggtagtttttttgtttgtttgtatgttttaacataccaagtccagtgaaatcttaaaatattttttatatggctgggcgcgttggctcacgcccgtaatcccagcactttgggaggccgaggcgggcagatcatgaggtcaagaaattgagaacatcctggccaacatggtgaaaccccgtctctactaaaaatacaaaaattagctgggtgtggtggcaggcacctgtagtcccagctactctgaaggctgaggtaggagaatcgcttgaacccaggaggtggaggttgcagtgagccgagattgcaccactgcactccagcttgggtgacagagtgagactccatcac

SEQ ID NO: 210681 - DNA, 1000 bp, Homo Sapiens
tatgtctctgctgaatgaagtttgctcctgggtgaacctcagggccgttttgaaccagtttcctcaagaaattgatgtttgctttgtttacctgcagtacaaaaaaaaccacaataagttactcccaggtaactagaaactaacaaatgatactgaaatgcgtcttaatctttactttccttgttcagattctaggagaaagagaggcatcctgggcagcctgctgcctatggtcttgagtataatgtgaacaacagactggcaaacaagcttccagcttccagtgtcaactcagctgtttgctcactgagtgacatggccaattcctttcctggtgcttggtttcctcactggtaaaacgggtaggctagactgatctataggaaccttctgtgatcctagaaacaggtggcgacttgatctgcaataacttactgggggcttgtaaggtttaaaagttgtgacaccagcaccacaagccctggtctgcattgaatgtgttctggaacctcttaaacaactgtcttgtggaacaccattttggagaagttaactcttggatcattagtaactcaactgaggacacacaacacaagctgaccaggaacatctatgatctgggctaactgtgagtctcataggtaaagctaatcaatattctcgttagcaggccctgcagttacctagacctcaatttaaaaaaaaaaaaaaaagtatgggctgggcatggtagctcacgcctgtaatcccagcactttgggaggccgaggtgggtggatcacttgaggtcaggaattcaagaccagcctggccaacgtggtgaaaccccgtccctactaagaatataaaaattagctgggtgtggtggtgggtgcctgtaatcctagctactcaggaggctgaggcaggacaatcacttgaacccaggaggtggaggttgcagtgagctgagattgtgtcactgcactctagcctgggcaatagagtgagactcagtctc

SEQ ID NO: 210682 - DNA, 906 bp, Homo Sapiens; identical to SEQ ID NO: 57955

SEQ ID NO: 210683 - DNA, 1000 bp, Homo Sapiens
cctcctacatatttaagtatgtatatcattaactagatttccatatttatttacagtgtttttcttttgatgtgaaatgtacatgcaatgaaatgcagaagtcttaagggtacattcactgagctttggtcagggcatgcacctgtgtaacccagactcctgtcaggacagaggaccttaccattggcttagaaaatcccccttaactcgtctccagtcaagcctttcagcctcctttccccaggaggcaacaattattctattttttttccaccatagaaaaaagttagaacagtggttctcatagttttgtgtgttttagaattgcatataaatggaataacaacagatgcacgctttgtctgagacttctttcactccatagcacagcagttctgcaagtgtgttctgcagacctcttaggttctccaacactccttcagggggtcccatatgtcacagctattttcattataattctgagacatttttctcctctacactgtgctgacatgtacgtagatggtgcaaaggtaacggtgggtaaattgaggcagtagcaccaaactgtacctttgtcagtgtgttcttcatcaccaccaacttacagaaaaaggagtcagcatcacttaaaaatgccctgggtgaagcagaacagatgtgcatctttttaaatctcagcccctgaatacatgttcttttaatattctgtatgatggccgggtgcagtggctcacgtctgtaatcccagcgctttgggaggctgaggcgggtggatcacctgaggtcgggagttcgagaccagcctgaccaatagggacaaaccctgtctctactaaaaatacagaaattagccgggtgtggtggcgcgtgcctgtgatcccagctactggggaggctgaggcaggagaatcgcttgaacctgggaggcggaggttgcggtgagccgggattgcgccactgcactccagcctgggcaacaagagcaagactccgtctc

SEQ ID NO: 210684 - DNA, 640 bp, Homo Sapiens; identical to SEQ ID NO: 50280

SEQ ID NO: 210685 - DNA, 640 bp, Homo Sapiens
ctttcgtaaagtttatattcagctttttatagtacatctgacattgtagaaaagcattttcttatatatagttgaaatatatattcaactttgatttagtaaagtatatgaaaaacataatttacattcagcattttatagtgtatgtttatattcagctttttatagtatatgtgaaatcctagaaaagtattattttcctgaataagaaccaggaagaaactgattaaagagctataccacataatttctctagtactagattatcttacagtcttctacctcttcaagatacaaaagtcatggctgtgaggctatcattacccttttaccaaagttggaaaaggacagcatccaaaataagtcagcctcccaaagtgctgggattgcaggcgtgagccaccgggcctggcctgcattttcttaactgccagtgagattgagcatctaccatgtctaagggtcattcgagttctgtttctgtggattgcttatttttatctcttccttttgtttacattggagtagtttttaaagcaatctgtggaaactttgctaaggagattgtattgtcatatgctctgcagtttagcctgcatcttttgccatcgtttatggcaaacagaggtaacatattttt

SEQ ID NO: 210686 - DNA, 640 bp, Homo Sapiens; identical to SEQ ID NO: 48399

SEQ ID NO: 210687 - DNA, 547 bp, Homo Sapiens; identical to SEQ ID NO: 50625

SEQ ID NO: 210688 - DNA, 452 bp, Homo Sapiens
tatttcacagttatcaggggatgtacatctctccctccgtacacttcgcgcaccttctcaccttttgtcaacggcaaaggcagcctttttctggccttgacttatggctcgcttttttctaaaaaaaaaaaaaaaaagaaagaaagaaaaaaagcaacgaaacataaaacacacaagcgccccgtgcccccagtgactctgggcctcacagagcccccgccagccagcatggggccccgccctgcagccagtcacgcgcccccacaccgcagccccccgtggctgtccttccaaccccacgtgctttttctttctcctgcccgcttcttttcttcatcacaaaaggcgtggagactcggagacggacgtttttccccttttttaagttattgacgcccagcgcgcctcgcctcttcacccatcaacgctgtgctttgcccactggactcctg

SEQ ID NO: 210689 - DNA, 624 bp, Homo Sapiens
gagggaatgcctgcctccctgttaccagctctgcagatgtgcacatatcttcctgtctctacaaaaaatacaaaaattagccaggcgtggtcgtgtgtgcctgtggtcccagctacttgggaagctgaggtgggaggatcaattgagcctgggaggccaggctgcagtgagtcaaaatcataccatctcaatccagcctgagcaacagagtgagaccctatctaaaatatatacatgtatattaacaattatctcttgaaactaaagtataatcacagtactagtgtactattttccattttattaaatgcactaaacagtattgcaatgtgttagtgtttattaaaaaatattttggaaatctttgggagaaaagctacttcaaattagtctgaaaactatcatttccttctagcaatgtgtaataatgtaatgactgcttagaatttcctgagagggactgtaacatatattttaagcataatattgtaaacaaacaagttcttttgcagtacttgaagatctttttttgtgactatcccccttatatattatgaagatacattttttgtgactatcctctttatatgtattgtgaagataaggttttttatagtgaatatc

SEQ ID NO: 210690 - DNA, 623 bp, Homo Sapiens
cgaggacctgagctcctggaccgcggcggacaccgcggctcagatcacccagcgcagcctacctggagggcctgtgcgtggagtggctccgcagatacctggagaacgggaaggagacgctgcagcgcgcggaccccccaaagacacatgtgacccaccaccccatctctgaccatgaggccaccttgaggtgctgggccctgggcttctaccctgcggagatcacactgacctggcagcgggatggcgaggaccaaactcaggacaccgagcttgtggagaccagaccagcaggagatagaaccttccagaagtgggcagctgtggtggtgccttctggagaagagcagagatacacatgccatgtacagcatgaggggctgccgaagcccctcaccctgagatgggagccatcttcccagtccaccatccccatcgtgggcattgttgctggcctggctgtcctagcagttgtggtcatcggagctgtggtcgctactgtgatgtgtaggaggaagagctcaggtggaaaaggagggagctactctcaggctgcgtccagcgacagtgcccagggctctgatgtgtctctcacagcttgaaaagcctgagacagctgtctt

SEQ ID NO: 210691 - DNA, 972 bp, Homo Sapiens
ggtcctgaagactttggtccagaggagaattttgatgcttctgaggaagcggcccgaggacgagatctcagaggtcgaggtcggggtaccccacgaggaggaaggaagggtttacttcccactcctgacgagttccctcgctttgaaggagggcggaagccagattcctgggatggaaacagagagcctgggccaggtcatgaacattttcgtgatactccccgccctgatcatccccctcacgacggtcattccccagccagcagagaacgctcctcttctctccaaggcatggacatggcatccctacctccccgaaagcgcccctggcatgatggcccaggcacttctgagcacagagagatggaggccccaggaggcccttctgaagaccgaggaggcaaaggccgagggggcccaggacctgctcagagagtgcccaaatctgggcgttccagctccttagacggagagcaccacgatggataccacagagatgaaccttttgggggccctccaggcagtggcaccccttctcgagggggccggagtggcagtaactggggtagagggagtaacatgaactctggcccgccgaggcgaggagcttcacggggtggtggaaggggtcggtagaagctggaactgagtaccctgaggcctctctggacagtatgtaagaacttcttgtggactcaccaagagaaacaaaaggaagcctgcaccattgtagccctggactcttttctgggcacctgaattcccaggaaccctcatgaaggcttcaagatgaagagactgctgccagctacccaccctggctgggccctgtcctggtcaaccctcattgccccaacctcccatggtggttttgtgaagaataaaagcggggatcttttttcttttgttttaagtccccaaagaaatgggggcatctctcccacaatttaagttccccggctcctttttgga

SEQ ID NO: 210692 - DNA, 1000 bp, Homo Sapiens
  misc_feature (277)..(277): n is a, c, g, or t
atgtgggatttggatggtcctgggggctccccagcatttctatcctgactgcctcttgggttgtcaaaacccaaggcagccttgacagggaccccccggccctaacacccatcaggagttggagcagttcctgcaggagcctgttccttccctgggctgacgcccccttgcctctgcctggtacccacatgacttggaactgaactaacatttttctttaaaaagcaaaacttaaaaaaaaaaaaaaagaggagagagatagaggaaggtgaattanactccaaaagatgaccctgctgtagctgggccctgacactgtcaccctccaccgactttgttttctcaggatggatttttgctgttttggctctcagcacctacctcagccggaatgaatgtcctggggggcagtggggcacccttcccgcgccgcacggaggcggcggacggtcgatgcccaggctaccgcggtaaggcccggggctccccgctctgccaggccacgtcgcgaggataaggcgagcacgagaggaacgcagggggtcggcgcccattccgccaacgtctctccacccccccccccccggtattcccccgcagccggaatatttattaccccccgtgacacctccccgcgcaggaacgccgccgcagcggcggacacacaaggcacgagtgaggggacgccgcgcgaagcctgttcaacaacccgcgggaccggccagcgcccggccccctccgagcgcgggcccggagtcaaacccgctctcggatcgcgcgcagtggcgaccgccttctgcgcgcgaggtacgcgactggagccccacccccagagggcccccgacggacgccctctgccggcggcgcgcgctcctcccgccacaaccaccacccgctgaacgcgggccgccgtcccccggcgacggccggagcgagagagtgtccggcgctcgctcacaccacggtgggtgcgtccaccaccgaccacacatggcacacg

SEQ ID NO: 210693 - DNA, 952 bp, Homo Sapiens
  misc_feature (9)..(9): n is a, c, g, or t
  misc_feature (801)..(801): n is a, c, g, or t
agagagaanaactagtccgagtttttttttttttttttttttttcacctctgatacttttaagtgaaaacatgaattaggcaaactaatcaatttgacaactgttgggatccgggctttctcactgtagtggaaatggcttctttacttgaagtctgctaagatgtcactgaaaatattgaggaacaggtgagcgtggtgatccctgaagaccagcgtgggacggaaacgaatggatttgtcaccacagccacccaacaccacacctttgtttctggcaattaaaatgagcttattccgtatggaatcatcgggagtatcgaaggagcaaaaggtgcctcgtcctctcaccctgctgatgaactgggggtaccgggcctggaggtccagcagtcctgtgagcagggccttcccggcatgggctgcattatttagcaggtcctcccgcttgatgatgttgatgacctcagccagcaacaggttcttggacgggtcccccagccaggtgttgaagatccggtagggagcattaggcctgaactcctccttgtggaagaagcccccagtcatcatcttcttgctgaaggtcatcacgtctgctgggtcatccaggccccagtgctcatgggcccagaacttgcccgtgcagcctcctccggtctggacctcgtccaccaagaaggcgcagccatgctttcctggcgatgtctctcagcttccgaaagaatcatcgaaaggcgtgggttgtctccaccctccggactggatggggctccacgatgatcccggcgttcccaacggncgggcggaaggtaaccccacggaccaaccgggaagggaccctttctcccggcctgagtggaaccccaatggtccgcagggaccaacctccctgggcagggcccccctgtggggggaccgccaccttttggtgcaaggaaccccggggccgg

SEQ ID NO: 210694 - DNA, 958 bp, Homo Sapiens; identical to SEQ ID NO: 46993
  misc_feature (747)..(747): n is a, c, g, or t
  misc_feature (770)..(770): n is a, c, g, or t

SEQ ID NO: 210695 - DNA, 982 bp, Homo Sapiens; identical to SEQ ID NO: 42789
  misc_feature (597)..(597): n is a, c, g, or t
  misc_feature (600)..(600): n is a, c, g, or t
  misc_feature (603)..(603): n is a, c, g, or t
  misc_feature (907)..(907): n is a, c, g, or t
  misc_feature (913)..(913): n is a, c, g, or t

SEQ ID NO: 210696 - DNA, 917 bp, Homo Sapiens; identical to SEQ ID NO: 54255
  misc_feature (676)..(676): n is a, c, g, or t

SEQ ID NO: 210697 - DNA, 650 bp, Homo Sapiens; identical to SEQ ID NO: 52035

SEQ ID NO: 210698 - DNA, 711 bp, Homo Sapiens; identical to SEQ ID NO: 55315

SEQ ID NO: 210699 - DNA, 671 bp, Homo Sapiens
ttttcagaaggaagacagcctcctccaggagcatcttacccgacctcttgtcaccgtaccaaatggcgatccgagcaaaaagactggaagagagccgagcggcggcgctccgagagctccaggagaagcaggctctgatggagcagcagagacgagagaaaagggcactgcaggagtggagagagcgagcccagaggatgaggaagaggaaggaagagctcagcaaactcctgcctccgcggaggagcatggtggcatcaaagattccctctgccacagatctgatagataacaggaaagtaccactgaatccgcctggaaaaatgaaaccaagcaaagagaaatcgccacaagcaagtaaagaaatgagtgccctgcaggagagaaatttagaagagaagataaaacagcacgtcctccaaatgcgtgagcaaagaagattccatggccaggccccactggaggagatgaggaaggctgccgaggatctggaaattagccggagatgggagagaggaggcatgagggcaggatgtggagccacttcatggagaccccacccaacctgactcggaccccacttctgagactcttttcctcctcagcccaagggagtttgtatctgcctttagataaactctttatctttctaaaaaaaaaaaaaaaaaaaa

SEQ ID NO: 210700 - DNA, 545 bp, Homo Sapiens
tactggttttccataatggctataataatttacattgccaccaacagtgtacaaagcttttctttccttttctctgcatcctctccaacacttcccttttgtcttcttgataatagtcattctaacgggtatgattacagtagctttgtagtgggttttctgtgctgtgctttttaatttcatgtatgtaaaaaacattgggtattttgaatgtttttcttttctcaccttatcctagaacttgaggctgggcgcggtggctcatccctgtgatctcagcactttgggaggccaaattgggcggatcacttgaggtcaggagttcgagaccagcctggccaacatggtgaaaccccatttctactaaaaatacaaaaattagccaggcgtggtggtgcacgcctgtagtcccagccaatcagtaggctgaggcacgagaatcgcttgaacccaggaggccaaggctgcagtgagccacgattgcaccactgcactctaacctgagcaacacagactccatctcaaaaaaaaaaaaaaaaaaaaaa

SEQ ID NO: 210701 - DNA, 1000 bp, Homo Sapiens
ggcggcggcggcggcggcggctcgtaccactgcctggcgtgcgagagcgcgctctgtggggaggaagctctgagtcaacatctcgagtcggccttgcacaaacacagaacaatcacgagagcagcaagaaacgccaaagagcaccctagtttattacctcactctgcctgcttccccgatcctagcaccgcatctacctcgcagtctgccgctcactcaaacgacagcccccctcccccgtcggccgccgccccctcctccgcttccccccacgcctccaggaagtcttggccgcaagtggtctcccgggcttcggcagcgaagcccccttcttttcctcctctctcctcatcttcaacggttacctcaagttcatgcagcacctcaggggttcagccctcgatgccaacaaacgactattcggaggaggctggacccgatctcagcccaaagtccgacggagcggcgagcccgggggaaggggccaaggaccgcgggtgccccaaggatagtaggtgcccaccccggatgaaccggcacgcctccattgcaaaccttcggcacccgcccccggctaccgaggggcttaactcgtgtggttgggaggctaggcggttgccgagagtcgagcaaactgcggaggcgagaggtgtagtagtcgtggaccgtaaggttaagcggacgagcgaccggggcgccctgcgctcttatgggacgcacaacccctcgtgtatgccgcccgcgccggcttgctcagagcaaggcatgggtgcgccaccgatgctgcggtgagcaagcgcccgggatcacgccctgcttgatctccgattaaccacacggcggcgtcatcggcgtaaggcgtccgcctattattcgtagcgttgacgcgggtgattcgcacgactcgagctgaactcccgacccagccgaggcgaacagaaataaatggtgacggccagacggaaagcacgctctaccccgcgtcttgcatgagcgaggc

SEQ ID NO: 210702 - DNA, 921 bp, Homo Sapiens; identical to SEQ ID NO: 47668

SEQ ID NO: 210703 - DNA, 656 bp, Homo Sapiens
tcggacgaggggaaagaaagtctgggccatggagatgagcctagtcctgctgttcctgatccgcactgccctttttgcaccccagggagctgctgctgatggtgccaagaacgaagaaggaagctcctgcccctcctaaagccgaagccaaagcgaaggctttgcaaggccaagaaggcagtgttgaaagatgtccacagccacaaaaaaaacaagatccacatgtcacccaccttccggcggcccaagacactgtgactccggaggcagcccaaatatccttggaagagcacccccaggagaaataagcttgaccaccatgttatcatcaagtttccgctgaccactgagtaggctgtgaagaagatagaaaacaacagcctacttgtgttcactgtggatgttaaagccaacaagcaccagatcaaacaggctgtgaagaagtttgtgacattgatgtggccaaagtcaacactctgattcagtctgatggagagaggaaggcatatgttcgactggctcctgactacgatgctttggttgttgccaccaaaattgggatcacctaaactgagtcaagctggctaattccaaatatatgtatatccttttcaccattaaaagaatcttaatctctcaaaaaaaaaaaaaaaaaa

SEQ ID NO: 210704 - DNA, 703 bp, Homo Sapiens; identical to SEQ ID NO: 44100

SEQ ID NO: 210705 - DNA, 472 bp, Homo Sapiens
cacataacagcattctacatgtaactggagaaattgtgtcatggatagggaagggagggtaattaacccaattgcctctagagggcaaataattaacagaattgcctccagtttctccatggctttctaaagaggggtcaagacttgctggatgccagatgttttccagggatcccagagaattggtctatggaggcagtgctttactgtattatagaagaggaattaatcacactaattgcttactctgtacttttgcttaatgatacaatataaacaaatacaatgagaaatcattttaaagcaatcaaacgggcttcaagttattagagctcctgaagaatcaaacattacctccatatatagaattattatactaggtgcaattaatgatttgatttatagatgtttttacataggtttgatatgcaacaagtctaggggtataaaatcaataaaatctgccttctaa

SEQ ID NO: 210706 - DNA, 629 bp, Homo Sapiens
  misc_feature (593)..(593): n is a, c, g, or t
aaagcacctgttatttttaagtttctaagggtctagttgttcagaatccccaaggatatttccctaacctcactcagtcacattgtaggagccagtgtagctatggaattatcttaggaactcaagcttctaaaactatccatgtagtcaaatctaggggaaaaagcaaataaaaatagtaaaatttggccgggcacagtggctcacgcctgtaatcccaacactttgggaggccgaggcgggccgatcacgaggtcaggagatcaaggccatcctggctaacacggtgaaaccctgtctctactaaaaatacaaaaaaatattagctgggcgtaggtggtgcacacctgtagtcccagctactggggaggctgaggcaggagaatggtgtaaaacccaggaggcagagcttgcagtgagccgagatcgcgccacggcactccagcctgggagacagagcaagactccgtctcaaaaaaaaaaaaagtaaaatttattttttatattcattaataaatgctgttgtgcttggagatgatcactcatataacatgtcattttttttggtcctgtttttggtttggtttttgccnattattttgttatatttcccaaaaaaaaaaaaaaaa

SEQ ID NO: 210707 - DNA, 921 bp, Homo Sapiens
  misc_feature (849)..(850): n is a, c, g, or t
ttccaaacaggaggcccagtgtgtcaataggagaggtcctaaagcaacaaaaagggcggggtgtcttggatgggcttcaggaagggaaagaccattgtgtctggagctcagagaatgggggctggtgtttgagatgaggctggagattgggcatggcatcctcacgcatgttgaggaattggggactttatccttaacatcctggaagccagtgatcccatggagagtgagaagatctgatctgtgtttcaaaggtcacttgactgccgagcagctggaggcgagttgctcctttaggagactgctgcagttgcctgggtgagaggctagaggggtctggtctatagcagtggcaggggagatggaaagaagagaatgatttgaggggcattcggggggcaaaatcaacaggacctggggggagacgaagggatcaagaatgatgcccagattctgggtgagtggcagtgctgtggtgcacaagtagtgatgttatgtttccgggtgacctgctgtttagcaggagcccagcctgtggctaagaagtatagagaactgaaactagctccctagggatgggaaaaccaagtgggctgaggataagaacagggccccagggctgggtgcagtcgctcacgcctgtgatcttagcactttgggaggccgaggtgggcggatcgcttgaggtcaggagttcgaaaccagcctgatcaacacagtgaaaccccgtctctaccaaaaaatacagaaattaccccggacatggtggcacatgccctgtggttcccagcgccttgggaggctgaggcatgagaatttcttgggccccgggaaggggggagggttccnntccacctgaaattgcccctgccctccacccctgggcaaaacccgtgaaaaccctgtccccaaaaaacaaca

SEQ ID NO: 210708 - DNA, 914 bp, Homo Sapiens; identical to SEQ ID NO: 44381

SEQ ID NO: 210709 - DNA, 908 bp, Homo Sapiens; identical to SEQ ID NO: 45494
  misc_feature (891)..(892): n is a, c, g, or t

SEQ ID NO: 210710 - DNA, 751 bp, Homo Sapiens
agctgttctcactgctcttgggaggtgttgtcccagtcagtgtttctgcagcttccatttgttgtttttatccagtgtaagcacctgttgaatgcagatgtgctgagttagaggtggtatttggaaaagggctgctatttctgctgttgagatttcagaggctatactctttttttttcttttcttttcttttttttttttgagacggcatctcactcttatcgcccaggctggagtgcagtggcgtgatctcggctcactgcaacctccacctcctgggttcaagggattctcctgcctcagcctcctgagtagctgggattacaggcacctaccacaattctcggctaattttttttgtatttttggtagagacggggtttcaccaggttggccagggtggtctcgaacacctgacctcagatgatccacccacctcggcctcccagtgtgggtgggattacaggcatgagccaccgcgcctggcctcagaggctatactcttataattttgttctgaggggagacagggaaagggttagacaacttgaaacattgaccctgtataaaaatgcaaaattctcaatgtgtatttataaatttctattttttataactttatgggacttcttagaggccaaaagtagtaaacatgcagatttaaaatgtttatgacaatctcaataaaaattcctatataaaactttggaaaataaaaaaaaaaaacaaaaactccaaggcatccttggcg

SEQ ID NO: 210711 - DNA, 905 bp, Homo Sapiens
  misc_feature (836)..(836): n is a, c, g, or t
taaccttcagtgtgtgtgtgtgactatgttccattagtgggttgatcttcgtataattggccactatgtgagagttcactactaggcagaaactattatggacagtgaaataatgacttttatctcaccacgtgagtttgatgcagtcttttctgtctagcccttgcctcttcctgcccatgtgattgcggtgcagtagtttctgttgtataatagtgtggacagcagctcagaaaaggagggaatgctactgataatttgtagataatattctttaagacttaggggaaccattgaactttgaaatttttattagaaaattatttgttcagaatcagactccattattttacatatacttaaatactttaggggtatttttgaaagttagcccagttttttatgtgctattaaatttttagattacatactaaagaaaagtatgtacacagaatgtagtgctcctagttactattttttctattaagaaatagtttagttctggtgtaaaatttgtttgaatgctaaaaaaaaaaaagcaggactgcattatggcacttttgccttggtggcccactttctccatttaaaacattacgatttgtatttttctgctgcgtttgtatgaagacatatttgattgttgttttctcttgattttaaaataaaacctcatgagcccctagtaaaagcctagaggtaccgaaaaaaaaaaaaaaaaaactcgagggcatcctatgtccggggggccggaagaaagagggtaattgaaaatgggccaacatggggccataaaccttggttttcccctgaaccccacagcctttttcttttgntacccacaaaggggggtgtaaaaatatctgggcccgcgggccctttcccctctaataagttgggaggga

SEQ ID NO: 210712 - DNA, 494 bp, Homo Sapiens
ccctcatcctccggctttttattgacagcggtcacctccaccttttagtaggattattgcctgacataatacagaaattttgctgcttgttctcaacaaagcaatgaaagagacacaatctctttccaccccccattggtgacccatgttctgggcttgtgctttttggaggagtctttgatctgtagcaggtctcagaggcttgtctcccggaggaacatggtgccgatgttgtaggaaaccttttttattctcgacgaagaaagagaaggctttggtggctttggaccagtccttacctccaggaaatagcagatcccaggaatttcctttggaaagttgtctggaagctcttcacgagaccgcggaatgaatgtgaaactttcttctcgttttaataattggtaagtggttgggctgacattgatgcgccgagggtgacttcccgactcgaatttgcttgccagtgtgacattatttccaaacaggcaata

SEQ ID NO: 210713 - DNA, 579 bp, Homo Sapiens
atggctgcagagaccggatattggcgctgcctccccgaatcccggacctgcgctgaggaggcggttcatctgtggccagcggtgcttcgggacccgcgctgggggaaccctggcgacggggcctggccctgctatatgcgggggcctcggctggagtgagcggcgtggacgcctctttcctccggctcttcccttgttgctgcgagagcgagagggccgcgggcggcggaggcagcggggccgggatggaggacgttaactctaacgtgaacgcggaccaggaggctggagtgcaatggcgcgatctcggctcactgcaacctctgtctcccaggttcaggaaaatggctttgtaaagaagcttgagcctaaatctggctggatgacttttctagaagttacaggaaagatctgtgaaatgctcttctgtcctgaagcaatactgttgaccagaaaggacactctatattgtgaaaccggcctaatttttctgactcttacgaaaacgattgccaacacatacttctacttttaaataaacaactttgatgatgtaacttgaaaaaaaaaaaaaaaaaa

SEQ ID NO: 210714 - DNA, 657 bp, Homo Sapiens; identical to SEQ ID NO: 50061

SEQ ID NO: 210715 - DNA, 895 bp, Homo Sapiens; identical to SEQ ID NO: 45683
  misc_feature (656)..(656): n is a, c, g, or t
  misc_feature (737)..(737): n is a, c, g, or t
  misc_feature (830)..(830): n is a, c, g, or t

SEQ ID NO: 210716 - DNA, 479 bp, Homo Sapiens
ccttcaatgtcctgggtgaggggttcctagaccattccagggttgggggcaaaagatcattgggaacaacacaggacttccaattctagcccagccaccaacttgctgtttgacctgggccagcctctacccctctctcagcctcagtctggggactaaacatattggacttgtgccagacaaaggcagagaaaccccagttcctcctggatctgtggtcctgctgtcaagatgcttggccctcccacaggcatctgggagtttccctcagccactgcctggagcggttactgctcagcccttccacaaatactcccgaaagctaagccaagtggacatgtggctagcagtaggggcctggggacaaaaccagaattctgcaaaatcttgtattttatgttgaaaacatcaatgtgatttttgtgttctccttcgtaatacacgtatgcttgagttaagataaaaaaaaaaaaaaaaaa

SEQ ID NO: 210717 - DNA, 626 bp, Homo Sapiens
gaatgaggagattaccttggattatctggttgggtccaagctaatcacatgagtccttaaaggagaagaaccttttttagctgggtcagagagagatgtgatgatgaaaacaggctcagggagatgcactgtaagaagggcttgaccagttgtttttgactttgaagatggagggaagggccaggagccaaggaaggtgggtggcttttggaaggtggaaaaagcaagggaacattctctccagagcctccagaaaggagctcagccctgttgacatctttgtttttattttttatttttagtagcattgaggtctcactgtgttgcacaggctggtcttgaactcttgagctcaagcactcctcccgccttggcttcccaaagtgctgggattataggcatgtgccaccacatctggcttcctactgacatcttaactttagtgcagtgagactcatatttgaatttctgaccttatattatagaaccataagacattatagaattatatagaattatagaaccataagacaataactttgtgttgttttaagatactaaatttttggtaatttgttatggcagcacaataaaaccaatatagcattaaaaaaaaaaaaaaaaaa

SEQ ID NO: 210718 - DNA, 502 bp, Homo Sapiens
tttttttatttttctctcttgaaacagggtctcccctctgtcacccaggctggagtgcagcggtatgacatggctcactgcagcctcgacctcctagctcgaaggatcctcccacctcagcttcctgaacagctgggactacagacgcataccaccatgcccagctaatgtttttaatcttttctgtagagaggaggtgttcctatgttgtccagattggtctcaaacttctggcctcaagcaatcctcctgcctcagcctcccaaagtgctgggattacaagtgagagccactgtaggcctatttctttctttatgaaaaaaagtaagagtaaattgtgatcaaatactacaatgctactgcggtgtgattcctgaatggtaaaaaccttaccatgctttgtttctccatcagatgccttgctcctcactactgccaaggagattacgcctaagactgatggtacaagtcttttctttaaaacaaacaaacaaaaaaacac

SEQ ID NO: 210719 - DNA, 581 bp, Homo Sapiens; identical to SEQ ID NO: 60207
  misc_feature (278)..(279): n is a, c, g, or t

SEQ ID NO: 210720 - DNA, 869 bp, Homo Sapiens
  misc_feature (610)..(610): n is a, c, g, or t
tccgtttcagtcccttccttggtctgaagaattctgcagtggcgagcagtttcccacttgccaaagatcccttttaaccaacactagcccttgtttttaacacacgctccagcccttcatcagcctgggcagtcttaccaaaatgtttaaagtgatctcagaggggcccatggattaacgccctcatcccaaggtccgtcccatgacataacactccacacccgccccagccaacttcatgggtcactttttctggaaaataatgatctgtacagacaggacagaatgaaactcctgcgggtctttggcctgaaagttgggaatggttgggggagagaagggcagcagcttattggtggtcttttcaccattggcagaaacagtgagagctgtgtggtgcagaaatccagaaatgaggtgtagggaattttgcctgccttcctgcagacctgagctggctttggaatgaggttaaagtgtcagggacgttgcctgagcccaaatgtgtagtgtggtctgggcaggcagacctttaggttttgctgcttagtcctgaggaagtggccactcttgtggcaggtgtagtatctggggcgagtgttgggggtanaagcccaccctacagaaagtggaacagcccggagcctgatgtgaaagaaccaccgggtgttgtaagcctgggacacggaaacccaaactggaatcaaacccccgactggaaaattgcattcttaaaaccttattaaaataaaacatttgcctcccgtccaagcagacgacgacacaaaccccggaaatcacttgcagcccccccttgcgccctggaacccaaaccacccccggggtccccggcaaaccccctcacaata

SEQ ID NO: 210721 - DNA, 667 bp, Homo Sapiens
  misc_feature (609)..(616): n is a, c, g, or t
  misc_feature (619)..(626): n is a, c, g, or t
  misc_feature (630)..(634): n is a, c, g, or t
  misc_feature (636)..(645): n is a, c, g, or t
  misc_feature (650)..(651): n is a, c, g, or t
  misc_feature (658)..(659): n is a, c, g, or t
  misc_feature (664)..(667): n is a, c, g, or t
cggccgcaagctcggcactcacggctctgagggctccgacggcactgacggccatggcgcgttcgaacctcccgctggcgctgggcctggccctggtcgcattctgcctcctggcgctgccacgcgatgcccgggcccggccgcaggagcgcatggtcggagaactccgggacctgtcgcccgacgacccgcaggtgcagaaggcggcgcaggcggccgtggccagctacaacatgggcagcaacagcatctactacttccgagacacgcacatcatcaaggcgcagagccagctggtggccggcatcaagtacttcctgacgatggagatggggagcacagactgccgcaagaccagggtcactggagaccacgtcgacctcaccacttgccccctggcagcaggggcgcagcaggagaagctgcgctgtgactttgaggtccttgtggttccctggcagaactcctctcagctcctaaagcacaactgtgtgcagatgtgataagtccccgagggcgaaggccattgggtttggggccatggtggagggcacttcaggtccgtgggccgtatctgtcacaataaatggccagtgctgcttcttgccnnnnnnnnaannnnnnnnaaannnnnannnnnnnnnnaaaannaaaaaannaaaannnn

SEQ ID NO: 210722 - DNA, 668 bp, Homo Sapiens; identical to SEQ ID NO: 44139
  misc_feature (631)..(631): n is a, c, g, or t
  misc_feature (637)..(637): n is a, c, g, or t
  misc_feature (647)..(648): n is a, c, g, or t

SEQ ID NO: 210723 - DNA, 1000 bp, Homo Sapiens
tttttttccggtatccactggaagtttatttctttagggttctatcccaaccagtcgcttaaaaaccaagtaacacagacctgaggggtgggggctggggactgcacctccctcctactcatggtggacagcagtggggactagggaggggcaggagaggtggctgaagcaaggcagcagtaatggggccacgacgccacagagccagctccgtcctctcccagaccctggtgggagtccctgtggcttggggtggggagtgggggacccaccccaggccctccctctcccttcctcagacagcctcctttcgggctcaacccatttcttccggcaggagactgaggcacacagagaggaggaagtgggagaggaggacgagggaggggcagggtggcagcacaaatgaaggcagaggtgagaggcgtgggcaaggccactccacccccacacccaccccagagaggggcgaggaagccacaccatcacgcagcatgtcggggggacaaggcggggtttaaggctgaggggcccggggcaggcggggcctcgggcctcagtcaaagccgtgccagtcgctgtgctctgagtcgtattccagctcggcgcccacacacttgacaccatccagcagcatgggcgtgccgtggtgcccgtccatgacccggggctgcaccgtcacgcgcaccccggggcccagtgccaccttcgcaggctaccaggatcccccctttgagggaccccctcttttggcgccccaacactcccctctgaccctattacccttcggggacgggcccccaccccgaagcaccttgcggggccacaatgagggaccggtgccccggaagaccattctttggatgagccgatggcgtggcaggcgcaaacggcaaggaaatcccccgagcggttccaggaaccagccggcgacccaacgttttaatacagaagaactccgaggcgcgacctcgtggggctggacccatgagcaaactgt

SEQ ID NO: 210724 - DNA, 339 bp, Homo Sapiens
tgaatttcaacaagaaattcattgggggatgcttttatagtcctacagcatttagtaaataccagtttatcagtgtgggtgggagattgataactaattgcatttttaggttaagcagtatgtactttgcgttaaagtgtatcctgcatgtgttctatggaacaatatgtggactgttagtattgtatgagaaaagagttccgtggtctggtaagtttttgggaaatacaggttgaatatccctaatcagaaaatgagaaatgttccaaagtctgttttgagtgctgacatgatgctcaaaggaagtgctcaatggagcatttcagagtttggattttc

SEQ ID NO: 210725 - DNA, 942 bp, Homo Sapiens
gaggagcctgggagccctgggggtgggatcagaacccaggagacgagtgtgcctgggagtttgtctggcatcccgggggctttgataggagttgtccgggaccccagggagatgagggttcagagggtggtgagggcacataggaggggagtggaagcctggctctcaggcctaggcccctatcctgccccagggcaggtccaggccctggaccccgcctagcgtaggctagtgtgtatccctggaaccagaagagagtaggtgggctctggaggcctcaaaggacccccgctagactctgtgatccccacgccccagaacatgcgtgggcgctatgaggcaagccaggacctgctgggcaccctgcggaagcagcttagcgacagcgagagtgagcggcgggccctagaggaacacctgcgtggcgccgtcggtcttgtcccgcaggcactggccaacatggcgaaaccccatctctactaaaaatttaaaaaattgcccaggcacagtggctaacgcctgtaatcccagcactttgggaggccgaggcgtgcagatcacttgaggtcaggaatttgagaccagcctggccaacatggtgaaaccccacttctaaataaaaatgcaaaaattagctgggcgtggtgataggcgcttgtaatcccagctactcgggaagctgaggcaggagaatcgcttgaactctggaagtggagattgcagcaagctgtggggagggcagtgaaattgtgtccctgcactccagcctagggaagagtgaaactggggtgtaaaaacaaaaaaattgctgggagccgggggcccccccctgtaatcccaccacttttggaaggcccagggggggtggttccccaaggtccgggaatattttcaaccaccctggtccaaccgcaggggaaaaccccatcactggaacttacc

SEQ ID NO: 210726 - DNA, 878 bp, Homo Sapiens; identical to SEQ ID NO: 40620
  misc_feature (631)..(631): n is a, c, g, or t

SEQ ID NO: 210727 - DNA, 626 bp, Homo Sapiens; identical to SEQ ID NO: 52542
  misc_feature (460)..(460): n is a, c, g, or t

SEQ ID NO: 210728 - DNA, 962 bp, Homo Sapiens; identical to SEQ ID NO: 48422

SEQ ID NO: 210729 - DNA, 986 bp, Homo Sapiens
agagagaactagtctcgagttttttttttttttttttaagagaggaggtcttactatgatgcctaggctggtcttgaactcctcagctcaggtgatctacctgcgttggcctctcaaagtgttgggattacaggagtgagccaccatacccggccaacccttgttttcttatctgtaaagtggcaatagtgataccagacctcaaaggatgagaattaaatagtatgtatatcatgtaactagcgtaatggttggtgtataacactgagaaaagctgagctgttgttattttcctcctctgggggttcagttaccaaagcaaagccattggactacactagttctcatccattttctgccccagcccacctgagtatcgtaacattctcatgagaataacctagaatctccagaggaatgtttctcaactagaggcacatgggattctttgagacagaggaaggcagagaagcttcagaagctctccaaatgatttggctacaggtctctagggaagtgcgggttcccatggagagtgaacggactacgtgatctctgagggcttgttcaattgcctctggggactctctgacttgcccgtgaggactggaaaatacctgtgagaaaggaaacccaggtgttcctggagactcctccaaacctcacacaaaggcgtacaattaggtgcgaaggattgtaacctgaacccgggctgtgcgagacttcttatatctttacagctttcagatgggcagccccgtgggaataaacaggaatggatggggcccaaggaagccaaaggtttccttccttacctggaaagaaaagggaaaagggccggtttttttgggcccccttctccataaaagtgcccccacccagaaaagctctccctggagaagacaacttttgggtaaaccccaaggaatctctttaggggccctctttattccaagggtatgttatattataactcccccccgcgg

SEQ ID NO: 210730 - DNA, 928 bp, Homo Sapiens; identical to SEQ ID NO: 40579
  misc_feature (702)..(702): n is a, c, g, or t
  misc_feature (716)..(716): n is a, c, g, or t
  misc_feature (727)..(727): n is a, c, g, or t
  misc_feature (758)..(758): n is a, c, g, or t
  misc_feature (776)..(776): n is a, c, g, or t
  misc_feature (791)..(791): n is a, c, g, or t
  misc_feature (800)..(800): n is a, c, g, or t
  misc_feature (813)..(815): n is a, c, g, or t
  misc_feature (840)..(840): n is a, c, g, or t

SEQ ID NO: 210731 - DNA, 786 bp, Homo Sapiens; identical to SEQ ID NO: 50020

SEQ ID NO: 210732 - DNA, 919 bp, Homo Sapiens; identical to SEQ ID NO: 51919
  misc_feature (600)..(600): n is a, c, g, or t
  misc_feature (627)..(627): n is a, c, g, or t
  misc_feature (645)..(645): n is a, c, g, or t
  misc_feature (675)..(675): n is a, c, g, or t
  misc_feature (692)..(692): n is a, c, g, or t
  misc_feature (745)..(745): n is a, c, g, or t
  misc_feature (796)..(796): n is a, c, g, or t
  misc_feature (821)..(821): n is a, c, g, or t
  misc_feature (825)..(825): n is a, c, g, or t
  misc_feature (835)..(835): n is a, c, g, or t
  misc_feature (854)..(854): n is a, c, g, or t
  misc_feature (875)..(876): n is a, c, g, or t
  misc_feature (878)..(878): n is a, c, g, or t
  misc_feature (913)..(913): n is a, c, g, or t
  misc_feature (916)..(916): n is a, c, g, or t

SEQ ID NO: 210733 - DNA, 976 bp, Homo Sapiens
gcgtggcgaattcggcacgaggagcagtacgtctgtcaccaccaccagctcccatgaaagcagtactcatgttagttcatccagcagcaggagtgagacaggggtcataaccagcagtggaagtaacattcctgacatcatctcattggactaaaggaggactcacttgattctgggaatcattcatcagaactgctttttcttggatctctagtctgtggaaacgttcttttttttttttttttaataatttggtatttattgaaagtcagatggattcttttgctttctgaggggtgaacacagaagactgcaacaagaaccaaatgacatgcaaggatttttcttaattatgctgtactctcagcatcagatacattcaaccataactgtatcttcctgagagatggatttcactttcatacgttaatggatggagtctacaaatcagtgaaaaaagtttttgttaaaataaagagcaataaaattatgtaaatattcaagtaaccttttttctaattaaaaaaaaaattgtaatcactgattctagaatgacagcaacttctgtttaaccttacgtgaaggaaaaaaaatatatggaaagaacttaatgtttgctgaatgagtcctttccatggagatttgctctgtttcattgaagtaatgaagtttcagtacgtggccaaagcttggattccacttttcgtcctgcatttccacttttcttcgtgattgcatcaaagaaaaatggcattcgtgttacttgggttttttcctgcttatcatttacactttgacgttgtttgctaatgagtgctgtgtgaaagttctggggatttggctactccttcattgggggattatgtttaaaagcactatggcagattctgcccctggacataaagaggtgttaatttatggtttttaggcaaatggtaccattttttccattccaagaaggttctcctattaagta

SEQ ID NO: 210734 - DNA, 929 bp, Homo Sapiens; identical to SEQ ID NO: 52564
  misc_feature (929)..(929): n is a, c, g, or t

SEQ ID NO: 210735 - DNA, 957 bp, Homo Sapiens; identical to SEQ ID NO: 51378
  misc_feature (727)..(727): n is a, c, g, or t
  misc_feature (915)..(915): n is a, c, g, or t

SEQ ID NO: 210736 - DNA, 931 bp, Homo Sapiens
aagcccctggggagcacagctcatcaccatggactggacctggaggttcctctttgtggtggcagcagctacaggtgtccagtcccaggtccagctggtgcagtctggggctgaggtgaagaagcctgggtcctcggtgaaggtctcctgcaaggcttctggaggcaccttcagcagctatgctatcagctgggtgcgacaggcccctggacaagggcttgagtggatgggagggatcatccctatctttggtacagcaaactacgcacagaagttccagggcagagtcacgattaccgcggacgaatccacgagcacagcctacatggagctgagcagcctgagatctgaggacacggccgtgtattactgtgcgtgggggccattcgggtatggtggcctacagattaccaattactactactactactacatggacgtctggggcaaagggaccacggtcaccgtctcctcagggagtgcatccgccccaacccttttccccctcgtctcctgtgagaattccccgtcggatacgagcagcgtggccgttggctgcctcgcacaggacttccttcccgactccatcactttctcctggaaatacaagaacaactctgacatcagcagcacccgggggcttcccatcagtcctgagagggggcaagtacgcagccacctcacaggtgctgctgccttccaaggacgtcatgcagggcacagacgaacacgtggtgtggaaagtccagcaccccaacgggaacaaaagaaagaacgtgcctcttccagggattgccgagctgcctcccaaagggagcgtcttcgtccaaccccgcgacgggttttttcggcaacccccgcaagtccaagctcatctgccaaggccaacgggtttcagtccccgggcaaattcagggggtctgggttggca

SEQ ID NO: 210737 - DNA, 786 bp, Homo Sapiens; identical to SEQ ID NO: 50287
  misc_feature (768)..(772): n is a, c, g, or t
  misc_feature (774)..(774): n is a, c, g, or t
  misc_feature (776)..(786): n is a, c, g, or t

SEQ ID NO: 210738 - DNA, 966 bp, Homo Sapiens
ccagccttgggattcccagctgtctccactcggtgatcggcactgaatacaggagactcaccatggagtttggactgagctgggttttcctggttgctattttaaaaggtgtccagtgtgaagtgcagctggtggagtccgggggaggcttggtccagcctggggggtccctgaaactctcctgtgcagcctctgggttcaccttcagtggctctactatgcactgggtccgccaggcttccgggaaagggctggagtgggttggccgtattagacgcaaagctgacagttacgcgacatcatatgctgcgtcggtgaaaggcaggttcaccatctccagagatgattcaaagaacacggcgtatctgcaaatgaacaacctgaaaaccgaggacacggccgtgtattactgtgctagaggtctcgtggaggcccctcgcggagaaggcggtattgtagtagtaccagctgccaattacttctactacatggacgtctggggcaaagggaccacggtcaccgtctcctcagcctccaccaagggcccatcggtcttccccctggcaccctcctccaagagcacctctgggggcacagcagccctgggctgcctggtcaaggactacttccccgaaccggtgaccgtgtcgtggaactcaagcgccctgaccagcggcgtgcacaccttcccggctgtcctacagtcctcaggactctactccctcaacagcgtggtgaccggggccctccagcagcttggggaccccagacctacatctggaaaggtgaatcaccaaccccacaaacaccaaggtggacaaaaaaagttgaaccccaattcctggtgacaaaattcccacattgccccccgcgggcccagaacctggaaattcctggggggggacccgtaaattttttccttctttcccccccaaaaacccaaggggaaacccttcttgtaatctc

SEQ ID NO: 210739 - DNA, 839 bp, Homo Sapiens; identical to SEQ ID NO: 40670

SEQ ID NO: 210740 - DNA, 1000 bp, Homo Sapiens
  misc_feature (856)..(856): n is a, c, g, or t
  misc_feature (861)..(861): n is a, c, g, or t
caggaacaggagaatataacattaaacaagacacataccatctctgcatcccccagaagtttgcagtctggtaagaaagacaggcattaaataattgcacaagtcattaatgagttaaagttttgacatgtgccttgaagaagatagacagggaactctgtagaggtacaataggggaacgtagtcctctctgatactgtgatacttaaggcaagattataagtatgaggagaagttaagctccaagatgggaacagagtatgccaggagaaaaggccagtgcagctggaatagagagagccaagaagggctgggtgcagtggctcacccttgtaatcccagcacattggaaggccgaggcgggtagatcacttgagtgaggtcaggagttccagaccagcctgaccaacatggtgaaaccctgtctctactaaaaatacaaaaaaattatcctggcatggtggcatgtgcctgtagtcccagctactcggaaggctgaggcccgagaatcgcttgaacccgggaggcagaagtttgcagtgagctgagatcgcaccactgccctccagcttgggcaaccgacagccaccctgtctctctaattacacccgttcggccaccccgggcttctcccgcccgcggccggtaaaacaaagaccgcgaacggccccgtgggccccgtctgccccctcccccgcttcttttgtccgccgcggccctgtgccctccgggctgcccccccccgcggcttgtgtctcccccccgccttatcgcccccgcgttgcctgcacaacgcccgcggaccgcgccccgaggagtttcgccgtgccgtgtcacaccggtccccccccccccnacatnttcgcgcgtgtgcgcggcgcggccgctgtccgcccccccccccccctcccccgccgccgctctttcgcccctctttccatacttcctcacgcagtctgcgctctacgcgtgtccgccccccgctacttttcctccgccc

SEQ ID NO: 210741 - DNA, 958 bp, Homo Sapiens; identical to SEQ ID NO: 49223
  misc_feature (764)..(764): n is a, c, g, or t
  misc_feature (772)..(772): n is a, c, g, or t
  misc_feature (958)..(958): n is a, c, g, or t

SEQ ID NO: 210742 - DNA, 887 bp, Homo Sapiens
  misc_feature (806)..(806): n is a, c, g, or t
tctccaaatccaagccatctcctagccagtggaagcaagatacacctaaatccaaagcagggtatgttcaagaggaacaaaagaaacaggagacaccaaagctgtggccagttcagctgcagaaagaacaagatccaaagaagcaaactccaaagtcttggacaccttccatgcagagcgaacagaacaccaccaagtcatggaccactcccatgtgtgaagaacaggattcaaaacagccagagactccaaaatcctgggaaaacaatgttgagagtcaaaaacactctttaacatcacagtcacagatttctccaaagtcctggggagtagctacagcaagcctcataccaaatgaccagctgctgcccaggaagttgaacacagaacccaaagatgtgcctaagcctgtgcatcagcctgtaggttcttcctctacccttccgaaggatccagtattgaggaaagaaaaactgcaggatctgatgactcagattcaaggaacttgtaactttatgcaagagtctgttcttgactttgacaaaccttcaagtgcaattccaacgtcacaaccgccttcagctactccaggtagccccgtagcatctaaagaacaaaatctgtccagtcaaagtgattttcttcaagagccgttacaggctacttcttctccagttacttgtagctcaaatgcttgcttggttactaccgatcaggcttcttctggatctgaaacagagtttatgacctcagagactcctgaggcagcaattcccccaggcaagcaaccgtcttcactagcttcntcaaatcctcccatggcaaagggctctgaacagggcttccagtcacctcccagcaaagtagtaggttcagtaaccattaaa

SEQ ID NO: 210743 - DNA, 577 bp, Homo Sapiens
aacagccaaagaaactcagaagagtcccggagctcaaggatcagagtaacacaattttcactttttctgtctttatgtaagaagaaactgcttagatgacggggcctccttcttcaaacaggaatttctgttagcaatatgttagcaagagagggcactcccaggcccctgcccccatgccctccccaggcgatggacaattatgatagcttatgtagctgaatgtgatacatgccgaatgccacacgtaaacacttgactataaaaactgcccccctcctttccaaataagtgcatttattgcctctatgtgcaactgacagatgaccgcaataatgaatgagcagttagaaatacattatgcttgagatgtcttaacctattcccaaatgccttctgttttccaaaggagtggtcaagcccttgcccagagctctctattctggaagagcggtccaggtggggccgggcactggccactgaattatgccagggcgcactttccactggagttcactttcaattgcttctgtgcaataaaaccaagtgcttataaaatgaaaaaaaaaaaaaaaag

SEQ ID NO: 210744 - DNA, 533 bp, Homo Sapiens
tttttcaatcttgatttctttattcttgcgtttatatacattaggggtggcatgaaaagctggaaaacaaaaactgtcttgttgccagtggtctatccacttgacaagatggggagaaacaaaagtgaattagagagctattgtaggagttagaattcgatataaacggctaccatcagggtgcacaaaattcagtcatttctgacatcaacacaatgctttcaaagctaagaggtactgagggacagataagttgctagttagtctgtccctatcatgcaaagcatgttgcactataattgagcaagggaaaatagaactggccctttgtaaaacgttagaacagaagccaggaactctatacgagaaaccagaacaaagagaaggaaatggtggctggggatggaagagaggagagcatttcaaacagagtagccccactcacggtgaaggaagcagtcgtatttaaagcagcgccggcaaaaaagtgtgtggaaggagtgcagagattgctcccgctgcacagacttggc

SEQ ID NO: 210745 - DNA, 910 bp, Homo Sapiens; identical to SEQ ID NO: 45191
  misc_feature (708)..(708): n is a, c, g, or t

SEQ ID NO: 210746 - DNA, 1000 bp, Homo Sapiens
  misc_feature (10)..(10): n is a, c, g, or t
gtgcatggangtaaaagattcaatccttaataatgatggtagctgtgttgcagaaaagaaagcctgtcagagtaacgtgttcagttttacatcataatcagagtgtgtccatctctgttgaaggcagaattaaaaacgccttcaacatttttaaaataatagatgaaaaacatctcaaagtcacttttaaaatttgaattgacgattccacataacaggaaaaggaccaggaacatcttaaatacttcacgatggaagtgatgttttaagtgtaatttcatcaaggagaagtttttccagaaagtcttttgacttcagtaagaagcttatttactctggtaaatagtttctagtaagatgagaaagacttgattttttaaaaaacaattaaaaatttacattgtttaatctaatgttgtgatttcgaaagtactacctttgcccttatagttacgcatgtgtatttatatgtattttcttggttcattcaaacgccaataaaatactttactatccaggaaacccgagacgaaagggaacaaaaacccaaaccaccacgtctacccattttattgggaggtggcttcgggatgtaccccatcgggggacacaccgtggggggccccccccagaaacctcccctaggggggcccaaaatatacgagggacctcgttttttttggaacaaagggggcccacttatgtgacgatcgctttctcggggaaagcggtttggcgcggcaattttttattgcgcggcgcggggggtaaaagtggcaagctcggggaatcctgttgaaaagaccccccacatctttcgaggggcgtatatataaatgctcacaatcttcctctacgagaattatcgagagctctatggcggagctaaaaaacatttttaaatccggcaaatggggctcacaccaaacgtaaatattcgtgaagatcctcccacacctgtgtttaagccgagccattgctcttttgaaaactccacaag

SEQ ID NO: 210747 - DNA, 874 bp, Homo Sapiens
ttggtatgaagaattaaaggaagagatggaaggggtggttaaagaacttgctgaaaataaccacattttagaaaggtttggctctttaaccatggatggtggccttcgcaacgttgactgtctttagctttctaatagaagtttaagaaaagtttccgtttgcacaagaaaataacgcttgggcattaaatgaatgcctttatagatagtcacttgtttctacaattcagtatttgatgtggtcgtgtaaatatgtacaatattgtaaatacataaaaaatatacaaatttttggctgctgtgaagatgtaattttatcttttaacatttataattatatgaggaaatttgacctcagtgatcacgagaagaaagccatgaccgaccaatatgttgacatactgatcctctactctgagtggggctaaataagttattttctctgaccgcctactggaaatatttttaagtggaaccaaaataggcatccttacaaatcaggaagactgacttgacacgtttgtaaatggtagaacggtggctactgtgagtggggagcagaaccgcaccactgttatactgggataacaatttttttgagaaggataaagtggcattattttattttacaaggtgcccagatcccagttatccttgtatccatgtaatttcagatgaattattaagcaaacattttaaagtgaattcattattaaaactattcattttttttcttttggccataaaatgtggaaatggccattaaaaattctaaggtccttttcaactgtttttaaagctggatattttctttaaattccggcttactaattccatgggaaaaaaattaattttcctccatttttaatggtaa

SEQ ID NO: 210748 - DNA, 912 bp, Homo Sapiens; identical to SEQ ID NO: 44490

SEQ ID NO: 210749 - DNA, 645 bp, Homo Sapiens; identical to SEQ ID NO: 43188

SEQ ID NO: 210750 - DNA, 960 bp, Homo Sapiens; identical to SEQ ID NO: 51540
  misc_feature (800)..(800): n is a, c, g, or t
  misc_feature (948)..(948): n is a, c, g, or t

SEQ ID NO: 210751 - DNA, 958 bp, Homo Sapiens; identical to SEQ ID NO: 52066

SEQ ID NO: 210752 - DNA, 889 bp, Homo Sapiens; identical to SEQ ID NO: 44525

SEQ ID NO: 210753 - DNA, 918 bp, Homo Sapiens; identical to SEQ ID NO: 53894
  misc_feature (669)..(669): n is a, c, g, or t

SEQ ID NO: 210754 - DNA, 872 bp, Homo Sapiens; identical to SEQ ID NO: 40879

SEQ ID NO: 210755 - DNA, 755 bp, Homo Sapiens
gcgtgcgaggggggtggggtggaaatagcggctgcttcttttccaaggatttatttaatggggatgtgttcaaggcaagaccgaattcagaaggatatcgacgtcgtgatccagaagtccagagctgaggactgcctgtttgcagggcccgcctggcaggacgactgagcaagtccttggaaaaccagagatattagagcggtgaatcgcgctggtcacgttggacacctgcgcgttaggagattctggagccagagggagagaccccagaaactccccggtcggcgacccagcccgagacgcctggggtcccaagggaagctgaacgcccggtgggctcccgggatggttcttccggttctttgtgccgccttcacccagtgaaggagcctgtatccaccctgcccagtcgctgttgggctgctgcggagcttccgctgccatcttcggatcctgtgttccgcccggggctccaccagggcagggatggtgcagaatggggaaatggagagagaacctgaaagagccccaaactcgaggacctattgctccccaagaataacatcttccagaactagacagaaaactaggcgtctgggaaccctgaaatccttggaggagtagatcatcatgaccctctgtgttccttttggcaaatgacttgcttccattgtttgtttgctcaattgtctgtttgttaaataaataaaaaccctttcatgtatctttaaaattcaaaaaaaaaaaaaaagggc

SEQ ID NO: 210756 - DNA, 942 bp, Homo Sapiens
  misc_feature (689)..(689): n is a, c, g, or t
ttctcacaccatccagaggatgtatggctgcgacctggggcccgacgggcgcctcctccgcgggtataaccagttcgcctacgacggcaaggattacatcgccctgaacgaggacctgcgctcctggaccgcggcggacacggcggctcagatctcccagcgcaagttggaggcggcccgtgaggcggagcagctgagagcctacctggagggcgagtgcgtggagtggctccgcggatacctggagaacgggaaggagacgctgcagcgcgcggaacgcccaaagacacacgtgacccaccatcccgtctctgaccatgaggccaccctgaggtgctgggccctgggcttctaccctgcggagatcacactgacctggcagcgggatggggaggaccaaactcaggacaccgagcttgtggagaccaggccagcaggagatggaaccttccagaagtgggcagctgtggtggtgccttctggacaagaacagagatacacgtgccatgtgcagcacgaggggctgcaggagccctgcaccctgagatggaagccgtcttcccagcccaccatccccaacttgggcatcgtttctggcccagctgtcctggctgtcctggctgtcctggctgtcctagctgtcctaggagctgtggtcgctgctgtgatacataggaggaagagctccnggggaaaaggagggagctgctctcaggctgcgtccagcaacagtgcccagggctctgatgagtctctcatcgccttgtaagcctgagacagctgcctgggtgggactgagaagcaggatttcttcccacctctcctttgtgacttccagagcctctggcatctccttctgcaaaggatctgaatgggcctgcgttcccgtttacctaatattagggattggaagaaaaactttacccccgggcccccgtggac

SEQ ID NO: 210757 - DNA, 940 bp, Homo Sapiens
  misc_feature (695)..(695): n is a, c, g, or t
  misc_feature (700)..(700): n is a, c, g, or t
  misc_feature (702)..(702): n is a, c, g, or t
  misc_feature (890)..(890): n is a, c, g, or t
tcgcgagcggccgcccttttttttttttttttaattgggaagggaagtataaggaagagctcagagggagtttcatacctggaattgttggacttaattgacacttgcaaatacttttagtataaaggtttaattctatttaaaaagaagatccattaaatcaagctcttaactcatgggactatttgcaacacttctttgtaaatatcattttgtttgttaggttattggcaaaacagtttcaaggttcacttccctcccttgaaccaggtccaggtcattttgctttggggtagattaaagtcagaactctaaaagttgagcaactttgtttttttttgaattgatttagcactaacccaccattgcatcttaaggacggcatgacgtgataatgatggacttgtgtgaggttttgatttttcaattaaactttttgttatcacaggtaattaattgtcagcggtcttgagtctggttatggaaccctgtagtaacaagagctggaaattggctaattgacaatgcaactgccttaaacatctcaagtagagaacatttacattagtgagatgtacttgaatttcagaacttaacaaattttaattactttttattgaaaactgcactgaacgctaaatgtccacctttacaataaacaaataccgtaaccgggtaactcccactaaaccccnggggnanactgacactagccccgcccccgaagcccgcccgcgaccgagcggcccactaatccaccgggggaccagcacacagagagcggaaccgcgagcgaccccccagggcagaaatcccgcccacccgagcgaacagcagcttccccacagcgtcgggggcccccaagaccgccacgcccccccctccacccntgcgcgggcgcgcccctaaaaaaaaacctccgcgagcggaggcactctct

SEQ ID NO: 210758 - DNA, 989 bp, Homo Sapiens; identical to SEQ ID NO: 48046

SEQ ID NO: 210759 - DNA, 934 bp, Homo Sapiens; identical to SEQ ID NO: 41140

SEQ ID NO: 210760 - DNA, 907 bp, Homo Sapiens; identical to SEQ ID NO: 52404
  misc_feature (714)..(714): n is a, c, g, or t
  misc_feature (750)..(753): n is a, c, g, or t
  misc_feature (757)..(758): n is a, c, g, or t
  misc_feature (760)..(767): n is a, c, g, or t
  misc_feature (770)..(770): n is a, c, g, or t
  misc_feature (773)..(773): n is a, c, g, or t
  misc_feature (792)..(795): n is a, c, g, or t
  misc_feature (808)..(808): n is a, c, g, or t

SEQ ID NO: 210761 - DNA, 901 bp, Homo Sapiens
  misc_feature (747)..(747): n is a, c, g, or t
ttgaagatggacagaaaagctgtggagacccacctgctcaggaaccctcaccttgtttcggactatagagtgctgatggcagagattggtgaggatttggataaatctgatgtgtcctcattaattttcctcatgaaggattacatgggccgaggcaagataagcaaggagaagagtttcttggaccttgtggttgagttggagaaactaaatctggttgccccagatcaactggatttattagaaaaatgcctaaagaacatccacagaatagacctgaagacaaaaatccagaagtacaagcagtctgttcaaggagcagggacaagttacaggaatgttctccaagcagcaatccaaaagagtctcaaggatccttcaaataacttcaggctccataatgggagaagtaaagaacaaagacttaaggaacagcttggcgctcaacaagaaccagtgaagaaatccattcaggaatcagaagcttttttgcctcagagcatacctgaagagagatacaagatgaagagcaagcccctaggaatctgcctgataatcgattgcattggcaatgagacagagcttcttcgagacaccttcacttccctggggctatgaagtccagaaattcttgcatctcagtatgcatggtatatcccagattcttggccaatttgcctgtatgcccgagcaccgagactacgacagcctttgtgtgtgtcctggttgagccgaggaggctcccanaggtgtgggaatgtggggggattcaaactcactcaggggctcccccctgcatcacattcaaggaggattggttcttgggaaaattcctgcccccttatttagccaggggaaacccaaaaatgggttttttaattcacaaaacttaggggggggt

SEQ ID NO: 210762 - DNA, 880 bp, Homo Sapiens
tggaaaattttccggccaattttgctacctcccaacttgatggattagaggtagcgcaaatgctggtgctcccatctaccttgtagacacttagccatcaagaatcaaggcacaagaagtgcactctctcattaacagtaaatgtttgcaagatattcagtttaactttcagcatcatgaatgttcttatccagattttgaatccgaaaaactataatccttttatgttatacaaaattactatgattttttacagttctgagcatattaaaattctactggatttcaaaaagagactaatacccaactgactaactaaacaaatatcaacttgtaatactcaatgaatttttttgccatttacatttgaccgttggctttagtgaatgtccatatttaattttttaaggcaccattacacagtttatcctacatttatcacatttcttaaagtgttaagattctatggctcatttctatgtatttttcttactttacaaaataacctgaaacagtatagattttgtaacacttaatttgagcagcttttttattacattgaattatataaagtgcatgttaccttagaaaaattaatatttgctgctttactcttttgcaaaacatttgctgtaatgaatggatttgtatttccaatatgtatcttgactgcattttgtaatatttactgctttattcctaattctgctttaagtactgaactgggcatgaaacattaaaatattaatccagaaactgtataaactggatgttgcttaaaatctgtatcactgccatgttgaaaactcagactgctttttgtgatgtttccaaatgaataaaacctatcctccccctcggttaaaaaaaaaaaaaaaaa

SEQ ID NO: 210763 - DNA, 1000 bp, Homo Sapiens
tgtggaaattgcaatgttatttttctggactattatggcatatttaagccaagaacatggggtcaaggatacctctgcagatgttgttctggatttcaggcaacggtctggaaattttaagtaactctcgtgttatttgaattaggtaaagcgtgttcacatttggacagcatttattctttggtgtaccagggatccccaagaccactctcaggataggtgatttgttagaagaattcacagaacccagaaaagctattataagttggacatgatggcttgcacctataggcctagctacttgggaagctgagatgagaggattcctggagccaaggggtttgaggctgcagtgaactatgatcaggccactgcactccagcctgagtgacagagcaagaccccatgtgcaaaaataaaaataaataacaaagaataaacaaaagctattatactcataattacagttttttacagcaaaagggtatacattaaaatcagcaaagggaaaaggcacatagggagagagtccaaaagaaaccagactgaagcttccagctatcctctccctgcggagttatatgaacagtgtttaattcttccagcacgtgatgtgtgacacagtacatgcaaagtgttaccagccttggtcatagagccatggagggtctggatcattgacctttgctactcagttccagcccccacagaggtcaaaatgatacaacatgtcctaaagtgccaagcatacaaaagcagatatttagcatgaagcacatatttagcataaactatctggtgtgccccagatagtttctactaaaaatacaaaaaattagccaggtgtggtggcgcgcacctgtaatcccagctacttgggaagttgaggcaggagaatcgcttgagcccaggaggtggaggttgcagtgagctgagattgtgccactgcactccagcctgggcgacaagagcgagactccatcgcaaaaaaaaaaaaaaa

SEQ ID NO: 210764 - DNA, 1000 bp, Homo Sapiens
tgatgagggagacagctgggtgtgtgtgtccaggtagttccatgttggcgagtttggagatagaaagtggcctaaggaagtttacttcctgaatgtgaatgttggccactttggagatagaaagtggcctaaggaagtttgcttcctgaatgtgaaggcctcagtgtagagagatatcatccactgggagatcactgaaaagtaaaccaaaacatttttattaatacatgggatggtagaatgtcactccagttttgttcctaaagttcgtagctctctaagaaagtgaattttaagcaagttaatctattttaatgcatcactgctctttcggtgtttttctagtagaattaatgataggtagcttgctttattagcttactgcccagagagaacattggtgaaattgttttggcttcagctctctggactgagtttggctgcctagctcagttttcagttggtcaccaaaacctgtcattgtttttgtgtggtatggggtctgctggagtcatgtggtagtgcgtttggcccttcattgagtggtggagccaggagttgagctgagggctgtggcagaattttgaattcaagtgaattcgaatgtgaaaataacaatgtctggccgggcgtggtggctcacacctgtaatcccagcactttgagaggccgaggtgtgcggatcatgaggtcaggagtttgagaccagcctggccaacatggtgaaaccccatctctactaaaaaatacaaaaattaggcgggcgtggtggcgcacaagtgtaatcccagctacttgggaggctgaagcaggagaattgcttcaattccctgcttgaacccaggaggtggagatttcagtgagctgacatcgcaccattacactccagccttggcgacagagcgagactctgtctcagaaaaaaaaaaaaaaaaaaaaaaaaaaaaaaaaaaaaaaaaaaaaaaaaaaaaaaaaaaaaaaaaaaaaaaaaaaaaaaaaa

SEQ ID NO: 210765 - DNA, 644 bp, Homo Sapiens
ttttttttttttttttttcacagaaaattattttctttaattatcatacatagctctctttcacatcaggcagtagaacactgcatttacttcatctcaggatactggatacaagattaatagtcagtttgtctcaaaatatgtcaatgtgttctgtctgaaaacatgcagaggggcttggagtaatcatatcattttacgaggtgctttagaaaaccaagctacaggtcctgaatacattccaaaaatcctaaataattaccaacagaagagagaactcttgccagccagtacactcagtaaagaagtacaaaggtgcagacaatgtaactttaccaggaagcttaaggggtggcccagcttctcggcaggagtcagcaggcctggcagcctccatggctggcgctgctgtgtggaaacagggccatggtcttcttgagctcctggtagctccagtgcatctgctccacctcggctctgtgctgcgcccgcacctggctcagctcctgcagcaggtgttcattggtgctgaccagggagctgtggctctcctgcagcatctgcgtgagctcctggatcttgtcgtagtgctccaggtgctgcttcagttccacaatctcgccacacagcctcttcacacttgt

SEQ ID NO: 210766 - DNA, 715 bp, Homo Sapiens
ttttttttttttttttttccaaagaagtgccttcatttatttacagggcttaggaaaggaaaaaagctctacaaaagggaaatttcaaaatacgggcttcagcaggggcccaggtggagtgagtagttttgataaggtccaggtgggactcacttccaggtggtgaggaccgctctccccgagtctctcgatcggcctgctctgggccccagagactgaccctgacggcttctcagctcccggtcagccccgtcaccctgggccaattcttcatcatacagaatctcgtaattgccgaggacttccttaggtggcgacttgttccatttgcagtctgggatttcaccattcgggacggcgatgttgagggtgtcattaatcaggttgtacttgaggattcggtcattggcagtgctggacgtgagagacggggacgcattcacctcgatcagccagggcttcagcttgtcgtcgatgatgatgtcgtagccatagcattcaaagcagtgcttgtcattgttcatcaccggcgccacagccttcagggactgcacgatgatccagtggatctcgtcgaacagcttgctggtcacctccttgccgcgggtgctctccaggtagagccgcaggttactcactgtccacttgcccccatggatgtggttgtagtcttccccgtgtttctggatggcgacgttggtaagatgaacgaaca

SEQ ID NO: 210767 - DNA, 684 bp, Homo Sapiens
  misc_feature (646)..(646): n is a, c, g, or t
ttttttttttttttttttaaacaaataagcatttaatttttgtacagaaccagatgctggagggaatagctgtggatgattgtcttggcctttccttcatggtagcaaggtggctgccccagatccagccatcacacccacatttatagcaggaagatggggagtgggctgcaaaaccttccccagaaacatctctattggatttgcttagttccctctggccagagctggtcccatggtagcccctaacagcaagaaaggctgggaaatgagcaaaaaggatcatcacaattggctgggacccgttatgctccatcatctgggccccggcatgctgaggctccaaacaaaatctggtcctgttcgcaaggggtggggagcaaggagctttgggagactggttggcaacaacagcaggtgctgcagaccctggattctgccatcattccacccatgtcccttcaggaactcgggacacagatgagggaggcaggagtgggcggcccagcgcttgagccccaggggaatgactgagagacattagccagggccaacggccagaccccacccagaggccatgtcactgcctaaagggttaggacccctgagccccagcccagctcaagtgccccctgccctttttcanttcagcctcctgagggagtctagcccctggagcctctc

SEQ ID NO: 210768 - DNA, 750 bp, Homo Sapiens
  misc_feature (659)..(659): n is a, c, g, or t
ttttttttttttttttttagttgctgttcataagtttattatctatatctgaaaaaatcatagaaaattgctgggtttagctctcagcagcccgctcctgagctctgaggaagcttgccttcttttgagctacccgatccttcttctgagcaagggacattttgggacggttccacctacaaaagataggaatatatattttttaaactataactgaagagaatagaatatttaatttaaaattttaataaaatttaattttgatagagaatatttaagactttgcaatcagaaggttaaataatccaagttcaaatacatttacttatgtatgatcttaagctaactttcccaaaccccaacttctgtgatgtcctactaccatagggccaaaagtcaaatagaagacatgttagattcagtaataccacttctaggtatttgcccaaatgttttgaaatcagtttgtccaagagagtggcactcccatgttcattgcagcactatatattaatagcaacagataaatggataaaggaaatgtggtatacatatacataatggattattacccagtctttaaaaatgatggaaattctgtcatttgcaacatgaatgaagtggagaatattgtgctcagtgaaataagccaggcacanaaagacaaatacttcatattcatatagaatctaaaacaatggaactcacagaagcagagagcagaatggtggttacagaggctggtgggtg

SEQ ID NO: 210769 - DNA, 740 bp, Homo Sapiens
ttttttttttttttttttaatgaacatggaatttaaaagtgtttgggggggaatcttggaagagttacttcattcttatttggcacaactagcttttctcacaactgaacatttcattcatcccaatgttcaaaaattaaagagcaggtagctcatgtggggcagcaaagaaccacagtggagggaggggagtgctacatctcgttctctttataataaacattatagttcagtataaacaaatgatgacagcatactgttgatttttgtttactcacactggtttcaatttgtgagggagattttgatttttttttttttgcatctctgggaaaatttgttatatgggcatataatgtgttagagaaataagaccacaaaaatggttcacaccataaattaaaactaaagtgcatttacgcagagtaaagctaactgtaacaactgaagacgaaatatcaaggaagactttctggtgcacagaaaatattgcagccaaaataaattattgaggttggctcgtatggtatgggatagaggatctttatttgatctcaagtgattttgcatatttccttactaaccacaaatggttctacaaagaaccaggtcaattaactcagtattgaaaaatcagctggcttccaggacaatgtgctacatgatgagtaacagcacctggcagctgggttctaaacccatacactaaaaactaacccaggattactaaattcaacctg

SEQ ID NO: 210770 - DNA, 717 bp, Homo Sapiens
ttttttttttttttttttcaagattttatatgtttatttgtggttagaaggaaacgaaaactaataagaaagaacatagttaagagagagctgaacatgaaatgggtttattattgtcatttgaaaaggaactaataagtaaatattgttttacttatttctcagttttaatttctgatatggtaagcattaatacaatccacataagcaagaattcttcggagtcctcaataagtttttagagtttcagggggtcatgagactgaaagttgacaaccaccgtccttaaataaagacaactttacacccaccctaacaaacattaaaaacaaacaagattccaaaggatcaagtcgacccaatagtaactcaactgcctgccaaaacacacctcaatgctctttgaactttaggacaaggaatattatcagcgataaagatggagatttcataatgatgaaagaattatgtcattaaaaatacataataatccttagcatatttgcatataattatacagcttcaaaatacatgaagcaaacctgacagaactaaaaagagaaacaaaaaactataattatatttggagatttcaacaatcatctctcacttgttgataggacaaagaccaaaaaaaaaaaaaatcagcaagtatacagaagacttgaaaaaaactgtcaaccgatttgacctatcatttatagagtaatattcccc

SEQ ID NO: 210771 - DNA, 723 bp, Homo Sapiens
  misc_feature (682)..(682): n is a, c, g, or t
ttttttttttttttttttggagcaaaatgaattttttttattgtacttcagggcaacaagtcaacagctgcaggaaaacaaaaccaggtccaatctatgatctaagaggaagtcaggaaaggcttggaagagagatccaaaggccatcctggcaaggggaatcccacatgagaattcctgggagagagcaggccccaggcagcaaggtcatcttgcctgcttctctgtaagttaatccttcacagggagccaaggcttctcttgactgcttggacaagagggtaagggccctggttgcaggatttgccagtgaagtcatccatgtcaatagaccagatcatggctcctcccaggtttaaattctttaagaactgaaccttggtctccatactcttcacatcatcatagcccacccactggttccccttgactgcgtagggaacctgctgatcctggagccgcgtgatcttggctcctttcaggaactggcagatctcataataggccaggaagcctgaagactctgtgatgggtccagcagctccagggccagaggcaggggcccccacggtggtttctgcagaggccagtgtgaaggagtgcccatatgtggggatgcccatgaccaccttctctgatggcatcccttatgtatccagtaccccacagcatattccacatntgtagtaggagcttggccctctgtcctgccaccccttgctc

SEQ ID NO: 210772 - DNA, 680 bp, Homo Sapiens
  misc_feature (67)..(67): n is a, c, g, or t
ttttttttttttttttttatgacaaaaacatttacttgagcactttttctgcgtgccgggcaccatngccaagcccctgggcgcacttcatcatactgggatccccaggacaaccctatgaggtagtagtatcgtaagccccattgtacagatgaggaacacggggctcagagaagtgaagtgacttgcccaaggtcacacagcaagtgcatggcaactcttggatttgaagccagatctgtctcatagctgcagtctagccgtgacacctgagtgcctcctaaaagctacatcacagagctgtctgaggatgctgtggggaaccgtctgtgaaaaggtgcaacacgtaaactccgaagagtttatggcaggcctcctgaagaacagcagactagaggctacccagaggcagcctggagacagagtggggaggaatgccctgtctcctctcccaggggccccgaccaccagcctagaccagcgggactctgggctgctcaggcttcagccatctctctcctgccaccatggctctgcccagaaaccgtggatggccctgcccccaaccctagaatgttgcagggctttccggcaggagaggggcacaggagggcgaccatgggctgaggtttctgaatgacattcagcaggatttctgccaatggctcgatggctcgctt

SEQ ID NO: 210773 - DNA, 748 bp, Homo Sapiens
  misc_feature (615)..(615): n is a, c, g, or t
  misc_feature (709)..(709): n is a, c, g, or t
  misc_feature (724)..(724): n is a, c, g, or t
ttttttttttttttttttggaatgtaaacagcaaactattttattcttgttttctatttaccaattcaaacttgctctgcaggtcactcctccctgcccctgggataaaatctagggcatgttctgtgactttctggatcacaaaattcacatgatttttggatcattctcagttaaccaaaaatttgtcctgtaacttctagctataaaaataggctctgttcagcatttaaaatgtccaatcccatgtaggagtctaaactttcgatttcattttaagtttaagcttcctcttgattcctcccccaagcctggcccaggcttgcatttggcttcaggcattgggcgggtagcagtgtttcctctccatttttcactttcactcttccctccccaactagcttgcagggatttctgatcacctagtagagtctagaggcgtaagggaaggaggtcaccaaggggcaggccaggctttatgtgaatagtgctgttgtgagccaagtacttgagtacttcgaggtccccttctactgcagacatcttccctatggttcctgtgacccaggtttgtctcagagtggggttagcacacggtaccatctccatcccctnttaaagtatttattacatttttctggaaatggaagtctggaaattatatttccctgatagtcttatgagcaggattccaggttgattctgccanatgtgaggcactcangtgagactagaaagcagaaagatg

SEQ ID NO: 210774 - DNA, 639 bp, Homo Sapiens
  misc_feature (70)..(70): n is a, c, g, or t
  misc_feature (233)..(233): n is a, c, g, or t
ttttttttttttttttttccaaagaaaagtcacaaatacatatgtacacatgcacgccaaccccactggnggacagacaccaggatgttgggatgtggggagtggggagtgggggttcccaagcacagcagggtggtgggtgggaccctccaaccccagcccgccccaccctctccacgtccccaccgatgaaatgggaaggggtggtgggggggtgagggggcagtgctcanctcaggccccactcccctgccttgcctccctccctgcctgctgtgcagcctgggagcatgagacagagaagcagaggagcctgggaagcttctcgaaggatggagggcgcccacctcctggaccccttgggtctccttggcttccccacggctgttggcgctggtggacaggacaggtgaagacacaggcagcctgggggcgggggccacaccgctgctggcctccacaggacccagccacccagcaggcatgggggacgcaagtcttgcgcagggaaggaggacgctggccctgtgagggcacgtgttggcgaatgcacgacgacgtggcatctgttgtgctcctctccatgccaggcagtgagcaggtccgggttcagttctcctggggtgataagtccagagc

SEQ ID NO: 210775 - DNA, 595 bp, Homo Sapiens
ttttttttttttttttctcattttggaatcaaagcaggttttatgggttacacagacgagccttagagccaggaaacatagtggcttcagatgtgttcaccgccatgtggcatcgagggcagaagagcagagggcgcctgggccttgtccacgtgtccaaggtgcaccacctccatcatgccagcacctgcagtcagttgctgtttgctgtcggaggtggggggtgggggctgggctccccatgggcacacagccggcagctgctctgctccctgccctgaggtcgcgggccgtggtgtgctgggagcgaggtgtgcttggcagtggcgctaggacgggtggaagtggtggtggtggtggtggtggtggtgctcgtggtggtggtggtgctcgtgccgctggatcactggcaccgcgtagccctctcctgctggcgtgggcggcaggtcccgcaccacctcgtgctccactgtggcaggctgagcgtgtggggccttgagtggcgagtggccctccctgcccttttggcggtaccgcttgtggccgtacggtggcggtgggggctgcgggatgtggtggccgtcctgaggggcct

SEQ ID NO: 210776 - DNA, 774 bp, Homo Sapiens
  misc_feature (749)..(750): n is a, c, g, or t
tttttttttttgttttttgaacagccaagaaaaaaattgcaatttattaagattcaataaagcgttgtactttcgaaagcaactttcgatgcatgttcttcaacagtcacattctatgaggaaaacattaagagccacgaacttgttgtttaatctcagagttacagacatattaagttcaaaataaaaggtaaaaaaaacaaaaaacaaacaaacaaaaaacccctcaaacccaacaaaacccaaaaacaaacaaacatattcttgacttccatccccaattttaaaacaacagtttttctacaactcaatgctcgccggcagcacgggaagtggtatgtcggacgcacatacgcacacgcatgctcacacgcacacatattggatatacatacgcaggtgtatgtccatcgaatatatagaacgcatgtaatggcaatgagatgcagtcactctgaggaaggttggtttttctaaatatcctactaaacttgagaaaaaaagtcttgaacccagtttgtgcatagttcatgatcctctataaaaccagcttttgtggatctgcagtcttgcaggacttttttttttttttttgtattttttttgttttgataaaccattaaaaagctaattaaaaaaatgtaatgcacaagtttcctgatcaagcaggcagggagcacaatgttcatatatatattttttaaaacatacttgaaggtatgttattccattgtctttcttccttgcannacatcaaaacattgatcattttta

SEQ ID NO: 210777 - DNA, 662 bp, Homo Sapiens
  misc_feature (600)..(600): n is a, c, g, or t
ttttttttttttttttttaatttggaacatacaggacaatttattgaagtcaatctcaagcaaaatctgaaatcagtggaatgtcattaaaaacctttccaaattaatcctcacggaagcaaaaaacacattggaattccaaagtatttgtaaaataaaaaaggcaacatctcagtaaatataatgtacaaaaattatatgttcctaccagcacacacatcagtaaagaagcttaaatattacaggcaaccctaaatacactataactagtcaacaataagctatctatatacaggttaaccaagctttacacgtttcacactatgcaataaaacataggccaatcaacaaaatcctcaaaatattatatatcttgaagtctatgtggcaacatcaagtcattatacagtaatgccctagtggaacacccccagggaaaattaacactaatcccttagtgtcaagagcttctagccaagtcacagaaactcaaaagagattgactttagtgaatattgatgctttgttattaaagactcaagtctcaagtgatttaggcaaagtaatggttcacaggatctacaaagtttattacagatnaagtacagaaataaccaatctacaaagatcattatcataaagaacacgagaaaatgaaaacg

SEQ ID NO: 210778 - DNA, 747 bp, Homo Sapiens
ttttttttttttttttttaacaggattcatctcctttattcataaaatttgaaagttaaaatgtatttaacagtttgataactaaaagatcataaaagatcagcctcaaaatcacaatgaaataactgattttttttctgagatttgattgtgttaagtgtctgtgggtccctcagattaatcctttaaaatggatacttttaccaatttaatggatattgtatgaattttgatgcatttaagcatatgacatagaagtctgtttctgcagattaaccttataatagcaatgcttttatagcaggaagtgtgaaggtagggagtctaggccccttctatttttttgctccatcatctttataggaaagcttttatcttcttgcttgtcaaatagcagcaagatgtcttctctttcatcagctgtgctgtaggattacatggccatgcctggtgccagggagtccgagaaggtgaatattttatctggcataaaatttgagcagcaaggagctctgtcacatgtcatcaccatctctcaactctgcacagacccagtgctgtccctggctcttgaagacactggtttcttaacctcagcttcatggataagtacattttgtcttttcttcattgatatgtgctctcctgcattctgttattgtaagacattacagttacaggaatctttttcttaaatcactgttaatgtctcacaggaaattagctcttcagtggaaatcagcagcc

SEQ ID NO: 210779 - DNA, 674 bp, Homo Sapiens
ttttttttttttttttttagaaatatcaatattcaagtaaacaaatttattaaatccaacagcaggtaaccttccaaataaaaaacattaaaggaaaaaatgtagacatcaaagacaaaaatgtgtgtaacaagtcaataaaaatactcaaggggccatttggagagtgcaacagtgcagaaaatacaaacaaaagtattaacttttgtcaagtttgtacaacctcaacaaacagacacactggtcacaaaccaagagggatccacaaaggtggagggtcacatgagcagtggactcatcacctcagcggcttaaggcagggtatatctgtgggaccaattcatccaagccccatgtgcctattgcttcacattccccctttaaaacctagtcatattcattagtgcaacaggtaagagcaattaagcacagacggagctggggaccagggtcagagggaagacacttctcccagagcaaatgtatgcatgtcagggggatgaaaaaccccagcagctgctgaatggcttcctttggcaatatccaagatttgtgttgaaaggagcagggaggttggatgggtggcggaagtaggtatttatgagataggctgggtttccaagaagagaagaatagggaggacatgatgcccagcacctgaatcagaagcagaa

SEQ ID NO: 210780 - DNA, 739 bp, Homo Sapiens
ttttttttttttttttttgaattatcaaactttattggcttgttaaaaatgattgaattcagcaagtacatttatgatctatctacattgttaaaacagcactaaaaataaaattttttaaaatgattatccattatttacagaaaatgtggaaaagatggcttttaaacccagaacattataggaaaaaaaaaaaaaaaaacagggcatgagaatgattcacaggctgcctctggattacagcaaatggttgaacatgaagtgcgtgaaactcaaggatttgcgtttcttaggaatctcttgttactttgtatgtgtttatactcaattcataaatggactgtcttacaataaaggtgataaaaaatctctgttcctttctttttgcttttcacactttttttccccataaaaacccactgcagtcatagtcagtagttaggggtgggggttggttcaacacattctgggtgctcactcatgaacatgccaaagctatactgcaacactagcctgaattcaacttagagttacctcaccatcaaaatcaggtggctgggacgttcttttgtctctgaagaccaaaacttgaaaatggactgactttagtgggaaatttccttctgcgacagtcattgtcatggaactttcctgggctgggagttctgtcagccaattcagtctggcagcactggcagcaattcattcatggtctgtccaaagagtcttaatcttccct

SEQ ID NO: 210781 - DNA, 734 bp, Homo Sapiens
  misc_feature (661)..(661): n is a, c, g, or t
  misc_feature (691)..(691): n is a, c, g, or t
  misc_feature (710)..(710): n is a, c, g, or t
  misc_feature (720)..(720): n is a, c, g, or t
ttttttttttttttttttaccatgctatacacaattacgagatacagaactaggcttaatcacactataataagaaaactcacttttgaattgtgatgtttctgttaacggaaggacaatacgttactataatacttttagtgtaataacttttgtttgaattatgaaaaaatttgaatcatttccctctagaccatttcatttcaaacttatactttgtttagtctagccagttgaccaaaaagaaagaaaataaaaggaaaaagatactcggccagatgagatagagagagaatgctaacacaaggttcaatgtatgcagttctcggttgctctgttccatatgcccacacagtgtcatgacgtattggtgtacccctaaacagaacgccagatcagtccattcttactaggctgaagaaaattctctatcagagcatcaatgagtttcttcagttcttcctccagtaaagcagtgtcactctggtcaggtgacgcacacatctctgcataatactttatctttggttctgttccgcttgtccgaagggtagcaacacagccattttgaaaagtaaatgtaatcatttggctgtttttactcacaggcagcactgatttcttattaggctggctactgtcatatccagtggtaatgtcncgtacatgcaatatagcaaatgttccacanaattttggatattcttttnggagaatcanaattacgaagcctt

SEQ ID NO: 210782 - DNA, 655 bp, Homo Sapiens
ttttttttttttttttttgattgaaaaaaatatgaaatttaattttagacatggcaagttcaattacatcacttcatatcacagtagaaaatataatttgttctaccatgggaaatagtataatggaatagatcacaatagtagtataataaaatagaatatccaagtgcaaaaacaattttcaagtaagtacacacactgtttgaaggtactttattaagatcaaagatttttcattacatttatttataaatccttcctagtcaaaataaaataataaaaatctgtatctttagaaagaacatagttttgtaagtctgagaaggttatgtttgtcagtttcaaattattacagtttagatacattcaatcattacacaataccaggaaggtcagccttaaagataccaagaacttccatattggtcagtaaaataagggtaaaaaattaaattttactttcacctttttatgtttgattgactacagtcaataataggagtacagaatttactttttggtcttgatttttaaatatatgaattttaaaaagtgaacgttcctcttctcttacatagtggctccaacttagggagctggcttctggagggaggagtgctattctccttgctggagaaggaggctgggggaagaa

SEQ ID NO: 210783 - DNA, 699 bp, Homo Sapiens
  misc_feature (611)..(611): n is a, c, g, or t
  misc_feature (634)..(634): n is a, c, g, or t
  misc_feature (680)..(680): n is a, c, g, or t
ttttttttttttttttatagtaagaaaatgtcaatttaatcatttactttagcaggcaagcaatttgtaaacattcagtagcggcagcatccaagttacaaacaatttaaaaagaaccaagattagtgattataatttttccttccctttccccaaaagaaaaaaaaaaatgatttggaaatgaatgacttaaaaccctacaaacattgaacattcagttatgtcttctatcagccttctatgcatcctctctgttttattttaaaagatgtatctactcctaaaatgcattatcttgtaataacttgtacgtgagcacttgcaatctaggaagttgttcctgcacatcactgtgcatatattatcttagtttaaatcccatttgcaaagggaatatttatgtcttgattcaatgcctctttgacttcgagtggcagggtatcaaaaaggtgatcttccacaacaagcccgcttttcttgagcatccgacactggcccagctgggctggcaggcggtccaagcagttccccttcagctccagctgagtgagctgggagagctgaccaactttctctgggagtgaggtgatgcagttctgtcccagattcanagtcctcaactttatgcatttanacaattgttttggcagaatgtccactttgttcccagtgatatgcanatgctgcaggttctgaagc

SEQ ID NO: 210784 - DNA, 642 bp, Homo Sapiens
tttttttttttttttttaggatactgagattttaatataataagagttgttaaacatcaagatgatttatagaaaggagacctatggacaaatatcaacttattggtcaataaaacttgttccttaaagtcttttacagtattttttgaaaattaacttttttttaactgcatatatgggtcttcacttcatttttcagtaaagacaacttatttggatatcagtgtctcatcacttgataagaccagtggaggatttggatagtagccagctgtttttgaattgcttgaagagaatcttgtaaatttgtagtccagaggtaattctgcgattgcttcaatacttggaattgcaatagtgctgtaagtactgattctcttacaagaccatgtataaaccaaggagtcttctgtattttccagtcccaaaactgaatcaataaaaaaagagccccattttttagatgaagtatttaaaggttttgcttttggtccctcatattttcctttcttctctagaggctctgactcctcaggcctctgactcctcgtgccttcatcccctctgagttcttccaggatgaggactgtctcccaattactatagtgacgagctgggaaaatatctgaatgcatgctgtca

SEQ ID NO: 210785 - DNA, 756 bp, Homo Sapiens
  misc_feature (632)..(632): n is a, c, g, or t
  misc_feature (695)..(695): n is a, c, g, or t
  misc_feature (716)..(716): n is a, c, g, or t
ttttttttttttttttttgaagaaaaaagataaccgtatttattaaaatgaaacaaattatgtgtatgactgcaagagttctggcatgatgcatcttggactcaacaaatctttgtttggggaatcccatgtggttggagaacagcaggatagttatttactctggtgagtctgtcaccaggcagttgtagtaccatgaggttttacatgcaccatttaaacaatgtactaggccgggcactgtggctcacgcctgtcatcccagcactttgggaggctgaggtgagtggatcacttgaggttgggagtttgagaccagccaggtcaacatgatgaaaccccatcttgggccgggtgcagtggctcacacctgtaatcccagcactttgggaggccaaggcaggaggatcacgaggtcaagagatcaagaccattctggccaacatgttgaaaccccatctccactaaaaaatacaaaaaattagccgggcatggcggcgggtgcctgtagtcccagctacttgggaggctgaggcaggagaagggcatgaacccagaagacagagcttgcagtgagccgagatcatgccactgcactccagcttgggcaacagagcgagactccatctcanaaaaaaaagaatggtctctttacgcaagaatgatggatgtggattttgtgtttaagtcttganaaaagagtcagtgacctcganatctcttgaaagaatatgcagaaagttcctgtgcactctc

SEQ ID NO: 210786 - DNA, 672 bp, Homo Sapiens
ttttttttttttttttttaaaaatgcacaaggtaatgtcgttttcatagttaaaatctgacattgtttatcaaagctagtcagttaagtggacacctgcaactcaaatcccataaacattttagaaacgccaaccacccctcctgaaaggtttgaggaatgaaatttggcagaagctcagctctgtgaaatagctcccgttttttttcttgggaccctacttagttccgtgggctcccattgggagctgattaatttctgccaatcagaacccatccctaacacatcagatgatagtggctttgacctagggaagaagaggttgagcgaagaacccccaccaggtatggtttgagagtccttagttggttttcttgggcgttaggtagtaagaaatccaccaggaaccccagccaaaaccttctcaagtgtcacttgggcagatttgggttatcattcctccttttgaagaagtgagcaaacagcctgctttgtttggagaagttgtgggcaggggaggagggttggcaaggaacctgaaggaacccactgctcagccagtcagaagtcagcagccatcctccattttcaacatggaccgcctggacacagccagacttggagcagtgcaacgagatcacagaccgaatgaccccagttcacacttggtaca

SEQ ID NO: 210787 - DNA, 657 bp, Homo Sapiens
tttttttttttttttggtatcaccattacttctcctaaagtcacgacataatatcacctacagcagaaatgaggacttcagtggaattgacatctccttccatcaagcgcatttgcagtccatctttagcaggacctctctctaatggctaaggctaggcagaagaatttgaagacagtctggtttccattttcctaatgcagcctggcccaagagccaggactcccataagactagtctactgtgggagtcagggtcttttccacgtgtggaggctagtgtttgatgctggacggcctggagtaaagggcgaaggggagaaggtaaccaaccaggctggcctcgggattcgcagaggagggctggggctttgacttctgcagggaggtgagcagtgtggccaagggctactcaaggaacgcctctgcgagaattcagactgtggttgagcgcacaaagcaagagtgtgcgaagaaaagttaacgcctctcccagctgaccccaaaatctgctaatctgggcctgacggaaaaaattcggagaagaacacctcggccgagttacgtgaaaaggctgggtacgaactactctggctctacttggggcgccggctcagagcgatgggcaggacgtccgcgaggaagaaagagtgacgat

SEQ ID NO: 210788 - DNA, 715 bp, Homo Sapiens
  misc_feature (596)..(596): n is a, c, g, or t
ttttttttttttttttttgatgttttacaaaattttatttttcaaggttgaacaatgattcattgtaggctttcagatgaaacaattagcagtcttgaagtacacattgaatacaaattaatttgatttcagtaggcacatttcttggaacaaactgaagagtacttaaaagatcccattgaatgcatgtggcattattcctagtttacggatactgtttgaactaaatgaatcttgggagagggcagttagtaattaatgcatttagaaactgatagcgctaaaatattaaaacttatgcattccaatgtttacatgtgtatgtgtgtgtgcacatgtgattctgctttgcctgttttactatcttaatgattatcccttcttactgtttcctctgaggatcttatctcacttctactgacagtcagaaattttcttatcagcccttttatccatcattttctagttttcaaatatttccaataatgccttttattttagacaagggctttgttgaaaaacctaaattacaccaaaataaaaccatactttatccctagtgctgctcataacctgccagaactttcatgcttcanatcacaagggctagggaaattgtctagtcaggagccccctccaacttctgtgacgggctggggcttccaggtactgctgctacaaggtaatgtatagatatatttcttctgtctcttac

SEQ ID NO: 210789 - DNA, 584 bp, Homo Sapiens
ttttttttttttttttttgaagatttaatatatcattttattgggatgagatcatagtctttacacaaatgctatgcaaacaagttactgaatatttttcacctcgtggagttgtacacaaccttttatatatacacaccctaccttctctcaaatgctgggcttacaggtttattagctagggccttttgaggtatgctgtcaggcgacagcccgatgagggtgctcgctggcaaggcccgcgcgtccagtcggcggccgaggggcagccaggggcgctccctctcctggacgtcacccgcctgccacacccccgctccttcatgaccgtccactgtgcttcgggcgtccttgtcacttgcttcctcacgttgaattttatgagcttcgagagcctgatttctccccgacccctcctaacacggctccttggcaggctgaggtgtcgcagatccccggtgtcccctgggccccaatggcacctggaagcccaggatctccgggaggcccaggctcgccgggagcaccgtcctggccgtccttgctggtgccgggcacgccttggggtccttgggggccctggt

SEQ ID NO: 210790 - DNA, 673 bp, Homo Sapiens
  misc_feature (657)..(657): n is a, c, g, or t
ttttttttttttttttttgcttgataaatgtttattggataaacgagcgaaggataatcacctgagcaccatagttgccaaagccccctctagtcccaaacctaagcccacactctgtccccttgcaagtaaagaaatgcaccaagcagggcttatgcagcagccctcggtctggcctggctggagctataaacatgcatgctccgaaaagccgcctcgcggaaggtattcctttaactgcaggtgtttgttgcccttggcacagcaatatgtaatttcccatttttagaacaatgctccaaagaacggtcacaaaaacaaccttaagagggggtggttttcttcctggccgcttctacagtcctgcatttggggtggagactgaaactgccccggcttggctgctggcttccttctgtttgttctggtctttgcattccagtgctgatggctgtggtgtgttcagaaccacttcagagctgcaggagctgaagacttcacgggtccaggtctggccaggctcgggagagcggtccccttgcggtgcagcttcaggcccaccgtgtggtgccccatggtgttcagcagctgggtcacctcacccgactgcaggttgtcaaagtagatggtggcacccacatctggtcccctccttgnacacccagtgcgctcg

SEQ ID NO: 210791 - DNA, 720 bp, Homo Sapiens
ttttttttttttttttttcagtatgaaaaacatggttttattacttgaaaaataatagaaattgtatataaaatacaaaatatacacttgcctagtgcaattggtctccattttacattttttacatgttttttccctatttaatggcacccaaaatgcggtttcattttcactgccctggtcaactaataccatttaacaacgtatttaagaacttcttcaaaagacagtaaaaacaatttgtaaaataactatgctttcttacatttacaaaacagaattttgataatatatgaatattttatatcacataattaccatgtaactactaatctgttatctatatcaaatcagagcacataacattttccaaatacactgttttaataaagagattagaaaacaggacagtaacagtttcttaaagcaatcttacaggaagtctaatttaatattctgttaggtgatgtactcacgtaggctcccagaagacccagaaactacatgaattgcggaaggctgatttaagatgccagttcttcaataaacagtgaactttgtaattagaatgatttttaagccaaaatactactccttactcttcagaaataaaatatagctatcctcttataatacagcaagaaacataattgttctggtaattgccagcttaactaaaaagactccccttttcgttttgtccattaatttcttgctggt

SEQ ID NO: 210792 - DNA, 680 bp, Homo Sapiens
tttttttttttaacgtttgcaaaggtttattaactgtcagtgactgatacaggggaatcggatgaggggagtacatgctgaacaggaaacagagtgaggggggcttgaccaggacgcatggcaatgggaaaagcagatgggagatgcttatactggtacttggtgtgtgtgtgtgtctctctctgtgtgtgtgtgtgtgtgtgtgtgtgtgtaaatgcagaggaaaaagtctgaaattaaacactcagaactgccctcagtagtcacatctggggagagatgaggatagtgctgttctatgcagagaatacctgacaatacttgttttctgacgtaggtgcatggatacacaaaccgaaatatgcattcagtatgtcttgctcatcaattataaggatagtatctaacagaatggcacactgtaagaaaatacaatggaaacactaacatcgaactcttggcacactaagaaaaatgacgctcaacttttcaccgttgtgaacacttgctttcacttgctatgcacctgatgacgagggagccgcagccatgcccatgttcgtgaaaggtcacacgttctgcttctcatcaagggcatgtgtcgtatccccacgggagttactcgtcatcttcctcagggtcgctgatctcttcataaatcaccagctgccctcgtgccg

SEQ ID NO: 210793 - DNA, 673 bp, Homo Sapiens
ttttttttttttttttttagattcacttgttattaaggtttattataaacatgcaaaattcattgcatgatgcatttgcaaaacgtattaaaatccttctattaacaaaacatctttgagctgttaggcatccgggtttcctgattctacagctccaggcctgtcattcaacgtgaactagaaatgggaaccaaaaccatattctttttatccctaagtggacatccagggctagagaagggaggaaaatcaatcggtagaggctgatgctagagtcagcacttccattaagttactgtacatcgtactttcataagcgacactgcagcctattaaataaataagcacaaaaggggagagggcgtacacttcagcttcttgagaaggataacaaggtaggcagcaaaatgttggtgtgtgtgggggtgggtgttggcgaacaacactggtgagtagtggcatgattactgatggcaccctggatggaaaataatctcccagagattaaaatgaacatatgtacacactggcttatccttgatctgaaatgatttcacacgcttgttcagcaacgtccttagacgatttggcctcttacaaagaatgaaaagtatcaagacagttatcaaccaaggagggtaccagatgacagattcacccaacactcatctga

SEQ ID NO: 210794 - DNA, 670 bp, Homo Sapiens
ttttttttttttttttttcacagtaaatgagggatgctttttcttaagaaataaatttaattcaaggtggttagtgaatgtgaggcaatgtaatgccttcacgaaagttaaagtaatccagttacaaaagaagcactgtgtatagtctcaaatagctgaaggtacaatgggctccatattttacaaagtacaaaaaattatttcatatacaaagaaaaatacaaataatgtgcaaaaaccattttcacaggtggcaatttataaaatggaaatgatagaaaagtccttcattcttaattatccccagatttcttatatattaacacagttctatttcctagtgtgtggacaattttaaatttgaaattctgatttatttttaatctacaaagtatttttattttttaaaagggaaccatttcattattgaaatcttatgaatgcatcagttaatttatattaaattataagcaggctatctgaaaaacaaggatatagaaatcatatatacacatttttgaaatattagtttagtatttaacatattaacatttcaaaacaaatgcaatgatctagctacctatgacgccagctggtgtcagtggttgtagcgaagatgctgtttctgtttaccatgagcaaacagcatttcttgggtcttaagctaaac

SEQ ID NO: 210795 - DNA, 603 bp, Homo Sapiens
ttttttttttttttttttaaattttaaaaatttattctttctcttttgttgctgttgatttgttcttgagatggctacaacaccagacagaacagtgccctcatatctgatggctgtgaagggctgcactcctttgaaacattaagatctgctttgggcttccctcttcggcctcaccctccccttaaaatcaagtcatttccacactttttagtaacatactaaatgacacatcatcccttgttagccctgtaaacattttttctccacacaccctccctctttttttctctcatgtctgtgggtgaataattcactaagaaaaaaaccttaaaaaacaaaaacttacacatttatatcctgcactccccacccacccgcccaccccagttttggctcttctctccaaggcagacaacaaactgatgtggattggaagtggactgagagaatgaacggggtcagggttcagatatccataaattctgaccctggcaggtcccgagcatcaccaatgtgaccacgatagaaagcagaacaagttccttgcttactcctccttgtctaaacaactctaaaggtgggaagaaacagctggggaag

SEQ ID NO: 210796 - DNA, 686 bp, Homo Sapiens
tttttttttttttttggtagagacagggtcttgctatgttgcccaagttggtctcttgggctcaggtgatcttcccgcctcgaactcccaaagtgctgggactacaggtgtcagccatcaatttgtttttactggcaatggcacaaaattgagctatcagtaaatggaagctttagttaaaactgaaagagtactagtatatcctctgtaaacaactcctcctaacaaggttgttacttttgatgaatgtatcattaacctaccaatgtggtaggtctctaaacctcagtcttctcatccataaaaagtgaaaggattgaatgataccacatatggagagcatttagcactgtgctgagactcaataaatggtcactaacatgattattaaaacagtgaggaaggccacaaaaatgagatacaacattatcatcctactacctgaaactgttcatcctagactctaataatgtgtgctggaataacaacatgaaaaagaaatataagattctttactgtctgccataccgttgggtctagatttgaaagatactcgcaccaggagcagtggctcacgactgtaatcccagcactctaggaggccgaggagggcagatcactggaggtcaggagttcaaaaccagcctggccacatggtgagacctgtctctaccaaaatacaaaaa

SEQ ID NO: 210797 - DNA, 705 bp, Homo Sapiens
ttttttttttttttttttcatctttgtaaatacgggcttttattcactgccagctccaggatggaaggagggggtgaatcatgcacagccttggtctaccctccaacactaggcagtgctggacaggggactcagaaagggaagcagagtgggctgttgatgtctggaaagctccctcaccagagtgcccagtgggtcacacagcatcatgggggatgagctggggctggagtcggctgtatctgacaccagaccctccattcaagctcccttgatgacaacgcccacaacagggtctggctgatgctccgttctgccacgactcctgctgggtgatcgtgggacaggtctccgcccctcgctggggtctcagctgctttgtctgtaaaatggaggtgatgacaccacctccagccttctcaaggctggctgagggagaagccacgtaaaagcgcttggcacacagtaggtgcttaataaacagtcaatgggattagtcttgtaaacacaaggaaactgaggcacagagtgggaaagccattttcccagagccacacagtgaagctgaaattcaaacttgagcctcgactgggttttctggcttgaattcatcccagagaggctctgacatatggagggacccctaacaggtgtttcagacacatcacggccaagggcttactctgctgggcctcaaaacacggc

SEQ ID NO: 210798 - DNA, 741 bp, Homo Sapiens
  misc_feature (664)..(664): n is a, c, g, or t
  misc_feature (689)..(689): n is a, c, g, or t
ttttttttttttttttttgatgtttcaataaccaatttattcacgtatttttaaaacttcacacttcaaagtgaacatctgtcaaccacttagaattgggtatttttggtacccatgtctacaaaaagtgtatggcttcccttgacagtactatactgaggggcaagtgttcccagtgtctttaaattgttaggttctccataatatgaattctccaaaatacaaaatagtctggttacttgttgcactgtcccatatttagtactttcatagaacttcattcctaagagcattttcttatgtacaatgaactgtcatttcttaaaaatattgcctcatttcccgcattcatggggttttccctcatccccagtgggaatatttctaatagcttaagagacttgacttctggaaggcttttggacattcacaggattcttctttgctgtgaatgttctactctataaggcttgtctatggttttaaaagtttttgagatccactgcagtcataggttcactctactctatgaattatgatcggctttccatacaccacctcatttagagttctcatcctcatggagtacagacacctaacatgacgtgactgtctacaaacgttatcataattgcatttcctgaagtccaagatgatctgtcanagactactattaactgtattcctangatttttttactgtatgagttctctgatgattgatgagctgtgacttctgtg

SEQ ID NO: 210799 - DNA, 708 bp, Homo Sapiens
  misc_feature (691)..(691): n is a, c, g, or t
  misc_feature (694)..(694): n is a, c, g, or t
ttttttttttttttttgtcaggactagtatattttattttcagatgcaagcagcaactttggcatttcttatcacaaaaaaactatatgagaaagctggcaagcccagtgaacttcctggccggagaggtttttccattaaaggtggcaaggtttgatcatccaccatctttagagttagaccattgagttggacagatttggaaagtaatccatgaggtcccaaaggtcttagaaggtatttatccacttgcttgttagaaaaaggatagggtaaccgcaagtacttggtgacattatggaggtttatggcatacagagttaaatctccttctttataccttggattgtcagtgtttgtgcaatgaaggtatactcgaagcttccttctctttgaaccttgcacgcttgccattaacaccttggtgcccaccaatttcttgaacagaagagatagccaataatcaggtaaaggatcgaagttttcatccactaaatggtagtttcctgctccaaagaatacttgcctcatcaccacttctattcccattcgggctgacaggcccaatttatccagccacataaagccagctgcaaaggtgtcggatagcaagggcgctccgcctccatatgcagagcttgtttctcctaaccagaccttcttgccaggcctggtgctctcaaccacctgnganactttttgcacaga

SEQ ID NO: 210800 - DNA, 581 bp, Homo Sapiens
ttttttttttttttttttacataattcaatttttattatcaccagtctttatcaatttagctgttctcctattgttcaagaaatgttatttggacaagttttccatagggcaacttgacttcctctttattcatttaaaagttgttgtctccttcaaagatatttagaggttgatctggtgagccctggaagtctaaagtcattttgtggcttcagaggcaggaagaactcccaacagcgatgtgtcgctagcatcttcacaaccatggttgggggtgtcatctgaggttcttgtcccatgtgggtcctctctcttgaggcaggtctccatctcatggaataaattctcctcgagagaacccctccttctggttgaaactctgaggggcagatgtttttgtttctgaactcggcaccacgtgagaaatagaataaacagaaccaggagaaggagcccaaagatactggataaaataagtgctaaatgacctgaggaggcattcagtgatttcagcgactgtccagagcacctcacgccagcatcttccttgtgtccacagtcactctgtccccagggtttg

SEQ ID NO: 210801 - DNA, 754 bp, Homo Sapiens
ttttttttttttttttttgacataagaacagttttattttaatcacttaagacttgtgcattattcaattttgagactgaaatacttgtttccctttcaactgattaggaaatggtctgagctggcagaagttaatcctcacattattcagctaatgagagacagaatcctaaaacctgattccaacttccgcctgtacctcacaatgcaagacaaagcctttcattttaatgttgtacacatataaggaccatataatctggattaactttaggtaacaataacttaaaagataggaaaatgtatcatattacagagatttaaaaattgtctatacaataaatgatgaagaaaactaacaataaacaggacgacgttcaaatactgaatacaattaacaaatggggccaaaagatcaacatttatctctcatcatctttcatgcaatgtctcagctttcttctcccaaacataaaggcagattaattcaaagtagccctattaagaatatttgtttatcacgcctgcaatcccagcactttgggaggccgaggtgggtggatcacctgaggtcaggagttcaagaccagcctgaccaatatggtgaaactccatctctactaaaaatacaaaaattagccaggtgtggtagcacatacctgcagtcccagctactagggaggctgagacaggagaatttgcttgaaccaggagatggaggttacagtgagcaaaatcgcgcactgcactccag

SEQ ID NO: 210802 - DNA, 569 bp, Homo Sapiens
ttttttttttttttttttcacttgatagtttaatgttatatttgcagcataaataaggcacaatatatgccagggcaagggagggagggagaaggcatatctggggggataactgctaagtggcaagggggaaaggaagacagtatggttagggagaatagagcgaagcccctgcctcagcccagtcccaggagattgtgagaaccagctcacagggatcatgctgaatcaggtggaggggaaaagggaaaagacagttttgtaacaaaaaacaaaatagcctgcagcactgcatcctcctacctgtcaaaggccaccactgggcactggggagacccagaccgagttgagttccttgataagatggagaggtgttgctacatgtcaaaaatatatagatgaacagagatataatcatagatacacactgcttccttttcaatagatactatgttaggatgtggcagcctccactcttggggctggaagctcatctcctccctgcctgaaaggtgtgtgtgttgtatggggaggaatgggacagctgaagcttggctggtccttactgt

SEQ ID NO: 210803 - DNA, 587 bp, Homo Sapiens
ttttaaacaattctacaaagactttattttttagtgatgaatttctaatggtcttatcactagactcaaaattaaagtgggcttatggatattgctttgttaattcggtggtgattgggactttcaaagatgttttatctatgtttcctgttaggaaatcgaggatggatcgtgattttaagctccttgttaattctgtcaataattagtggtcaaaatggaaaatattcatgaatggccagtacatggaatacagaaaaccccatgaaaagcctgaaagagaaaacaaatgaaaagcagagttctgtgagagttctgtgctgggggtaccttatctgattttcctcatcattcaccaagaagaaccagcgaaacttcacaaccaacggactgcagttggtgatggtaacgtagcgaatgagctcagtatcgttcaggatgcagccaaaatccagctcctttgtctcaaagctgaggttggggtaatgcacttctccgcgcaggtccaggctgtctatctgagggtgttccacatacttaattgctagaatttcttctgccacccagttgttcagatcgtttctgta

SEQ ID NO: 210804 - DNA, 593 bp, Homo Sapiens
accaggggtgcactttggccttctcgaagcaccagcaccttgatgatgtctgagatgcccttgttactgagactctccacaaaggtctccagggggtagttgagccctggcaccagcaagggtaccttgaagaaggcccggggcagggaatagagcgcctcgttgtacaggaagcagaccagcagccccaggacaggacgggttgttgaggtgttctgcaggtgaagtgtgagcttaaaggtggggccaaggccctgaaccacggcgtgcagcttgagtggctctcgggctgtcgtggacagggggctcaggctggactcgagggcctgcaggtaggcgcgggcagcacgtaggcgcagcaggtataggtctgtctggaaggcccggtgcatggcggtgccagcctcccgctctcgcagtgtctgatccacgtaaagccgggtctttcggggcacattgagtttcatggcctgggctggtgggggacccacctcacttcctccctctacaaacactgctgtacgcttcaggatcttgatgatcaggccaccacctcgagtggtcatgatgagggtgttgtcctcccggccgta

SEQ ID NO: 210805 - DNA, 558 bp, Homo Sapiens
tttaaaggctttatttgcattcttgtaaattttattatttcaagtcaatgtgttaagaattactgcgcatatagttatttcttttataaatttgttttccgtgattccttcaaaagctttcttattgttggcctttattttctgcagagaagactacagttttacagcttatgctaccatttcgtatttgaaaataggacctaaagctaatcttctgaacaatgaggcacatgctattactatgcaagtgacaaagtccacgcagaactctttcagggtaaatggctattaattttcagttttatatattttaaaaagtatattaaagcctatgggatgcttttctgtcatattcccctaggtccagttgaacatgagaaaagtcagttttctgattagatttctgggtatggaagagagaaaatatagttttctgtaaagatgtaagtgaaagaatttagactggccttttaacataaactaggggtttccagtttcttggaatgggaggactccgtttgaatatctaattttgttatgcactctgctcttatttgg

SEQ ID NO: 210806 - DNA, 619 bp, Homo Sapiens; identical to SEQ ID NO: 40863

SEQ ID NO: 210807 - DNA, 654 bp, Homo Sapiens; identical to SEQ ID NO: 54030

SEQ ID NO: 210808 - DNA, 476 bp, Homo Sapiens
tttgagacggagtctggctttgtcgcccaggctggagggcagtgccatgatctcgattcactgcaacctctgcctcccaggttcaagcgattctcctgtaaacgcatccttcttttgtagagatgcctacgtctgcagcctgcatgctgtgatgtctcagatttacacccagacatcgtgctgagggacaggcggccacacgcagaccccacgtggaccccggggaggttggagatggtgctgggtcctcaccgtaccatgctcttgacttcgtattctttcacaaattcccaccacaaaatgttaaaaaataaacaggagagaattctaaaaatcaacatccattcttactagaacccactaaaaacttaagaacacgcgtgctctccccaaatgtgactgaaaatgcacatcccaccccgtggggcagccacgtactccgagaagctgcactcctggttcccagcctgtttcta

SEQ ID NO: 210809 - DNA, 650 bp, Homo Sapiens; identical to SEQ ID NO: 52937

SEQ ID NO: 210810 - DNA, 532 bp, Homo Sapiens
ttttatgaggcaaaaggcaatgaatgtttttatttgttaatccacattagcagcaacaccagaaaaatcattaaccaccccacctagcattgaaactgactccacttatcgcttcttctttttaaattataatgtaaaaatgaattgcaaaatatattttatttgaacttactgaagtcaaaatcataggaaccagatatttaaataaagtttaaatctaaagtttatattttaaacataaaatttaaatcgtttgttttgaaaagtatatccttgaaaagtattttgatatagatgggaagattttcatagactggcatctatttttccacctactgtttaatgaagtaaactgttgaatgatgtaaactgttaaatgaagtaaacagttaaaactgatgacataaaagacaagcaaagcgaaggaaacatgttataaaagataagtattacagcattcttaagtatggcactttataaaatgaaaaccgggatgctgtcttctgagatatcaacatatttataaggagca

SEQ ID NO: 210811 - DNA, 492 bp, Homo Sapiens
attaaaaatccaaagtttattccagagctattgattttccagtatgttttacagcacaagcattcatgttacactaaatttttgcattacttggtttaaaaactattctttcaacaacattgaatataaaatagcacaaatcagcagatcattcacaagtttcaaagcacatacactgcatttttaggagactgacaagtgatgtagttaaattttgtgagctagtgaaaggagaccagtatagtcataataaacactgtcctcagcttactgttcaaaagtattttgaaaatctgtgagtcgagggccaggtgcagtggctcacgcctgtaatcctaccactttgggaggctaaggcgggaggattgcctgagctcaggagttgagaccagcctgggcaacatggtgaaaccctatctctactaaaacacaaaaatgagccgggcgtggcagcctgcacctgtattcccagctactccggaggctgaggca

SEQ ID NO: 210812 - DNA, 532 bp, Homo Sapiens
  misc_feature (167)..(167): n is a, c, g, or t
tttttttttttttttttgagacggagtctcgcactgtcgcccagactggagtgcaatggcagatctccgctcactgcaacctccgcctcccagattcaaacgattctcctgcctcaccctcccgagtagatgggattacaggcgcccaccaccacgcccagctaatnttttgtaattattttttagtagagatgcggtttcaccatgttggccaggctggtctcgaactcctgacctcgtgatccgcccgcctggacctcccaaagtgctgggattacaggcgtaagccaccgcgccaggcccattttgttcttaataaagaaaaatagaatgctgtacaatgacatggttctataagaatacaaaatatttgtaatgattgaaacaaaatagttgacaacatttttagaaactcagaaaatttcaagcccctaagtcttgctttccccacctaagtccaactagttcctctgcctcaatgacaacgtatcccaagagaagatcaaatcaggctctgacccagactgcttag

SEQ ID NO: 210813 - DNA, 554 bp, Homo Sapiens
gtggcaccaagggttacagatctttttgtcagccagcaacttacacgatgtgtccgttttgttattcactcatgaaatacaatttaaaatatttaaaatattttgtattccaaaaatataatacaaagaagtacctctgagaacattgaaaaaaatgtataatttgaaaaatgtaacttataagggcagctgtcttcctgcaagagttctgttgccaaggaatttcttaatgtcgctcattctgtccagggggtttggggcgattgggctttgaaaaaatattcttaaaagtttgtttagcagaaaataatcacttttacattttgtgcaaaacattttacattttcagataatttaaatgagcactacatactgtcagtgtgaatgtagggccttgaaagcattttgcttttttttttttttttttttttttttgagcttggttataaaagcaatctcctgtgttaaaaacgtgtgaatagtttgataatttgtacacataatcaagagcatctcagctggactttgtgttggctgctgtatagaacatgaac

SEQ ID NO: 210814 - DNA, 501 bp, Homo Sapiens
taagcgatattgagtatgaaaccctggatgagcaaaagggatcttgaccaaagggataaatgtctgataggaacctgccttaccacacacaagcagagatgtcagaatatgtcttttcaaaatatgtttttgttgttgttgttatagttttttgcattccttctacaccagagaatgaagacccagattcttagaaataaagccaaactggcattcatctggtttctcacagcatcagtttgataaaaagaatttcactgtattttttttgtccccatgtattttgctttttccaatacttccaattatttgttggtctcactaactcttcaagcctggtgtggctgtaggaacagtaagcacagtggcggtgttgataactgacgtgatgtgggctaaacagacatgttaagtcaaaactattctctggaggaccatggaatgggcatccctctagactatgggagggtgaagtggaaaactttaatgaatatagacagc

SEQ ID NO: 210815 - DNA, 492 bp, Homo Sapiens
tttcctagtaaaggatgtatttcactcatggtactgtaatgataaatcccattttcaggttaagactgcatctggagtattgaaacttggagccactttctaagagggtaaatcggaggataagaagtctttaaccatttctattgaggataggctgctgtaattactgtggaaaagagaaggcttactggggggctatgagaaggcagaagtagaacatttgttctacttgggtgatgaattagaagtggaaaaagatgagaggcaaagacaaagacagctcctagaattgaagcctcttacaccaagcatggtgtaagttgccgtgaaagaagtgagttcccaaacgctgtgagtactttagcagaggtggctccataccagggactaaggattcctgcttgggataaaagagtagaagactcttgagcaactttctgatggataatttgtggggaaagtattccttgatatattctttctaactaggta

SEQ ID NO: 210816 - DNA, 330 bp, Homo Sapiens
  misc_feature (259)..(259): n is a, c, g, or t
tgagacagggtctcgctctcttgtccagactggatggaatacagtggtgagatcatggctcactgttgcctcaaattcctgggctcaagtgatgctcccaccctggtctcccaaaggccttgttttgtagttttgctctaaatttcaggaggtggctcctggtctatatcctgcctcatgtcccgtcaacacagcctcggggtctgaacccagttggatctctcttactgagggtttctccaatgtccgggtctccggnttgtgagagtcacatgaaagatgtgaggccagctggcagcaggctcgtacgtcaactgaaactagaaacca

SEQ ID NO: 210817 - DNA, 422 bp, Homo Sapiens
tttttttatcattatctgaaagaatggattgtctggcttcttgaaatccatggcctcttactgggacaggaaaggcattggagttatgtccctagactagaaagagtatggttcatgaggtccctggccctctccataactctgcatttggtcactaaatattggtagaaaaagtatttgtccattactttacttgttccaccacctaaagccaaaggacttagaaggtaattaatagtgatacggatagaatgcaagccacagtcacctccatccttctcaccatctctcaagcccatgtccttgacctttggtatttacatccatgtgacacgctctacctgaaatgtcacctttttccagcctgtcaaagttattcatccttcaacactgaggcagaaatgcacctcttcttagaagcc

SEQ ID NO: 210818 - DNA, 435 bp, Homo Sapiens
tatttctccctagaaatcttaataagacaattatgccatcagacaatgttaagaagaacgatccttggagatcccgtaatcccactacccttctttggctcagagaggataatttgcctaatgatacattaaagttagtggcaaaacttaatttggagcctgatttcctactgacttccaatttagtgctcccccagtatgctaaatagaaagccctctgcaatatattaaatgtatactaaatgtatatatttaataatgtcatgtataaaatatgaataaaatgtccacataggaaattaacacatatataccttctctgataagcactcctctatgtgtcctgattatttactttctcttatcttttccttagtgttcctcaaattatatctatcctctaaaccagggatcagcaaactataacccccaggc

SEQ ID NO: 210819 - DNA, 454 bp, Homo Sapiens; identical to SEQ ID NO: 60410

SEQ ID NO: 210820 - DNA, 1000 bp, Homo Sapiens
ccttggaaattcaggaggatgaaaatgataaccttttccacccaaaatacactggagaggatttaacctgtactgtgaaaaatctcaaaagaagcacacagtataaattcaggctgactgcttctaatacggaaggaaaaagctgtccaagcgaagttcttgtttgtacgacgagtcctgacaggcctggacctcctaccagaccgcttgtcaaaggcccagttacatctcatggctttagtgtcaaatggggtatgttttgctgctgctgctactgttttttttttttttttcttttgatagatttttaaaaaatgattcattttagtagtgacaagccaaaaaaattgtggatggtatttgcagaagttttctgcattcggaatatatgtgtgagaaacatcctgagaattctacaaattggaatggacaatttcattaaaatgtaatcgtaatggacaattaaattttagtggaaattaaaatggatgatttttaagagtatctcatttactctatgattttcctgtttacatatttttttctcctatatttttaaggcatggatttgaatgtagtaatctctgcatcgttcattcttcaatagttcatccttaaaaaattagcaatacttaatagaaaaattttgatttataaagttaatattgaaaataaatttcaaaatttaggtttgttaagtaaactttagcatacagaacatttaagttgcaatgaattagggatagttttgtttccattggtgtttgttgtataaagtcttgaactttgggaaattttaacattaaagttcataaggagtttgaggttgtctggcaaaaggatattgtgcctcacctctgttgtgtgaattatttcaataaaatgaatacaattagaaggttgacaattaatatgtaaaagtgttatgcgtatcatttttactaatgtcataataatattaactaataggcaaaaaaaaaaaaaaaaaaaaaaaaaaaaa

SEQ ID NO: 210821 - DNA, 545 bp, Homo Sapiens
aagtcaaattactattccagttgtcatgctattggggaatgcaaaaggcaattttttagacacacaattacaacctacccctgtgggccaatgagaacccagccttcaaataaacaagcttctcattgttaacacagggttcaaaggcagggaggttggaggtgttttgcagggtatccagaattctgatcgctgaatactttagggcaaagagtaagatttcccacacctccccctaaatcttacaattccctgatgaggcaggaacatgggaaaaaaaagatacaggttaaattacaaagcagaaaaatatgcccagctagaagctaaagacctggtctcaaaacactgaaccgaggagcactgattccagcaatcagactggggtctccacacttccaaccccctgaatgcttcctctctacagcaggcacggcttactactgagttgtgactaattatcccccaccacaaaagtggaatgaggaaggattattcaaaagacaaaggctaagagtggagggttggggagagaagcaataaag

SEQ ID NO: 210822 - DNA, 501 bp, Homo Sapiens
gtcattaacatttatttcaattaaagaaatgtgaatccaggattaatgtaaggtgaaatattaaagtatctggcgaaagaaatgctattaagagtttaagtaaaatgtttgcggtaccagtgctatgtataacagacaaacattaacaaaattaaaaacacattctttttttgttttaaattgagatggagtcttgctctgtcacccaggctaggagcgcagtggcatgatctcagctcactgcaacctctgccacccgggttcaaacaattcttgtgcctcagcctcccgagtagctgggactacaggtgtatgccaccatgcctggctaatctttttgtatttttagtagagatagggtttcaccacgttggccaggctggtctcaaactcctgacctcaggtgatctgcccgcctcggcctcccaaagtgctgggattactggcgtgccccctacacctggccaaaagcattctgaagagaatcaaattctgataaac

SEQ ID NO: 210823 - DNA, 492 bp, Homo Sapiens
acaaattgtattattacacattcctagttgctgcttgtaatagaacagatttcaatctcagaaatgtttatctgagagacatagatcaggtttacaaggacaagaggtcaaagtcatgccacagacgatccacaccacctatgtatgcactctctctcttgcacacacacacgcacacgcgcacacacacgctgagtctcatgtgcttacctcgtctgactgccgctggtgttatatgtagcttccatgcctggaagaggcacatatggtaacatggtgtggctaaagtaaagcaaaagtacaaaagcaataggtaagggcagtgggataacaggaaaggttttgatgttattgtgggtattagcacatgatagccccaagaagacaagaaatgtcagttactcagaaagaggaaagctttccaaccaggagagttatatttatgtgcccatcactggaatggaggcagactgacaggaagattattttcta

SEQ ID NO: 210824 - DNA, 407 bp, Homo Sapiens
caatctgtttgggactttgagggctggggtgggaaggtagtggaatggaatagataaacagccagtcaagagctgtggggaggttgacagaattggggtgcaggtacatgtaggatacacagaagctttgtgtctgtggaggctgtatgagtctgtgggtgagcagcatgtctaagtgggtggaaacatgtatagctaaaggcaggaactcttcccatacagctaaacccttgttcaagcaatttaaataaacaagaacattttaaaaaattaaaaccccactaaaacaatccttgtggagcagttttcttgagtgcttaagtagagaccagattcaaaaaaggattaagagaatgtcgcataaccaagctgcagaaactgaaaccgagcggggtgtgaggggagat

SEQ ID NO: 210825 - DNA, 402 bp, Homo Sapiens
ggtaattttactgtttcaggaaaggtggaaagaatggggagtagaggaaagatgaagtaacaagcttttacaaaataagattgttgacctcaaactccactttgcatctcatccttacatagcagttccagaaggcctgggcttccccatgatgggcataagccatgagtgactcagtggtcatctgctgaatcatcatttactccgcttttagccacccccacattttctgtcaagactgattttctagatttcaccttaagacgatttgacaaggtcaagatcaatgacagttactgactgtggccattttccttgcctaaggagttttagtagtcagctttggacttgaatgtttcttatgagacaatttgtgacatccatattcacagtgacctttat

SEQ ID NO: 210826 - DNA, 430 bp, Homo Sapiens
tttttttttttattttccatatagtaaaatgcctttatttaaaaaagaagaggtacagtacattataattccaaggaaattttcgtattttaaaaatgccaatttttggctaaaaactcaaaagatttcatttaatacttgaataacaaggaaattcacaattaaggctgaaatactgttcatattattgtgtatttctaagcatgttattttaagcttgtgtattttaaaccatggttacagaattgtataggaatatattgaaggcataaccttatatttattggaattttggtttaattgtttagaatttcaaaatagtattgggatgtgaaacaggatgattatcactctgataaaaacaagactgaactgagtccttcactgtatttttctaaagaactcacttctagtgagtaagtgttcaata

SEQ ID NO: 210827 - DNA, 282 bp, Homo Sapiens
aagtttaagcaccacaattagcttaattcatcagaccaaaacaggagctgtgtcttctctggcaggggaatgatctcaggagtgcaaggatagatgttccctaccagctgccggcctaagtccaaactctcataccacccacgtcctgccccaggctcacaggccctagggaagccaagcacacaattcctctgagagcccaggcataagccataagccatacttcaccaccctagtttaaggatgctaccagagacacccaggaaatgacagaaatgatta

SEQ ID NO: 210828 - DNA, 464 bp, Homo Sapiens
gctcgacttttttttttttttttttgttaccattggtagtttctggtgttggaaactcagtaaaaagctgtgtctttcattatctgtcacttgtgcagtgctttactgtgctcagaatgttttcctatatacacttccatttgctcatcaaacaaccctatgagactggtgaagaaggtagaaatccagtcacagaattaatattagagcccacattgacacccgagttgtttgaaagaggtttataaaactatcatagttgggtgaaaggtttctttgcttattcctctttccttcaaagttacatatagcgcccgatactatgtaggaagtttcagtctactgaaattttacatcaattatataactatcatcttaaaaacagcagtttctttaaaatacatacacacacacacacacacacacacatatatatacacacaaacaaaaagataaagaaaagg

SEQ ID NO: 210829 - DNA, 437 bp, Homo Sapiens
ggtcgacgccaaagcgaggttttaaagaaaacgttgcagagttaagagtcgctttcttgtacatttttgcaaatgtcttttaatgttccctttagtgtagtgggaagaatggtgttgttttatgttttgtaaatttgttttgctctataaaaaatggttggcttcccacgtttgcttttgcagtccatctattgcagaaagctttttaattaaaacgcatcaaagaagacctgactttatacggagaagtgataagggaggagtatgttaataacctttaaagataattgtggatttttttgatactactgtaaaacttaaaagtactcttacatcgaaattaattgggttggctgggcatggtggctcaacctggaatcacagcactttggggggttgaggcaggtggatcacttgagcccaggagttccagacca

SEQ ID NO: 210830 - DNA, 459 bp, Homo Sapiens
gctcgacccagtcttctaaatactccatactagtctctggtattttgttataccatcctgaatggactaagacacatagggtctatgttacaactactcagctctgctattatagcacaaaagaagccagataatatattaatattaaacaaatgggcatggctatatccaataaagcttcatttacaaaaatagccagcctatggaccacatttgactaagttcaaacagaaataatcctctttaacaagaaataaaacaataccatttaaaggaagataacataagccagatgccttacaaggtattattcacaatgcctaccattcaattaaaaaattactagccatacaaagaggcaggaaaatctgacccataatcaagggaaaaaaaaaaaaagacccagcatttcttaatagaaattaataatagaactttaaagtagctatttaagtatac

SEQ ID NO: 210831 - DNA, 1000 bp, Homo Sapiens
agcaaaagtaaaatatatctcagaatttttagggttatgtttagcatttgaacctgtaactaggctcttgtagatttcttcactttaaacctcttttctgagccctgtttctgtaccagtgcccttcaaaactttaatacttcttaccatccttcaaaacatgaacaaactttaaagatggatcttggtgggagatgagactggttactaaatattaagtatgtgagtcagtggtcacctgggctccatgcccatggagacatgaaatctaaagcctagaatgtccattgctcccccaaacaaaaaacaaaagcaaaaacattagatctgaattaaaatgtaattttaaactgttgaaagtgacttttgtaaaatatgtaagaacatatttcaatacaattccaattagctgtttcggttgtgcattgatgtgaagtggtgagaatgttgatattaagaaccaatgtttcaggtacacaagttctaaataagctgatcaattcaattaaagttattcagtcttggctggacacagtgcctcatgtctgaaatcccagcactttgggaggctggggcaggaggaccgcttgagccccgggggtttgaaactgcagtgagctatgatcatgccactgcactccagcctaggtggcagaactagaccctgtctctaaaaaaactattattaggccgggtgcggtggctcacgcctgtaatcccagcactttgggagactgaggtgggtggatcacctgaggtcaggagttcaagatcagcctggcaaacatggtgaaaccccgtctctactaaaaactacaaaaattagccaggcatggtggcatgcgcctgtggtcccagctactcgggaggctgaggcagaagaatcacttgaacccgggaggtggaggttgcagtgagcctcgatcctgtcactgcactccagcctgggcaacagggtgagactccgtctcaaaaaaaaaaaactagttctagatcgcga

SEQ ID NO: 210832 - DNA, 1000 bp, Homo Sapiens
  misc_feature (744)..(744): n is a, c, g, or t
cgtggaattgatggtatctgttttgcagcatccagaagggggctatgccattgccagcagcagtgacgatcggatgaatgagcctccaacctctcttgggcttgtgcctcaccaggttcttgatcaatatgaacgagaaggatttaacttcctagccaaggtgtttaattcttcacattccttcttagaagacttgactggtcttacattgctgcatcaagaaacccaagctgctgagatctgggacatgagcgacgatgagaccatctgagatggccccgctgtggggctgacttctccccggccgcctgctgaggagctctccatcgccagagcaggactgctgaccccaggcttggtgattctgggcccctcctccataccccgaggtctgggattcccccctctgctgcccaggagtggccagtgttcggcgttgctcgggattcaagataccaccacgttcacagcttaaataataaaccttggcgcttggcccttgcctattggacctggaaaacgcccgcccttcgatacgggcatacgcgcctccgagggacctcttatggccgcgggcggccggtaaaaaataaaagggcaaggggggaaatcggcccgcccttgggggcggttaaggcacgtggctgtcccttcggcgcgccgcgacattgtggcgttggaaaagagagcgtgggcttaccagccgttgcccgaggcgtcgctcgcctttacatagggggcgantcacgtggagtccaaattcgcgccgggcaaggccccggaggtgccgagaccagtggggtttgtaggacgagggtgtgcgcactgccacgcgctacccccgggcataagttctacggccccccccgcggtttcaccgaggcccagcggttctcttttgaacaggggggtgcgccacgaagggagacctgtactctgtagccgaaccaccggctttctcttctcgccggccgataataccatgcgcgccgggcttgga

SEQ ID NO: 210833 - DNA, 614 bp, Homo Sapiens; identical to SEQ ID NO: 47886

SEQ ID NO: 210834 - DNA, 872 bp, Homo Sapiens
ctggaccggtccggaattcttgggatctaaacaaattgtggtatatccatataatggactatactgctctgcagtataaaggaacaaactgacacatgcaacaacatggattagtgtcaaaaacttggtgagtaaaagaagatagacgcgagtacctactgtatgatcctgtagacatgaaattctagatagaatttagttatagaaagaacagtggttgcctagggtggtaagaaaagggtgattgactgcaaaagggctcaagggagtgtttaggggtcatggaatgttcttttatcttgatggtagtgatgcttccataggtatatgcatttgtcaaaacttatataaccatatacttaataatgcatcatttgaaggtagttattcctcaaagttggcttaaattattttagcatttttaggccaggcgttgtgcctcacacctgtaattccagcactttgggaggccaaggtgggcagatcacctgaggtcagaagttcaagaccagactggccaacatggtgaaattccgtctctaccaaaaatacaaaaatcagcagggcgtggtggcgcacgcctgtaatctcagctaccccggaggctgaggcagaagaattgcttgaacccaggaggcagaggttacagtgagctgagatcacaccactgccctcctgcctgggtgacagagtgagtctccattaaaaaaaaaatagcatttgtatttaaatgggatacttctttttgttggggggtgataccgaggtttttgcatatttggacattgcatgataattctttaaagtatgtaaagaaatctagggagctccaaaaaagactcctttacttttttggccgggctaagaataat

SEQ ID NO: 210835 - DNA, 898 bp, Homo Sapiens; identical to SEQ ID NO: 43548

SEQ ID NO: 210836 - DNA, 710 bp, Homo Sapiens
gcctgggtggcgggacagtccaagaccagcctgccaacatgatgaaaccccatctccactgaaaatacaaaagttagctgggcatggtagtgggcccctgtggtcccagctactcaggaggctgaggcaggagaattctttgagcctaggaggcgggggctgcagtaagccaagactgtgctgctgcactcctgcctgggcaacagagcaagactccatctcaaaaaaaaaaaaaaaaatcagttgtatttgttccaaaacttgtttttgcaagttgtacttaataacgatgtaatttaattcaatattaccaaaatcaaacaattatgagtgtgaagagagtaatctctatgaaaaaaagttgaaaacttgggaaagacctgataaaagacgtgttattaaagaaaaaaatgctgtggaattaggtgtgggtaaagcaaccgtgaatgtttgggagggagagaaaagtgtcaaaatataggactttgccttcattttgtttcacaagtgtcttgagtcctcattctactaaagctgaaattgataatgcttcttgctgtgctaatcaatgtcctctgtgcagcctgcatcagcaggcccacacgcaaagaaaaggtcttatcctgacatcaaaggagtgatgggtagataaacctgtttatattttaaattaaaaataaaattttgaagataaaaaaaaaaaaaaaaaa

SEQ ID NO: 210837 - DNA, 866 bp, Homo Sapiens; identical to SEQ ID NO: 47763
  misc_feature (779)..(779): n is a, c, g, or t
  misc_feature (795)..(795): n is a, c, g, or t
  misc_feature (834)..(834): n is a, c, g, or t
  misc_feature (839)..(840): n is a, c, g, or t
  misc_feature (848)..(848): n is a, c, g, or t

SEQ ID NO: 210838 - DNA, 907 bp, Homo Sapiens; identical to SEQ ID NO: 58382
  misc_feature (662)..(662): n is a, c, g, or t
  misc_feature (902)..(902): n is a, c, g, or t

SEQ ID NO: 210839 - DNA, 608 bp, Homo Sapiens; identical to SEQ ID NO: 40630
  misc_feature (593)..(593): n is a, c, g, or t

SEQ ID NO: 210840 - DNA, 669 bp, Homo Sapiens; identical to SEQ ID NO: 40750

SEQ ID NO: 210841 - DNA, 931 bp, Homo Sapiens; identical to SEQ ID NO: 47198

SEQ ID NO: 210842 - DNA, 912 bp, Homo Sapiens; identical to SEQ ID NO: 45296
  misc_feature (727)..(727): n is a, c, g, or t

SEQ ID NO: 210843 - DNA, 850 bp, Homo Sapiens
  misc_feature (850)..(850): n is a, c, g, or t
ctccggtggccttcaaggtcctttatgagtgttacccctctacacgtccacaccactcaccacacatacatacacatgcacacacacacacatgcaattctacctttttctaacaccatctcttatctctcattattctgcctcttacttaccctattatggctcccaagaaagttcctgctttagtgttttgttccctctgccccagagagctccccttagtgatctcagttcaaatattatcttatcagtaagacaaacccttctcccatctgccttccctatcccctgtacctgacaatctatgagtttgcttctttatttctgtctatacttccccctccccagccccaaacatgcccatcacatgccctagaaggtaagtcccatgaaggcaggggctttgtcagttttgttcatttggtatttctggcatatatattctctaaatatttcttgaattaatgaactgaaaaatgtgtgttaaagttgctaagtgtaactgtatcatactttttttgtattttaaattttaaaataaaggctaatatatttagacaggatttccaaaaactttgtcttcaaattttaattttcttcctaatattcttcacattaaactatggactctaattttctggataaaatatcctgccttatggaaatgaaatatgaaattttattaaaatgctgctatattacataagttgcttcattaagctaaaaatggtttttattttttgggtgtgtccaatggccacttgaaggtataagattttgactttcagaaggagagatatcactgttctttaaaaaattatgtaattttcatggattttctttaggaacn

SEQ ID NO: 210844 - DNA, 845 bp, Homo Sapiens; identical to SEQ ID NO: 40617
  misc_feature (730)..(730): n is a, c, g, or t

SEQ ID NO: 210845 - DNA, 854 bp, Homo Sapiens; identical to SEQ ID NO: 55799
  misc_feature (786)..(786): n is a, c, g, or t

SEQ ID NO: 210846 - DNA, 580 bp, Homo Sapiens
tttttttttttttttaaacatataatttttttattttgagcgtgacacttctccactagatagcaaggaaaagtggtaacaattacacattacacaaaagtactgtaccattgcctttatcttgaaggtttcggaagcctctacagttaataagttaaataaagggcttgagtacataaatatttgtctaggaaccctaccgtatctacaacacagtaagaatctacgggaggacaaacttttaccataccacgctgagtgcaattgcgttataacatttcaaatatacaaagctctgttcttttctttttttttttaataacaatggtatgtacagaatcaataatcacagtttggtgacttcaacagtccatattctagcagagtattatttccctttggtttgatataaaaaccttggttggtgtatgataaagaagagaacaagaacaagacgcccctttcctttaagtgcactgttagctatcttacaggctcgcatttgcttcccgggccctggcttcacgctggggccctcgctggggagatcaacttcgagcgccaaaatgctatttaaaaa

SEQ ID NO: 210847 - DNA, 566 bp, Homo Sapiens
tttttttttttgccacaagatatattttattccaacataaaatatgctcatataaaaataactcaggaaatataaaaaaattacaaacatttttgcacagatcctctatataaaacatttacctggggttaaacactgaaaatacacttctgaaactagtatagttgaactattttcttggataccaagtatacacaaaataaaagcccttcatctgggagagcatgggcaggagggaaaacaacttttagcatcaatctatatttatttctctgttgctcgaatataaaccaatgatgacaagaggagaaactctgggggtttatttaacaaaattaaattcacatttctgagcccatcatagtgcatccaatgtccaccaatctggaaagctgcagaataatgatgttcctctttgttaaataatgtggcaccttccaacaaatacttgtgatcagacaaatccaagtaatagggtacatacgccagatcttcagatttccaatgttgcatatttaagacaacaaaagggggtgcccatggcagaaaattcgttgggaaaattc

SEQ ID NO: 210848 - DNA, 404 bp, Homo Sapiens; identical to SEQ ID NO: 53053

SEQ ID NO: 210849 - DNA, 384 bp, Homo Sapiens
gtatttttagtagagactgggatttcaccatgttggccatggtctcgaactcctgacctcgtgatctgtccacctcggcctcccaaagtgctgggattataggtgtgagccaccacgcccagccaatatatttttacctacatcattttacccactgtagaaaatgcatcagaaagggctccaaacattatgatatggtcaatcttactctcatggagtagtaacctataggaaagagtaaacttcctgctgacttaagtatttgtgtctgtacctaagttcactaatgggttatgctttcatgagtactagttttaatatttatctatgcaacttgtgttctgtctgacagaaaaatacacttgtttcctgaggccacactgc

SEQ ID NO: 210850 - DNA, 487 bp, Homo Sapiens; identical to SEQ ID NO: 60272

SEQ ID NO: 210851 - DNA, 884 bp, Homo Sapiens; identical to SEQ ID NO: 54199

SEQ ID NO: 210852 - DNA, 1000 bp, Homo Sapiens
atgttctcccgacaccaggccatgccattactggtgaccacgaagatgagggagctgtagcgagctcggaaccagtccagggcctgctgtaggtatcgccggtcggccaccacccccttccacacttttggcatgacatggacatagtcccctcggcgaacatggacccctacaaaggtgcccggccggctcccgttcacctgcaggccccgcaggaacttctgggcctcctcccgcacgtggtcgtgcagggtgaactcctggaggatctcctggcggaggtggtggtagaaggtctaggagcaggggtagccggtgaagcggacgtactcccccgggatgtggcggtattcctcctccatccagacgttcaggtggtagttctgccaggggatcctgctggacgtggcgctttgcaccaccggcagggtggattctgaagatgggggccagggtgctggtgaatctgggcccgggatgaagggcgggcccgcccggttcatctttggccaggggcatacagatgtggacggaacttcgcccccattctgggatcccccccgggcgggaccctaattcgccatttggatccggaccaccattccccccccttgaaaccatgtggccttggggaacccccaactcggcccttttttgaaatgtataggaaggggcttagaccaacctgggcgaaataccgaggcaacccagggtaaaactttcccccaccattgggactctgaaaaacaaattcacaattaagaccccgtttgccttgaaaccgttctaaaattataaaacgggggaaaaacccgttcgaaaaaaaacaaacaagagcaataaaacaggcggcccactcgggcaaaacgcaaaaaaagaggtctatcttggaaaccaaaccacagcaatgtgtcttccccccgggttcagagcacaacccggcattccacggctccattcttggaaaaaatctaaaaggccctcgcggctccactttact

SEQ ID NO: 210853 - DNA, 960 bp, Homo Sapiens; identical to SEQ ID NO: 52210
  misc_feature (26)..(26): n is a, c, g, or t
  misc_feature (798)..(798): n is a, c, g, or t

SEQ ID NO: 210854 - DNA, 929 bp, Homo Sapiens
  misc_feature (861)..(861): n is a, c, g, or t
  misc_feature (879)..(879): n is a, c, g, or t
  misc_feature (900)..(900): n is a, c, g, or t
  misc_feature (924)..(924): n is a, c, g, or t
gagcggcgccttttttttttttttttcaagtcaaaattgggtatcttttatctgtttcttcgttgtggtgaagaatgttgcctggattccttccatctaaagacttgattgttagacctgtggcagaactctagatctgactttagccttggggaagcaaagaggacaaaacctaaaagctcaactttctgcatggtatgcatgattcaatgagctctttctgctttggagtctgttggcttggagactcggatatgatagggcttcagttcctcaggagggacagaatctggggtattgctcatgaggtcatgtccccggaaggactttgggaaggctatgacatctctgatgcttggagatccagtgacaaggcatatcagtctgtctaaccctaaggcaattcctccatgagggggtgccccataatctaaagcctggagcagatgggagagcattttcacatcctcctttagtaaggttgccaggatataacgctgcagctctgcattgtgaattcgaattgaaccacctcctatttcattgccatttaaaaccaagtcatagtgttggctacgggcctttttgggctcagtgtacaggagatgtatgtcactggggtggggagcagtaaatgggtggtgggccgattccagctctctgggattttcctccttgggcaggaagagtgggaaatctaccacccaaaggaaagagaacagagtgggggtcacggagcaccactcctcttgtttctagaaggtcagcacattccagtcgtaattttcctaacaagagcatgctttattgtgctctccagcagttagtaggaccacatcttccctcctgggtctcccattnagtctgataatttccagnctttgtgactccattatgaanttaagcactgggagaattccagtnttctt

SEQ ID NO: 210855 - DNA, 990 bp, Homo Sapiens
ttttttttttttttagaaaaccttgttttattcagcccagacctgggcaatctagctctgtggtatggccaaagtataaaaaataaaaaccaacaacaacaaaacaacactgtagagaaaagtgaagtataaaatggggtctggcatccggaatccctgtggttttcatccacgttcgctccctgaggccggcagggagggatgcccctccgtgcctgtgggttgggggctgggcccctcggcgggaggctgcccggggagcagggcctgctttggaaggggagagattggccatctgtccctcccggagatcaggattggacaattttgcagtttgttgcagaaacgtagcgacctgtgtagtgaatgttgcatctcaccacgttgttggtgaagtcagactccaaaacaatatactttgggttcacgtgcaccttgaggatgtagttcccaggctgcacgtcggttatgtcgatccactggcagtcgatgtccgcattgtaggtgtcatagcagcctgggctcaggccctgggtatgagaggtgcatgcatagcgcttgaggttgccgaagtcacaggtgctgtcctccaggcagaaactggccttgtggccctcggccaccttcttggcttgtgggctgcatccagtaggtcgtaatgggctgaactcctccatgctgtggcaatgctggtgggagctgtgcccactcccaggtggtgccctggcccggttgggggaagaaaatctcgctgggccccttggttcttcaacgcgctgggggggaagccgcacttaagcaccccgcacatctcctaaatccggggggccctcacgggggcataagggcttggtgccggggcacaaaaaaaatcttcttccttcccggcgagacaccgagcggcgcaagcgaagagtaacaagcgggggggggttctcctctctctgctctggagaatttttttatactaccttgggcgccccccgagct

SEQ ID NO: 210856 - DNA, 766 bp, Homo Sapiens
  misc_feature (659)..(659): n is a, c, g, or t
  misc_feature (703)..(703): n is a, c, g, or t
ggacgcgtgggcgcagctggccggaacaggaccgtggaagtgtttgacctcaacgccggctgcagtgcagcggtgatagcggaagcccactcacggcctgtccatcaaatctgccaaaataaagtgtgagcgccactttgaagggcatccaacccgcggctatccatgtggaatcgctttcagtccttgtggacgattcgcggcttgtggggccgaggacagacacgcttacgtgtatgaaatgggctcaagcacgttttctcaccggctggctgggcacacagacactgtcactggagtggccttcaacccatcagcgccccagcttgccacagctaccttggatggtaaactccagctctttctagctgagtaaccactgacctgtgagctgggtccaggaatgctgtgaggaacaacttaaaagtaagaagtagtggttcatccatcagggggccagaagcagcaactgtttttcatattttgagacttgcctcagatttcccccgtttgcaagctcctcccctctgtgtgtgccatgtcagagttttatgtctttctgctcctcaaaagggatccccttcattgggaaaatggaaatggcgtccagtacttctgcacagaatttggtaaagttaaaacaaaatatctttcaatanaacataatatagtatttgtttgataattagagttgcaagacaanagagagaatttcttttgggcagtgaaaataaagcagttaccagtcaaaataaaaaaaaaaggc

SEQ ID NO: 210857 - DNA, 905 bp, Homo Sapiens; identical to SEQ ID NO: 55034
  misc_feature (688)..(688): n is a, c, g, or t
  misc_feature (704)..(704): n is a, c, g, or t
  misc_feature (761)..(761): n is a, c, g, or t
  misc_feature (820)..(820): n is a, c, g, or t

SEQ ID NO: 210858 - DNA, 944 bp, Homo Sapiens
ttttttttttttgaggtggagtctcactctgtcacccaggctggaatgcagtagtgttatctcgactcactgcaacctccgcctcccaggttcaagtgattctcgtgcctcagcctcccgagtagctaggactagaggcatgcaccaccacaccaggcaaatttttgtatttttagtacagatggggtttcaccatgttggccaggctggtcttgaagtcctaacctcaggtggtccacccacctcggcctcccaaagtgctaggattacaggcatgagtcaccatacccggccggttatctgcagttttcaattctcagatttgctacatgaatatttttagcctacagaattcagattagctttgaggaaatgtggtgtgagagacacgtgtaaccagcagaaaatcagcttaggctacccaccttagcgttttgttcttattcaaacaggcaaattcttagtaaataagaaagaagtaaagtttgatctcaagaaaatatgagggaaggctgaaaagggccctgggttcagaaagaagggttactaaaaaggagataagccgctggacaacagatctccattttgcagaatgctaagacattgcacttagtacctcctgtttcccatgggttctgatccagaaatgtgcccctgggaactgagcagctgagttaaaatataactcaaggcccacctgagtcgccaccttcctgaggcaccgtgccagcaaggtgcaccagtgtggcagacctgggagactcactgtccccctcaggcttggctcatggactccgacaccccccaggggaaatgcttccagcccgggattagtcattcaaggggcccttcatacagacaaaagggaacaactgcacattaggggattttctaaaattggggcaagtccctgggcccctggcccccttaacgaaccatatgga

SEQ ID NO: 210859 - DNA, 673 bp, Homo Sapiens; identical to SEQ ID NO: 40850

SEQ ID NO: 210860 - DNA, 1000 bp, Homo Sapiens
  misc_feature (856)..(856): n is a, c, g, or t
  misc_feature (1000)..(1000): n is a, c, g, or t
tggagagggccggggtcggggaggttggggggtgtcagccaaaacgtggaggtgtccctctgcacgcagccctcgcccggcgtggcgctgacactgtattcttatgttgtttgaaaatgctatttatattgtaaagaagcgggcgggtgcccctgctgcccttgtcccttgggggtcacacccatcccctggtgggctcctgggcggcctgcgcagatgggccacagaagggcaggccggagctgcacactctccccacgaaggtatctctgggtcttactctgtgcaaagacgcggcaaaacccagtgccctggtttttccccccccggagatgaggggatacgctggattttttgccctatgcgccctggcccctaggttcgtaatggaattaacgggccatggatagcctgcagcgaaaggcgacggagtcgttgcggggaggggggggggtcgctttgaagaagagtggcgtcggggggggcggcggcgttgtgcctcccccgggccggttggtgccgggccgaaccgcgctccgggtctaggcgggggccgcaagtcgcggcccgcggggggcgcgctgggcgcggcgcccgtgctccgccgggttcgccggacaccctgggacgcagaccgggcggggtgtaggggcaggtgtcggctggcggggcgacgcggttatcggggcgggcggggtggagagcagaggtgcttgctcgcccagcggcggtgggcgatcgcgcctggcggggcactgcgggggcgggacgggcagcttcactcgccctcggcggtcgcgacgagcaggtagcgctgggtgaagagacggacgtggccccgacaagggagggtccnacccgggggaggcggtgccccgcatatgagtcgcttgtgaggctggggggctgtttatgcaggcagagggacatcggcccctcctagcaacgcagtcggctccggtcaatggggcgctaaggcgtgggcgtggcgcgcacagtn

SEQ ID NO: 210861 - DNA, 732 bp, Homo Sapiens
  misc_feature (689)..(728): n is a, c, g, or t
aggctggtctcaaattcctgggctcaagcaatcctcccaccttagctaacctcccaaagtgctcggattataggcatgagctgcatgcccagctaatttagtgatttttaaaaactgagctggtaattataaattctcttcctggaacttctgactttctcacaattggaatcttttgacaaaaattatcagtaatgggaaaactttgtgtagttgtcatttttcctcccatcagtgtgatagatatgattggagttatgttggactgatattttgaaaaaagatttaattatagctattaataaagacatttaaactactgactatgcatttttattcttttgggagggtttaatgtttatagtttaaagcaaactgttgtttttaaaaaagtatctaacagggccgggcgcggtggctcacgcctgtaatcccagcactttgggaggcctaggcgggcggatcacaaggtcaagagatcaagaccatcctggctagcatggtgaaaccctgtctctactaaaaatacaaaaaaatagctgggtgtggcggcgtgcgcctgtagtcccagctactcgggaggctgaggcaggaggatggcatgaacccgggaggcggagcttgcagtgagccgagatcgcgccactgcactccagcctgggcgacagagcaatactctgtctaaaaannnnnnnnnnnnnnnnnnnnnnnnnnnnnnnnnnnnnnnnaaag

SEQ ID NO: 210862 - DNA, 512 bp, Homo Sapiens
  misc_feature (484)..(492): n is a, c, g, or t
  misc_feature (494)..(494): n is a, c, g, or t
  misc_feature (496)..(497): n is a, c, g, or t
ctcagtcctggtggactcaaggcagatgatggtgctgaggctgtgggagacgagggaggaggctcaggggtggctttcacctgggctctgtccatggaggtgaggacagtgagatagttgggcctcagtgctgtgtggaccctttcttgtctccctgatgactggatggagggcctggaggaagaggggtcttagaggattcactcatgtccctgggggagggggactcactccaggtctcaggtctgcactgacacatttgtttgtggcttggggctgcctgctataaactattgggggttcgtccattttggagttataacctaaggcagaaactcagatggttcaaatgtcctcttcatgaagcaatgttatcagcgtataatttagattgtcttgcaagagtctcatttgttgtttttctaaatgcctgccaatattgtttgaaaatctacaaatgtgataaatgtatcttcaaagttannnnnnnnnanannaaaaaaaaaaaaaaa

SEQ ID NO: 210863 - DNA, 933 bp, Homo Sapiens; identical to SEQ ID NO: 55740
  misc_feature (669)..(669): n is a, c, g, or t
  misc_feature (812)..(812): n is a, c, g, or t

SEQ ID NO: 210864 - DNA, 686 bp, Homo Sapiens; identical to SEQ ID NO: 52658

SEQ ID NO: 210865 - DNA, 977 bp, Homo Sapiens; identical to SEQ ID NO: 42218

SEQ ID NO: 210866 - DNA, 856 bp, Homo Sapiens
attttattcttgatgtagctgaatgtacgactgacttttgttccactcttccattcagaatctttcttggaggggctatgtggcaggaaattatagttctcttctgttatactctcagtcagattagcactggtattgtggaaggtactgtggaagggccgtgaattgtccaatccaggatggctgattgtcattaatgagatggattttgtcaatggagaggaaatggctgatgtacagtaattaaatccctgctgcttagatctgtgacatatctgctgatcaaacatcctatgttctctctggtctgactccagatcctcttctgaaagtgacaccaaagagtcaacccgttcctcaccactgaatgggtgtctgagctcttcggcatttgcagagcttacttctagagatgaggatggcttgtttccgacaccagctcctcctgtcaagccttctagactgaaacttctcctatgaatgggaggtctcctgacaacatccccaagaactcgcattgaactccggtggttcatttctgcatcgctggctgcatttttcccaggcccccagctgtgcctccggaagggagaaagagagcgcatggagctccttaggacagagcagtttgcaggcacttcagtgatactgtccatctcctcctccctcacgtcccctgggtcagcaggctcactctcactttctcgaccctcagctcccatccatggctgtagaatccatcaaggctttgccgatctcttgacctgtttggctttaaaatctgggagagagacacatcactgccatgaaaaagaatgtccggtccagtgaaagcggtgtccctcggggggaagaa

SEQ ID NO: 210867 - DNA, 837 bp, Homo Sapiens; identical to SEQ ID NO: 47210

SEQ ID NO: 210868 - DNA, 901 bp, Homo Sapiens; identical to SEQ ID NO: 54028
  misc_feature (764)..(769): n is a, c, g, or t
  misc_feature (774)..(779): n is a, c, g, or t
  misc_feature (781)..(786): n is a, c, g, or t
  misc_feature (790)..(790): n is a, c, g, or t
  misc_feature (792)..(793): n is a, c, g, or t
  misc_feature (798)..(799): n is a, c, g, or t
  misc_feature (802)..(802): n is a, c, g, or t
  misc_feature (830)..(830): n is a, c, g, or t
  misc_feature (870)..(870): n is a, c, g, or t

SEQ ID NO: 210869 - DNA, 860 bp, Homo Sapiens
  misc_feature (646)..(646): n is a, c, g, or t
  misc_feature (836)..(836): n is a, c, g, or t
agtctcgagttttttttttttttttttgtgagttaagggtcttgcgaggtcattctggacttggggtgggccttaaattcaatgaccagggttcttataaagagagcggccactggaagacggaggagagactggaagatgcagccgcagcaagggacacggtggccaccagcatgggaagaggctgggagctgccccagagcccctggaaggactgtagccccgctgaccccgattccagatctctggcctccactgagagccagcctgtcgggggcagccctgggaagctagtgtggcagggagggcccagcccggctgggcgggtgcccgggctttagcagagggccagcgcggtctcggggtcccccacgatgtccctgtgcaccagcttaaaggtgtcaatgaacagctccatccagtcctgccgctctaccccggtggcgaacttggcccgctcggcggtgtagaccagcacggccaccagctgggagtaggcggccgggtcctgcgtgagctccgtggcgtttagcaactgttggatcaggggaatggtcctggggaaggtggcgtccggcccctcttccgtgcggaggaaggtgaccgggggctcgccgccaggccacggtgcatctgtttggcaggnaaggtctgggcacacgatctgagggtccgggcagaggacgtcctccatgtcatcgatgaacttctcagcgaccagttcggaagaacagcgtcatgtttgcgcacctgcctgtgggcttgtcgcaaggcgatgggaattaaaagggttttcacctctccgtggcctcctccgtggggaacttgttcccccntatgcccgattggcccgtcacgtt

SEQ ID NO: 210870 - DNA, 941 bp, Homo Sapiens
gcaaagttaagagaatgaggagcatgtcagtccctctccaatcaataagagaaggctaaggaaagagtccttccctatgtagactgtggtttaccccattctttccattcccagtctaccatttcttgggactcaggttccagggtttacatttgaccctaaactttgggcttctaaatctgtctgggtgctttggtgtcaccctgagggataatctaatgtgatgagatgaacccagctccattccataggcaggcaggtcactgcaggacacagggatctctgaactcctgggctgaggatgatttgctccctgctgtagaatctgccattccttcccttagctggttcagaaggtctctgctctcactgggaggcaagttactcaggaagtatggaggggccaattccaccagcctaatagagagagtcataattagatgatctgcatcttctctctctctgtctctctctttttagagacagggtctcgctctgttacctgggctggagttcagtggcatgatcataactcactgtagccttagactcccgtaatccttagccttagactcaagtaatcctcccacctcaatctcccaagtagctgggactacagggtggtttcaaactcctagcctcaaggactcctcctgcctaggtctccaaaagtgcatcttctcttataatgcagacttttaaacttctcaccagcccttccacaaatcctgtctcctcagatcatgtttttactaaccactaagatcccttccctccgcctctctaactccccagccataattttggcccccagggagaggaattagcagtataggagggatgtcagggaaactcacatctgggggttgaatctccgcaaccaatggaaagggagttggcctttgggaaatgcgggaaatttgtggtaacagcccccccgg

SEQ ID NO: 210871 - DNA, 954 bp, Homo Sapiens
  misc_feature (7)..(7): n is a, c, g, or t
ttgttcntgggcaacaaagcaaggcggatacttattctggtagcagggtggagtttgaactgggcagttacctctgctcaagccccttgaagaatttcagattccctgttaaccatggaggcatgggctggaagctgggtgtgggggcaggcaagaagagactgacaggagagtgaaaaatgttttgataacattgtactggctgggaagaaaagcacaaagcaacccgtactataatggtccccatcttaatttgaaagcgtttgagaatcttttaggacaagcactgacgaaggcactcgaagactccagcttcctgaaaagaagtggcagggacagtggctacggtgacatctggtgtcctgaacgtggagaatttcttgctcctccaaggcaccataagagagaagattcctttgaaagcttggactctttgggctcgaggtcattgacaagctgctcctctgatatcacgttgagaggggggcgtgaaggttttgaaagtgacacagattcggaatttacattcaagatgcaggattataataaagatgatatgtcgtatcgaaggatttcggctgttgagccaaagactgcgttacccttcaatcgttttttacccaacaaaagtagacagccatcctatgtaccagcacctctgagaaagaaaaagccagacaaacatgaggataacagaagaagttgggcaagccccgggttataacagaagcagatggaacattttcaagactctttccaaagattttatggtgagaatggggagtaagtccttgagtgatgtcagccccgaaagaagtttcaaaacttgcgtccacctgccttaccgaggagatgccaaaaaataaaattccccatttaaaaagaaaccagaatccgaaaatggccagggatgtaccctttgcaaaaatgggaaaagattcgtccacaaaaaga

SEQ ID NO: 210872 - DNA, 904 bp, Homo Sapiens
ccacggacatgtccaagcacatgaccctcctggctgacctgaagacctggtggagaccaagaaagtgaccagctcaggggtcctcctgctagataactactccgaccgcatccaggtcctccggaacatggtgcactgtgccgacctcagcaaccccaccaagccgctggagctgtaccgccagtggacagaccgcatcatggccgagttcttccagcagggtgaccgagagcgcgagcgtggcatggaaatcagccccatgtgtgacaagcacactgcctccgtggagaagtctcaggtgggttttattgactacattgtgcacccattgtgggagacctgggcggaccttgtccacccagatgcccaggagatcttggacactttggaggacaaccgggactggtactacagcgccatccggcagagcccatctccgccacccgaggaggagtcaagggggccaggccacccacccctgcctgacaagttccagtttgagctgacgctggaggaggaagaggaggaagaaatatcaatggcccagataccgtgcacagcccaagaggcattgactgcgcagggattgtcaggagtcgaggaagctctggatgcaaccatagcctgggaggcatccccggcccaggagtcgttggaagttatggcacaggaagcatccctggaggccgagctggaggcagtgtatttgacacagcaggcacagtccacaggcagtgcacctgtggctcccggatgagtctcgtccccgggaggaattcctggttgctggaagccacagcagccccctctgccctggctcttccaagccccctttctccctgcttggaggaaccctgtctggtttcaaaacatgccccggggcctcccggggcctccccctcca

SEQ ID NO: 210873 - DNA, 926 bp, Homo Sapiens
agaaccctacaatgtggacatgtgggaagggcttcagtcggagctcagatcttaatgtacactgtagaatccacacaggagagaaaccctataaatgcgagaagtgtggtaaggccttcagtcagttctccagccttcaggtgcatcagagagttcacactggagagaaaccatatcagtgtgcagagtgtgggaagggcttcagtgtaggttcacagcttcaagcccatcagaggtgccacactggagagaaaccctatcaatgtgaggagtgtgggaagggcttctgtcgggcctccaattttctggcacatcgtggagtccacacaggagaaaaaccataccgatgtgatgtgtgtggtaagcgcttcagacagagatcctaccttcaagcccaccagagggtccacacaggagagagaccatacaaatgtgaggaatgtgggaaagtcttcagctggagctcataccttcaagcccatcaaagagttcacaccggagaaaaaccatacaaatgtgaggagtgtgggaagggcttcagttggagctcaagtcttatcattcatcagcgagtccatgctgatgatgagggtgacaaggacttcccttcatcagaggattcacacaggaaaactcgataaaatatgttttactatctcagatgggtgctgaaatattttaataatcagagctatcatagacaaaacatttgttttatagagtcagtagttcagccaagtgattgggagacacacagcagagaagcctcacaagagtggagacatatggactgcattcagaacattgaccattagctgatacatgcagacaagaagatcaaggaaggatgagtctgatctggagtaaatcagaagtactaggatggaaatgctggaatctgtttccactagattatagatcccagg

SEQ ID NO: 210874 - DNA, 1000 bp, Homo Sapiens
  misc_feature (763)..(763): n is a, c, g, or t
  misc_feature (856)..(856): n is a, c, g, or t
tgctgagaggaaacaggaaacaagactgcgaatggcgctcaggcagggagcagggagtggcgtttggcttgcacgttcccatgtggccagatgctggggccactttccttctgtctgctggtgactgcagtgttccccctcctcctcaccacggggctcctgtgagtctggggggcacctctttctggcctgtgcacctctctctggcttataaaggtgcctggcctgtgccagcccctccttgttgcgcctcaccgtggggaccaggtgaggccggctctcccacgtggttggcccgggaaagctgcccacagcctcagcatcttcaggacttaccgatccagagcctcccgggcttctccgggggcctggaccaactcttctatttaagagaaccctcagatgaggtacctggagccctcggggttttggttcggaggggatataaattaatttgagaaattggaaggaaggacgttggcccactggcaggagggagaggaggagagagagaggccccagggcgcccacgggccgggggggggggaaacggagaggaatggaaatgggccccatgggactaaatgccggcattcccgggcccccagacgcctttggtacgagaactggaccgatactgcgcggactgcgccgatggtgatgaggacggtggcgaagaagtcctgaggggagggggacgcggcggcggcggcagggcggggaccggtgcggggactgaggcggcgcggcacagtccgacggncgaccaaggagggacggcgcggcggcgatgtcgcgcagatgcacgaggagagccggcagcggcgacggacggatgcgcaggcacggcgcgtcnccagggatgtagcgagctctacacgaacactgagagagaacgctccactcgggtgacgcgcgtggtggagtgacggagcggagatggccacgcggaccgcgatggcgcggcagggccgaggccgcgccagacggcgcgaggatg

SEQ ID NO: 210875 - DNA, 1000 bp, Homo Sapiens
ccgtccagcctcttaggaggctgaggcaggagggttgcttgaggccaggagtttgagtctagcttgggcaatatattgaaaccttgtctcttaaataataattattattattgttattcttgacaggccagtgtagaacaggtggggcatctgtggtatgacagaactgggttccaattctgtcccttcacctgtcccaggttcctcatctgaaaactgtgacccagtaaacctaatttcatgagcagctttcattaaaattgaaataatgttggaaaatgccttgtaaccgtgcttgatatagagtagttacttagccagttatttcctctcttcttccaattcctaacaaaatggaaaaacgtttggttgctaggaaagagctctaaggggattttgttgttgtttgagacaaagtttggctctatcgcccaggatggagtgcagtggcacaatctctgctcactgcaacctccgccgtagacagggagccaaccatagtggggtgcacctggtctggagctccaggctacttaggagggctgaggtagcgagggttggctctttggcccagcacttggaggtctagcctcgggggcgaataatatttggaaacctatggccgccgttacaactgacctaggtaagggcctcggggccagcgggcttaatggcccggtgggtccgccccatatttgcgcaaggcccgaatgcaattgcgatcccctttggaccccccctgaagtggagacaagcggccccggggggaaaatggccagacgtttcatccggcttttatttgccccgttccccccctgtctagaccccccctttgcaacaccctaccttcttgtttctcttcacgcgaaagtcgcgggcgacgtatctattaacgggcccctcggcgccaccggataaggcccccccctggctgccaccggcgcaagggacccaccgccgctggacgaccacgcgtgccgagacaccttcggttcccccc

SEQ ID NO: 210876 - DNA, 689 bp, Homo Sapiens; identical to SEQ ID NO: 43719

SEQ ID NO: 210877 - DNA, 702 bp, Homo Sapiens; identical to SEQ ID NO: 41410
  misc_feature (675)..(675): n is a, c, g, or t

SEQ ID NO: 210878 - DNA, 447 bp, Homo Sapiens; identical to SEQ ID NO: 58977

SEQ ID NO: 210879 - DNA, 912 bp, Homo Sapiens; identical to SEQ ID NO: 47999
  misc_feature (625)..(625): n is a, c, g, or t

SEQ ID NO: 210880 - DNA, 936 bp, Homo Sapiens; identical to SEQ ID NO: 54302
  misc_feature (662)..(662): n is a, c, g, or t

SEQ ID NO: 210881 - DNA, 904 bp, Homo Sapiens; identical to SEQ ID NO: 55105

SEQ ID NO: 210882 - DNA, 927 bp, Homo Sapiens; identical to SEQ ID NO: 54758
  misc_feature (711)..(713): n is a, c, g, or t
  misc_feature (715)..(732): n is a, c, g, or t
  misc_feature (737)..(738): n is a, c, g, or t
  misc_feature (751)..(752): n is a, c, g, or t

SEQ ID NO: 210883 - DNA, 909 bp, Homo Sapiens; identical to SEQ ID NO: 45739
  misc_feature (828)..(828): n is a, c, g, or t
  misc_feature (843)..(843): n is a, c, g, or t

SEQ ID NO: 210884 - DNA, 917 bp, Homo Sapiens
  misc_feature (611)..(611): n is a, c, g, or t
  misc_feature (839)..(839): n is a, c, g, or t
  misc_feature (861)..(861): n is a, c, g, or t
ccctccgtctccttgactctgggtgggctgtgtgacttttccttgctcaatagaatgagaaggaggtggcgcaccggctacaaggctagaccgggggctcgcatatctccacttgcagctgccactgccattagaagaacttgctcagccagctcctgggccccaggaaaaggacaagtgtcacccagaacagagccacctccagctgcactcagctccagaagctggcccggccggtccagtacaccttttaaataatgtcctctacgtgccggtgtggaagtagcccggatgcaattgaatgaacaacagacggtgctttccaggacggcgctgtgctttccaggatggtgctgtgctttcatttgggtagctcctctgtgagcctcccagcgccgactgcagagcccccactctccagcctgcaagaccccgaaattcaagccacacaaagaaaggaggagggggccgttggcatttactgaaccttataaaactgtcagcaaaacagcccttaggcttggactccctgctagccgggttttacggtgctgaagtcagcatcttgattcagctgcataaataatctcctgcagtcctgcaaggcctgnggtaggagagggtatggggaccagggcactctgtaagggctgggataggaaccccagggaataagacagaccaactgcgggacttcagactccactgcagccgggatcgggttgttgttaatttcttaagcaatttctaaattctgtattgactctctcatgcatgtaactgatctttagatattgtcagccaaatgactaaagggatttagaaatctgattgacttnttggaaatcttgattgactggnacactctctctgcctctttctttctcacattttatttctaactaaagtttcctccg

SEQ ID NO: 210885 - DNA, 864 bp, Homo Sapiens; identical to SEQ ID NO: 49887

SEQ ID NO: 210886 - DNA, 938 bp, Homo Sapiens; identical to SEQ ID NO: 41782
  misc_feature (708)..(708): n is a, c, g, or t
  misc_feature (867)..(867): n is a, c, g, or t

SEQ ID NO: 210887 - DNA, 931 bp, Homo Sapiens; identical to SEQ ID NO: 52982
  misc_feature (729)..(729): n is a, c, g, or t

SEQ ID NO: 210888 - DNA, 732 bp, Homo Sapiens; identical to SEQ ID NO: 49526
  misc_feature (635)..(635): n is a, c, g, or t

SEQ ID NO: 210889 - DNA, 955 bp, Homo Sapiens
  misc_feature (759)..(759): n is a, c, g, or t
  misc_feature (761)..(761): n is a, c, g, or t
  misc_feature (766)..(766): n is a, c, g, or t
  misc_feature (810)..(810): n is a, c, g, or t
  misc_feature (827)..(828): n is a, c, g, or t
  misc_feature (848)..(848): n is a, c, g, or t
  misc_feature (859)..(859): n is a, c, g, or t
  misc_feature (867)..(867): n is a, c, g, or t
  misc_feature (874)..(874): n is a, c, g, or t
  misc_feature (883)..(883): n is a, c, g, or t
  misc_feature (905)..(906): n is a, c, g, or t
  misc_feature (908)..(937): n is a, c, g, or t
agatcacagcccacaatgagcgcaagcccaacccgccgccagggctgctgacctggctcatgtccatcgatgtcaagacgctgcgcaccatcctgtcctctgtcacccacaatgggaaacagctggtgatgaccgtgggccttctggcggtggtcgtctacctgtacaccgtggtggccttcaacttcttccgcaagttctacaacaagagcgaggatgaggatgaacctgacatgaagtgtgatgacatgatgacgtgttacctgtttcacatgtacgtgggtgtccgggctggcggaggcattggggacgagatcgaggaccccgcgggtgacgaatacgagctctacagggtggtcttcgacatcaccttcttcttcttcgtcatcgtcatcctgttggccatcatccagggtctgatcatcgacgcttttggtgagctccgagaccaacaagagcaagtgaaggaggatatggagaccaagtgcttcatctgtggaatcggcagtgactactttgatacgacaccgcatggcttcgagactcacacgctggaggagcacaacctggccaattacatgtttttcctgatgtatttgataaacaaggatgagacagaacacacgggtcaggagtcttatgtctggaagatgtaccaagagagatgttgggatttcttcccagctggtgattgtttccgtaagcagtatgaggaccagcttagctgacacaccccccagctggcccctccacccccancntcaangtgcctttattttctcacagcaagccccctttagtcccccaagnccccctcccccctaaanngcagctgggggggaaaaggntgaaccctagntactgggnaaaaaantaaatctgnttgccttaccgccccccccaannannnnnnnnnnnnnnnnnnnnnnnnnnnnnnaacctccggagggcattt

SEQ ID NO: 210890 - DNA, 880 bp, Homo Sapiens
  misc_feature (805)..(805): n is a, c, g, or t
tacttctggttgaatgtctttttgtcacttccggctggatctaccatgaaagatttctgaatccaggaagagagattgactgggcaacatgttattcagaaacaggaccttgccctgtcactcaggatggagttcagtggtccaatcatggctcattgtagcctcaaactcccaggctcaagcaatcctaccacgtcagtcttcccagtagctgacagggtctcactctgtcgcccaggctggagtgcagtggcatgatcttggctcactgtagtgtagacttcccagcctcaagggatcctcccaccccagactcccaagtagctggaattacaggtctcatgctctcactcaggctgcagtacagtggcacaacctctactcactgcagcctctacctgccaggctcaagcaattctcctgacttagcctcccgagtagctgggattacagttgaagcatatgtcctgtgagcttaggggtgctacaagttgaccactgcagcagtaaagatgattctgaagaatggcatgggatggatcctttcgaatgcacttgagcagcggtctccaaccacagggccacagagctggagctggatctaccatgaaagacttctgaatccaggaagagagactgactgggcaacatgttattcaggagatggggtctcaccctgtcgcccaggcttgagtacagtagtgctatcacagctcactgcagccttgaactcctgggctaaggatcctcctacctgagcctcctgagtagctgggactgtagggtctccctctgttggtcaggnctggaagtgtagtagtgctatcacaggctgactgcagccctccaaccttccaggctggaagcgatccctcccata

SEQ ID NO: 210891 - DNA, 475 bp, Homo Sapiens; identical to SEQ ID NO: 60339

SEQ ID NO: 210892 - DNA, 560 bp, Homo Sapiens
tttttttttttccattttagtagagatggggtttcaccatgttgactgggccggtcttgaactcctggcctcaagtgatctgcctgccttggcctcccaaagtgctgggattacaggtgtgagccaccacgcccgaccctcttcttggtagcaattaaactcccctggggaagtctcctgcttatgagatatgaagacagaagacaggaagccgcaatcccaatctcaaatatcctagactcggctttgcccaccaactttttaaatagcaagattaatccaactgtactctcaattttgcctggccaattcttcaggacccactccctcgccatctgtgaagggtttcactgggggccaattcaagacctggccacctttcaacctcacattctgctgctcatgagccccactcacaggggcgcattcactatgagtttcagttgaagaacccagcctttgaggatctagatgcaggtttcctggtagaaagatctacatcaatgctcacaaaagccaggcaaactggtaccaaccagtcagatcagcactgtgtttgg

SEQ ID NO: 210893 - DNA, 483 bp, Homo Sapiens
  misc_feature (359)..(359): n is a, c, g, or t
gacgccataagcaaggaataattcatgaggaagatatataacagttctaaactcatatgcacctaacagcatagccttaagatatataagcaaaatataacaaggcttaatcagagatatgtaaatacgctgttggggtgagagattttaagaaaactgtctctgctattgacagatcctggacataaaatcagtaaaccggccaggcacggtcgctcacgcctgtcatcccaacactttgggaggccaaggtggatggatcacttgaggtcgggagttcaagaccagcctggccaacatggtgaaaccccatctctactaaaaatacaaaaattagacaggcgtggtggcgggcgctngtaatcccagctacttgggaggctgaggcaggagaatcacttgaacccaggaagcggaggctgcagtgagtcgagattgtgccactgctctccagcctgggaaatgagtgaaaactctgtgtca

SEQ ID NO: 210894 - DNA, 495 bp, Homo Sapiens
gctgccgcctactactactaaattcgcggccgctcgaccagggatcagaatttccctccctattaggcaaatgcgtttaaaaaaaaaaaaaacacgccagtttggttgggatgtttttagtatgctaaaacgtttatgtttacccagctcatgagtcagaagttattttgctgcttataaattcattttgccatagtatgataaatagcttttaatgttgtaagcaaatagggcattggatagcagcactaagtcattgaaaacaaaaacttctatattggtgtttggtttttatatagtttagggaaaggctctttaaaccaagtttcaggtgaaaaaatgaaaaaactttttaaggattttagataacatgccaagcacagtgactcatgcctgtaatcccagtagtgaatctgagaagcgcaggcttcccagatcgcttgagctcaggagttgaagaccagcctgggcaacataatgagatcccgtctgtac

SEQ ID NO: 210895 - DNA, 397 bp, Homo Sapiens
tttttttctagtagagactgcctttcactatgttggccaggctggtctccaactcctgacattggcttatgttctttttaaaaagtttgatggtgagtagattttaattaaatggtgctttttattgaaattttctttaaaaataaaactctgtatttgtaatgtaagtcaggagtaaatacagattttggataaatgtctacacttcctaagtcaactctcagagtcacttttaagatcactctagctgtctggggtatccaacttgggaaattcagagcctcagtatttagaaagaaaatccttcctcaactttaatctgatgaaaagtaaatctttccttgaaagtcgatgatatgccacaaagttaaatgcgccatctggcaaaagggtcgac

SEQ ID NO: 210896 - DNA, 1000 bp, Homo Sapiens
tgagaggcttctggggcctttggcagcatccaggtagcccccagctctgtccaggatgctggctttttttttttttttttttttttgagacagggtctcactatgttgcccaggctggagtgcagtggtgcgatcatgggtcactgcagcctcaaactcccaaatgatgcacctgactcagccccccaagtagctgggactgcagacacaccccaccacagccagctgactttttaacttttctgtagaggtggagtcttgctgtgttgcccaggatggtttcaaactcctggcctcaagcaatcctcctacctcggctttccaaagtgctgggattacagatgtgagccattgtggcctaagatgcttttttgagacctgagtccctaagaccccccacaggctccttgggcccacccacagccctgggtgccttctggtcacactgtcctcttaggggccctgctaggccttccgggcaactttgaaaacaaacccctggtctctccttttacagatgaggaaacaggcttgggaagggtagatttaaacttggttgtaggtatttccagagcctgcgctctctagggctgggacgcccatttcttcttgccctggggggtgccttgccttggtgtgaaacctcggggctccctgcaccgaaaccgtttaatttccaagaaaaaacactgggtcgagtgcggctcaagcctgtaatcccagcactttgggtggccgagacgggtggatcacctgaggtcaagagttcaagaccagcctgacgaacatggtgaaaccccacctgtattaaaaatacaataattagccgtgcgtggtggggtgcgcctgtaatcccagctactggagaggctgaggcaggagaatcgcttgaacccaggaggtggaggttgcagtgagccaaggttgcgccactgtactccagcctgggtgaggagagcgagactctttctggaaaaaaaaaaaaaaaaaaaaaaaaaaa

SEQ ID NO: 210897 - DNA, 1000 bp, Homo Sapiens
gatcttccacagaaaaggcatactggagatacaatttcagagttcttgaaggtctgaattatctgtttgctttcatatttaatagatagtttgggtatatagaattctgttttcaaaatcattctcctatagaaccttgaagacatttcctccattgtgtcctggaatttagggttgctgatgagaaatagaattccaatttgattcacattcttgtgttggtaacatctttttccctccttggaatctcttaagggttttcttctttatcttcgatggataaaacttcaagagaatacatttggattcaagtattttattcattcagttcgcttgatacttgctcagcccttccatcttaaaatcaatagttttcttcaagtctggtggtttttaaaaattacttgtctgattttctttctatagcatacatacattatttgtgcccacctgttatctttggttatctttgaacactcttttatatgttttatttgccgcattatgttacttagaaataagaacatcatatagtttgttagaaaaggatacatgttattgtaacagaagaagtagagcagaggaggaaatgtagataaccttgggtatggaagcatccaagatgtcttccagaggataagtaaacttggtacaaccagacaatggaatattattcagtgctaaaaagaaatgattcggctggacccagtggctcacacctgtaatcccagcactttgggaagctgaggtgggtggatcacctgagcacaggagttcaagaccaacctggccaacatggtgaaactctgtctctactaaaagtacaaaaattagctggtcatggtggcaggcacctgtaatcccagctactagggagactgaggcactagaatggcttgatcccaggaggcggaggttgcggtgtgccgagatcacgctactgcactctagcctgggtgacaagagcaagactccgtctcaaaaaaaaaaaaaaaaaaaa

SEQ ID NO: 210898 - DNA, 1000 bp, Homo Sapiens
ggcatggccgagccggggccggagcccgggcgtgcctggcgggtgctcgccctgtgcggggtggccgtgttcctggctgcggcagcagccggcggggccctggtagcctggaatctggccgcctcggctgctcggggacctcgctgcccggagccaggggccaatgccacggcgccgcccggggacccgccgcctggggtcgacgacctgcggcgccggctggcagaggctgccgagcgggaggaggccctagccaggcagctggaccaggcggaaagtatccggcacgagttggagaaggcattaaaggcctgtgaaggccgccaggtaggtgggccgggtagagggggagctcgggaatccagaatgttgagataagagacggcctgcccacacaactccagggttccctccctgtgcctcggtttccccagttcctcgaattgagagggtattgagaatagcgccctaatgccttccaacccttagatgtcagctcaccatggagtctaccttctgatccacctgcctcggcctcccaaagttctgggattacaggcatgagccaccatgcccggccctaattttttttatattttgtagagatgggatcgcttgagcccaggagttcaagaccagcctgggcaacatagcgagaccctgtctcaaaaaaacaatcaaacaaaaaaaattaaaattagccgggcgcaggggctcacgcctgtaatctcagcactttgggaagccgaggtgggcagatcatttgaggtcaggagttcgagaccagcctggccaatatggtgaaaccctgtctctactaaaaatacaaaaattagcctggcgtgatggtgaacgcctgtaatcccagctcctcaggaggctgacgcgggagaatcgcttgaacccggaaggtggaggttgcagtgagctgagaccgcgccactgcactccagcctgggtgacacagcgagactccatctgaaaaaaaaaaaaaaaaaaa

SEQ ID NO: 210899 - DNA, 1000 bp, Homo Sapiens
tgcctcctttcccctcccttttgcacagctaactcttactcatcccgtgatcttaaatgtcatctcctcaggagagtgttccctaattcccctaggttgggttagaacctctgtcgaacatgctccctcagtccatggcctacctgtgacatgcatggcctttccaggtacccccaagcatcctctctgaccactctctccctcacaccatttgccacagccacagtggccacctgctgcccctcaaacccactaagctctatcctgttcaaaatttttttttttttttttttgagacagattcttgctctgtcactgaggctggagtgcagtggtgcggtcttggctcgctgcggcctccgcctcccgggttcaagcagttttcatgcctcagcctcctgggtggctgggactgcaggcatgtgccacccagccgatttttgtgtttttagtagagacggggtttcaccatgtttgtccaggctgctctcgaatgcctcacctcgagcagtctgcccacctcggcctcccagggtgctgggattgcaggcgtgagccaccgcgcctggttagttcaggattcttacatttgctgttccctctacctggaacactcttccccctttcatcctccaagcctcagttcatgtgccatcacctctgagaggccctcctgactctccagctgagttgcggtccccctctgcctctcttatagcaccctgagcctccctttagtacttattaccattaatgattgttactgttaaattgcgatttcattgcctcctatcctagactgtaaacttgacaagagcagggactttggttttcttcatttgttgaacacctactatgtgccaggcccaggttttgccctctgtcttgtgtccatctgtatccccagcacacagcagagtgcctggcacataggaggtactcaagaaatattgcttaataaaaactcaaccttaaaaaaaaaaaaaaaaaaaaaaaaaaa

SEQ ID NO: 210900 - DNA, 527 bp, Homo Sapiens
ttggacatttcaggcctccactggcagttgctttcactgtacaaatgtaaagtgtggaaaagggtaaggacctagaaaaagttatacaaaaaatatgtgccattgtcaggtgcaaaacctggcgactactctgaaccaaattaagtataatatccttcaaaataaatgagaatatataaataagctaaaatagaatccacacaggcttcatagaaactttgaaagcattacacattggtaaggccccaggataggaagaaaataacctaacatgttcaaaagggcaaggaaaaacctccctacactgggaagtttgttactaaataaacttttctaaaatggaagcacaataatgatcagctcttggaatttttattgcttaaaggcacgtctagtatacacgaaatactcttttaacattgctggtcttttggaaacattcttagttttaaaacttgaacctttatgcactgagtgcctcagggtgaaaagaaaaacttgactttgcatttcctaagctgtaagtc

SEQ ID NO: 210901 - DNA, 532 bp, Homo Sapiens
agtgtgctcaaaagccccatgcttctgaggggcaaaaaagcaagaattgaaggccacgttggaagcacaaaattttccagggcctcccttctggtgtacggggcctcagagggcaacattaccatgaactgtcctgcacacaccagctggggaaagcctcaagtgaacaaagatgaaaacacggtgggaaaagcaaaagcaaagccgagcagcaggcagccatctgtatctgcttccaggggcagagtacaattcaacaacagacctttacatgtatttttgaagaaatccaattttgccaaggcctcctaacataagaagggcgctttcacaaccacgccttccgggccagctcctctccagatctgcactggcaggaactgctacacatggcttcacccttcgcctgaacccacttctcagccagctgtcctagcttcagagcacagcttctgcctggcctgggtgcgaggctgacccctggcagtggtgtgccctcacccagcaagggccagacagctgctgtctggga

SEQ ID NO: 210902 - DNA, 627 bp, Homo Sapiens
gcacgagttttttttttacccaaaagacataaactgcatttattgtgtagaaattcagaatggctcaggctacacaatagtagtcagatgtaaagtgtactaaatttcatcttctagaagggttgattttgaattcaatcatcatttgagagaagacatcccagctcgcataatttcatcaaccaggagaatgttggtggcaatcactgtgcaagagtgaagaagttgtttttttacacaataattatcccaaactcctgcatctgctgctaccattggctcacctgtattcaaatctacgcccacaagttgttttgactcgacatgctcagcctgaacttttactaatgtttcctgtgggtcataaccagcattctgagcaagaaccttgggaataatgagtaaggcatcagcaaaagcttggactccaagacgagctcttccttttatactgttcttatatgtaacaagagcttcagccattgccacttcaattgcaccagctccaggaaccatacaaccatcttcaatggcatttttgatagcacgaagtccatctcttatggcatccttgacttgtgtgagagtatgcttatttggtcctttaaccaacaaggtaacagagca

SEQ ID NO: 210903 - DNA, 602 bp, Homo Sapiens
tttttttttttttttttaagataacatttcgaatgctttaatcaacagacatatacaaatgaattttaaaataaaaccaaggcatcaatgaagaagatctaacatgaaagtcaccacatctcacaatgagaatccgatcagatggaagaaggcaaaagtctaaatcatagagtggcggagggaggcacgggagagacggagggctctgggactaaatcatcagggcatggccacctgatgtcttccactttcagggtcccagggccctaggtggaggtttgggacaaatatggtatttggtcacaaggagcaacagtacgatctgctgtatctggaatgggaaaggcgcacagaatcctggaaggactgaagacatcagatgctatgataacaagatggagagtacgagggcacaagagctgtaaggaggctctgtgctcttcggtgacaggcatcaatcacaccacagcaagatgtcattaaaaagttactactttagtggaagatctggagtagctacaggaaaaactctttgggaaagtccaggtggtagagagaaaatacacatttaagcactaggaataactgtgatgccacgctca

SEQ ID NO: 210904 - DNA, 679 bp, Homo Sapiens
tttttttttttttttagacaagccaagaaatatgtttctttattttcattcccatatagcagagatggaaccaggacagtgatgctggaaaagcctgcctcgatcaagtcatcacataagttaatgtcagaaaacctgtatttgaatttgactcctctatccttactctggaaaattggacatcttgacccagtggctgtgagggctaaattagatgatgcagaaagtgcttggcatgcagtagatatgcaaaacaataacttatgacactctccaagcagggaaaaaagtcttcatgccttctaactaataatacaaacgtatgcagtgtctttccaccctggcttgagtttaacaaatacaaattgaatagaaaaaattagtcaaactccataaacaagtttataacaaatacaaatctaatcgaaaaaactagtcaaactctataaatccaacttgattttaaaattctagtggctacaacactcaataatgttttcacatcgtttgtgaatccattccctagatgcatttaaagatgtaggagaaactgtttcagatcctctgggaggacgagtttggttatcttatgatgctgctggattccaaaacacttccgaattctaaggcggcataactgcatcaaagaagggggcccttctctctccaagaagagctg

SEQ ID NO: 210905 - DNA, 669 bp, Homo Sapiens; identical to SEQ ID NO: 50322

SEQ ID NO: 210906 - DNA, 590 bp, Homo Sapiens; identical to SEQ ID NO: 45613

SEQ ID NO: 210907 - DNA, 592 bp, Homo Sapiens
aaaggcctgttaggaggagttttcagatccccaggaagagcagagaaaagaaaggtggtgcctccccttcttctcaaccccctctctctctcccctccatcttttcattagaatctttctatctcctcttcccacacccatccgagatacgtaaacacgcatgcagcgccggccgcctctcccctcaccgccacggccgcccagctgccgcgtttggtgcgagagaaagcggtggaaccacgctcccctgctgcccctccccgcggaagttggaagtagctcaggtttgaagcttgtccgtaaggctgcagctcccagagaggaaagatggtgctcggcgcccctccctcccagcccctgaaagcagagaagccgttgtgtcctcctaaggatgcttctgagaagtctcgctatggaaatagcccgtggccatggattctggggctttctccaaggccattgccaatgttctgaggaccatgagtgcttctccccgtggaaattcttcagttctgtgtgtctacttgaaatgtgcttgatgtcagcgtcctcccttatttagaaatctctattagtagatgtgatccatgca

SEQ ID NO: 210908 - DNA, 688 bp, Homo Sapiens
tgaacaaaatgtatttataacactttttattgttggaaactcaacttttattctgggttaagcctctagataaaatcttaagtctgccaaactattattccccccaccttttctttccccaactatcaagaccattctaggaagtacgtcactctaccaaaaatgattgagttgtgttgggcctggggaaaaagtcgggcaaaaggagcctttcttgtggctgctgatagttaggttcatccaccaccgcactttgagctcgactagagtcgccatggggtttcatctgtctttgtggccccacagtgctcacatgttccacttcagctgtgccaataggtggtagcagattatttcgactcaggggcgtcggtgagggagaggagagcgagtcgggtgccactgggactcgggctcctctgaggatttcttccacagatcttggtgtttcagcacatgaatggctcgtgctgatcggatgaagagttcgtggtggtggattgcgtctcctggtggactgcactgtgtatgacagagatgatgtactaaactccacagctcgatttggccaatttcgagttgaaaggatggtactggacccaggcctcataagtagcttgtcatcaagatctaagagcttgtccattaaggggagatttcttggctgtagaggcattccatggaccaa

SEQ ID NO: 210909 - DNA, 500 bp, Homo Sapiens
  misc_feature (214)..(214): n is a, c, g, or t
  misc_feature (293)..(293): n is a, c, g, or t
  misc_feature (295)..(296): n is a, c, g, or t
attatatacagaagctaatgtttattgaacgtaacagtatatttcatgtagtttcccataattttttcatgtactaactcatgtaattctttgttttttagagatctgaagtgattttacctttacttccttcactttaagccaatcatgaaatttcagtgatttctggggtgagggcgaaaggtggtgttacgaatcatcggggctgtggcangttgcctcacggaggtgcaggtaggctggggcctcactagggcagctggaggagcacggactgccctgccggcagatgnanntgttccgagagcatgagagctggtatgcaatgtcttctgcagcttccagcttgcacagctcgctctggccgtcccctgcagtggccagtgagttggcgatcagcttcagctgccttggagtcaccctcagcagagatgatggccgccttttccaccacaaatctggcgctctctgcttcctggggggccacctgtctgttaact

SEQ ID NO: 210910 - DNA, 537 bp, Homo Sapiens
tttttttttttttttttttataggtattattttctctattttaccattaggggaactgaagctcagggagggtatttgttttgttttgtttttttgagacagggtctcactcaggttgtttaggcttgcgtacagtggcgggatctcagcttattgcagctgccatcttctgagctcaggtgattctcccatctcagccacccgagcactacaggcatgtgctgctctgcccagctaggtttttgtgtgtgtgtgtgtgtgtgttttattttgttttttaagtaaagatagggttttgccatgttgcccaggctggtcttgaacttctggactcaagcaatcctcccacctcggcctcccaaagtcctattgattataggcatgagccaccacgcggaaagttttgttgttgtttttccagagatggggtctattttgcccaggctggtctcgaactcctgggctcaagtgatcctcttgccttggcctccagaagtgttgggattacaggtgtgagtcactgtgcccagcgtcagg

SEQ ID NO: 210911 - DNA, 579 bp, Homo Sapiens
aatggtttggactgcaaactagtacttaggctttcagcaacttggcagtgtttgtctgatgcagatactgcacccagttttaaaaaaggcttattactaaataaactagtgaagttaacaactgaaggagtaatagtatgaatgctggattcagaagtcaaacttggcttttttccaagggaagagcttattcttggaatatctatatgggtagtttttgaatcatttacctctttatcaatccctttacattcaatacttatactatgaccaactgacctatgaccaacgttcaagtgggtactttcagaagtaaactggttctttccaacagattcagaaatttcttcgattagttctgtagtagaacttaaaagtaatggattaggagccaactgtgaagaagtttcagggggacttctggttaaaggattaacagatacagtaggtgatggggaagggagattgctttctcctactgcactgaatggggatttagcggtagatacatcagaagcacctcccattttaaagtccggagaagtgcaatatacaagaggctgcttttcatgctttgag

SEQ ID NO: 210912 - DNA, 611 bp, Homo Sapiens
aatctgctcctctaaaataaaactcagccaattattttcttttaaatagcaagatactaagtattttaggctttgcctgtcattcaatctgtcacaactactcaaagctgcaccaccgtagcaccaatgtggccaaagataacataataaatgaactgagttgtgttccaataaaatttcatttatagacacaggtagtggtccagatatattaccaacccttcttctacaggaatactagtaatgggtactatttaggtagaactagcagttgagactagaataagatataattaagtatcataaaattagatggtcctacttgcagactataatgtatgacttaaatgttgtatttaaaaatttacaaaaatctgtgaactgaactgagaagctaaaaaattcctaaaaagtaaaaaatcagttgtgcacacctattcaatgaaaaattcccttactcaagggaaaagctttggacaatgattagattccaatttgcttatgcaattgctagaaaatgttgtgtataaaggattcaagaaaggaggatttctcagaaaatttctgtctcctttgatttaaactcaaaatgggccgggcgcggtaggtca

SEQ ID NO: 210913 - DNA, 645 bp, Homo Sapiens
cacgcgtccgcttgctcttttcacatactattctttttttttttcctgagtttcgctcttgctgcccaggctggagtgcaatggtacaatcttggctcactgcagcctttgcctcctgggttcaagtgattctcttgcctcagcctcctgagtagctgggactacaggcatgtgccaccacacccggctaatttttgtatttttggtggagacaggtttcatcgtcttggtcaggctggcctcgaactcctgactgcaggtggtccacctgcttcggcctcccaaagtgctgggatcgcaggcatgagccaccgcacctggccttcacacactatcgtttaatcctcaatatctgtaaactttggtgacacatccatttaaaattcaaaaaaccatcttggcttagcacatgactgaaaatgaaaaaatatcaaggcaaccacaacatgtcatgctttttcttcttttgaaacatcatcacagttgataattggtttactgtttatgacttttctgctagactgtagtctccatgaaagcaggatacttactaggtttttcttattcaccatggtatccccacctagcacagtttccagcaacattgagtagtcagtatgtattaatcaaataaataaaataata

SEQ ID NO: 210914 - DNA, 643 bp, Homo Sapiens
cccacgcgtccgctcttaccaagaagacatttccaagtcatatttgctttgttgcttctggaaaaaaatgttcatttcctccctcccttcctcctcttcccacccctcacttgctctgactgtcactcctttttttcttccagaatgtgtactttatattacatatgtacagtatcagtagggaaaatgtaaaaagatgttgttttcttttgtcatttaattaggccatctgtcctgttttaaagaaatagttaataattcaacactttatataacaaatattaactaatacccatatttataaaacatttttcagatttaaaagattgttaatacttataaacttagtgttattcttagaaaaccccatcaaatttaaatgtgatttacacagtgactaggaacatttgtatttattgtttcttctctgcacttttcatcatctgataaatacaagagctcaagtaactgtcttttcttcaagatggcttctatacttgaaatcagttaatacaatagtttttccagttctttttttatagagagtcaaagagaaataaaccaaattatattcattgtgttggaaatttgtatttttacttctaatcaaaaagggtagcaagtttacaaagtggtaaaaatt

SEQ ID NO: 210915 - DNA, 599 bp, Homo Sapiens
aacaggcacagaactaacgcaaggtacattctttaaagaggtgctcattctcagggctacacttgcacgtagctgcctcacctgcctagtcccagctctgctgctctggaaagtctcgggagcacatttttctccagtaatacgtgtggcctacattatcatttccaaatgaagaaatctgagactgggattcatcaaaatcacctaggaggctttttctaactactgtgtatttcctcccaagtttttttttaaagacagggtcatactatatttcccaggcttgactcctgggcctaagtgatattcccacctcagcctcccgagtagtagctgggactacaggcatgagcagccaccacacttggctcctcatagattctgacataacagcctctaacccctcataagaagcactgccacttcaaatacaaatatcctggtgtgctaggtaggagaaaagttccaagaaccaacttactattttgagcatcaaaatgctcaaaatagtaagttttgcaaaatgctttgttacaaaataatttaatcccattgatcaaagactatctgaaaacccttaggggatgaatcagtattta

SEQ ID NO: 210916 - DNA, 599 bp, Homo Sapiens
ctatctgtaacagttttggtagtggtattacagaggatttgtaaaatggattggagtacttaccactatttcatctgctctgaaatagttcactaaccaaactactgacaacagtttaatttttgttctttccttaaaattatacagactgcaccaagaacaccatatggacctagtaacacttcagatttttagaccttacaacctttgcaagttcttctatgatttctgggctctttagattttctactgcttgagtcactttggtaatttatattttccttgaaaatactcaattttgtttactcacaaaaacctcacttttaagaatatcctccccctcaaccaaaaaagcataacatataaatatggatatatcagtatcacttaaatgcccagaataggaaaattataaaattacggaacatccacatgaaattatacagaaagaagtatgtgtactgaattgacttggaacagtatttattccaagcaattttttttttaatttttaaaaaggaagttgtaggctgggcatggtgactcatgcctataatcctagcaccttgggaagccaaggtgggtggatggcctgagct

SEQ ID NO: 210917 - DNA, 612 bp, Homo Sapiens
tttgagacagggtcttgttctgtcacccaggccggagtgcagtggcgcaatcatggctcactgcagcctcagcctcccatgctcaagtgatcctcccacctcagccttgcaagcagctgtgactaaaggggcacaccagtatgcccggctaatttttgtatatttagtagagacggggtttcactatattgccatcacacctggctaattttttaatgttttgtagagacaggggtcttgccatgttgtccaggctggtcttgaactcctgggctcaagcaatccacccacctcagcctcccaaagtgttgggatttacaggcgtgagccaccgtgcctgcccatcatcatctcttgcctggacaactgcaaaagcctcctaactggtcttcctgcttccatcctattttccctataggcccttttcttctgcatattttagacacagtgatcctttttaaaatccaagttgattttgcatacatcttaaaaataataaatgcaagcaagaatcattaaaggatgctatcattagataacagtttgttgggaaactggatattcatacagactcaaagctatctccaccacaggaaaaaggcacatttacag

SEQ ID NO: 210918 - DNA, 537 bp, Homo Sapiens
tctgaaatgatttatttcttttataaatttttaatcaaaacaataaaacaacatgcttaattattaggtggtagttacacaggggctattgtttctgtgtattatttgtatttagtaaaggtttaaaggcataaaatagaagaaaatttggaaaaatatttggggtgaatgagacaattcaggaacaaatacagaaaactatattatcatatagcaaaaagctatttaaaatagagataagcaaactatagctcacaggccaaatgtggccttctgattattttttgtaaataaagttttattggaacacaacaatgtccatttgcttataggtagaatttctcaacctcagaactactgacattctggatgagactttttttggggggtgggggcagttgtactatgcattgtaggacgcttagcaggatccctggcctctgctcaccagacgccagcagcacccacccttcatactgaaaaccaaaaatgactctggacattgccaaatgcctactggggtgtaggtatgagaaa

SEQ ID NO: 210919 - DNA, 629 bp, Homo Sapiens
tggaaacaaatgcatacctaattttacttattcatcaagacagatatctattactacaggcacagtttaaaacagaaaagacataagatatagagcaaatattgtcaagatgacgatattttgccaatcagctatttttgagaaatcatcttttattctgaggctgtgcttttcattcacagtgaatctaaatctcttccttttatctcctgggtgtcaggatttgtcactcttcccataaacagaattgattctgttggattatgcttcataataaacagaaatggatgatttgctataaattggctttgagccagactcatgatcacagggatgtgtatgccagttgatgttgcagcttcactaccatcttcatttatctcaaagaaaactttttgcgtcacttgggaaacatacacttcagatgaatctgttattccagaaaggtcgcagccaccactaaatatctcggttatgttcaaagaatacaaaacgtctttgaagtctactttttgttctactttaaatctagggaggcttatttctacttcctcttcttgcatctcagagagccattttaggatttgttgagcagtaattagtttttccacttcttctatatccatacc

SEQ ID NO: 210920 - DNA, 553 bp, Homo Sapiens
tgagacagggcctgactctgtcccccaggatggagtgcacgatcacagcacaccgtagtctcaaccttctgggctcaagcaaatctcccacctcggcctcctgagtacctgggaccacaggcatgcaccaccatgcccagctaatttttttattttttgtagagatggggtcttcctatgttgctggtctcaaactcccaagctcaagcgatcctactgcctcaccctcccaaagcggtgggattacaggcgtgggccaccatacctggctcatatttgaatttaatgaataaagaaactgaggctcagagaggcaaagtaacttgcctgataggacacagcaagtaaggagcagtctgcatcactgcaaagtggtgtcttcagatgcccctgctgcccggtctccagtagccccaccacagccactttgtcaccatgactgacaagatgaccaactaacacacacttcctgaatccccaccagtcagggcctccgactgcatcttgaaagaaaaactgctgctctcttcccaccaagtggaatgtcttttca

SEQ ID NO: 210921 - DNA, 461 bp, Homo Sapiens; identical to SEQ ID NO: 45399

SEQ ID NO: 210922 - DNA, 631 bp, Homo Sapiens
ccacttgggaaaggagaaccaagaaggaaggacttcagaaaaggaagaaaccatgaaacattaagtaatttacaaactagactcttctttattctcttattttatttatttctttatttttgagacagagtctcactttttgcccttgatgaaatggactggcccaatcatggctcactgcagcctcaaaatcctggcctcaagaaatcctccagactcagcctcctaaagtgctgggattacaggcatgagccacagcacctgacctagactgttttaaactagatttccctgagaaaactttcactggaaaaatcaaaattatcctgctgtcattaagagaaaactatctgttgtagaaaattacattctttttttttcagacatgtcatataaatatttggacccctctctgagaacaaactacttaaaagtcatttcaatcattaacgaatatcataattgagggcctgtgctgggtgccagaaatctaccagtgagcaaatcagcacggatctttgtccacagtaaatttacagatcagaggaaacagaaaaacaatcagttaaataaaacaggtctgaaaattgcgtatgagaacccaaagcagaggtacctaatcaggtcaaaa

SEQ ID NO: 210923 - DNA, 510 bp, Homo Sapiens
attgattgattgatggattgattgagacagagtttcactcttgttgcctaagctggagtgcaatggcacggtttcagctcactgcaacctcggtctcccaggttcaagcgattctcctgcctcacactcccaagcagctgggattacaggtacccgccaccatgccaagctaatttttgtatttttagtagagacggggtttcaccatgttggtcaggctggtctcaaactcctgacctcaggtgactgcccaccttggcctcccaaagtgctgggattataggcgtgagccaccacacccgaccagcatgacctttaaacacaattggacttaagacaaatttagtaaatgcagatttctgggggggaaggggggaatcttcttttaaaatgcccatatttagtgtaggtgaaatatactgcttataaactattgatattagccttgaagaagccattattggttcttagttgaataattaaagctttaaaaagtcttataaaatgcag

SEQ ID NO: 210924 - DNA, 552 bp, Homo Sapiens
agatggagtcttgctctgtagctcaggctggagtacagtggcacctgatctcagctcactgcaacctccgcctcccggattcaagcgattctcctgccttagcctcctgagtagctcagcttacaggtgcacgccatcacacccagctaatttttgtgtttttagtagagatagggtttccctatgttggccaggctggtctccatctcctgactccttgatctgcccgccttggcctcccaaagcgctgggattacaggtgtgagccaccacacccagcttcattttaactttcaaaaacaacttacaaacttatattaacaaatcagtaactattagtaaacttaactggaagaataaactgccaagtatataattatttagaaataaagtaacatttctcaaaagctgttaccaaataaatgtcactttcactgaactctgcattaggaatcaggctataagaagtcctttatataaagaggacaaatgctaggctaatccttttctctctgactcgtcttcattatgaaataatttcaactttttctc

SEQ ID NO: 210925 - DNA, 595 bp, Homo Sapiens
tgcaagataaggcactttgtttttaattctatcagtctctttagaatgaacgaaggtctgggtcctctggaaatctcaagtggtgctgcctgcagctttaaaaggctgagcacaaacccatcagagagccacagtcctaagtagactcctcggtgcgctctgcccacctgtccatgtgcattcagatttctcattaaattttccacagcatgaccagtggggatgacctgggtggcctttgtgtccatggccacagcctaggtacccacctggcatggtgcctccacaggcgcagcgagcggttttctggcccccgctggagcagaaggtgcagcagtgaaacacgcctgagtgtgggcggtgctttctcctcaccatcacagtgaatggcgagccctgcacatgctgttctttgatgcagacccacacagtatagacgccaggttccttgggggtgtaggaaatgtagtatgtcccatccttgttatcctggaccattgttctgactgggctgtctttcttatctttagggacaacggcaacttgaacgttgtctcctcccctgcccatgatttctcctgcggcatccttacaa

SEQ ID NO: 210926 - DNA, 611 bp, Homo Sapiens
tctgtacgtatgttttatttgaacatccacatttcttagcttagagacaattatattccgtacacttttcttctctctctcttacaatatttagactggccaaaaaccagggaaaatgtccttggactgcagtcattataaaattttacttaatgcttatgaaagcactcatgtgaaaagcttcagcatgaagtgtaatcaccacattcagtttcaaagttcaaatgcccattcctatgatgggtaaacacctaccatagcgcaaagaaggagagtgattgtgggtaatgacagaggaggaaaagtgaagggggtaacagcttctcccagaggagggggtggtccctgttccatgcccatcttgtctccttaaacaggaacagccaacaggcctaccagtccttgtactctatgcagctacttcccctgctggaaatgagcagctgccttcttctccctaaggtttgtcctcttttatctgattcttggaaacgtttttttaagttttgccaggttctttgttctttcatgaatgaactgatggaaattttctatggaagttacttacctcacttaagaagcacacagcagctctcgcctataatcctagc

SEQ ID NO: 210927 - DNA, 601 bp, Homo Sapiens
ataatgaaataaaattatttaatttcacattctattcatatctcagaacttatacataaaagagagaaagaggctcaaagaagagacataaacattcaagttatagaaattctgtaagacaagaatgaggtgtattaacctcaggctctaaaataggagaaaattaacattgtgtgtaaatagttacggcattttcagagttagcagaaacttctcagatgttatcactaacgctttgtagatattttattcccttttggaaaaacaagctcataaaaacaatacttcaataaaatatatacgcctagtattgtatgatgtactggtagcacagggaagaaagccatttatttttagagatattcaaaaccctcactgatcactgctgcaaaaagtacaagtttagcactataagagttaaagagcagcggaaaatgcccatcttgttatggcaggggagagtattagaaatgaaaccttagttttataaatttcgaaactgtacagacagaatgtgcagtattagctttgccaacactatctgggataataagaatatttacctgatagaataagtcacataaatttagaagaccttaat

SEQ ID NO: 210928 - DNA, 611 bp, Homo Sapiens; identical to SEQ ID NO: 47700

SEQ ID NO: 210929 - DNA, 1000 bp, Homo Sapiens
taaaactatggccataaaagtattatatttccttaataatttccctcacttctaaaattgaatttcatgctttgcttgagtatccatagaagatatattactttatttgtataatctatttacattctgtgtattgctgaatgcatggcatgattaaaaaaataaaatatttgagcagaaatggggttaagaaataatgtgagttgaaacctagacctaaaaaaaggctatgccttaaggtgttttattgtttttacttttgcttttttaaaataaataaaagcttgtaaaatagtctcactcacactgtagagaaccatttgtttgtcattagattcctactttgcatagattgaacacaaataattacaattgattgaatagtaggaagaagttttgttattgattaaactatttagaaaaaatagcattatatcttatttttttataacctgattataattttgactattttttttttcccatttctcattgcactataatttgtccctgatactttggtgtactgaatttttaagtactttgaggcctaccgaggacatatcctatttcatctttgcatatcccacatcatgaattgaatttccctgccctctctttttttgttaagaagctaattattttaaaatgaagacataaaggaacatgattgtattctattttctgtttccatagttcatacccttgctggttatgattctgataatgtctttttattttcccttgcttatttaaaggaaacagtgccacacataatgctgtgcaaataagcaatcaacatttactgtttgctaaatgaatgaatatgatgcctaatccctcctggttaccttgtattttcataatcacaatttcccagaaactgtgaaattactgggattgttttaagtagtttggtgatggttccaattttcaacaataaaatataattaatatcagaaaaaaaaaaaaaaaaaaaaaaaaaaaaaaaaaaaaaaaa

SEQ ID NO: 210930 - DNA, 418 bp, Homo Sapiens
gtgcgacccactgcacttgttgcccaggctggcgtgcagtggcgcgatctcggctcactgcaacctccacctcccagtttctcctgcctcagcctcccaagcagctggagttacaggtgcccaccaccatgcccagctaatttttttttttttgtatttttagtagagacagggtttcaccacgttggccagacttggtctcgaactcccaacctcaggtgatccacccgcctcaacctcccaaagtgctgggattacaggtatgagccaccgcactctaagataaatttctaaagcacaattgcttggcccacattcagtctgaggaatggcaatccaacattctcaatccaagagagtctgaccagccattgggcacaagttcaaatcctccaggagtactggatgttttagatta

SEQ ID NO: 210931 - DNA, 393 bp, Homo Sapiens; identical to SEQ ID NO: 38631

SEQ ID NO: 210932 - DNA, 605 bp, Homo Sapiens
ttttttttatcattgacaatgtttattatcaagaaactttaggttttttaaaagaatgctcgttttagaatacaccaagaggacactctgtgacaggacatatacaaacaaggataattaaaatattaaatactatctaaattaaaagaccataattcaaattgctaattataatatttgtgtcggtagaaataactatagttccccttcatgaaattcacccccacgttctcatgaagactatgacgtctcaccacaatttcagttatttaatttacaataatcaatgctgagttttctgtgctgaagcatgcactgttacagaaagcacaaaatcctatttacagggatttttagttttctttaaaatgtatctcaagcatcttttaaagtgcgagctacaaataggttgtatccttaatgaaaaaggcttctttctaaaagaagtatgagatagctatccaatactgcaggaacagttatataactaaccgaaggaaccagcagcactctgctaactctgttttagtgtagcaacctccttcttggtgttctactaccagccaaacatgtactccattgctttggatacaagactttcatct

SEQ ID NO: 210933 - DNA, 600 bp, Homo Sapiens
tttttttttctgttgttacatattttttagagatattggcctattgttatattttgggggtaggatggtctaatctttgataggttttggtatcactgttatcctggctgcatgaaaaagaggctggaagcttttagtcaataaaaacccaatatgaacaagtaaacgcagttattattacagtttagtttatgaattaaacaggattttgtgtgctgatgtagtaaccaccacttagacttagtttctaagagaaaaataaatcccaagtttcaaacaactgacttacatgaaaatttctggatgaatattgtcggagtctgtctttatcctgagattctatagcaaaactcccttaaggattttaaagggttttgaatacacccatttccagccttcgtttttttatttaaaagggtcttaattttcatagagaatctacacaatgcatgtataataaaaacatatgtcactgtcaaatatagatgtaaaaagcttatgttcttctatgttttaactcttctctctagctaatttgaaatatctctaaattcatgtccaaactgagataagacgttggtacacttcaataaaaatgta

SEQ ID NO: 210934 - DNA, 534 bp, Homo Sapiens
tttttttttaatatgaatgtgaaattagcgaggatgccctttcccctggcggacagaatcctctgttattaaaaagtaaagcactttaataatgaaaactttttcctctttttcttgtgttttaactgtttaaaattaatgagaagggcagaatggttgtcaaagcaatattgaaagccgggcagccaggaccgaataagcacaaaaatccctctagagtgttaaataaacagagctccagccctctccgaatccctctgttggttattgtatacattctgtaacagctctcagaatagatctgagagccagggaggcagagaggtttcagaattccaataaaggcctcaaattaaagacagcctggtgcgaattccaggagaaaattaaagagacctcaagcttaagtgacaggtgacttgcttctgtgtcacaactgtcaggggatttagtgataatatggcaatatattacaaagggcttttcttattcccccctttaggtttccaaatgaggcatctttcttcccaacaa

SEQ ID NO: 210935 - DNA, 611 bp, Homo Sapiens
  misc_feature (445)..(445): n is a, c, g, or t
atatagtaaaacagctgcttgctccatagacagagcagggctatcctataggcagggtggcccagagtagcccagttatttacaatggctttaaatgacaaggcccggctatgtgccagaaacctcacatcctcccactacctggtgcacaggggctcatcccattttccaacaaggaaactgtgcctccagctaggcagcctgtgctttctgccagaccacactgcctccccatgctggtcaccatgcacgcagagctgacacagcattgcctctggccccagggagagcaccactctttaggccagctcgccctgcctgcagacagaaaatgcccagccagagccacttaccactctggagcccttctccacagcctcggtgccttcaaggccctctgtggcttccccctcggtgccctcatcattgtctgagtcgctgttgntcgagcagtccgtgcgagtggctttgctatctggctcatcaggactgccgccctgctttctcttcttcttcttggatcggaagtcggctgtgggtcaggtctttcaggtcccgctcatctgcttcatggcattgtcaaaccgaaaactaagcgggacgggccggga

SEQ ID NO: 210936 - DNA, 609 bp, Homo Sapiens; identical to SEQ ID NO: 59465
  misc_feature (442)..(442): n is a, c, g, or t

SEQ ID NO: 210937 - DNA, 513 bp, Homo Sapiens; identical to SEQ ID NO: 59543

SEQ ID NO: 210938 - DNA, 613 bp, Homo Sapiens
gacaaattccaaagggtctaatattctgtcatctgagcccagaggagaggagagtgtgacacagaggaaaaatagctgaagaaataagggctgaaaacacccaaaatttggtgaaagacaaacatagatgtaagaagttcagtgaatcccaaacatatcacatcacaatcaaactggtaagaatcaaagtcaaataaaaaatgtcgaaagcagttaagaggaaaaggatccaaattactatgggtttctcaccagaaacgagggaggtcagaaggaagtggcacatttttcagatgctgcaagaaaagaacgtttgacccagaattctatattcaggaaaaaaaaaaaaaattcctttaggaatcaaggcaaaataaagaccttctcgaatgaaaggaaacaaagcgaagtcatgggcagcagtgctactcaacaggaaatactaaaaaaagttcttccgctggaggagagcaacttgggactccaggaatgaaggaaaaccaacagaaatggccaatatctgggtaaatataatatatatatttttcttcttaagttatttaaaatatgtgtgaaagttagcaaaaaaaaaaaaaaaaaaaaaaaaaaaaaa

SEQ ID NO: 210939 - DNA, 568 bp, Homo Sapiens
gatcgacgtttgcttgtttttgttttgatttcctcagataatcttagctctctaaacttcccgtggcataagataagtaaacgtttgtgtggctggcacagagtagtgctgtaaacaagcacaacttgacactgggccatatgaggatcatcacagatttaaaggcatacaacaccattcaaaacacagataggagccacaatgggaagcaaagtctgaaggtgccatgggagggttagatagggagggaagaagaaaaagaaaggagagaaagagaaaaaaaaagcccagcaaatagaattcaggaacatgttcatgacagactgtacatcaatagaggaaattccccaaggcactgcagaggagtagtgcagagttataacaggcagaagacatctgaaagggggcatgagctggggtggggaaatagggtttccatgcttcactgggtgtggaaatagatgggcttgactttcccagaaaggatcttggggcacttgcacagagatgatctctggcatcattttcggaaaagtcacgctcaccatgttgtgacttgatttagcag

SEQ ID NO: 210940 - DNA, 948 bp, Homo Sapiens
aaaattccttttcagaaaatcagccatttccttctcttaagatggttttagagtctttgccagaagatgtagggtttaacattgaaataaaatggatctgccagcaaagggatggaatgtgggatggtaacttatcaacatattttgacatgaatctgtttttggatataattttaaaaactgttttagaaaattctgggaagaggagaatagtgttttcttcatttgatgcagatatttgcacaatggttcggcaaaagcagaacaaatatccgatactatttttaactcaaggaaaatctgagatttatcctgaactcatggacctcagatctcggacaacccccattgcaatgagctttgcacagtttgaaaatctactggggataaatgtacatactgaagacttgctcagaaacccatcctatattcaagaggcaaaagctaagggactagtcatattctgctggggtgatgataccaatgatcctgaaaacagaaggaaattgaaggaacttggagttaatggtctaatttatgataggatatatgattggatgcctgaacaaccaaatatattccaagtggagcaattggaacgcctgaagcaggaattgccagagcttaagagctgtttgtgtcccactgttagccgctttgttccctcatctttgtgtggggagtctgatatccatgtggatgccaacggcattgataacgtggagaatgcttagtttttattgcacagaggtcattttgggggcgtgcaccgcctgttctgggtattcatttttcatcactgaacattggtggatctatgcccttttggggtttctcagtttcatgaagccattaatggaggtatttaactcctttcactacagtttcttgcaagatggctaattaaaatactttggcccaggaattattgcccagccagtcttcctt

SEQ ID NO: 210941 - DNA, 939 bp, Homo Sapiens; identical to SEQ ID NO: 54220
  misc_feature (779)..(779): n is a, c, g, or t

SEQ ID NO: 210942 - DNA, 908 bp, Homo Sapiens; identical to SEQ ID NO: 54934

SEQ ID NO: 210943 - DNA, 959 bp, Homo Sapiens; identical to SEQ ID NO: 52748
  misc_feature (807)..(807): n is a, c, g, or t
  misc_feature (819)..(820): n is a, c, g, or t
  misc_feature (822)..(822): n is a, c, g, or t
  misc_feature (825)..(825): n is a, c, g, or t
  misc_feature (830)..(835): n is a, c, g, or t
  misc_feature (843)..(843): n is a, c, g, or t
  misc_feature (860)..(860): n is a, c, g, or t
  misc_feature (866)..(866): n is a, c, g, or t
  misc_feature (885)..(885): n is a, c, g, or t
  misc_feature (889)..(890): n is a, c, g, or t

SEQ ID NO: 210944 - DNA, 972 bp, Homo Sapiens
ttttcggatggaataaatctgaaatgctatcacaggttgtaaagtctggaaacacaggtgaatatacatgttgttatcaaaagactgacaatctttaaaagaaaatattaccatctgtttccagactttatggacatgctgtgtaaagatgactaccttgcagaattcctcttaataacagaaataagttggaggaatcttaaacgttcattggtgggagaagggttaagcaaattacgatatatttttagagtagaatattatgctgtcattaaaaatatttctgaagaatttttaaataacatgggaaaattactttgttaatgaaaagtgaaaaggatgatttatggatgtacagtacaatctcaactatatattttttaaagtatgtatagaaaaaagactggaaggaaaataccaaaaagttaatagcagttgcctctggatgatggggtaatagattttccccctttatatatttctttatttatcaaatgttcaacaataagcatgaattatttttataatgagaaaagcaaaacaaaacaatacaacacaaagcaaagaggaagaatcaggcagccaacaccaccagttttatcagaggtgaacgatagaatgatggctgattacatgtgatcattttgaaggctaagaaaagaaatggataaagaatatccttggggattttatctggatttaggataatgagagtcttgttgatgagagtcttgttggaaagccaggtttcaaaacatatgtatgcacatgtaacgctggccttcctaaataagccttgttgggggaaattgtttttctcccctcccagaataaatgaggggtgtctcttccgcgcaaaagaggaaaaaacgggggtggggtcagggtaccacccggatttaggaacaatgtggaacctaaataattctttctagcctgtaactttcccaaaggaatttggatctggcccgg

SEQ ID NO: 210945 - DNA, 913 bp, Homo Sapiens
ctgaaacccttgtgttttatgaacttcatgccctggtcttcaaacgaattcagtgcaggccaagaagcacagtttggcctgggttggatgctctatattttcaaagagtgaaatgccttgagacacagcctttgctatagtacctgctaaaacttcaacgtgtggataaatatagcttacattgaatcgaatagactcagcgagagtggcagtgaaggatgccctctggaagattcgaggtgctgaggccaaagggctagcaaggaaagagcgtgcgggtcaggcccttcagcctggtggaagagcaggcagggagggtcctatggttcctgggaggacccgaagcatgatcgcctgtcaagagccaagagccctaatggccagcgccggggaaagggcccccgaggggcagtcagcagccctgcaggggcggcgtccacactcctgtgtggcacgggacactcatggctccaccagctcctgaagcttctgggagccagagagtcagcagggagaatcccacacacgggcactcagttcctggaaaccctgcatgagatgcgggatcccgaagccagattgggggtccctagggtcttggcttcggggctaggcgcggaaccgtaaatgagggttcagcctgtctgcctgagggattgtgtttcctgccgtatttatcactcaaattttgaaaagcagtcgaatttgttatatttggaacccctagtagttaaaaacagcagatgggaacatttcaggaatatgcctttgtgcccaggaaactgtggagggggtttcctgtagggtaagtgattacctggttcgccttccccatgttcacaaaggtcctcaggggtttgggggacccttttccatcatctcaacatggatggaaaacccccggtctcccaga

SEQ ID NO: 210946 - DNA, 896 bp, Homo Sapiens; identical to SEQ ID NO: 49397
  misc_feature (845)..(845): n is a, c, g, or t

SEQ ID NO: 210947 - DNA, 656 bp, Homo Sapiens; identical to SEQ ID NO: 47800

SEQ ID NO: 210948 - DNA, 879 bp, Homo Sapiens; identical to SEQ ID NO: 55102

SEQ ID NO: 210949 - DNA, 934 bp, Homo Sapiens
tttcttctttgctgccttgctgtcttgacactacctgcaagaagtgtggctgtaaaggccactttgcaaaagattgtttcatgcaaccaggtgggactaaatactctctgatacctgatgaggaagaggaaaaggaagaggcaaagtcagcagagtttgagaagcctgaccctacaaggaatccttctagaaaaagaaagaaggagaagaagaaaaagaaacatagagataggaagtcatctgactctgacagctcagactctgagagtgatacaggcaagagggcaaggcacacatcaaaagacagcaaggcagcaaagaagaagaaaaagaagaagaagcacaagaagaagcacaaggagtgagagtataaagagtgtagggggtggttgagagtaagaaaccaggagccttgtgccttgagactcctggaaagactcaatagtgagaatatagcctcccaccccattaacttcgctcccatgggagatggcttcccctcatgcaacaggcaggtttgggagttagaggtcaaaagcagctgcctgaatgagttgttgtttccttatcactcctggtccctttgcaagtgaaccctgcagctcacccattcattcacccaacttccttcattcagcaggaggtcctattaccctctccagctgccactgccagagctggattcctgtaaaggagtccaggctagagccacagaaactggtggtgggaagtgaatttcggctgtagtttaaagtgattggacccttccctattggtctgtcctgggccaactgggtggggtgatctctgctgcatcccacatggggagcagagactggcaaccaggaggggggaacctggggggaaaaagggggggctcattttttcccctttccttctaaccctaattcctcctatggctagaaagtggcct

SEQ ID NO: 210950 - DNA, 735 bp, Homo Sapiens; identical to SEQ ID NO: 45636
  misc_feature (666)..(731): n is a, c, g, or t

SEQ ID NO: 210951 - DNA, 882 bp, Homo Sapiens; identical to SEQ ID NO: 51818
  misc_feature (619)..(619): n is a, c, g, or t
  misc_feature (694)..(694): n is a, c, g, or t
  misc_feature (873)..(873): n is a, c, g, or t

SEQ ID NO: 210952 - DNA, 892 bp, Homo Sapiens
  misc_feature (613)..(613): n is a, c, g, or t
  misc_feature (665)..(665): n is a, c, g, or t
  misc_feature (674)..(674): n is a, c, g, or t
  misc_feature (740)..(740): n is a, c, g, or t
  misc_feature (792)..(792): n is a, c, g, or t
  misc_feature (826)..(826): n is a, c, g, or t
  misc_feature (832)..(832): n is a, c, g, or t
aggaaaaggtgacggaaggaagaaaaaagtctagctatcttgaaatgtaggttaagcacttgcttcattttgttgtattctttccactcacttttgtgaacttccactgaagatgtcttgaatctccatggaattcttctcaaagcttcagcctggatatccagcctcctgactcacctttggggtttccaaaatatgataagttcaaaatctgtggccttaagaaggtggtggaagccaagtttcttttggttcagaagcactttgagtatataaatggattcgtgctgtagaccctgattcatgatttagatgtttcgcaggagcttttcaggatagagatggttcattgaaatttcacgtggatttaaggctcattaaggtgttggggaagccggatgccactctgtcagtataaatcccagtgaggctaatttagtggagctgtagccagctttcatgttttccatcagccacacttaccttcatctcttcccttctcctttctaaaatactgtatcagaaagtgacattttttttctcctaggagaagaatcgctcaaagatgatggtcttccttctttctaccatggtatttgtctttaaagattangcgatgtggtgggtgggcatggtggctcatgcctgtaatcccaacactttgngaggctgangtgagagggtcagtgaggccaggagtttgagaccagcctgggcaacatagtgggaccttgcccttntacaaaatgtaaaaattagccaggtgttgtggtccatgcccggtactcccangtacttgagaggcaagaggatcgcctgagcccangaaggntgaggctgcaatgaagctatgaatgtggccaacagaagggagaatcctgtgtccaaaaaa

SEQ ID NO: 210953 - DNA, 649 bp, Homo Sapiens
agcgatggcagtgacaggctgcacatgagcctgcagcaagggaagagcagcagcacgggcaacctcctggacaaggacgacctggccatcccaccccccgattacggcgccgcctcccgggccttccccgcccagacggccagcggcttcaagcagaggccctacagtgtggccgtgcccgccttctcccagggcctggatgactatggagcgcggtccatgagcagtggcagcggcacgctggtgtccacagtgtgaggacgctgaccccgggcagccgctgctctgaagagcttccgcgccttccccctggtctcgtccgttttcctcctcagctctcgctggtttgttcttgggttgtttttcttttccacctgccccatgccttttggttggtgaccccagactctgtgatcccccagggtccatggtgctgctccatccgccccccctcccctgtgtttacgcgccccatcctgtgtgtcccagccttttgagcagaaactgccaggcaggacctgctgggccgtgcggggcaccctcggcctcaccctgcagtgtctgtggcactcactgcttttctaaggctcgccgtgagccaggtctaaagtttgaagaaaaagaaaaatcttaaaaaaaaaaaaaaaag

SEQ ID NO: 210954 - DNA, 776 bp, Homo Sapiens
  misc_feature (739)..(772): n is a, c, g, or t
agttctgaaggggcagatgggggtgtgagtagtcggggagtcgggattgccagcaccctcacccttccttgggggcaagtagaggtgagaacactttccccacctccctccacagacactcctgaggacgctgcatcccacgcactgcctggtgcgtccatagagagaggatcaggtctcagcatttcatctgtgaaagaggcatggccctgggttagaaaggagggcaggagacatggaggaactggggggcacccagatggtgcagatggtttgcacacctgagcctgtctgtggtgaccattccgctcctctcccactaccctccaatctatcattccctactctctaaggccaaaatatcctgagcaaggctggcaaccccaccccaccatcccaaatgcaagcagccaggcccaggagttcctctggcccccacaggcatggagctcccagctggtgggtacagcttgagaggggggcagctccctcaggctaagctactgcccttcactgggccagccctgcctccagccctcacctctctcaccccaactctcccccaagcccctttctactcaacgggtgtagccactggtgctttgaagccttttgtttttataagatggtttttgcaaggggaccaggttctcttttcactgggaccttgcaaggaggggagtgctctcctggtttctgtgcaggcgggttgatttaaagatggtgttttcttctcttnnnnnnnnnnnnnnnnnnnnnnnnnnnnnnnnnnaaag

SEQ ID NO: 210955 - DNA, 671 bp, Homo Sapiens
  misc_feature (639)..(646): n is a, c, g, or t
gggtcctgacctttgataaatctcattgcttgataccaacctgggctgttttaattgcccaaaccaataggataatttgctgaggttgtggagcttctcccctgcagagagtccctgatctcccaaaatttggttgagatgtaaggttgattttgctgtacaactccttttctgaagttttactcatttccaaaaaggaaggcaagttttcctgcttccatgacgatggagagcaggcatctcctttcctgagtttcagcttgcttctgacagggaaggtgagtgtaagttttttccagcttctaagatggcagagaacgatcaccagcctgagccttatttccaggtaagtagctgaattagagttttgtcttaaaatttttccttaatgaataaaatgtaagattacccaccagctgcttttaatttctccttagcattagaacactcagtaatcatatgaattgtgcatttgtttgttttgcttaactctttctgtttgtttatgtttggggttttattgttgttgtttcacttttctcccatctcttcctgacttggtcaaatccaaaggaatgttccaaattatggggagcaaggcatctgaaatggctaaaactcctgtggctgcaaaaaatnnnnnnnnaaaaaaaaaaaaaaaaaaaacatgt

SEQ ID NO: 210956 - DNA, 897 bp, Homo Sapiens; identical to SEQ ID NO: 44559
  misc_feature (831)..(831): n is a, c, g, or t

SEQ ID NO: 210957 - DNA, 922 bp, Homo Sapiens; identical to SEQ ID NO: 54346
  misc_feature (653)..(653): n is a, c, g, or t

SEQ ID NO: 210958 - DNA, 1000 bp, Homo Sapiens
ctactttgatagagatgtggagaaggcatttatgaaggctagctctgaactcttcagtcagaaaacaaaggcatctttacttgtatcaaatcaaaatggaaatatgtacacatcttcagtatatggttcccttgcatctgttctagcacagtactcacctcagcaattagcagggaagagaattggagtgttttcttatggttctggtttggctgccactctgtactctcttaaagtcacacaagatgctacaccggggtctgctcttgataaaataacagcaagtttatgtgatcttaaatcaaggcttgattcaagaactggtgtggcaccagatgtcttcgctgaaaacatgaagctcagagaggacacccatcatttggtcaactatattccccagggttcaatagattcactctttgaaggaacgtggtacttagttagggtggatgaaaagcacagaagaacttacgctcggcgtcccactccaaatgatgacactttggatgaaggagtaggacttgtgcattcaaacatagcaactgagcatattccaagccctgccaagaaagtaccaagactccctgccacagcagcagaacctgaagcagctgtcattagtaatggggaacattaagatactctgtgaggtgcaagacttcagggtggggtgggcatgggggtgggggtatgggaacagttggaggaatgggatatctgggggatattttaaaggattacatgttatggaaaatttttatggaactgacatggaagcctggatgactaatctgtacttgggcacagtcttctttgctctaatttgctgacatgccttccctggaggggggtctgggcccaatgccaaatggtactccaatggatggttaagggggttcttaaaaaatttcataccctccttttggccccttttgtagtccaaggagggttttgggatctttaaaacttggggtatacaggacattggcgggaccccccg

SEQ ID NO: 210959 - DNA, 932 bp, Homo Sapiens
tgtgaactagtgaactaccatgttgacttctataatcgtccctgtttggggacagatagtttactgctaatggggtggaggggtgtgtgtgtgtgtgtgtgtgtgtgtgtgtgtatgtgagagagagagagagagagagagagaggtttgtcccatatatcttgttccagcagccatatatcttgtggtctacagcctgaagcatgatttcccttgaagtcttggggttgtttaaaggagagtcccttcaatataaaacctctgaaatattagtgagaatggctcactaatgtgaacaatgtttaaattatttatttatatatagaattactgaatattagtactgggaaaatttatagaaatcatctagtcttacccttcatcttacatataagaaaaatggtcttttcttctaatcacattcacaaaatatgatataaaccttgaccatgaatgtatgagcctaattagagaaacagaaaatcagcatgtcagttttccttcattcaaaataacatagtctttctaagcagtcattctggagttaacatgcctagttcagagccgctgtggatgctcaaatcatttctggaattgccttcaggacacaattatgagaaagtcagacttcccatattttgatcatgccttgtgttttcctacgtgtccttatcccactggattgtggctcttactcccaagacttattcccaaatgatttttttgactccttttcattaaatcaaatttcccccccacacccacaaaggttttgccctttggccgtacattctcaaaacattatttcattggctctgcggaaaagccccctcccttctcaaaccaagaagcggtcctcaaaacttaaatttttacatcgggggtcctttttcaccccccttttggcttcccgctcgacacttccattcgct

SEQ ID NO: 210960 - DNA, 380 bp, Homo Sapiens
ggtcgacttttttttttttttttaatggtatgtagggctccatttgtattcttgacctagaccttataaacgtgagaggtgggcctgggtctgggaggtacaaaaagaaggtggaggtaagggacaaagatagttttcagcatcctgatttaaaaatctaagaatgcctgtcagtgattcagatggaggagatgacggttccatccttccagcagcatcaggagagagatcaagttgggaattcttaacagaagccacagtgattagcactcctgcagagagagaatttcaagaaaagaagtcggaagacagaactcaggagcagcatgaggatgaggaatcagttaaagaaagtggaaaggaatgataatgggtcgacg

SEQ ID NO: 210961 - DNA, 958 bp, Homo Sapiens
  misc_feature (383)..(383): n is a, c, g, or t
atgtagaaatgaatgacagtgagatgcctgcacatctaaccttgtcagatataatcaaagttctgttcagtgacaaattaatgccctgtaatgtggtaaggaaatcttatttgtggatacagtcttcatcttcttcacttacccacagcagcaacaccaggcctgtcacacagatgaatgtgttgagggaatgaataagtatttccgtcaagaaaaaggaaacaacaaaataaaaccaacccaagtaaagaacagccaagtggccaggtgcggtggctcatgcctgtaatcccagcactttgggaggccatggcaggtggatcacctgaggtcgggattttgagaccagcctgaccaacactgagaaaccccatctctattanagatacaaaattagccaggcatggtggtgcatgcctgtaatcccagctactttggaggctaaggcaggagaatcacttgaaatccaggaaggcggagtttgtgggtgagttgagatcgcgccactgcactcccagcctgggtaacagaagcaagagtctgtccaaaaaaaaaaaaaaaaaaaaaagggaaccgcccaagttaaccgtagaaaagttgaaattaaaaaaaaatggaaaaatatttaaaaccttgattccatggtaaaaaagggagttaaaatttttgggccggtttttaatcccggggaaagaaaaaaatggaaaagaaataaccccttttaaaggtttttattggggtggtaaaaaaaaaaacccccccccctcaaaatttatttttccgcggccgattttttttaaaaatttaaaaaagggggaaaaaatataggggcggggggcaaaaggggggttctcacccccctgtgaaaccccccccacccttttttttgaaagcccccaaaaggggggggggggaaacactctctctttaaaaccggggagggtttttcacaaacacc

SEQ ID NO: 210962 - DNA, 823 bp, Homo Sapiens
aaccctacaaatgtgaagaatgtggcaaagcttttaaccagtcctcaacccttattaaacataagaaaattcatactagagagaaaccctacaaatgtgaagaatgtggcaaagcttttcacctatccacacaccttactacacataagatacttcatactggagagaaaccttatagatgtagagaatgtggcaaagcttttaaccattctgcaaccctttcttcacataagaaaatccattctggagagaaaccatacgagtgtgataaatgtggcaaagcctttatttcaccctcaagccttagtagacatgagataattcatactggggagaaaccctagaagtgtgaagaatgtggcaaagccttcaagtggtcctcacaccttactatacactgagagttctgaacttactctgtaaccatcccaaactcctcccaggcacagtctggcagaggtcctgccatttcggagacctggaggaagtggcccatttacagccatgtaggcaggcctgcagaccttggcctttactacggtacctgaagtggttcaatgactcagtttcagttacctgagccacagcttaaggtcagttccgcctatatagaaacccacacagttaacctgaggaaatgctctctggtactcactgaaagccacactcatccacatcctgatacaaggcccaccatatgcagacctgactgccaaaacatgccctagtgtctgccgtacagagtgaagtcctgaaggatatttagtctgtccaaaactaaaatgaagatttcaactccccacccccctctaacaagccagct

SEQ ID NO: 210963 - DNA, 490 bp, Homo Sapiens
  misc_feature (262)..(262): n is a, c, g, or t
ggtcgacgaaatctttgatggaattagccatgcagtacagatattaaatgcatcctcattcttctcatagtcaaaagtatttgcctaagctggatgggaaaaagagaatcccatttcactaagtataaaagaggggattttagagaaggtctcagaagaaagagatgtggcggtttggtgaaactcaccagaggctgaaccctctccagcataacacacggattgggaggagtggggtggcattaggccaggtgcgtacccnagtgctgctctctctggacttgtttgctagctgaactcatccatttgcataattttcagtgccatttctcagctgatgagtcctgaacttttgtcttgaagttagacttctccttcaaacagcagtcttaaacactcaacttctttcctggtttttccacttgtcaactcatgaacacctcaaacctgtaaaatccaagccagactcatggcttggagtgggtaggga

SEQ ID NO: 210964 - DNA, 817 bp, Homo Sapiens; identical to SEQ ID NO: 44292

SEQ ID NO: 210965 - DNA, 903 bp, Homo Sapiens
aatatgcagcattactgttttgcacataattccaaaacatcgtattttcttattcatgtatctctagtcttcttttagacagttggacccttttttctttttcttttttttttttttttaagtattgttaacaatcctttggaagtcactactggtctttgtgtgctgctttttaataattgagttattttgagcttgccaagtaggatctattgcctggactaaaatttatttcctaatcttctgatgaccaagaaaggaaaaattaagtttgcagatgtgagatgaaatatagccagtgaatatgcatactgattctgaatgaaaggaattaacttttcagtcaagaaacagtctgcatgcagtaaattgaatttttcctgcaactggaatgatttgtttaattcttctttgaacactgccctttctccagtaagaacactaatgatttgctaatattttttaaagaaatctgtttttttaattagttaagctcagacttcctcttattttttatcctagagaaaactgctaaaagggaatgatatatcagtactattcttctaaaacaactttttaaaaatgattatacaaagccaaatatgctcattatataaaatttagaagcaaaaagaaggaaataaaaattttccataattctaccagctagagataatggtgttagaatatattcctttctaatctgttttctatgcatgcacaaacacatatgtgagcacatatttataattttattctaaaaaataggacactgctgtacatattgttttacaatctaaggcatataattataatattctttaaacatatttatgagtaaaataattaaaacttatacaaaaaaataacggaatggcttttttagctcattcatggattttt

SEQ ID NO: 210966 - DNA, 872 bp, Homo Sapiens; identical to SEQ ID NO: 42075
  misc_feature (647)..(647): n is a, c, g, or t
  misc_feature (818)..(819): n is a, c, g, or t
  misc_feature (826)..(827): n is a, c, g, or t

SEQ ID NO: 210967 - DNA, 830 bp, Homo Sapiens; identical to SEQ ID NO: 50337
  misc_feature (642)..(642): n is a, c, g, or t
  misc_feature (764)..(764): n is a, c, g, or t

SEQ ID NO: 210968 - DNA, 659 bp, Homo Sapiens
agatgtggaagagagagcccaggccataattgacaccacagatgattcgactgccacagaaagtgcaagctccagtgtcatgtcccccagcttctcttctgagtgaagtctagggcagattcttccctctgagtttgaagggggcagtcgagtttctacgtggtggagggcctggttgaggctggagagaacacagtgctatttgcatttctgttccatatgggtagttatggggtttacctgttttacttttgggtatttttcaaatgcttttcctattaataacaggtttaaatagcttcagaatcctagtttatgcacatgagtcgcacatgtattgctgtttttctggtttaagagtaacagtttgatattttgtaaaaacaaaaacacacccaaacacaccacattgggaaaaccttctgcctcattttgtgatgtgtcacaggttaatgtggtgttactgtaggaattttcttgaaactgtgaaggaactctgcagttaaatagtggaataaagtaaaggattgttaatgtttgcatttcctcaggtcctttagtctgttgttcttgaaaactaaagatacatacctggtttgcttggcttacgtaagaaagtagaagaaagtaaactgtaataaataaaaaaaaaaaaaaag

SEQ ID NO: 210969 - DNA, 498 bp, Homo Sapiens
ggtcgacgggaaaccgccgccatgattcagtcatctcccaccaggtccctcccacaacaatgggaattataggcaatataattcaagatgagatttgggtggagacacggccaaactgtatcacattgtatgtggatatgttaatttttttaaacatacagacataaaaattgctagaaattaccgacaagaaaagcaaattttgaataaattgaattctggaaatataaaacgggcttgtttttagaatacaaaatcagatgttaattcctgtgactgactgaatatagaaaggtaacctaaggctgggcacggtggctcgtgcctatagtcctagcactttgagtggctgaggtaggtggattgcttgaaaccaggagttcgagaccagccaaggcaacatggtgaaacctcatcgctacagagaatgcaaaaatttgcggggtgtggtgggacaaacctttgtccccgctactccagaggctaaggtgggggatt

SEQ ID NO: 210970 - DNA, 873 bp, Homo Sapiens
aactgctgccaactcgccaccactgctgccgacctcgcaaccactgctttgtctctgaagtgagactgctcctggtgccatgaacggagacgacacctttgcaaagagacccagggatgatgctaaagcatcagagaagagaagcaaggcctttgatgatattgccacatacttctctaagaaagagtggaaaaagatgaaatactcggagaaaatcagctatgtgtatatgaagagaaactataaggccatgactaaactaggtttcaaagtcaccctcccacctttcatgtgtaataaacaggccacagacttccaggggaatgattttgataatgaccataaccgcaggattcaggttgaacatcctcagatgactttcggcaggctccacagaatcatcccgaagatcatgcccaagaagccagcagaggacgaaaatgattcgaagggagtgtcagaagcatctggcccacaaaacgatgggaaacaactgcaccccccaggaaaagcaaatatttctgagaagattaataagagatctggacccaaaagggggaaacatgcctggacccacagactgcgtgagagaaagcagctggtgatttatgaagagatcagcgaccctgaggaagatgacgagtaactcccctgggggatacgacacatgcccttgatgagaagcagaacgtggtgacctttcacgaacatgggcatggctgcggctccctcgtcatcaggtgcatagcaagtgaaagcaagtgttcacaacggtggaaacttgagcgtcatttttcttagtgtgccaagagttcgatgttagggtttccattgtatttttcttacagtggtgccaatttctgttagatacta

SEQ ID NO: 210971 - DNA, 908 bp, Homo Sapiens; identical to SEQ ID NO: 43834

SEQ ID NO: 210972 - DNA, 1000 bp, Homo Sapiens
ccatccccaaattcaagattagaaagatccctgactgcttctcaagatccagaacattccttgacagagtatattcaccatttagaagtgatccagcaaagattgggaggggtactaccagattctacttcaaagaaatcctgccacccgatgattaaacagtgaataaaatgtcatggctctttcctgcgacaattctatttgaggaaaagatttgtttttcccttttcccaaggaagctcgtgggacagcatgggcactactcttcatgtgcggtgacaccagcccccagatgccttgaattaagtgtcctcacctttatgcatgactgcaaagccagctggagcattttctatggagcctccgtatgttttaggcccatgaccttcgtgaggtgacgggcactcactcccatgagccctggctgtgtgctgttgtgtgcctatcggcagatccatccttcctggcctccagggaggataccccgaagaatgggcttcccggtgggttttgtttatttttcctaaccgggtacagaatgggaaactttcctttacgcattgaagcacccaacctacctcccgatgggggaaggttcgcgcttggccgcctcgcccggcgtctccgggtgttggcccggacactcccgccagatcaactacaggtcgacaccgatgtgccaacaaccacaggattgagggggtacgcgccccgtacgtttcggcccccccgttctatcagcgctgttgtgacgggcgcggtggctcctcgtgggggggggcggccctcctatagacaattgtccctctccgcgggggggacaccacgccccaccctatgaggccccgccccttctgcgcgtatagcagtggcccgcccccaccgccgcgggttcacccatatcccacgccattggggtgggggcgcgcgcgcacccctcaaacacaccacttgcccgcacgagtacaccgcaccccttctccagcgacgtcccttggcg

SEQ ID NO: 210973 - DNA, 879 bp, Homo Sapiens
  misc_feature (749)..(749): n is a, c, g, or t
  misc_feature (785)..(785): n is a, c, g, or t
  misc_feature (831)..(831): n is a, c, g, or t
ccacgcgtccggggcagtcatttctggcgaggcagaggcaagcgaccagcagcagaagatcatacccaggccacgtgcagccggccacagcaaggtagagaagttgtgccgctcaatcacagacacctgcacccacaacatacttctgttacacacaagaacatttcaggaaactcagccagcttattttttgtttctcttctatgtcaatacttagtgtttctcattttgaggactttttctctctcctgtatctttgttttagtttctttggtttttattttgtagtcctttcagttatttttaatgtgccaaaaatttgtacatgttcaattaaaaatgttgtataatagtgtaatacttttctttgtatgaaaatgtcctcttcttcaaaggtataggctttgtaatgaattagattttctgccaataattgatatacaatttatattctttattgtgcctgtgtgttaccatgctaagaatgtctttgtttaaagggaattaatctttttatgatgtattaatctgtgttttcaattgttttccaagtacagttcaaataacttgcatatttactatacaaaatggttgacaagtgttctttttgcaaagacttgaatacattggcagaggtgctaatcacatcttccctaaggcacctggaagaattatttgaggaaaaaatgagttttcacattgttttataggaaattaaatttgtccaaagatttggagactatttttanacataaatacataaaatttcattatttcctgctatnctgtttgctggcagaagtgaatgtttggtgaggttattttgggatnaatttaccaaagaaaaaaaattagacactgccataaatttcttgttct

SEQ ID NO: 210974 - DNA, 892 bp, Homo Sapiens
  misc_feature (746)..(746): n is a, c, g, or t
tctgccggtgctgctgcgccctgcggagctccgaacacgtgcgcagaggctggctgtggcagatgcaactgcaggatgacttgaaagtagggcatccttcacccatctgaagggaggaaatagtggcaggtgacagtctgcatgtgcagttttcagatgccttcacctgaatgacatctacctccatcaggaccccagatgtctgacagccctgtgtgacaccaagataagtaacgatcccgttgaagataccacattacacttaggctcctgttggccatgacagcttcttagacttgtttttaatgaccttgacagttttgtttttttgtttgtttgtttttgggacggagtctctgtcatccaggctggagtgcaatgtaatggctcaatctcagctcactgcaacctctgcctcccgggttcaagtgattctcctgcctcagcctccccagtagctgggattacaggcatgagccaccgtgcccggctgcctcctaaattctcaaaacattccatttttattctgtggtcttactttattctgtcatgtagagaatagtggttgagcctgttgtcttttgagagtggatgctgtagtcctgacatggctgactttcagcccgtaagcttatagtagaggatggggattttgttatcagctgctaaaagggagaagccaaagcccagaactaaggggttctgatgaagttgaaggagagggaaaatgcccctcaaggcaaaanaaccctctgaggttagaaatctggggctttcacccggagtggaccaatgggtaagaacctttcttcctttctccagggatttaatttcctccctggggaagaagaacttcttaggggggtttggtccttaaaaaccctgggttttc

SEQ ID NO: 210975 - DNA, 962 bp, Homo Sapiens
ccacgcgtccgtgaacagatacaagccaaacgtgctgctaagaaacaagaattcgagaggagaaaacaggagagagaagaagcccaaaggcagtacaaaaagaagaaaatggaagtgtttaaaatactgaacaaaaagactaaaaagggccaaccaaacttgaatgtacaaatggagtaccttcttcaaaaaatacaagaaaaatgttaaacattttgttcctacaggttaaaatatctgctgcctattaggttcttctgtgacatgtgcctcccagcagtgaactaaatttgtcgacataaactggattgctaaactatgctaaatataagatgttcacatatttttattatggtaaaaaattttctaaatatgttctacatgtttcttatttatttgcctctgaaggaaggttggcctgaagaactgaaagaacctcttattttgcaagacaggcccaagcatgtaatacttttgtaccatatgagatttatatgaaataaattttttacccctccgcgccaagcagcccaacacccaaccacccaagaagccaaacgaaagaacccccccaacggaaagcgaaaccccccccacagagcccgagagcccccgcacctcccccccacaccgaacggcccgggggggggccccccccaaaaaactcccccgggggggggccactctttatacgtcaaccccgtttttctttgtgaacaaagggggccccttataagggggggctgattttttaaaaattaaaggggggggggcgttttctttttaaaaaacccctgggggcgcgggggaaaaaaaggcccaaccttggggggatattcttgtgggagggagaaccctcttcctttgcggtcggggggggggccaacctcgttgggggaaccacaactccccctcaaaagaaatttttttatagtctcctccgcggggcgagaaatataaaa

SEQ ID NO: 210976 - DNA, 814 bp, Homo Sapiens; identical to SEQ ID NO: 41200
  misc_feature (803)..(803): n is a, c, g, or t

SEQ ID NO: 210977 - DNA, 892 bp, Homo Sapiens; identical to SEQ ID NO: 42830

SEQ ID NO: 210978 - DNA, 812 bp, Homo Sapiens; identical to SEQ ID NO: 58275
  misc_feature (797)..(797): n is a, c, g, or t

SEQ ID NO: 210979 - DNA, 876 bp, Homo Sapiens; identical to SEQ ID NO: 50177

SEQ ID NO: 210980 - DNA, 636 bp, Homo Sapiens
  misc_feature (606)..(610): n is a, c, g, or t
  misc_feature (612)..(635): n is a, c, g, or t
ttccttccacctccaacttataccctctaagtctaaggtgaaggaaagattcagaataaatccaacttgtttatagaaaagttcttgttagtccttagacctcatctcaactgctctgttgaaggtaatgatttattggggggaaaaaacaacgccaatttatcctctctgtattaaagtgataattctgggcccacagaaatcagtcagtacctgcggtgtgccttaaggggactctcatgatcatcattcccttctagagaacattctagatgaagaaatgcaactgttgaccttctggttcacccatctccccctcgaggcattcttgataccccttctcacctgcatttctgtcccagggataccagatgcagccactacctaactaggcttgtcctgggggagtgagccgtgaacctggagacatggctttgacccacagctactgttcatttcctcaggctttgcgctgattccctcaataatatgacagtaaggcaagtagtctccttgcctttctcctgaaaggtatgagatgtggacatttcagtgtttgaattattttaagagatgttttatagaaataaaacgttttgtagctannnnnannnnnnnnnnnnnnnnnnnnnnnng

SEQ ID NO: 210981 - DNA, 600 bp, Homo Sapiens
tctgtcatcccataggccaccacacagagaaatgctggctgagggtcacttgcttgctctgtgccccatgaggcagcacctgccccagatggacggggctgtgaggggtgtctccaggcacaaaggcccgaacacaggaagcctgtgaccatggcagccttgtcttatgggcgcatatgtgcgtgtgtggctgagtctctgacagctgtgagtgtgtgtgagcagggtaagggtacgtgaggggtctgagaggagtgggtgcttgtcccccaaacctgcatgaagcaagaacaactcctggccaggccctgtcctccccacgtacccctgcatccccagcctcgacccagggacatgcagggctcacaggagacagggctcaggctgccggagctccaaccaaactctgtcccacttcacgcacggactgtcctgggcaaaggtgttcaccttttccgagcctcggtttccttatctgtaaagcaaagcgacaccagcaagcctgtgagcattgtgtatatagcagacatggaggtcctgcagcaggaggtgctcaataaacacaaagcgactgaaggatggaaaaaaaaaaaaaaaaaa

SEQ ID NO: 210982 - DNA, 977 bp, Homo Sapiens
  misc_feature (106)..(106): n is a, c, g, or t
agttttttttttttttttttgaaggttctcaggtctttatttgctctctcaacttccagggattgacttatttaattaatccatcaacctctcatagcaaatattntgagaaaacaaatttatattcagattcttattttcagtagggaagtaagaagttgcagctcagtacacgtaaagttgagacagagatggagacatccagcccacttctctggaacaggaaagatgatcggggagggaacacaggtcagtgtggggacaggggtcacggtggacacgggggtgggctgtctctccacctcctcacattatgctaacaggaacgcagacgcattcagatgcctttgcagaaagagatgccagaggctcttgaagtcacaaaggagaggtgtgaagaaatcctgcatctcagtcccacacaggcagctgtctcaggctttacaagcgatgagagactcatcagagccctgggcactgttgctggacgcagcctgagagcagctccctccttttccacctgagctcttcctcctacacataacaacagccaccacagctcctaggacagctaggacagccaggacagccaggccagcaacgatgcccacgatggggatggtgggctgggaagatggctcccatctcagggtgaggggctccggcagcccctcgtgctgcacatggcacgtgtatctctgctcttctcccgaaggcaccaccacagctgcccacttctggaagggtccatctcctgctggcctggtctccaccagctcggtgtcctgagtttggtcctccccatccccctggcaggtcagtgtgatctccccagggtagaaagcccagggcccagcacctcagggtgggcctctgggtcagaaaccaaatggtggggtcacgtgttgtcttttgggtgttccgcgcggctgcaaacgtctcccttccccttctccaggaaatctgcgggagccact

SEQ ID NO: 210983 - DNA, 885 bp, Homo Sapiens
ccacgcgtccgatcaatactttaactgcattctgtgacagactgttaatatgaggactgcagacaccaagtggctctcctttgcagtgtttatgaattacatgcatttgagctatcaatttttttttcttttttctcaggtggagtgaagctgacagtacagtagatttggagagtaatacaaatcctttctttctggttagaacacactgccaaaagccatctctttcatctaaggaaaagattaaaaatgcatgttgatatctcctaactatcacacaacttccactattacaatgaaaaatctgttcccctttcattgcctctgaaaactctttgacgagtagatttcaaaaacagagattttaaaaatttgcttgctttactggtgaaggacatttgcattttttttttttatttatttaaaggaattagtttgttctcctggctcattcctctttgttactttctgttccaatacacagaaagcttgatcatctttgatcagcagaaatatcttttatttagcaaagctcaacttcccaagagttatgcatggtgtgcctatctgaaggtggtgttagctctgttgaaatgcctgggtctgagtaactgtcatgatttttatgattaaaaacagactcttcatcaagaataatgactaattctaattgggctttgtgatatgtaagataactcataaatgaattgcaatggattttatttccgattaactatatatttatcaaagagggactgggagcaagggttttggagaatattttttagggtacccaatagccataagtgagggattccaaccaaaaagatggaattttattaagcaggcaggtgcccaatcacccttaagggggttttaaaccta

SEQ ID NO: 210984 - DNA, 900 bp, Homo Sapiens
  misc_feature (717)..(719): n is a, c, g, or t
  misc_feature (770)..(770): n is a, c, g, or t
  misc_feature (792)..(793): n is a, c, g, or t
  misc_feature (808)..(808): n is a, c, g, or t
  misc_feature (815)..(815): n is a, c, g, or t
  misc_feature (822)..(822): n is a, c, g, or t
  misc_feature (878)..(878): n is a, c, g, or t
ggacgcgtgggatcgcgagcgccccctttttttttttttttagagatggaatcttgctatgttgtccacgatggattcaaaatcctgggctcaagagatcctcctgcctcagcctcctgagcagctgggactacaggtgtgcaccgccacactccacagctgatgttttaataaagtgccactgagtatcagactgatcaaactgaaaacatcccagaacttcagaccaggttaagggggccaatgagaagatcatgaaaagtgacatcagatgaaagctgagatctgtgaaagtttcaaatcagtttttccaagtaagtccacagaccatttgataggctaagcccagttctttacacaatgtagcagccatcatgtctgagtactaattgttctcttcccactggtttttgtgaaattttctgttctgttaccttttaaagattctagcaagtttttgactgtttcaattgcaaacttattgcttttcttcttggtaaaggactttctgtttggagcagatggtagcaatagggataccagcccccagggccgattacttgatatggaaggtcgatctgtatcttcctgttgtaaaatccaggcactttctcgggccaaatctacaaatttttgcagctggctttgacttacatttttgcttatgttgagagaagtttcaaatggattctgaatgtacagaggagaaaaattcannngtttgttttgctccccttccctgtcgaaatatttatgggaattttttatcngaaagcaaaaattgccaaaatnnactcaaaaaattccnttcagtnagtaatncttaaatggtttctgggggttcctggtgaaaaggttttaaattcctacctcaaagntcacgaaaacaaaagtgggggg

SEQ ID NO: 210985 - DNA, 931 bp, Homo Sapiens; identical to SEQ ID NO: 41705

SEQ ID NO: 210986 - DNA, 873 bp, Homo Sapiens
tttttttttttttttttttataacaaaaagtatttaatattttaattttcaaaaatgtctctgtaaataagatacatcttacacagactgtatgtcttacagaatagcaattatattcaatatgtttatttctttgtgttacaatttccttgtttgccttatagagatgattcaggaccctaccaaatccactaggctgttgcaaatatcaagatcatctatgcaatagtcatttgagaaaaataaagcattatgcaaaatattgctatgctgataccaactatatgagcaactagggattaagccagatccccgtggggaacagaatattcaacttcctccttgcagtgaggtgataaaacctgtatggaccagctaggtaaccctagggggaaagaaattgtttaaagagacctttctaaggctggtaggaagttgaattttcttaccaatagaagcagctgaactatttgttttttacacattaaatttgaagttggtctctgatttccacccattgcccaagagtttaagaaagagagatgaccacagctactgatgattaacagatcaaatgtttttgtctgtggtaaacacaaacattcctgaatttcctctcagaagctattgttgcatagaaatgtattatgatttagtcctccacaaatcaaagtaatttttttctttagaaatactcccagattggctgagtgcagtggctcacacttgtaatcccagcactttgggaagctgaggcaggcaaatcacttgaggtctggagatcaagaccaggtgactgttaaggcatctgttttctgtcctgaacttttgtcactggggacatgggagaaggtaactttgcttggcagtcac

SEQ ID NO: 210987 - DNA, 898 bp, Homo Sapiens; identical to SEQ ID NO: 52930
  misc_feature (859)..(859): n is a, c, g, or t
  misc_feature (873)..(873): n is a, c, g, or t

SEQ ID NO: 210988 - DNA, 742 bp, Homo Sapiens
  misc_feature (708)..(726): n is a, c, g, or t
  misc_feature (728)..(728): n is a, c, g, or t
  misc_feature (732)..(732): n is a, c, g, or t
  misc_feature (734)..(741): n is a, c, g, or t
ggacgcgtgggcggacgcgtgggtttttggtctttgatgatttgtataatttagattttgaaatgggctctctgattactcagccaacaaatatttatagggtaccttttatatggcaaggcaccaggcacagtgctaagaggaacataagaaaaacgaacatggtctgtgccttagggagcttatatagacaaaagcaaacaaataatcattaacctttatttttgtaggtgacaaatgagcaatgcataatatgcaaaatctgggttaagggagagaatcaagatattcagaaaaaaaatctcattacctgctcctcatgcctcaaaaaaaatccagaagattttgaaatgcaggagataaacatcacatattccttattaatctttgtattccaaaaataatttctgaaaatcacaggaaagaaaacttttgtgtatttattagcagaggcaagctatactatcaattggacacctcaagggcacaaaattgcctggaactacaaccttcaagttcaaaatttctacctccagaaagcaatgatgtttctaaagattctcttattttttaattgtgattagtagatgtgtattcctaagtattctacagcaatgagaaataaggagcacattctttttttttttttttaatcaaatcgattctgacaaaaggagtttattgtcttgcttggttaaaggctgaccnnnnnnnnnnnnnnnnnnnanaaanannnnnnnng

SEQ ID NO: 210989 - DNA, 892 bp, Homo Sapiens
ctagatcgcgagcggccgtcctttttttttttttttatatttgaagaaatttattgagtcaaatatgagtgaccatgccccatgacacagccctcagaaggtcctgaggacatgtggcaaaggtgttcttcaaagtgttcattattaaggcatccatctcccataacttcaatgcactttgctaaacaatgcattatttctgaggacatctgaatctgtttctgtaccaatggtcttaatcagaacatcacataaattgccacatctgtgtgagatactcaggaccacggactctcacacactccagaagaaaaggcacggattctgctgctgcccctccaacaccattgtggaaataaaatttcagtaaagggaccaccagtttgacaacctgcttggtgtactccacaaagcagtcaaatcagctatgtgctgcaaaaggtcactttttttttctttgagatggagtctccctgtcacccaggctggagtgcagtggcgcaatctcggctcactgcaatctccgcctacctggttcaagcgattctcctgcctcaacctcctgggcggctggaactacaggggcccgccaccacgcccagccaaccccttgcgttttaagcaagatggggggttccccctgttggccagggtggtctccaaactcccgaccttaggggatccactcgcctcggcctcccaaagggctacaaaccacaggggcgaaccaccgagcctgggcaaaggccaaaattttttcctgggcggaacacacccaggtaccacaaacaaaatccccctccccccgggtggcgaagggcgcccaaaaaaaatgagcctttcggggggcaaacaaccccaggcgtttaaaaggtctacaccccccgcgggc

SEQ ID NO: 210990 - DNA, 884 bp, Homo Sapiens
ggaatcctaggcgcggatctcgcgtttccggccggaaggcttctccagcctttcccggaagctgcgctcgctacccgggtaacgggtcccggctgtggaagctcccgcggcgccgcgatggacctcgaggaggcggaagagtttaaagaacgctgtactcagtgtgctgctgtctcatggggtcttactgatgaaggcaaatattattgcacttcttgccacaatgttacagagagatatcaggaagttacaaacactgatcttattcctaatacccaaataaaagccctcaaccgggggcttaaaaaaaaaaacaatactgaaaaaggctgggattggtatgtgtgtgaaggtttccagtatattctttatcaacaagcagaagccttaaagaaccttggagtaggcccagcctaatttttgtaactttttataatgagacttacacagtgatttaaattatatacaggatgctcagccagcacaaagctgtggtgagatttgggcccaagtctccgactccagattccaaaccacattaaaaaaaaaaaaatcacctgcagactgcctatagctttaacagtctctgtctccccttcttcacatccttccggtggagaaaagtttgtggatattaagtaaatttgattcaatagacattttatttttttgtaaagatgatggggtcttgctatgctgctcaggatggtctttgactcgtggcctcaggtgatcctcccacctctgtctcccaaggtgctggaattaccgatggtgaaccactgcgcccagccctggttttggtagtttccttaaaaagtgaaaaattagaccctatccatggggacccagcccattccacttacctaaggtggtctaacccc

SEQ ID NO: 210991 - DNA, 849 bp, Homo Sapiens; identical to SEQ ID NO: 43629

SEQ ID NO: 210992 - DNA, 851 bp, Homo Sapiens; identical to SEQ ID NO: 42657

SEQ ID NO: 210993 - DNA, 871 bp, Homo Sapiens; identical to SEQ ID NO: 41813

SEQ ID NO: 210994 - DNA, 614 bp, Homo Sapiens; identical to SEQ ID NO: 51390

SEQ ID NO: 210995 - DNA, 878 bp, Homo Sapiens
agatcccatcccagctgtgcacagtctgaagcaagcagagtgaaacaagttggcaacttgttccaagcgtgggcctttgcagtctgtgatccagtgttactccaggtcccagtctgtcccatacttgtcttttgctacagttagttagttactttgttatcatccccttgtaaactgccttcaatatctgggataaggaagacaaagcttaatgacaactaaggttctagctgacatctttctttcatatttaatttttgtgagttttcatctgttttctgtttgtttatgtgtcctaggttcttgacctaaccacatgggttttgttttttgtttttatattagaacttagaaaagtttgttttacagcagtattatggaacagaagagaccattttaaataatttttttaaacagcccaaaacacacaaaagatacttgttttctagagacagggtcttgctctgtcacccaggctggagtgcagtggcacgatcatagctcagtgcagcctccacctcctgggctcaagtggtcctcctgcctcagcctcttaagcagttgggactacaggtgtgtgccagcatgcttgctgttttttttttttttgagacagagtcttgctctgtcactcaggctggagtccagtgggtttggtctcagctcactgcaatctctgccctcccaggggttcaagtgattctcctgcctcagcctcccaagtagctgaaactacaggcgcatgcccacatgcccagctaaatttttgaatttttaaaagagacagggttttcactatgtttggccaggcctgggtctcaaactccccgacctcaaggggattccgcccggcttctggccttcccaaaaggggctgg

SEQ ID NO: 210996 - DNA, 937 bp, Homo Sapiens
ttttttttaagaaatggctttattagaaaaaatgtagtgtacatgtggctaatttccatcatcgatatacctcttggctattttatcattaaaattggatacagggtttgaacttctttagaagttagtggcatatcttcctattctgatatgtgacttagggaaggcgttatcttcatatgatagacaccctttatttcttttcataattacaagtaatcagtagtttagcactggcacaaaacagagagagaattacttaggtagtgctttatgtgtaagaagtcacacttccaaccccagaagcaggcacaggtatgccatctgtagagttttaaaatcccctattatcactcaagtctcccattattattacctagtagtaattaaattaatgtgataatctgtaacctaacaaaacctctgaatgaagtttctttcttctccctcttttcctgttagatgtgcaattccgagcaaatgtgcagtgtgcagtattgatttccagcctccttttaaactccttcaagtctgtgctattaaacggagacaaccacatcaagatagagtctgtcataggattccctgaagcacagaatgaggaggagactgagcaaacacgacccggggaggcaccagttgaaccaagacaactctgtatgataaaatgtgagaaaaaataaaagtactcccataaacatattacttaaaaaagtgacaactccacaagtaattcccttctgggaactgggtagacagtttccaacaaaaaagctcaaaaaatattaggcccgctggctattcaagaaccactccccagggaggattaccgggagggcataccaatgttcacctggggggttaaaaggaagggggggggtgaatgcctggttccaaaaccagggttcacgggtgggaaacccaccgggtgggagat

SEQ ID NO: 210997 - DNA, 725 bp, Homo Sapiens; identical to SEQ ID NO: 53031
  misc_feature (650)..(650): n is a, c, g, or t

SEQ ID NO: 210998 - DNA, 924 bp, Homo Sapiens; identical to SEQ ID NO: 53364
  misc_feature (24)..(24): n is a, c, g, or t

SEQ ID NO: 210999 - DNA, 683 bp, Homo Sapiens; identical to SEQ ID NO: 46785
  misc_feature (630)..(630): n is a, c, g, or t
  misc_feature (649)..(677): n is a, c, g, or t
  misc_feature (679)..(680): n is a, c, g, or t

SEQ ID NO: 211000 - DNA, 956 bp, Homo Sapiens; identical to SEQ ID NO: 42929
  misc_feature (722)..(722): n is a, c, g, or t
  misc_feature (829)..(833): n is a, c, g, or t
  misc_feature (835)..(835): n is a, c, g, or t
  misc_feature (837)..(838): n is a, c, g, or t
  misc_feature (840)..(840): n is a, c, g, or t
  misc_feature (863)..(863): n is a, c, g, or t
  misc_feature (867)..(867): n is a, c, g, or t
  misc_feature (869)..(872): n is a, c, g, or t
  misc_feature (874)..(874): n is a, c, g, or t

SEQ ID NO: 211001 - DNA, 631 bp, Homo Sapiens; identical to SEQ ID NO: 51288
  misc_feature (607)..(607): n is a, c, g, or t

SEQ ID NO: 211002 - DNA, 781 bp, Homo Sapiens
tggcgcgcttagtgatgggatggccctgtgcaggacgccgacacgaaaagatgaagagttcaatccgtgctgtctgaactcacagtgtagcaggcgagatagacgggaagatcggtagggtgggagatgccggaaaggcttcccgtgagactggataagaaatcaaaaatctggtgaaattgccggcaagagggagttaaggacattccaggcagaggcaagatgaagccagatactcctctatgaagttaaatgactggttcagtgttaacactgctagtgagcgacagagatggaatttgaacgcacacctgtctgactccacctcgtgttccttccacatggccagcaagctctgctgtcccacctcgcacttctgggaggtggctactccctctttccacccccttttctggatcttgacaagggattctaccctgccccagctgtcaaagcctgcagcagctgccaaaaaacctcaacacaggcatactttggacctacatcatgtgttgatgtcacagatgctgtaccaggcatttgactccttgatctaaagccaggattcctagccaacatggcgaaaccctgtctctactaaaaataacaaaaattagctgggcatggtgataggcacctgtaatcccagctacttgggaggctgaggcaggagaattacttgaacccaggaagcgaaggctgcagtgagcagagattgtgcctctgcactacagcctgggctatggagtaagactctgtctcaaaaaaaaaaaaaaaaaaa

SEQ ID NO: 211003 - DNA, 866 bp, Homo Sapiens
  misc_feature (792)..(792): n is a, c, g, or t
  misc_feature (852)..(852): n is a, c, g, or t
gaagccgcagcagccccagtgccgaccagcagggggcacaggacagagaagaggaagccgcagcagccccagtgccgaccagcagggggcacaggacagagaagaggaagccgcagcagccccagcgccgaccagcagcagtcacaggacagagaagaggaagccgcagcagccccagcgccgaccagcagggggcacaggacagagaagaggaagcggcagcagccccagcgccgaccagcagggggcacaggacagagaagaggaagcggcagcagccccagcgccgaccagcagggggcacaggacagagaagaggaagccgcagcagccccagcgccgaccagcagcgggcacaggacagagaagaggaagccgcagcagccccagtgccgaccagcagggggcacaggacagagaagaggaagcggctgcagccccagcgccgaccagcagggggcacaggacagagaagaggaagcggcagcagccccagtgccgaccagcagggggcacaggacagagaagaggaagcggctgcagccccagcgccgaccagcagggggcacaggacagagaagaggaagcggctgcagccccagcgccgaccagcagcgggcacaggacagagaagaggaagccgcagcagccccagtgccgaccagcagggggcacaggacagagaagaggaagccgcagcagccccagtgccgaccagcagggggcacaggacagagaagaagaagccgcagcagccccagtgccgaccagcaggggggcacgggacagagnaagaagaagcccgcagcagcccccagcgccggaccagcatggggggcacagggacagagnaattagggaagccc

SEQ ID NO: 211004 - DNA, 903 bp, Homo Sapiens
  misc_feature (526)..(526): n is a, c, g, or t
ggcatccatagactatttccttgcttacaagctcagtgaacatactgaattcacttataaaaagaattttctcaattttagttgcttttcaaaaaattcttattccttttatttgtaattctttgacattgttgctgcttcacagttttggtaattggacagtttggtctttattatgatattaacatttttacctgtcctgaaacaaggaaatacaatcaaagaaacagaagattggtggaccttgaaccacattatgatatcagatgacccagagtcatggttactaagttgcctaaatttttagtaacaaagatgtattagaaagtgacaggtcaattcaataatggtttttttggatacatttaattatataatccccttaagttgtgcttagtcagcagtatttaatctgttgtctattatatatctaactggtctgttatgtttattatatatttatatattgcttattcatatcttattggagtaactcatttttaaaacaatatatttcatctcctangagaagaggatcgagtatgtgtttttattctttttcattaggacattggggtattttcttattgtgaaatgtattgaatatttcatttatttggtttgtgagtctgaccttcactccctagcactgatttttatttggccctccttttacctgattcataggagttacgagtagccgttaatatggatacatttttcccatttctagtacactgccccttccaaaagtgtctgggcttactccaactttttctggaattggttcatcctggcttttaccgatcaataccaataaggtaactataccttccaaacaaacatcaagttggtgggaaaaaagggatatggaacagtccttttctcacctactattcaaag

SEQ ID NO: 211005 - DNA, 964 bp, Homo Sapiens; identical to SEQ ID NO: 48266
  misc_feature (800)..(800): n is a, c, g, or t
  misc_feature (802)..(802): n is a, c, g, or t
  misc_feature (858)..(858): n is a, c, g, or t

SEQ ID NO: 211006 - DNA, 575 bp, Homo Sapiens
ctgtttcttcatctctggtgttcatgtcttttaattaaatacggaattttggagatgataagagggataacctgcgctatgccattttgcttccttatctcactgtgttctttcagagtgtagatatctacccaggtcaaaattcagccaaaagcactattatgtaaagataataatccaaatctttctcccaaatacatgtgtacagaatcatcccccaaggtttagagtcaccaataccctattctgagcttctgctgtatgttttatgtttataattacagttcacaaaaaggaagttagtcttgtttttaagatcagaagtgggtgagaggacctgtgatgaggttcctgagggtttggtgtttactaagtaatatatcttactctaggtgcagggctgatggcaagccaaagagcaactgccttactttgatgtaaacaaaatttgctaaactgagctgctcaaaattgtttttatggtagtagtgtttctttggattgtatcataatagctgccaaaggataggtaaagaggtcattaaaatgatgttgaactaaaaaaaaaaaaaaag

SEQ ID NO: 211007 - DNA, 773 bp, Homo Sapiens
  misc_feature (745)..(745): n is a, c, g, or t
  misc_feature (747)..(748): n is a, c, g, or t
  misc_feature (750)..(750): n is a, c, g, or t
  misc_feature (754)..(755): n is a, c, g, or t
  misc_feature (759)..(760): n is a, c, g, or t
  misc_feature (763)..(765): n is a, c, g, or t
gggggttttgcccgagttttatttttgtctgtctcagctagaaagtgggagactttcatttaaaatggaaattggggcgaggggttggcggctgggcgaagggagcattcaaaagcggagaatgtcactttacccgagaaattcactacgatgggccattggtttctgctcggctcgcaggcgcactgcacgagtggaggtgtggctagtggctgtgatgagataaatccatgcatagccttttcattgcgagcttgaaagttcttttctattacagttttagctttaggtttaattggttcgactgccttctccacaatttgggcgagaatttcctttgccttctcagcaaaagttgttctgcggacccgtctgggtcaactttcatgagggacattgagacaaacaaatgaaatatgggttaaagtactctgagcagctacaaaaagaagaccagtctatcctgctggagacagtggccacgtgaagaaagagctcttgcagtatgaaagaccacatggaaagagaggccacatggaaccaacagtcagcatcttggtttcggacacgtgaagaaattcatctcagactgtgtatcctaaatcaggcacttgctgaatctaactacatgagtgagaccagttgacaacacatggagcagacatgagctgttctcagtgagtcctacacaaattcctgactcacaacactgtgagccaattaaatgggttgttatttttaaaanannanaaannaaannaannnaaacatgt

SEQ ID NO: 211008 - DNA, 862 bp, Homo Sapiens; identical to SEQ ID NO: 55926

SEQ ID NO: 211009 - DNA, 879 bp, Homo Sapiens
ttgcctctgccatgttagaagtgcctttcgcctcccaccatgactctgaggcctacacagccacgtcgaactgcaagtccacttaaacctcttttcgttcccagtttcagtgtggtggaaaaggaagagagagctgaggcagacgatgtaagatctgctgttacttcttgctgtgtgaccttggagtaaagacagctttggagaaagacagacctggattcaaatgcagatctcttccttactagatgggcatgcttgggtgaagtgaagtgggtgtgcctgggatcacacacagctggaaaatcaggccatgtttgtgtccacaaacaagagtgaagataatctctcctatctgagaaatccaggagtggaggaatccaatgggaactctggccaagctaaaagaaggtctcaagagccacagatgtcttggatatttctgtatttcagactctactacccagacaccaaaagaagaaatgattaaccctggaggctgccttggtctaggtgaaaaaatatatgtacgatgacagtgcaatcatactagaactcaggattaagaaactcactcaaaactgctcaactacatggaaactgaacaacctgctcctgaatgactactgggtacataacaaaatgaaggcagaagtaaagatgttctttgaaaccaacgagaacaaagacacaacataccagaatctctgggacacattcaaagcagtgtgtagagggaaatttatagcactaaatgcccacaagagaaagcaggaaagatctaaaattgacaccctaacatcacaattaaaagaactagagaagcaagagggaacacattcaaaagctagcagaaaggcagaaataactaaaatcagagcc

SEQ ID NO: 211010 - DNA, 814 bp, Homo Sapiens; identical to SEQ ID NO: 43945
  misc_feature (660)..(660): n is a, c, g, or t
  misc_feature (692)..(692): n is a, c, g, or t
  misc_feature (773)..(773): n is a, c, g, or t
  misc_feature (790)..(790): n is a, c, g, or t

SEQ ID NO: 211011 - DNA, 836 bp, Homo Sapiens
atactcagagtacgcacggtctgattttctctttggattcttccaaaatcagagtcagactgctcccggtgccatgaacggagacgacgcctttgcaaggagacccacggttggtgctcaaataccagagaagatccaaaaggccttcgatgatattgccaaatacttctctaaggaagagtgggaaaagatgaaagcctcagagaaaatcttctatgtgtatatgaagagaaagtatgaggctatgactaaactaggtttcaaggccaccctcccacctttcatgtgtaataaacgggccgaagacttccaggggaatgatttggataatgaccctaaccgtgggaatcaggttgaacgtcctcagatgactttcggcaggctccagggaatctccccgaagatcatgcccaagaagccagcagaggaaggaaatgattcggaggaagtgccagaagcatctggcccacaaaatgatgggaaagagctgtgccccccgggaaaaccaactacctctgagaagattcacgagagatctggacccaaaaggggggaacatgcctggacccacagactgcgtgagagaaaacagctggtgatttatgaagagatcagcgaccctgaggaagatgacgagtaactcccctcagggatacgacacatgcccatgatgagaagcagaacgtggtgacctttcacgaacatgggcatggctgcggaccccctcgtcatccgggtgcatagccaagtgaaagccaggtgtttcacaaccagtgaaaaagtttgagccgtcattttttcttaaggggggcccaagatttcccatggttagccga

SEQ ID NO: 211012 - DNA, 978 bp, Homo Sapiens
tcgagcctttgtctggatcggcttctctccgcgggcggtaaacaagccgatcgagcctttgtctggaaagtcagcatctccggctccggctgcaatgtgttcctggtgacattagcatcgggcagacccgccggaggaggggggtcgccaggttcccgtctgctttcggaggcggatcgagcgggtgacttttgtgcattcgttttaatttttggaaatctctcttttttcctccctcgctcgctgccgggcatgtcctgatctggcggccgctcctaccaccctgggcagccgagcagagtcgtccccagcgggtctccctccctgcctccctgactttgcaacaccgcgttccgggaggaccggcctcggcgagggaggaggcgggggagctgcgaacacccagacccaaaccctgacatgctctggggcggagaggaggaagccaggagctgagcgcgccgcgggggctgcttcgccctccggctccgagcgccgggctccgggcgccctgccctgcgcctgggcagcagccttgctggtcttgggggcgccccccgcttcccgccccgggggtccgcggccggcaggaccatgctgctgaaagagtaccggatctgcatgccgctcaccgtagacgagtacaaaattggacagctgtacatgatcagcaaacacaggcatgaacagagtgacccggggagaaggggggggaggtcttccaggaatgagccctttgagggaccctcaccatgggaatgggccagttcccccgagaaacggggggtatcctccacaagcaaaactggcctaagttgggcctaaaagctggtttgtcccccaaaaatatttttattgtgaccaaagaaaggctttgggaacatattaaccccttcccccctttaccagaaatacccggggtccccttgtcgggcggaaattccccccctctcatttacaaacccaccgtatgagggg

SEQ ID NO: 211013 - DNA, 642 bp, Homo Sapiens
ccacgcgtccgcccacgcgtccggttacgttcacttcaacctacagacccttttgtataatgtacagcaaatgtcattaaatattgaatgctctattgggggaagacaaatgaagagaatgcattttgagcatttcaaatcagtagtttgggcagtgccttttggggtccaatctttttggattggattctatttcatcttttgatgtgacttttcactagtttacaaaaaaaaggttggtggtcaacaaaaaaagcaagtcatagcagttcagtgcctttgttggtagtttttaactttttttgtgattctttttggaaaatcatagcttacagatggtataactgtattatataatggaattttctttaggtgtgggaaaacttgatctgaaagaaaattatcagcttcaattggcgattgattcagtgcccacaatgtaaacagggttggtagttgttactcattttgaatataccttttccttattgtattctgtaatataggatcctggaaatgagacctggtggaatattattttcaactgtagtctttctatactgtggactaatgaaatggtgttgttgataatctaaaataaccaataatccaaaaaagttcattttaaaaaaaaaaaaaaag

SEQ ID NO: 211014 - DNA, 1000 bp, Homo Sapiens
ccttggtgtcccacagagccctatgagttccaccgtgcatgttccctgaacaagtttgagatccagtctgtagatgggaagtttcttaccaacactcagattctcaggttctctgggaatgttggaggtcagacacaccagacccctgttcctgcagggcagtgatcagctggagtggaggagtggcctgccttccctgatatatgtgttcagcctaccagtcagcaccatcccatattgtcctacagctgacctactgccctgttacccacctgcttggccccaaagcctgttgagttggcataatgtatttcagagaaaagctctcaggtaatctgtatggcttataagggaaacctgcagtcctttctgaaaggggagctgtgaatatgactgctttgtagaaagatgtcttaggattctgggtgaaaatttttaattcccctcatgtaggaatgtcacagagtgtacctttttgacttagtattttcctagtaaaatacacctttcttaagaaaatggctacaaagtcagatgcatgtaaatgctttcagcaagggtttgttgatcatctgctttaggctgggctctatgttaggtgcctgtggattccattctagtacctgtgttctcatagaattgaatcctggtcccccatatgacttttgatgatattcacactgttaattccaataaagacagagtagacaaacagaaactgtacatgaaaggaatagcatgaagttgtcgatttttaacaagtattataaataatgaaacggtcttttcactttcagatgagaattttcccttttttttttggttcactagatagtagttatcctaattcagaagttcaactaatgtaaatatccattgattgagaaattttgtatttttgttgttttcagttacttgttgtagttttctttttggtgagtcttatgattggctttattgtaatagaatggaacacaaactttgaaaaaaaaaaaaaaaa

SEQ ID NO: 211015 - DNA, 553 bp, Homo Sapiens
cacgaggtttttttttgaaagcaggaaacacctttatttccctgctgtgctgagtgaatcttttagcagacttgccgaaacaagaaatgagccaggtttctttgtttttgtttttgtttttgtttttgtttttgtttttgttttgaagacagagcttcacttttgtttcccaggctgcagtgcagtgtggcgatctcggttcactgcaacctccacctcccaagttcaagtgatcctcctgcctcagcctcctgagtagctggaattacaggcgcctgccactgcacgcggctaatttttgtatttttagtagagacggggcggtctcaccatgttggccaggctggtcttgaactcctgacctcaggtcatccgcccgcctcagcctcccatagggctgggattacaggcgtgagccgccacgcccagcacgagccaggttttgttgttgttttttgtttgtttttcctgctctgagataggcagcatggtgggaagagcattgacttcggagatgaaagacctggattttagactcctggggtagctactt

SEQ ID NO: 211016 - DNA, 431 bp, Homo Sapiens; identical to SEQ ID NO: 61129

SEQ ID NO: 211017 - DNA, 523 bp, Homo Sapiens
ggtcgacatcactttctttagattgttgggggaacctagggttctaaggaagtgagtttcctgatgtttgaaatttgccaatgcagcctttcaaaaatatgcttagcatagtttaaaaaaaagaaaattcacccttcttgctgattgtgaggaggtcagatatctgtccctcagctgtcacaatggtagacttgatggagttacatgacagagaagagagcccaaggaagcacctgagtggtttctcatctctgggccactctgttaaggcctgtttgttgactttgggattttcatcttattctggagagttaaggtcgccagatgaataaaatactactgttagtgagcactgggggagctaatcccaaaactgtttagccacaaggttaagaagttaagagaaaaataatgggactgttggtggtccttggtttccatttcggtaaatcccattggctgataatttggccttgggccatgcaccctgccaatttaggtactgggtcagttaatggctacg

SEQ ID NO: 211018 - DNA, 507 bp, Homo Sapiens
ggtcgacctccatccttggtgacagagtgagacatcgtttccaaaaaaattctacagaaatgctctatttacaaatttacataatttcctttggaaatagatttaaaaattttttaaggatgaggtaggtaggcaggaaaacggggttctttttggataaaaaaattcacatggccgggtgtcatggctcatgcctgtaatcccagcactttgggaggccgaggcaggcggatcacgaggtcaggagattgagaccatcctggctaacacggtgaaactccgtctctactaaaaatacaagaaattagccaggcatggtggcgggccctgtagtcccagctactcgggaggctgaggcaggagaatggcgtgaccgcggaggtggagcttgcagtgagcccagatcgtgccactggactccagcctgagcgaccgagtgagagcccccctgcgaaaaaaaaaagaaaggttttgccctctgaggagtcgtatgacagtgaacacggc

SEQ ID NO: 211019 - DNA, 704 bp, Homo Sapiens; identical to SEQ ID NO: 44556
  misc_feature (682)..(704): n is a, c, g, or t

SEQ ID NO: 211020 - DNA, 547 bp, Homo Sapiens
tagcataatagaaaaatgtaaacatttataacaaaggaagatgacttttaagccagaggagtgcccttttttggcatgcaaagttacattttaatcagcctgacaaaggcgccattgagtggcccaagctcaatacagagggccacagtggactatggaaacacagattagtttaacaaatgactcattatggcaacctctgcgactattaccaaagaggagatgatggaggcggacctgggaaataaaaattcttctcagaaagaaaactaaatgatctagccgtgtgtgtgtgagtgtgagtgtgtgtgtgtatatgtgtgtgtgtgtgtgtgtgtgtattgggaggaccaaagtagatcttacaaagactctcacactcaaaaatcagccaattttaatacaaagtagtccctaaatacaagccaagtattttaagaaattgggccagtaaaactgatctctttcatgtgcccttcctaaactcagggtcactgacccagtgtggccttcaagggccctggactgactgaaaccatatatgaag

SEQ ID NO: 211021 - DNA, 763 bp, Homo Sapiens; identical to SEQ ID NO: 53501
  misc_feature (630)..(630): n is a, c, g, or t

SEQ ID NO: 211022 - DNA, 863 bp, Homo Sapiens; identical to SEQ ID NO: 46886

SEQ ID NO: 211023 - DNA, 881 bp, Homo Sapiens; identical to SEQ ID NO: 45682

SEQ ID NO: 211024 - DNA, 639 bp, Homo Sapiens
cgtgccctgtcccctccccgggctccggccacacgagcgggccggcgctgcgctgctggcaacgtgtcgcgggaacgctcctaccccatctgcatgccttacatggctcgaaagtaaaaataaaaagaattacgatgcgggcgaggcttgtgggggtgagaagaggagattccacgtctccccagtgctgcgtcctgataggacccccagggccttccgagccctctcccagcgaccacctcgtgtcccggagttgcagcaagagatgtgagaaggtgtcaccctgaagaggaagtggtggaccagccctgcctgatgtggacagcaggggacacatgtctgcctgtcggtctatctgaaatgggggaaaaaatgctgaaagccaaaggagggcttaatgtggccttttccaccttctaattccatagaacctcagctctgggacttgcttcctgacctagggtgcaggggccaaatttgtttgggaacaaccccattcacaattccccatgaactttcagaaaggacccttgcgtcttaggtcctgagaagtcacaaataagcaagctgcattgtctaatgtcttgtctacactgttttacaaacacatttaacagccgaaaaaaaaaaaaaaaaaaa

SEQ ID NO: 211025 - DNA, 451 bp, Homo Sapiens
  misc_feature (445)..(446): n is a, c, g, or t
ggggagcaggttcttgggagcgtgaggcaggaagacactaggtgctgaatctcctgcaaaactggctgcctggaggccctgagccacccagatctgaataaaacagatgcttaccctggaagagcaaatgcctcctgttgtccttggtcaggggttctgtctacctggggacccctgtctgcacaccagggatcaataagagccaaagtgggacacctcctagatgtcagtatcagctggctgggcagtggaattttgagcgacctttactttatacttttctgtgcttgacagattttcagccatgaccatgttcactttataatcaaaacaaaaataaaggtcccatttttacaaaaggaaaaaaaaaaaaaaaaaaaaaaaaaaaaaaaaaaaaaaaaaaaaaaaaaaaaaaccaaaaaaaaaaaaaaaaaaaaaaaaaaannccttg

SEQ ID NO: 211026 - DNA, 888 bp, Homo Sapiens; identical to SEQ ID NO: 50025
  misc_feature (369)..(369): n is a, c, g, or t
  misc_feature (371)..(374): n is a, c, g, or t
  misc_feature (377)..(377): n is a, c, g, or t
  misc_feature (395)..(397): n is a, c, g, or t
  misc_feature (401)..(401): n is a, c, g, or t
  misc_feature (407)..(407): n is a, c, g, or t
  misc_feature (411)..(412): n is a, c, g, or t
  misc_feature (415)..(415): n is a, c, g, or t
  misc_feature (422)..(422): n is a, c, g, or t
  misc_feature (436)..(436): n is a, c, g, or t
  misc_feature (451)..(451): n is a, c, g, or t
  misc_feature (454)..(454): n is a, c, g, or t
  misc_feature (460)..(461): n is a, c, g, or t
  misc_feature (473)..(473): n is a, c, g, or t
  misc_feature (477)..(477): n is a, c, g, or t
  misc_feature (481)..(481): n is a, c, g, or t
  misc_feature (483)..(485): n is a, c, g, or t
  misc_feature (487)..(488): n is a, c, g, or t
  misc_feature (494)..(500): n is a, c, g, or t
  misc_feature (502)..(506): n is a, c, g, or t
  misc_feature (510)..(515): n is a, c, g, or t
  misc_feature (535)..(535): n is a, c, g, or t
  misc_feature (545)..(554): n is a, c, g, or t

SEQ ID NO: 211027 - DNA, 462 bp, Homo Sapiens; identical to SEQ ID NO: 45276
  misc_feature (432)..(433): n is a, c, g, or t
  misc_feature (435)..(436): n is a, c, g, or t

SEQ ID NO: 211028 - DNA, 1000 bp, Homo Sapiens
gagcagctcaccagacacagtgaccatccacccttcatctagcttggcgctgctgagctctactgccatgcaggatgggagtacactgggcaacatgaccaccatggttagccctgtggaattggtggccatggagtccggcctaacctcggcaattcaggctgttgaaagcacctcagaggatgggcagaccatcattgagattgatccagccccggacccagaagctgaagatactgagggcaaagcagtcatcttggagacagagctgaggactgaggagaaagttgtggctgagatggaagaacaccagcatcaagttcacaatgtggagattgtggtcttagaggattaactggggatctcagggccaggagttatgttttgatttggaattttaattatttgttttatttttatcattgccccactcatttccacataggaccccttttttaaaaaaaaaaaaaaacaaaatcttattgctgtaactgaaaatggtggggttcttccccactcccttcattgaaaaatggaccaaaacaaagctgccccttccaaaaatttgaagaataagggccattccaatgggccctaaattcttctttaaccccaaaggaaaagggaaatttttctctttttaaggggcgcaaatggttcaaaggacatacccacggttacacccccctggtccccacacaaaaaccccttttttcccacggccttcccttcctgtgggagcggggtgaaggcccatggtgaggctctcccacttcccctgtggccaaaacactggcaattgtcacccccacactcttgggccaacacacccacatcccttgaaaccctgggaaaacggcgtaaaccccacttccgcaaattgggggagagtgcctcgcacagaggcccccttatttatactttttctgaaaacccccttcagcaccagtgtgtccctccccccgagagaggctcaggctcccgccaaaaaacttccccc

SEQ ID NO: 211029 - DNA, 937 bp, Homo Sapiens
  misc_feature (148)..(148): n is a, c, g, or t
  misc_feature (151)..(151): n is a, c, g, or t
  misc_feature (153)..(153): n is a, c, g, or t
gagcgggtgaatcacttgaggtcaggagttcgagaccagcctggccaatatggtgaaaccctgtctctgccaaaggtgcagaaattggccgggcatggtggcgcttgtctgtagtccagctacagctactccagatctgggctgaggnggnanaatcatttgagcccgggaggtggaggttgcagtgagctgaaatcgcgcgactgtactctagcctgggtgacagggtgagaccctgtctcaaaacaaacaaacaaaaaccccaccagcaaccttgctgacaaatccacaggcccccacgtctgccaattgcctgcctgtatgaactgggcacctgggggaggggcgtggcccccaggctactcatcttggctttcacagccaaagggcctgggtggaacctcagcttactgtgtttactgactgggtaatgtggcctctgaagctgtcacctatctataaaatggggattaaaacgacactcacttgctcattgtctttcatcccacccacgtgtgttaatcgcgtgctcctgtagggcagccactgtcctgggtgctggcacttggtacccaggaaagatgaggctctaggtctcagagagaagatgagcgacggggatcaggcgaaaaaaaagtgggagggagaaggacggggaggaaatctgggtgggcaggggaaaaaaagcggggggaacgggataaaccgggaagtacaagagcgggagaaggatggcgggtagcctcattagagagggaagcgcgcgctcggctcagcggaacgccgacaaaggcggcggagagggtgaatcggtcaggaggggaacgcgcagagggaagcgggaagagaaaaacatagagagcggggttagggcatggaccctgagataagagggaggggaaacgcgtaggtacacccccccccaggcgggaggaaa

SEQ ID NO: 211030 - DNA, 750 bp, Homo Sapiens; identical to SEQ ID NO: 50241
  misc_feature (719)..(745): n is a, c, g, or t
  misc_feature (747)..(747): n is a, c, g, or t

SEQ ID NO: 211031 - DNA, 869 bp, Homo Sapiens
agagaactagtctcgagttttttttttttttttttgagatggggtctcactctgacatccaagctggggtgcagtggcgcgatctcggcacactgcaaccttcgcctcccagattcaagggattctcctgcctcaggctcctgagtagctaggattacaggcacatgccaccatgcccgtataattttttgtatttttagtagagacggggtttcgccatgttgcccaggctggtctcaaacacctgacctcaggtgatccgcccatctcggcctcccaaagtgctgggattacaggtgtaagccgccacgccctgcctataaccattctttttttagggaggtgtggtatatggtgctaccctggatctgtagtcaggatttgaagaagggagaaggtatttgcttgtgaagaaggcaccatgcattgtgctctgtagtggtgactggagagagagctgggaggggcacaggcagcaaggtccctgcttaaagacagttatctagtttggagaaacttagctggatagtcagttcttacatgcatttggcaagcacttatcatacactgtaaagaggcaatatgtctagcttgttagagggtgggctctggagtcagacttctggctttgaaccccaacttccctgccattttcaaatgacactggagaagtcgcaaaacctatttctgtctcagattcctccccagtaaaagtgggatattaatagtacctcctttggcttgatatgacaattcaatgagttgatatatgcagaacatcttagaacagcaactagcttagagtaaatcttcagtaattgtaaactgtgaatatactatgttttttggcactgaaagccacgtcgtgt

SEQ ID NO: 211032 - DNA, 868 bp, Homo Sapiens; identical to SEQ ID NO: 54912

SEQ ID NO: 211033 - DNA, 549 bp, Homo Sapiens
gacctaagatggcggcctccagggggctgggaatagccgctcatgtcggctaacggagcggtgtggggccgcgtgcgaagccgcctccgcgccttccccgagcggctggccgcctgcggggccgaggccgcggcgtacggcaggtgcgtgcaggcctccacggccccgggcggccgcctgagtaaggacttctgcgcgcgggagttcgaggccctgcggagctgcttcgccgctgcggccaagaagacgctggagggaggctgttaggagggactctgagcttcacacctgtctgctgccatgggtgcagagccctagtcctgatggcccctggtggcacatatcgaatgcctagggcagaaaggaagtgggaatggcgaagatgtgacattcctcggtgttagatcctgttttttcttaacaagttgaggcgtgggtagagcaggaattggttttccagcattgtgtccgtaaacctgagttagaataagatgtaacggaagccacgataaagactcggtcaaatcctgcaaaaaaaaaaaaaaaaaa

SEQ ID NO: 211034 - DNA, 909 bp, Homo Sapiens
ttttttttttttttcattggggaattgtgtgtattttctagcacttgtgtattggaaaacctgtatggcagtgatttattcatatattcctgtccaaagccacactgaaaacagaggcagagacatgtactctggtgtgatctcttgtcctcagtgtctcttctgggctcctgtccctcttgctttatagctagctgcccggggaccaaggtacaggtgaaagcaaggtagcagcttgcgggaggaggcctgtctggcttaccagtctatacactgtggcctcaacctcccagacagggcagagaactgtgggcagctcgtttgctttctaggctggctggagaggtgggagctcattgatagactcatgatggaaactatttttgaaacaggcttcctccttcaggagagatcatgcggactaaactgtagcaattccagtgcacctggcagtgatccttttctttgcaaagtactgtctctttggttccagtaagttggaccaccacatgacatcattttccctggaacctggtcactgactaacacagacaattgggactccagagcctcaagagccaggagagggcacagtacatacagagggagtcaaatgggatctcattttgagtcctgccttccgcacactcagaacggcagccccaaggccccggagtgtccagggggcttctggcctgaggtgaatctgcccagccccaagaaggcacaaaggtaggaagcaccagagagcccccattcccacagggcggggcggcccagcagcaaccagtgggaagcttcagctgttcctccaggctgcctcttcgggaagacaagtttcagggcacaggttttattgcccctagcttggaaaaagaatcttcccgggaacggtattttcaagcacaa

SEQ ID NO: 211035 - DNA, 563 bp, Homo Sapiens; identical to SEQ ID NO: 49978
  misc_feature (89)..(89): n is a, c, g, or t
  misc_feature (94)..(97): n is a, c, g, or t

SEQ ID NO: 211036 - DNA, 917 bp, Homo Sapiens
agagaactagtctcgagttttttttttttttttttagttgggtacgagaatcgagatggagggggaacaaaacccaacaaaataacatcttcttagggaaaacctggctgtggccagcgggcacctcctgaagccctgcttgctgcagaggcgccgctcttcagtgatgcagggtgaggggctgagcggcgcctcctcccatctagtctgcttgggggccgccagggagcatcttcaacacccttacaggacaatgaaggacccgtgtgttccctctgccggctggactgggcgtcgatcctgctgcccggaacctctcactcgattttactcaatgaagtagagcacagcatggcctaaatgccccacacccgccctgtgtgcacacccaggggaatacggatcagtgtgaaaaaacagatctgtgcaacagagacacaaaacgcaacacaaagccacagcatctacaaagtgcatcgctcctgtccacgctgatctccgctgccctcccacctgtgcctctgcccctcagtctgctgggtggggcctgtgtctccctccagcctccagctggactgaaaaggtttgggtgggaagccacagagctccatttctccaattcacagcttctccccagaccagaaaaatccgaagtgaacacagcaaaaccacagcttttaggggagcacaccaggaacccgacccaggggctgaacaggtgccagaaccccccgaactccctgccaagccctccagaatactcgggggggcccaccgggaactgggagaaaaaaaccggcaactcccagtggggctttgggccccccccggggggaaaagccccaaacaactgggaaggggggaacaaccaaggctttcccttcccacaaaaggggtccccccccctattctcaata

SEQ ID NO: 211037 - DNA, 884 bp, Homo Sapiens; identical to SEQ ID NO: 44924
  misc_feature (725)..(725): n is a, c, g, or t
  misc_feature (732)..(732): n is a, c, g, or t
  misc_feature (828)..(828): n is a, c, g, or t

SEQ ID NO: 211038 - DNA, 919 bp, Homo Sapiens; identical to SEQ ID NO: 45175
  misc_feature (796)..(796): n is a, c, g, or t
  misc_feature (890)..(890): n is a, c, g, or t

SEQ ID NO: 211039 - DNA, 993 bp, Homo Sapiens
  misc_feature (927)..(927): n is a, c, g, or t
ttccagtggaccagtgaaagaggaaagaggtgatcttataaaattttacaatacaatatatgtaggaagagtgaagtcatttgcactgaaatacgacttggcgaatcaggaccatatgatggatgctccaccactctctccttttccacatattaaacaacagccaggctcaccacgccgcatttcccagcagcactccatttatatttccccgcacaagaatgggtcaggccttacaccaagaagcgctctgctgtacaagttcaatggcagcccttctaagagtttgaaagatatcaacaacatgataaggcaaggtgagcagagaaccaagaagcgagtaatagccatcgatagtgatgcagaatcccctgccaaacgcgtctgtcaagaaaatgatgacgttttactgaaacgactacaggatgttgtcagtgaaagagcaaatcattaatgttgttcttgtttctatgataaaagcactttcagattgttctgcagaaagttggagctctgtccttcaaaccttttagccctatagatgataaatatcactgggttataagaaaaaattgcacaaaaattatgtgctttttaaaatatttatccaaaatgtagttgacagagatgtattttgagttggattggaaaggaatattttaagtgccttttaaaaatactaatagtcccggccaggcgctgtggctcacccctggaatcccccgaactttgggaggccaagggcgggcaaaaccccgggaggtcaaggagttcgaaaaccagcctggaccaacatggaagaaaacccattctctactaaaaaataccaaaattagcccggggggggggggggcgccatggcctgtaaatccccccgcttccttggggaaaggtttagagccaaaaatggccttggaaaccccaccnaaaaaccggaaaggttgggtggggtgaagccccaaggggttggccgcccacctgggcaccctcccc

SEQ ID NO: 211040 - DNA, 748 bp, Homo Sapiens; identical to SEQ ID NO: 47118
  misc_feature (583)..(603): n is a, c, g, or t
  misc_feature (641)..(641): n is a, c, g, or t
  misc_feature (677)..(677): n is a, c, g, or t

SEQ ID NO: 211041 - DNA, 479 bp, Homo Sapiens; identical to SEQ ID NO: 48303

SEQ ID NO: 211042 - DNA, 766 bp, Homo Sapiens
  misc_feature (600)..(600): n is a, c, g, or t
gggtttcataatttaacaacaattatcaatgaagtaggtaatgatcttgatattgcacatctgcgaaaagttatcagtgaacatcttacaaatttgttagaatgttttgaattttattttccatcaaaagaagatccacgcataggaaatttgtggatccaaaatccatttctttcatcaaaagataacttaaatttaactgtaactctacaggataagttgttgaagctggctaccgacgaaggattgaaaatcagttttgaaaatacagcatcacttccttcattttggataaaagctaaaaatgactatcctgagcttgctgagattgctttaaaattgctgcttcttttcccctcaacatacctctgtgagaccggattctctactttaagtgttattaaaacaaaacatagaaacagtttaaatatacattatcccctgagggtagcattgtcatcaatccaacctagattagacaaattaacaagcaagaagcaagctcacttatcacattaaaagctttaaatattgatatgtaaggtattggttcaaagtatgcatataagcattgagtgtgaggaatttgctatttcactnttaactttctgtctagttacagttatggaagtatgagaagttatgagtgaaacagcaattttctatataaattggcctatatgtatattttcaattaagaatgtgtacagtttttataattctatttttcctcatatttgtcgaaattattaaaatataattttta

SEQ ID NO: 211043 - DNA, 873 bp, Homo Sapiens
  misc_feature (658)..(659): n is a, c, g, or t
ggcagtctcaaaaaatactttgatgttcactagactatgttttctattcatttctttaaaatgaaaaaggagaatttcaagtcagcagccgctattaccgtatcttacaatttaattacatacacagtgaattgaaaccattgtgcaaaatggattacacatgtatacaaagatacgatttgatgatgacactggcacattattctaaactattcattcagcatgcctataattacataaattgtatgagactttttgttgcaaaggacacatttatcatattcattcacacatattatatgtgatagctgtccaacatcctgtctgggaagattttgaaaacaggacaaagaaaacatcattttaaaatgtcttcagctttttttgaatagacgtattcaaacatattctgaacattgatgtttgaacattttaatttgtgtgatgatgtaaaaaaatataattttagtttgtacataaaccattgtgaaaatctgataataaaattttttgataccattggaaaaaaaaaaacacaacgaaacacaaaaacaccaaaacaactacacacaaactacaaaaaacaacacaaacaaacgctcaacaacccacaacaccatacaccgaaaccaatttccccatcccacaaaataaaaannaagagtgtgtggggggggccccctgcgtccctaaaaaaatttttttaaaaccactcttttttggggggccgccgccgcccctagtgtagaaaaagaacaaggccatcacggttttgttccaaaaaaaaaaatcttggacaataaaaaaagtgggttgatttttccccccacaaaaacaaacccccgccggcgcaccccccgcttgcttaataaa

SEQ ID NO: 211044 - DNA, 807 bp, Homo Sapiens
  misc_feature (790)..(791): n is a, c, g, or t
gggaggtcaggtccgcctcatcagctatgaagtctgtgaatcctgggagaatcaggaagtcgtcgtaggtgaggcagtcggcgctggcaaagagctgctgcgcggggagccagttatcgggcacatagtcggtgccgcccctgatcagccatgtgaagaccatgattgctttcccttcagccttccacctttgtaagtttcctgaggcctccccagaagcagaatcctgcatagtctgcagaactgattttagaatgccaagctgacattttgagtttttatgagaaaccagaaaatttggtgtgaagaccctaagtggtgtgtctgacttacagcaggcccacactgctgatttatggtgtaccagtggaagacaggagagacaaaacctgacaaccagaaaagaaaaaaaaataaattgaagaatctttctaattttctgctcagcagtggctaatgttgttgtcctcttgttgttgattacttccatccactcaatttggctgatctccagggggcctacccttctgtccactaaaacctggcagcctgttttttgttttgttttatctttaactgatgtgctttcattttgttttattttattttgattgtttttcattttgggtgagtttacagcacactaataccaaagaaaatgaataaagaaaacattagaataaaactatgttggagggagaagggaaacacaaactctacaggaattctgatagctttctattttctttttttgaagtttacttttttgcaaggtagtattctcaattgnntaatccacaaaatatt

SEQ ID NO: 211045 - DNA, 782 bp, Homo Sapiens; identical to SEQ ID NO: 44771

SEQ ID NO: 211046 - DNA, 781 bp, Homo Sapiens
  misc_feature (777)..(777): n is a, c, g, or t
ggagccaaaagatgtggataaaagatggaacttcttgtggttcaaataaggtttgcaggaatcaaagatgtgtgagttcttcatacttgggttatgattgtactactgacaaatgcaatgatagaggtgtatgcaataacaaaaagcactgtcactgtagtgcttcatatttacctccagattgctcagttcaatcagatctatggcctggtgggagtattgacagtggcaattttccacctgtagctataccagccagactccctgaaaggcgctacattgagaacatttaccattccaaaccaatgagatggccatttttcttattcattcctttctttattattttctgtgtactgattgctataatggtgaaagttaatttccaaaggaaaaaatggagaactgaggactattcaagcgatgagcaacctgaaagtgagagtgaacctaaagggtagtctggacaacagagatgccatgatatcacttcttctagagtaattatctgtgatggatggacacaaaaaaatggaaagaaaagaatgtacattacctggtttcctgggattcaaacctgcatattgtgattttaatttgaccagaaaatatgatatatatgtataatttcacagataatttacttatttaaaatgcatgataatgagttttacattacaaatttctgtttttttaaagttatcttacgctatttctgttggttagtagacactaattctgtcagtaggggcatggtataaggaaatatcatatggnaatg

SEQ ID NO: 211047 - DNA, 598 bp, Homo Sapiens
  misc_feature (570)..(570): n is a, c, g, or t
  misc_feature (572)..(572): n is a, c, g, or t
  misc_feature (576)..(578): n is a, c, g, or t
  misc_feature (580)..(580): n is a, c, g, or t
  misc_feature (589)..(590): n is a, c, g, or t
ggcatattcattgcagctttatttgtaacagccaaaaactggaaacagcccaaatgtccagcaacaaaagaatggataaacaaattgtggtatatttactacctagcagttgaaagaaataaacctctgacacacacaagctggattaaaaaagaagaggaaatgaattattgatacatataataaagattactctcaaaataattatggtaagtcaaagaagtcagaccatgctccctaagagtatatacttcatgattcaatttctgtacaattctataaaatgcaaattaatatatgataacaaaaagtgattgcctggaaatggtgagaggacagaggggccagaatcagccaggattacaaagatgcacaaggaaacttttgagggtggtggatatcttgagtgtggtgatagttttacagttgtatgcctatgttagaagctatcaaattgtacactttaagtatgtacactttgttgtatattaattatgccttaataaagttattataaaaagtagttccaggcaatactagacactcaataaacatttgtaaactaaaaananaaannnanaaaaaaaannaaacatgt

SEQ ID NO: 211048 - DNA, 795 bp, Homo Sapiens
  misc_feature (660)..(660): n is a, c, g, or t
  misc_feature (727)..(727): n is a, c, g, or t
ggatagtccaacatttgaaaattcagattgcacactgaaaaaaatggataaagaaggtaaaacattaaaaaaacataaattgaagcataaagagagggaaaaagaaaagcataaaaaagaaattgaaggtgaaaaggaaaaatacaaaactaaggatagtgccaaagaactgcagaggagtgtggaatttgatagagaattttggaaagagaatttttttaaaagtgatgaaactgaagatctctttttaaatatggaacatgaatccttaacattagaaaaaaaatcaaaattggaaaaaaacatcaaagatgataaatcaaccaaggaaaagcatgtgtcaaaagagaggaactttaaagaggaacgagacaagattaaaaaggaaagcgagaaatcttttagggaggaaaaaaataaaagatctaaaagaagagagagaaaacatacccacagataaagactcagaatttacttctttgggtatgagtgccattgaggaatctatagggcttcatttagtggaaaaggaaatagacattgaaaaacaagaaaagcatataaaggaaagtaaagaaaaacctgagaagcgatctcaaattaaagaaaaggacattgagaagatggaaagaaaaacctttgaaaaagaaaagaagatanaacctgaggcataagtccgaaaaaagacaaattagaatccttagtgaaatgtgtttgacttaaatanaaagaaaaagggaccaagcctatatttccgcaatccaccccaggaaaaaaatgccccacttaaaggaa

SEQ ID NO: 211049 - DNA, 705 bp, Homo Sapiens; identical to SEQ ID NO: 45561
  misc_feature (674)..(696): n is a, c, g, or t

SEQ ID NO: 211050 - DNA, 1000 bp, Homo Sapiens
caaaaaatacagttaggatgctgacttttaggattccaaacctagttctgtcaaatgaccatttctattatgatgaggaagagtgataaagggatttaaggattaagaagccctctttgtcatatatatctttagatgataatgatgtgatacagaactttgtatgcaaaaagagctgagatttaaatttgagaattatctccatgtaagtgatgatagaacttacttaaagtagcaaaatctcacagaacactgtagaatgaacagcgttagtggctctagactaagccatagatggcacccacatatagcaggaaattgtaatttataaatatttccagatttatcaggcaattctctttcctaacattgaaattttgaaaacaatcacagaataaatgaactaaagacaaataatgaaagtcacattattactttttctttttcttttttcttttctttttttgaaatggagtctcgctctgacacctaggctggaatgcagtggcacgatctcggctcactgcaacttccatctcccgggttcaagtgattttcctgcctcagcctcctgagtagctggaactacaggcacgcaccaccacactcggctaatttttgtatttttaatagagacagggtttcaccatgttggccaggatggtctcgatctcctgacctcgtgatccacccaccttggcctcccaacgtgcttggattacaggcgtgagccacagcggccggcctactttttcagtctcttagatagataattcagttctcctttgtgtgaaaaatatctttgactaagttgtgttgctttttaattttttctttttagcagccaactcttcctgccaaataaatagagtcatcagtcatcctactcttccgatcagcatcactgctcatgaagacaggcacatcaaattctatgataacaatacaggtaagaatttattaagaattgatttttattaaagcaaaaaaaaaaaaaaaa

SEQ ID NO: 211051 - DNA, 1000 bp, Homo Sapiens
ctattatctcttcaattctcccatcaatcctgtgaaataagtacgtttgtcacccccagctttaactaaagatgctgtggctttgaaagtttaagtaacttgcccaccagctaaaaaatttcacagctggaatttgaacccaagcagtctgacaacagaggaggaaactttaaccatcacagttctaatttgacgagatctctcctgaaacaggggctaaatactatgatagttaagtgaatatttcatccaggaaacaaccgtagctaaaaatgaagccagtgagcaattttttaatggtttctcacagccaagtgtaattccaaacacctgacatatagtatctcacttcatttgcactctgcaagggatatattatttatactcatttttcgaagaggcttagggggttaactaacttgcccatagtcacggtttttgtaatttgtgaagctgggatggtgcagaataattgattaacatccatttattaaatatttctattagtttgtgcaaggattgctttagttctgttcagttcggtattttaatcagttactaagatgaatatgcaaaaggcaaacaaatttcagatgacacaaaacggagtgaaggtattacaaaatggaacaatattcaaaaagattttcagccttaaattgcttgctttttaagcataaacaacacattcacacattcaaagataacaagactaagggccgggtgcggtaagtatctttgtcttacaccagaggcgggtggatcacgaggtcaggagatagagaccatcctggctaacatggtgaaaccccgtctctactaaaaatacaaaaaaattagccaggcgtggtggtgggcgcctgtagtcccagctactcaggaggctgaagcaggagaatggcgtgaacccgggagcagaggttgcagtgagccgagatcatgccactgcactccagcctgggggacagagcgagactctgtctcaaaaaaaaaaaaaaaa

SEQ ID NO: 211052 - DNA, 439 bp, Homo Sapiens
gcacgaggtgagatggaagaggtaaagggaaaaggagaacaagcagctcttctctgcgtggcgcctgggatgaatggtttctggggacatccctgatggcagttttgtggagaggcgcaaaactttatgtggtaagaaatgagctgtaggcccagcgcagtgacccacgcctgtaatcccagaactttggggggccgaggagggcggatcacttgaggtcaggagttcaagaccagcctggccaacatggagaaaccttgtctctactgagagtacaaaaattaggcaggcgtggtggcaagtgcctgtaatcccagttactcggaaggctaaggcatgagagtcgcttgaacccgggaggtggaggttgcggtgagggaagatcgcacctttgcactccagcctggacaacaagagcaaaactctgttttaagaaaaa

SEQ ID NO: 211053 - DNA, 521 bp, Homo Sapiens
ggaaaatcccactttacttcaagtgaagtcactgggttgtccccatgaaatatctccacaatgggtgtgctagacctttactctctgtggcaccaccaagaccccctcaccctgccagagccctctgaagtgtactcagaatggaggggctggaagtggggccagtggtcctggtagtcagcctccccttctgacacaagaattatcgtggaacagcttgtgtgaccgatcaactggtctctccatctttaagccattgtcttgttgactctgttactgcagagtttggggaggtctcatggcttctcgcatcctatttcctgagcttccctgaagccaacttctggccactggtatgtgatgcgagcacagtgcctcctcctgctcctccaggaagcttctgctgattgaacgcaggccagatggcgagatccggagcaaccttcttagatcaagggaagaaaggggcacaagaggggagtacgtaacaagataaaaggagctccctccctgatgactac

SEQ ID NO: 211054 - DNA, 625 bp, Homo Sapiens
ttttttttttttttcttgttagattagtttattagtgaggttattgcttacaggtctgcaggctggctatggctcagctggactgttacagtctgttctatgtatgtcatttcaggacccacacataaagcagcaactacctgagaaaagttctcacagcaagagtataagaggccaagaaaaattacacaagaacaccgaaggcctctggtcagacatgtcatgttatgaccaatcaccttccatatgaccagggccaacatcagtgtaacaggaaagaataaccactgtcaactataacaagggcatgaagggaaaaaaaaaggtatgaaaaaataatataacctaccacaattaagctaatggtttctctatttcattattttcaggtccaaagtaccagtgctgggattatttataagttcctatgttctatttcattattttctgctttccatgcagtgaattctttccttactcttttccccttcttcacttggctacttattttcaattaaaaatttcttacaagcactcctttagctgtttttcaaatactctgatatgtagtgttttcattacttaaattattagtgaggccaggtgtggtggctcaggcctgtaa

SEQ ID NO: 211055 - DNA, 606 bp, Homo Sapiens; identical to SEQ ID NO: 45793

SEQ ID NO: 211056 - DNA, 576 bp, Homo Sapiens
ttggtgaaacagatttccaatataattagatcttttatttaaaaataaaaacaagtctagaagcgattttgatgactgccaccagagggcactgtaaccttgttgtagacgatcaaaacgcagccattaaacacttccagccacatgtttatttctttgagaaagcaacactgcaggacaaaaatgaacaccagtagtatatttcaacttttttttcatgtcatttgcctagatatatttttttcttatttttatttttatcttacaagtcaacctcaaaaacataaagcaggagagaaatgagccatgcctctttttcagtttagaggggtagctgacacaggatgagagcacagtaaaacttaagctaagatttccacattaatatcttgcccccaaacaccatgcagtgctaaaagtcacattcccatcatgcaagcacattaaaatatatggcgattaaaactcctggtttctattttacggcatttgctctttccacgaggcacacttcccttttgggctaaaggttaaaaaaaaaaaattcaaatacaatgaagaatccattattttcaa

SEQ ID NO: 211057 - DNA, 589 bp, Homo Sapiens
tcagttctgggtctatttaaacccaggtttattcccatttgctacaacagattcccttctaataaaatgcactggcaaggtgaccagtgagtgacccaatgtctggttgggaaatctctctctgaacttcttgctgttggacctaaaatgtggatgtaaattggatcacagctggtttggcattgaaaaaaatacatacacaacaaacaattacaacttctttatatggcagtttttactgggtgtctaatactctctttactgtctcaagtggaagtccaaacaaatttcatttttgtagtaaaaaatctttatttccaaaatgatttgttagccaaaagaactataaaccacctaacaagactttggtaagaaagagacttgatgcttcttataaattccccattgcaaacaaaaaataacaatccaacaagagtcatgttacccattcttagccattaacctggttttaagtctccaaaatcaggattttaaaatgtacccaactgggaccaaatacaaacatgagacactagggtggcttgtccttgattaggaatcaccagcttaaggaactttatcatgggct

SEQ ID NO: 211058 - DNA, 650 bp, Homo Sapiens; identical to SEQ ID NO: 54424

SEQ ID NO: 211059 - DNA, 608 bp, Homo Sapiens
ttttatatgttttattcacaaattttataataccagtcacacatttcaaaaccatttattagagtcagaccactcaagttttacactagacagaaaccgtctctaaacaatatattggtggttgttgttaaagtggcctttaaaaaggggttcactctgctaaaaggaggctcatcctgataattgcaatcactaacaactagaaaaaactaaaccgtgagtacaagcttgaaaaataaaatgtagcactgggacgctattaaaactcattgtaactaagttgaacagtaactttacttaaatgacatatcgctcccatatgaatccacagaagaggaggactacagggaaatataaggtggcagaggaccacttctgtcaaggggtaaagaaaaacactccttcgctatcagggaagggagaaaaagagaaaaggaagaggaggagggactgaacttttcagagaaactgcaagtacttgttaccctctgggccagttctccacctacaggttggataagatctcctccccccacccaaaccccaccctcaaccccacttgcccctattttgggacaaattagaccctccaataggagaataaaagt

SEQ ID NO: 211060 - DNA, 589 bp, Homo Sapiens; identical to SEQ ID NO: 48071

SEQ ID NO: 211061 - DNA, 665 bp, Homo Sapiens; identical to SEQ ID NO: 46708

SEQ ID NO: 211062 - DNA, 1000 bp, Homo Sapiens
tatgtttatcacttatcctcaagtttgcatttatgatataaattctaagctaactaggaatagaacatcctcaaacaaataaatgacatctacagaacaagtacagctaacattatactaagatgactgagcacaggcaaggatgctgacttttaccatttttatttaacattgtaatggaggtcctagtcagttaagtggtgcaggaactataaataaaaagcacacaaatttgaaagggagacctaaatgtccttatttgctgatgacatgattgtgtacatagaaaatcctaagaaatctgccagaaataactaccagaacttccagatgaatttaaaagttgaagaatacaaagttaacataaaaaatcaattgtatttcttgttttattctttttttttttttttttgagacggagtcttgctctgttgcccaggctggagtgcagtggcgtgatctcggctcactgcaacctccacttcctgggttcacacaattctcctgccttagcctcctgagtagctgagattacaggcatgcaccaccacgcccggctaatttttgtatttttagtagagacggggtttcaccatgttggtcaggctggtcttgaactcctgacctcgtgatccacccacctcggcctcccaaagtgctgggattacagacatgagccaccacactcgccaatcaattgtatttctaagaactaacaacaaaccatattgaattgaaaatatgatgattacaatatcatgtacaacagcatataaatatgaaatacttagacatagttttaacaaaatatgtgcaagatctttatatgaaaaactataaaacattgctgagaaattgtaaaatgaaataaagatatatcatatttttggattggaagaatccatattattaagatgtttctttctgctcaaattgatttttggattccgtgcaaccccagtgaaaaatcccagctttgtggccaaaaaaaaaaaaaaaa

SEQ ID NO: 211063 - DNA, 1000 bp, Homo Sapiens
taggacttagctatctagttaaatatcttcagtttaaacagatttactcattttacaactgtgtaacaatttattttttggcagtttctgaacttccagttttcacgttctctagtattgacaacaagctgataatcttgctagacacaacagactcttgaggaaggaattattcattgtggtttatagacaatgatatttgaagttaacttgccccagggcaggagtatggttcttatataatgtaggaaaaggccagtcaacaccagacctcagagctaccatttaatgcattgtggcaaatgattcgcatgtattatcacacttaatgctcacaagaatactaccatgaaatagttaatatttaaaacaaatttttttgttttttggggggactgggtctcactatgttgcccaggcttgtctcgaacccctgggctcaagtgatcctcccacctcagcctcttaaagttctgggattacaagcatgagccaccgcgagtggtctttatcattattatcgctgttttacagatgagaaaactgaggcacagagacctgcttatggtgacagaagtaggaattgaaaagatgagatttgaatctagctggtctaatttatcctgaagttcaagatagcaatacaagaattatgaacatataaatggagtgagtggatatgatcgctcaagataaatctcttggccgggcgcagtggctcacacctgtaatcccagcactttgggagactgaggcgggcagatcacgtggtcaggagatcaagaccatcctggctaacatggtgaaaccgcctgtctactaaaaatacaaaaaattagtggggcgtggtggtgcacgcctgtaatcccagctactcaggaggctggggcacgagaatcacttgaacccaggaggcggaggttgcagtgagccaagattgcgccactgcactccagcctgggtgatagagtgagactccgtcccaaaaaaaaaaaaaaaa

SEQ ID NO: 211064 - DNA, 1000 bp, Homo Sapiens
cagttgtagagtttctattgcttttatttagaaattttttattttcctgctgagattccctgtccttgtataatagcatgttttattttgcatccacaaggagagtttaatagctgcctttagagttcttgtctgctgatcccagcatctcatcttcctgaggttggtccttgtggatctctcctctgggttctgagtgacattttgctatttttttagtacatgtagtaatttcaaattgtattctggacattgtaaatgttgtgtcatagagactttgtgtccggttacattctccagaactaactgatgtttagtgtcattgtatcaggcagtctatctctgtctttcttgtgtggcagcagcagaaacctctgttcagcttttctgcgctggctgggctgcatgcctgtgcacttcaggtgtcggatatctggtcagccgtgtgtgtagtttgggactccctttctgtggctttcttctttgtagttgttatcctttcgctttctggctgtggttgcccagtaatctgtctactggctcttgaagaccttggccacaggtcttgtgtgtgaggctgtagccctggggttgtcacagacagtcccctcctcagagaaagctccttaagaacaaaccatgtcctgcctttcttttctcccaggggagactcctccagtttctacctgctcctgttttcatgctttcaggtgtttcgttttgtagtttgtgcagtgcttatagttgtttctgtgagaaggtaatgcctacagataggagcccctggccatcgctgggagtccagccaggcagctcacactgaccctgtaaaccacacagctctgtctgacgcagcaccctttttggaaaggtgttctctatgttcagcagtcccttcccatgaccgtcagagtctgtgcatctgtttccattggtaatcaaaggttgctggatttaacactgactgtatttgtctttgaaaccaaaaaaaaaaaaaaaa

SEQ ID NO: 211065 - DNA, 1000 bp, Homo Sapiens
cccagcactttgggaggccaaggcaggcggatcacttgaggtcaagagtccgagagctgcctgggcaacatggcgaaactccttctctacaaaaatacaagaattagctgggcgtggtggtgggtgcctgtaatcccagctattcagggggttgaggcacgagaatcgcttgaacctgggaggtggaagttgcagtgagccgacatgcaccactgcattgcagcatgggtgacagagcaagactccatctcaaaaaagaaaaaaaaaagggagagagaagtacttaaaaacgcacatacataataggagaaaggactatctataaaactgtaataatgctatcattgtcaaggtttatgcttattgttgtgtgtcacaaacataatgaatcaactccaaaggcagggatatatgttttattcattgatgtaccccaaacacctaaaatggtaacacatagtagatactactattaagtataatagtaggtgctcaacatatatttgtggaataaatagtggggaaatttctggcactgggagtcaggtgatccggatgctagtattgtcagtaactggcagagtacttgtatgctaatcgtggaacttgatgctaaggcccagcttaaaattccttaaagtgtaaatgacttcttcattatgatggttacattagtgcactttgaaacagcactagaggctgggctgatggcttacacctataagcccagcactttgggaggctgaggctgttggatcacctgaggtcggggagttcaaaaccagcctggccaatatggtgaaaccccatctctactaaaaatacaaaaaattagccagacgtggtggcggacacctataattctagctcttgggagacagaggtgggagaatcgcttgaacttgggagtgggaagttgcagtgagctgagattgcaccactgcactccagcctgggcacgaaagagtgagactctgtcttgggaaaaaaaaaaaaaaaa

SEQ ID NO: 211066 - DNA, 1000 bp, Homo Sapiens
agactaggaaacagaggcttgtgtgtattctgtggaagtgatacttatctacattcattatgaatggaaatctgttggatgggaagcttcttaatggttggttcaaatttttttgtacttcgtgttaatttagggaatgaggccaaatacctggaatgtgctcagtgaaattatcagttaaataatgtgtgtgtattgtcacatatctggaagtagcatcccctacagaaaatgcctttggcttgctcttcttttccctctgtgctcttattctaagccacacatttctgaggtgtttgctgagtagtggacagaattcatatggttcattcctatacccttcttgttgtctaagggggattgatattccactgagatttggggataaaattatagatattgacttcacccttgtagattctgatttcattgcttttgggtagaacctgggcatttctacttttaataagcccttcagatgattctgatatacaccaaagttgcatgactgctgtttgagagataccaatttgtctttctaaagttagaattgccttgctagatttccctttgctgtataacatcactgttatctaatgtttttagacgttattgaaatttggagtattgaaaaataaattctgggatttatttttcttctgctaagaatatttatgttagcaagatattagtatggatttttttcttaaaaacacaaaagcacctgtaatctcagcaatttgggaggccgaggtgggtggatcacgaggtcaggcatttgagaccagcctggccaacagagtgaaaccctgtgtctactaaaaatacaaaaaattagccgggcgtggtgggcaggtgcctgtaatcccagctactcgggaggctgaggcaggagaattgcttgaacctgggaggcggaggttgcagtgagctgagatcacaccactgcactccagcctgggggacagtgtgagactccatttcaaaaaaaaaaaaaaaa

SEQ ID NO: 211067 - DNA, 1000 bp, Homo Sapiens
tctcctttttagaattgtactttattgagagttagggtatgtttaaaaaataattttggcttggtgcagtggctcacacttataatcccaacactttgggaggccagggcaggagggtcacttgaggccaggagtttgagattagcctggggagtttagctagaccttgtctctacaaaaaaaaaaaaagaaaatttgctgggtatggtggtgcacagctgtagtcccagctctttgagaggttgaggtaggaggatcgcttgagcctaggagtttaaggctgcagtgagataagattgcaccagtctgggcaacagagtgagaccttgtctcttaaaaaaaaaaaaaaattaaaaatatttttaaagaagtgaattaaaataatttttttttgcattgtctggttccttctgatgacctttttctgttataataagagacaattccaaaaattcagataaagcaacaataacaaaaagacaataacagtcacctgtaagtccatctcacaaagataatcactataaacatttttgatgtacattcttttagtttctttttagtgctgtttgttcagtgtcatctctcattagtatcttaaaagatatttttaatgttaaaattatgcatatcaatgtatagatatatacacagtaataacttttctgataaatgtattctttattgagaataacccaaatcatgtgctttagacaggaagcatgctagatagagtcaattgttcagtaaatttgcttcttacagaaagtataatttgataatttaggccacaatccttgtattttttactagtagatttctttttttgcttgctatattgtatggaaacttattttatctttttacctgaccttagaaaaatatattatgagatcacacaaagtaattatctttggataagtcgaagatgtttatttctcaaatcacctctaaaagcatttgtttaaaaaaaaaatacataccaaaaaaaaaaaaaaaa

SEQ ID NO: 211068 - DNA, 460 bp, Homo Sapiens; identical to SEQ ID NO: 38747

SEQ ID NO: 211069 - DNA, 427 bp, Homo Sapiens
ggctggagcacagtagcgccacctcggctcactgcaacctccacctcccaggctcaagcgatttgctgggattacgggtgcataccaacatgccctgccaatttctgtatttttagcagagacagggttttaccatgttggccaggctgttcttgaattcctgacctcaggtgatccgcccacctcgaccacccaaagtgctgggattacaggcgtgacacctgcgcccagcaaattcttacttttcatatgttgaacgtgcatgcaagtgtgatcctctagttttcttattttctcccactttacaactctttttgtcctcctccgtgggagttttctcaactttatcttccaaccctctaagaatttaatattctgaatttccaactcttctatgaagtgtttcatattctaaatttctagaagc

SEQ ID NO: 211070 - DNA, 682 bp, Homo Sapiens
  misc_feature (648)..(675): n is a, c, g, or t
  misc_feature (677)..(677): n is a, c, g, or t
ggggaggaccccgatggcggcgccgggtggcgggaaggaggaagtttcaaagccagcttgacgtggttgtggccgttgggcgagatgaagctacactgtgaggtggaggtgatcagccggcacttgcccgccttggggcttaggaaccggggcaagggcgtccgagccgtgttgagcctctgtcagcagacttccaggagtcagccgccggtccgagccttcctgctcatctccaccctgaaggacaagcgcgggacccgctatgaggtgcgtgaagtgggcaggccctgtcagtctcgcgttcttcttggaagccgagacgcgggccaccctcggtcctcatgctcccggctgctccctaggcgaaagcccgccttgggggttcctgaactcccagccttgagacctaccatcagcccgaccccagggtcctgtgcgtcttcctacggacccgaaagaagaaagctttgagagtgtaccttttcgctatttttcctccccacttttacgactttgaatttacagtgttgctatttagtagtggatggcaatcccgcctgtttcaagtttctgaaattttgcgtgaaacaagcgcaaatgaagcagctgtccagttggggaacagtaaaataactgcagttctgttcnnnnnnnnnnnnnnnnnnnnnnnnnnnncntgtcg

SEQ ID NO: 211071 - DNA, 850 bp, Homo Sapiens
  misc_feature (666)..(666): n is a, c, g, or t
  misc_feature (677)..(677): n is a, c, g, or t
  misc_feature (737)..(737): n is a, c, g, or t
  misc_feature (742)..(742): n is a, c, g, or t
  misc_feature (744)..(744): n is a, c, g, or t
  misc_feature (754)..(764): n is a, c, g, or t
  misc_feature (766)..(770): n is a, c, g, or t
  misc_feature (773)..(780): n is a, c, g, or t
gggcatcaggtaggctgcgttgaggatctttgctcttccatccgcctttgatcgtcttcctcttcagccatccaggtaagccaagatgggtgcatacaagtacatccaggagctatggagaaagaagcagtctgatgtcatgcgctttcttctgagggtccgctgctggcagtaccgccagctctctgctctccacagggctccccgccccacccggcctgataaagcgcgccgactgggctacaaggccaagcaaggttacgttatatataggattcgtgttcgccgtggtggccgaaaacgcccagttcctaagggtgcaacttacggcaagcctgtccatcatggtgttaaccagctaaagtttgctcgaagccttcagtccgttgcagaggagcgagctggacgccactgtggggctctgagagtcctgaattcttactgggttggtgaagattccacatacaaattttttgaggttatcctcattgatccattccataaagctatcagaagaaatcctgacacccagtggatcaccaaaccagtccacaagcacagggagatgcgtgggctgacatctgcaggccgaaagagccgtgggcttggaaagggccacaagttccaccacactattggtggctctcgccgggcagcttggagaangcgcaatactnctcagctcccacgttaccgctaatataaggtaaagttggtaaattcatacttaataaacnatttnangacagtccannnnnnnnnnnannnnnaannnnnnnncctggtcggccgcctcgggccttcgagaaagctttctaggacaattcgttttggcgccggcgggcccaaa

SEQ ID NO: 211072 - DNA, 818 bp, Homo Sapiens; identical to SEQ ID NO: 49125
  misc_feature (538)..(538): n is a, c, g, or t

SEQ ID NO: 211073 - DNA, 861 bp, Homo Sapiens; identical to SEQ ID NO: 42166
  misc_feature (673)..(675): n is a, c, g, or t

SEQ ID NO: 211074 - DNA, 622 bp, Homo Sapiens
  misc_feature (549)..(549): n is a, c, g, or t
  misc_feature (612)..(612): n is a, c, g, or t
gggtgggccgggaagggcgtgggttgaggagaggctccagacccgcacgccgcgcgcacagagctctcagcgccgctcccagccacagcctcccgcgcctcgctcagctccaacatggcaaaaatctccagccctacagagactgagcggtgcatcgagtccctgattgctgtcttccagaagtatgctggaaaggatggttataactacactctctccaagacagagttcctaagcttcatgaatacagaactagctgccttcacaaagaaccagaaggaccctggtgtccttgaccgcatgatgaagaaactggacaccaacagtgatggtcagctagatttctcagaatttcttaatctgattggtggcctagctatggcttgccatgactccttcctcaaggctgtcccttcccagaagcggacctgaggaccccttggccctggccttcaaacccaccccctttccttccagcctttctgtcatcatctccacagcccacccatcccctgagcacactaaccacctcatgcaggccccacctgncaatagtaataaagcaatgtcacttttttaaaacgagacaaagagagacaggaaaaaaaaaanccgtggcggc

SEQ ID NO: 211075 - DNA, 877 bp, Homo Sapiens
ggggtactgtaggtgcgtgggagaaactttgcagggtggggacccggcggctgctggccggtagtgactggtgggcgcgctcgaggactccaaggggcgcagcccgggggcagacccttgggtcgggcggggatcttacgcttcccttacccgcccccttttgtctttcacctcagccccgccggctgctgtgggagcggcggccgtccctctcctggaggtcgtctcctggcatcctcggggccgcaggaaggaagaggaggcagcggccggagccctggtgggcggcctgaggtgagagcccgaccggcccctttgggaatatggcgaccggtggctaccggaccagcagcggcctcggcggcagcaccacagacttcctggaggagtggaaggcgaaacgcgagaagatgcccgccaagtcataaacccccccgggcccggccccccccgggcaggggggcagcagccaacccccgctggggaagcccccccccccggggggtcttctgggggccacccccccggtcgggcaccgtccgacttgtcccaatcgtaacccctccaaaccaaacaaactccattcccccggtgttcggttcgtcccccctaggtccccggctatacctgggccgggtctgcccccccgatagtctcccggagtagcggccgctttcaaaaccaccgctcctcctcggaaaccctgggaccttcccgtgacccgaagcgggtccgtagagactgtgcgtttatatccttcaaccatccacgtcgtggttcgctgtatgtccctgtgtacatcggtccttgccgcatcggtctctatcaacagcacaggcgctcccccccactctctcctctccgtctctcgcctccc

SEQ ID NO: 211076 - DNA, 834 bp, Homo Sapiens
  misc_feature (602)..(602): n is a, c, g, or t
  misc_feature (779)..(779): n is a, c, g, or t
ggggtcatggcgacgtccagtgctccagccggtgtgaggacacgatatgctggggtttttgtccgcacgccaaacgggtttggaggaccctcttcgccttcggagagcagagtcaacacgtatagttttgggactggaattaaataaagacagagatgttgaaagaatccacggcggtggaattaacacccttgacattgaacctgttgaagggagatacatgttatcaggtggttcagatggtgtgattgtactttatgaccttgagaactccagcagacaatcttattacacatgtaaagcagtgtgttccattggcagagatcatcctgatgttcacagatacagtgtggagactgtacagtggtatcctcatgacactggcatgttcacatcaagctcatttgataaaactctgaaagtatgggatacaaatacattacaaactgcagatgtatttaattttgaggaaacagtttatagtcatcatatgtctccagtctccaccaagcactgtttggtagcaggtttttggtactagaggacccaaagtacaactttgtgacttgaagtctggatcctgttctcacattctacagggnatttttattttatttcaaacggcaactactttgagtaaacgatttcataaaaagaaacgttactaacagtgtattctttgtaagtgacatgactaatgtactttgtgctagttgttgagactcagcagggaaataaagatccctctgtgcattattcttataaaactgaaccattgnaaaacacctttatatggaccatggatccttggggaagactcaaccaatatgaaaa

SEQ ID NO: 211077 - DNA, 443 bp, Homo Sapiens
tttttttttttttttccattaacccaacacaagtttatttactaagtcaagtcaaactgaggagtatttgtttctttggtagttggtagacaaagaatacatatacatattctatttcccattaagcattcgatcatgttacaaaacaatggcctagagaactatcattgaagatttaccaaatctgcctgaagcaaaatgtgataaactgcagaaatggtggagaatgacactggaagtcataaagttgattctcaaacacgggtttgaactgcataggaccgcttatatgcatattttgataaatatattgaaaatttttttggaaatttgcaacaatttaaaaaacttgcagatgcaccatgtagcttagaaatactgaaaaactaagaaaaaggtgtgtcatgaattcatataatatatgtagacactagtctatttta

SEQ ID NO: 211078 - DNA, 597 bp, Homo Sapiens
  misc_feature (245)..(245): n is a, c, g, or t
ctcggctcactgcaacctctgcctcccagattcaagcaattctcctgcctcagcctcccaagtagctaggaccacaggcatgtgtcaccatgcccggctaatttttctatttttagtggagatggggtttcaccatgttggccaggctggctcaaactcctgacctcagagtgatccacctgcctcggcctcccagtgtgctgggattacaggcgtgaccaccgtgcccggcccatcctgttcgnttaacgtgtcctcggcactagcggttaagttccttcatggctggggccatgccgcatgcaatttatcttggtatcccaaatgcccgccacatagtaggtgcacaataaatgctgaatgaacgaataatggagcctcaaggacgctctaccattagctcctgggagcgggctgtgtggattcccctggggatagacgataaccagaccgctgcacaaagaaaagttaggagggatgcctgggattaaaatccagacatttacattttaaagcctacatttcacacacgaacatatacacatgcagacatgtacacacagatgaatacgtgcacacacactcctctctcaaagc

SEQ ID NO: 211079 - DNA, 780 bp, Homo Sapiens
ttttttttttttttttctattaatcttttattattaagacggctgaaaaaaatgattacatattattagtgaagctcagtggaagagaagtgggtggaaaagctctaacccgagaggccgctttcacaagatgggaggatgggttacattttgcaaggtgtaccaaagggttaaagtcattttcattaaaatttaaatttcagcatgcgctcactctcccttccccgtcctttgaacgtttgactggcaaccatttcatatttcaatctcggcagaacaaattgaattagatgttgaaaccaagctcggctctgttcaccaaagcctgcatgctctgctcacactaatcctttcctagacgctgcggagcacagacgggcgctgcgagagacggccctgcacaaaagacaaaaaagaccaaggcggcaggaaaaggagaggaggaaaaacaagcgggcagaggccgctggaaattgtcttccacctgatgcatggggcttaaagcctaggagacagagcctgcgtccacgcagcagggaaggccagtgtggaggcacacagagcgacccgagtttctgtcttgtgtctggggcacccagcacagtgtctcgcacacagcagatgcccagcaggtgtctgatggatgaatgaatgaatgaatgaatgaatgagggagaggactcactctatcagcccatgcctctagcctgtgcctgttccctccctctgcagagtgggcccggctattctcctcaccctcacaacttcctgagaagtgat

SEQ ID NO: 211080 - DNA, 1000 bp, Homo Sapiens
gctcctttgcccgtgcggccttctcagcagctgctgcttctcctctaggactgaccgcaagtctcagagcgcgccggctggtgttttgtcgccctcaggagtgtggccgaggcccaggtgtgggtttcccgtgcccgccgtgacctggcagtgagggtctgtgcttctgtcagtgccgttggcctgagacatgtctgtcctggagaccagcacgtgtgggtgccgactctcagagagccccttgctcacagcaccaaaccccttgctgtgtttttattattaagaaatagaaaacaaagggcataaccagacttaggactttggtgattttctggctgaaggttttttttttttttttttttgagatggaatctccctttgtcacccaggctggagtgcagttatgcgatcttggttcactgcagcctctgccttcggggttcaggtgattctcccacctcagcctcctgagtagccgagattgcaggtgtgtgccaccacgcccggtaagtttttgtctttttagtagagacggggctttaccatgttggccagactgctctcgaactcctgtcctcaggtgatctgccggcgttggctcccaaagtgctgggattattcttgctggagctaagttgggattgactgcagtgcatcctttgtgaggagcgctgggggaaggtgtgaggaatttgaccgctaagccccagggtctggctggaaggaggagcttcgtggacaggccttgaggacgctttggtgcatttcctgaattgtccctgtgagaacatgccttatctgcagcagtcaggaaggctgataggaaagttacctagaaagccgggcatggcggctcaggcctgtaatcccagcactttgggaggctgaggcgggaggattgctgcaacccaggagttcgagaccagcccggacaacatagtgagaaccctgtctctaccaaaaaaaaaaaaaaaaaaaaaaaaaaaaaaaaaaaaaaaaa

SEQ ID NO: 211081 - DNA, 1000 bp, Homo Sapiens
gccatgggggtgaacatggagacagccagattcttcaagtctgactttgagcagaatggaaccatggggaacgtctgcctcttcctgaacttggccaatgaccccacgtgagctttccctgatgcccaaactgccctcaggtgggcagaccccgtccccttccaagacctacagtaccagggctccagggcatcccagaactacagccatacgccagagctgggagaacaaccctcattgtgtagatagggaaactgaggcctgggaagggctaggaaaactcacaggcagagggagccagaacatgactctgtctgctgcctgtgccctctgctcttcccacaacccatgtccagccaccattccaactcagggctcctcatctctgtgtcacatccacaaagtcaccccaagaagatcaaactgctattataaaagtgtagaaaatgggagtttaaatctgggggtcaggtggatgaaaacaattctaataaactatcctgggtatttctggagggtactccagaaagcagataatagaattctggaggttttggtgacatccccaaggggaagagccacagctccagagctgggaactgagagtgtctgaagctgaggtacggtattcaggagcacttcacgtgggaagggttcatagggctggcaagcatagggacgagcacattaggtgtgctttgagcagtgaaagggacagtgagaggagcagtgagagggacgaaaccatccagaggacatgcagtgagggtgctccagctgacccaagtgtgggtgccctaggataagacagagctaaagcaggtgcccccaactcatctacagtgtgatatgccagagtccttccttttcccgcgctccatgcctccccctcgactcccggtgctgcggaagaactgaaggttgcgatgccttactctgacgggagcatctgtatttttatgttaaaagcccaaaaaaaaaaaaaaaaaaaaaaaaaaaa

SEQ ID NO: 211082 - DNA, 1000 bp, Homo Sapiens
aattatttatgtggtatttatcttaaatatagccaaacattcatattacaaaggaagaaaggggcttccacacttttttcctacttttttttcccttctcctatgcttagtgaattgtcaggctgctagggcttgtagaacagggcttgagttttctagagacctttatataataggcactttaaaagcagaatttcatttacataggcactccttctagtagaacttgatggagctgttaaccggctatacttccttcttgcacaatgggagcgtccctatccctccctaaaaatacgttttttttcctttctcccagctggcttactaaacctccctgggaagtcctttcctaaaaccgggctgttctgttcattctatacatttatgataggttatctggccttaattctgtcacagcttttgttcagatatgctcattttcatgacactgctttgtacctgataccttatgtaatatttgttttgccttgccttgaaatcacagttcaagtttagaaccttttcttgcttgatacactgatgctccaaaataacaccttaaatgtgtagagtttgccatatgtaattaaaccttatttatgtttgtatagtttcgtagtttatggaattctcacacatcacacaggagttgagaaattacttttaggcagctagaaagggtaaaagagttctcggtggaattttcctttaataaaaagcagctcctggccggtgactttgggaggctgaggtgggtggatcacttgaggtcaggagttcaagaccagcctgaccaatatggtgaaatcccatctttactaacaatacaaaaattagctgggcgtgggggtgcgtgcacctgtaatcccagctactcgggaggctgaggcagaagaaccacttgaaccgggacgcagaggttgcagtgagccaagatcgcgccactgcactccagactgggcaacagagcgagactctaccaaaaaaaaaaaaaaaa

SEQ ID NO: 211083 - DNA, 1000 bp, Homo Sapiens
gctgactgaaagaacatgaactttggtttccaaatcttgagcatctggcttcatgactgcagccggaccatcaatgccatgaagacgacattgctgtggggggtatgagagtccatcaaaggagtctgctcctcattggcctttggcttcacccaacttagcctgacttctggatttggctgcaccatgaatggctgaaggtgcttttttctctgcttcttcttaagcagtgctctctgattatccagtgccagctgttaaagtttcatcgtctcatcgtgaaagacactgtccccactggaaccaagccggcagcaactggcattcatgcctgctgctgtttaagtggcagccatgtccccactcctagccacccatggctctaaactacttttaagagcttgttggccaggcgtggtggctcacacctgtaatcccagcgcttagggaggccaaggcggatagatcaggaggtcaggagatcgagaccatcctggccaacatggtgaaaacccatacctactaaaaatacaaaaattagctggatgtggtagtgtgcgcctgtagtcacaattactcaggaagctgaggcaggagaatcacttgaacctgggaggtggaggttacagtgagctgagatcgtaccattgcacttcagcctagcgacagagtgagactccgtcttaaaaaacaaaagagcttgtttggagagtgtatcatgggggtgcagctactcctatacctttgctcaaagactggtcctcttctctgggggacgacctcttccacggagcgtgcacttagggagggacaggagggatgcacatagagcggtgagcgaagaagagcacacacgcctagccagccaggtcagccgaatcaaccctggcgatcaatagggtaacagacgtctcagccagatcaccctcatatcctaaagcactcttaattaattttttacaaataataaaatgctttcatccccaaaaaaaaaaaaaaa

SEQ ID NO: 211084 - DNA, 796 bp, Homo Sapiens
  misc_feature (741)..(741): n is a, c, g, or t
ttttttttttttttgtttgtatgtttaattaaggattgcacctgagacgagtcaagcctcttgaaaaagtcaaatgcctccatgtaaatataatcaagtttcctttcccaagtgtccatgtgtgataaataaaaagttttagattactaatattcacaggtaacacagagaagaaaaaaagagaaattcataaagagactttaagtgtttaagttaggggttgatcaccagtttgtgcagtatataaatttttggaatggtttcacacacatgtatcttgatttgtggattgagctgcaagttctctttctgggcatcttttgcttgacagattcccagcatagcacaagttcctggagagtttaacaatcatcttctgccagcatgtcaatctataagggtttagtgcttggatgtcagagtgagtgttgatgatactcggaagatctggggaagcatgttactaagttgataaaacatttcttcagaaatactctgtggtactagaaattgcactgtcctagaaattcctccatcccatgaagccatttccatcatgaaacctttgacacacttgaacacaagttccgctctccttaagcaccagggtatagtcatttcctctgacatatcatgtaccagcaagagaggaatgcttattgttgtgatgtcatgggtacagcaaactttgagtatatttcggagtcccataatggcaggatcacgagcagtgatgtttcncgatttcacatggtcatcacacagagatggaaagaacatggatttctgagagatt

SEQ ID NO: 211085 - DNA, 804 bp, Homo Sapiens
  misc_feature (661)..(661): n is a, c, g, or t
  misc_feature (788)..(788): n is a, c, g, or t
ttttttttttttttttctggatagtatagtattttattggcgtttgaatgagctaagaaaatgcatataaatacacacgcgtaactatgattgcagaagaagcactttcgaaatcacaacattagattaaaccgtgtaagttttttattgtttttgaaaaatcaagtctttatcattttactaggaactatttacagaataaactaatgagattcttcctgaggtaaaaatactttttggaaaaacttctccttgatgaaatttcacttaaaacatcacttccatcgtgaagtatttctttaagatatttttggtcccttccttttatgtggaatcgtcaattcaaattttaaaggagactttgagatgtttttcatctattattttaaaaatgttgaaggggtttttaattctgccttcaacagagatggacacacctctgattatgatgtaaaactgaataagttactctgacaggctttcttttctgcagcgcagctaccatcattattaataaggattgaattcttttactccatgcacaatctatattccctgctttacaaagaatagaaatctaattctcactatgaaggcagataaaagtaatcacttcaacctacagatgactgaatcagttaccaacgcactcagactttanatagcatttatccaatgtgtctatatttctacacacattcatatgaagaacatgtagtttacatcattgcacaatttatgcttttactgagttgtgatggtcattatatttttattacatttcccanagctgggctacttact

SEQ ID NO: 211086 - DNA, 1000 bp, Homo Sapiens
accactgcactctagcctgggtgacaaagtaagactctgtctcagaaaaaaagaaaagaagtggttaatatggtaaatgttatgttacatatgttttaccacagtaaaatttttaaaactaagatgaaatggccagtttacagcagagtaaaaattcgaggcctgatattcaccccttatgtgcctaaccctgttctcaaagtattaaacccttgaaaaggtcactatttgctagaaagtcgtccctcggtgtccacggaggagataggttctgggaccactgcagaaagcaaagagcgaggatgctcaagtccctgatataaaatggcaccatacgagcacatcacctatgcacttcctctctcatgttttaaataatttctggattacttgtaatacctaacacaatgtaaatgctgtgtgaatagttgtactatgttgtttagtcactaatgataagaaaatctacaagttaggtatagatgcagattttttcatgaatatctttgattcatggttgaagccaggggtgaggaacccacagacacagagggctgtgtgtccttttgaaaagaataaatcaagctttggaataagaatgaggaaagaaatggaaaattgcccaaaaacgcctttgtcacatttgccgaagagtagtttttcatactaagggtcccgtttgaaataaattttgttagccaacctaacttccttacatttctttagttggattctcttataaacaattatgaaaatttttagatgagattggctacattaaagaactggctttagtattatagcatagtagttaacaaggcctaactcgttaatcatagtgctgtttcactgataaaattttgcgtaggcctcttatggcagctcatgcctataatcctagcactttgggaggctaagataggaggagtacttgaagccaggagtttgagaccagcctgggcaacaatacgaaaccgtatctgcaaaaaaaaaaaaaaaa

SEQ ID NO: 211087 - DNA, 1000 bp, Homo Sapiens
ttggcctttccctcgcatcagtggtagcagcaggcaggaagtctgaggaaggtggtgtcaccgtgagtgtggactctcctttctctgtctgagctgctgggagcacagggaaccctgtctgtcaggcctgagtttcagaaactgggttttcagccccagggacctcgggcctccaacagcccaatgagatcgtgcttcctgtcttgtatgaataagcacaaaatataaacaactggtgtttcttgtctccaacccacccagctgcaaaacttcaaggaaaggacaatgccggtatgtaggcaaaggtccccaacactgccctcagcatatcagaggaggtgtccctgagagcacagaggacattaacctcctgctgccagcgtctcccactgctctctggatcacactgctgggtcccagtacccgatgaacctgctctttccccatctagacacaagccggcactctgctggagagtgcgcatggcaggtggaagatcccttaaaggacaaaaagagagacgcctgcatgtcacttacctctcagcttccacaggcgggatgtgacagtcctcatggaagactcttgaacaagtgtcgcaacagaacagctcccctccgtcccggcacacctcacactcatccaggtttctcatctagaagataaaacagtgtccacgtcactgggaaccgcaagattcaggaaggccaaccctctgggcaactagaacacactgcctttgtgtgaacctgcatggacaggcaaatgcttctccctgggatatgaaggaaaaacatggcatggagatttcagaacaaatcctggtctgcagtgaagttcaggaggaaggggtatgggtcagaattgaaaagttttccttatgaaaccagagattgtaatgaagaaagactagcaacaaagcaagatgatgattttataggaatctgaataatttccttattctgcagataaaaccaggttttgaaaaaaaaaaaaaaaa

SEQ ID NO: 211088 - DNA, 1000 bp, Homo Sapiens
aagacaatccacgtgtggctcaagtgtcaataacaaagtgtagctctgacatgaatggctattgtttgcatggacagtgcatctatctggtggacatgagtcaaaactactgcaggtaatatgtcagaaataaacaaacacagtttgtaaaattttgttttatagatttaggggtacaagtgcagatttgctagtggatatattcagtagtggtgaagtctgagcttttagagtacctacccctcaaatagtgtgcatggaacccattaggtaatttttcatcccttaacccccccaaaactcttctaccttttgaagtctccagagtctattactccactctctatgacaatgtgtacacattatttagctcccacttgtgagaacatgtgataaacaaatgcagttttactctttgtatttctatttttataatttgaaattaccctatatttccatgggctgttaaatgcagtatatatattattagaaacttttctgagtttttaaaaattaggtagtaaatagtagcttttaaattgcacacatatgtcagaggtgcagagcagggaggacttctgatgcttctcacacttgccaagatggtgtctctctgctttggatcttttccttcaatttctatatcaggtattgttttaagaattgattccaggccggacgcgttggctcatgcctgtaatcccagcactttgggaggccgaggcgggcggatcacggggtcaggagatcaagaccatcctggcgaacacggtgaaaccccgtctctactaaaaatacaaaaaaaaaaaaaattagccaggggtagtggcggacgcctgaagtcccagctactcgggaggctgaggcaggagaatggcatgaacccggggggtggagcttgcagtgagcggagatcatgccactgtactccagcctgggcaacacagcgagactccgtctcaaaaaaaaaaaaaaaaaaaaaaaaaaaaaaaaaaaaaaa

SEQ ID NO: 211089 - DNA, 1000 bp, Homo Sapiens
tcctcctggcaagggcccctgaggacctcagcctttcccttgggctctttctttgctaatcacagcagccacaactgaacctgtctctggggaccaattgaggcagttggcagcttttattttctgccccacacttaataagttgaggaggggaattagggtatccacacagctaactgccaattacctgggctgtttctagagacaaatagttccccttagttggtgttgggtttcacccagtgtctgtgtactaattaaagtgcttagaggaactaccatcccagtgccctattgcctcttgacctcccaaggccagaaagacgaggtttaagtgagtctgggttctcagacgcagacaagatgactcagtgtgcagccctgcctgctggtcaccacggagacctccaaatctcagaatctgcagtcttgcctactgtttctctgtgtgcatttggcaaactttttaatactagcacttttggcagtatactccaagcaatcaaattgtttaaaacaatattaagcaagtcttcatgtctaggagctttcacagtaactgcttgctccactgccctgactttctggcacacttgagatacagctgacatctctttgcagcagcatgctgtctcggctttaagctttgttcagaccctttccctcagtaagtcataccctgctgacttactgggccttacatgggcctgccacttgttgctgcaagagtgtttgtgcctcttccttgtataagtggggcgtggattgagcttcagggacgcagcatagagcctgtctcctcctgataacattcgtccacttgaaaggggagtctcaggctgggcgtggtggtgcacacctgtaatcctagctattggggaggctgaagcaggagaatcgcttgaacccgggaggcagaggttgtagtgagctgagatggtgccactgcactccagcctgggcaacagagcgagactccgtctccaaaaaaaaaaaaaaa

SEQ ID NO: 211090 - DNA, 982 bp, Homo Sapiens
gccaattgaaaatcttatttttgaaggaggtttaataacataagaagatttttaagataatattgggggaaggagagcaaattttatatgaaagcataattcatatgtaatatgcatagcaaacatttatagagaataatatcaaatattggtgaggagatggagaaaccatatttcatacacttagagttgcattttaaattgatgtagccatttgagaggaaaaatggcagtatcaaaatttaaaatcttttgacccaacaatttcacttcatggtatctttcttaaatgtttgcttgtgcatgggaggcaattcttaggatgatttttgaagcactgtgtataatgctttgaagcattttgaaacaatctaaatgttaatccgtttagaattaaataaattggaattaattaaatgattatgtccacattgtggtctattatatagcaaatgaaaagaatgaggtatagacatggaaaaaacggatcccaagacagtctacatgaaaaaaggaagttacagagaagaatatgtgtgatatgccatttgtttaaaaaaaaaaaaactgatatatcaattcatatgtgatatacatacatgtttaaaaaaaaacaaacaaacctcttagatacacagaaaactagtcacagtgattatctctcaaaggagaaatggaattgagagtagtgatagaggtctgggctgggtgcagtgacccacacctgtaatcccagcactttggaaggctgagataggaggatggcttgagcccaggatttcgacaccagcctgggcgacatagtgagaccctgtatctacaaaaaatacaaaaaaaaaagaaaagaagtctgtaatatttatttgtaatgtttggagtttttagcctcacagtggatttgataaattatttatagaattgaaaataaatttgaaaatatttacttgtgcagaaaaaaaaaaaaaaaaaaaaaaaaaaaaaa

SEQ ID NO: 211091 - DNA, 1000 bp, Homo Sapiens
agctggtgtttttagccttttttcttcccttgaccttgtcagtttaggagtggatgcatctagatgtgggaagccatctagaggtctctgaacatgtgtgatagtaagtaggtagcgatgtttctgcagctgctcaccacccacccagggaaccctggacctggtggaggtaagaggaagacagaaagcaaagcaacgcctgcagcataccccaaccctaaccctagccctgcccagccctgcagccaacatgggcttcattctcacaccagtgcagaaaggcaagttttattacctctactttatgggaaactgaggctcagaaaagtggagtcttgttcggggtcacccagatggaacctggattgaggcctaggtctcacctgcctgattttcaccgtagaaagtcagaactacctagagaatgaaatcagtaaaatacctaggaacaaggtgtttgttccccagcatttcagctgggagctatttccctgcacagataggctagtgagttttatctatgctgaattatcctatggttccaccaaggtgacatgtagtctaagctgctttaggtgtacattattaaaaacgagagcctaacagtcaacaacagtggactgcttcctagtaaatctgggtgactaactttgcctgtgcccaatgttaaccctcgaggtaacactaagtgttgataatcacacagacattatcaaagtgtccagtcatcccagtggctggaaatcggatctagaactgaataccaactgagaccgcggaagtctcagcggtcctgatggaatctgaaagtctgtccctcccacagctctagctcagttcttcctccctctctttccttttctattagtttacaaaaggcttctttaattacccaagagatgcttcagagtcagctgactttccttgcagcatttcacatgtttacccaatttttctctggctctctcaatttgattaattgcaaaaaaaaaaaaaaaaa

SEQ ID NO: 211092 - DNA, 1000 bp, Homo Sapiens
cactctccatgcctctgccttctcacgcactcagctttaaccacaccaaactggatgcacttcctctctcttgtctctttaaagggactgtgtcttctgcttggaactttccctttgtgaactcccatagccatccctcagccaacagacatctgcacgcatgccagctccctccctcccctacccggtctattgggttgcgtctccctccctctattctcatagtacttggtgccccctctgtgcacacagcccggtgctttatggttactttttgcctgcctgtccatcatgtcactagatggtgagttcctcccagtgcctagctctgtgccaggccaatgataggaccccaggaaatgtgtgtgggagagattagaaggagagagctggaaggaggaagacccatttggagcccagggcagcagccaagccaccttcatttgtcccgacgatcatgctggtcccagagttggcctcattcctccagagggtggtactaagattactggagaaaacaaccagggggaagctcactggtatataacatcagctcccttctcctcgtcccaggaggaaatgatatttccatacatcctaaacatccgcctccttgcagcatctgcggaagcttgcttgagtaatgaaagataatcagcaatagttgaaatttcctatccttgggcaggtctttttttcctactatattatgtatttaaatacatagacatatttaaccccacctaccttttgggccaagtgtttatggactagacttgttcttccccttagttttggaggtccagtggtgagtacctctcacttttcagagccagaagtgctgcttaaaaatgtgttcagatcctggccgggcgcagtggctcacgcctgtaatcccagcactttgggaggccaaggtgggcgtatcacctgccgtcaggagtttgagaccagcctggctaatatggtgaaaccccatttctacaaaaaaaaaaaaaaa

SEQ ID NO: 211093 - DNA, 559 bp, Homo Sapiens
ttttttttttttttttttgacacttaagtattagcattttatttcaagcacttatgctcatccttgagtttaaaaagtctaacaaaatctaagaacccgggttcctttaaacatgtttacctacttgtggagacaccaacaggaaccagcaaaccattgtttatttatttacataatgtatctcccatggagacctatttggcttaccactcttcataggcctagtacaatctcatagagcaccctaggatttcactgatcaatacctaatggcacctaaaagtacctatgcttcttttcttgttccatgaatccgtgaaagtctgcagatcctcccagctctagaagcagtcatgttttttaccaaaatcagcattttgctttatggaaacacaggcaacatctgatagcgaagagggcattaagatttgacttaaccaaaattgcctgacaacgaaaaagtcatttcatcattctgcttggcaatgtagtcttcagaaatcaactgtgataaaaagcaggaaataactgttaaaattttagcaactcgcctcgtgcc

SEQ ID NO: 211094 - DNA, 1000 bp, Homo Sapiens
aaacgtggattagggttagtcttcatggatccagtcgtgtatgcaataaagaaaggcatttactacacaaagttcagaggacttcgaaaccattctacacacagtttattcacatcctgattatgatttagttgttgaaggaaataattaaaatcataagtataatcagactgtagctatcaagtgtgtgtgtttgtgtatatatatgtatatgtgtatgtataatttttttactatgacaatgagaggaaataggcagcaaatatgactttgctttctactgtgctttttaaaggcagtttttattatcagcatgtagttttataatcattgaaaagttaatgtcaagataaatacttaggaaaaaatattgaatttatcaattggttctagtataatctttaatgttataaatatattagtatactgtgtttttcaagtgcaattttgctaaatgagtcacagcttttaaatctggaatattattaaggatggtgatcacaaataccttgagaattatttttgtgtctaggtttagcgacaccagtagacttgaagctaaaattgatacccattctacagcacatgcaccatgatgcaatcttggcttccagtgctcgtcagcttttacaacagctggtcacatcctatccgtccaccaaaatggtgattgtgtctttgcacactttcactctgcttgcagcgtcatctttggttgatacacctaagcaggtaatttcaattttctttaaactgcctatctttggtaaacttacatattaaatatatgattagaaataagaaagtggcccacaagtcttgaggacattaaggttcttttctctaataaaggtcagattaatttgcttttgcttgcttttttattctctctgttcacagtactgattgttgggagcccttgaggaaaatgagatgttatggagtacatggctgggtgtgaagttggccgaaaaaaaaaaaaaaaaaaaaaaaaaaaaaa

SEQ ID NO: 211095 - DNA, 1000 bp, Homo Sapiens
cattccttcccttgaatcagagagcactagatgggaagggtgatgggagctacattatcactggcagatggaactattcagctcctgtccttccattctctaagaaccatgcatgtgtgtaaacacatgttgcatcagtgattgttccaggctttgcctacttgctcccaaacatgtgaaaaagaagaggaagattaagtaagtcattcatatattacttatatctgagtgtttgcaatcatataggggagcatagttcccacaaggaccggtttttgtaaacttttgcttctctttcctgtatttaggcattatatagctatggcagtgatcacccacaggtacaaattctgtatcattcattgcctttacttggaggtttacaaatatttttagtctctacttctttttcaaacacaatcttgaaacctcaacatatgaaacgaataaaggaaaattttgttagcataatgtatgttagatttcagcgtgtaatgctgacttataaaatcaagaagaaagaacaatgaagctttgtgatgaacacagaaatttgaaagcagtgttagagatgacagctgcaatcttctttaacttcagtttccaatttattgccttttgttgttaggtatattttttatgttgttgtgcagtattgagaaaaccctgattccctaaaataaggagttgcaaataataatgagttgttttatttttttaaacagttaccttgcaagctcgggatgttttcctttaaacttatccacttaaaacgtgttcacttaaaacaaaaggaagaaaagaaatggcttctttcaaagctgatatcgctaacaatgtgaaaccatttacattttttaattggtaagcctgcgatttggaggaccaatgatagcttcctctagcctaaatcttccattagagggagaaaacactttttaaattataacattaatgagatgctcattgatgtacttaaaaaacaaaaaaaaaaaaaaaa

SEQ ID NO: 211096 - DNA, 735 bp, Homo Sapiens
  misc_feature (691)..(691): n is a, c, g, or t
ttttttttttttttatttgtgaaacgatacaaattttattaatatacaacgggaaatttgacagtttagggaatcaggtactcaatcttttgattctcttctgcacttatggtatatgagaagccagattataatcacatagttatttgataacacaaatatacaaagaacaaggagtgctgattttataatgcagtgttcagggacatgaagacttgactgtgtactcattgggccatgtttcttaaaatgaagttcaagagtccctcaaaccagaggtacataaagcccaggataaatatgacacatctgcctagggtaccaaagatttggggaataaaaagctaaataactgaattggtaatttaaaaaaaaaaatttacactaaaacacacagatatattattaattaggatgcaaaaaattgcatggattttttttttttaaagcatgaagcctccaagaggatttgagcttgaagtgggcagctttaggcttagggtaagcagaatagtggagtcaggagcacaggcttgtagttggacagaccagggttttgagaataagactcttgacacttattagctatgtgatcttcgaaaagtcatgtaacttgtccaagctctataacctcatcaatataatgaaaataaacaggcttgttgcagggactgaaggaggcagaccacanaactagctaggacagacacctgaaggatacagtaaagtatggtg

SEQ ID NO: 211097 - DNA, 632 bp, Homo Sapiens
ttttttttttttttttttaaggaaaaaagtataccttttaagttcagcttccttaactactggcaacagagagaaactcataatttgttttaaaaagcccagttacagctgccctgcctacccatggaccattgacttcccagcacactcttaagaataatatacagagaggcaccattttgctctgggtcttatggaatcctagagctcttgaatacgttttggtggtcctacggagagctgtaactagcagtggagttgttgcttattccagctgtgtgcttttcactttccgatctttggacccagagaatcatttgccatggaatcatctggctagtaagacactcttatatggatgcaatacaaaaagtggtaaattaaagcaaagcaatcatgtggtccttactctaaaagagacaatatgtaaatgtactattataataaggtagctctgcagatgtaataagctactcataaattatttgggtttaagaaaacttaagactatgttaaactggacaacatctccatcttgagtgagagtaattagtaactaggatgaccacacattctcctaacacgggcaacagtctagtctaattgttattgcatttctgacctgattcttt

SEQ ID NO: 211098 - DNA, 1000 bp, Homo Sapiens
taccccctaaaaaccccaactttttaccctaggtgtatggtgaacctaaaaattttcctgaaatccagccctcacaaaacacaaaaacttagttttgaattggctgaaatagattaaagtgattcacccttgctcttaaatgcttgtcagaagcaaaactaaatcctctctagaggaaggtaacattcacagcctcagcctatctccacagttttgtgcatgcaagattaacattcagtcaaaaactaagcatataaaaagaggcaggcgataaggttacccacaggagatctagatattagggttatcagacatggaccttaaggtaatgttgataaatatgtttagtaaattaagtgacaaatggaggatttcagaaagaactggacactattaaaaaagttaaatggaaattctggaattgaaaagtgcaatatagggtgacaatagtttacaataatcttttgtatattttaaaatagctagaagagaagaatttgaattttttaacataaagacatttaaggtgatggatatcccaattacactgatttgatccttacaaatcatatgaatgtactaaattatcacatgaatcctgaaagtatgtgtatctgttatgcatcaattaaaaattaaaaagaacttttaaaagtgcagcaactcaaattaggaattaaacaggagggtttaatagtattcttagctgaagaaaaaattagtaaactagaagatagatcagaagacaatatccataccaaagcacagagagacaaaaggatggaaaatgaaaagaaaaagaaaaatatgtaagagacaaatgggacactgttaaaagtctaaaatacttataattggaatctcggagaggagaaagaataggtcagaagcaatagtaaaagacataataacttgagaatcttccaaaactaatacagacttgcatatttgagaatcactgtagctctaagcagaatcaataccaaaaaaaaaaaaaaaa

SEQ ID NO: 211099 - DNA, 751 bp, Homo Sapiens
  misc_feature (468)..(468): n is a, c, g, or t
ttttttttttttttttttcccttttctctttaaactcttcgtctgtccttttcgtttctttttttcactttttttttctcctctcctaccccccccggcccttctccctgcctgcgcgcccttcagtaggtgaaaaccaggttggagatgctggactcgagccagtctcccgagatcatctcgctcacctcgggcgtgcagtagtccgggaactcgaagtgcgagccggagccgggctcgaagttaaaatccaggtcccggtcgagcgccgacgacgaactgaagctgcccagggacatgctctcaaagtttgagctggggttcaggtcgagcaggtcgtcttcgaactcgtcgtcggaggacgaggagcccgaggaggaggaagaggaggagtgggacgaggccgaggaggacgcgtgcgagggcgcgctggacggggcgggcgaggcggcgcgcaggctggcgtanccgcggtggtcggcgggcgagcggccggcggcgggggacgaggcggcgctgctgcggccgctcaggctgggcgcgtcgggcgagcagcccgcgccctcctcctcgtacagggtagtcagccatgtgcttgaggcgcagccgctccgcctctcgaatgaaagggatcttgtcgctgtctttgagcagcttccagcgtttgcccagccgcttggagatctcggcgttgtgcatgtcgggcgactgctccatgatcttgcgccgctcgatctgcgaccacaccatg

SEQ ID NO: 211100 - DNA, 766 bp, Homo Sapiens
  misc_feature (707)..(707): n is a, c, g, or t
ttttttttttttttttttgagttgtctaatatgaatcgggttttatttgtttttggatttaaaaacttctcctttgatgaatgcacatttatagggcaagttagaacaaccaatcacataaacaactgtcctcacataataggtagttgttacttaaaatgaaaatcccagagttagtaataaattcaggtacatatgattctgtatgtcaaacaaatagaagatagcatgtcctgaaaaagtttctggtgactaaaacaattgggccaaaaagacaaggacattgatgtccaaagatgcatgttaatggttcaaatgaaatgtgaaaaagcaaaaggtactaaaatatttaacatattaaattaatgtaaatttaattaccaaaataaataataaaagtgaaagaatccttccttctacatcagtatatctgagtcagagccactaaagctatctatttctacttcaccaaacatctcattcccactcagtacttgaggagtttgatatacttggcttcatctccctatttctaaccttaggaatctgattcttcctcctcttcttcctcctcctcctcttctttttcttcctccttctcttctttttcttctgtggccacttctgctgcttctggctttatttctggggccggtggtggagcactgctggaggagttctgccggggcacctctggtgatttttancaagcaatcaatattgtactaatatatattataaaagttatgatgatatatcacatgtc

SEQ ID NO: 211101 - DNA, 816 bp, Homo Sapiens; identical to SEQ ID NO: 51585
  misc_feature (660)..(660): n is a, c, g, or t
  misc_feature (709)..(709): n is a, c, g, or t
  misc_feature (804)..(804): n is a, c, g, or t

SEQ ID NO: 211102 - DNA, 714 bp, Homo Sapiens
ttttttttttttttctttgaatgtttcttcttcggacacttttgccacatctactgacaccacggtttgatcctcttccacccagtcatgagccctcttcatggccttattgagtttgtcaggtgtggccgccacatgcaattcaaagagaagctctgtaagcatgcgagcaaattcttctcccttttcttctaagccttgttcttcttgattttcttcattctctaattctttggctgcaaagatgtctttaatggaaattaggtcattttttaagagttccagcttctctccatcaagtgatgctaaaaatgactgaaccttgctttcgctttcattggacagaatttccagggcttccaggtgtgacaagccttgatattcatcaaacagcatcccgtagtgcgcggttctctccatcgtgagctgctgtgccagtctctgcttctccttctccttagcttcccttaacatctgagacaaggaaacagttctctccatgagcgtcttggtccgcttaaagcccgggtcactttctgcaaggacattcatggttttcttgccgatgaattccaacgcatcaaggcctccagttaagacacttttacctgtgttttgaaccacacttggtgatggcagacagcatacctccgagaggctgatgaaggggaagtgggtgggctttctgcaggtcctgatctgtggctgcatctg

SEQ ID NO: 211103 - DNA, 677 bp, Homo Sapiens
ttttttttttttttttttcacagccacaagtatttattgagtgcctgtagtgcaagaaagagagatggtccctgctcccgcggagcttacagcttcacgactccagcatctggctagattcagaaacaactgcagcaagcacttgtctacccaccagcagcactgtaaaaagcacatttctcacattatcggtcactgttacagtgaaattgttagatgtaaaaattatccttgaaatctgtagtcatagagatgacatggtacataatgtccagcaaatgcacatttatggcttgattcctcacatatctgaggggtctatggaaataaagtacaaatcaggcagaaaagacttagtaacacagttcctaagaatactggggtagtagtttattatcaaactaccatagagctcttggcagggcaggaaattatttccagcaaaatttgtgcaatatagtggatttaatcaaacctgcaactgtcaaccatacatggtccctcatgacaggtaaatataatctacctgtctgaatggtaaaaggctacaggtgtgcatttattttttaaagcttcttaaagactcatagcacaagtggcacattgaaatctagtgaaaacttgagataatctaaaaattaaagtgacaaaagtctctaattttactacatatgtag

SEQ ID NO: 211104 - DNA, 823 bp, Homo Sapiens
ttttttttttttttttttacaaaaacaaataaggatttttatttgcagtactttccactcttcctttaaaaacttgccatttgcttatcagttcctctggggctgacccactcaaacaagacaaaggataaagaacaaaagatagtcctccgaggttacaggcttggaagggcagagaggagctacgaaccttggaagaaaaacaaggtgctcaggaattcatcgcctaacatttcacttccccacccaccccttagtgctcccactttggcagtgatctctctttggctttaaagagaaagggggaaatgtgccttgttttgcaggtgtgcaacaacacagctctggcatctcaagcagcaggggagaactctaagacagaagaatttcttcatgaaaatcacggtatgttatcacatactgtctccatggcccatacaaggactccttaaggttctctctaacatacaacatatcccccacaactcagtagagaggtttccttcccactggaatagaaatcctttgcctcatttattacagtctaaaaatccacactggctttttgattctttctagcatgagctcagacactatacttcaaaagaatgcccagaggcattttcttaggtagagacttagctgcgggctgagacttcggccccacatagctcacatcaattctgcagctgcctcctttcctcccaataaaagcatcatagctcagagctacaagctccttgaatggagaaaaccaaatcacccaggaaaggtgaccaactcctgatgtgcagtatcaagtgtgaatgctggaaatgctact

SEQ ID NO: 211105 - DNA, 778 bp, Homo Sapiens; identical to SEQ ID NO: 49038
  misc_feature (743)..(743): n is a, c, g, or t
  misc_feature (757)..(757): n is a, c, g, or t

SEQ ID NO: 211106 - DNA, 700 bp, Homo Sapiens
ttttttttttttttttttgagctcttgacacctttattggaaggatcctcaaggctgtgggcaccgaggtctggaggcaacagaagcagcatccacccacccaccacagtggcagagcacaccccgtgcaaaaacccatcacagagagaaggaccatggagcccctgcaaagccatcatggagagaaggaaagtccccactgtccatcagccccggccaggcctggtccctcaacccctgtagaaccccaagcaggccgatgtgggaggcatcaccacacgtgggttccaactgcttctccaaaccctgtggtctcacatgaggcagggaggaaatttgaaaatggcagcagcctgggcacggaggctcctgcccataatcccaccactttggaaggccaaggtgggtggatcacttgagcccaggagtttgagatcagtctggacaacatagtgagaccccatctcgacatttttttaaatatttttaaaatataaaataaacagcaatacaaagaaaaaacccccaagctgcagtgtgtacacaatgtcactttccagcgttcctgatgggaagaccacaaagctcacaaaggccgagggcaagtgcgggggtggtgctgtgcttccccggcgtccacaggaaaatagtcctccgtcctatacagtgtgggcagctcgtacgtcacgggcaccggtgc

SEQ ID NO: 211107 - DNA, 725 bp, Homo Sapiens
ttttttttttttttttttggtaaaaggtcaaggtctcaaaatgctaaatgatgagggaaagtgtagcaagtatgattcaattctattaaaagacagaaaaatcaaggtaggcacttgctcaaaactacgtgagtagtcagagaggagacacaaattagctttgggaactcccgagaactccaatgtgctccagtcaaaatcttttttaaaaggttcctttgtaaacattacccttcccccgatctctgtgaccaaggttgccacctgtgacatggatttgcagcctgcagtattgtacttcccctgcttggggccatctgtgctaggacatgatgatttttctatgaaagcagctgttctcaccatcacaaccagccttgaacttggtggcacaacctggatcctaaatagtggctctggagcaactgggaatagggccccggggaccatccacccaggtggcagcgctgggctgcaccaagggggagtcaggccagaaaaaaagctttgccctgctccctgctgctttttgccagcccagccagaagccctgcagaaaacctgtgctgaccggcccgacatgtggcaggtacaagaagatgccctatttatgaggggacaggtttacaatttacaaaagacaggcgaaaatataaagacataacttaagtcctgccagtggggagttagaatgttcctggccaggacataaagaatattcctct

SEQ ID NO: 211108 - DNA, 733 bp, Homo Sapiens
ttttttttttttttttatgcaaaaacattttatttataatagatcaacatttttgacatgaaaggtagccactttcaatttctcaggaatgcctagaacccaacagttttcagaaagactacttagttcacaattatttcactgtaggtaaatgaaataatttcagaatgaactttttaaatggctttgcctatggcaaattgttttataaacttgaatgtatggtaagctagctttcccaggaaatgaatgtaatccaactatgttccaaatgtattaaaccagtttatacaacaaatatgagaatcacttatgtgcatcaactgtgctaaaacaagaattctttttatcaaaatattcatttttcaaaaaggcctcacattaacccctcaaaccaagcacccccttcctatgtccagcactcttttctacttcgagttgcatgactgtagagacaactgtcaaattccagtggaactgtacactgacttaagactctatgtaatatacatcaaacacaggaggtcactgactttaagggacgaggtgataactaactagttataattcagccaatgtcttttttagtttagagggaaaaaagtagcccccaagtgtccttaacttttcagtacttctctgtaacacacagaatgaaaaggtactctctaaaattaaaatcattagaaaatatcttaaataaaatgttttacataaataagtgttaaatttc

SEQ ID NO: 211109 - DNA, 731 bp, Homo Sapiens
ttttttttttttttttttgctttcggcccgcaaagtaaataatgtcaaaaaaactaaaaactaaaatcaaaataaaataaaaaaaaagcctaaatactccatttactataaaaataaagcctccgctaatgtttcagtaaggagagggactacaaatcagacaatgatcttcatattaaccacaggatgattagaagaatctcccagtacactaagattcactcattcacaaatatgtcctgagtgtctgatatgtggcaggcactgttctaggtactggagacagggaagtcaacaaaatggataaatacaggtatctctgactccagagccccaactcaaccactgtactccactccttcagggcatatacgatgatgatctcagcagtactgatgaatttaccctccagccagccagtctcttagctcaaatgctcctgcaggaaaatcttctccaagggtcctggataggactgtgaattcagtttatgtgctgagtatggccacttcgctttgttagcttcactctagtttggtccaggcagggtacatccccataacggtttttctctaggtttcctggagacatggaacagtggaaagtgccaacagggttctcacgacgaatgtcttcatattcctcatagattccttgcttttgcctggcattaacatagtccaccaactcttggatggtcatagcatggggacctggaacatgtactgagt

SEQ ID NO: 211110 - DNA, 768 bp, Homo Sapiens
  misc_feature (522)..(522): n is a, c, g, or t
ttttttttttttttttttgattatttcagagatttattgcaagttaattgtctgtgaagctggatattccttaacatgaaggtaataaactttaacgttccactcaaaaagacaaaaaccaaacaacgaaaaataagaaattaaccagaaagctatagcttgttttcttactcagaaaaaaagtataactgataaggtacaatttctgtaactggatatttttcaaaattataaggcttttagttctaaaagtataaagaactgtgatgcacttctagtcaacctaatcttgctagaagctttatcaacactgacagtctcaatactttctcttttgctattatatagtcaactttaaaggtaattccttaaagtaaatttgtgtgttcctaaaaatatggactaaagttgaatgggcaaaggtatacatcgcattttctgggggagtaggggagaagtcattcccaaaaagtgaaacatttaaacaattttattctttctttcacaactaaacacaccttngaggctgaggaacatgtgatttgccatatgatttccaaccttttcttatccattatgttttaacacttgttttccctacttttagtcatttttacaaactgaaggtaaagatacagtaactacatgagtagtgagtacatgaatttttctatataaagaaagtgtgactctactaaaattgaagttttgactcacagacactgctacaatgagataacttgagatattgtctttggtatataatgg

SEQ ID NO: 211111 - DNA, 741 bp, Homo Sapiens
  misc_feature (675)..(675): n is a, c, g, or t
ttttttttttttttttttgaaaggtcaaatgtgctttaatgcggggtggctcccaggtcctccctgggccccgggggagtggcgctggctgggcctgccggctgcctggccttccttcccggctttcccttcttggccgtcgaggcctttctcttgccagacagaatgggggccggggtgttggtggcagggggccccgggtggggcggctgctcctcgtcgagcgccttgaagttgaagaagtagtcaacgttggacacggtgtccaggatctcaggcacgctgtagtcaaaggacagcagctcctcgggcaggcacagcgagcggatgtcatcggctgagttcccaccactgctgtcaggcagggccggcccagggacctcgcacagggtaccctcaggctcagaggcgcctggcaggcagtcgaagagcttcatggcgtcctccagcagaaccttgtcaggcagtgccaaagctctggccgtcttgggggccttggccttgcctgctcccagcagggccccctccttgacctcggccaccttgagctcgctgaggcccggtgggtacaggggcaccccaggtcgggccccactgccctgcagctccttgacggggaaggccaggggttcgggcccagggaagtggccgaggtgaccctggaggtggctgtangcgtctgggggcagtgtgggctctgcaggcagcgtgatgagtacagggggcggcttgttctccttg

SEQ ID NO: 211112 - DNA, 753 bp, Homo Sapiens
  misc_feature (677)..(677): n is a, c, g, or t
  misc_feature (680)..(680): n is a, c, g, or t
ttttttttttttttttgtctattatataggctggataaatttttctcccagtcatttgattttattgtgtttttactaagcatttttattatcttcatgtagtcaaatgtgtcaatattttgttgccactggatatttccaccacgtttccttctgtatttatatggcttcattttcttacatttggatcctggatccagatggagttcattcttgcatatggtgtgaagtacaggtctaacttcaactttctccaaggggctttccagttggctcagcaccatttattaaagtctgctttgacctgcgattgaagatgccacctttaactcctcatcccccacccctaagaaacctcacggaacatatgacccaagagcagagcagacataaaaagattaactgagctactgagattcggtcaagaatgtgaactaaaaatgaactgttgagaataaggctggaagatccaacagagggaaacggctgtggaggtcattgccaggtgaggtgtcagatccccggcattgggaagtggtcaactcgtgggttggtaaaaagaattcaccaacaacagtataggtttgaaaaaggaaaggtattagaagaatgctgcagaagactgccatggggcacctcggtgagaggactgaatgtaccacggtggatttttcctntanggatatttatggaccttaaagcgggaccgtggggttgcagtgagtttcagcatggcattccggagatgtacag

SEQ ID NO: 211113 - DNA, 744 bp, Homo Sapiens
  misc_feature (730)..(730): n is a, c, g, or t
ttttttttttttttttttcaaaaatacatgtttttatattttaccatatgttcacatttacaagaagtctttataactctatatggctgtaagttactatttcctttcattcaacctgaattcctcccttcagcatttctttgagagaaaaaataggaaaattagtgattggaggtccctataaaattttcttacatctcaagtgttcctgaaatcaggtgtttggctttatgaaattctgagtaactttttttttttaacaataagagttttataaaaatggatggtgaagaactggaaaaagcccacagcagccgtactatttacaaatgactgacctaatgattatttcacatcttgaaaaaagagttacacgtgctatagagatttgaaatatgaaagtctgcttaagcgttacacacttggctacgaagttttaacaaaatgtcaatcttttcttgacacttacatcagtcaagtttatgagatgtgaaattatcattccatagactcagaaagttaaggtagaacaggatggccatggtttacatgagatttctttgagacatgctaagtgtgaatgtccattaaactttaacatggagatgcagagttcacattatgatcttccattgaagatttggaggaaaacgctgagctagaaatattttttggtggatttctcagcctagaggtgatatttaatgcagagaatatctaagatcatcancggaatgagagtag

SEQ ID NO: 211114 - DNA, 470 bp, Homo Sapiens
tttttttttttttttttaaaattgccaggttttattaagataattggcaaaatttcaacatacaccttacctgaatgaacacttttaataaaatatgaaggatcactcatgactacaactgaactcaaaagtgagatgtagagcagatttgtaaattgataaatttatttggtaagaaattattcacttcattcgcttcactccatagagaattctttgcagagaaatgttatgaacaagagaacaaagcctgtctctcaccaaagagcacctagagtaagagtttacaatgatgtatctggattatctaattcatcaaagtttatttccttttcaaaaacaactgctgtgtcagtctggagttccctatttcatgttttctaattattacaataaatagtcttcaaaatagaaaaataactgttacttcttaaagcagcattttatcttctattttgaagcctcgtgcc

SEQ ID NO: 211115 - DNA, 695 bp, Homo Sapiens
ttttttttttttttttttcattgtacaatatctttattaaagaaatgcattccagcaacactgtcagcatctttattaccaaagaaatacataactttaacagataatctctctgtatcttagtttttgcctttgcaaaacaaatggagatatatcaactctcatacaattctaaaagcattgtgctgtgctgcctcacaggggtacgttcccagaggtttctctctctagagcaatccctaataggacaattgttcactctgaggcttctggcttcttatctctcctctcttggggagctgctgcttctctgtaggttgcttccctgtgacgcagggaccatagtttctgctctaataacaccttttccactctgacgtagctgagccatacactacattgccttagtcctgttcaccctttggtgattctgttccatttgccacctggcctcttcctcctcagtcacttttttctttttttgagacagtctcgctgtcactgaggctggagtgcagtggtgcaatctcagctcactgcagtctcaacttcctgggctcaggtgatcctcctgcctcagccttcggagtagctgggattacaggtgtgtgccactgcacctggctaatttttgtatttttagtggagacggggtttcgccatgttggccaggctggtctcaaactcctgacctc

SEQ ID NO: 211116 - DNA, 678 bp, Homo Sapiens
  misc_feature (625)..(625): n is a, c, g, or t
ttttttttttttttttttaaattagtcaaacattttattatagagtatatatttatatcaaaagcacaaaaacgtttattctgaaaaccaggaagattgtgatgttacagaagaagattcaataattccagtccatttctagggtactaagtgtctgatcacctcagtgaaaacaagatacaaatgaggccaaggtcacaggtctggccaccctgagtcccttcgcactatttggtttctcaagttgagacacgtattcccagtcccagttagccaccttccaagtgtttgctactagccttaatgggtacttagccaaagactacaccaaatataaccaaagcttatgttaagtcataagattaatccttcaataataaggatagcataattggctttgttacctaattctacataaacaaaatcatcaaatatcctggcataactgaaatgacttacagaggaagtagtaaagcttggaagtattctatggtaactgagctgaaaaaggggaaatgccaaatgttgtaaatgccatcattaccaataagagtcaccaaattctcagaaataggtaattggcatctcaaggcagttagcactacaagatttctcttgcctttanaaaaaaatcatttttaagactcctttttttacaaggctacatcaaaaaataaa

SEQ ID NO: 211117 - DNA, 652 bp, Homo Sapiens
ttttttttttttttttttaactgggaatcaaagtggtttattccagaaatgtcaatatacactttttttttccccagtatatatcacatcttaacacaatatattactttgggcaattaatacatttccttcctctaaagacaagcatgcagaggagaatgtaggtaactgtttatcacagggtatacactcttgtgagtggcccaaattgtgcaaacaaggaggtaaaaaaacaacagcctggctgggcgcagtggctcatgcctgtaatcccagcactttgggaggccgaggcgggcggatcacctgaggtcaggagttcaagaccagcctggccaacatgtgaaaccctgtctctactaaaaataaaaaattagctggttgtgggggcatgtgcctgtaatcccagttacttgggaggctgaggcaggagaatcgcttgaacctgggaggtggaggttctgcagtgagccaagatcatgccactgcactccagcctggcgacagagtgagactccatcgcaaagacaaaaaacaaacaaaaaaaacgacagcctacagtaagtcttacctcggctctcctgccctgggagcaggaaggatctttccgtggcaaatagcaccgtcaagacccaaaccttcctctactgca

SEQ ID NO: 211118 - DNA, 662 bp, Homo Sapiens
  misc_feature (393)..(394): n is a, c, g, or t
  misc_feature (598)..(598): n is a, c, g, or t
  misc_feature (603)..(603): n is a, c, g, or t
  misc_feature (641)..(641): n is a, c, g, or t
  misc_feature (643)..(643): n is a, c, g, or t
ttttttttttttttttttgagacagtctcactctgttgcccaggctggagtgcagtggcacgatctcgcctccctgcaacctctgccacccgggttcaggtgattctcctgcctcagcctcccaagtagctgggattacaggcacctgcaaccgcacccagctaattttagtagaaatggggtttcaccgtcttggccaggctggtcttgaactcacctcgtgatccacctgccttggcctcccaaagttgtttgcttaccttttaatgaaactatcattaattgttctaataccctccataagtatctcgtggtataaccgattaaatagctaagtgacttgtccagatagtctgaaatttcactcagtagtatgggttctttttcattcanncaagagactactgttttttgttttgttttgttttgtagttcagggaaattttcccctagtattactttgataatttactagggaaattttcctgtagtattactttgataatttattatcctccaatgccttttgtcctcttttttgtaactttaggcagattttgtacttcctgggttgatcatctaactttcttaattttcncttcnactttacatttctttatatttttcttttacttgctggnanaatgaactacctcgtgccg

SEQ ID NO: 211119 - DNA, 602 bp, Homo Sapiens
ttttttttttttttttttgaacattgtcatatgtctctgtaatggggtggtgggacacatagtgtctaacacttcagtttctctgctgcttccctcccattgagaagccagtgccagggttgctgtgaagatgggagagcttctgaacccacctcattaaaggatgagaaacccagggtccgagagcaaagggacttgacggtggccgcaagtgcttcaaaggcagagctgggattggaacccaggtgtcatctcgatgggaatgtccagcagtgatgtccaagtgggaagtgaagacccgaaggctcaagggacacaggtggctgacagtggtcaaaggctagggggcaggattcaggcagaggagctctagggggtgtttgccaccctgtgtgaactcccgagactctaccaggggggccgaaaggagtaccccagaagggcccaaggggtcctcggggttgacctgactctctggagtcctggatgggtcagtggctgtgggtgtttggggagggcggttcctgctgccaggctggggcagcagaccctcaagacatagttacaaagcctttggtgtcactcagtgtctggcttgccct

SEQ ID NO: 211120 - DNA, 710 bp, Homo Sapiens
ttttttttttttttttttcaaaattgatatatttacttcattgccagcggagtacactcgcatacatagatatctctgagtcactttaagtcacataactgcaaggatacaaacaaacactagttcatccctgtggctgagtgcccttggggaatactcagatcccagtggggcttctctctgcatcttctggccactctggccgttctccctgagcccacccaccttctccccctcccttccattcttccacgatggtagcaaagcagggaagtgccagtggaaagagactgcaggtgcacagaggcttggacaggccagagtccatggcagctgctttggcgtctctccttggttcatgtggtgggcacttcaccacttcaaggacactgtcaactccctgaaggcaaggcccagggctttgacttccctaggcatggagagacagtagtcaggaaaagcagctccttggcagactgctgggtgtgtgacaactgtgagggctcaggggctacaagcagggacagggcaagctcgcaaacaaaaaactgagacccgatgcggtgcatgcggggagcagagctgtgcagggcgctgcaggagcagaggagggggcggggcaggacggcttccttgaagggagccttcaggcactgtcatgtgccacatcctgtgtgaggcattcaccttcatcttattgcatctgggat

SEQ ID NO: 211121 - DNA, 689 bp, Homo Sapiens
ttttttttttttttttttaatgaatatggtaaagtgcacaaatcataaatttcagcgtggtgaatttctacacgtgtatacctgtgtatccaccatgcagaccagaagaacataattgtccctccaggaaattcccaaatgctctttctcagtcagtatcctccaatttgacattttcatcatagattagttttgcctacccctgaactttgtgtaagtggaaatacatggtttgtcgtcttgcttttacgcaacattgtatctgtgagaatctattgtcatgtctgctttcctgttctttttcttggttgtataataatccattgtggagatgtatcacaatgtatttatcttactgctgatagatatttgagttgtttgcagtgaatggttattgtagataaagcagctatgaacatccttgtacatgtcttttgatgaacataagtttacctcttgtggggatgtggacagggtctcactcagtaactcaggctggatcgcaggaacctggctcactgcagcctcaaccgcccaggctcaagtgatcctcccacctcagcctctcgaatagctgggaccacaggtatacactatcacacccagctaatttttttggtatttttgtagagacagggtctcgctttgttgtccaggctgctcttgaaccctggttcaactatcctcct

SEQ ID NO: 211122 - DNA, 676 bp, Homo Sapiens
  misc_feature (96)..(96): n is a, c, g, or t
ttttttttttttttttttgaggcagagtctcgctctgttgccccggctggagtgcagtgacacgatcctggctcactgcaacctccacctcccggngttcaagcaattctcctgactcagcacccaagcagctaggactacaggcatgcaccagcacgcccgactaatttttgtacctctagcagagacggggtttcgccatgttggccaggctggtttctaactcccgacatctggtgatctgtctgcctgggcctcccaaagtgctgggatcacaggcgtgagccaccttgcccggcaagcagcctctgatttcaactcaagagacagaagaggatcccaaattccaagcaactcccaagatgcaaatcaaaatatggaaatgttaaacaaattgaaggatttcccaatagttacctgcaacacctaaaggtcactgtttccaaatggtgcaagaactatgcaaacaatatgttggttgctgttaaattcaaggacaggacactattaacagttataacatttttggtatggacctttatgaatccgtgggaaactagagacgcgctgtcttagcttaggatgccataaaactaccatgggcttaaataatagaaatttatttctcacagttctggagcatgggaagtccaagatcaaggtgccagccaatttg

SEQ ID NO: 211123 - DNA, 683 bp, Homo Sapiens
ttttttttttttttttttcaaaatcaaaaatagtgttattaattctgatgtctccgaagcacaaaaaaaaaaaaaaaaaagaaaagaaaaaaaaggaaagaaagaaaccacccttcccacaattcaggccccaggtccaggccaagggggccacacctgcaggcagtgcaggcccaggggctgaggtggtcctggccacaggctccaagtgggaccagcccatggtttggctcttagggcctggctgggaggctgactgcctccatctggggagcccaggccctggactggggatgagagagatcaggggtcaaggtcagaggtctgggtcactcagttttggtactctggccaaggcagccaaaggtcagggttcagacatgtaggccaaagccactcagttctgtggtccagcagagaggcagcagagcaggtccgttactgaatcctaggaggtggtccagtgggcgccaggtagctcagtactggtgttccagcaggggctgggctgccgggctctcacgctcctcaataggggcaggccagtcgcccagggcacccataggtgtgccactctcaggggcactgctgtccaagcaaggaatgtcctgggaagctctggggggtgaggcctcagtgctgacatcggggctgaggctgaggctgaggctgaggctgaggtc

SEQ ID NO: 211124 - DNA, 601 bp, Homo Sapiens
ttttttttttttttttttacttatgaaaacatttttattattcattcattccacaaacgtaggggctttccatgtgcagggcacagtgctggacactgaggcctctgccctccagtgctcatccagggcttggtcctccaagcctacctggactctgcctttctttgggacgttgtcctggacttcagtccatccagtacttctttccagaacttcagaatggaagcacaggtgaaaatcactatatttcaccactgatcatgggaacctagagtggaatatcattactgcatcacagacaagatcacagacagggtaagaagggggagagaggaaatttacaattcctcataaatagttccttatttacagagattgtaagtgattatgtaaatcacagagcttccaattaaaaccagctcaagctacaaacatgaaagtccaggggcagtgccagagccacctcacttgcccgagtgctgctctccagggcttgctaccatctgctcgtgtgccccttaaagtgagggcaatggtagagacagcaccggcctctagtcctaggaagcacacatgcattcatgtcaagcactgggggttg

SEQ ID NO: 211125 - DNA, 792 bp, Homo Sapiens
  misc_feature (756)..(756): n is a, c, g, or t
  misc_feature (763)..(763): n is a, c, g, or t
ttttttttttttttttttgtattgttagtagagacagggtttcgccatgttgaccaggctggtctcaaactcttgacctcaagtgatccacctgccttggcctcccaacagctggcattacaggcgtgagccaccgtgcccggctgagttatgtaaactttaaaacacacacacagacacacatacacacacacacacaccttttataaggaagcatgcgtgttcaggacacacatcaaacacatcacagtgggtatctgtgaggaggcatttgggagctaaagaccaataaaggggaaaaaataaatcagcatgtttgtgattctattttttgttcaaaaaaaagtcttacacacgtgttatgtgtagagaaaaatgttaggaaggatgtgtgccaacatgttcagagtgatatttctggatggtggtagtatgagtaattgacatcttttctatttactaatgagcattttgtaacttttctaccaagaatgttatatacaatatatacttttaaaaaatgctaaaagttaacaaaacaaaaatggatttcattaactgtataaaacacctgttcaacctatgcaatgtcactcgatctacatccagccactcaaggtcttccattgtctgtccttatctttcagctagctgccatcctctcatctctgactgcttctctaaaccgctcatgagcattaatgcactccatcaacctatcgtgttcaccttgtccttactcttgctgtttcgtgngctgcanagccatgtgctcctgctcagagcacatcc

SEQ ID NO: 211126 - DNA, 728 bp, Homo Sapiens
  misc_feature (648)..(648): n is a, c, g, or t
ttttttttttttttttttatagccaacctttttttttttttaattagagtatattatactttcaaactggatacactagaaattggcaatgcaacataagatgcaaaggaatataccagttactgtcaaaatgaccctgtacagcctcgtaatgcaaaaagctttatacaatacaaattttcagtaatgtacacaaaccttgacagtatgatcatctgaacataatatgaagagttaaaaaaaggatagaagaaagaaagtgctgagaaccctaactgcattactatatggaaaaataagctagttttcattgaagaatgcatagtgacaacaattgaagttagttggtaggtgaatttctcaaagatgttagtgttttatacggaaaggatatctatggaatacatccttccctgagtatcaaactgcaaaccaaattcaggggtacatattttctagggtggagtctgaaaaatgctgtagatttttttctttattaataacaataataatataaaaagtcaaacaaactccaaacacaccttttctcactcagaaaacttttataatttaccagaaagattgatgactctttccaaagtgctaaaaaagttgcccaattatattaagcattactaagtcattcanatacaagttcagtggcaagcagtgaaatgcatggcatttgagcagtaaacgtctccttcccttcactcctctcgttcttg

SEQ ID NO: 211127 - DNA, 669 bp, Homo Sapiens
ttttttttttttttttttaacaaactgaacagtgtttggtctggaatgtgtttaaggaaaaggcaaagttcgcagagtgtgggtagacagaatagggaagaagtacagtttcagaagaacatgcaaaggtttcgtgcactggctgaattcaaggaccttcaattaatttgccagaagtgattgtgcaaacctgggaaagaggacatcttacttctgtttatgaaaaacgggaggagcttccctttgcccgcacttgccttcctttctcatatccaaaggaatcccagtcgtgtgcttgttaaattctgcgaagcagcgagggctctggctgaagctgcggcagtggccctacttccaccttcagccctagagcaatggttccagcgtggcctccccaacgcgaagactcaattctggccaaggttctgggggagagggagaggtgaggggccacgatgctttcaaaaataaagtctacctgcactgggatatcatctttcctttctgtttaaaaatgctcataaaatagcaagccccagtgggttaatcaggttaagctgtcattcagggcatgatggacactagggtagacagatgagtgggatgagtacggggtaggtaaaccgagtccggggctccctaggccagattcctttcatccctcgtgcc

SEQ ID NO: 211128 - DNA, 758 bp, Homo Sapiens
  misc_feature (732)..(732): n is a, c, g, or t
  misc_feature (743)..(743): n is a, c, g, or t
ttttttttttttttttttgtatacaggatatatatttattaacagtgaaaaagcatttacccaaagtcaatgttacaaaatacaaagagtacctccacagtctggccagctcattattttaggcattatctcaacctgcataaagttctctctcactcattttgaacttttctccctctatctatctgtaaccaaaatttttaacttcaaaattaggacaaataggaatactgaatgcctaacccttcagcaatagttactagagaaaacagattaaataaatatatctgctctcaaaccctacgtattttaaaactaaattatctactaaaatagaaaaacaatagacttagattaatagcagctgtaacaccagtcaagcaattctgataaggttcataggtactatggtaataactaagatataaatacaatttttccactttaatatgcatgcagacagagagagaaacacagtatgtaaggctgggcttgagtaccaaaacagtttttaccctttcctgcttaaagtggagaaaataaagaatttgagtgtgcatgtaacataacttattgttccaatttccctgaagttagttagagcacctggataagaactccgaattctgaattggtaattttctgaataggttttattaaagttgaagatatattgtcttccataatttaagtagcaatacagtaaatgtcctcgcagggaattcctcattntatactccttngatggacatacactg

SEQ ID NO: 211129 - DNA, 788 bp, Homo Sapiens
  misc_feature (701)..(701): n is a, c, g, or t
  misc_feature (717)..(717): n is a, c, g, or t
  misc_feature (730)..(730): n is a, c, g, or t
ttttttttttttttttttgcagtctagtctgtttttaatgatgtttttaattgacaataattgtagatattcatcggatacacagtgatgttttgatacatgggatgtctagtgatcaaatcagggtaatgagcatatcatcatctcaagcgtttattatgtgtgttgagaatgttcaatatcctccttcttgctgcttgaaactatataatatatggtcaggagtttgtttttccgtcgtcatttgtaaccgttaacattaggatctgtgagcgtgttttctagttattctgctttattttcctctgctcctgaccgccgttggatagctgagatttcctccggatgggcagaagctcggcctgccttatggcttccgtagctgaacactgtgtcttcactgagcgggatgagtgattggtacctgccaggccccccgtccacaccctcacaccatgctgagactgtcgggggttcccattggggagtaatggtgatattctgactctctgaattcctaggccatttgggaactgtggtgactgaatatctcagagcaccctcctggcttctttctcttctggctggagaacgtctctaagagcattttaaaatcaggcttttctgtagaaaaatggccgaggccttgaaggcctaagaatacatggactttgcatgcctttgatagtttagctggatgntaaattcagccttcanatatttccttcanactctgaggatggaacatcacagttttctggctctccgtgtttctcacgtatagtctg

SEQ ID NO: 211130 - DNA, 695 bp, Homo Sapiens
  misc_feature (601)..(601): n is a, c, g, or t
  misc_feature (630)..(630): n is a, c, g, or t
ttttttttttttttttttaaatgcttaagagttttaatcagtccgccataaaaagctcctccccattctccatcttgggggctcagatcttggcttcgggttgagatgagggacagggatatcaggctgggagaggagagtaaatatgaatgcggctgagggaccagagctgggatcggaagaaaacacaggtgaaaaggagcagaaagagactgctaaccccagtccctgagccaagtcagaaatccaagtccttttatagcatccaggagccaaatgtagtgaaatccacacatcatatcgttcttatctgcaaagtgctgtcatctggcgctgaaagcaccaggactgggctgaattgggcccgaagtgcctgaagggtgtcactttaggtctggagagtcaagaggagacgccaccttggcctacagagttgagagcgagcatcatcttggcctggaggggtgtgcaggaaatgccaccttggtccagggagttgggaggaagatcccctgccttgggttaagaggggccatcattttgggcctgcagaaggaaggaaaccatggggagtccccagaccccaggatcagggaggtgntagtaggatggagacagtaaaagaaagcnaacctatcccacgacactgctggacttgggaaacagaaatcaggctgagagggcggggctaagct

SEQ ID NO: 211131 - DNA, 655 bp, Homo Sapiens
  misc_feature (643)..(643): n is a, c, g, or t
ttttttttttttttttttaaacggacgagaataacatttatttagcacttattagtttctacctttatgataatcattttaagcactttaacaaggttttcaatgtgcccccacatctctgcattccagccaccaccgtgcctttgtggagtttctcagagctaccaggctcctcccaccacagggcctttgcacgtgccgctctcatctgagacactcttctttggcctctttacccctgcaacttctactcttctttgagatctcagctcgagtcttttcctcaaggaagtagcttagacttgtgcagattctgtttttttaacttttaagttcggggatacatgtgcaggtttgttataaactcatgccatgggggtttgctgtagattatttcatcacccaggtactaagccaagtatccaaataggcactcagtgggtaatggttgaagaatgaatgaagaaatagatgttagtaacatttattgagcacttactggtttcttttttattataagttctgggatacatgtgcagaacgtgcaggtttgttacacaggtatacatgtgccatggtggtttgctgcacccatcaacctgtcatctaggttttaagccgtgcatgcatttggtatttgtcnctcgttccgaat

SEQ ID NO: 211132 - DNA, 607 bp, Homo Sapiens
  misc_feature (258)..(259): n is a, c, g, or t
  misc_feature (382)..(382): n is a, c, g, or t
ttttttttttttttttttcagcgttttgtggcttttactccatatatgaaagaagacaaaaacatacaaagtatatgtacaactaaaattcaacaatatatacagaaatgtttcttgatataaacgtccctattagctttgtgaatgccaccaattcacctagtaaaggtgtcaaagcaatagaatggtgattttgattgtttcctccgtctttcctgattccagttcagggtttgggggggtggggtggggaaaaanntggtttttgttttgtttttttttaatcaaccatcattcctggtcattgcattttgataaaacatgcagcattccctttgtagcaatgttctaatcttacagccactttttcctttttctttanagaagggctgttatgtgaggaattttctttttctcgtcagtctgggaatggtaaataaaaatgcaggagtccaaaatgcttctctttcaccatgtaatgtcttaaactcattaaacaagtaaaaacgctgccaagtttgtgcagattcttctggttgggggaaaatctgtttttacaaaaagtcattttgatggatactcccaaagagaagagactcagagcctg

SEQ ID NO: 211133 - DNA, 757 bp, Homo Sapiens
  misc_feature (665)..(665): n is a, c, g, or t
  misc_feature (678)..(678): n is a, c, g, or t
tttttttttttaaaagacacaaaactagccgaaattataaaaggttatgattgcaatcctggtatccagttacattctccctcctgcagaagctgtggagaatcctgtctcagaaaaccaatttctattttgtcacatgtccatctatgcaaaatacatgtactttgtccctgacatagggcaacaatgctgaatttactaagactcatttttgcgcatggtttgatagggaattaagatttactaggtattctgtcattgtcctcattactgattattttaactgtgtctcaaacacttggatagtacactatagtgttataagctgtttgacatgtcgcttcctaaattctcaagttatatatatgtgtgtatatatgtcatgtaacaggcacaactgttttcatgtgtatcactttattgcacttcacaggtatcatatgtttcttacaaagtggaggtttgtggcagccctgcatggagcaagtctgtcagcaccatctttctaacagtatgtgctcacttcatgtctctctcacattttggtaattcttggaatgtttccgttattaaatcagttatagtgatctgtgattagtgatctttgatattactgtcataattgcttggggggcaccatgaaccacccctatataagacagcanactgagtcgatanatgttttatgtgttctgaccactgcactggacagctgcctccctatctctctccttctgctcaagactcctatccttga

SEQ ID NO: 211134 - DNA, 712 bp, Homo Sapiens
  misc_feature (655)..(655): n is a, c, g, or t
ttttttttttttttttttgcaaagattcactttatttattcattctcctccaacattagcataattaaagccaaggaggaggaggggggtgaggtgaaagatgagctggaggaccgcaataggggtaggtcccctgtggaaaaagggtcagaggccaaaggatgggagggggtcaggctggaactgaggagcaggtgggggcacttctccctctaacactctcccctgttgaagctctttgtgacgggcgagctcaggccctgatgggtgacttcgcaggcgtagactttgtgtttctcgtagtctgctttgctcagcgtcagggtgctgctgaggctgtaggtgctgtccttgctgtcctgctctgtgacactctcctgggagttacccgattggagggcgttatccaccttccactgtactttggcctctctgggatagaagttattcagcaggcacacaacagaggcagttccagatttcaactgctcatcagatggcgggaagatgaagacagatggtgcagccacagttcgtttgatctccaccttggtccctccgccgaaagtgggccacctgtcgcttcggtgctgacagtaataaactgcaaaatcttcaggctctaggccactgatggtgagagtgaagtctgtcncagacccgctgccactgaacctggctgggatgccagtggccctattggatgcatcat

SEQ ID NO: 211135 - DNA, 647 bp, Homo Sapiens
  misc_feature (549)..(549): n is a, c, g, or t
ttttttttttttttttttcaattctattactttgtgtatttgtttgccagtcattacagatgtcctaggcaggtgatatgctccacattttgcagctgaggaaattttaggtccagagatgttaggtgaatgacccaaggtcacacagctagagaggggtggtgatgaggactgcagctctgggtcctggaagagctctcattcttttgcacggcactgagatgaccctctgtctccacccaactgccattcactgtgttcctcccaccaagggccaagagggagcaggaggtgacggtgctgaagaaggccctggatgaagagacgcggtcccatgaggctcaggtccaggagatgaggcagaaacacgcacaggcggtggaggagctcacagagcagcttgagcagttcaagagggtaatgctttttggtgatgctttttggtgatgacacataagagtgacatcagcagcctcaaattactacaggtcagggtctggccggggagctgcgggtcctgggccaggccaagcaggaggtggaacatangaagaagaagctggaggcgcaggtgcaggagctgcagtccaagtgcagcgatggggagcgggcccgggcggagctcaatgacaaagtccacaagctgc

SEQ ID NO: 211136 - DNA, 715 bp, Homo Sapiens
ttttttttttttttttatctttatgattttttattattctaaatgtggtacatattcactgtaaataatctaggaaaaaaataagacaaaaacttaagttgcctatcattttcccacttagaaagacaaccactttggcgtgttgcattttgatcttttttctctgtatagttactttatattgcttttcaggtcacatggtaaatggaaatgcagaggtattggcactggaaacttcttttcatataactcttcaggtagcataagggctccctgtctttctgttcaagtgtctcagtggagttcaaaagagcaaagaaaatgagtcttttttaaaaattgaataattagaactcatcacctatctaatgtcctcccagcatccagaaactcttgagtatcgctgtgctgagttacaaagctttgcattcttgcttccttacgaaagacaaacgccagtaaatgcaaatagggatcacctgggaatccaaagatgaaagttgtgtttttgttaaaagggacatgcccttctcccaggaaatgtaagggccaggtctaatgtcttattaatcaccctgtgttctggtaaccaatttggatgcaagaagagtggactagcaggtaaaccccaaaagccattgattacatttctctatggttagaccagcctaagagatatttagctataaggctgggtgggtgcagtgcctcacac

SEQ ID NO: 211137 - DNA, 682 bp, Homo Sapiens
ttttttttttttttttttaggagaaaaataatttatttatttaatttaaaacagcaagacttcagcttccacccagtcagggcttgcattacaattttgcaggtgcaaaaactcacacttttgatgccacaactagaagtttgtaaaaactatttttcttgtcgtggacacgtgaagagttctgtttgcaccctcagcctgggccaaataatcatctttatttaaaaacaaaacagaacaaacaaaccaaaaaaccctcaaaagcacaaagaggcagaaagcggctggtaaacctggttaaaagaccaaagttcagaaagtgcatgggagagggacgctgagctgcggacaccgttccggctgcagtacgtgttatggctgaggttacacttgggtgactcagggatgcaggcagatgaacattaaccacactaacagaggagaaagaagcccactggggctgtgcaaagtgtccaaggagcacagccccttttgccctgatcagatgtaacagcccctcgcttgagcccaggagttcgagatctgactgggcaacatggcaaaaccttgtctctacaaaaagtcaaaatttagccaggcctgtggtcccagcttctcagggagccgaggtgggaggatcgcttgagcctgggaggtggaggctgcagtgagcccctgtgcc

SEQ ID NO: 211138 - DNA, 827 bp, Homo Sapiens
  misc_feature (761)..(761): n is a, c, g, or t
ttttttttgtttttatttgtttataaaaagaaaagtgttatatatataacatattatacctcatgaatacatacaattatttgtcaattaacaataaagaaaaatacagcaagcaaaaaagactctcttccacaaaaatagtgttcattacagaaaagtacaaaaaaaaaaaaaaaactaagaggatatttagaattaagaaaaaactaagagggtatttagaattaaaaaataaaaagaaaacaattacccatgaggtaattactgaatgcatttggttgaaagtccttctgctatattttccaaactgtatgtgtatatatgtgcgcatgcatatatgtgtttgtgtgtgtgtacacatatctatatgaatggaccatatcgtaagttataaatgcatacatatattcatgtatatataatcattagatcatactataggttattttacagtctttttgttgaatacgttgtgagcattttatgtcattattttctacaagatttgaaaaataaagtataaataccagttaatttttgaaatcaaccttattaaggaataagttccatgcagcaaaatccctttcacctctactgttcgatgagttttgacaatgtatgcaaccgtgacatgtatcaccacgatcaagaaagaaaacatcaccacaaaatgttccctagagccccttgcaggcagtctctgacttcctggcagccagcaatctgaatccaaccaccgtagatcagtttcaatttattanaaaaaaattttaactcatggagtatgactcttgctcgggattctgctatctatgttgttgagttta

SEQ ID NO: 211139 - DNA, 620 bp, Homo Sapiens
  misc_feature (573)..(573): n is a, c, g, or t
ttttttttttttttttttggttaaataaatatcttgtattacagctaataatcttgtatagaaatacatttccttttaatgtcagcattgctaaatgtctgtttatctaacaggacattattccaattgccctacaccaagctcttagaaatgtagctttattttatacaatttgaattatgagagttcactttcagacgaagcacctaacaggaaatctctcaaacacagaaatgctggtttagccacaagatcaaaggaaaagattgattttgtatgtccgtgcagtttttgagagtgcgtctacacattttcgttttcacagcaatctttgtgtttgaagggagttctgatgtggaaacagcttgcagggttaaacctggatggcgcccctgtgatcagacattgctctgttgtaataaaagtgtcctcagttctctttccctctgatcctcctgcctgtacttctcctcgagttgctgtttctcagaatctgcacagtaaaatgtgcaatctgggcttttccgaatctgttcaaactgactgaaatcagccacatattttccatttttnggagagagataccacaggcacaaactcaaaaccccaagtagatttcc

SEQ ID NO: 211140 - DNA, 717 bp, Homo Sapiens
ttttttttttttttttttaggaaactaaaagtctgttacatttatttctaacgttgattgaaaaaaatagattatattctattgccagatcttgaatataccttatctcttaataatcccacaggaatcctaaaaaacagatactatcaatctctactttacagttgaaaaaactgtggcagaaaggttaaatgacttgccccacgtggatttcaggcctgtctgacagagcttcttgaccctgtatgtcttctcggccctgtatgtctatcaagaatgttgtacttttaaatgctatttacatagatgaagattctgcaaactttttcttaaaggccatatattaaatatttcaggccttctgggacatagagtttctgttgcaaccactctaagtgccaaagcaaccacaggcaatatgtaaacaaatgggcatgtgttctccaataaaacaggaggccagtttgccaactgctgatgtagaacaggggctgataaatcatagctctacaccaaatccagcccaccacctgttttagtaaacaaagctttattcatgatctagatgtagcctatcatctagaccatttctagacaattgaagggtaattcaccaagctataataatgccctagtttcacagaaacattgtggggaacatccagcgctctttattctcatcttccttcacaacaatgttctgattcctaatctgtg

SEQ ID NO: 211141 - DNA, 723 bp, Homo Sapiens; identical to SEQ ID NO: 57842

SEQ ID NO: 211142 - DNA, 701 bp, Homo Sapiens
  misc_feature (626)..(626): n is a, c, g, or t
ttttttttttttttttttggtaccccattcctgttgaatgggctcagtcttgacaaaccaattccctgtaactttttcacaattcttgactctgagaaaaagcagcactgtagggacctgaactctccattctaccagttcacccttctgacctgttctgctcagcctgtggtgaggggaacagatggaagaaggctttccttggggtttgaagaggaagccagttgtgggagtctctttgttacaccccctcccctccagaccctctctctctatgccttcctcctcactgcatatttatttgcgatttgtagcactgatctatggtacagttgttttgtttcttaaacagaagtaggtaagggaacctcagtaataatggaaatctgcctcagtctcctgtttggaaatgatgagaggtgagataagtaatgtttatatacctcctttcttctgtgatgattataaggtatacgaagctggacagattaaacattgagccctgtgcatattttagtagttttatttcccctatgagaatctcccctgccctagccccttcttcctgcactctggaacagagcctctggcatctgtccaagctctgtctctaagggccaccttcncctcttctgtctttagtatcccacaggggttctctgggctgtgcctcctttccttggttcacatgggagggggct

SEQ ID NO: 211143 - DNA, 578 bp, Homo Sapiens
ttttttttttttttttttatgttcgttttttaaattaagacatttattaacaagtgcttgcagtttgttaacttttttgaaaaaagtcattataaaattttattacatattaaaaatgttcttaaaaatctcaacttgactggatataaaacatttaaaaatctttaaaggcatattcagtgaaaccaagcctccattcatggcatttaaaaaaataattagtgagcaggaattggtttattttccaactttcccactgatcttcaaatacgtcacttttgttcaaataatgcaaggtttctaacagtccaattgtaaagatttttactaaagtggatttgaaatttagcctctaatctattgagaatgatgaggattttgctggaacaaagatgactaataattatcaagaactgcaacagctaggctgatgcaattggcaactcacccacgtatttccaaaagcggcccacattttatagatgcgtgatgtgatactagcacccttctcctcaggctaagctgccagggtcttttctttgacccagtttgttgacagatcattactttcaagcaaa

SEQ ID NO: 211144 - DNA, 688 bp, Homo Sapiens; identical to SEQ ID NO: 57859

SEQ ID NO: 211145 - DNA, 565 bp, Homo Sapiens
ttttttttttttttttttgagatggagtctcgttctgtcgcccagactggagtacagtggcaccatctaagctcactgcaacctctgcctcccaggttcaagagatcctcccggctcagcctactgagtagctgggattacaggcgtgtgcctccacacccagctaatttttgtattttgagtagagatggagtttcaccatgttggccaggctggtctcgaactcctaacctcatgtgatctgcacacctcggcctccctaagtgctgggattacaggcatgagccaccgtacctggcctaaaatattctttatttacatttaggtttctaataaagaggagcctaagacatgcaaattagtgagaagtttttcatcttttgcatatgagtcattcataccatgatgtgcttttttttttttcagtgccataagtgagaaatgactctcacaactttctcataatgtttaaacttgagtataatacatttattctgggtgcaagccagagctcccgaccacttggtggcctggtttacacttgtatacgtactctcctcgtgcc

SEQ ID NO: 211146 - DNA, 596 bp, Homo Sapiens
ttttttttttttttttttagtagagatgggtatttgccacgttggccaggctggtcttgaactcctgaactcctcaactcctgatctgctcgcctcggcctcccaaactgctgggatgacaggtgtgagccaccgcgcctggcccgaacgtgtatttttgacttgcgatattttcaatatagagttggtttatccgaagtaaccttataaccccatcacaactgcgtcataagttgaggagggtaccaaatgcatatagctttcatagcattttaaaatagaaaattgtaactcaggatatgtctgtacttcctaatcccctcaccctctttggacagactattggaggtgtcttcctagtattctgctgccatctgcctttctgggcttcatggcctgtcctctgttcctgctccccaggaagctctggagtggtctgaagatggtgactgcagccctcgggcttcctacccctcctagtcccacctgagctctcctttccccattgcctgacatctcagagttgcccattatccaaattcctaggtctctgccctgcactggggttcttggctgatggtattttggggaggggg

SEQ ID NO: 211147 - DNA, 733 bp, Homo Sapiens
  misc_feature (639)..(639): n is a, c, g, or t
ttttttttttttttttttccttagaatccgtctttatcgggcgatcatccttcgcaggtctggggtgtccacgggccgcccagagccccctacgtgggccagcccctgctgtgggcaccaggaggatgacttgcccgcctggaccctccttgggcctggtcagtgcccccacgccgcactctccactctctcggtcctctggggccaagggccccaccgggtggggtcagggctcctggcttcggggcgaggtggagccgtcggcgtcctgccctgagacggaggctggggcacctgcactgcgtagctcccgggccagcttctcggccagtttgcggaagggtggccggcgggcgggctctgcctcccagcagctgctcatgaggacgtgcacggggcctggacagccctcggggggttccatgcggtaccccttctccacggcctccgacacctctttcagtgacattttagggtacggagcccgtccatatgagaagacctcccagagcagcaccccaaaactccagacatccgacttgctggtgaacttcccgtgtttgagagcctcgggcgccgtccacttgacgggcagccggcttgagtctagccccttccgctcggctttggccaggccanagtcgctgaccttggccaccaggtcctctgagaccaggatgttgcgggcggccaggtcgcggtgcacagcttcttgctctccaggtactccatg

SEQ ID NO: 211148 - DNA, 724 bp, Homo Sapiens
ttttttttttttttttttgatacagagtctcgctctgtcacccaggctggagtacagaggcgctatcttggctcactgcaacctctgcctcctggattcaagcaattctcttgcctcagcctcccgagtagctggaactacaggcacctgctacttcgcatggctaatttttctatttttagtagagacagggtttcaccatactggccaggctgatcttgaactcctgaccttgtgatctgcctgcctcggcctcccaaagtgctgggattgcaggggtgagccaccacgcccggcctcgtcagtaaacatttttaaaaaacaaaccaaaccagccaccattccttaaactctttgtacaaatatgtgctagaagctaaaaggacttttaataatttcaagattacataaagaaatacattttttgttgttgaaattacaaatacttttgcttttgaacttataaacacttttgggattcagtccaaagcttctagagaacagttttaataaatacatttaaatttttagtagagatggggtctcactttgctgcccaggctgctctcgaactcctgggctcaagcaatcctctgtcctcagcctcccaaagtgctgggattacaggtgcagtttcaatattaatgtggattttttttcctcattaaaaaaggaaagaattctatctgaaaacatacttacatagagtccattttctccagta

SEQ ID NO: 211149 - DNA, 740 bp, Homo Sapiens
ttttttttttttttttttgtaactggttagaaacaccttaatcaattttattttattttgtatgcacaagagtgatatccaattaaaaatcgttctctaataagtctaaaatatatctttcaatatgtgtaatatacaaattacaagtgataaaagtattgggttagttttttgttctttgatttcttttgttttggaactgtatttaatataatagagtatcttaaataaggggtatttcagaatgaatgaagcccagtatatttccttcaaaagcatatttgagctatcttgcttcattcttcttgatacttggtattagcatactttaatatttttgcctggtggtaagtcatctccttgtggtttacttttttcttattttatttatttatttttttgtagagacagggtcttgctatgtttcccaggctagactccacctcctggcctcaagggatcctctggccctggactcccaagcgctgagattagaggtgtgtgagccaccctcactgccctctttgtggtcttaatttgctatttcctaattactaatgggaactggtcacctactcacttgattttggtcgttcatggttcctctttgaagtgcctatttaatgccggcatccattctttgcttcaggtgtttttctctttcacattgactcaataacagtctttatatatcctggatactaatcctttatcacttgctgcaagtatcctcgtgccga

SEQ ID NO: 211150 - DNA, 727 bp, Homo Sapiens
ttttttttttttttttttaagaaaaaccacaaaaagccattttcaaagagaagctaacgaaattcattaagagatattcgcaggtaataattctaaagatttaaaaattgccataaattttgtaatatatttattaaaatagttaaaacagcagcaatactatttaaaaatacatatatatgcccataccatatgtccattaagtccaaccttaactcttttcgtttcccatttttcttagcttttctaactacataatcctgttctctataactcactgcttattaaagcaaattctaaatacgatttctgcaatatggagaatactagtaccttcatttctgggtgaattttttttgatggctgaactataatgtgaagagtattttctaaaactattaacaagaaacaatacaatgaaatgcatagctcccataacatccaaacattggctttactttcagaatcctgaagacaaatgagaagctccatgcattagtgtgatgtgccaccaggtggccatcacctacactgcaggggaagcctgctacttcaaacagaaaagatgtatcaaaaccacctgtatccaggttaacactacaagaaaacaacagaaatctataaatgcttcaagtttcatatatatatttattttatgaggtagcatttaatgatttttaagaaaacttatcacttttcttcacagcatattttgatgtgagtttta

SEQ ID NO: 211151 - DNA, 685 bp, Homo Sapiens
  misc_feature (650)..(650): n is a, c, g, or t
ttttttttttttttttttgaatgaagaaatctggcttttaatgtccgtacatcaagactatgtgatcatcattatctagatgggaaagttttattatttgtagaaatccagtgctaaaaaatacatttcaggatcacttagtccaatcttcctgattttacagatgagaaaactgaagcccagaagttaagctacttacctggagtgagaattaagccaaattcttttgcctctgggtgttcgtataaacactagaattttgttatgataaagaagtgaacactctataaccaaaagatacagaaacatagctctctgtttaccttccaatttttgggcaaaaacttcagtgaatgaagtaatgcaatcatccacactgagcttagaaaagacaatgataacttggttttccacttaaatgtcaatgttaaatgtggtatcaaaccaacccaatggcagaaagtaagcaggcaaagcttatgggcttaacaagcatttgtttttgacggcgtcaatcaggaatcaatggacaatacacagccaatcctttgctttccagagtcacaggaggccaggaagtctgtgggaaaatgtctgaagttcgggttatttaaggctgttcagaaatttagcatgttcttctcctcttnggtacagagtttctcctcctatctttggaccagtc

SEQ ID NO: 211152 - DNA, 700 bp, Homo Sapiens
ttttttttttttttttttaaaaattcacctatattttaatgctttcatagttttattttttaaaatactgattcatttggaactttgtaacatttaatacaaggcaaaattatataaatcgcaaacatcagttaagtaaactgtaatgcacacccaacagaaagaactttaaagcctccaagagctttgaagcttcttccaagtttttaatttcacagaaatacagcagaataaacattcctgcgtataagactttgaagaatttgaatcatgaaatattgtgtggtaagatggattgaagaggcagaaaggaaagttctaagggtttgttttctaacactgagaaatcatgtcagctgggaaaaaataccaattaattactgagtaccttactgcatacatttcaacctcattctcatttggtacactgtaaaatggcacagtccacagattattatatatagaaagcaatccttttctaatcctattcccatggatatcaatgttcaaagtttactgccatgagctcaatcaaggtatggtgtgatttgaaagtgaagcctttattgtgccagaaggtcatagcataactgacttcatgcaaacagggagctctcccttctttcctagttggtctgctccttctcctccaggatgagtacagtgtccacagttattcctatgtcctccagcgactggc

SEQ ID NO: 211153 - DNA, 786 bp, Homo Sapiens
  misc_feature (725)..(725): n is a, c, g, or t
ttttttttttttttttttcgggtaaatgaatatgtttatttaaatatgtatacaagcatggccctaggagcagcagatacactttcccaaaggtgggtgcttcctttaagatattgcacaatagaaaataaactcttgtcaatccttaaaattagtcttcaatgctatgtattttagctatgtaacttgtactgtgtcaacagtgaaccttattagattcacggtgtcatcgaacttatagcaagataaaaatcaatcagtaggaatgtcattttaaaaagtaaaatagtgggacggttgtggtggctcatgcctgtaatcccagcactttgggaggctgaggtgggtggatcatttgaggtcaggatttcgaaacccgcctggccaacatggtgaaacctcacctcaactaaaaatacaaaaatcagccaggcatgctggagggcaccttgtagtcccagctatttgggaggctgaggtaggagaatcgcttgatcccagggggcggaggttgcactgagctgagatcacaccactgcactccagcctgggcaacacagcaagacgctatctcaaacaaaaaaaggaagtcaaatagagctttaaacctgaatcatttacatctttactttataaaatgtaaaactacttttttacccaagacttaaaatatagaattatgtaacttctactttaaacaaaatgaaaaatgttttgagtatcanacagtatattatctaccttgtagacagcatcttcatctaacactgccactgtgttagtatt

SEQ ID NO: 211154 - DNA, 738 bp, Homo Sapiens
ttttttttttttttttttgggcctttttttttttggtcaaataaaaaaaaatcactttagcagcagttcagcaatctctaattgtagggcttgttgtaaacctcactgctctaccttatctgttgttagtgaaaacaaaaatatactggaaattcagtttaaataaagctaggttcagagctgatgccttgaaaaagatatttttgccaacagataaacgcaactcaaatagaatccctaatataagagcatgagaaaaatccttctacaatattttgaaaagtgaaggtaacatcatgaatgctgtgtcagtgcatgacaagttaaactggcagcactctccatggccttttataatgcagtgtcatcatcttccctgaagtctcccaccaggagtgagtgcttgtcaggttcactggtaacaacactgtttagggagcgtttatcagacagtagtgagtttatagaggctctgctataattaacaatccggtccagcaaacccagtttaggagaattccttgaggtatcatctattccaacatgaacgctgatttctgaaggactcttctgtcctatctggctccgggcaggcagttcataactctcgtaagttggtttcctgtaaagtttaaggaagagagaagaagtactacagaaacagatgaagcagccattgctgcagatcccatccagggctgcaaaccaaccaatgggcataaaactccagcagctatg

SEQ ID NO: 211155 - DNA, 592 bp, Homo Sapiens
ttttttttttttttttttgaccagtttcaccatcttttttattggatacagagccataaattctctgatgcccatgtgagtccttttaaatacatacactcaggtacattcagcaaagggcatcttacgggtgacatggagcaaagtgctgggatggcgatgcctgggtggggcagagaagtgtggccagggaaggccccctgggggctggaggtacaggcaccacttcagaaacaaaaataaaaccaaaaattgctctccacccctctgcctgtgcttggggctggggaagctaccctctcactcaggcccattatagcctagctgtgtaggaaggtagggcctaagggccagttatggaggttgcccaccagtggtgcccactagaaccaagcctgctggcatcagccacaaagcaagcctgggtcacctcaggcctctgccctggatacaagaccttgtcagggcagagctgaggctggcaagcccaaggccaaggctccctttgggccatgctggcagtggcagaggaggcttggcctcacgggtggggagcctgcctgattgtcagggcagccttgggactggctga

SEQ ID NO: 211156 - DNA, 735 bp, Homo Sapiens
ttttttttttttttttgtgttatgcaagtatcccacttcattcaaataaattattctttccttgaagaaaagcatggccattagctctctgaaaaggaaagggtaagtttgggactgaactagtaataacaacaacaaataaaaccttcaaaagttgtggggaaacaaattattttcaaaaacaatttacatagttataccatcctcatatcatctacactgaggtaaacagatagacaagtacaaaatctgaataacatttgctgtatttaaagacaaagatgcccttattggctcttcaaagggcaggtgaggatttacattgatccaattcttatggtcttatctactcatcctttggagccagtaataatctgtatataggatctggttaagccaactgtctccattcctccatccatccatccacccacccaatagttctttgtgtgaggcactgtgctggatcatgaagccatcaagatgagtaaaattagattctcacccattaataagtttacagaacagtaggagaaacagtcaagcaactacagtgatgtcatataatacaggcataaacaaagtactatggtagccccttactgcctggaggaatgaatgaaaggagtcagaaagaaggtgatgtttgagctgaaacttgaagctaaatgggaaacattcccagggaaatgatcttcagctcctaatctaaaggatagcaattttgttcctatt

SEQ ID NO: 211157 - DNA, 644 bp, Homo Sapiens
ttttttttttttttatttgtttattttcttgtaggtttagttcatgcatgtggcaaaaatgcacacagtacagaggatattcagtgaaagtatgcttcctcaccccacagcccttcctttcccttccccaaaacaactattgttgctatttctttgtctctggtaacctttctatattgggtatataaacatatatgtacatgtatatatggatacacatgcattttcagttcacatgatttaaattctttggtctaaagttctcagaccaggcaactcttcctttgagtcaccccagaggttaagagatggctctccaacgctccagcaattctctttcttcctgccaggaaactattactttgattttactgtcttgacttgtaaaaagagactgacgatgtctatctgtcttcccagagtgactgatgggccaccttctggggcgccagcctgaggccctttcctgcccctgggctagcttttttcagatgacttctctgagcgaggaggcctttggctgccagcaggaaattttgggtcatgtctaatatcaaagaatggattattttccctcccttacccagcctgtgaactgacacccaacaccatgggctgacacccagcaccaggctccatgccct

SEQ ID NO: 211158 - DNA, 720 bp, Homo Sapiens
tttttttttttctattttaaatcatgtttattatttaagtttttatcacagtggagattaacttatgtttaatcatccaatcagtgcctactgtcaacttaatcaaattccaaaaaagtaaaatcaactcattcatacactctaagtcctcttactatcccaccattcattgcctgtgtcttttttcccttttaacggcaacatcgtaataagattgtgaaaaggtataactaataagtttctatgtatgtataataccatttcttcaagtattcagagagcagtacatttgtctgcattgtacattagaaaactacttgtgacattatttctaagtgcaggagagcagctcctggtgggagagtaatgaagttgtttgtcatagtgtatgccaaggatttacagcactctagaattttcacaactcttccatgttagtgaatgacattaggtaaatgttgtatttgcctactctcagctatcagatgtgggatttcaaactagaaacaaataaagcatacactcaaccaacaagggtagtgcaagtgctaagtaaacagaatgacatggaataaattcatagttgccaactagtgaatgcttcagcagggagaccctgattttatgatgtctgtgacttgcatccctgttctcaaatgaatactgtcactgctccatgtcagctacaatgaccggaaaaggctgctggggtgagggctg

SEQ ID NO: 211159 - DNA, 590 bp, Homo Sapiens
ttttttttttttttttttaaacaatctggagtttattttttctcatttaataattggggagtttggcaattgctcatcttgatttgggtgttcaacaatgccatatcagggacccaggatccccttaatcctccttcagttctatctctgaaatgtaactttcattctcacatttgctgtttcatggttgtttgatggcagctgcacctttaggcatgctgttggccagaaagaggagaaagaggcaatgactgttaccacacaaagctctgattttttaatttgaaaggaaagcccttctcagtagggttctgttcatttcattcaatttctcaattgcagtagtcacatatcaagtactcaatatcacatatggttagtagctaccacaatagagagacagaacggatggttgatttccttcactgcaaaaagttctgcctcgtactaatcagactatacagaattaaactaccacttctgtttcagatcaatgaaggtgcaacctctggagttggggtaaggtcctaatctctttgaggaagagggatccttgtcactatcagatcaaactaaggtactgctaaaga

SEQ ID NO: 211160 - DNA, 671 bp, Homo Sapiens
ttttttttttttttttttggtagagatggggtttcaccatgttgcccaggctggtctcgaattcctgggctcaaacgatccacccacctcagccttccaaggtgcggggattacaggtgtgagccaccgtgcccagcaccaccattattaactgtagttaccatgttgtgcagtgttatctcaaaaaatgtattcctcctaacactgtacactttgaccaacatcctaatgatttgcttaggataaactcttacatatggaattgcttgatcaaaagtgtccatgaatttaaggattttgcatactgtcaagactgctttgattcaatgaccaatagtacaacagagtgtccattttactacacgggtattataattaatttctcattttttgccaattctataggtgcaaattgagcttacatttgactactaataagtttgaacatatttcctatcttcaatggcaatctgcattttggggggtgaatttttcattgttagcccatttttctattggaatctgtggctgcttctgattaactcatatgcaagaggttcctgtatactaaggatgttaacccatttttctgccatccatctcaggttatatgacttttcattttatttctggcatttgatgtggtattagtttttatgcagtgaaatcat

SEQ ID NO: 211161 - DNA, 643 bp, Homo Sapiens
ttttttttttttttttttgagaaaacacaaaaatagtttgttatttattatgatttctgcactcttgaagtaaagcacgaatataacaatagtaaacatgcgaaatgactttctcagtcatcgtatttctttcaccatcattagtttaaaaccatgtggccctatttagaaataattagcattcatggctattgcttcatggacactttactaagcttgtacactttgcacaaacaaactaattcaagtattttgactagttttagtacactggtacaaaacaaaacaaacaacaaaataaaacacagcaaaataaagcaaactggatgatcagacaaacataaactaaatatgaacagtcaaatctgtcaaagaccagttggataatcaagtcagttaaaatgacctaactgctttgtttgtttagacactactcaaattcttaggtaggcacaagaattctgttcttttcttcagaatacgccagacaggaacgcgaggagagattcccgcatttaaccctgcaacttatggcaaagacactgcgacgatttggtgccttcaaacgaagatggtcatattctgtcctgcggtagccagaaaagtgatgaattatataaaagtacttaattttctctccttg

SEQ ID NO: 211162 - DNA, 685 bp, Homo Sapiens
ttttttttttttttttttacaaatcaggtattattttcttttaacaaattacataaaacagtatagattcatgatgtttgctacctaattgtcagtacaagatgaaagaagctgaataatttcctcttccaactgaagttgattatttaaaagtgctgcgatataaccttaagcttactatttatccaagcactcctgtaaataataagtgtaatcctaaatcccagtgggggaacaacttgaactgatgcaaggtataataaaccacaaatcaggagtcaggaaggctatatttggttctgtcacaaactaagtgttaggatctgggaagtcattccacccctctgggcttcatatttttatctataattaaaaaatggtttagtatcaatatcagtgtggtccacagctcttgggccagtctgtgaactgttagtgacccacaatgagacaaaggggggcttgtaccaggctgtaaattacctatatcacccagcacactgcttagttcactgacagtttgtcaaaacaagaatttttcgatgaaggaaaataaaaatatcaacatattctaaaacaagtttcttatttctctgcaagccagcaattagtgcagcactggtacagattaacaatacggatccttgggtcagaaactttatgacattagctatggcacttactc

SEQ ID NO: 211163 - DNA, 661 bp, Homo Sapiens
  misc_feature (582)..(582): n is a, c, g, or t
ttttttttttttttttttgcataaataggaaatcctttaatttgataatcattcattcaacaaacatctattgagcatctcctctgaataaagtataaaatgttttctacttttcttttttaaaatttgttttaaatcatcctgagaaactctttaaaagtttatttcctaggatttacagcagttaacattcagttccaccaataaaattcctcactggattccacacaggacagatggatctccattaggtaataaccttccaggtggtgctgacactgcacatatgtgaatattcctctctgtgggaaatagagatgtaacttctacacttgcctcaacctgctactatgactttcttcacagtcctgggttttcaaagatctaaagttaactcttctcttagagaatacatgcaaacaagtaaacttaaaacttcaatgcaatgctcttatcccatagctctggttcttgtctttgtaattgatgcctcctgagctgactgctggcctcggtgtgctcctgcttgagagctgtctgccgggggaggagaatgcccagctctaatagttacatcttcanaaaggccacccttcatacggtgctggtgagaaaggcacctgctgagtttccatatcaacttcctgctgagtttctctat

SEQ ID NO: 211164 - DNA, 618 bp, Homo Sapiens
ttttttttttttttttttaacatcattctttccatctttattaaaagaccctaagcacaggacactctagttgatccctgccactttcacttaacccatctattcaataagtatttattgagtgtctaccatgtgccactcaacaaagatccctgcccttgtagaaattaaattctagtggatattgtgtaaatctgaagaaattgtaggtacccgatctctttacagaatggctttgtaactagtttgggtataatgttgggaggacaggcaatggaggaaagaagaatgcttctaacagttttgccattattccaactttccttcctttctcaacttgcctaagtgtttttcccagaaagaaccagagaggcagctcggaggataattttgaatcatgccctattgttctgggcattaaaaaaaaatttttttaaaaaatttttattgttttatgtagagacaggcatctgtgttgcccaagctgggcttgagctcctgacattaagcagtcctctcaaagtgctgggattactgtgcctggcctgttttcactaattcaacacagggaatcaccagctgtgatcataagagcctcttgaatcatcagttctacgg

SEQ ID NO: 211165 - DNA, 750 bp, Homo Sapiens
ttttttttttttttttttacggttttaaaaaatatttatttaaaaataagatttcaaaaaatacagtacttaatacattttgagaagtaaaaattccacaatttaaattaaaaacaatctgcaaagaaaatagaaatattacgtgaaaaaaactaaatcgctacaataaattaaaaacaacaacattgttcttaaggtagatacatggtttgattttcacattaagaaccagtgtagacttttcatctaaacaaatacatctcagctacatggttcccacttgtcatttcacccattttactcactcttctcaatctattcttacatctctcaactactattttcctaattaccatcaacactagaaatattggtgaagattttcttcaaattctcttaggggaaagacaaggtaaaaataatagacaatgcaaggaaaacagcactcagatctatacatattatgtactgaataataaaatgcctgacaaatttaaaaacaggatcttcttatgccacttgtaacataccactattaaaagcattttagggatataatactagacagaacttggggttcacacataattttaggagcctcaagaataacatagattttggctattcattaaacttgccagttagatcacacacaaaaaaacactaattccagggacacaaagtgagctcatacagcatgatccatgtgtgctctgtccttgcaagagctagctttgtcctcccgtgtta

SEQ ID NO: 211166 - DNA, 682 bp, Homo Sapiens
  misc_feature (657)..(657): n is a, c, g, or t
ttttttttttttttttttgatttaatcgtctatttattaatgcatttcaagtttcaaaaaaccttacatctttgcacaatactttattttttgcaatttttagtaaaaatttccaaagtgaacaaaaaaagatactgtataaaacacagtggacattaaaactgacagtagtattagatctcatttgtcttgatccttttatattaccacatcttgattcgcagtggaaagagttcagtgcatgtatctcttttcagaaaacatttaacttagactcaaaataaaatagggcagtgtgtgtacctgccaaaatcctaccacaggataacattacaagcaaaaaatttacatgttccaaagtctaccacactcaagaagttactaagaactcttgcagaataaaagtcaccattttagaaatgcaaacccacttccaacctttgcacagtccaaaaacaaaggcatttaaatgatttaaaagcaattacatacatatctacctacttgtttgtttagaattatttatagtctatctggggtttcatgtacaaaatttgtctctaaatcatgtacaaaaagctgtattttgaaaaagtcaccacatactgtacaagtttacaaggaagagatcccgttattttctctagcatttttggncttgctggcttgcgtcacattatga

SEQ ID NO: 211167 - DNA, 745 bp, Homo Sapiens
ttttttttttttttttttcatttgtcacttgctttatgcaaacattcgagtgtacctctttcaccacagggctagagatggtctactctgtacatacatttcacaacaaagaaaaattctgtcattccccaactctatgaccaaggaaaacttttaggatttctttaatttgtagcagagacacagtggcctagccaatcggcagtgctatacacacagtatgccagtttcccacccctaccctctttctccttttttaaagcttcaaaggttagatcaataaaatttaaaatttcctcatttaaggagaaatataatgacccacatgttaatttatattaaaaactaaaaataaataatggggttcttaaacaaggacatctttaactaggttatgattagaccagcctgtgggtgaaatgagagattatctcttctccctggaaatgtcttcaaggctcagacaattcagtagtttttaaaaggccccaactcacacatctcaggtgaaaagtataggcaatgggcaacaaacaagacgctagtatgcacttggcttctgataaattgaaacaaagatttggtggcccagcctaataaatgacagcacgaaactagaggtttaaagtaagttttgacatcacatatagatccctcaaccctaagttactttggagggaagccatgagaggctggatcagtcctcaagcctcagctaaggatggatcctatttcttcccagtgc

SEQ ID NO: 211168 - DNA, 702 bp, Homo Sapiens
  misc_feature (674)..(674): n is a, c, g, or t
ttttttttttttttttttggagttgcatagtcttttatttttctaaagatgaccattccatgtttaatgtcttcagagaagatctaaaaatcaaagttaacaacccatttgtcccaactctaactcttcctgggaacaattcctcattctgttacttgatttcttcctttaccacccacataaaatatgtcttactgctcacaagatcaaaagaaaacagaacaaaacattgaaacatcagaattgtttaaaacactagatttcattcaatggtccaattggacacttgctcattggaacttatttctgcttcagctctagttctttgagaaacacaagaattcctttcaccaaaatattagcctgacacaagaatgttgaaaggttagctgccttagctttattgctgcctataatctccaaagatatctgaacacctagaagattaaatgtagcaagaagtggaagagaaacacagtttataagtcatttaataactataattgcatagaatttactcacttttcaaatacttattctgaatgaataccaaatttgtgaaacaaaatatattctatggtgcttagaatggttgttaaatggtgagttagttttccaagtaaaaactttacgtgcattaacagaggggaatgcataataatcctatgaggtangccctattatcctcattgaatagaagag

SEQ ID NO: 211169 - DNA, 765 bp, Homo Sapiens
  misc_feature (701)..(701): n is a, c, g, or t
ttttttttttttttttttccaaaaatactccaggctctttctcttataagtcatttttttttctcctgtaaaaagcccccctgccctgccttcttacataaagcacttactacgcgccaaagtgcccttgagacctaagatctgaagcaactatgagaaaggtacagagggagagagagagagaaagagagcacgccagtgagaaagcgagcgcgagcgcgagcgcaaggggaggagagggtgggagagggcggaagggggaaagctgtccgtgggagattgtgtcttcatgtccacggggctgcatctcttgatggtgcactgaaaaagcagagctcaccagacagagtggaaagacagggggaggggcagggagcaacagaaggaagagacaacaagcccaagacagcttccatctcagacggaaggcccccagaagatagaattccagccgactgaaaaaccacccaatgaacaaagaagattctagaaaatagaaagtgttgggattacaaagttgcgcgtttcatcggtacaaactggtctttgaacctcctttgtgagagcaatcgtagtgtccaaattgttagggaaaacaaaaaaaaaatcccaaggaggagggtttttcccccttccctgtttggtttatcacagcattttgctttttttttagcacagctttttacgtttctttccattcnagcatcacagagcctgttcccgggtggaaacaatccacacgcctcgagctggtgactcctcctt

SEQ ID NO: 211170 - DNA, 681 bp, Homo Sapiens
  misc_feature (659)..(659): n is a, c, g, or t
ttttttttttttttttgtgagaatagcttttaatttaaaacaattgaagcaataaatcatccatctctctttccatctcaggcaaataatctcccaaaacatttgatacagtttaacaacaactgtgactagtgcaaaataaaataaatacaaactctttcaggagccaacatcaaaacctgctggacaggtgggcacaggaacagactcagcctctgccaaggctgagacaagcggcacatcaagagtggcaggatttgtgcagtgtttcaacacacccagctttgaacagactcaacaatacctggggaggggaaaccacaagaggattttgcctacaatgaaacaaatatgcccaacaccctcaagtggctaatatccttggtacctagaagatgctagaagagcaaaggtagcagctcccaggcaaagctgaagacaggcagtttggggctcatttgcttttgtcttttaattgggatcatacatatatatattggtttttcggcagaaaaaaaaaatctgctttctgggagatgttctgtgcctcacagtgctcctgactccagcaaaaatatttgtgttgtttctgtctatttagatactttgcagaattgcgtttcctatttacggatttcactgcctaccccacaccatgntagtctagagtggggctgtcca

SEQ ID NO: 211171 - DNA, 740 bp, Homo Sapiens
ttttttttttttttttttaagttaaatacagtttattaaaaaaaaaaacccattcacaaaatggaatttgagctgcagaacagctcatgtaaactgcatggcagtgataacgaagtacagtggctcagataaaggtcttcacaaggacgttcctgcaaaaggcaaaagaggttgtaaagtattcatataagcagaggtgaatgactacacagttatatccactgtcactactgggaatacctggttggctaataactctttttgcaattggatgagattacgaagtgttttggtttaaggtacagcttgtcattcttttactttgggaacgcagggcattcttttgctgagcactaatttgtaaaaacttacctttctgccacgaacttggacagatgagtttctgtttttaagagctgataagactagtagcagactcctccctagaaaagtaaacaacctttagaactagctctaagaccaagtcccatctcaagctaaaccccccatacctcccattaataacccacccatccccccaccatttggggaagtctattactttgagccattattttaaggaaatgggtcaaaggaagataaataaaagggcaaaaatttatattcacagtacaaataatgtgctcacttccttcaactgggagccatcaatagggtgtcaatttaaaacaattcatctccagaaaaacaagttcagcttaactggactagttttggct

SEQ ID NO: 211172 - DNA, 702 bp, Homo Sapiens
  misc_feature (689)..(689): n is a, c, g, or t
ttttttttttttttttttgcatgagaaaaacaagttcaacttttatttgttttcattgtttcccctcctttgcctgaccccgatcaccaaaagatgtgcagtgtgtggcgctccaggtctgtgcagggccatataaagtgtctcggttaatttttttgtttgtttttcatgtttgtacttcagacattctagaagtgcttaggtgataacatttacccatcaatttgcattgctggctcaaattctgaagtgaacaaccccttgtataatggaggaaaatgaagtcgcacaatgtctgggtatattgctttaaatgccattagcttttctgtatgtcgtccacataaggctcttaatgtagacaccttgcatattaactttgttagtattccatcttctcggtgattcttctgtaggacgtgttgaagagctagctgaattttctgttgcagtttttcaatttttaccttttcttgcagccatgagcgatctgctgacatcagtacaaatgcagaaaataatgcaatttcatcttcagtcaggtgcatagaacataaactctttccaaattcaaacacaaagctaataaagtcttcacaacctaaggatttgaagacgtcggggctggcatacttcccatcaaagtacacggtgttgttctgagagtcaaaggcacggcacattctgantaacaccacctct

SEQ ID NO: 211173 - DNA, 705 bp, Homo Sapiens
  misc_feature (552)..(552): n is a, c, g, or t
  misc_feature (578)..(578): n is a, c, g, or t
  misc_feature (640)..(640): n is a, c, g, or t
tttttttttttttttgatctccagaagtatgtcctgagaggaaaggcggccagagagctttaattttccagatcactgtaggtctcagtgaccttgacagtcatccgcacatggatggagtgctcttgttctatttttgaggtacccctgtgtttcacacatagaggctttgccttcagatcacagagctggactaagaccttacatgctgtccctgccgccccctgggaatgcaggctccttgctcacgatgtacctaaaatactgcacaccccgtctaaggcatcccagggaacagaagatgcggaagagactttaaaaattcagccttattattttgttagaacttttttgttcagttcatttttgtcattttttaattatcttcttatgggacaaaatgaataatccacagctcatttaaattcctccttttaaaaataattgttagggttgggcacggtggctcacaaggttaagagatcgagaccatcctggccaacatggtgaaactccatctctacaaaaaaaaaaaagaaatacaaaaattanctgggcgtggtggtgtgtgcctgtantcccagctacttgggaggctgaggcaagagaatcgcttggacctgggaggtggaggttgcantgagccaagattgtgccactccactccagccaggcgacagggcaagactctgtctcaaaaaaaaa

SEQ ID NO: 211174 - DNA, 721 bp, Homo Sapiens
tttttttttttttttgttgtcattgctttattactcatagtttccaagcaatattacatatataaaagtcattttaaaaacaaccaggtttgctagaaaagtgttttttcttggaatcatggatttctacaccatttatacctggagtcctttatattaaatatattatttacgcaggcactaggcaaaattgaagaagttttgagttatctcctccataacccccaccttcccacattcccacaaaaaaatcccaccctttccctattatatgggttattaacattaaaaacaataggaaaatacacaggcatttcaatttgaatcacttttccctatttttacatgtctggagatgttggcttggttatgaattcaaaagttctcccagagttcttgatgatgattcatagagaaatctttcaatgctatcctcttccaaagtaatttccatgaatgtctttagttttctgtgaacagtggctgcaacctccctcacttttgagcttttatgtttacctgcattaataaccaggataatatgcacagcagccgtgaggcacacaatgccttcaatatcattagaagccacacatgcctttaattcatccaaaaatgacctgaccacattcgaagactttattattattcctattaaacaccttgaaaatggtggaagatcagaaagatgctctggaggggtaagctcttctacgtcaga

SEQ ID NO: 211175 - DNA, 805 bp, Homo Sapiens
  misc_feature (569)..(569): n is a, c, g, or t
ttttttttttttctttttcacgcatttgctttattcgaaaagaggcttttaaaatgtgcatgtttagaaacaaaatttcttcatggaaatcatatacattagaaaatcacagtcagatgtttaatcaatccaaaatgtccactatttcttatgtcattcgttagtctacatgtttctaaacatataaatgtgaatttaatcaattcctttcatagttttataattctctggcagttccttatgatagagtttataaaacagtcctgtgtaaactgctggaagttcttccacagtcaggtcaattttgtcaaacccttctctgtacccatacagcagcagcctagcaactctgctggtgatgggagttgtattttcagtcttcgccaggtcattgagatccatccactcacatcttaagcattcttcctggcaaaaatttatggtgaatgaatatggctttaggcggcagatgatatacatatctgacttcccaaaagctccaggatttgtgtgctgttgccgaatactcaggacggacctgaattctgattttataccagtctcttcanaaacttctcgaaccgctgtgtctccaatatcttcttcaggctctgacaggcctcctggaaacttccacatatttttcaatttatttcgatcttgtacaccagtatttttctagtactttcatcaaatacagctcctgcaactcctacttgatgtgaagcatatcctggtaatctgctgggccttctctcagcacagagtcacgttgatgatccgatctgcgtggtgaagcggagcc

SEQ ID NO: 211176 - DNA, 711 bp, Homo Sapiens
  misc_feature (23)..(23): n is a, c, g, or t
ttttttttttttttttttatggnacctagatgatttcctttttattactggaattaaatatacttaaataacatacagagcttaatgaaaaagatcatgaatcactccaccataagaattatcaggacatgataaaatcttatgtatcttaatggtaaaaacaatctgattattaggtctttgtttgaggcagtttatctacagttcaaaaaaatgctttcactgattacattccaaagtatttctttcattgtcagcaggagtgtctggcatttaattaaaatatattcctctaactataaataattgaatggttttaaatctatggctaatattggcaaaccgataaataaccaaataatgtaagaactagaattatcaaaacacttttgcgaacacagttctgcttggagggctccacggaggaagtgcctcactttcaagaaaggaatgacgtttcttctgttttcgttcaattctttcttgtttttccttattttccagccatttttcatattcattaatagcttgtttatctttatcttttttctcagctcttttcagttcttcctttcttttctcatttatttttttctttttccttttgcttgaaaaaagctcctttttttcattccatttctcagcagcagttaaattatctttctttttctcggcaacagtttcctcctctttctgtttctttggtctttc

SEQ ID NO: 211177 - DNA, 726 bp, Homo Sapiens
  misc_feature (602)..(602): n is a, c, g, or t
ttttttttttttttttttaacaatggtactgccctttatttacacagagaagatgctcagtaatgacaacttcatcccatgccaccttcccacctaaacaaactcactcctctctccacccacaactatattttcctacatctctatcatttcaaggtacttttagaaacaaagcttcaaacatttagaattggtgtctgataacttgattaccttcagagtcctgggtaaagagcaaatcaggcttcagattttgagttggcccatcctcctggcactgagcccaaggactgttaggaaacggccctaagtcccaattccagttattggttacatcttgaaaaggagctctagtgttgtgggcaatgacccgctggccttgagaatcttcagtgaaaagttgactccaggagtccttgtcattcttttcattgtcccaggaaaacacagaaactggactacggctttgtttcactgattctatgttttctccattccaggattccctgtatgtttgaaggaggacaggggcctgcctgttttctttggcagacacctttctttccaatttagtcttgcctaagggctgacagcatttgtcnccaggtagtttggtgtgtttctccatactctgatagttcttcttagactcatgaagccattcccatttcctggcagaacccctttttcttcctttcggtctagcaacaagactttcaagtcctc

SEQ ID NO: 211178 - DNA, 699 bp, Homo Sapiens
ttttttttttttttttttaaaaattactcaatctcaggcatttattcatagcaatgcaagaactaatacaaattgtaaaaagtatagtatagtaaatacataaaccagtaacatagtcatttattgtcattattaaatattatgtacaggacataattgctgtacttttacttgactggcagtgcaatagatttgtttacaccagtatcaccacaaacacgtgagtgatgtattgcaatacatatgtcatcactaggctatgacatcactaggcgatagaaatttttcagctccattataatcttatgggaccactatcatatatgtagtctaccactgactgaaatgtcattatgtggcatacataatgtagagttttcaagggtaccttaaagaacatctataaatacatacacacacaaacacatttatacacccagtagtcaaaatgattttaaaaatcacatgttagctcaaaaagataattaacttttattattcattaaaaatgagctttctaaaatattagtaaatttcattttaagctctgtcttgaagtgctgataccactgaagtaacatttttcttctttcaattttttcttggaaaattatagttttctctttttctaaaacagcagggagttccttccagttcttgataaagataaagggagcaccatggacttgagtaactgca

SEQ ID NO: 211179 - DNA, 667 bp, Homo Sapiens
ttttttttttttttttttactcattcagattatttattaagagcaaaagtcgggccatcccatcgtgtgatattgcaacatgaaaagtcacatacatactaaggagaccccacagaattgagagcctttcaacagtacagagccatagattacaaagttaaaatacaaatgatcccccagatttggcaggaaacaagtacaatatgaggaggcctggaatggaagggcacttacttttcaataaggcagttacaaaatgggaaaaaaaacccccaaaaccttgtaccccaaaatatactctgatgagcgtagcagacaatagaaatgtaaaagaaggatcctgtataaccctctgtcattggcaaatgtgtgcattaagtgaaagcaactgaagggtttgtgttttaagatgcaagctagatgaaacaactgactgtagacatttctacctcaagaacagttcatatcttgccctaggctgggttctacctcaaaacaccagacccactttaccatttctaaccataaacttggaaacagtctataatacaatgaaaggaataaaaaggcacccctagagcaccatgcttcccaaggcatgatcttgagctcatctgcccttcggttcgactgcccagctcagtaacagggaccaggagccagggcc

SEQ ID NO: 211180 - DNA, 682 bp, Homo Sapiens
ttttttttttttttttttaagaaatattcgctttattcgcctttaaatatgaaactttttgcacttaagttaaaatctctgctaaatccataggtctctcaagaactgacagatacattcatatacctactaaactactttaaaaagaagacacttccatggcgaattgaattagcccaaactttccccccaaatgggacaaggtattacattttggagtttttcttcgagtcacaaactaaactccagatctctctgtccaaaatttcatcgcttaaagaaaaaaagttctaattacaggagcggatactgagctgaagaacttcccaatttgagttggttattcctactaaacgcagccacacagctgcaacaacagctgcagcaggaggacaacgggctacgttttttgcgcaaaccctcttgaatcgggcaagttgacgttagaaactaaaatagtcccggagtcagctctgcaggggtcgggtttcgcggacccggcagtcgcccaagctcaaggcgccagtgagcgaagccacatttccagagttccaagtttgggcacaggagcgaagttcgggtctgggccactccaagccatggcctcggatcccagaaccggggacctggctggcacacctgcccaggtgcgctaccggcgccaggagccccgccgccctcc

SEQ ID NO: 211181 - DNA, 701 bp, Homo Sapiens
  misc_feature (564)..(564): n is a, c, g, or t
ttttttttttttttttttcccagcattgactatatttgaaagagctacacttgagaaggtaccatatcttcacatccacactgcatcagagaaccccagaatggggtactaaaaataaacacccctccccaaaaaacgcactcaggcatgcacacacatccacacgcatcctctcagttcatcagtgcactataactgagcttcaggggtgagagccagagctcagatgctggaagtaaacctttggcaaaaaaaaaaaaagaaaagaaaaccagagaccttccaactcctcttcccttccagagagaaggtgatgaagacaggagcagaggtgaggagacacagggccaccacactgcccaatcccagggaccccactcccactgaatagatgtgaatgatggcccttcaagttgtgcaatcacagctgcccacctgtaagctgcagccctgagaggggttcccaggagtagctcctaacagaaaaggaaattcgacttccatgctccaccagttgccctgactattgagggtgttgtggcacattacaagggggtctggcanaggagctggctttaagacgcaagcctatgtgtttgcccgtgccctgaggtggatcacaggtagtgaatgagctgcctgggcttgaccccatttcatctattcagccaggaagctcagcaggaataaaggatatggcc

SEQ ID NO: 211182 - DNA, 751 bp, Homo Sapiens
  misc_feature (627)..(627): n is a, c, g, or t
ttttttttttttttttttcatgatttgaaatttttattttctgaaatgaaacaattgtattgtacaaaccatatctactgatggaataaataagtgaaaaattatactgctgtacaacacaccaaaaaaaaaaaaaattcttgaaaggggaaaaaattaggtaacggtgaaaaaaggtctttatgcctctaaccaggttcttggcgataatgaacattccaaaccatgacaccgtttgctaatgggaggtcaccaccctagaggaatcggtccacagccttccgggttgtgggtgtaagtgccagcactttgtggaatgtgtagccgcagcttccccgacttcacgttttggggggaattaggtttgccctgggagcccttgaggccacggggcctgatgtccacggaaggcttttgctcgggatcccccgccccctggctcgaagctgaaaggtcttagattctgtggtggggggagggcgaggggtgcagggtgggtggggggcagcggctcgaggagcgactgcgccagggaaggaagcacatcggatttttgcagtcttgtcattctgcgtggaaggccttcttggccaacgtggagtgcagggctgctggcgctttgcctgncgtggccgtggtggggcccaactggtcccaatcgccggcccattcctaccttcaggcacttcagagaaatactagtgacagccttgggacggtggacgtcgtctgagtcctcacctgcgccaac

SEQ ID NO: 211183 - DNA, 661 bp, Homo Sapiens
ttttttttttttttttttgaaacagttaagatttttgtttaaatttattttttgaactggtaataattttacatgtttcaaaattccaaaaatataaaatgataaagagtgaaaattattcctcatcactgtcctcccaattcttctggccaaccagtatgccacttttaccctttcagagattatgtgtgtacatataaacaaatgtttcttatttatttatttatttttgagatggagtttcgctcttgttgcccaagctggagtgcaatggcacaatattggctcactgcaacctccacttcctgggttcaagcgattctcctgccttagcctacggagtagctgggattagaagtgtgcaccaccacacccagcttttgtatttttagtagagatggggtttcaccgtgttggtcaggctggtcttgaactccggacctcaggtgatccacccgcctcggcctcccaaagtgctgggattacaggcgtgagtcaccttgcctagcctgtttcttctttacataaatggaaacatactctacagtttgacaccttgcttttatctacttaactatcttagagctctttctcacattagtatagtttgaggatccctaattcaaaaatctgaaatctgaaacaacttctggtcctgagc

SEQ ID NO: 211184 - DNA, 696 bp, Homo Sapiens
ttttttttttttttttttaagcattatttatattttaataataaagtacataccatggacataaaatgaaaatgcatataaattgaatagattattatttaggtacatcagttaagtagcatttagttgtttaataaataacagactaaatctgaaataattcttagtttggtaagttctaagtataattatttaagaaataagagaatatatacaataatatatccattcttgtcgttcattcaaaggcattacatgttgacaaaccattgtagatttgggtcccacttctactgcaaatatgttgagtcctctgttgtttatgcagtttttacttagctcattgctgatgtgaataatcactttctcatctgacttgttttcaataactgacgttatccaggtgtcacaactgtaagtatgcacgattatattttcatagccatccattactttggcatcaccgttgctaagaacagatttacaaatggccttctcaagttgtccactacatgcctccatatggacagctttaatttttggcttgcatttttctgcatagatatcaatgacaaatggacatgcctctgtcaactccagagctttattgtagcccatagagtgtagagttacccaaaggtcacaaggatctccttctcgatcattagcttccattagattcaaatccataaatcc

SEQ ID NO: 211185 - DNA, 637 bp, Homo Sapiens
ttttttttttttttttttaacaaaaaaaatatattaataaaaaagttcaaaaaaggggggggattgtcatctcctttggggtgcgatggcttcaaatccaaactgaggctctccgggtggtaaggatgtgcgaggaggcctcttgaagaactccaggcctatcatgctgtctctccgctaaagcctgaggcccgaggtcagaggattcaggaaggctctgcagtcggcccaggagggcggggtcccgtggtggaggcggggagagggaaggaccgcacggagcaccaacccctgctcggccccgtaccaggaagcgctgtgggacccgggctcttagggtcttgacacaggacgggcctgggccgaaagcccaggcacgcccgaccagagagtgtttctccactcccggactctgccagtcaggatggtggtgccttcgctgaagcttcaggacctcatcgaagagattcgcggggccaagactcaggcccaggagcgggagggtgatccaaaaggagtgtgcccacatccgggcctccttccgcgacggggacccagtgcacaggcaccggcagctggccaaactgctctacgtccacatgttgggctaccccgcccactttggacaggtactggc

SEQ ID NO: 211186 - DNA, 735 bp, Homo Sapiens
ttttttttttttttttttcccttcaactttgtttattgatgtacggaacatgaaaaagtacaaagaatccaaacacaaaagaaaacatgtacagcctcttaaatactcaacagaatatattttctattccaacagatgtgaattaagtcatacggtacaacttcaaataaataccagccttacattttattaagtgctctgataaaacactgtaaagtgaagcacaatttgcatgccctctcatcaatgccttggtttgctacagtagtataggaaagaagcatgtagctgctgttttcccttgagggaaaccttattatttttttttaagtaaatacatgtattttattttttagggtttttctttttttaaacgcaaaaggttaactctggcaatctaaatgcacctaaggatatgaaaaagtgctaagccaattgatttctgaatagcattgagtgggtcagcatgaaaactcgcttattcactttagcacgcgcctcacagtaaatgtacggtactatacggaaaaattttataactacaattttaaataataaaaaataaaactcaaagcaaccgcaaagataatgtacaactatgttatgcatagcacattgcctgttctaaggggaagcatgtgagcatctcagtttatacaaaaagcaggacgtaactatatagttctcagtgcatcctgatgaaggatttttgccttcagcttttttgaaatttat

SEQ ID NO: 211187 - DNA, 732 bp, Homo Sapiens
  misc_feature (674)..(674): n is a, c, g, or t
ttttttttttttttttttagccaatggttttattagtgtttactattattctttgtaaaaggtatgacgtattttctatatgtatcaaatattaaactcctaaaacaaggtgggttagggcaaacatggagtatggccatataattgagaatcatactatagtttttatacagcagtcaagtcactaaaaatggtttatcaggttaggtttaccaggaatcctagatgacacaactgggcatgagaatacgatgaaccaccgtcctctccctgatggcagaggtcattactggcctttcacattcaagccatctcccagctgtgactctgggcttgctgcactgtagtgtaggtagtgctttaaggagatgggagtagttagttaatggttctttactgaattggttctaagataagtggactaaaattagaagaaaaatctagaaaaaattaggagacatgtttgtggcagagatcattaacttgaggataccctatggccttaagcatcagctttattctcatgcaatagttagaaactattctgaaacttagtctttagtatgtagatttttttttgcttgaaacgatgttagatgtggctatgcaagcatggaaaggtatctgctttttctaccaggctgatccaaacttacactgggtcagattgccanatcactcaatagactgagcctctgatttagctcaagtctgggatgctttatactgtgt

SEQ ID NO: 211188 - DNA, 756 bp, Homo Sapiens
ttttttttttttttttttacttgcaggattaggctttaatgaatttgaatacaaggcacaggtttccaggtgtatgtaaatacatctccattttacgttctttaatcgcttaatccttttggaccgggataagagaatatttgaaatttcttattaaagcaataacttccttaatagggctttagtctttttgctttttttttttttttaagagctgatcatctgaattcctagtacttgcaagtaaattttttttttttttccttttctgtccacctaccattaggtggttcctagatcctggcaaattgtctatggttaaatgatgcttttaatttctgtgtcaacacagaccctcttcgttggtgtctccaaattagtattgtcttcctctagtgtgtcattacagtcccttttggcttttgtttcttcctcatggaataaatgtgggtgctcaattcgtcccctacgtacaaaatgctggatccgggattccagtccttggcatttaggacggtccatgaggggcttatatgtgcgcatcttcactccttctacaaaggcactggtctgctttatgacagagggcttaacatttccccattctgtcattccatccatctttggtcctattccacagggtactggaacagtgtccagtccttgtagcatactatacaacatgtgagttttgacagcatgattagcccacagttgttgtaggtgggtaatattgaactcctgagcctcctggtc

SEQ ID NO: 211189 - DNA, 668 bp, Homo Sapiens
ttttttttttttttttttctatttactaagcattttttatgtgcaggagagagtacaaaccaacatgcaacatagtcttcattcttaaaaagtacatagtaaaggtatgaaaaacatttgtattcagagaattctaagacaaatggtcaaatattcaaatggcctggcactagtggtaattccagcagacaaacagcatgagaaaaggccgggagacagtaataaatacgtgcccattgcaatgagttacccaatcaagcccttttacctccttaagatggcagattagaagaccctcttccccaggagagtgggagcgtctgccttcgggctgtcagtaatattaaataagagtgcttgatttataaattttaaaaacataagaaggtttgacattctgcccagagcaacggagggcagcgtggtttaccagcgaaaggactgaacagagtgccaggagcccttagctctagacttactgaacagaaagaccttgggtgaacttttcattgaaacactgaaggctttaggttcatacctgtatacgaaggatagtcctggtgtggggcagcagaaatgccactgagctagaagctggaagacccaggtcctggctttgctaataataatgacatttattatgcactgtggtgctagaggttgttctt

SEQ ID NO: 211190 - DNA, 791 bp, Homo Sapiens
  misc_feature (630)..(630): n is a, c, g, or t
  misc_feature (739)..(739): n is a, c, g, or t
ttttttttttttttttttccttttcttttcttttcttttttttttactttggccttttgagacaagaaattatttctttatattttctctaaattctgtttgaaaactgaaccttcttctttagatcatgtccctctcctgtcatatttattcagtgacagttaggggaggctggtagcactttccatgttcttcccagatgtctccttaggcagatccctgagatggtgcagtgccctttcagtttccatgttgtggccatagttttcccacagtccctcagcaagtaactctcagaccttttctccagtttccaatgacattttctcaccgtccttcaggccctgaccaagagtcttgatgcccttccaggttgcatgaatggtccccttgaggcccagttacaggtcagcctcacagtcgtgtcacatattgtagcttctgattaccacagcagctcatttccagctgccatattctgttccagttatctattctgaagtaaaacaactcattattacttgttttttggcttagagagtcttggtggccagctcatctcacacacagttgcagccaagctggattgtgtgaaagcacagtggggtggtgtgcaaggtggctcactantggttgggagtggatgttgctggaggctcactaattgttgggagtcggtgttgctggaggctcagtgggggatgtcaatgcgtgtagctagtcatggactgggcttgtnggttcatcatgaggtctcaggggagtgggattccctgctggtgactggcttt

SEQ ID NO: 211191 - DNA, 734 bp, Homo Sapiens
  misc_feature (656)..(656): n is a, c, g, or t
ttttttttttttttttttcacttggtgctctctggcctctttattcccatctccttaggctgaccctgacaagtgccagggccaggcttggaccaagcagtcaactgagtcagcctgccctgggaaccaggcaggggagggagcttacggacgggctaggctcaggagagtaagagagagcagatgaagggcagaagtccgtggccgcagaggcagctgagcatgagggatggagcgtgctgctgtcctgcaggtgccgttagccctgttttgcactggtggattgatctgctcaggcgcacagggagatggcacagcaggacccgccgcccagcctcgctgagggcatgctcccgcctcacctccagaggctgttgggcggaagccgagagctgcagcagttggggccagcgtgggactggaggcccaggtgaatcttgtggggcaggggacggagctgaggctgtccggcccgggccctccccacccaaaggccctagaaccctagccttcaatcctgggggtttgcttctcccctgagtcctggctttcctgacctgccgtccgttagggacaggtggaggggccaagtcttgccatcagaggccagtgtggtggtgccagagctacggggtattccaggacccctgacctangcacggggcaggagggcccagagcacctggccacttgtcaggagcttaggattgggaggaaagagggagcctgtatcc

SEQ ID NO: 211192 - DNA, 659 bp, Homo Sapiens
  misc_feature (544)..(544): n is a, c, g, or t
ttttttttttttttttttcttcatataataatttaatatatgccagccaaacaaagtatttgtatctttattcaattaaattaaaacagacctgccaggtatattatataacattcactatatacatatgatttaggcaatgcaagataattctagatatgctgattactcaactatgtgtaaaacatgagcggtgtcagtgatgcccagcaagtgctccttttcacattgggtgcctgcatttccatggtatggttagagggatagctacgagccatgacatggactaccagtaaacttctgtgggagaaggagggaaaatgacaatctagcatagatgaacagtctcctaaatgcaaatagaatagttgacagttatttttttttaaaaagttcttctgtcatgttaatgacacaaaacttctcttttttgaaggcaacaccaccacattttgtttgggtgtgtggggacaggtggggggaatgctcttaaaattggtacaattattcctaaaacaacaacaacaacaaaaaagtacctctnttggtgaagcctcggtacccattcagttcaccgtaataatctgtaaacaggcctgtagtacagtgccgggccttgatttcaacaaggtcaggtaccacagcctttcctcacagtc

SEQ ID NO: 211193 - DNA, 634 bp, Homo Sapiens
ttttttttttttttttttgggttaaaacaacacacatttattacctaaaagtttttgtgaatcaataattcaagagcagcttcggtgggcttagaatcgctcatgagttgcagtcaagatgccagctggggctgcagttgtctgaaggttctgtttgggctggcggatctgtttctaacatgggtcactcacacggccactgacaggaagtcttagctcttcatcacagtcacatgggcatctccatggagctatgtggtatgtgctcacaacatggcagctggcttgtactagaggaagtgatagaagagagataaacatgggggaagtacacaattttttatgacctagtctataatttaaacaccattgtttcattgtattcattagatgggaatcactaaatccaacacatagtcaaaaggaggaaagaaacgagcatgagaaaatttgtgaatatattttaaaacaaccacaactagaattcataatgtgagtatcccttaatgtagaaagggtgttttacagatgataagtaggcatggttatgacagatgatgaaactacagatatcaaaaggaaagtgactttggatttgggggctgagtttcaatggatctcctttgatctccct

SEQ ID NO: 211194 - DNA, 767 bp, Homo Sapiens
ttttttttttttttttttcaatataaaaccaaaagctttattctctagttattattcagctccaattctaactgatttgaaaataaataatttaaaaaattttcttcctagaaagtaaaatatggcaccataatccaattgggcctcatattttaaatcctgcagaaagcaaacgtggacggcagatagatgataataataggccattactctcaacgcagagaaggtggttggtgtttcttttctccacgttcattcctggaccatttttggtctccttcctatcaaatgttgtctatacgatgtgaaggactttgaaagcagccacagcctgtttttccctttcgtgtctgttctgcagtatttccagcagtgagatttcaggtaaactttcttctttcccagcataggttggatttttttgttcctttgatgcttgatgagtcagatttgatggtttgggtttggggatggtcttagcgtattccaaagccttctgccgagggatagcagatttcttttgagttttttctgtttgtggttttgatagaatggatagtgtcttcatgttgtactccttgacttgttttgcatattccttttgctgtattaatttttgcgttttgtctctgatggactcaaagtcaggtccgaggcctccaagcttcacgtctcttttctgataacctttcagcttggtgttctttagctgttgtgctctttgatgcatttgtcttcaagatcgatggcagcattttcatttcctt

SEQ ID NO: 211195 - DNA, 752 bp, Homo Sapiens
ttttttttttttttttttcgttagaatttttttattaagtacatcaaaatttcaccttacatttgaaattgcatagaaatttaaagtgctaaagcaatcattgttttttcaaaaaaatgaatttgaagccaaagagtggagagtgtggggatccactgggtaggacatttgagatgtatgcaatgtaggaatcttatttgaatcctgacttgaattggaaaaaaaaaaaaaaaggcacaacttgaacactgctgggtagttattaacactaacaaactgttaacagttaagtctaacaacagaattgtggttttatttaacagtccttatcttttagacatacatattgaaatatttacaaatgaaatgatttgctatctgggatttgcttcaaaataaataggggttcaaagatgaatggcatttagataaatcaagattggccatggattgatcatgttaacatgagttcattatgcaattgtccttttacatatacctgacatacgccattaattttttaaaaagcactcactccgatgtctcctatgtataagaacacaggcagctggcagcaactaaatggtatcaactaaatttttataaattccaagagtcgttaattctcagctatctcaaaagtaaaatctctgggaaacttaatattaagacagtaactatctgcacacagtaatctgtacaaagtttaattaccaccaccagtcagtcataggctagtcgagtagctgtat

SEQ ID NO: 211196 - DNA, 599 bp, Homo Sapiens
  misc_feature (520)..(520): n is a, c, g, or t
  misc_feature (548)..(548): n is a, c, g, or t
ttttttttttttttttttaggacaacgtttgtttgtttttattttaaaaagtcaccatattaataaaaatgctacaaaacccagaataaatatcttcaagttacaaaagcaaaacaggtctagaaaagttggctgtaaaaaggcaacagagaggacagacccaaaagataaatgtctgcttgcttgggtggggctggtgctcaaggagggacagttgttggccctctcccccgaccatgccttagaagcatctccgccaggccagtgaatcaggcctgggtgataacggaaaaagttccatgcctgcaggcatcgttctgccatcactcaccgagcttcctggtctgtgttccccttcccagcctcactgttacccgtaaaaatgaggagcccagccgggtgaagtaagaagaggcttggcttcagagccagcccaatctgcgtttctggctcacttcctgctgtgtgagcttggcaggcacgccccctctggttccaggtttcttcctctgtgaagtangggtgcgaatgtgtaccctgccgggtantggagcgggtttggctgaaacagtgcatgcaccactgcacactgccgagtc

SEQ ID NO: 211197 - DNA, 621 bp, Homo Sapiens
ttttttttttttttttttatctaaaattgaaaaagtttatttatctttgaatatatcacaagtatactcaactggcaatattttttttaattaggtaaaatgtacaaggtgtatcttcccacaaattaatgaaactgattttgaacaaacaaaattgacacacagatacattttctaagtgatgcacttttccaatgatgtcagcattactcaaaacattttttagaatataaacatataattgattttataattgctgtcagaaacaaaggcacattcttttactgtcccagaacattcaagatgctttcaatttattacaagtaccaaaagcagccacaactcaaatggctcaagcagttaaaggaattattctttcccataaaagcggtcctgaggtagggctacagtggctgaacttctgctatgataagtattcaggggtttcccaggacacagcatcaatgctaaaactggcaaaatcccaatggactgatcccttcaatggatgacaggaccctctatggctgaaagactctaaagttcttagttcttagctgtgacaggacagagaaccgacatgtcccacctgcagccacacccatccccttattattacta

SEQ ID NO: 211198 - DNA, 659 bp, Homo Sapiens
ttttttttttttttttttgagccaagaagtgcagtaggctgcggggattttatttctgcccccagaccaaggcaacggagccctcacctgcctgccacccccacactgggcccaagcaagctcaggtgagcgcacatacatccaccgtggcgggctcctctcgggtgaagccatcaccgaagccctcatcgtccaccaggtcgggctcacggcagcacatgggacagaggctgttgcgcacagcagaggctcggagccagacgacaaggttccaacgctcaccagtgcccaagggccgggctccatgcagctggccgccacggtggaggacaccctggcccaccacgtgctccacctccaggggctccgtcagggctgtgggtgcctggaagaggcccccaaaatacagggcgccccctgtgaagaccttgcccaaggccacattgagggtgagctcggcattatcatagtggcagcccagctccaggtcctggcccggtgcgtatttgaccacaaaggcccggtggctgtcgagccggcccccgccacagtcagggtacagcagggccatcagcggctgcaggaagcgctcccgcagtggtgtcatcagcggctcgtccagcccgagctcgtgcagcagcaccccgtagttgttcatg

SEQ ID NO: 211199 - DNA, 695 bp, Homo Sapiens
ttttttttttttttttttgcggggtgaaaatgtttttattataactttggtcagacggggcacagccgggcgggggctctgagggtgctgggaagctatccagcccccaactcccccctcccccgggcgcgccaccccggagggagccgagggcagctcatctcagagcgcaggaagcaaacccgccgccgcgacctctccccaggctggggtgggctggcaggcggaggtgggcagtaaacagtcctattgtacaaatatatagcgcgggctgggcgggggcggtcaaccccggttccctggcacggggacagggcgcgctgggcccggctctgcagcgagccggtgggagggcctagctgtggcccaggcggtgttgagcacgggccgggggcgtcatagccggggagggccgggcagcgagcgggtgggcgaggggcgagtcatcgtctgccccgcccggaggggaccccggcgggtgagggacgtgggtggagggagacgtggggagctcagtcggagtagatgatgaagccagagaacgtgctgtatttgttgctgttgccgccgtgtgctttgcctccatccagcttgatgaagacctcgtcgccggcgtccaggtgcaggatcacgctgttgctggcgtagtcgtaggtctggtccgcgtcctgggcactagcactggcccgcacctg

SEQ ID NO: 211200 - DNA, 648 bp, Homo Sapiens
ttttttttttttttttttacgtagatagtaaactatgcatagtattttatttgtaaccccatgtgttaagaagggacactgttaaagtaacaatcatttaaaagtaacaaccaacaaactggtatttaatttggtattttaaatagttaaaaatcaaatggaaacagtgtctaaagtcactaagataattcataacaaaacccattaatccaagctccacttattgtaaatagaattcaccatgagctaacctaaaatgtacctgtggagataaaacaagagtgtaagttagcaaagtattaaataaaatttcagggagcccctaaatttatttttaagaactttagaactaattctctatatgcaaacactgattaactcaaatatcttgtaagttcattcatacatggccttatttgaggcagtgtatttgtattcactagcaaaattcatgtcagtaaaatatttttgaagcagtttatttcccagatatttcactagtttgaaatagtcatttcagtgattagtctgaatttctattgaagcctaagctttgaatgaagacatgcttctgaaaataaggcagtttttctctagtctgcttatcaatagaaaacaaatctttggtttttagttaaagtgacagga

SEQ ID NO: 211201 - DNA, 658 bp, Homo Sapiens
ttttttttttttttttttagagagccaggcgcagagatgcagtttattcgtgacctctgctggccactcgcacctgcgcaagttccacaggctgacctgccatgtccaccccatgcccagaggggcttctagtcctgaatgtgccctcacccagcccctgggagaaggcactgtaacaacaggtgaagagggggctgacggagcctcagcaactgctgcagatgctgtcccctgacaatgtaacagccgggaggagcaggggtgaagagtggcagccgccctggccgctgagtattttagagggagctgactggggaagacagtggtgtgctgtcaggtccccctgctccccttagagtggggctacctctcggggtagctgaggatgggtgggggtgggctgagcaggtctcacttatcgaagtgatccagtgggtagtgctccccgtaggtctgcaggtggcgggccagagactcctgctgcttgcggagctgggcgggcatctcctgatacacgtctgagaagagcaggttggggttgggtttgggcttccgctcggcctgctcaaaggcctccatcaccttcctgcgggactgcttcctccaggccttctcctgctcctcatcccaccagccttggctcagcagatagtgccgc

SEQ ID NO: 211202 - DNA, 756 bp, Homo Sapiens
ttttttttttttttttttgtatagaaatggtggtttaatgaacaatgttccaaaacacttttcaaaaattatatatataattagatgttctgtagttgtcaggcactgaggacaccttgtcctccaagtgcaattctaaaaagcgtagataagccacaggtgcaaatgcatcagctgaatgtatgactacttctgatgaatccacaattattttcttcttaaatagagggcaatccaaagtgaaagtttcatactctccaccttctccacaaacatgtactccatacttcttagaaagctctatgagataaggctccatttgatccagggttttcccaagatgcttatcaggatctaaacccaaagctgctactttgatgatcattgcttgaatgttagatgatatcatctctctgagcaaatcttcctggtttctctgccaaagataagctaaaggctggagattaagccttttacacacattttccactcgaatacgctgatagtcagaaagtatagcacctactgatatcccctctacttcttctttttccttaacaagtttcaaaagctcatagagatcttcaacctcatcaccttcacatttggtgtacacttgtcttgtatccaagctccttcctcttatggttcggcgatagaggggaagagcattgcttctgcatacaagtcaatggcatggtgccccactgtctgatacatgtagctatccagttcatcagaccccacttggttttc

SEQ ID NO: 211203 - DNA, 693 bp, Homo Sapiens
ttttttttttttttttttgataacaactgtttaatttactattcagatggaaagcctggtaggatatttgggtaatggtctgtaattaggtagcataactttgtacacatgaatcaactgggacccgatacaatctaaaacagaaattcaaatatattttccctcaatgaaaagggctgaggaagtcctccaaaatgtggagacatttcaagtctacatcaacacacatctggacctgtgcagcattcatttaattctaaaagaagaggcatactgctcagaaaaggggcagagatttcccagtcatcttgcttattaaaacggtttagataaaccacacttttagctagatgtacactagacagcaatgttttaacaagtctaaaacactatacaggttttaaaatactatgataacaactcagtcatcattgcaaaaaggcattcaacatgaataaaatgtttgaggaaactgatgtttacctcttttaataccaaagctttttaaaaagttttaatcaatttaagataaaacttttaaaatatgtagtacatatctgtgtatgcaatttcacctttacttaattacctagaggcataataaagaataatcatcagatgaggtagtatagtgatgtcctctaggctgggtagcggtccttacactaatggccttggacagtgtatgctctc

SEQ ID NO: 211204 - DNA, 711 bp, Homo Sapiens
ttttttttttttttttttcctgctaataatcatttattgtttgtttatatacaatagaaacctcttttataatgggtgtgggataaggatgatgatggcctatggggctccctgtcttacagcccttgtcctcgggccatgatttgacctcagaatgacggtgactctagcaaggcactggggagccagactctgctgcatttgtgtgcaaatcccctacgagtttcaaatggctccacgcatcaacaaaacctcttagttcttaagaaaaggagacagaagagatttggacactgaagagaaacacagccatgcctgagctccctgctggtaggaaaatgtgtgcctaaggttgcttttctctcaggtttccatatttttgtttcctcttgcggagctgccgctggagctggagcttgttggtgaagaacagctgtctccagcctgtgtcctccgccagggccctcacgtcaggagtgatggtgtcgcaggtcgactggactatctgttcccacagtttatcagacatgcacagctttgcaaatctgtgtgatgtttgacaaagcctggcaatatcttcaagatccagataagaaatgatagtcaggagcaatcgtctgagagccgttcaaggaagtcaaatttacctttgcacaaattgatgacatagtctaatattcttgcaccaaatattaaggcagtttgaccttg

SEQ ID NO: 211205 - DNA, 752 bp, Homo Sapiens
  misc_feature (736)..(736): n is a, c, g, or t
ttttttttttttttttttgaagagaaaaaaaaatttattatgttccattgttatgtgacgttccaaaattggaacactaggcaaaaccactgctacactgtacataatgtataaaactatgtttcttatctcaggaggtggtgacacctgctattcagtgtgatattcaacggaacacttcacatgtaaggcaacatcacatttttcacatcgaaaagttgtgttcttatgacattcagcgcatcgcgtttgctttccctgtttgactatcacatgatttatgccatcataacgtgagtcaatgttacgcttctgaggtcttcctttttggccaggttctggaggatgaccatgggtctccagataatggcataccacacgtcgacgaaactccagaaaatccactggtttctcatcatatgttttatgcaattgccaagcattttgtaagaccaattcgaaacagaacaaaagagggcttgaataccatttctttccacggattgatgcccgatacttatcaatgttttcatcagctctgtctacgcctcccatgaactggttatacactttgatcatgtttggctgctgaacttgtatcttctttttcagtttctgggagtaacgactgacaagacacaggggatggataccagcaccagatgaggcaacagtgacaacactgttatcattccatctgcagacatattgcctttgccatcaattcgataatcanatgtgcctctttcttt

SEQ ID NO: 211206 - DNA, 623 bp, Homo Sapiens
ttttttttttttttttttacgcttgacaaaacactttacttcatttagtcctcacaacaaccctggtgaggtaggcacattctcggaggtaaaatgacgtgggcaaagttccctggctcgtttggggaaaggctcagcagccgggccaagaaaggtctttgggggcgcaagtctttggagggcaggtctttggggagcgctttgagtaatattagagctttcactaaaccctggcctattacgtcccctcccctgagatttacctttatatactcaagttctttcatgccaggaaggtaggctgaaggcttcgaaaacctgcagctcatacccaaagctagcactgtctatccctggagacccagcgcccaaaagctccactgggcgcatagcgcacggcacgcctcctcccccgagccgcagactgagtaactggccccggactaacctgaccaggtcggtcatgcaggagcccaccactaccaccgccgccacctcctcttgccactgcctctggggttccccagacgccgccatcgctcaaaggtgctgctgtccaacctggacggtgacctctgccctttgcccgaccccgttaccagagacgccactcctgccctccc

SEQ ID NO: 211207 - DNA, 749 bp, Homo Sapiens
  misc_feature (611)..(611): n is a, c, g, or t
ttttttttttttttttttggaataaaaatttgcatcaaaatcaatttattcattttattgacatataaacaaaatgtcatttgtttattcaataaacatttgttaaatgcctaatacatttcagacatcatgccaggcacggggatgacagggcatggtggcgggcacctgtaatcccagctactcgggaggctaaggcaggagaattgcttgaacccgggaggcggagattgcagtgagccaagattgcgccactgcactccagcccgggcgacagagtgagactccatctcaggaaaaaaaaaaaatgtggtctctgccctcaaagcgctcatagtccaggagcctgacaagtggacaggtgattacatgcaatgtaagaaaggctgtgatgtcatacaagaagacaagtgggagtatggttttgaccagttcctcctcttagatttattccttcttctttggctataaagcaaaagaattggtcctattttttttaactgtgcaaattaagccatgaattttaaaaactttataaagataaaagacaagcatccagcccagtggctcacgctggtaatcctatcagtttgggaggctgaggcaggtanatcacctgaggtcaggagttcaaaaccagcctggccaacatggtaaaaccccgtctctactaaaaatacaaaaattagctgggcatggtggtgggtgcctggtatcccagctactcggaaggctgaggcagacaggag

SEQ ID NO: 211208 - DNA, 701 bp, Homo Sapiens
  misc_feature (637)..(637): n is a, c, g, or t
ttttttttttttttttttaattgaagaattttttaattaaaaaacatttttttgacggcttcttgttgagcagggctaccccacaggccatgtgcctagagtggccttaattgaaatttttgttacaatcattgtagattcctgtacagttataagaaataaaacagccgggcgtggtggctcatgcctgtaatcccagcactatgggaggccgagacgggcggatgacgaggtcaggagattgagaccatcctggctaacacggtgaagccccgcctctactaaaaatacaaaaaattagacgggcgaggtggcgggcgcctgcagtcccagctactcgggaggctgaggcaggagaatggtgtgaacccaggaggcggagcttgcagtgagccaatatcgtgccaccgcactccagcctgggcgacagagcgtctccaaaaaaaaaaaaaaaaaagaagaaataaaacagagaggctgggcacagtggctcacgcgtgtaatcccagcactttgggaggccgaggcaggtggatcacccagcctgggcaacaagagggaaacttcatctcaaaataacaacaacaacaaaaaagaaaacagagggatcccaggtacccgccttcactcagtttcnccaatggtaacatctcgcagaactactgggcgccatcacagccggggtctgactgctcttgctc

SEQ ID NO: 211209 - DNA, 726 bp, Homo Sapiens
tttttttttttgatttttagtatccttttattttttttaaagcacaaatgcccacacaactttgacttacaaggtagttctatatagaataaattaaaatgttagtaaaatctgtattaaaaactatgtacaattaaatgtggtttacagggtacataattatgcttctcacatcaattatagttgaggacaattatagttgaggttatctaaaagaaagtgtaatacggacatgaccattcataagtaaaaggctggaagtctccctggagtttatgcagatgatttttacttgttattgcacagtgtgaattggtaggggaaaaaataatacactaacccttgggtcccatacaggcaaattaagattgcattcttcaggctgtttcaatagcactggatttggccattccctgtttaaaaagattgtagcacttgataagactattggatattaccatctaaacgtattttgttaaacatacagcatttgtgaacgtgatccttcttcattctgccttcttggtacatacaacgttttaatcctttctgacgacattagactactcaaaatctttttctcctaactatgaaatgaacttaaaccatttggtagccttctcagactgaaaccaaaaacgttctctgccactcaaagaactttaaaggactatttaaataaagaagtaccatcccaagataatgatgtgtccacttcaaccttga

SEQ ID NO: 211210 - DNA, 688 bp, Homo Sapiens
ttttttttttttttttttccaactttctgtttcagaggcagcagcagtgagctgcaattgcagccagccctttccccagccccactcccttctatgaactcctagccttcttcgcagacagcctagcatctggctaaagggcaccttgttagcaaacacaatttctatgaacggattacccatggactgaagctgttgttgccagcggctggaggaggggactccagacatgagtgttccatgagtgatgcagatgtggagtggaggtctcaggtgaggtgctgcagagccctgggtaacagaacgagtgagacagtaaggactaaactctagagatctttgcacaccttaactagcccgaggtccgtgtgacaagtccggtatgcactgcgggggaaatgcaccccaggcagaagccggcccttccaggcgtggcatcctggggcacctgccaggatgctcacagccctctcgtccacaaaccactgtcttcccttggcttctgcagaggcctgagtgaccgcagcacatggcttcgaggaggagacgtgggacgcggcacagcagtccgaatgggcgtcttctgcacagtcttccagcttccagggagcgtgtgtgttcaccaaggccgaatgctacaagactaggtaagctgtccagcgcgacgggctcttccgaggaggagtgt

SEQ ID NO: 211211 - DNA, 758 bp, Homo Sapiens
  misc_feature (659)..(659): n is a, c, g, or t
  misc_feature (672)..(672): n is a, c, g, or t
ttttttttttttttttttccttttttggagtttcttagaagtggttagctcagtacatggtgtagacaggtgtaataaggctgtgggttctgcttgactgtctgaataactaataatccaataagtttgcagaaatgcatagaaaatttacaaacagcatcccatttcctcttgaaaattgtgaatcaaagcactgatacaaaatatcccacattaaaagttttaggtatattcacctcacctttccccaaccttctcaccacaggtcctggtcaacaaatagatttggactcctgctttcccttactctggtctaaaggcacaataagatgcctttttacagatgaatcagcttacatccttttgcttgtttggtattgtataaggaaaatgctcatctgaatctgttccgtgcaatgctcactgctacttagatgacctctcatctggttgtgtggctggtgacttgagctccaatgacgagaagagtccaaagaccctgactcctaggaaagcgtgggagtcaagtccattgtaattcagaccgtttggaaggctctgctctggctggggatcatgctgggtgtggtttctgctttggtcagattagcatggtggactttctttggttcagaacctctcacctctggccccactangctgtatgcctgngtggccagccctggctggggtgctgcgtcagttgacagtgtccgctggctgcgtgaggcactatttgctgtggagcgagtggagga

SEQ ID NO: 211212 - DNA, 706 bp, Homo Sapiens
ttttttttttttttgtgtcggtgggacttcccagatcgttctttcttgctgggaaggcttctccctgtgtcttctgtctcagacccatggctacccccaggctcctgcttgttcaggccgctacaggcagaccctgaagcaggtgcgtccattctgcctcctgaggaacgtactattttctctccgcccacttccttgcttttatttggctcaccaggatctaggccttggagatggtcctttgaggagcttcctatatcctttggtttttctgttcctttagttctggcatctttgttccttgaaagtttaaagtcaaaatataaagggttacaactgtatgaaatggagggttctgccttggtgaaaattaatagttctgatggccactggagggcagtgctttcatctttgctcaaaactgggaagaagggaccagtaggatgtttgggtccttcttggctttctttccctgctggggtggccagagaggtttctttagaagagttggactcacacatttgggtctctgaaaccttctgactatgactttctaaactctgatcacttacatcccctcctaaggccttctttgcctcagctttgcttcctggttctgagggctcggtcatgctggtttccttcggctgctcagagacttcactaactgtcttttctgctccttggcttgctgccgccttgatgc

SEQ ID NO: 211213 - DNA, 751 bp, Homo Sapiens
ttttttttttttttttatacaagaatgttcatagcagttttattcataataggaaaaactggaaacattcaaatatctatcaatacaagaatggatcaataaactgtgatacattcattccatggaatggctaaaggaacaaacttttgacacacaaaacaacatggatgaatctcaaaaacattttgagtgcaataggagccatacgcaaaacagtgtgagaaaaatgataaataataatggtttcaagaaatgcagagcagagagcccagaggcaaagacccacaggacagagggtcagtcccaggctgtggatcctaactaagaaactcctgctggattttgcccagctccatttccaaactattttgggttattgacttctttatcccctccatgttccctcattttgaactagaatcactgtagtggttattctatgtctgtcccatcatttcacattaggggcagataagctgtttgttcagtttcacaggtcgacagaggtaagggaattatgtcaaggatctgcacttaatggacactctcggaagcctcattcacacctggtgtggatgttttagatgggattttaaacttttgatctgatgtggtctacatgacatttttcatgttgaactaatgctttaatgacatgaaatctggaaacctcaggggagagggtaaatgcactttgcagatgggggaatgtgagtgtcctactgtggtaaatggaatttctgaaatggtc

SEQ ID NO: 211214 - DNA, 644 bp, Homo Sapiens
ttttttttttttttatttacagtatactttattcaaagcatttcagttaaaattattttgggttcaaatacatgaacatataattatatataaaatactatagttctcaatagtttacagtgacatcttttttagaattagctgcttataatttgagtgtaaatgtattacagaaagctgctaaattgtttatatttctacttatttcaatttagctattagatatttagaacactcataagcccacctacagtatagttattatactttaaatatttatattcaataggggaatcaatacaatacaaaagatatttgaacagctagtcctttgtaacacccccccgctgctgccgagagggctagataagggggtcttacctatttcctctgtaccacactcacattttaccagagtccatatacagggccagtgtggagtcacttcatgcaaatgagatggtactttcagtttccccaaaaagatgactgcgaaatccagattacaccccaacgttatgcctcaccttggagacctattctaatgaatgtcaattagtgaatgttgactaacttgtggttagcatgactgcaaaaaaatgaggcctgcttcagtgcaatcactaaagacaggagtgaggctc

SEQ ID NO: 211215 - DNA, 786 bp, Homo Sapiens
  misc_feature (731)..(731): n is a, c, g, or t
  misc_feature (761)..(761): n is a, c, g, or t
ttttttttttttttttttagaagagacggggtttcaccatattggccaggctggtctcgaactcctgaccttgtgatccacccacctcggcctcccaaagtgctaggattacaggcgtgagccaccacacccggcctactttacctattattgttaaataatgttgtcaattatatcactgcaagttcccacagtaaaacaatcaaagattgcagttgttgaaaattccttccctgaagctagtcatattctaactgatttatggaaacttgtaactgttaatctatgtaagtgctcagtgaactatatcataaaacagtgataaaaaaatctctctaaatctacttttgagagcccataacccctacttccacatcctttctccaccttcagtaaataagatgaaatctgaacttcatatccattgtaaagtaaataatagtggaagcagaactcaacgaaaatacttgtaagtttctcagcttaaccagtcactgtctacctgcctaacattcagtcttgaatactcagttctactaccacccactctcagaagtgtttatcccttcacagcctcttctggctgtgaaggcatcagggaacttaacgcactaaattctaatcactgattttgtttgacccctgtactagcaattgcagtctgaatgtccatttttagttctttatttcctgatcctggcaatatctggtacacattaaatgttcaacanatgtttgctgaatgaataatttatgaacanataaacagtattgatccacatgttg

SEQ ID NO: 211216 - DNA, 725 bp, Homo Sapiens
ttttttttttttatttttatataatctttattttgtgacagaaaattagaattcccattttcttacttttatgacaatatgggtaaaccataagtgataataactgaaattcttggcaaagattttttctcttcctcatgtatatttaattcttccccctatagtacctacccaacaaattgtacaagtagacaattagaatgtgtgtttggtttgtcattactctgaaactgttatcaaaatgttttctttttaaaaattggacactacaaatgaagtgttccacagaaagaaagagcatacaggtacactttaatccaaaaaatacaagaaaatgtagatgagtaaattaaaatgtacaaaatcacttaaattgtctttcatattcgtttaaaattagataagcaagaactaacacttccagcaaaaggtcttaaaatgcataagtgagaactaacatctccagcaaaaggcagtattattattagcactgtccatgacagtagcataagtcgggctgactacagcacattgccacaggttagagaataaacccaaaactcagcagagcaggagttcagcccctagctgttgcaaggatgggcagcagctctgtctgaatgcttttacacacagagaagagttctatgactctgaatttccaaaaaaaatgcagacattaatagtaggtcagagacaaaaagaatcctttgaacaaagctgtg

SEQ ID NO: 211217 - DNA, 710 bp, Homo Sapiens
  misc_feature (696)..(696): n is a, c, g, or t
ttttttttttttttttttgaggttgttgggaaaaatttaatcagctacagatattttaagtaccaaaggctgcctctggagggaaaagaaaactacccctctggttctggttgacagaagtatgtattatcagattccctgtgaggctttacatcccatgtttgctggagaacagagggattctctaagagtgtagtgatttcttcagatagttccttcatcttgccttcaattatttcagaggcctcacaggcagtccccattattcccagtcatgtattcatttcagcttatttccaactcagctatccttggctctgaaaagctgtcatcactggcatcactgtatctatcactggaagacagtttgcaaccctgttgcaagtaggcattcaggttcccagttgctgcaagtaacagccccagatacggaggggaaggcttcatcggcctagaagaaaactcaggatggaactggacaccaacaaaataaggatgatttgccagttcaatgatttccatcctgtctccatcaacatcctgacctacaaaacttaagtcattctgctcaaattgtttgatcaggttagggtttacctcgaaccgatgtctgtgtctttcttctataaaaggaacatcaccataaagtttccttaatattgaattttcagttttgaaaacagttcttcttattcncagtctcattgttc

SEQ ID NO: 211218 - DNA, 847 bp, Homo Sapiens
  misc_feature (663)..(663): n is a, c, g, or t
  misc_feature (693)..(693): n is a, c, g, or t
ttttttttttttttttgtgatataagtatgaatttattgacatgaacttcctttagctattactctaacacagggtatcaaagagctgaagataatgatactaaacccacaggatctgaagtttggagggctccctctccctcagagagaaagaagagagagagagagagagagagagagagagagagagagaaatatgaacaaatcttttaaaaagaatctggagaatgccttcaactataataagaagtaatgacagtttgacaatttaagcatttttttccagaaacatatatctattccatagataccaaatcgattaccatataattgagtttgaaagtatacaaaatatttgttcttacatactgaaattaaaacctaattttaaaaagtgcacagtaaaaacagcataaggaaacctacaatatccatgacatacgtattgttttccatttactgccgacatcaacttctgtatttgcctcactggttacaaatatgttttaaatatttcaaggccgtttccaacactgactagtttactaggtccaacaatactttagcttcctgaaggcagccagcatggacgtggtctcagccctgcggctctgtgcagcaggagcaggtctggaaagaacagtcgccaaccagctatttcanaactatcgactcttgttctttttagattcnccttactggacatctttagtgtgtcaatctcttctctctgtttagataatgtctcattcatgctgcacaggtggtcactcatcatacttaactgatccctcgtactcctcttggtagttgtcagctcatcctgaagtctgctgatgttctgact

SEQ ID NO: 211219 - DNA, 773 bp, Homo Sapiens
  misc_feature (723)..(723): n is a, c, g, or t
ttttttttttttttttttggtgtctgattcactatactatatttatatttatatatatatatatatatatatacacaggtataatacaattttggtgaacaaagttgaaggtttccatatcgcagacagaggcactgagttaaggattctatttccccccaaacatgcttagcaaattcaagtttctgctttttttttcttctaatttccatcatgcagccatttggcttccatccttctaagaattattaatgttctgtatatatacatccattgcaggcttgtattccacaataacaaagtcatgtatagagaatgtgaaatgatacttgaaaaccaagatatataaaatattgaagtcatttatgccttttgatgactgggttaaatatgcaaagcagctaaaggaatatttacaccacccaccccctttttaactcacacaaagcatatgtagacagaaaaactgaacatactttaagagcacacgcttttttttcggctaagaatcacactatcatcgtagctttgcaactgatgtctgtggtaacatactggttataaaagaaatgaaactcacaaaaggaaattagaacttagcttcctaaagcatatagaattgttaaccttgacagcagaagctactttataaaaagggaaaatagcaatgctcttaatggaaaaactaggtgccagatgtgtttaacagcctgcacaaaatanatacattctatgtgaaaataatgaccccatccaccttgattttagcttgc

SEQ ID NO: 211220 - DNA, 695 bp, Homo Sapiens
ttttttttttttttttttctccttttaaacttttattgagcaatatgtcatggatgtctttcctggtcagtaaatacaggtttgtattatcgttttttaaatgagtctctagcagttcatcatatgaagactcctactttagtctgtcctctgttgatgaatttccaggttttctcttggtggtgggggtgaggagagttggaataaacaagagtgaagggaacacatctgtacatacattttgtactcatttggttttttctcatgataaatttctataagaggaactgttgaaatcagaaaagagaggtgggtggatggtggatccgtttggtttgattctgtgcaatacagacgggaccccaggagcctttgctgagctgtggttgaagggcatcaaacagtctccttttctaatgacactcccttttatagattggcccggatcctcgttcgcctgccggcactcaggctgatgagctccaacataacagaagaacttttttttactggtctcattggcaatgtttcgatagacagcataatcccctacatcctcaagatggagacagcagagtataatggccagatcaccggagccagtctatagcgcaaccacacacctgccaaggagcaacagaatccttccaggaccgttcacatacaaagaaaagtagtggtattttggtatgtgc

SEQ ID NO: 211221 - DNA, 688 bp, Homo Sapiens
ttttttttttttttttttgggtattgactttttattattagtcactgttcataatttgtttcaaccaaaagacagtacacacagcagaattctaatgcatcccatgtaaatgtttacatccattttattcctcactcgcctctaagacttatcatttaactttaaattttttttttttacatctcaaaaatatgtctgcaataattagagcttcattagctgtcccacttggaaacagctttttaatatttttacagtaaagaagatgtgatggggcataatgaaaatgtaacttacaacactaagaaagaaaagggcctttataggaacacagtgggagttcataaaggaaagagttcagaagctctttcccatggggcccccaaatggaaaacaaaaacaaaacacacaaagcgcaaccgcaggttctttgagggaagaaaaaaaaaaaaaaaaaaccaactccaaggctccatcttgaagccagaatcagcctcttggaagtctgtaaagcaactgtgcaagctgcttcggcatttccttctgttaaagtgttccaggtcctggaaccctgtcgatgggacccactcactgatattgcttgaaaaagttattcacttccagttctacaagcagccccactctcccgagccaaagctggtcaaaagtgttttaaacttcaggactt

SEQ ID NO: 211222 - DNA, 691 bp, Homo Sapiens
ttttttttttttttgtttatgggttgctctttttatttttattcaaataaatacaatacttatgtatagcctgattaatttcccttgtcatatctcttttttcaggtttcaggcttagatttttagttgtgccatgctatggtcacatcataactgttctctaagttgaaacaagtatttcaacaggcaaatagcaaactcgccaaaagacctgtgggtcacttgcccaaatgaggcctactgagatgagaacaaacatctttttttggtaaaaactctatttttatagtgtatctttggatataatgcaattgtttcttccccttctttcccaggccaggcacttgaaaataagacatttcagggatgggcaacccactccattaacatccactggactcaatttcccaagaaaattaaaacagtgtgaaagaacactgcatttagcatttggcatttcagttaatgagactgataatgactgaaatatttttgatgtgctagaagtcaattcagaaatgtaggactggagaaatttcatttgttctaaatgagtcttgcttcccctgaaattccgtctttaagcagtaacttctttagttcgaaattagtctgattaatatcacctttattgggaagaactattatcctctctgtggcttggcctctggtatctacgtatattatttaa

SEQ ID NO: 211223 - DNA, 667 bp, Homo Sapiens
ttttttttttttttttttgtgcaggttaaaaagttatttatttatttatttgcttttggaaaaactcgagtcagcttgatgaggtcactttttcctgctactccttcttatttggggagtaaagggacttccatgatctggatggatgattgtgatgaggaggttaccgggattgccctgagagaatggactgtgagctttcagggatggaagctgcatcttcatctctataatcccttgtttggcacagtgtcagcctgagaagatgcttggcgacaaatatgaattatggcacacactgttaatttcttacccatgagcagttcctttgcttgctaacagaaaatcctgattttgcttggataaacaaagtgtccagtgtcaggtgatgactcaaggttggtttaagccaggctggggccttttgttcctttttgcctgatacttgaaagagtttacagtagggactgtcctgtggtccacttctgcataatgagacataaggagaagtctgctgtgtccttctaagaagattttcttcactggttaaaggcgagagacacatcaagaaaagcccccttgacatagcttcctccatcttgttcctggagtctgaacttggtcatgatggctggagctataacagccatcctgtgatcatgaagct

SEQ ID NO: 211224 - DNA, 601 bp, Homo Sapiens
ttttttttttttttttttaggtgatatgggtattttattttcttcaagtattaaagaattgttttctgttgggggaccgccttcattcatagccaagttttcacaagcttgtagtgggctcctaactctgtcaactttttgggaaacactaaatgttttattaacattctgaatatttgaaacccttctgttgtgacttgtagaggctgaaattttcttctttttaatggtatcccaaagactcctctttttctttttctgctcttctgcatttcctagtaatatagcttggtgtttcagaacatcatttacaagaaatgtcataatctctcttactcggccttctttgagtggtgtccagttaacagaaataacaattttctctttaggctgcaacacgaaacagcgctgcgacacactgaagcccaggtccgcggccgggaagtgggagatcttcacttctgccacctcctcgttagggttgtctagggccagagacagcgtccgtgaggctcccaggagaacgtccccgaagcaaaggaaaggagacctgcagaagtggctgagagacaggaccggcgggggaagacgcctcctcctc

SEQ ID NO: 211225 - DNA, 727 bp, Homo Sapiens
  misc_feature (597)..(597): n is a, c, g, or t
  misc_feature (629)..(629): n is a, c, g, or t
ttttttttttttttttttattttttataacagctttattgaggtattattcacataccatgctttaaaaatatacaattcagtggttcttagtacattcacagagttgtgcaaacatcacatctaattccagaacattttgatcactcctcccaaactccataggcattgactttaatgtaatggcatatacatatatagaaatacatatagaaaccaattattctagcaccatttccattctttccccagggactgcaacatcatctgtcataaatcaacttttcatgtctgtgtgaatttggttttgatctccctattgagagactggtgtacagtatttgtctatccctgcacaaattattaaagcaagttttgccattctgttatccttcctcatgaatatcttgattacttttggccctaactcatcaagttccacagaaatcccaattggaatcttagttaaaattgtgttgtctatggaccagttgaagaaaactgacacatttataatactgactctgttccataaagatggtattactttctacttattttgtttaaaaatgttttaaatgaagctttataatttttnttgttatacgcatccctagatatcttacattntttgttatattccgttgtattcctgaatccttattatttaatgtcactgaaaatgtactttaaaaaaaacaacgtgtttttcttaccatttgttgctg

SEQ ID NO: 211226 - DNA, 706 bp, Homo Sapiens
  misc_feature (554)..(554): n is a, c, g, or t
  misc_feature (613)..(614): n is a, c, g, or t
  misc_feature (699)..(699): n is a, c, g, or t
ttttttttttttttttttccggtatgaagcctcttttatttgtgcctcagaatcagtctggtgcccctggcatcagggaagggggtgggaggaacagtttctctttgttcttttcttccatccctctttgtgtcccttctgagcctcactggctgagccgggaaggccagtcccagacaggcccgggacaagggtgtgcggtgggcccctgcccctggcggggtctgtgcttctctgggtgggtgaggtggggcaggggagagccgggggttagcaccattggatgaagggttttagagtcagtctccgtgtgggggcaagtgggatgtacaaccacagaggctagcagcagctggtgggaaggggtgggggtggcgccagggccctgggcgagccctttgtgtccagtctacttgggtctagtgcttaccccagcccaatatgctccccactctccgaggcaccatgagggagtcagggcttgcacaggccagggggctacgttggacacactccctgatcacaaaaaaaaaaaaaaaaaaatgtgccttggngggatgggactccaacttctggctgcccaaggagaagctggaaccaccctgagacccannacgggtgtgggggctgggggagccgggtaccccgctaagtgcacttgacgctgaattgcggggtgggggaggggctgggccctanacgtgct

SEQ ID NO: 211227 - DNA, 625 bp, Homo Sapiens
  misc_feature (21)..(21): n is a, c, g, or t
ttttttttttttttttttagnaaacaacctagtcttttatttgcccaaggccggctgttgcaagcactgaggccccaagacttccagaagggaaggggaggaggggcaaagcactgtgcctaccaggtgctgcctgccccgtcctgcttcctgcaggaggtgggaagggagagaaaacggacattcgcgccatcaagtatctccccagttttcagccactataaatattcagttgtggaggaggaaactgaggcacacgcatccccccaggcttctacttgctagtccaaggtttaacttactccctcccctcatctctacccccagcagaatgagctgtaagcagcctggggagggtctcaggagcccatctggtggcctgtggagcggggcaggccagccagggtcaagggctaggggtggggggagcaggaggggtgtggctggaggagcagctgctggcggtggggggagtcggcactcaataggggaccccagctggggttccatactgatagcagtgggggacaggcagagccctcagctgtacatacagggaaattgaggctgagaagcctccagtctttgggtagggaggggccttccttcagctactcaggtccat

SEQ ID NO: 211228 - DNA, 776 bp, Homo Sapiens
  misc_feature (669)..(669): n is a, c, g, or t
ttttttttttttttttttaggtttaccatcttttatgggcagaatttgtggtatcccaaagcaattacaatagcaacatcaaaaatcactggtcattgatcaccatgatagatatataacaatgaaatagtttgaaatattctgagaattaccaaaatgtgacataaagacatgaaatgcacacctgacgttgggaaaatggacctgatcgtcttgctcaccacagggttgccacaaaccttcagtttgtataaaacacaataactgcaatgcacaattcagcgaggtatgcctgtatctggtaaattatttcatagggagtacattgtgaacatgacaactaccctatattcctcattcaaagactttctcacaagaattatcttctccgaactctaaggtatttagtgtggctataaaacgccccacattccttacactcaaagatttctcagaagtatgaatactcagaagttgagcaaatcccaggccatgatgaaagttcttcacacattcttttatgttcacaagatttctcatcaatatgagctctctggtgttgagtaaatttttcgtacacagtgaaggcttgtccacactccttattgtcacaaaatttctaactattctgaattttctgatgttgagacagctgatcatccacagcanatgctttcccatattccttacattatagcgtttctcaccagtatgaattttaacatgttgaacaatgtttgagctacaactaaaggtcttcccacattctgtacatc

SEQ ID NO: 211229 - DNA, 706 bp, Homo Sapiens
  misc_feature (591)..(591): n is a, c, g, or t
  misc_feature (683)..(683): n is a, c, g, or t
ttttttttttttttttttgtcgaagcaggattttatttcaccattactggacatctgaaatggggaacgcaacagagagcatgcgtgatgaacgtgctgctcaggggatcagagtcaaagagttgcaagaaaatgaacaacagatgaaggacgtggtttgcagcttgatctgtttctacaggacagtggaagtgaaaggtaagacagcccttaagactcaggatttttaataaactctgatttttaataaccatggaacaatgccctgtaattagctgtaatttacggagatatggaatcttgaacataatgtgatgaaaactaaacctcagaggaagggtatagtaaaaatacaagtcataaaataatattattgctgcaaggaacttgttcctgtttgtagaaatgaatgtagacctgtatcacgctgatataatggtgggagagatttctggccggtctgtggttctgagactcatctagtttcttcaggctcagtgcttctccctctgggcacatatatcccagaaggctacatgtagtagccaagacattcccaatgtgtcctacgtgtcacgcccctgcctttanaaggttagccaaccaggtgaccttctaaggtacctttttggttttagagatggggtctcactcttttgcccaggttggactcgaactcctgngctcaagcatcctcttgccgcag

SEQ ID NO: 211230 - DNA, 654 bp, Homo Sapiens
ttttttttttttttttttcatttttaactatttattgaatgaggcagtcaaagacagaatgggaaacaacacagaatccatgctctgctactggggttttgcttttttcttcgtcttggcaacttctcaaactatttggaggttatttcaccacaaaggaacatggactttaaagtccctggacaacttcacaatgacgataaaaaataataattaaaaaaataacaaattgtagaactaggactatttatatgtaaatttccctcccctccccccattacgtacagaaaagaacatataaagaacattagatagttttatataaaacaagcaaatacaagaatctgaaacttctctcaaaggttgagcaagacgtggagaatcttttaatgtcgcattaaaaaaacacattaaatacaccatcacacacatggggagagctgggaggagggaggaggagctgtccctgtactcaaggttcagagatttggcctgttgaaaagtcaggtgaattcagctactggagactcagggcttgcagctgagaaagacagagttaacggttaccaagaacacccagatagtcaacacctctgaggaggcaagctgctcccggcctgggccacgaggttgcatcaaggaacatgggcctcc

SEQ ID NO: 211231 - DNA, 763 bp, Homo Sapiens
  misc_feature (630)..(630): n is a, c, g, or t
ttttttttttttttttttcattttaaaatacctttattgatgtattattgcactctacatcaaaactccaacagggcttttcttctagttttttcacgtatagaccgaatgttgggcatttaaatgttagtggtgtatatgccagacattttaaaacaaatactttgcagcaaatggctaataattctaagtgttctgttatggagacggtttaaaaaaaaaatcacaaaggctacttttgcattgagatttccatagtaacatttgcagtaggttggatttggtcattacatcttgcagtaacattatctactagggttatgtatccagggaaaggatcccaaaggctcagtgtgacaccacgtatcatatgcttggcaacacaaaataactaaacgaaactggcttgatagctacatgccatatgatactaataggcaaaatccttaaagttgctagtgccttttgtcactcacttagtaaatacttttgatcaacaagctatgtgccaaatactatttgagtgtactatggaatcttctaacttcaaacttatccctaatctcaagtatttattgaatgagtttggtacagaaaaataatactgaaattgaagttcaggagtcctgngtcctaaaactgactggagtcactgtagcaacctctctgggtatgcttcattagtctcttacagtctctttcaacctaaataattctacaataatcctgaaaccatcttatgtattatctcaccaactgttag

SEQ ID NO: 211232 - DNA, 757 bp, Homo Sapiens
ttttttttttttttttttggccttaaatggttctttatgtcataataatattttacaattatttagtaaaaaaagaaagcaaatggagagcggtctcttgggtacaggtgtgtatggccctttactggttctcttacttccaggcacaggaagctagggggcccctcatagctgctctccctggaaggacaccctccctggagtctcctcagttccccaatttctgaggggggggtcccaccagctatctaatgcaggattccatcaaaaaagtcatcaggcgtaactccccgttatcccactagccccggcctatatgtcccactgccctagtaagtccaaacggtaccaccaggagtggggccccctagtccccaaaaccaaaactgtgtccacggtaagaggcagctgatgacagtggggggcactcagagtgcaggtgccacccccgtggggtgaccctccaagtgtcctgctcccagctgcctctctcgcccacagatgtcatgggttacaaaccagtccccctcaggaacgagagcaccttggaatcattctgtgtttccaaaacttccctcctatggccctgcaggaaggagcctgtcatcctgatgggcagaggactcaggcccctcacaagccttcggcagaagggcaggcacacaggattggatgcaaaatccaaaacttcagtacagcagggagcaaggagcccggaagtgggcgcactggctgtgcacacgcctggacactttca

SEQ ID NO: 211233 - DNA, 758 bp, Homo Sapiens
  misc_feature (700)..(700): n is a, c, g, or t
  misc_feature (742)..(742): n is a, c, g, or t
ttttttttttttttttttaaggtagccactctttatacgtgaatgacgggaacaagggtgtgttcctcattatcgacttcctgtattaaattgtgtgaaatagtctcccgtgggttgatttgtatagacttcattcatatattttttctgcaaatgctgctccttggccaggctgaggttgctgctgtccagagctctgcgcaggtcgcgctgccgccgccactgctgccgctcaaacagcagggtggcgcgagccccctgaatcctccgccggtcccagtccaggtctcgctggcgcttttcttcctggagcctcagcttctcctggatttgctgcttctggactaggcggatctgctccagctgctcctgggtcatgcccttccagcggtcagggaccacgcggtggggcccgaaggagctggctgcctgctgcgggttctcggagagcaggtccccacgcaggaggttggtgatctcggccaagttgtcctcttgttcttgctttttctcttgctttttcctttccactgactcgatggcctggctcttgttgaagtctttcacagatgcacaaactgcctttctggtggtgctttccagcttctggaggtgcttggctgtctcgtcaaactgcagccttgtctctgtgtagagggcctctgcgcatttttgttcagcacgggcgttcttccattcnctttgctgctgcaaagacattctctgttttgttcctcttggnatttcttcctctcatg

SEQ ID NO: 211234 - DNA, 652 bp, Homo Sapiens
ttttttttttttttttttgctcaagtactatttattctgtttaccaaacatatagcagccgggcagggagtcttcatagcctgttgcgtcatgtgattccattccagatttttccttttattcctgtctccaaggccccattgtgcaggtgctactaattttcatgaaatgatactaggaggtaaagaaagttcgctggctctcaaatatccatctgtgtgcaaacagacagagtacagaaaaataagtagaataacaaagttcctagttttgtgtgggctgagagtgaaaaaaaaaaagagtaacgaggagtgaaaagaatgaagaagaaaaacagctgcacaggaaaagggcagtgtcacaggtgcctcccacggtcctttgccgaaagcctgtgggggaggccaagtggggaaaatgggggacatcgggtggacgacccaggggaccagctggtgtcagagaatggtagattaggatttggcctgctagatcatgctggcggcattggccaacatcaaacacgagggggctctggtgacaggacatgacactgcacaatcagagatcacagcgaatggctttgctgaggtgtccactttactcctgccccgatcacctccccttcctgattgttagtccttttgtttct

SEQ ID NO: 211235 - DNA, 729 bp, Homo Sapiens
ttttttttttttttttttacattagaattttttccttttattcttgttcacatcttcgaagctgagcttcgtttcaaaaggaaggataccagaggcaggaggagggtcacttgggaggggaggtggaatctccctcctctagcccccttgctacctcttaacaggcttcaaagtcagaatacagccatcagctgagagcagttcattttggcacactgggaggccggctgtgcacaccggacctctctagtgggggatcaggtcctctgctctccagtggggcctggaacagctccagtgagatgccccagctgtgggctgggggtgcagcacagagcctcagctcccccaggaccctcagctgcctgaagaaaacactcacctggctggagggaaaaagggccttgccctgaggtatcaggtgggtggcaagtcatactgagctcccgctcagcaagaaaactaaacgcacagaagacagcaggaaaatgccatcctttaacagccaaaaatctgtccttcaggggcaccaggtgactccagcccctgggggacagaacaaacacaccatacctaccatcaggcaccagacgcctcaaaacgcctggagctagggccggaaaaggcgttaagtcaccttctctcagcagaaatgtgaagctggccttcagcttctgcccaggatggcagaaacacattctgttggtggattggttgctggtgatggac

SEQ ID NO: 211236 - DNA, 732 bp, Homo Sapiens
ttttttttttttttttttcatttaaacaattttatttatttatttatttttgagacagtcttgctctgttgcccaggctggagtgcagtggcatgatctcggctcactgcaacctccgcctcccaggttgaagcaactctcccacctcagcctcccacgtagccgggaccacaggcatccaccaccacgcccagctaatttttgtatttttagtagagacgaggcttcagcatgttggccaggctggttttgaactcctgacctcaggtgatctgcctgcctcagcccttgaaagtgctgggattacaggcatgagccaccacgcccggcctaaacaattatttaataacattttcaggagcaaagaatatacacttaataaaaacaaccataaaatgccggtcttctttgatgactcccagggaattcactgtatttgaaatcatacattcatcaaatatttagttggcctgttcccggattatccatacacaaggaaatcaatgatccttcatcttcattcaaatgtgccataaaatcctctgggtccacaagtccccacgccatacttctttagagatgctaaagctgctgccttaaccctagggttatccaacaatccaagaaaattaaatgaggcgaagtttatacattcttttccattcaccacagttttgtggcttggagggcctgaacgatgttgtagttgagagcaggatggtcttttgggac

SEQ ID NO: 211237 - DNA, 612 bp, Homo Sapiens
ttttttttttttttttttcaaataatatttatttcaccctcaagcttggtttgaaatttctgtccttacgtatgcttcataatgtacctaatcattgttcgtgggttcatgcatatgcttataaatgtgcatatattggggtgcatacaaaaaaacattttatagacaggaatgtgctgaaaaaatgtaatgaattagacagtagaaagaaccaactatgtgctccaagccacacaaatgcctaagaatttggcgtttgtttgcggcacatagtttgagtgcttctcagatgttacggtgcatccagatcacctggggatcttgttaaaatgcagattctgaatcaataagcaggaggtggggcctgagatcgtgcccaagctcccagaagataaaaatgctgctggttcacaggccacactccgagtgacaagaccctaagcgtactgtgatggttagtgtcatgtgtcaacttgactgggtcacagggtgcccagatatttcatcaaacattattctgggtgtttctgtgagggtgctcttgaaatagattaacattgaaatcagtaagctaagtaaaacaggttgcattctaatggcagtaagacagat

SEQ ID NO: 211238 - DNA, 767 bp, Homo Sapiens
  misc_feature (681)..(681): n is a, c, g, or t
ttttttttttttttttttacaaaaacaaatttatctttaattatatcaagatttgtacatataaagacgggttgagtctcaggattcaccgagctccagaaattggcatcctcaagccccaatagctaataaaaaaggtaagatagtaacctatcttacctggccctaaaaactggcatcctcgagccctgacagcggcccatagattggcagacaactgctgagggttctggtgctgtaatatcagttctgttacagttctttctccaagggaacgagctgctcgcatggctcttacacgaccttcttcctccaccagttgacagtttacaagtgtcaccagtttcctttgcattggacggctcagtgcactctggttcaagctagctacacctttacctccacttagtggttttaagtagagtgccaaatcctcaacgcatttctttgcaacctcatagtgtttattctcacctagattacttaacttaattgactgatgatctggtacctgggctccaactaactggagaagtgcgaagttgacaggaagtacatcaatatctgtgttgatggcagtctggtcaaaaggacaagcttttcgatgaagtttattcaagcaggtcttgcaaacagtgtgtgaacaacctaaactgatgggtttgtgcacattctcatcanattcattatagcagattggacaggacagaaattctgtccattgagctgcctgcacaggcattgtggaagctggatgctcgggttag

SEQ ID NO: 211239 - DNA, 747 bp, Homo Sapiens
  misc_feature (665)..(665): n is a, c, g, or t
ttttttttttttttttttaactatttaaccagatttaatagtcaattgattaataataatagattccaagttaaacaaggcatgtatacattaaagaaagcagtacagaaatgtactgtatatgaactgtttacaaaaacatacaaaatgttggatggcacaagggatacagtgctaatataaacggattgtttaagctaagtgcttaacataaactgtccatccctataactaacaaagaatatttaagggacatgaaatatttcctataaaaataatgctatatggtgtactttattcagtgtatttttaggtggtattcatatgttcattatttttctcattgattcagtgactatatcttcatcatgtttccattttcatttcttccgaagctccaggaaaatctaacttgctaacaatcatttaaagcgagaagagaggaaagcaggagcagcagcaggaacagcagcattatgggtaccagctgggacagtgtgtgcttgcaggtgtctctcagatacgtgctacctgtcgccagaacttgtgctatcagcttacaccatggtaccaaatatctcactgaggtcacttcacagggctgttgaggtgatttttttaatacctctccgctgagcaagagtagagcggcctactggttccanaactggtgactgattacggttcaaagcagaatatgtagctgccatggcaccctttactagatgtggtgcatcctgtctgttt

SEQ ID NO: 211240 - DNA, 628 bp, Homo Sapiens
ttttttttttttttttttcacactgagactgcatgtttatttggcataatgctagaaaaaagtccgcaaagaactgccagaaccaggcctgtgaccaagtttacagtcatctagtttctctcacaatttcaaaatgtcagatcagaagaatctttggcgattaatccactctccattttatgcgtgagaaaaccaaggccctgatggtgtccctggtccaagtccagtgcctttcacaatgaggcttttggctcttaccctctgaagtggggcagtggctcactgtgaggggagagggtcagatcttgttagtttgatcttaaggcactcacaaaatgccctgatttttcttgtctttgtgagaagacaaaaaacagtctggtagtttttcacatcatcgtgggaacccagaaatatatgtacagtactcagaatttaagggaatggaagaaagaagaaaatgagattctcttttgtgagtacagaattagaagaaaaaaaaaaagaggggtgggcagtgccagaggcgaacgggcacaggtcattactgcgtgtgtggctgagctacaagtctcctggaatgtaaacaatgttggtttatttccaatttcatctaatccctcgtgcc

SEQ ID NO: 211241 - DNA, 704 bp, Homo Sapiens
  misc_feature (633)..(633): n is a, c, g, or t
ttttttttttttttttttatgctaaaaattcaagattttattagaccactggtagattttagggagaggagtgacaggatctgattttaagaagatggctctggtgtgtgtacacaaagtggggctgtgagattgaatatggggatcggacagcagctcttataacagtccctacagcaccaaggccaagcgcacaggctgagcagagtgaagacagtgaaggaccccaggggcccgctggacacagaaagtgacagaggagtttgggggatccagttccggagaggtgctgggaactggagaaaacgctggcgtttatttactgtgctccacttctctcttttttgagggaagtgccaagaggtgagagaggaaggtgtgcagacagcaagatgaccaatggggccctgcagattctggggaacaccctgggcagaggatggcagtgagaagggaactcttgtgtggcagatggccaactcgcccatctcatgtcatcctaacaaccctaagaagtaactgctactaggatctcaatgttacaaacgagggagaaggcaaagaggttcttggccaaggtagcacaaacaatgagaaaaaatgtcagaaagcaactagcaatacagaacctanagccggagaggtgctgggaactggagaaaacgctggcgtttatttactgtgctccacttctctcttttttg

SEQ ID NO: 211242 - DNA, 602 bp, Homo Sapiens
ttttttttttttttttttctgattcaggatgttcactcctgtgttatttattatatagaaagatcaaggggactggttaaactagacatatcacatccagccgctgctaaaaactaaagggaaatagtaggtgacaaaagcaggggtcctgaacagtggtgggctcaggggattggagttttttcctttatgtttttctgtattttccacaatccatgcttttcattgccattccatcagatgatgttaaggaggaacacagatccagtcacctgaggggatacttcctcactgccaccttctcagggtttagaccaacatgtgggttctagttcccccagccccaaagctgttccctgcaaggaagagatcagtctttgagcaaattttggctcaagactgaagacacagaaggcgaggctcctgcacgcacagcacacggccatctgatcctgtgctgcagtggacgctgactttcgccacgccgtcctctctggcccagcaccggcctcctggcctcagaggagcagacactcccagtcccagggctctcagggtctcttgtccctgggtccattctgggacaggaacttctcgatgga

SEQ ID NO: 211243 - DNA, 712 bp, Homo Sapiens
ttttttttttttttttttggtatagattttattatggatgaaatttgatccccggttagtattccacacaaatttttaaaaaggcatcttggtgtttgctttcttctgctctaagtaggctccttacatttttcttgaattaatttgcaaagtatatgtttatctataagttagtattaagatagaaaaatgataaatacaaaatagtagaggtacataatctgaaagaacattaagacatgtctcccacaccataacagtggtataaaacatgaaggtgacgcctgataggatccacaataaagtaagaaaatgtctgttcatgattctttgctgaaggatagcacataccagcagaatcataagctgaaactttaaagacagaagaggtaatctgtattttcttggtttgaggattctttcgaacactcaccagatccttatagataagctttgttgtttccagatatgggctaatcacatcctcatattgacaaagggctccaccaaggcaaagatgtttgaaaagacaaaacaggaactcttctctatctggttggctgaatatttcatattttctgagtcttccactagcaaaatcttcgtaactcatcagaaatgagaaatggattacaaaaagaatctaaacatttaacaatatgtccactgtctcgtacaatatcttcatcatataaccgatgaaaaatgacat

SEQ ID NO: 211244 - DNA, 741 bp, Homo Sapiens
ttttttttttttttttttagttctaattatgtttaatattggtttgctgctttattgaataatctacatttgcttttaaaaaaaggaaattcacttaactgcatgtcagtcacccaagttttaagtgtacaaatgaaatggaaaacatttattacacaaatttaattacaattctaagaaataaacatgcaaattagatagagttcaatttgcagatgctaatcctcatccttgatcttgttccttcctcccttgattttcagtctgtgcgtcttcttgattcctagggagccaggcagccagaggtctggtttttcacagtcggaggatcactcctcggcgggctgaggctgctgcccgcctggtccacgcctccgcctctctcttcccttcctcccctcccgcctcttcggccctagcaactttccgagtgcccagctgtggtcgcagaagcagggaataggcgtcctcgccgccaggtcccacgggcgcagggcgctcccgcaaccgcgggcttccagcgggtttggccggcaagggagggagggaaggccgggccgacatctgctgcgggctggagcgcgggggcccgggccagccccgccagagccctgccagccgctgtgagtcatttccttggaatcctacctttggtgtttatttcccttagaaggaaacttggttttttttacaaaaaaaaaaaggatacgacactaagaataataatagctcttattcttc

SEQ ID NO: 211245 - DNA, 695 bp, Homo Sapiens
  misc_feature (587)..(587): n is a, c, g, or t
  misc_feature (672)..(672): n is a, c, g, or t
  misc_feature (677)..(677): n is a, c, g, or t
ttttttttttttttttttaggattgaataacaaggctttaatggctcaattttcttatgattatacaaacatataaatcttgaaaaggtaacgccatttagtaaaatccataaaaataacagttttgccacagtgcagagaaaagttcattcagtttgattccccatgccctcgacaagcagctttctgattagagctggaagacacaggctgggtgcagtggcgaccccgtagtcccagctactggggaggctgaggtggaaggatcacttgagcccaggagtttccgaacagtctgggcaacataccaagaccctgtctctttttttaaaattggaagacataaagtctatacattctacactgaatcatgaatatactacggagagtttgtagaaagtaaactttaaaatcccacactccaacatcatatatgtccataagcaggatttgcaattcacttcatactggaggtaagcaccccagctggggtcctcttgccgcagtggtcaggccgtcagagctgaggcctttcactgcaacaagggaagtagtcttcggtccgaaacaggacgggggcttcgtanccggcttgctgtggcctcgagggagcagacttgctaaagagcgagggcacgttcatcgtgtgcaggagcttcttgaacgccctgnggaangtgcccagctcggcctcg

SEQ ID NO: 211246 - DNA, 752 bp, Homo Sapiens
  misc_feature (721)..(721): n is a, c, g, or t
ttttttttttttttttttggtataaatactttattaaagaaatattgtcattttcgttaaaaaatacattagagaagagagttttgggttaccagtctttcctcacagaatcacagtgtaagatattcatttcttgacgtctctaggaaccttcaggccacggatcagcagaacatacacgaacaagggaaaaaaattcctcttaattttactgatggccccccgtctctcaggtggtctgagagtggcacttggtaaacagtgtgtgtttaatccagcctctgcctctgactacctttaagaccaggactcgaagcagagtgagaggcctccctccacccacctcggggcgagtgaagacacagcttacagaggcgttcaaagtagtgacgcagtgaggtctgaatgaacacggaggattttattactcaccattaatggtagtgaaatgcccttcggtggataccatcaggtgaggtagggaagacattccagaggaaatctgttaatggggcaacgtttttatttctgtacatttacatacaaattttccccaaaggtacaacagatgcgacaccatgcagacacgcagctgtgaacgacagttcagaactcagcgtaagcttgtgctatgaacgagcaccgtcagagaatcgcacccacacgtacagaacacagtttttatattacaacctcaaggacagagggagggaagtgttcngcgctagacatgacacaccatactgcttttc

SEQ ID NO: 211247 - DNA, 759 bp, Homo Sapiens
  misc_feature (630)..(630): n is a, c, g, or t
tttttttttttttttttgtgtttaaatttaaatggtatgtgtacttgcttcacattgtctttctaggttggcgttcatgattcaagtatttcaagagtgatatgttctctttttggattcatattccaaacgaaaaaactgaagttataagggaggcaactatgtgctcagacagtctgtcaatgacccacctttttttctctccgttttcttttttccttttaaaaatgtatttattgcaagttgaaaaaaaaaacgaaaaggtcaagttagtgctgctgctgttccaaaaaaggtcacgaggtcagagttgaaagttctaagttcagattgaatccgaccctcctcccagaaggtcaccaggtagtaaaggagcagggctgcccatcctatggggatcttccaccgttgggactccccataagctagaagaatagtttgggggcccccacaatgaagcgccagcaagatcggccccgctgctgccaccagcgctgctgctccactgcccgagcccagtggacccaccaaaaagattcagagcaggtcccacgggatctgactggttctggccggtctccagcgactgccaccccgcagctggcgcacttggggttgctgcaggtgtanggggctgagcttgtgccaaaaagcggctgacttcatcatcagtggcaactcagcaaggatggtagtgtttcccaacacacacatgtgcagtgcagtttgggcctttggcgctcctgtttggtgctgtat

SEQ ID NO: 211248 - DNA, 745 bp, Homo Sapiens
  misc_feature (636)..(636): n is a, c, g, or t
  misc_feature (696)..(696): n is a, c, g, or t
  misc_feature (728)..(728): n is a, c, g, or t
ttttttttttttttttttatttttataacattttatataactcataaaacagtgtttgtataaaaattcacacaaagttgctagagagcatacaatttccaaaaatgtcctgggtttttgttacattcagtttcctaaggatgcactccaatctatggtaaaatgcagacatgatgcgagatttcattatctttggtaaaactattctcattattttgtctcctcacagtattaagtctgatatccactttgtgcagggtctgctattactaggatgtcagaaaaacattaaggctggatctacgagaggcaagtatttcccaacagcagtaatagccccttggccctcacccccacttcatgtatctatacagtcgatctacacagccaggcggggtgcaagctcacgacctccactcgggagtctcgagatcccctcttgactgggaaagaagcaaacatttgtggggaacgttggaaacggaggccatctctaaatgaacccagtggtcatgctgtggtgtggtcagaccagcaacttttaccaattaaatagccaatctattcaccactaagtagatcccattggttggttggttgatgattgctgctgatgtggttccccactccccacanacataaaaggaaaggaaggtttggagccaacaccgaaaggggaggggcacgctagcgcanatgacaccagacacgactttattccctgtcanacatttgttgtcctgta

SEQ ID NO: 211249 - DNA, 664 bp, Homo Sapiens
ttttttttttttttttttcatttgtatcatattcatttattctcaatacctgggacatttaaggcattcaataatgaattaaagctgtgccttattttggtctgcattaaaggagtggtctaaattttacaagatatattttgcatcagaaaatcaaacttcagcagtttaacatgctggcatccatcaccaaggcatgaagcaacacatttgctaatgattcctaatcactacagtgctacatcatttacttaataaatactgattcagtacttatatatacagatagtctgatggatgagtaaccacagtgatgttgttcaggacatgatgtaaagttgaaaggtgcatattgctatgttttaaaggctgcctttacagtagaagcagcaaagtgtgcttaatggactgctgtcctctgatgaccaagcaaatgcaacaaatgaaatatgcacaaggctgtccttggacagtacttgtttgctttgctcacaaaggagaaaaggaaagaaacaattgaaaatatgtatatggtgaaagtatgtgagtccgagcagaaataacaaaggcaaaaggatgaggagagatggagtaagtctagagaagaaaataaatggatgagatagagagctgtctaagcaaaaaaggtgtcagacctctgatc

SEQ ID NO: 211250 - DNA, 633 bp, Homo Sapiens
ttttttttttttttttttgcaaatcagcagatttattgaggcagcagcggcagtggggagcaggggtgtggggagggggcggggcctccccagggtccatgaagtgctggcctttcccaggcatgcagtgtgcgcagccggagggggatgcgcagggactgcgctgtgggcgccgatggtcagccatggtcagtctgtccgcagccagctgcccttctcctccacctccttggtcactaccagcagcacctcgcacaggccctgggccagcgcagccgccaggaaggccctgactccgtcctcatcccccagggcctcgggcgcccgcagcttggagtccaggttgtagtagacaccgtccacctggcgcagggccacccagtgccgccggcgcagcggcagtgacagcagccccagcgacacgggcgagggcaggttcaggatcagccccagtacctggggcagggccagctgggacaggggcctcctcctgtcccaccacacggcggccaggcccagcccctgcagagcggccatgatcacattgacatcatagttgccggtgcccaggaggctgcgatgagggttcagccgggagtctggggccaacctcttgcagatctccctcgtgcc

SEQ ID NO: 211251 - DNA, 700 bp, Homo Sapiens
  misc_feature (463)..(463): n is a, c, g, or t
ttttttttttttttttttctctaaattttttatatttatttattgcagaaaaatatacaaagatatttacaaaacaatcataaaaatatgaatgcatttagacaccggatctatttgcattttaccatgggtcctcaataaataaatagaatgttgttttttgtattttaagtttttttttgtttttcccctcagaggaaggatgaaaaaaagaattaactgactatggttttgcaggccagtttgatcccagtatttttatttctaaaggtgttcttatagttcctctgattgttaccattttaaaatagagaaagtccatagtgatgcctttcctttcagtggctgattggcacgacctcttgagaatgcatgcatgaaaaaaataaaaataaaaacattcttcgtcaaaaaaaaaaaaaaaaaaacacaaacaactgttcagacttctatcagaatgcanaggtgtgaggatggtgccgctgcccgtctgggaatcactgtccacgggcctgtctcgctttctcttttaaaagtgcgccccacgccctgtttctttgaatttggattttgctcttctaatttccaagaaaatctttggcatatatttttatttttagttatccagctccagagtctctagactgtccattttctccttctctggaaacaatgacatctaggtctccggccctgctga

SEQ ID NO: 211252 - DNA, 706 bp, Homo Sapiens
  misc_feature (625)..(625): n is a, c, g, or t
ttttttttttttttttttgttgaaataacaattatttaattttaattaatataaataattcagtaggtctggggtgaggcctgaggttttacatttccaacaagctgccaggtaaagccaatacatctgtccaggaatcacactttgcgtatcaaaggtctagatgacattatcattccaaagagtttcttttacaggctctcagatcagtgttcatccactacctgactactgtcattcataggcattctgttccacagcaggccagctaacgtggtatttacaaagctcactcctcttatacaacaatccaagtgtttcttttgtcagttgtctgtgccccaggagatccctctctgccttgccttgccctctgcctttggagaccagcacctcatactcagtgaaggcctggagtgcttaagagggatttcttccagctctcttgccctggtcttcagtgtattagatgtattacctccatgctctcagtagaggcccataggaaagagtaggtaggttatgccagctcacacgcatcctttaaaaatggtttagaagtttagctggtttcttattactcctgtctatggatgtttccttctgtcactctactagggatganacagctaatcatgttcaatagttacatttagattggtttttaaaaactatgattgtattagttcgtttccatgctgctgat

SEQ ID NO: 211253 - DNA, 779 bp, Homo Sapiens
  misc_feature (660)..(660): n is a, c, g, or t
ttttttttttttttttttcccgattgtgtcataaaatattttattggaaaaaaagtcaccgtcttcgcaagagggggtaggggccccagcgacatcggggacccggcctccaggccgagccgacgggttgccccggggcaatctcaggccgttgtggcctgagcccaaccgctgggtccccgacgtccaaaagcgggtgtgtgcctggaggctccccggccgggagggcaggccccagacggggtgggggtgcaggcgaggagcggggcgtgaatacgcgtggagcgctctgcgccacggagctcagggtagagactgtagcttccgccgggctggatgcgagtctcccaggttagagcccagaagcgcgctgggacctgggtctggcttttgggtctgtgtccttcctcgtttggccccaattgtccgcattcaagatcataataaaaaggcttaggaagtaaacttcttggacgcggaagggccggctcgcgggtttccgccgagtgagggggctgcgggtggcgcgggcatcccaggccccgcaccgtataccgccctcagtcctcgcggctcctgtcgctgggctcgcccggcacctccgccggtttctctgcatccttggcgcgctcctgctcagtaagctgctcgctcgttggnattgagttcttcttgggccgccccttgggcttggtgggagactccaggccgccgccctgcagcactattttcttccacttcatcctccgattctggtaccacgtcttcacctgcaactg

SEQ ID NO: 211254 - DNA, 729 bp, Homo Sapiens
  misc_feature (631)..(631): n is a, c, g, or t
  misc_feature (650)..(650): n is a, c, g, or t
ttttttttttttttttttccagttcttcacaatttattcattttttttaatcacacaccatatggtttcaatgcatttttttattcaattcaaaagaatttaacaagttaacttttcctaaacaaaagttttcatgtgtattctaccatttttaggagctcagtaaatataaacattgtttcaatacaaaacctttaaaaataccttgaaaatgtttaaacagttgtattttgcatgtctttgtttgtaatcactgagcccatacaaatccttgcactactaacagtcacaagcttgaacctcttaaaaaatatcctcgatcaaagctttggaatccagtaaaaattaggaaacgagtgggcttcagaataccctgagcacaaactagtgcaacaccacatgttcgaacttctgtccacaaagaggggtgacagtgaaatagaaaaagggggagataaagaacaagtaaattctggctttattacacaagcacgaaaccaaattcctttggaaaaataatgtcttcggaggacttccagaccagtgaggtagagtccaacagtgagaaaacggatctgcccctaaggtcctggagacgtctcaatcggtggtcaggaagaaagggacctcncctgcgggtccagctgtcncctccctccgcaggccgggtacgggaggcagcagagggcacacctgccccagcgtccaagacgaccgcgccgcgggccg

SEQ ID NO: 211255 - DNA, 657 bp, Homo Sapiens
ttttttttttttttttttcctgtttacatgtgtttaatgctttgaattttccaattcctattaacattcattctctcatcaaaccctcacaacatccctgtgaggtaggtcaggcaataagtggtttgcccacagccacaccagtgatagggacggagtaaacccatactgcaggtttcccagcccccaagctgatgcacctttcatttcatgttacacaggatctttgtgccaaccagacacaggagcatcaagagcactaccagaagcctccctgctctctgagcttgcagaggggacccagaaatgctgggcttgaggcatcaagaccaggggtgccccctgtaggccaagccaggtaaacagaaggaagggcaggagtactggaagttcaggctcaacagccacccctgccaccaccataggtctcagcctagcatacactgtgttccctacatatcttgacctttgtcaggtgcaagtcttattagtttactgagaggactcagtgcccactcccagacgagaagtcactgcaaggcgtggctagcagcaagattcctgacttccttcccacagtgccttcccattctgttacactctgcagcccaggaaggagggggaaggtgagggctgactgactcagcctgcaagtgc

SEQ ID NO: 211256 - DNA, 646 bp, Homo Sapiens
ttttttttttttttttttcagcagcacaaatcccttttattaaccatcttccctttctcgagtatacacaagtagaaaagaaacagtgaagtaccccgatagggagggtggggagaggatgggagggggctcctgaggttaggacaagaggccagattccagctccttctcctgactggtctgtctctgtgcaatgactccacttacatcccttgacccccgaaacacggcactgggggactgcagccctgctgaccaggctgtcctcctagccctgtcagggactggtgctggcagagcttggtgctgtgccacagactgacagaaaacagcacagtgggtctggccccgggggcagagaagatcaggcaccaagaggggatgtgagaaaaggcagtttatccatctggggactggacagaggcccagccagcctccaaccagcttctgcttcttagatcggactgccctgagtggcgggcggctcggcagggggtccctctcgtaccctttacagaggttttggggaagaggggacaaggaaatgctaggggctccaggtggaggaggaagtctgattggtgcctgggattggccaaagtgagagggggcagctgaggggctgaggtggtcaaaacgggaatat

SEQ ID NO: 211257 - DNA, 600 bp, Homo Sapiens
ttttttttttttttttttatgtctatatttatttatttataaattatttggatccagtactataataacaattacacacattgtaactcctacacaatttgaaattttcaagttaagacaaaggtaactatatatagaagcagtatgttttctgaacccttacagattgttttgcacactcctggattacacacatctcatcaatctcaagaataaaatcaaagtctttggcttgacagccttccacaatctgacctctgttttctcgccagcctcatctcctgtcattcacaacatttccagcattccaaccagtctgaacttttgcagtttcccacgtgcgctaggctctttcttcatcagcatctctatgcatgctgtctcctgctactggaatgccctcattctcgttgcttcctgttttgaagaaaagctgtgataccggcaacagtgtttaagtatcacacgggtagttaaaaggcaagttggtcctatctgacatgtggaaatggccagctcaagttagaaggcagtacctggtgaaaccttgtcaccacatcgaatgattttgaacacttcccatcaatcgactaccgacta

SEQ ID NO: 211258 - DNA, 727 bp, Homo Sapiens
ttttttttttttttttttgtattgaaatatgattttttaatttagggcttgaaaatcttacgaaagttgttttaagtcatcgaataattctatctggacagtgacattgcaaaactaataaaatgaaaacactagaaatattatttggaggtgcagggagatgaggcacattttggggcaaaggtagagaaaatgtagtatttggatagttagatgttttacttagatttttgtttcattagcaactaatggttgaggtgtctatttatttaatgaagtagaggtgtatttcatttaatacaaagaaagcttctccccctccccaagcaatgtagaaattggaacaaagatacaccaaagccctgttaggacattttccacaggattaaaaacaaatcccaaactgtacaatgctgtaagagagagacattacactatgtaagtgtgactagataaaagtatttcaaggaaactttccgttgctttggaagaattccctcttttgtgcagagaaatcaagagaatttaaaaaaaagagggaatataatacaatagcattatagaagagaataacacacgttcacttggattggtgtcttcgtctttcacttcttcaccttaagaaatgtagtgcaggagtggctgaattccaggacggggcaagaataaagtgcagtgtagatttgttcacgacaggagatttcaaaagtcagaattactaagcctg

SEQ ID NO: 211259 - DNA, 771 bp, Homo Sapiens
  misc_feature (684)..(684): n is a, c, g, or t
ttttttttttttttttttgcttaatttgctctttatttagatttaaaatacatctttcatacattgtttaaaaggaaaaaggaatcatgtcaaaatgtttcaggaaatgatttaagttagatataaagaacatagttctgattttgaagtgttagtggaactcaaacagaaatgattagtgctctcttaagatcatgacatgattcttaaagtggctatttcagagcctagaaataacactgtattactgactaatgtctacagagtactgcaaaagatgctgaatagaaaagcaggtggtgtgaaaattttaatttttaaatagcaaagcccctgtctgggtattgtcagtaactttcagaaatcctagagaaaatgatgattaggtcaacacaaggaaaacagcgattaacagaataggaattgcaaagagcttcagccaatggaaaaagaagcaaggcttctgaagtctcccgaccactcgtgtctgcatgggtttcaacgaccggtcccactgggtcagtatggcatttctggctcctggccactgccctgggcccaccagcctaaactggtagggactacaagggccaaaataaacttccatggccaatttgggatctgtgagaaacagccatgggatgttgggctttgccccaatgaaggaggagagttcatccatantaacaatgtaatctgtctgtatggtctcgcttttgccaaaccatttgcgctttttctccattttctcattaatatcattcatcatgt

SEQ ID NO: 211260 - DNA, 742 bp, Homo Sapiens
ttttttttttttttttttatatatatagataaaaaactatatttatatacacacatacatagagatccttcaaccaagaagaggcaaaggatccagggtcctctgtggtgccccttggcctggcacaggaaagccaggaggcaccagctgtcttgggaatcatctcgggaaatgcagtgctgagctagtgtgccatggatggggggtctccaacagcccactccttccgaggaaggtggagctatgatgaaccagggcagccctcacccgagctttccacacatcctgaaatgcaagctgtacctgatggagctttgaaactaaaacccaaagtgcagatacaaaaggatcccctgataggcctgggggactgactccttggggaagagttccaagagcatcatgcagcaggggccggggaagccagtagggaggacatacacccacagcccccaggcccggaagacaggtgtcatggacacagaggcctgctcagccacaggagaggggctgggctctgtcccctcctcaggtctctctcaggcaggggaagccaaaaggccagggtgaggctcgaatcaaggcaaaaaaagggctgtgggtggtgagatgtactggggacagtcctagaaactgcctacctccatgttggtggccctcaagggacctgcattgtagcctaagacctgcaggagtaatgtgttgactcagggtattagaaaggactggatctggcaacaca

SEQ ID NO: 211261 - DNA, 687 bp, Homo Sapiens
ttttttttttttttttttaactagcaaagtttctattatactttcttcccttttccattcatatggtcaaatggtcttcttgcttgttttttttctaaaagacagttttataaatactctgcagctcttttttctttaacttttaaacatataattaatttaataactttgtaaaaggaacttctctcttttaaataaagggctatataaccacacaaataggtcatgtaaacagtgacacgggacccatcgcagggcacactggacccaccctcacgttaagcgcacaaccagcgatttggtcttgttcagtgcaacgggtcaggcctgagtgcacagcccctgggcccagctgcacgcccccagcaccactgcgcccaggctggtggtccacccatcagggccttcaagcccgccctactctcagagcagagcccatctcttcatgctgggctaagctgagctgctcccctggggctaaagagagtgaatccttcccagcccgcgagcctgtggccactcgggagtggagggaacactgggaccctcactgctcggggacacgcgaggcccagcgtgcctgctccttctctctcccgcaactctctctagtccgttcccacagcaccaactctggactccaagcctgcatggccctggtacaaaaggggttggggcgacccacgt

SEQ ID NO: 211262 - DNA, 686 bp, Homo Sapiens
ttttttttttttttttttaatagttacaaatttaataaaatttgccttataaattacagcagcagccccagggctcagttcgctgccccaagaagcaacagttgggcaaagctgggcagctattgctggagagagttgtctcaagagttcagggctgtagaggtggccagggaccagcatcacctcctccaggacggccacaggacagcagcaggggccaggcagaggctcatgggccagtgggtgcacaaggaacaggagtgggggctgaggccaggccctgtgggctgccgagcgcccctgcccactgctttcctcagtccagactggccatgagcaggtgcagctcgcggaaggtactgccatggcggccgctcaggcctgacttgctcttgaccaggccgctgatgctcttaagctgcttgtagcagagccggcacttatgcagcctctcctccctgctgatatccacacccacagagggtggggccgccagcatgtctgtgatgaggggcagaaaccgctgcaggatcagcttcagggaggtgcagcccgtctggacgtagctctcatacttgctctgcagaagcttctcaatctgtggcaggacggtggtgcacaggtccagcttccacagggagctaggagaggccaggacatgctgccatcagcccagccctgcccct

SEQ ID NO: 211263 - DNA, 501 bp, Homo Sapiens
ttttttttttttttttttcacaatgctactccataaaatcagggaaaaaacagtaaaatcaaatcagacacaaacggcaaccataaatacatagaaaaacaggaacaagatagaatcgttgagagtttggaataggactgggtgttgtttggcagagtagatagctttggaaacagtgaaatatgtatgcctgccaaagatggggttcagaattgccccttgggagggggacaccaaaggcatactcctcctcccaaatttaagaagggggtttccagagttccaagagcccctgctgtgaaaattctgcggtctgcacccctcgaggcagtgactgcctttgtgcgtggtcacgtttcggtttcatttagactgagcttggaagtgactgttcaaatggcacagtttaggtccaaataggggctgggtgggggtgtgtctgccctggggatttgaaaggtatagtaccttctctcctggttcagagacaaccctcgtgcc

SEQ ID NO: 211264 - DNA, 727 bp, Homo Sapiens
  misc_feature (705)..(705): n is a, c, g, or t
ttttttttttttttttttcttttttctaaaatatatatatatatatatatttatgtatttaattttgctgtactagcgacacccacaaccctccacaaccatgtcctgatagttctttaatacaaccttttcattctcgtcaaggtacagcatcgagatagcactgagttctgtcgggacacagcatgccttaggaatcttagagttaacagagttgaccaacgtctgaacaatggcatgattagtggagttcagatgatcagccagaggaaaagggcattctccgtggcagtaaaaggcgtgataccccgggggagccacaatccagtcattccaccccacgtcactgaagtccacgtacaaagggtgtctcttacagctggacttaaggcgtttccgctgtttgtgtttggcttgacgtttttctcttttgtggagaggatgcccttttccatcatggccaaaagttactagcaatggccttatctgtgaccagctgtgttcatcttggtgcaaagacctgcttatcctaacatgtctcttggagacaccttgtttctcctccaagtgggccacttccaccacgaatccatggttggcgtgtccctgtgcagtccaccgcatcacagcgggggtgacatcaaaactttcccacctgcttgcattctgattcaccaacctggtgtccacaagactggtcacggngaatttcgagttggctgttgca

SEQ ID NO: 211265 - DNA, 700 bp, Homo Sapiens
ttttttttttttttttttaaaaagagggtggtttgagtgtaacaatactgattcaaaactgaaatggaagacagtttctccctagaatactttagggtttttcagagtccttttccataaaaggaatataattgaaacacatctcagttaggtgagatgagattgctaaaatacatacagaactaaaaaaacagccaaaacaaagtcagtttaatctcttcaactcctattgatttccgttggttgcagtctttttttcctaaagcctattgcataactgcaaggaatttgctttcttccgctagggaggtcagcaaagaactcatgtccccgatagccatgttggtggtgctcatggacagcgctgggaatgggagggacgcccgaggcgtggtgaggcgggaggagctatgggaaaggttctgaatgatacttgggctcagggcccccgacatcaggctggagtggtccccatcgtctatgatggcatcgaagtcaatctgtaccccttccaggtcatggctgtcgaggctgtccactgtgcttgtcacctgattagcacctggggaaagtaactcagagtttttggcgctggtcccctgtagcaggcagctggcgtctgaaatagagaatgaaccagctttcgtgtcttgctgactgaagccacggtttggtcatagaactcctcgtgccgaattct

SEQ ID NO: 211266 - DNA, 791 bp, Homo Sapiens
ttttttttttttttttttaaagttcaaaatgtttatttcaggacttttcagaacctttaatatgttttgccttctgaatccctgggagggaaacaacgtaatgtacagcaaactaatttcaccaagaactctttcccccataaaacatcatgtgtcccactgtatatacttcaggaaatgtgctattatttcacccaaacaggtgaatttatcagagtccccaaaagaaatagaaggctatttcaagtggggacatttgagaagagtgtaataaaacaactacagtatttacaaatgtatgagcagggtttaggtaaagcaacaagttgtagtgaactatactggggctagtaataactgtaagctattaccaaccctaagtgaaaaggggtaaagggagggagcaggaactaaacctagtgaggtaactggggtaactgcttgggaacagaagagataggattcctgataaggtactatttagtagaggaacacagccaactgatgatgacatggcaggaaaggagccagggaaataaataacatcatttcattttcctctcaacttctaatctcccactggtgcttcccatttgttgaacccaaccaaaagcaagagagcaaaggaacctacctcacagagcagggagcagaatagaaaagagcagacagaagctattcagcacagtagggctctattcacaagcagctaggtctaggtaaataaatgatgtcatcaggactcagtctctctttttctctccactctgctttccttcgctgactcattc

SEQ ID NO: 211267 - DNA, 557 bp, Homo Sapiens
ttttttttttttttttttcagagttcccgggtcccttccgcctgggttcacgttcacgtttattcaaacaacagagccgactcgggcgaggtctgggagcggcgggcgggcggtgtcgcctcctgggctctgctgacccctggtggtggggtcggcccaggctgggacctagcccggcccccctcggccgctgctgaccgccatcccccacaccgccttctggagcccgcagagggaggcaggggcgtccccggggacagctcaggcggccacagttgggggcggggagcatcagcctgtgcggagctgggagcctgggaagcaggaggccagagggtggccccttcggttaagtgtctggggagcggcccgggagcccagaggggtcgtcgggggaagcgcggggcacgtgctcgcaggtgatgaggtgggtgggcagcgcctgggtgtcgtggaagatgacgaagatgctgggctggcagatgcagtccacggcgctgtcgtagcgcagaagcacgtggccaggaccccgcagagggggcgcccgcagaccgcgg

SEQ ID NO: 211268 - DNA, 729 bp, Homo Sapiens
ttttttttttttttttttaaataaataagctgtattatctgtacaaaaaatacaaatacagttttgtgttttagaggagaaagtgcctccttccacattagccagcagccttcattgtcttgtggtgctgctgagttgcaattcacagaacaaacattaaatgtacattcatttcatgcaacgagcattctgcttcccacccaaacctaggttctgccagctcactgagacccactgccaactgctccaacccaacatggagctggaggatgcttgctctttaggaaatgtaaatagtgaccactgattttcaatcactatcgaactagaaataattaaccacattagtagtagtatggaatttgtctgtctttatcattccatgcataactattatgccacaaatgaattccctcttactgcctcagcatcccatgttagtttttacaacacatcctgtacagtgaatggatccagagttaaacaccaggttctattaaaaataggaaaaatataataatcactactgagtttacaggaacacaactgcaggaagttagttaataaagtccccccaatagttttgtttctggatgacaatgtacaattattaatattgcacttttttaataagaaatcctaataaatattcacaaaagatatacagacatagaaaaattcttttttattttaaacagactttacactgattttttagtaacatgattt

SEQ ID NO: 211269 - DNA, 699 bp, Homo Sapiens
ttttttttttttttttttgtagagacagggttttgtcatgttacccaggctggtctcgagctcctgagaccaagcgatctgcctgtttaggcccaaagtgctgggattacaggtgtgagcccatgcccagctgattttttttttaagcaaacaaatttgacttcataaattgggtgggatactgttgggttttgtgttacagtgaaaagaagactttggaataggtctaaaccactaaattgtgtgattttgcttactctctctgagatttaaagttcttccatgcacattggaggatgggggttgtatctgtgtttgagaggattggaaacctgtgtgttgcttctgtagcgttggtgagtgcctcacctggtcagatctcagtgaatggtagtgattttagagagacacaaagtccaggggcagcataccagtcatgtgggggtaccacggggtcagaagtgttatttgtccagtcgaggctatctttgctcacactgcagaaagcttggagacatttctggttcttgaccttgtactctctttagtgacagctccattctattctcatgcttacagtatttgaactctggcctttactggaaaagttgatttgatgaaatgaggcatttttacttttgttgactgactagtcactccatggaatgaagacttactgtcctttgtgttttcggtcat

SEQ ID NO: 211270 - DNA, 632 bp, Homo Sapiens
  misc_feature (522)..(522): n is a, c, g, or t
ttttttttttttttttttcaaagtatcctttgtaaaaggctaggtaatattaatagcattcaaataggagtagcagggccaggcacttactcccagtaggaaactaatctcaatcgacttggtataggattgagtattgtcccgctcctctcctcatcattgtaactctaaaagtgttccttccttcgaaggtagatggcacgaaagagactgacaaaagctcccaaagaactgggtcacagagttttctgagaagatgaacacagcagaaacactgcagttgatgccatgggtctgcttccatccccatcagtgtcttcatggaccccattgggtccaacaagaaactcctcagggagtaagaaaagttaggttcagatctccttcccgcagccacaatgacactggtgacagcagtacgttcaggggatttgtgactgtaactctgcttttcgcttttccttaaggaaatcaaaattaagatatttctccacaaattacccatcagcgtggctcatttcngtgaaggacttggcaagccacatagcttcagaacggaaggcaaatgctatagtataccgggaagaaaaggctctgcgtattacactacctccttcttctggccactcctc

SEQ ID NO: 211271 - DNA, 780 bp, Homo Sapiens
  misc_feature (649)..(649): n is a, c, g, or t
  misc_feature (681)..(682): n is a, c, g, or t
  misc_feature (723)..(723): n is a, c, g, or t
ttttttttttttttttttattttattatttatttcttttaatacaaagctttggcattagcaattttatgaaaaaataaaatgtactaaaaataaatgcttgtgtggcatgattggtaaatgatgcacaaaaataggttcttttttccttcaaggcaaaatcagtcagaaagcaggttttttcttcttcaaaaccattctaccctatggaataaaaggaaaaaagaggtcataaattaaagagtagtcaaatgtttaaaataacagagaagtgaccctaactgaagggtggcctggctgtccccagctagttcccaacccctctggtaaggccaggaagccattaagtgttttcccaaaatcagcagtttcagatctgcagttgactgactcatccatcttagaggtgctttaatactcccaaaaggatgaaggaaaaggtcaggcccatggcgtgttgtttaaatacacagggacaattatcatacaatttacaatttttcctggtttaaacacatgttctgaatgctgagggtgctgaaatctgccgctgttgtctttaaaaaatgctcctcttacctctcaaacaagaatgtcctcacttattttgaagtgatagggatgtatggctgtctcacaggaatcctccnagaccttgtgtgtgtttctgtccttgcatcanngtgtaaaacagcctatgaccttttgacaagccctgcgctgnccgagctcctgctgcctctctgcagcctgtgctgtggggctgtcctggctttctgat

SEQ ID NO: 211272 - DNA, 591 bp, Homo Sapiens
ttttttttttttttttttgcaacatgcccccaattttattttgttttgggggaaatgtgctgaaaaacctaaagctttttttgtttagcaccttatatcaaagtaatgaaaatgggtatgatgattacatgtgcaaatgtacaaaatcattaactctacaaagatacatcattccaaaattacagaaaaaatttaaagcatgcatttaattctttttctttaaagggttgctgaatgcttcccctgaaaaaaggtggctgttttcaaaatcagcaactgctggtgaggatttcttggcacagttatgaccagcatgttattgctgcatcttcctgataatctcagccgacaccgggggatggaaattgattgtgtggtgccgcaggccctgagctgtcttgtaactcttcccacagcgacacttgaatggtttgcggacacgaatctgtgttctgtgaccattcttagcgtgatactttatgccattcacattcttgtatctctttttacatccaggaactgggcaggcaaaaggcttctcttcccctccattcatgcacatggagctgaggatggcttcggagctgatgg

SEQ ID NO: 211273 - DNA, 761 bp, Homo Sapiens
ttttttttttttttttatcaccagctctgtcctcatctgtctgttctgttaaaagtggtgcattattttggccgggcctggcagttcatgtctgtaatcccagcactttgggaggccaaagtgaacctaggagtttgagaccagcctgtacaacatggcgaaatgccatctttaccaaacaaaaaacaaaaaagttagtcaggtgtggtggcccttccttgtagttccagctactcaggagactgaggcaggaggatcacttgagctcccagaggtcaaggctgcagagagccatggtggtgccactgcactccagcctgggtgacagagtgagaccctgtcaaaaaaaaaaaaaaagtggtgcatttttaaaggccaactcattggcatttagaaaagaacgtgtgttgggggaatcctgggtattatgtaggatggtgttcttgcttttgaaagctgtgatagcggatgactcatatttccttgcttcttttcaagaaagtcccaacagccctattgacttccatttcacagttcacatcctccttcttcttcttctggaaatcggcagctacagccatcttcctcttgagtagtttgtactggtctcataaatggttgtttgaatatatacaggagtttctttctgccccgtttaacaacagagaaacggagcgtgaggaagaacagcaggaagagcaacgcagtcgacgtcagcgcaagaaagaaggagatgatctgcggagagtgtcctggctctc

SEQ ID NO: 211274 - DNA, 755 bp, Homo Sapiens
  misc_feature (710)..(710): n is a, c, g, or t
ttttttttttttttttttaacgaactgaatggcgatgtattttaaacgctcatattttgtttctcctctcacacttctccctttgcgtgttccttttccacaattctaatgctactgtccatcaaaccctggcacctgaggccacgatgtttcagagacaatcgtacggagaagccacttcacagtcagtcacaggaaggccagagccggcaacaggacacaacagagcaaggctttaaaaattactcgaaagggaagaaaacccttgaaagcctcaggcccaccctcctgccccgagggaagacacccccattgcggcggtttcctcccaagcctcgccgccgtcacaggagccctctcctctgccatcgtctgtcctggcgtttctcggacgaagctttcacctcaatctctagaagcagaaacgaaacagtcccagccctccccccgccatatccaagtatacatgagggataaaattacatttgtacaaaaatagattttttttttttacctttccagatgctttagacattttctcttatctttactctctttatggatctgtcatcctctctaaagtattagctatgcgtcccagctaaggcattgctaaggattgggaacggctaaagctgtctgctccaaagcatcttaaaatagatgcatctcctgccttgagatattcattcgaacccggatttcaccanaggagggtccttatgtacttgcttacacgaagcaatttataggaa

SEQ ID NO: 211275 - DNA, 626 bp, Homo Sapiens
ttttttttttttttttttaggtttaaattatatatatttttttctttttgaaattttttttcaaaattccatagttatatacagtaacatcaatttcaacaacagcagtacaaagcacacatttgacttacaggagcactgattgccaaagaataccaaagtgtttcaccttgatgatccatgggaggaccccacaacactacagacaggtaggagggagaacaatgacattttgccgtgaacttagttgagctcacaggaaaacaaaaacaaaaaacacatcaccaggattttgcattttacattcactaggatgtatgacagatagagttaaaacatcaacaacttaaatataattaaatactttttaagaaatattatgctttaaattatttaaaaataatctctttgtggatgttataataaaataatgtcacactgcacctgggggaggttggggaaaataaataagcttttcttcaagctctgactctcagtccatgtatgaaggctcatggcttcagattttgaaatatttggtccagatgcttcatggaatccctggaccatctctccttggggtcagcacagacctccttgccccgtttggtcttgaagatcacagc

SEQ ID NO: 211276 - DNA, 752 bp, Homo Sapiens
  misc_feature (733)..(733): n is a, c, g, or t
ttttttttttttttttttgctcttgaaacatttctataactttattgaatattgacacggaagaggctccacacacaaaaactctttataagttctcatatattttgatgatcatgttcgtggtagatatgaatattgtgttaaatgtaagaaaagtggcttttgttctggaatattactttggtcagttaggaatcagatctgccacacataaagggcaggttcataaaggctgtacaattccactgtcctacatcaggcaaggagggtaaaataactcttcaggcctttattcacccaaattgaatgtgtttcataagaaattctactcagagagaaagtctgcatactgagaaaattatatagcaatcatgttttcctaacccaaaaataaaacaacaagatggaaaagttcacagcactttatgccccacacgctcccctacgaccatctggagacaagactgaactgagaggagggactgtggactctctgagggctcaatatcaagagtctgtgcaataacttcgagatccttctttgattagctgtgttttctcatttgcatttgtaggctggagaaaaactggaaagtccacatctttttccatgtcagacttgatctgctcctccagatcctctggggacacatagaagtcctcttctggcactgatgactcgggccggcagtgtccacagcagcagttgcagcagcagcacaggcagcagcanaagtagcagcccgtcaaga

SEQ ID NO: 211277 - DNA, 715 bp, Homo Sapiens
  misc_feature (625)..(625): n is a, c, g, or t
  misc_feature (681)..(681): n is a, c, g, or t
ttttttttttttttttttcctgaagccaagtacataggaagcatttattccgacagaattaccataaaaattaccaaataaccaacactgcatatactgattctatttctgaaataataaatttgcctaaattttaccaattccagaaaaaagaaaccaaggtaacatatttctaaggagaaatgccttctataaccacattggatgaaaaatgcaaatattctggctcaattaaaataagctccagtcttgactttaaataccatcaataaaggaggaaatattttcacatatatgtaaattcattattttaactcagacgtaaatatatctccctcaggatcaatttaaaactgaagtcatttgccagcaggtttaagagccagctccttccctacccagtacagtcagcaaagcacactcatgaaaccgggtgaagaagtgcaggtgagaagcacaggctctcagcagacatggagggacccagagagaagtggccaggctgcttggaagtatatgcccttagagtctaatgttctggactgcagttaccttccaaaggagattctgactctctaggtggatgtaaaaacttgtaaatcaatcaagtaaaacctgtcttggnatatagaaaatataagaatagcaggttggctcatacaaatcagtgtgcccagatangcagtgtccaggaacgaggaaaacgggccagctc

SEQ ID NO: 211278 - DNA, 638 bp, Homo Sapiens
ttttttttttttttttttctgttttacatgaaattaaccatatttatcatctggctaccatagttccaaaataaggtccagtagtagtttgaagcacagcaagctcagcagtttcttccctttttaaagcccgacagtcagtggagttttctatagtcgagccacgtgagcactgtcaccccaagtagagactcttgtgaactcaaacggctccagattcacggtcaagaaccttggtgacttcacataactaccacttattgctggaagggagacaatattgtttgcttctgaagttttcaaacagtttctcacctggcagcttctccggatttctttgttgctttcataatcgcttctgacattgcgctttcaaaaatctaaaggtcgaatcatcatagttgtggaacgtaaggagtaactgggccctttgaagtagtgccactttatcccattcagttttccatggttttgtcccgcagtatagaacattccatttagattggaggggccacaagcatcaaaccaccatcctcctgttaacatgagggcacatttgcacatacagttgtcattatcagcatctttagtgctgaaatcagcaccgtgtaagatcaggctgctctgttttcctgctg

SEQ ID NO: 211279 - DNA, 625 bp, Homo Sapiens
  misc_feature (600)..(600): n is a, c, g, or t
ttttttttttttttttttattttcccaccaattatttattctttccctcctaaaaattacagacacttaacagtgttctatttacaatgtgcgcatccaggcaaaaatttccggacaggctaaaaagcaagaaaatgcgatccacaatcaggagaaaaatgaatcaacagaaactgattcagaaacaaacaagatgcagatgctgctcacagaagtctagaacgccaaggtgaagcccccactgggttggacattttcttattccttatgtcatttaaagcacaactcccgagattttacgtgatataaccgctagaggcctctctgtcacaggctgtattactcccaggtccccatgttggctgtgttcagattttttgttatatttgtggaaatctgagtgcatgtgacgactgctatttatgggttttgtttttatttttaaagacagggtcttgttctgtcccccaggctggagtacagtggtgtgatcacagctcattgcagtctcgaactcctgggtccaagccatcctcccaactcagcctcaggacttacaggcgagtaccacctcaccaggcttgatttttgtgtttttanacagactgaacatctttcagtactc

SEQ ID NO: 211280 - DNA, 672 bp, Homo Sapiens
ttttttttttttttttttctgttgtgtatcttttactttacatttgctatttacagaggagtgttgtatacataggtattattttatgtcacactgcttcagtgataactatatccatgtgtttgtatccatgtttttatccattcaactgtattaaaaggtgttgggacaggaaaaaaagttgtattactaagtacacacaaagaggttcttcaggtaaacttcaaagtattagataatactttaataacatgggcaaagaggatgcggcagagtaagaagtgatgaaaattatgcagcttcatgtttaaagtctgggctataagagtcctgagagaaggaaagtatagaagaaccttctgagttgaagggccaggactagagacatgagctcctcctttatggatatgacagattctaagccaagtagtgcttgctagcaagactgagatgtaaaaataaaaaagtttcaaagcaaatatatttccccagctcctccatacaagcagctgtacttcactaagctaccaagtttagctgtaagaaagtaagaagtttgctaatgaaaaacaactttgtattttaatttcctcttcagggacattagggatcctttgtcttttttcaagtgctttgaatgttcatgtaatgtcacaagtcctaagacaatgg

SEQ ID NO: 211281 - DNA, 731 bp, Homo Sapiens
  misc_feature (604)..(604): n is a, c, g, or t
  misc_feature (695)..(695): n is a, c, g, or t
  misc_feature (700)..(700): n is a, c, g, or t
ttttttttttttttttttcatttaaatacaaatatacttacaaaaatcttacacaggctatttacaatcataaaagcgaacagtcctggtaccagagtgtgagggcaagaggtctgtccatcctccctctggcagtcgggccctcgtgtccttttgcctcagggacggaagcttttgcaggagctgagttgttcaaaggagcctgcgaaagagagttgtctagtgaggaaacctcgagatgtcaggattggcacgaactccacggcgctggctttgggggatcgctgcgccccggccgaggcctgggcatgggctgagccccgggtctcagactgtagtctccccttgtttgctgttggtgagcctcgtgtagaacttcctccaggagttgagggtcttgccggaccagatccagaagcccgacgtgatgcccacgatcagcgtcataaggtacttaatcatgaagaccgtgaagtccgggctcatgggcgggtgcggcggggcgcctccgcccgcctggaggtgagggcaggggatagcgtagctcttgcagctctgggccacccagctgcgttcccactggtctcggaaggcctgctcgtanaagtagcaggcgatgacgatggtggctggcacagtgtacagcacgctgaagacgccaatgcgcaccatgagcttctccagcttctcggtcntggtngcatcgtgcttcatgatggtgcggatgcgga

SEQ ID NO: 211282 - DNA, 746 bp, Homo Sapiens
ttttttttttttttttttgagatagagtctcattctgtcacctaggctggagggcagtggtgcgatctccactcactgcaacctctgcctcccacgttcaagtgattctcctgactcagcctccagtgtagctgggattacaggcatgtaccaccacgcccagctaatttttgtcttttaatagatacaggctttcaccatgttggccaggctggtcttgaactcctgacctcgggtgatcaacccgccttggcctcccaaagtgctgggattacaggcgtgacccaccacgcccggctcaccaactgatatatttcacagtaagcacagtatttaaattctccttttaaaatattgaaaaaaaaaaaaaaaaaaaaagacgatccagattaagcacttccagtcagctaaaaacgccactcagagaagctactgagcccttttcacacctggtttcctaatgggattttcagagaatttcaaacaccaaatgtacacatctatccaatctgttatttttatataaagaacaacaaatgtcaaaaaaaaagctaagcaacctttcacagaaaggaagtgactgaaaacacagtaagaaaaaggagcacaggtataggcagggaaaaatgcaatgactgatgaggatagatttccacaggcagtgatacaaaaaattcaccttgatctttgatttgaactatgtggttgctgctttgattctggatggtttactttactccttgcat

SEQ ID NO: 211283 - DNA, 732 bp, Homo Sapiens; identical to SEQ ID NO: 52405

SEQ ID NO: 211284 - DNA, 713 bp, Homo Sapiens
  misc_feature (502)..(502): n is a, c, g, or t
  misc_feature (683)..(683): n is a, c, g, or t
ttttttttttttttttttaggacacacgggactctgttttaataagcagcttatagattttagcaaaccatatttcctatgacattgggttctcatacaggtctgcagttcaaaatccaagtttgaaatctgggacggaaggcattctggaaaacggagaatctaataaaatcaatgacgtctcatgttcgatgctggctgtcacggaagggctggccatctgttggtctgagtgtagctggtctcgtgaatcccactcggtacacaatcgctaaacactaaaacatgtcaagcaaagtacatggtgcgcagagtgtcttggtgaacctggaccgccttggccagtgcttggtggtctcgcccgttactctgcccagaggtatggcttccttcagcactgtcatgttccttatccaccaggtggtacctggcccggaaggccaccaggtgagcgtagtatgctggcgctgggatggacacggagcgtgtgcagcgcacgtangtgtgacacagctggtaggttaggatctgcagctcatcagaggagaaacgattgtcgtctcagaggacgtgatagtgcgaaggcctgcttgtctcctggatgccagcgtgactacacaggtagaagtcgaactcggtggggtgggtgattttcgtgtccacagtcgtgcctgctggaatgntccacttttcccaaccgctcgttcttgtca

SEQ ID NO: 211285 - DNA, 467 bp, Homo Sapiens
gcagccgcctactactactaaattcccccccgctcgacgagaatgggaaatacacaattgccaataagtgtaaataatactaaaagtgactttagttctgcatgatagccaattgagtagatgaagtatagaaaatatagggggatgataagaagagggtaaaattccgaggaggtacgggagagaaggaaatttagcccttccaaattctttctctagaatttagagaggatggctcacgcctgtaattctagcactttgggaggccaaggcggacgcatcacttgcgaccaggagtttgagaccagcctgggcaacatggcaaaatcctgtctttacattaaattccaaaaattagccgggtgtggtgatgtgcacctatagttcaagctactcagaaggctatggtgggaggatcgcctgagcttcagaggttgaggctgtggtgagccatgttggtgtcactg

SEQ ID NO: 211286 - DNA, 716 bp, Homo Sapiens
ttttttttttttttttttgacgaaaagcagatttttattgaacagaggtataaatgtgtttcattttctaataaatctctttcacaaatcaccttgctgtttcgctcttcttgaatgatcatttttagacaacactgtctgactgttttggcttctgccaaggttagcgtctgttcacaggctgagtctgacttcttcctcccacctcctcctagtctggccttccaaaataatgctcaccattctatcacattgacttcagttttgaaaagaaaagttatcttacaaagtagtatgtataactctgtaatatataaagtgaggcaatgatagaaccagttttaaaaataaccttccatgatgattttcatttgcatccacctgcttattagtaagaatctttttacatgtttactgcacgccccaatttctcttcagtgaaaaacttttgagtatcatcacaccctccaacttctcctctcacctatattgaaaagggtctgctctttatcctaacatctatactaggtaattttcagaatattccttcaatcatcaaacaaatttttgagatccttgcgctagatttcactatcttaatatgaaaaccaataatcacctattaaaatacaatacaggccaggcacagtggctaacacctgtaatccaacattttgaggaggcaaggcaggtgggtcactgacgtcaggatttga

SEQ ID NO: 211287 - DNA, 655 bp, Homo Sapiens
  misc_feature (590)..(590): n is a, c, g, or t
ttttttttttttttttttctgtactcatcagaatgggatactccacaactgtctcaccaactcagtgccagtacacatgctctagaggacttctggactcgcagctacaactgtacaagtgcacacaagtgaatctaccctgttatcctccacccactgattgaggatcgaattgcacatttctcttaaccatgacaggagaaagcaaacagtgaaacagaatcatgggtgatctttctcactttccctcttgttttcattggtttgtccataccattctaattaacatgaaagggctctgcatatagagagattgtctcactgacttcctggatcaccgaaaaccatcagggttgaaatttcatctgagtctttcctgacgcccagcaaatattccccctcggattattttacaccttgagggcattttggtcttcagttcaacactcttgctctgttcccaaatggggcgctatttaggggaatttaaagagaaagctgagaagaataaacatttaccgagttctcttggcattcagtctctgaaaaacacagtataaactattcatgctgcttcttacatctgtcanatcgaaaattaaaagccataaaagtgtaacactgaaaatatggcatcaaaaacctcgtgccgaat

SEQ ID NO: 211288 - DNA, 573 bp, Homo Sapiens
ttttttttttttttttttgaagtttttagtttattaatgttcttgcgaaaaatccacagtggccacagctaacatcattgcagcacctttactccttcggctgtgaatcaagagaaagaagtttagtcaacaactgcctttaaaattctttaaagtcttcaattccaaaagtagtaacactcatgcacaacaattattagtaacctagaatatcaagttattttgatgttatcataacacaatgaaagcatcaagaaataaaatttacaaacattcaagttaagaataaaacaaaaataatgggctaaatattgctaaaccttaaaaacaaaaccatgtcactgttagtattttaaaaggttacaactcttcagaatatttgtaaatctacttctagatgtactacacatgatctgcttttaaattgctacgtcagtacaccaaggagtctagtgatctacatgactacatgaaaagcttgaattatacctgtgatccaatctccagctcactgaatcagtggcggggaagggaaaaagagaaaggagggaaaagaaagatttcattaatagt

SEQ ID NO: 211289 - DNA, 569 bp, Homo Sapiens
  misc_feature (91)..(91): n is a, c, g, or t
  misc_feature (412)..(412): n is a, c, g, or t
  misc_feature (504)..(504): n is a, c, g, or t
ttttttttttttttttttactccaaaaatcagcatgtttaatggggcccctgtgcactgccctctgccccctctgaggttcgcacaccgtngggcacggactcgatacaagcacgtgaaacgggggtggccccagttgcttagaatctggatcttcaccttgggaaaggcagctggggggtcattctgcaggtggaaagtctgaatctccgatttctcaacatcgaaggtgaatttccccaaggaaacttcagtttcatcataaacctggaggccaaagaccgcgaaatcgcggggggcgctgttggctcctccggtgtgctccacgctgggcggtggatgctgcagagtgatgtcgctcagctgcactcggcccggcagttggatcaccacctggccttggtcgccttcanaagcccagcaattcccagggaacacgtggggctccaggataaccgtgggcggccgtgcgtagttccagaagctgaagcgattccagaagtangcagtgttcctgtctgcgtaatcgtgggatgtcttctgcaggtcgatggaggctcccacagagct

SEQ ID NO: 211290 - DNA, 674 bp, Homo Sapiens
ttttttttttttttttttggagggtgatagtgaagcaactcatttattctgaaaacaagaaaataaggagaaagaaacaaagtattttattctaactttcctatacaaattgtacctccacatataaaataactgatgagcaaaaacaaatttttcagaattccagcaataaatgcagaagggaggctgggtgcggtggctcacacctgtaatcccagcactttgagaggctgtggtgggtggatcacttgagcccaggagtttgagactagcatgggcaacatagtgaaacctcatctctacaacaaatacaaaaaaattatctgggcatggtgatgtgcacctgtggtgatgtgcacctgtgatcccagctacttaggaggctgaggtgggaggatcacttgagcccaggagatggaagttgcagtgagctgagatcatgccactgcattccagcctgggtgacagagtgagactctgtctcaaaaaaaataagtacagaaggaataatatcaccattatacagctcttaaacaacggatttgaggaataatcatcaatactaccccaaaaccattaggtgaaaagctgacaggaaactttataatggaaagttccgactagcaacatagcacatgtacagaagaagagaggatatcctacctgcttgaaaa

SEQ ID NO: 211291 - DNA, 710 bp, Homo Sapiens
ttttttttttttttttttgagactccataatcagatttattttcctctaataagacagtttagcatctccgagttttgcattctacagtcttacaaactttagttattagcatcagaaacacaaaaacattgcaagacctcaaaacacaaataaataccaaataaaaccacacataatatacaataaacaaaactagaaaacagtaatgctatcaggaagtcaggcatgttgctaactcacagtaacaacatgattattgctgggcaataactcacggtctttttgttttttcttagaagagcggaaaacaggacccaaatcactggtcacaaaatcacttggactgtcaagatgtgtcttcacagcaagcggctactacagacgcaacttttaaaacaggcagattaaaaagacagggtcaaatgagagattggccttctttggtctttgtttttgggtaacagaaccgaacagaggcaccggcagagaagaggctgcgaatctgcagatgctgtgcagcgtcgacactgccctccacacttcacagaccttctcctacaggcatttcttacagaaatcaccggacatcatgccagcttgtgtgttttccaattaagtcattgaatttgctgttggagggtatcttacttgtctgaggggactaagttgtcaaatccagtcatcacctaattacaggagcggtacagcg

SEQ ID NO: 211292 - DNA, 605 bp, Homo Sapiens
ttttttttttttttttgtattaacaaaaatttatttctcacagttctgggagctgggaacttcaagatcaaggtgccagcagacttggggtctggtgagggcccacttctgttcataaagacagtgctttcttgctgtgtcctcacatgggaaaagtacaaggcatctctgtgggtccttttccatgcagcccattcatgagggttccatcctcatgacctaatcacttctcaaaggccctatctccaaataccatcacatttgggatttgtgaatgttgtaggggacgtaaaccttcagttcatagcagctttctcagctatattcaaaataccctacatattttagaaattctctatttcaaaacagtttatgggccactttacctcagatttcagtatctaccaaggacgatcatcttcctttcaggggtttcttaaaaggtgtattacttagacaggataattattaagacaagggtaaggtcttgcaccagcaattaagaaatactttgcctacccatttgtgtctaaacttcttccagatcatgaagctctttgagattatgatgaaagttagagactatcttttatttgtttagtcat

SEQ ID NO: 211293 - DNA, 760 bp, Homo Sapiens
  misc_feature (617)..(617): n is a, c, g, or t
  misc_feature (686)..(686): n is a, c, g, or t
ttttttttttttttttttctatttttgaaaaatctttattgcttttcctgattgtacaacaaatgtaaaaattcaaatattacaaaatgacttaatttaaaaagtacattttaacatgttataaaataaatgcccatttcaaaaaattcaagtatcataaaatacatgacgtagaaaatgagccctctgtaatctagcccaacccccgtatcccccaggattactgctgttcagatccgcgtgtttccttccagaccgtctctgtgcacccgccacccacacggctgacatgagctccatatgatccgagatgatagtaacgctgaccaacggagcagggttcagctgccgatgccctgaacagcttccagtttctacacagaaacgctttcctcataaaagcctgaaactgtgacacagttttgcactatgtaaatgtatcaggttgaatcatgaaataaatgatcgctcaccatttttggcctagaaaacagcagtttcacgtggttcaacgtgatagctgttcaacagacattggggggtttcctatttcttgccattataaacaattcagcaggtcaggtgcagtggctcatgcctgtaatcccagcactttngggagaccgaggcgggcagatcacctgaggtcaggagttcgagaacagcctggccaacatggtgaaacnccgttactactaaacatacaaaaattagctggccctggtggtaggtgctgtaatccaagtacttgggaggctga

SEQ ID NO: 211294 - DNA, 724 bp, Homo Sapiens
ttttttttttttttttttatcacttagtgttttattgacaacacagagaataaacgatggtacagttttacttggacaaggcaaggggtatgcagtttggaagtcaacaaatattattcaaatttataattaaagaactactataacatttaatcatttagccaattttatatatgtatttttataagaactgaaacagaaagaatgaaaatagaaacaattaaaaatgtccccagctggctaggaaaagaaagagtatggtttgggattataaactcttcgattccctatgatatttagcaatttaattgtattactttgattaaaatgtttttgatcagtttaaactgatgtaatgaattcatatttattgatacagaaaaatatgatataatccatctaaaaagcaagttacaaaacagtgtacagtgtaccatagtacctatgaacacaattagtgaagtaatttgcagagctataataccaaatcagaaattattttggtaatgaatttatgattttcctcgttttctgattttttccatgatctcatatactttattctcagaaaacaaaagacaaaaccccacacatacacaaaaataaacgagtaacttctttacaaccccagaggctaagtcagtgggaaaagagggaaatgaatggttatgagcataaacacagggacaaataaaagaagtttggagcacagagaacaattcac

SEQ ID NO: 211295 - DNA, 655 bp, Homo Sapiens
ttttttttttttttttttgccatctcagaagggctttatttctacttcatcacggtctcatacagacccagaggcatcatcatgtgtttccatttggtatccttgtgactttttgtagtgttttcccttaagaaaactttgagtaaactctgtacattgccagttaatcttttcacaataatttaaaaatggtgttgctgttggatcatcgatgcaagaagaccaacaataaaagtacagtacaaggaaattcacaacatattacagtggaacagactgagtcacatttaggtgatggcgaggacacagtagcggtatatacatgcacccgaagacgtgcaagccaagtaggataatataaggatcatacagtgaattttctaagcccactgaggactttgtaccttttcaaaatcatcctgtatcccctccagcatacagaatatctgtcttgtctactggcttcatggctttttcactacaaaaagttcactgaatcagacagtctgaagcattaaaaaattcgtaaaaaacagtaacactgacaaaataaaattaacttaatccactctaattcaacatggaaataaactgaaccaaaatgtaacagtgcaaatttaacagaggcagtcaggtattgacagcgagggtgttc

SEQ ID NO: 211296 - DNA, 606 bp, Homo Sapiens
  misc_feature (584)..(584): n is a, c, g, or t
ttttttttttttttttttcatggttaattaaacatttttatttatttattttttttttactgagacagagtctcactctgatgccaaggcttgagtgcagtggtgtgatctcggctcactgcaacctccacctcctgggttcaaacaattctgccacctcagcctcctaagtagctgtgattacaggtgcgtgccaccacgcctggctaatttttgtatttttagtagaggcggggttttgccatgttggccaggctggtgtcgaactcctgacctcaagtgatccgcctgccttggcctcccaaagtgctgggattacaggcgtgaaccactgtgcctggccaattaaacgtttttaatacagtaataagtgaataatagaattgagccagattcaggattgaaatgatgtagtcctccatgaagaattcaaagcaagagttttcatctcaacctccaacatttcacgtaggtaaagaccatacctcaagcacctccaagccctcatttccccagcctctacctcatggccctctgcacagccatctgcgcacaaccagtgcttacacacaggaggccctcanaataatactaataatctaaggt

SEQ ID NO: 211297 - DNA, 717 bp, Homo Sapiens
ttttttttttttttttttatggttatgacttttattaatcatatctgctgttattcccaaacttctcaatgttacatgaatactaacccttgttttatataaaatatgactaaagtaaatttacctacaggtgcctctctccttcattggtgattaaaatttcacgccagagactaaacttcatgaaactactgcaagcatgtgtatgatagaccaattagcttagtatctggcattgtggccagaaaaaaaaaaaatcgttacctacaaaatctcttgggcaacacttaagccatggaagagcccacatgaatccaggtctactttcctttacaggtagattccagaacaacaacaaaaaatgtaagactacaagaaatgatttaatatgataaaactcccatttcaaaacccagttctaaaggatttactgactaatgctgattatttagtcatggaaaatgtctctcataaaagtgctcctaacaaaacatgatctacaataatttataaaatgtgaagggttgggatgtgcagactgattggtgcacgtcaggttgtttctcttaaataaggtataaaaaactatgatatcatagtcttttgactttattttctgagataaaaaagtataggcataggtgtttttactagtcttcttgatgatatcctttagaataatctatcaaatggcttctttcatgtttcctgattatc

SEQ ID NO: 211298 - DNA, 632 bp, Homo Sapiens
ttttttttttttttttttaagagaaaaggctttttaatatgaaaactatgtatttgggcacaaaaatgcaacacacagtaagaaaccatattctatcaattatgatattctgtaatctaagaacacagaaagttttgttattaggaaatgccaagaggaaaaagaactctgtaaagtcctattcaatttactttgttagggaaaaggatgtttatttggcttttgtcacagttccatcatgtctactcttcttgtaagttcagcttcaatgctatctagttctcgctttgcttcttcaattttcacttgagcaagagacggattcggcattaagtctaaataggactccaattttttcttcaaaggtatagtctgttgctttaatcttgccagtttctctgatagtgctactaaggactgatgagacagagaagcatccatgcctctggctgaaagttgctcctctgcagccttgattccaaatctgaattcctctgactttgcttttagaaagtccatgttctgacgacgattatcaactttggccctttctgtagacagatgcaactctgctttcttgacatcctcttgtagacatttttctaatactaaagttgcagttaaattttttt

SEQ ID NO: 211299 - DNA, 626 bp, Homo Sapiens
ttttttttttttttttttcaaggtctatatcagaaaaatatatttgggggggctgcagcacaggactgagggagcggtacatgcttaaaaggcaacagggcctggttttcagtggcgatgatgattctctatgacagtcagggaaacgtggtctctgagagtgatgggcacataaagccttggtgccagagtgcatcgcatggtgtccaggccgagtctctgccagatggttagaggcctgggtctaccctgccaggagaggcgtgtttgggtaacaggcagatggagtttggaacacatgaatggctcatcacacgccaaccctgagtggggcaggaggcaggaagggtgggctgccgcctctggttggcattctcagagatgcgcagtccatcagcttgttccaaagagtgaacacaggcctctgcgtgctcccaggctccttggtgtcccaacagctggagctcctcgatgagtcacgggagttctttgccaagaagtaacgatagcattactcatggaattgcttcactgctttctgaaggttggcataaaaccgggtcatgctgcgggggaagaaggagtccaccacgttctgtgggaggtaaccgctgaggtcggtatgg

SEQ ID NO: 211300 - DNA, 679 bp, Homo Sapiens
  misc_feature (590)..(590): n is a, c, g, or t
ttttttttttttttttttcatgcaaaagctgaagttttttatttttttttgagatggagtctcgctctgttccccaggctggagtgcaatgacacaacctcggataactgtaacctccgcctccagggttcaagcagttctactgcctccaagccattctcctgcctcagcctccccagtagctgggaatacaggcgcccgccaccatgtccagctaatttttgtatttttagtagagacagagtttcaccatgttggccaggatggtctcgatcttctgacctcgtgatcctcctgcctcggcctcccacagtactgggattacaggcgtgagccaccataatcctggccgtgagcctggccaaggctgaagttttaggaggaaaggaatctgtgagcgcagtggacattcggatgggaatgtttcttggcctcgggggagggagagaggaacaggagctcagcccccttctcctgtcccgatgctgcctcctgacccagcgcgggagggcctctctagaacacgccagaggtggccatgtggactctcctccaatgacctggaccaggcactctacctaaaaggacanacccaggcctggctgtcgggggcagggtctcaggggccacagacgcggatgtcctgctcagtgaccagggtggcacggacaggtgtcca

SEQ ID NO: 211301 - DNA, 726 bp, Homo Sapiens
ttttttttttttttttttgagttaagaatatttatattttttccaattctttacacttttattaacacacttacaaaaaataacattcaaacactgagaaaattaaataactttggaagcagagctcattgttttctgcttacatataagtgacaattctgggctgttggcacaaaataatcaacattcataaaacccttactactatatatcaaacataagttaaaatcataggcactagtttatcaaatccacatttcttctgtaagactaaccacagtaaatccttagattttcccaaacagaaaaattgcaatatacaaaggctttctagtaaaaaggcaatttttctctttaagaaactaaaagtcaacagtctgtggtagtacaacagcaggtaaaataatactttaccaaactcagatcaaaaatatgttttaacaagtgatgaaatattttaataaaaaaaaatagacatttttttctgatgcagccatttaaaaacaaagttaaataacctgaatactccttttgaaactgattatctaacttaaaaaatgtaatatgtttcataataggtaaaattccttttaattattagattgcagcatatatattttttgaaatgttgcactgaaaactgagacttgttctgttttgtacgtggtttttacaagagacagtagctacttctttcttttacttacttagacatgagataccccc

SEQ ID NO: 211302 - DNA, 680 bp, Homo Sapiens
ttttttttttttttttttgagctctcttggcctttattgcccatagaaaacataaaaggtcagcaaagtcacacgagcatccacccgtcatcatatggacctctgtccttggctgtgttgaattccttcccggccagctgactggacctcggaacacagtggctgtatgtgctgagagtggcttccaggccccagggatccacagatcccagcaccccggtgcagccaacaacacagggtgtcctgtctactgttgggtagcatgggaagggcctggcctcagggtgaaggttcccattgcatgttttccaggtgcttctgccaggggactgctggaggtggttcagctcactacagtggccgtggcattgagtcagagattggcaaaggataaggctgtgggtgcctctgcccagcttctaactccagggcctgcctcaagagggacttccaggaaggcggtcagaccagcagcagtgggtggagaggtgctcctggcctggttggaaaagagatcttgctggctagacagtcttgtgagactccataagggaggaacctagagcagtgatgtccacagaacgttctggatgaaggaaatggtcccatctgccttgccggatgtggtggccactggagggcagtggcatgatctcagctcactccaatctctgcctcct

SEQ ID NO: 211303 - DNA, 667 bp, Homo Sapiens
ttttttttttttttttttggtggaataatttttattatttagttatgaggcagggctgtaatggtgaaatcttttagttttatctgattccacaaatattttctactaagaaaatactactaaaatacaaattaaggctacttagtaaatgcctcaggatggccaaaaattgtaagaaagaaaacctttggatgatacatcctgtctacatttctgctactggtctcctgcttttatgattctccttgacaaaatccacgtgacagtaattttgtgtaaccttttgaaagatgaatttgtcaaaaggctaggatgtagatgacacttgctgtttaacgcctttttgctgttagttctatacagaagtacgaagtggaggtatgtcatccataggaatgccatcacgtgcattttcttcactttctggcatggctgaatcattcaaagttggattgtagtagctagaattcccaaaactcacatcataaggttccggtgcattgtctaatcgcagaactggttcatttctgtcgtcataaagtcgccgatgggaaaatgaatccgttttcctttttccacacaacaagtagcccacaagagtaagcaatgagacacccagaatagcacctaaaatggccccgaatactaatcctgtatttctattttc

SEQ ID NO: 211304 - DNA, 472 bp, Homo Sapiens
tttgagacagagtctcactctgtagcccaggctgaatggagtgcagtgacaggatcatggctcactgcagcctcggccctccaggctcaggtgatcctcccacctcagcctcctaggtagctgagactacaggcacatgccaccacgcctggctaattttttgtattttatgtaaacacaaggttttgctatgttgcccaggatggtctccaggactcaaacgatctgcctgccttggcctcccaaaatgccgagattacaggtgagagccatcatgcctggccaccttctatgtttcatattttgactataaagcccaaaactccagcttgctgaggcagctaatgtgttagagctaatgcacttctgagaagactgctagcagctccccgaaaacccactgttcccttatctccagggacacaactgcccaggtaagattacatctcccagcctccctgtgattaggtgt

SEQ ID NO: 211305 - DNA, 675 bp, Homo Sapiens
ttttttttttttttttttgaggaccaaataatttttattcacatacatctagttcatctacctaaagtgttcagaacaatgttcagcacatattaagcttgatataactgttacctatgatgatgacgatgatgatgataatgataactgtacagtcactgtctttctgaagttgtttggtgatcaagaatgtgtttagaactatctctttattagacaaagtcataaaccaaaaatttccaacttcctgtacatgttgaaagctttaaataaggatccttggatacaaaatatggtccacatggctgaaaattaattctatgacacaatattattctaaagtcatccttattttgaaagcctaaagattttcttttatggctataaaaataccaccaagctagacattttaattctgttgagatatacaaatagaattaccacagcagcctacaccttctatgatttctaaacacttaaacatcaatggttttgggaagatgctgttgtccttcacagttcattaaaagttcagatgccttttgtgaaagcccaacttttcttctacctgctaaattgtcttttcagaagtcttgccggatgttttctttgtttgcctctccatgttgctgcttaatttgatagatttcattttctagctgaacaatagtccgt

SEQ ID NO: 211306 - DNA, 694 bp, Homo Sapiens
  misc_feature (604)..(604): n is a, c, g, or t
  misc_feature (664)..(664): n is a, c, g, or t
ttttttttttttttttttcacatctatacaactttattaacaagtaaaatacatgccagcatgttttatatatgggcaaggacattcctatgataatgaatggcacattatcatctaacaattgacctttatcaaatatatgttttcatatgactatttgaagaattaaataataaacaactaataaatgctaaaataacatttaacagcagttaaaaatataaaagccattcagtttagtatttacgataagctggaatcattcaaatacaactattaaaaaaaatactattcctcttctacaggccaaatggttcattagaaaacactgtggcaataataactggctcctgcccttaccccagttccatccctcaaagggcagtggagctaaggtagttgcttcttggtacagtctacaattatacacaggatgatcatataacttatcctccaaattagaacacttttgagagtacgatgaggcactattaagctgagaaaacaggaataaccaggactcttttgagcaaactaaggatatatattaccttagttaagtatggtatcacattcactatcattactttttgcacttcttganatagtacatactagatgaaaaaaattatatttaatgaaggaactctgaatttttctccanttggatattttgaactccacttttcctgtt

SEQ ID NO: 211307 - DNA, 230 bp, Homo Sapiens
ttttttttttttttttttattaactaaagcccatactttattcatatttcctcagtttccctccaatgtcttctttctctcccaggaccccacccaggatcccacgtgacatttagggatcagctgtctccaggttcctctaggctgtgacagtttctcagactttgcttggttgttttttggtttttggttttttttattttgagacagagtctcattctgtcacccag

SEQ ID NO: 211308 - DNA, 688 bp, Homo Sapiens
ttttttttttttttttttggtccttctgtttatttcattttggatactcagtgaatgttaattaaccaggaaacttaaaagttatttcaattatgaacctcttcaatccttcatcaattattttgagtattctggtcttaaaaacatctctttcttctacaaacttctgaaagagatgaacacctccacctacaccaaaataatgtgctttgctggccaaaagtacacgtccatttttacttaacagtctaaggaaagtctggtgcaaattactataataatctgggttgtaaatggtttctgaggtgagaatgagatcatattttacaaaaagtttttcactacttagtacaagcttacaaaactcagaccactcaccagaaaaaaatcggcatttatatagttgtgttacttttggtttcctgcatcttttcacatctggctcatttacatcattttcttcatcttccaaagtggagttagctactacattaggtaaggttacttcatcaatcaccatactgttataatcttgaaagtgaatttctttggaccctcccttgaatgcagttatacctagtaaacctgatccacaaccaagatccaagacttttttcccagcaaatttcactttggcctttgtgaaataagccaggaggtcaaaggtacattcccagatttttaagcc

SEQ ID NO: 211309 - DNA, 695 bp, Homo Sapiens
ttttttttttttttttttaataatctagaatttattttttctagaagagacttagacaaatccaatatccatcaaggtaacacgagtctatctctgagatggaaagtgtcttcctctccctgaatagagactttaaggatcactagtgaatctgggaataactggagagatactcccaattcatctagaatgactactaacaatggcactatatttcctttgagttctgcagtttagggcatagttagaaaagatttaagatgtcctttcccaacattctttccaatccattagcgtagaataactccagttcctggatgttccagtattgtagtttcaaaaaatggtagaagtactggcaggaaaagtcagggtggattccagtgaatttaagcccctgctatagaatctcttctgtgagcataataatggtgtctgggtatctgcatcacgccgagcctcctgctttagttggtggaatttgtgctgcgtccagccatatactccacagttgagtagaccctgagatgttgccgttagagcctggagaacataaagggccatgtgaagcttggtgtcctgtggcttagtcagctttatgatcattagaatgacagctgggccccagcagcacaagaaggccactgggtagaagcgacccgttggtcacaatgtgaatcactgcccactgttca

SEQ ID NO: 211310 - DNA, 812 bp, Homo Sapiens
  misc_feature (20)..(20): n is a, c, g, or t
  misc_feature (685)..(685): n is a, c, g, or t
ttttttttttttttttttanacacaaataatgtcttttaatggagtgatttttttctaatcgaggtattatgtacttttcatttactaattattgtttacatttgaagtgttttatgaattaatatttaattgcatagatgaagattactagttataggcattttactaaccaatactcattaagcatagcgtggattcatatgacatcaaggggctattttatttggtaaaacgaaaaagcacaagaatgaacgaacgcgagaactgaaacagtggagacacctagaatgacttgtctaagatctaaatcattttgttctcttcccagcgtacttattatcctgatcattgtcatcagcattgtttgggtccttttagcacagatttctcaaaaggggtaactccataacagttggaagcttacaaattcatataatttgtaagaggtcaatttggaagtacctatctattttaaaattccagtaacctgggaatttcatcccatgtctagagtcttttaggtaaaatatttccacaattaggagaaatatgtgcatggggattttttatgtagcggtgttttgatagaatagaaaattgggataaaccaaatttccatcatgaaggaaatagtaataggctgaataataacacagcgaatattatgcaggctttaaacatcanaaaagagttcaacttatgacttccgatgatggtgttgaagcaaggcactgctggttaacatttgattttctcgttagcgatgccgtggacggcatcctcgttagcgatgccgtggagggcgtcctcg

SEQ ID NO: 211311 - DNA, 725 bp, Homo Sapiens
  misc_feature (624)..(624): n is a, c, g, or t
ttttttttttttttttctcaaatactcatgcattacttctataaataaaaagttttaaagtttgtttgcttttcactatccccatattggcattaaagagagccagtttatcaggcagcatttgaggtaaggaatgtccgtctctgggaccctatagatcctgggtaccagattacactcatctttctgacttaatttccagagtggatagcagcccctacctaagcacagccccctcattgggcaataagtcagcaacagcaatgctggccacacgggaggccctcaggtgtcctcaccccacccctaggtttactgacaggtaccctgcaggggagagggtggggccctgagctggactccacccaacactgccacctccccagcctgtgtcctccctaccacccgaggagctgaaagacccaacagcacaccctcagtggtttctgaaaggaagcaaagctctttctaccctttttcactttgggtgaaaacgtggctgggttgacaagtcagttttttagaaaggaagcactgactagcgagggactcgcccagccagaagagggctctgcaaagacagccccatccccaggatgggaatgctggattcagacaccacanaccaagagaacccagactctggacatggagcagtaccagggtgaaagacttttcccaccgacatggtcacatagccattctccttgaagtactgggggatg

SEQ ID NO: 211312 - DNA, 734 bp, Homo Sapiens
  misc_feature (642)..(642): n is a, c, g, or t
  misc_feature (720)..(720): n is a, c, g, or t
ttttttttttttttttttacactgaacagagaatattttttttaaaatggctagccaagcaatcacggagaaaggaaaagaatagcggcgtgaaagtaagaattccaggctgacttgaaacaatcatgcagaggctcgggggaggggaaggaactcgggggtcctcttctgagagccttggtccagtttcaacagaattgtacaagaatgcatttctgttttattaaaaaaatagacattaaaaaaggcacttagagggaaatacaaattcaaaatccaaatcctcataaatgtgttcctgaatctagacattttcagaaagaataaacctccccccaaacataagacccagaagaaaaatccaaacagaaacaagatgaccatgacaatgtcaccagcaagagggctgggagtgcccttcctatgtggggaccgtcctgggggaggacgggagcccgggtcttctgtccgatgtcactgctgtcccttctctcgacgctggtggagggcagaggtgggggcctcctgaggttgttcaggtttcagaagttacagactcgaatgcatcccaattccacttgcgccgccgacgcgacggacagccctggcgcgccggtccggaggtgggtggcgcggcgctantgggaggcggacatggaccacgcgccctccatgcgccacacggagaaggcgtagctgaggcgctcgtgggccacgtanctgcagctggtcat

SEQ ID NO: 211313 - DNA, 736 bp, Homo Sapiens
  misc_feature (712)..(712): n is a, c, g, or t
ttttttttttttttttttgtccttgaaataatgtttattccacgctgtcccgacagccccctctgcaggtcccctcggtgtactctgaggtgggaaaccctccctgggggcggtgaaggggaactcgggccaccccaccagccagcagatgctccagcagccagagccccagcctggagctgaggctcttcctggggctcgccgggcccctgcaggcttttcggaccctcagccagcccggcttcctctgctttgggcagcagcaagctggcccttgggcacctggactgctcaccagccgcccagccatgggtcctgctctccaggttccttctagcagatccatctctgtcagagcaagggactcaggcctggaccatcttctgggctgtcactggggctctcagtggccatcccagctctgcgctggcccttctggagcgtgtaggcagacggccccagccgcaggatcttcccgctgcccaggcactcgtcccccttgtagaacacagcaaactgtcctgtggcaagggcacgcacagcctgcacagctgtcacccacacggtgccatcttgattgagggtcagcacacagggcactagtgccatctggtggcggaatcggaagtggcactccatcatcttgtcccggaccagtgctgcgggaggctcctccgcaatccagtgcacgcggctggtcctcagcaggtcnctgtacagggctgggtggtctgtc

SEQ ID NO: 211314 - DNA, 717 bp, Homo Sapiens
  misc_feature (652)..(652): n is a, c, g, or t
  misc_feature (659)..(659): n is a, c, g, or t
  misc_feature (709)..(709): n is a, c, g, or t
ttttttttttttttttttgccacttcacaaatattttatcaaaaaactcacctggagaaaactcaaagaatcacagtaataagctgtctatgccatattttttttttccttttttgaaaatgccaagaagctactactaagaatgtattcaagagacggaagttccaagattcatcacagggtcaggtgggctcaacttagtttcctgggccctctataacacttcatgttcagaattgtctccaaataaaagcaatttaagggaacattcaatatgggtgtctttgctgtgcttgcagtcttaattctgtggacactgatattctatcaatggaaaattgagcctttagtgaacttgaataccctgttccccaatcactgcccagagagcagtttctgagcagccaacatgtcagaggcaggaaaacagcagctaaaaggcaaaggagaaaaatggaagacacctgcctttacacgtgtattttaagctaaataaccatgataaaatatcaccaacacccattttttgtaacttcttaattgtcccacatcaaagataagtatggacaactgtaattggttcttatatatccctaaattcctaattgaaatcaattccaataaatcgttggtgctcagtagaaaaatgcanaatttanatatatatattcagtagaagttaccttcataacttgtggggcattatcanaatataat

SEQ ID NO: 211315 - DNA, 629 bp, Homo Sapiens
ttttttttttttttttttgagacagagtcctgctctgtcgcccaggccggagtgcagtggcgagatctcggctcactgcaagctccgcctcccgggttcacaccattctcctgcctcagcctcccgagtagctgggaccacaggcgcccgccaccacgcccggctaattttctgttccttagcagagacggggtttcaccgtgttagccaggatggtctcgatctcctgacctcgtgatccacccgcctcagcctcccaaagtgctgggaccacaggcgtgagccactgagcccagccccattttatttcatttctctaacagcaatgatatatatacatcccatagtatatcctactgatatactagcccctttccccattcaacacctgtgtaatcaggaaataaaacaatgattcgggtttaaagggtatatcatgtgaaactaatgctggggcggtagtctccattcatagttcaaaatacaaattttatccactaaaatggaaacacaaaaaacaactactgaaatgtaaataatataacaacaaaaataacaaaatatcataatacacagggccaaatcacattatatacactcactacacccactctaccctaccttagccc

SEQ ID NO: 211316 - DNA, 623 bp, Homo Sapiens
ttttttttttttttttttcaaatattttatttcttttattataagacatataggtaaaaacttgcatattttgaaaaagatagaaaatggtaataaaatggatatttttcttattaagaaatatgttcataaatatgctttatcaaatgttaaaatggttattttgcaaaataataataaatagagcagagctgtgacatacaagggtcaaccaaagtactggaggtttttatgctatatgttttatgaaaattcagacttctgattatacattaaaaattgacattttgcactacagggtatcaataattctgattttaaaaatatttttatgatggctccatgaattcaaaaataataaaacataaaaggtggtttgactaaatagaatctgattcaaataatttccccctaaataagaaattgtaagatataatttttgagcctataagggacacatgtatcagttcccaattctatatgtctcggtgggcattgaacaaaaattgtttgctaagcctttgtttccagcaaggtccacatcatttcttttcacagtttgatggagcaataatagtcacgattctgatgagcctagttctacaattctagctccatggatc

SEQ ID NO: 211317 - DNA, 683 bp, Homo Sapiens
ttttttttttttttttttaactgatatatatctttttattatgcacagataaaagatttaaaactgtggttatcaaaactatacatctaagcatcttcacaaaatagctgacacactgaacagagaaaagaatacaacaggggtgttcaaactggccacagggattttaagggtactcgttttaccctcatagatgatgaaaaccagcaacaaaatcaggctcattcaggaaaaaccagaagagagaagtattgtatttggaaactgataatagtcctttttagaaaaacatctgtcagtttcatgaacaacccccagataaaacaaacatgaaaaaaatcacataggactcacccaacaaaatgtgctctgttaacacaaccagcagtacaatcatcattcaaaccatgaggtagttacagtacaaaaagactggcacgcgtgtgagcaccccacacacactcacaatcatgcccactaagaacacaagcaggaaatggatttacaatcttattacaaggcaaagaaaaaaaccattttttttgtttagaaaatgctatagaaacagtttagacagaagaaatctctggctttttaaaatacagagtaacagctggtaaacaccacatggtgaaaagctatagcgtattatacagacaatctgccttggagtttggggcatt

SEQ ID NO: 211318 - DNA, 685 bp, Homo Sapiens
ttttttttttttttttttaacaatactgagagtaatttttaagctaatgataaaaatttcaaatatgaatgatttcaaacactttagtcttcttccataatccttaaacgttcaggatatcagagtaatgacaggttgtttcagatctcaaattaatagaaagactaatttgtttagtaaggtgggttgccagatccttaaatgtgctcttaactggttccctgtgaaattaaacattggtagttatgtgtttttgaaacaccttgaaattgtcttacataaagtttggttgtggtgaatttatttaaagtattttctttgaaaaaagtttgctaagtagatcctccaatattaaaagaaaaaggtatctctggaataaagtaagaggattgtaatgaaagtaagaggataattgttcatccatcaagccaactcaagctagttctttctttccagtgcagcaacacattttagggcaacaaagttcagaatggatacaatggcctgttcagaaagcatgcaagttatatcagatcatttctttaaagtcagtgtgataaatttgttaactagactccgaccatagaaagagagagatacaggaagtcaatgtaaattgcagacatgccagctctgttggttcacattacagctacctaatgttgggcttaatttctttttcttc

SEQ ID NO: 211319 - DNA, 608 bp, Homo Sapiens
  misc_feature (401)..(401): n is a, c, g, or t
ttttttttttttttttgtaggagacaggtatttatttgccaggcacacagaaaaatgcgaggaatagaaatgcttgcatactcttgatttttttttttttttttggtgtaaaaaacacaccctcccctcccaccccaaaaaacatcaaattccttccttttccccaaatccctggatcttggaatgaaagccacccttccccaatctgtcctcacctccttcagcccatccaagttatgcacaaaaaaacaaaaattagtgagaaatttggggatttgcacaacaaaaaattagataatgttttccaaaactaggtcttctatgctgtgtcaaaaaaagtttcctacagactgaggatattcacacgacaggagcctgggggttaaatgagcctttattanaatgttgtagcagttgtgtttgaaggcggtggccctacaaaaaaaaaattaaattaaagtccctaactgcatgggtaggaaaaccagggctggagctcaattggaaccagtggagcccagaactcatggagacatacgtatgtacgtgggcacgggacgccctcgcactggcatgaagccggcccagcctgcaagagacacggaacg

SEQ ID NO: 211320 - DNA, 601 bp, Homo Sapiens
ttttttttttttttttttcagagcatatttaatcctgggctattgctgaggccgacttagaagagacaaagtgagatgcgaaagaggagaatttttatgatagtttgtacgttacaaatacccaagaaactattttctttacaccattattgccatgactttttgtggacagtttcacataactgtaaagtccaggctgcttgggtctgacccctacagacctgccatgttgaagcccagctttttcgctcccgcacaggtaagaagctgctgatcttctgcagacccgccatgttggggcccagctccccacgccaagtcagaagctgctcatcttctgcaacagggtttggcgccgttcttcagggccaatgccctcagcaatggactttaagaagcgctgctcgtgtgccctctggagcaaggagctgacagaagggttggtcttgctcaaagtctcatagcaggtgagggtttccaaggctaaaacgtagagtggctcacagacctccgggtggagcatggccatgatgtgcagagcatggcagaacacctgggtgtaaacaaacagggcttcctgggtcaggtcctgctctggtcc

SEQ ID NO: 211321 - DNA, 687 bp, Homo Sapiens
ttttttttttttttttttaaggaatgtttgaattttattgtacttttttttttaaagaaaagagaatatcataatcttacacaatttctttcaaatggataaacttagacaatttatcaatgcttccttacatttttacaccacgctgaactccaacaggtttttgttttaaggtaaaccaggtttttggtccttccctgtggagaagttactttcaagtcagtgaaagttcttggcccatgattaaaagtctttgccaattagtactcaacaacttcaattcatttttttctggttcaagatgagtaggagcctaataaggctgtgataaaagggcaaaaggcactgagagccaaaagcggattaatgagctcctccatttatttgtcttcctaacagctgaactgttacaactattgacactcttcaaaaggttccgctctgaaccctgtccaggcactgcaggctccaatggacatcttcaaatccagagaatggaggggcaagagcttcccctgtgtgatgccaaaaccaacaaagccccatggatcaggtaatgaaacttcagcttttccccctttgagatttatttactggcagctgacaaggggcacattcagctcgaattgtgcagtcaaggccctgtcaagcttttagaggcaccttgtcttgaagcacttcatgact

SEQ ID NO: 211322 - DNA, 681 bp, Homo Sapiens
ttttttttttttttttctggagaataacatgtttatttaatgaatgcttgttggattttcaaagataaacaggctatttgcaccatgtagatacagactgacctgaggctccacaagctgagggagtgggagctttatttttgatgagagttcatgatgcagatattgccacttatctccattttggccctggggtgacaagatcgagtctggaacgtcattttcagggctggatgcctggttgcttgcagatgattcctgagttgtatcgttatcatgttggcaatactggggccacattttcttagcattaaattctatgaatttgatgaaatctttctgttccattggttttaactccagaacctgttgctgctggaaatctttttgtctgctgaattgtggcctttcagttacaatggattccaattcagaaaggttaactggttggagagcttcttgatgctctggctctgaggatttctttagaatggtaggatgctgatcttcactgtgcttctcctgaagcatcatctggactttttctaaattgcacttcactgttttcagtttcagggaaagcgcttcagcctcatgttgagtggctccattatctcccaggccctgatctttgcaagtctctaacagaaaggcaaccttgtgctcaatctctgttagcat

SEQ ID NO: 211323 - DNA, 632 bp, Homo Sapiens
ttttttttttttttttttaaaacacaaaagctttattttatcaaaacaaatcaacagtctacctctaacaataatcttcaagagtaactgcattgtaaataaccataaacgatccgatcagaatacattcaacatagcatcgctatagaatgcaattaaatgtataatgtaaataaacaacttaaattatgcaactcgcaagatgtaaatgtcatgtggacacagaaaagggacagagacaagacaaactattgcctggcgctgaagagacgagccctcactcaacacagcccagctgcggggacctctctctagccccaccatgacgtagacacaggagcccttcttttgagatggagtctcgctctgtcacccaggctgcagtgcagtggtgctatcttggctcattgcaacctccgcctcccgggttcaacaattctcctgcttcaacctcctgagtagctgggactacaggcgccaccacgcctggctaatttttgtatttttaatagagacgggggtctcatcatgttggccaagctggtctcgaactcctggcctcaaatgatccacccgcctcggcctcccaagtgctgggatcacaggcatgagtcactgcgcaggcctgggag

SEQ ID NO: 211324 - DNA, 303 bp, Homo Sapiens
ttttttttttttttttttcagagaagttaagtttattttgctccttgctgttctcgaaagatttgaggtatttaacaaaagtgcttatgattcaaaaggaaaacaatacaggcttgatggggagaaggaagataaaggcaatgcttggaaggcgtgataagctacccagaaatgtacaccatgctgggctggtcgagtggtcagaggtggccatacgtttggctcggggtttcctagaagccaaaacagaaggaacacaatttatatttagaaaagtgaagcaactgacacaggaagtagagt

SEQ ID NO: 211325 - DNA, 685 bp, Homo Sapiens
ttttttttttttttttttgcctctaggcaagctttattctttgactccttcatccaggaaggggctgttagttgcatctcacccaaatggaatgcgatgggaattgggggcttgagttgtttggagaaggagctgttgatcttggcaaatgaatatagctggtgtgtggtgtccatcaatccttgagtgcttggccatggagactagggaatggtcagaacagacccagaggtccccagatctttacaataccaaggttcaggaggtatagacagtaaggaaaaagtccatttcctatttctgtccattttcagtaaagtttttgttttgactggcttttaaaaaattacctaggaaatggaaagcttataaacattcgtaagtgaattgttgaactgctaccccaagtggtttccttacccagtcaccacttaaccagaaatattagaatacacggttcaaccagaattcaaccaggcagataacctgcctgttgctcaagcaatcatcagagttttaaaaaacaaaattaagcaaaaaagacctttccccaaatagcatcattaccacttagctttgtacgacccattcctaggaaagccacattccacttcagagaacatgaccgcttaaggtacagttaaaacaaagtccttgcctttaggtgcttactttttgttttaat

SEQ ID NO: 211326 - DNA, 569 bp, Homo Sapiens
ttttttttttttttttttgcaggcacaagggtttttttggttctctgtaatatggttgggaattcaatattaagaagtagagaatcccagctactcaggaggctaaggtgtgaggatcacttgaagccaggagttcaagatcgacctgggctatgtagagagaccccgttccaaaaaagatgtaaagctggaaggaaacttgggggtcagctggactggccgcctttgttgacaaggcaggaaagcctggctcagtaccgccgaatgatttgtccaaggtgagcggtggcagagctggaaccagaagctgttagatgtttgctgccccttaaactccagcaccaaacctccctctgtccccgaagaccatcttcacagggcatggttagtgcgtagtggatctaggctccagactgagggtctgtctgggaagggcttctaggaatcccccagcttcctcgataaaggatgtggctctggttacccccctcccccatttccagatggaaatttagctaaagagtgagggccacagagcccatcaaggggcgtggtccgtgcctgttccc

SEQ ID NO: 211327 - DNA, 682 bp, Homo Sapiens
ttttttttttttttttttaagacaattgattttttttttttgctttctcggtcagataatttcagaaactccctccctgtgcacctgtgggcattcccacttccacacaccaacaagacaaggttagacagatcttctaaggcagcttctaaggcctttcagcatgtcaaaatgcatctttggggtatccgtttctgagtaccaacaagggaacggaatgggttaagatttcattctctcagtagaggaaaatctagggattcattctacatttgaagccaaaaacagttatctgactccttccagagcctttaaatgttgatcccttcccctcttctcccatcaaacatacacttggaagtttaagaagaatggagggatctcaaggtgtaaagttttctttctgtgcgatgaccagtgctggtcctcggatgtcaactgccaaccagggtagctcatggttacaacctcccgtacagctctcacttatccagaactactgaggctccaagctcagtatcaaactgttcacttgcactatgtcctctatgatgtcactgtcatcatcattttacagacacactgcgactccaagtggtcgttactagttcacaatcaagtagctctcgttcatcttctcgttcatcttcaactctatgattaactgcaaaatgttctgctc

SEQ ID NO: 211328 - DNA, 705 bp, Homo Sapiens
  misc_feature (530)..(530): n is a, c, g, or t
  misc_feature (634)..(634): n is a, c, g, or t
  misc_feature (667)..(667): n is a, c, g, or t
ttttttttttttttttttgtaaagcgctgatcctgtttatttggcaggaaaacgagacaatccagcagcccaggagggacaggtggacttaatcctcctcctcgtcgtctccagccccagccccaccctggcccttcttggcattcttcctcttcacgcggcccgggcggccacccccgtagggagagcgcagagagaagtcgatgtgcttctgggaatccaggcggacaatgaaggacgggatgttcaccacctgcttgcggaccctggaagcagcgacaaggtgaggtggactggaggagaaacggacgctaaccccagctaccgcaccactctttcctctccacccaccccgtgaggccgccacggctgcagacaccaaggcgctgcaggaagggtgcacctgatcctacgtgcgccctccggggttttagggtatcaccttaatccccaaaaatgcttcagatgactttctcaaccccattttataggagaaatccgaaagtatcccacctaagaccacaaagcanatgagatggccatgtgagagcccccaagttccgagtctgaaatatcgtgaaccccacacctgacactgagctgtattaccacgtgcagcagcaatgcccacaantacacagcaacccgaggctacgtctccgacganagcactgacacacaaggctctgcctacggctcacaggg

SEQ ID NO: 211329 - DNA, 688 bp, Homo Sapiens
  misc_feature (612)..(612): n is a, c, g, or t
ttttttttttttttttttgaacattgtcatatgtctctgtaatggggtggtgggacacatagtgtctaacacttcagtttctctgctgcttccctcccattgagaagccagtgccagggttgctgtgaagatgggagagcttctgaacccacctcattaaaggatgagaaacccagggtccgagagcaaagggacttgacggtggccgcaagtgcttcaaaggcagagctgggattggaacccaggtgtcatctcgatgggaatgtccagcagtgatgtccaagtgggaagtgaagacccgaaggctcaagggacacaggtggctgacagtggtcaaaggctagggggcaggattcaggcagaggagctctagggggtgtttgccaccctgtgtgaactcccgagactctaccaggggggccgaaaggagtaccccagaagggcccaaggggtcctcggggttgacctgactctctggagtcctggatgggtcagtggctgtgggtgtttggggagggcggttcctgctgccaggctggggcagcagaccctcaagacatagttacaaagcctttgggtgtcactcagtgtctggcttgccctggggcccanaagggctggtcagtcctgcctctggcaggcaatctggtaggcccatgattcaaggaacagtgacattcagtggtcc

SEQ ID NO: 211330 - DNA, 667 bp, Homo Sapiens
  misc_feature (608)..(608): n is a, c, g, or t
ttttttttttttttttttggttgctttacattctttcaattaaactttacatttgatttccaaggaagtcacaggcataaaaatctcaaatcaagtttcccctgaataaaaatggacagacatttctctgacgcaaaatcctcttgctcagaaagctaaagtctgtggtgaattcagttcacagatactgcacacttatttgtacaatactttggaggcatttgtagttgtaaaatagaatatacaagtctgtttcacaaaattctaaaaataaaatatatcctgggctattgataaagcatgaaaaaaaatttcatattaaaggaaaattatcaagaaaaccccttcaggtaagttattaaatctacgaatcaagaaaggaagcagtttgtgcgaatgcagtgcagggaggattcgctaacaagtgtgctccgtctcttccatgctcatactgctcctccggctgcttgttttggaagctccgggggacactgaggaaaggagtggatcagtgacaccgacgggagaaagggtgtcgtccatcaggatgtcttccagtttggatcccatttttgtggggacactataggcttggttggcctcagtcncagttccgaggttgttgttgaaggtgatggtgccatccgtgagatcgagagttgttgta

SEQ ID NO: 211331 - DNA, 649 bp, Homo Sapiens
ttttttttttttttttttaggttagtccctttaataaatggaattataaacttgtcccataaatacctccacctcaaaataattgctgcacaagcagcgtgttacctcagtggttagtaaagtcctgtggtcctaataaaactatccttggggaacctcggagtaaactgatttgcagataagatacaatgctaatggttgcaatctgattgccttaggagaaaactgaagtcattctccagcaaacatctcccaaggccagctgaaccctcttgatctttagggaattcagatctttgggggggtggggggcagtagcatcaggctgtgggcctctgcttggccaacttccgaccacacaaaaagtttttctatggaccttgtaaatcatcaacccctccttggtcttttccagttctcagactcactagaatcagaaacacctctatccaaaaatctacaaccctggacacaaagaagccgagctggaggggttgggggacgacgagagaaccctgtgttaggtaaaagctggaactcatctcttttccgagccacctggtcctcagtttcccgtattatgaatgttacaaagatgagctggctcttagtcctggccgaggacacacctgtcctggcactacaggtg

SEQ ID NO: 211332 - DNA, 698 bp, Homo Sapiens
ttttttttttttttttttaagagaagaaatatgcctttttattgttttttataattacacagttacctttattggtgctctttgtttttgtgtgtgaatttgaattattgtctgtggtcacttactttcagcctgaagaactctagtatttcttgtaaggtgggtctggtagcaacaaattctgtttttgtttatctgggaatttctttattttgctttcatttttgaaagatcactttgctagatatagggtccttggttaacctttccattttggggttttctttagggggcactttgaatatgtcattccatgcttctggcctccattgcttctgatgacaaatcagaattttatatgactttccttaaaatgtacaagtagtttttacttggtgctttcaaggttttctcctggtctttggatttccacatttttactatgatgtatttgcctgcggatctctttgcatttattctaaagttcactgaagttcccggatgtgtggattaatgttttacaataaatttaagaagtttcagccattatttcaacaaataatttttttctcccttctctctctctcctctccttccgatactaagtgtatgttggagcagttaatggtgttccacgtttctctgaagctctcttcctttttattcattcttctctcttctttggattgcatatctct

SEQ ID NO: 211333 - DNA, 646 bp, Homo Sapiens
tttttttttttttttgttgctttacacttttaatctctgttggtacatcagatgccacggaccaagcaatttaagttctggagcccgaaggcagttccaaaccaaagcaaggattaaaacctaactcaacccagcaaggtccttatccaagctctctagaagagaccattctgtttctagaaatgacgggacactgtgttcaaattgcttctgtcaagatacttaaaaataagtaagtgttcctcattggttacaaagctggggctaatgctcatctcaaaacgactccaactctctgagtccagccatttcaaaggacatcctttagtctctggaaatggagagtgcgattcagaaatgagctccaggggccctctttacaatcaccaaggacttctctccactcgtgagggtccggcttcctccagtgcatccttctcttcaggctggaggaagttttctatggcagagttcatcatgcccttccatcttcccgtcactgattatttagaagacaggagaatcacagaaagggcaggggctttgcagtaacctcttaatccagtcgggatcttctggagctggatgccgggcaatgctgtcatggagcaacaccttctatatatcaaactctggcaggactggt

SEQ ID NO: 211334 - DNA, 782 bp, Homo Sapiens
  misc_feature (761)..(761): n is a, c, g, or t
ttttttttttttttttttaaatccatcaaattcattcattcattcataataaagtgattaatcattataaagagagcaatagtagtttacatatatatataacagtacatttatctaaaatagtagatgtgtgtgtgtttgtatcctttgtccattattgagcttggcaaacaggagtacatagaaataaaagcagaccttactgacatgtaagtcaataatgaatgccttttccttccctcatcttatcattctctccattgttaatttaaaaacaattgcttttgccagtattcacaaaaccacgtaaactgacaattgagtatggtaattaggccaaatcctttatggttatctcccctgatgaatgcttccacgccatctgcaaactacagtctcatctgcaaactacagtctcatctgcaaatggcccaggtgagaataaaatctgcatatgaaacagaatatagtgtgaatcatatctaattttaaatattttaatttatatgctttcatgaatataggtcaataagaaatccacttttcagattttatttcattatagaatatatttgacaaggatacatacaaacagattcatcttcaataatacatggtgtttactggtgccctgcacttctgcagtaggctggtgatgtcatcaaaaatgtttttgaaagttgcacttcatcagtcactctaaacaaccagtgccatagagctcagataattccattcatttacttgcccttgatgagtanaatctaatatttgctttaagt

SEQ ID NO: 211335 - DNA, 685 bp, Homo Sapiens
ttttttttttttttttttaaccaagaaaactaaaagggagttggtgaaagacatctttggactgcttctctcagttcctgctgtcagacaatctgaagtacttttaagtgtaacctgctcactaaccctcagcctgacacccagctatgtgtcgttgtcttgacactgtgtgggaagctttggttgggcaacacattgtcaaagttaaaatccaatgtatctccatccatgaggtcattccgaatgatggattccatgtcacagtctaagcgctcaatgaacatgccatccaagtcacttgggagcttctcctggtggagaaggcccattctgccatagccattgcagctgctcacggaggagtagccccccagggcactcatctgcatggggtggggcagaggcacttgtacaggtgtcttcacttgggtcaggcggttcatacccgaggtgtggggcatggtgcttaccgtgtggggcaggggacgcccgttaactgcagatgtctgctgagcatgtccagggtgggtatgggagctgggattcatcattttgttatgagatgcctggctgccataggttgacatgaccgaattagggcccatcatgacgttctggcccaaaacccggctgttgggctgggctaccccaggatcaactggtgtcataatgtcattatggggag

SEQ ID NO: 211336 - DNA, 676 bp, Homo Sapiens
ttttttttttttttttttggtattcagagacgttttattccttggtgagaaaagagatcacacgcttttgctttatcacagaaggaagggtcaagagaacgtctacccaaaggtaggcaggggaggtagcagagggcgtagggagctgctgcaggccaggctggatgaagatctggggggccgcttcacacagctgcccacatgccactctggagacttccagaaggacgggagcccgaccatgccttgtgcacccacagagccaggccccgagaaacaaggaccctgtgaggctatggctgagggcgggggccggttcctggggtctcccctccagaggggcgagagccacccctgctgggaggcctgggagaggcacaggctgtccagggcctctgacacgcggcccacctgtgcttctgggaaggccaccttaccccctctggctgaggagaaatcaaatacagttgagaacgttaatcctgagacgggaggaccctgcccgtgcaggcagctgctctccccagagtccgatacactcccctctccctgccaagattggggccaagatggcgtctcggcaggctggccggctgtgggttgaccagcacttcctgctgtcacacacgtcacagcccttcttccagcttctgattaagtctctgggacacacagc

SEQ ID NO: 211337 - DNA, 699 bp, Homo Sapiens
  misc_feature (19)..(19): n is a, c, g, or t
  misc_feature (634)..(634): n is a, c, g, or t
ttttttttttttttttttntttttttacaagttttcataagagtactttacttgtggatttcttggctaaatgtattaacatttgtttcttctcactaaaagtccacattttcaacaaagctgtatgtgtaagattgatagtttcattccacttgttcttttcgtaactggtgtaagccaccaggttctccgtgtactgcaagatcgactttacaaactttaggtactgctgatactcatgcgcattcttcccacaaacagcatgaatgttgaccaactccagcgcaatgagtaacagtatcaggctgagcacaggggacagtagtctgatactactccacatacgcaggtagttctgccgctggcgagaccgcagcgtcctttccacccactgcctgtgtctcagctctgaggcaacggtgacctggctggacacacggcggcactgttcgctgatgcttcggagcacaaccagcacttccagcacaatcctggggcagaacagggtgggaacaggtgtgctgcagagctcacggagaagctggggccacgtctcagtaggaagacgatccaagtcctttaacacacaacgattctcaggcatatggtgatacagctcatccgtcatttttgntatcaaagagtggcaggcatttgtttcagaattatcttctaatctgacggcttgccgagtgagtt

SEQ ID NO: 211338 - DNA, 835 bp, Homo Sapiens
  misc_feature (784)..(784): n is a, c, g, or t
ttttttttttttttttttctatatcatatctttattgactccttaataactactacaagctcacttgtgaatcacacctgatgtacaataaataagtcacaattctgaaccacatctatagaaacttgaattcctagtaaatataataattgaggatcttaaagctcaacaagtcaggccttccagtttttcagatgaggaaattaaggcctaaagatatgaagtgacttaccccaaagtaaaagatctagttagtaataggagctgagattgagatccatgacttttaaaacccagaatcatgctctctccactaaaccatgtgatcattctaagtagtcaacagttttcacgatcctccttctgtttccctgggaagggtctccatattaaccaaattcttaaggcattcagagaatctctccagtgtgaggtttttattgttgtaaaaaagaagagttttgtctaatggtttccccacactcagtatgtatatttgatttctcttcactatgaattttttggtgttttgtaagatatgtgctctggctaaaggctttcccacattcattacattcatagggtttctcttcggtatgcattttctgatgttttttaaggtctgtcctctgcctaaaggctttgccacatttaccgtattcataaggtttttctatagtatgaatgacctgacattgaataagaccagagcagtaactaaaggcctttctacattcattacatttataggatttttcactagtatgagttttctggtgatttntgaggtctgtactccaactgaaggcttttccacattcagtacatttatacg

SEQ ID NO: 211339 - DNA, 821 bp, Homo Sapiens
ttttttttttttttttttactcggagaagtgccaagtttattagagtgagagagtatcaccctcacattgccaccaacagacatagatctcagagacacactgaccttgcaccataattatggtgagtttctaggttagaagataccttagaggtcaccgggctgaccctcccatctgatgtgttaacccctcttaaacatctccctccaggagactgaggtgagattctgtttaacatacggctatcactgaaactctggccagctctgaatctgcaccctggaggcggagaatgtttaagcactataaggcagtagaaggaaagttccttggctcaggccccaatggtccccctttttttaatgatgaaaggttcccagagtccagtgcaaagtccctcgaaatcccccccaccaagcacaaagcacgaaaggaggcctgggccgagggactgggttagctggattttgtccttgagctttgagaaggcctagttctccatccacagaaggcctctcttgcagggttctggggccagcccttgccatgagcagcttgttcttcagctcacgaaactcctctcagagaagacttaggcttgctgttccaccagctgtagtttggcagtcttgactcgatgagcttccttcaggttctgtgcacggacctctgggttggaaatgaactccacctgctgcacaggaaaccagcctcgctccccgtctgagagctcacgccctccagccagccgtcactgctctgctgagtcaccatcaccacgtcggctttctccagtgcaattcatcattctctcggggct

SEQ ID NO: 211340 - DNA, 756 bp, Homo Sapiens
  misc_feature (635)..(635): n is a, c, g, or t
  misc_feature (707)..(707): n is a, c, g, or t
  misc_feature (730)..(730): n is a, c, g, or t
  misc_feature (742)..(742): n is a, c, g, or t
ttttttttttttttttttgcggctctacttcctttattgaggtctcaagttccagcctccgcccgtctcgggcacaagaccaggcggggttctgcacgcggccgcccgggcaagcccagcagatgccccgtcaggagtactcgcagaggtggccgcagcctgcgggacagtgggagctgccttccagccacttcatgatgtgctgcaggtggccgccgtggctgcagccctggcaccacacgaagagacccttgactacgtggtggcagacggcacacatgctggcgcagcggtggcacctgtcgcagacccagccccggctgctcatgggccgcttgcagtggctgcagttgacgtgcagggtggtggaggcctggttgaggcagctgacggcgcggctggtgctcagcttgaccacctcgttggacacgttccagaggcggaagcgctgcagcaggtcgatgtaggaagtgtaccagtgctcctgggtctgctcgtcgatgtccttgcgcacccgttcacccaggacgatgagcacagacacagccatctgcacgtcgccctgctcagcgtagaagtgcagcatgtcgcgcaccagcacgccgaagaagtcgggcggcaggcggctgtcgtanagcgcgtgtgagacagacaggagcgagaaggaggagtccacgggggccagggagggcacatccgcctcgctngcgctcacgtgcggggagtcggncttgtcctgcangtgctcgggcccgg

SEQ ID NO: 211341 - DNA, 636 bp, Homo Sapiens
ttttttttttttttttttgcggtgaactacagaatttattaaataagaaagctatcaattggaacaggaggaaaaaaaagttttaaaaaaaatctataggaaaatagtcaaaaaagcatttagtgctcgtcgccgtccctctgaggggggccgtcagaaaggcaactgggacctgacagacccgggcacatacttgaaattcctgaattctaacctgcattgtacaaaatgccacttgaaacgtccaccagaacccccagccaaagaggcacatctggacagcttcacagcacggaacgtgtgaccttggtccccgtgggtcccggaggaggacagcagcagccacgcggtggcccctgcgcactcaggccatgactgcagggaccacccactggggccacaagagtgacccgggagccagagggagccctgagcatcggcggaaggcacaggtccctgcccggggtggccatctcagaggcacatttagtgtttgttctacttatgaaatcaaggacaaccaattgtacttatcttacaactgatgttctgggatgggactggaaaacactgattccagaaccactctttttcttaaaatcactggcttttatgacaatgtcttccaagagctca

SEQ ID NO: 211342 - DNA, 745 bp, Homo Sapiens
ttttttttttttttttttattttaaaatttaatgtttattttaaataggaaagcatttctagtgctacaggcatcaaggtatttagaaggcatcaaaatttggtgcatagcaactctggatcatagaggcttttaattcttgagggcacaaagggtattgcaaggggaactcttgcaataacctcatgtgaggcagctacaccaggggcaaaagggtaggggcaagtctggccatttctctggaatgtcaaccgagaggccaacttcttgcccctccaaaggaagctgtgggcgtccaaccacaggcccagaagcaaatctcactatccacattctgtgacacaactcacttttcaagaaaatttgaaaacacccagctccaagaggggccacagtgatctgctgaagaatagacctttttctctaactaactttaggggagaaatctaaaatatattttgttttttttaaagaccatacttcctcatcctgagtcaacagctcctaacctactgacaacaggtggtgggcaataggccagctccctttcccagacctgaactggccttagtagagagagtcctggcatcaagggcctgcagtctcctggaataacagcatcaggccttcaaccagcacactgtctcacatataggcactcaaaaaatctgcttcctgaatcaatggaagtatattatttcatttgaaagcatactgcaacttcagaggctctgtaatgggccca

SEQ ID NO: 211343 - DNA, 720 bp, Homo Sapiens
  misc_feature (642)..(642): n is a, c, g, or t
ttttttttttttttttttcttgtgcaaatataaacaggtttattcattctgtcattaggatacaaaatagaacatgtaaaaggcacccctcccgtcgaccccacagttcagtgtgaacaccgagcgctcgtccagggaaggctgccatgcacggcgtggctcccggtgaaggcagccggcttgagccagcctcaggtctcgaacatggcacagctggtgcacagcactttctcgtacatgtcactgcagctgcgacagcgtcagggaggggagagaaaagctgctgtcaggggctgaattgtgtccaccaccccccaccattcaaacgtcaaagtcctaacccagaacacctcaggacatgaccttatctggagacaggatcactgcgggcatcatcagtctagatgacggcactgacatgggggccctaaggcaacacgaccagcgtcctaaaaagactacgtgaagagaaggacacagagaaggaagacgacatgaagatacagggagggggcagctgtctacagggaacaccaaagataaccagcagatgccaggagagaggccaggacaggttttccattgcagcctcagaaggaaccagccctgccagcaccttcctctcagacttctggtctccanagcacgtggcagtacctctttgctgtctatgccactgggtctgcgaactcagttacagcagccctagctgattcccac

SEQ ID NO: 211344 - DNA, 745 bp, Homo Sapiens
  misc_feature (667)..(667): n is a, c, g, or t
ttttttttttttttttttcaaatgcaaatagtctttattatgagaaagcagtgttatctaggaaagtcacacgctggtttctttctaataaaatgacaaagcaggtttcttaaataatttacaaagggcagaaattgctcttgaacagggctacccctcctggcacatccacagtgctctgcactgagcatataaataggtacccgtgagcccagggtcgtaagcctggaaatatctcctatgccttcctccgagtccctggtagggaaaggagggatgagagtggggccctcaagagccttggcaccagaaacacagtgggtgagtgactctgcggatgactccccaaaaaccaggcacccgggtacagagctaagagctctcaaatatctgatgctagcacttcatgttatagatgaggcaaatagaaggctcaaggtcaagtgtacgatgagtttctaagctcaagagtcccctaggaaagcagaaggaacaattctccccctctgcaaggtctccccaagacactctcaggctatggcaggcagtcactgatgggtccagatgtggctggagcagggggctctgggccccttgttaggtgcttgttagcagtggcccaggggtactgacgactctcgggggttttttccaggaagctcacggngaagcatagacatccttgagtatgaagccttggcggtcagacagggcttgtttcctgcaagacagagctgcctttttc

SEQ ID NO: 211345 - DNA, 723 bp, Homo Sapiens
ttttttttttttttttttggcggtataaaagtgcttctttatttggtcatacagctttcaaatgttgcttaacgaacagatagcatttttataatcagaggaaagactcagtattaaagtgcgcgtcccatcattgcaaccgggccctcgggcagccagctctctcttgcttcgcgtccggctctcaggccctggagctcggcctccctaccttctccaggcgcgggtcctgctccttttccggccgccctcgctccgccccttcgcctctccccgtgatccctctctcgctaaccgtaggcgcttttcgtgaaggcccgggtttttacagcacttcgcttttctaaccacgaacagtgctcgttcgttcgcagggccagcaaggagagccccgcccccgcccgccgcccgccgcccgccgcccgccgcctttggatcccgcggactccgcccggcccggcctccccaggcatggcgccgctgcgcttctccgccaatctgtcctggctattccccgagctccccggcctccccgcgcgggtgcgggccgcgggcagctcgggcttcgaggccgtcgaggtggcctggccgtacgcggagacgcctgaggcgctggcgcgcgccgcgcgagaagcggggctgcggcttgtactgatcaacacgcccccgggtgcgtcgcgggccgggagggctgggagggctggggggtgccggggcgcgggc

SEQ ID NO: 211346 - DNA, 739 bp, Homo Sapiens
ttttttttttttttttttgcgggtgtctgaggggagcgtttatttcaagctaccgatgggacaaacactcccaggcttcccaggtgccactgtccggggcggcatcctcacttccagcggcctccaacgcggcccttccctgcccccttccggaacttctgggcgtggctgatgcggttgtacagcacgttgatctcatatttctgctgtttcagcttcgccatcaggtcgaacttctcagactccagctggtggatccagtccgacagctcctgggctttctcccggagctgttcctcccccatgtagtcaatgtccagaggcttcttacgctcggagaggatgcgcaccttcatctcccgccccgtctgccgcttaccacgcttctgttctgccttgaccaggtagccgccaaaatgggcccccatgttggacagcaccttctttttcttggcatcatcctctgcccgcttcttggcctcttcctcttccttcctcatcttctcctccgccagcttagcctgacgttcgcgttccttctcagttctgaagcgctgttgctcggctctctctgaccggcgccgctcaatgcgctccttcaaggcaaccagctcctcttcctccttcttccgctgctcgaaatgtacatcgatgagtgtctgcagctccagcaggtctttctccatgcgcttgcggtggatgtcatcgaagtcaacgcgctccccttctgggatctttg

SEQ ID NO: 211347 - DNA, 754 bp, Homo Sapiens
ttttttttttttttttttggattttagtatgccttgcaattttttccctttattctgatgcatgaagtacccactaaaagtgactgttgttagtatagcttcagtaatgcggtgatgaggtgacagggcaggtgatgctctcttagtctctttaggctactataacaaaatacttcagactgagtaattcataaacaacagagattattgttcacagatctggaggctggaaagtacaagactaaagggccaggatatttggtgtttggtgaaggtcaaacattcagacactctcaacgactatagcgacagcagcagtcttcaggaatcctatgtgagggacaaacactcagaagccagctggagtgttctagaatcctatgtgagggccaaacattcagaccacagcagtagtgttgtggaatcctatgtgagggacaaactttcaaacccttgtagcagtgttctggaatgctatgtgagggacaaacattcagaccacgggagcagtgttctggaattctatgtgaaggacaaacattaagactctcatagcagtgtcctggaatcatatgtgagggacaaccattcagacaccagcagaagtgttctggaatcctaggtgtgggaaaaacattcagaacctagtagcagtgttctggaatcctatgtgagggacatacattcagaccacggcagcagtgttctggaatggtatgtgaaggacaacattcagaccttgtagcagtgttcc

SEQ ID NO: 211348 - DNA, 739 bp, Homo Sapiens
ttttttttttttttttttgcatgtatatattcattgcagcactattcacaatagcaaagacatggaatcaacctaaatgcccatcaacagtagactggataaagaaaacatagtacatatacaccatggaatactatgcagccataaaaaaagaatgagatcatgtctttgcagcaacatggatggagctggaggccattaccctaagcaaaccaacacatgaacagaaaaccaaacatcacatgttctcacgtataagggagagctaaacattgagtacccatggacacaaaaaagggaacaacagacaccagggactacttgagggtagagggtggaggagggtggggtatcaaaaaagtatctattgggtactatgcttattacctgggtaatgaaataatatgtacaccaaacccctgtgacatgtaattgatctatagaacaaacctgcacgtgttccccttaaactaaaatataagttaaaataaaatcctcgttaaatcactgcctgaaagtctttattgaaaatctgggagaaaatatattgaaatgttagtagtgcataactttaatttttatactttttgcatcttacaaactttctacaataagtacacatgacttatataaacagagaaaagcaatcattatcttaaaaataactatccagtaactgccacaatctcctgagtccagacaatctagagcagaagggtagactgaggaaaatatacac

SEQ ID NO: 211349 - DNA, 707 bp, Homo Sapiens
  misc_feature (685)..(685): n is a, c, g, or t
ttttttttttttttttttatttttatctccagtttattttttttagactaagagcagagtatgaaagtcacagccaaagcacttgaaaaaggcccaggaggataggtgggaccacatagggtgagcagggcaaggtcctgggagatggttcccggctcagggctggaagggagggggcgttgttgttttacggtctccaaaagtgtctgtgcgttgcataggtcctgtcttcacagaagacaaaagaggggccagggggtcccccaggtgtggggggcctagcctggtggggaaggggtctgaagctgaaggggaagtcaagaaaggtcagggggttaaagagggaagggactctgtctgtctgtacattatatatagagatatagagtctgtacatgcctgcctggcaccccaatgcccaccccttgccatccttgtccactgcccgcccccccaggggtgtctacttgtaaacttggtttcaatccaaaccacaatcctggaagtgggagtgggggaggaggacgtgcttattgctgtaaacaggggaaggaagcagcaggcagtgctgccccttgcccatctagtcccctccccatgttctgcccctggaggagagcaatgggggtgcctcccacgcttcgatttgctctctctgggggcatatgtctctctggggggacanagggagagggcaccaggagtca

SEQ ID NO: 211350 - DNA, 762 bp, Homo Sapiens
  misc_feature (731)..(731): n is a, c, g, or t
ttttttttttttttttttgtattggatttcactttattttgttccctttcccgtctgttttggcgtagaaaaaatatcaccgagaggaagcagcaggagagggcaggtggagctcgactgcctggactggaggggggcgggcaggggcaggggccgggggcagggccagggcctcagcccaggggttctgcttccggtaccctaatagggtttggaggaaaaggggacaggcatatggcaggcagaatggtgggaggacaggccgaggtttttaggcctttacagtcttaggcggggtagggtgaagcaggacaagcgctgggggatgggaaagtcagggtggggtgagggtgccaggccaggagttattaaagctgcggggaaagggagtgcgcagcctagcgccaagggtgaaaaggggacccactgtggacccaggggacattgggaccgcctccaagccccgcctattctggggctgcactcttatccctttcactttggggtgtactggagggggctaccccagccttgcgggcactccgcataaggaaaagggcacccacgctagctgagggtcccgagaagccattcccctccgcccccagagtggaaggagtgggcgacatggccacaggagcggcagaacactgggaagggggtccacctagtgaggctgggatttggcgggaggctcaagactggctggggaggggcgctatccgaagtangggtgctcactctggaagttatagtctggct

SEQ ID NO: 211351 - DNA, 795 bp, Homo Sapiens
  misc_feature (721)..(721): n is a, c, g, or t
ttttttttttttttttttcagttaaaatgtagtttatctaaatctcaaaatgtttaataaaaacaagtatcttctccatttaacactttgctttctaactgtacagtaaattgcattgtagagagtacacttctgtcttcaaactgtatcttctttggatggaattaagatgtaactgtatagttttaagataaataaatgggaagttggtccaactaagatgacagcagatatattacatgcaggatttaatattttctaattctctcttttaaaaaaaaggatgctgttggattgggaaaaaaaaaaagtcaaaaaagaacccagattcaatatataaaaatgtcccacaataggtcgacaatggcagtaaaaataagaggaaaaaagtaatctttctggaacatcatttttcaataacatagaaacactaagtgccaggaagattcctattcatgtaattttagcatccaagtttccctctatttattttattggaacaaatgctttaaataaactatttgtcctcttcactgaagagagctggtctatttcatctttaatgagctagtttttgggaagattagccatgtactgtagtaatgcctactgcataaaatccaagcatttgctgtgaacagttggagaaagcagtcaggaagaacctaggatcaatggaaatagatgttactttaagccaccgacgaaagagagaccacanagtacccagtgtgttaaagccaatctcttcttgcgtttgtttgtttttgctgtgcaagttcaccctatgaaaag

SEQ ID NO: 211352 - DNA, 735 bp, Homo Sapiens
  misc_feature (655)..(655): n is a, c, g, or t
  misc_feature (678)..(678): n is a, c, g, or t
ttttttttttttttttttaagaatggcaccaccgtttattgctgccagtctatctgaaattccgtgagtctttctgggtttttggagataagtgcaccagagttaaattaaatcatttaatttccaggagtgataggcatagggacacattactcaaatggatctggaatcccatttttttccaagaaatctttcttgattcattggatgagtggctataatggacatatcttcctattaattgccaacagcacccccagctcccaaattcattcttttgtctatgtgtagaggtaacagcccttatcagatgttacatttgtttaattggtgactgtgtggctgtgatttaatctaagtttccagggagctatgggttagatgccaagctcactaccttgagcagacagggactgctggagaggagggtggggtgagctccctgagacccaacgagagcctgggaactggctgccattattgtgttggctgtcccagggctctgggagtctgccacaggctgtcctggcatctgtgtggtgtctgtgtaactcccccacatgctggaaaggtagggccccacatgtcttggtgccatgccagagcgtgggctgcagcaggacagaggtcgtttggcagagctggcattaactcnctagggatgctggagagccttangagcacaggcaggtgtccagaggcagagcagaagtccagccaggcccagatgggcag

SEQ ID NO: 211353 - DNA, 721 bp, Homo Sapiens
  misc_feature (550)..(550): n is a, c, g, or t
  misc_feature (697)..(698): n is a, c, g, or t
ttttttttttttttttttgccgcatgagattattttattaaaaaactcaaaggaagcagagtgtggagcggtatctgtcctgcgtgacgtctcacatcggagttggctcagaccctggctgtgcatccatcagaaagtgcaaggcccaggccatgagctggggaggaagcctgacagcttggacccgagcacagagggacgtgcagggtggctcatactcatactggaaggcagaaccatcacgatgcctctttgggggttcccagacagagcagggctcctgggctcccctggtagctccggtcctgggaaaaggcggccgattcttgcagggcaaccctacaaactccttgaactccaggctaggtttctggggcctggtcacaagagcctggtgtggactggggacatggctacggggtgagagactgggagtgcagctctggagtggggagctgggggtacggctggcgtgtggggacctgggggtcagggtggcaggggctgagcagatggctggtgagggctgggagctgcttctctgccctgngtctggagcagccaaggacagggcaggcagaaggctgatgctggtaccactttcctcggatgacatgtggccgggtaaggccggggttcctgaggaactgggtgaggaaggaggagaggctatgagggtcagagataggtcctgcannagcggggtctggtgggggcagct

SEQ ID NO: 211354 - DNA, 747 bp, Homo Sapiens
ttttttttttttttttttgaattttaaaaatgaatgtgtatcactagtgcctgattcttaatctgatcagtaactgcttgatgactgaatcaatcgctgatggagggaacaattatgcctcattcactgccgtaacatgggaaccttgcatacagcaggtgcttaataaatgctgggcacatgaacagatgaagagggcttggttcctcccaattccccagggccaagccctgttgctggcatgcagtaggcactccattaatgctgcctgtgtgcacgtgattgcttagcaagagctggctggacaccaccccacacgagagccctctgtggcctgccaaggggtccagaggtggccctgatgtcctcagtaagcacgtggagcctgggccaccgatggctgctttggctttctggctgctacccctcagagttcatcccgggcagcactgtccagtggggactggagcacgtccgagttcttggcctcacggctcagtgcctgctgctcccgcatcttctgggacttggcgcggtcccagtcggtcttgacgtgctcattgttccatacgactgaggtctcggtgtcactcacatagccatcgtctcctgtgtagtgtgtggggtagatgagcagcggctccacagagaaggcatgcaggttgcggagggagaagtgggccttgtactcggacactgggtgtttgtcgaacatgacgggcaagaactcgtccacaggcagcatct

SEQ ID NO: 211355 - DNA, 627 bp, Homo Sapiens
ttttttttttttttttttgtaattcattaacatttattttcaccaatgcaataaataaatctgtcatgaggttaatttctcctaatctgtataaaataattccattaacctgtgaaaagtaatgatcatactgatttgtctagggctcaaacccttagacaaacatctctttgattacctgtttgtgtaaagaaaactgaatgcattttatattaatatttaaactactgataactgtaaacaaagtagcatttattaaaatagaatatacacttaatttatactaaattccagggagatttatacaagtttttcagccttaatttttaaaggaatgcatgattttttttaaacattaccagtcaagtatatacaaaattgaagtatgccattcaagccagattgtgattttaaaataacaaacctctaaatagctaagtaatgtacaatgtgtaaaattccaattaaacacaggtataaatcttatataaatattggccctataataccgagcgatatttacaagcaaacatgatccaaacagcacatgcagattcagggtaagtaaatactcggacacgaactgccagtcgcacttggtctccacggcaacagattatttcttca

SEQ ID NO: 211356 - DNA, 714 bp, Homo Sapiens
  misc_feature (658)..(658): n is a, c, g, or t
tttttttttttttttaaaaaggaaatgttaatggaatttggatacatttccacttatttggtatatggctttattttcagttttattttacaaacacttacatggtcttactatgtgccaagtactgggttccaaacgttttataaatatgaatgtatttcatcctcataactctgtgaagtggatactactgttatctccattttacacaggtacagagaggttaggtaacttacctaaggtctttcagttaaaaatggcagtcgggatttgaatcttgccagtctggcttcagagtctgtgatctttatttatttttcaagagatagggtcttgctgtgttgcccaagctggagtacagtgttagtcacaggcatgatcccattactggtgagcatgggagttttgacttgctccatttctgacctgagccgcttcacacctccttaggtaacatggtggtccctggctcttgtggggtcaccatattgatgccaaactgaggacacccaacgctcgttgcgtgctacagccaagaactcctgggctcaagtgattctcctgcttcggcttcactagtagctaggacaataggcctgcaccaccaagccaagccagagtctgtgatctaaccattctattatgccacctttcccanagatgtttacagtttttcttaaactgtaccagtgtagaaaataaaaatttgtggag

SEQ ID NO: 211357 - DNA, 716 bp, Homo Sapiens
  misc_feature (644)..(644): n is a, c, g, or t
  misc_feature (662)..(662): n is a, c, g, or t
ttttttttttttttttttaaattaataatatttataatttctgaaaaatatacaacttaacatgaaaatatatattatagcataaatccaggccagattttggcctaagtaatacatccaaagtgtttcatttttttttaaaggcatcaggcttttctctttatttaggctattaatctatcttgtcctttttacctcccttatattctagtcactggttttattagcagttacaactaccaaacaattactttttattgtatcacacactaaccatgcctctcactttaaatttttatggatcatatattctaatcttaaccataaaggcatagctatatcctaaccatgggtactcccattttttatagtttattatagatgcatagacttatccattggtccactgtaagtaaagaatgttggaattgtcagtgaaagaccaggaacacctcaaaaataacatcttaatgaatcaatgcaatgttagttggcagcagcattgtcttgcatgtccaaattacatgttttactatctgttccagcagaaggtacaaaatgttcaccattatttaagaattctaagtttgcttcatccattacttttctttcattgtccgatgccttggtatcttttccttganattttttcttcatagcanaaatgaaaacaatatataaaacaagtgctgggaatcttaaagctatagataagc

SEQ ID NO: 211358 - DNA, 798 bp, Homo Sapiens
  misc_feature (652)..(652): n is a, c, g, or t
ttttttttttttttttttctcaggtttcatctttttaataagctctgtgaaagacatcctaagcactgtatgagacacaacagaatattttttcttccagtattaaaaaaaaaaagacatttgcaaacattttaaagccaactcttctatataatcagtttgatgatctgaattagaaaataccgctggataatcatgttcttgatacacatttcctttttttttgagatggagtctcgctgttgcccaggctggagtacagtggcgcgatcttagctcactgcaacctccgcctcccgggttcaagcgattctcctgcctcagcctcccaagtcactgggattacaggcgtacaccaccatgccaggctaatttttttatgtttagtacagatggggtttcaccatgttggtcaggctggcttgatgcacatttcttataggtacattgggaaattgcttcctaaccacaataaacactgtgtacaggtttttaaaatgtccctggatacacattaattttttgaagtcagtctggccaaacttgccagaaccaattattgctagctccaataaacctaagagctcaaactaaaaaactggtaaaaagaaaaatactcaggttctacaaacgtcccataatttgtctttanataggcagaaaaaatttaaaaaaaaagatggaactgtctaaaaggtcttcagctaccttggcaggtcaatttaaaaacaaaaggttgatatactataaaataagatgcttcggtgcagctccaaaacctttataatacagcatttg

SEQ ID NO: 211359 - DNA, 764 bp, Homo Sapiens
  misc_feature (723)..(723): n is a, c, g, or t
ttttttttttttttttttcaaagtacaaacttgcatgtttattgattcggcaactctgcttatggagaaatacatgtactagtcaccagtacattttaatattgctctgcacttaaacaaccaccacctgtcactgagctacagaagtgttgattccataaatgttcccagtgataccatgtaaggtgataccagtaaaaaaaatttccaaatggatcttttgttctgttacatggacaaatgtaccatcacttaagaaacagaaatgcagcaatttctctccacacaatagcaaagattttcttacatgactctgtaacttctacttagtccatagaaaaacagtcccttttctaagggtgaaaaaatacctcttcaagagacaggcaaaaatttgaaaattacaagaatgtgctctttgtagcctttcatccctcccacaaataggtcaacagtaaaaaaaggatgaagtttaacattctagctagaaacgtacaaatgtcacatgtggacttttgtcatcttttctgattatcgactacttcaatttcacttgagttgtgcttttattcttctttggaatggcagttccagaaatcattaaatattaacaaatgatgatgtcagagttctagaaataaaaatatccatctattgtagtactagtccaaccttttcagaatctgtacctggacacctccaattgtacaggtaatactgcanattgccatctcctataccagacttgagtttttccacttggc

SEQ ID NO: 211360 - DNA, 644 bp, Homo Sapiens
ttttttttttttttttttgacttttataaaaaggtaaggaacttttattggcaaaatcaatcaagaaagatggtaaaaatgtagatttaataagaaaaaatgtgacagtattctatccaatactaaaatgggagttacatattttaactataagtatttgcctataagcccattcaagggcttacagtgctcatggaagtgatcacccttctttcttcatttctacctgaatagtagagcattagagtcattctttctctaccagaccatgtgaattgacatttcctgttttagattgtactgaaactaaaagaaacaactgtacaaccaaagatgaggtataaccttaaccaaaattatatctctggacattttcataaaaccatgggtcctcttattaaatgctggaacccagtactcctcctgctacaaccacacacactaaagatttcaaatcacctgatcctactattgcaaataaatctccactgagttattcatggaagtgtttaatagggtaaatcagttgtaaaatcttgtttttaaacagcatgcaaataaagcctgctcttcatggccccagttctgaaagccctgtcatgtatcactgcttgagcttacctgccgtatgacttctgcctcca

SEQ ID NO: 211361 - DNA, 739 bp, Homo Sapiens
ttttttttttttttttatattgcagaatcgctgatttattatttgattcccctcccaactccttggatcattcttctatggtctcatggatcgaataatcattggcacatagcaaacatttcataaaaacagatacaattggcaacattatattcatacaaacctaatacacgcacacactgggcatgatgatggtgcagtccttgagcagggtttacaggcaggatcctcttcccgatgcttcacccgtggtatctgatacaaccccacttcattcagaggcgaacaccttccccacgggctcctgtgcccccacccagctctatgccatccctctcctctcactcaccagcccaccttgctttgcaccgctcccccttagggcctttgctgtcaaggtggtctccatgtgtcaaacagggactctgaccaactacttcatctcaaataccaccttcacagtaaggcctgcctgccctcctctttaataccatgactgttaccagcccctccccagcactcctgacttcctgatgcctctccactttcctttttttctgtagcacagatcaaagagagcaggtcatgttactgattttgcttcctccaatagccagttgtgttcacagatgtacctgagcacctggaaggctggctgcctagcactcatgaatgtacagtaggtactcggtataggtttgctgaatgactgaatctttgatctgcacaccatccaatg

SEQ ID NO: 211362 - DNA, 716 bp, Homo Sapiens
  misc_feature (683)..(683): n is a, c, g, or t
ttttttttttttttttttcaggatgtgacaacgtttttaatgcaaagtcaaccattagcatctttcccatgtacttattagatgtgaaatggcaggacttcacggccccgtttgcatattttcctactccgcagacgaataatattttcagggaaggcagcgcagtctgtgccgtcacaatcgggcgactgtgggtgatgagggatgatgattttccaggaggccctggggtcagaggactcctagagggagtttccagcccctcaatcgcagatggatggcctgttgatgttgtaactggggtggaagttgagccggtcacaggaggtgatgcagttatcggggccagtcacgatgcttttctccaggtaaacattgagagtattgttccggaacattccacccgctgcaagttgttgggaaaatttattcgaatttggataaaatactttaggcatctcgtgcacggtgggggctctgctcccgtaagcctggttactggtcctgtacacggagacagccttctgggtcctgtagccccggaaccaccccgggttgttgaacctgcccggcaggtccgcgctcacgcggtagtagtcgctggtcctctccggcggggccgtggccttgggcgccacaggctccgcgcacgctctggggcattcctcagccattgtgcctgnaggagaagcgggactcggcggcgtcctgttgcc

SEQ ID NO: 211363 - DNA, 736 bp, Homo Sapiens
  misc_feature (596)..(596): n is a, c, g, or t
ttttttttttttttttttaacatgcttgtatttattatattaaattacaaatgcctggagttacatttgcttgttttgtgtgtgcgtgcctgcgcatctatgtgtgctagctccatattaaaatcaacatttaaatattaatgcaaggtcacaaatataaatggctacttgttttttttcccttaaaaattttagtgcagctttgctttccttaaagtaatatttaattttccattattttctatttaagcccttcatcgtgggtgtaaatggtactgaagccccagaaagtcctacagagatttttcaccctacagtagctctatgcttcaagcctaaatatttataataacctgaatattatccctgtttcaaggaagactttcttgtctacagttcaccctagctatgattttatatctaaaagataatgccaacaacaaaacagcctatacctaaaattgatggtttattctgagttctgtgcagatcatctgatgaaatgaaactaacttacacaaaataaagatcgactgctcttgtaacagctggatagtcaatcaatgtgaataaatggggcacattataaaatttanaacctaatacttgttcttctacagcctactgtctttaaacacttgttaagaactgaggcaagtctaaccatttcctactgaagaaacacttctgcagcaacgcttttaaatgtcacattaatagtattctgctgcgggag

SEQ ID NO: 211364 - DNA, 707 bp, Homo Sapiens
ttttttttttttttttttagtttgaagcaactattttttcttttattttttaacagacacgttcaacattacgggcaacatttttaaaaccttaagctttacagactttcaaacattcaaatactgtggtccctttcctttgatgtggtttattcagctagaaaagaaaacatggtagacaacttaatacattttcaccaaattgaaagtagtacaaaaattttaggactctaccgaactacacatcgtacctaatgtatcattaaaaatagaagacagtattttcttcagcaaataaaacagcatactaatatgctgctaatgcataccttttaatgtgtactgtcattcataaattatttacaactgctactgtgtgaagagaactagaatgtaaattttctgcaaaactggaaaaaaagcaatacaaaatttgtgaaagcctgtgttttatactatacaaaagtcagtttttctcttcaaataccagatattgtatgcagtgatattttggacacattatagtaattcttgaggatgttttagtgctggaggtaagtttacaggcctcgattcttcatcaaggagtactagatcttctatttcactgcctctgtatttccttttacatatttttaccaccacctttttcttgagaaatacttcaatgcttctcttgatgcaactgcttttgcattttctttgct

SEQ ID NO: 211365 - DNA, 655 bp, Homo Sapiens
  misc_feature (601)..(601): n is a, c, g, or t
ttttttttttttttttttaaaaacaaggttttgttacaaaaaacagttctgaacagttaacattgtaaaaaggtataaaaatacagggactctgagcactctgaggaatttcccgacacatgctcttaactaaggcggagagatctctgggaagccgaagtcagggcctgggcctctgacccctgccctgggcctggtccccctcctctttcccacgatcccatgctccagggctgaccagagacaagggctctccccaatcctggctacggctcagcctctcaaggaggaactttaatgatctacagtggctcatcctagaagaggggggctggactgcaggtgttgctgggaagcctctccaggcctggagctggagtacccgtcctcagcactgccagcagagcgcctcctcatcccaccccagcttgaggcccccaagggaccgggctctgggggggggggctgtccaaaagaagggtcctcccctgtcccaggcacaggggtgttctccagatgccagcaggagctcatttctctggggggccggagggtggggagaagggtgctgagctccttcgaagctcctgctgcagctggnccttcagtgtggacacctggggaagaaagggaaggtaaggccagccaggtcctc

SEQ ID NO: 211366 - DNA, 762 bp, Homo Sapiens; identical to SEQ ID NO: 54612

SEQ ID NO: 211367 - DNA, 788 bp, Homo Sapiens
  misc_feature (637)..(637): n is a, c, g, or t
  misc_feature (672)..(672): n is a, c, g, or t
  misc_feature (729)..(729): n is a, c, g, or t
ttttttttttttttttttcagtgtagaccgtctttattggcaggtgttaagagtgcaaaatatcaacaaacccaggggaatacgcaagggggtgggagtatggctcccctaccccatgtgagagccctgtaaccaagccagtggggtgggaacgttgacttgactgtggcaaattcaggctcagcaccttccaaagaacaagctcccaggcaggagggctccttgcaacacaagggggaaaggagtggcaccctggaaggggcctgggctgcgacccaccctgggctgcttggctcctgtatactgcccacctcaacccctcaagaggaaggcttcacagctgggggtatgtagttcagagaaccgggctaaacccagccctccccaaacccaggtatctgcctcgggcctcagtttccctcctcccagtgattacccaagttggcccatcaggccctgtagtggcccagcctgatccaaagtgacaagtccctgtaacataccatgtatcagtcagtgtgtgggctgcaggccctccaaagctgctgggatcaccacaggctggccttagtcaaaaagaccctcttagaccatgggaatcaatccaaggtgctgggcattaaggctaccaccccanacttgctttgtctcctgaaggaaattgacttccangacaaatggcgcctgcacccaccggcatgctggtccaaaagtgtgatgcaataacanagggtcctcctgctgagagcccaggctggcattaagccacaggggctcgtgctcgggaa

SEQ ID NO: 211368 - DNA, 815 bp, Homo Sapiens
  misc_feature (773)..(773): n is a, c, g, or t
ttttttttttttttttttgaaagttctaaataacactttattgaatggacttatttaggatcgcacagctgaaacgagcccagcttcctagcccagtattctctctgcttcaccacagattagtttaaaatttgcatcttcttgccaaagatcagggatcttcgacacctggagtcattttagacctaaagcactgtagccgaagtcctcgggcaaaccggccagcttggtactcttttccatccattactgaaggaacagtctctgtatcttgcacaatgacagccatttcactgtcacgctttcccagcatgctgcggtcatttatgttggcagagccaataataacagtgttatcatcagcaattaacaacttgctgtggacatagataagctcagttactaggtttccttcgagctctgcatgtgttctaagaccacagaatgatatgtaatttatccactgattaccaagctctgcttttaactgtccaaggatggaattttctcctctgcacatggttctgtagttgaagtgcatgattgcctgtagagcatttcctccgccggttgaaatgtctccttcgaaccctggcagaagtggtatcacgacatatacccggtatttctggttttccctgtgagctttcaggatcctctgggcaatggcatcgcctatcttggttgacacaactttgtcatcagcacagcttatgaaaaactggttttcgatatagatatagtgcctgctgttctctatcacatggacgtangcggcgtggatggactcttcatggtactttataccagcagac

SEQ ID NO: 211369 - DNA, 790 bp, Homo Sapiens
  misc_feature (652)..(652): n is a, c, g, or t
  misc_feature (740)..(740): n is a, c, g, or t
ttttttttttttttttttaacagaaaaagatagcactttattttgtagcaccttttttaaaaacagtctttttaaaaattttcccagctgacccttttcaatcttcaatcaaccaatccttattaaccacttacatacagatgattccatttatatgaaatgccccaaactggcaaatctatagagacaaatagattagtggttgtcaggggacatagggagaagcaaatgagtaactgctagtcgatgtggggtttcttttttggagtggtgaaaatgtctgaaactgatttcagtgatggttgcccaactctttaattttgcccaactaaaactattttgttagttatctatcagacagggtggtctctttgtgtcgcccaggctcgactgcagtggcccaatgagagctcactgcagtcttagactctgggcctcaagcgatccgccagcttcagccacagccacagctgcagcctcccaagtagctgggactataggtgcacatcatcacacctggctaactttttctttaagagatggggtttcactatattgcccaggctgatcttgaactcctggcctcaagtgatcctcctgccccagtctcacaggcatgaaccactgtgtctggagacactaaaaactttanatgtgtgaattttaaggtatgtggattatatctcaatcaagctgttttaaaaaagcacctgattttgttttagcacttgattattcanagggcttctcttaagggtatgcttcttcactctgccttctgagccttcca

SEQ ID NO: 211370 - DNA, 701 bp, Homo Sapiens
ttttttttttttttttatgttcactacagatgcaagcatctgattttatttcaaatattttgcatccaagtttgcttacatacacagatattaaacctacagatacaaaaagctgagtgtacttacaaattaataactgtacacaggcagcataaaattctctttgtacatgccaaaaacattccgtgtccacccagggtgaacacagccacttcacaaacagggtgtaaataaggaggttcactaagtacaggaaagttacaagaccatattggcattttaacagccattcctgagaaagagaatgggaaagggcttaagagtcagaggagaggaaaagaggaaaacagatgacctcctacatcagaagatggagcagtgagaatacagaatagggaagcaatagttaaaaaaaaaaaaagtagaaacaggatttgatgtcaatttgctgtgcaaagggtaaaaaggggagttttatttccaggctatctgccatgatcacagctagtttgttactggtgatgtgaaatttggaaaaataaaagaacaatatgatggccagaagtgatacagacttggacacatcatgtttgaaatatctgaggtcccatacgtagggatgtccaattgacaattgggaatacagttccagagttcacaagagagatcaaacctcctggagctccaccaggctcctgtgg

SEQ ID NO: 211371 - DNA, 686 bp, Homo Sapiens
ttttttttttttttttttaaacatcttcattacatctttaatgctctcacgtggagctgctctgggttaaattacagctgtatgcatcctgaattcctggcagcctccagtcgactcaagtgctaacgtatttatagcatttagaggagggaataaatccagaaccttccccatgggggcttcctaggcctttccctcctgacacatggcatttgcccagtggaaggtctgcatacactacccctgcatcccctccagccagcagcggacagtgacggtggagaggctgggcacgggacatgcctctgtgcatgcttgtgtgcatatgtatgcccagcgtaaaaaaatgccctgctcttgtggtctgtctctgcccaatggcttgccaggacccctggtatcagccctgaccctccaaggcttatggagaggccaagtgcagggacccatctccccactctctaaacactgaacggctcttcccatagatgggatggaggtggggaattcaaacatagactaagttttttagatgtttttctgaagtgcaatccctcacccactttcaggcagtcataactgccccctctagcctgcagcctgtgattactgccctcagaccaacagcctctcccaaccccagattctcattagagcccaagacagggagccgttttcagaagcag

SEQ ID NO: 211372 - DNA, 738 bp, Homo Sapiens
  misc_feature (644)..(644): n is a, c, g, or t
  misc_feature (722)..(722): n is a, c, g, or t
ttttttttttttttttttgcatatttatgacacattttatttgcacaaataatactgcatcagtttcattgagaaaagttggaattttgttatcaaaatcattggatgggaaactgcattttcagaacccacttcttttcctctttcactaacggtattccttacaacttgtaaacattcatgaagaactctatcattgtgatccatttttaaaccaatgcacccacttggagttataatttccccataaaaactttccatgctgatcacttttttttcctttaatacgctttgagcatcagggcacactgctccatccatcgcaggcgctgcgggtggagtttctatctcagtgcacagcatgaaagcttgggtccatctgtgccacacaaaaccaagcctctcttgaagtgatttgtttacagtgtcatttgatggagtggaatgttctgcaactcattcgaactgttacagaagctttgctaaaaggtcaccactgctctctagaatttccaaatctgggcaccctctgggagcttgttaaagataaggttctccatgggctttttccatacaaactagatcagattaacaagaggctacttttccatagaggtttgtgttcatgttgagaaggagagcangaaagagagaacacaagttaattacagttagttacctcaaagtgtgcaagccactttctccaattcagagggcatgtnacaagtgatagtacat

SEQ ID NO: 211373 - DNA, 788 bp, Homo Sapiens
  misc_feature (604)..(604): n is a, c, g, or t
  misc_feature (609)..(609): n is a, c, g, or t
ttttttttttttttttttaacttttatttttaaaatgataaagaaacggggataaaaataaaccacctaaatgagtcatattagtttctttagctttttcaaatagtttctaaaatggaaggagattgaaagccagttttttaagatttatttcaagtgttgtgcaaagagggcttatgcaattcttcagaccctatttattttatttatttatttatgtacattcttctggaaaggattactaaagccaaactaagaaaagtatgtaagtgatggattatcaggcgcccttgtttgaggtcagagtaaacagacagactcccgataggttggtttaaaagtagatacctagattgcctggaagcattcaactcagctttgtgggagcatttggtcaaacttccaagtcattgttttttttgtgtgtgttcattttgttacttttccagttcttcctttgttctgtttatgtgccaatgtgcacagagaagatcaacatccccattggcccatgcggcggcatgtgtctttcagtcaagagacgctgtgaacccgtcctgaaggaatttggatttgcctggccagagagtctgaactgcagcanattcncaccacagaacgaccacaaccacatgtgcatggaagggccaggtgatgaagaggtgcccttacctcacaaaacccccatccagcctggggaagagtgtcactctgtgggaacaattctgatcagtacatctgggtgaaaaggagcctgaactgtgtgctcaagtgtggctatgatgctg

SEQ ID NO: 211374 - DNA, 641 bp, Homo Sapiens
ttttttttttttttttttatccaggtggttttatttagtaaaattttacaaaagtcagggctgacttcttggctctgcccttcgaagagcacagttttccttagcagataactgggggaagccacgggcccaccagaggctctcgcaggccagtggtgcgacctcctgtccacaaccgtgagggacaaaggcctgtccttgaggctgctgggcaggggcccaggcagtaagtgagggcacctgcgaggctctgaggacacagcacatctgtacaccctcatggtgccctgaccacacagcagccagggcagagtgtgacagacagagggtttctgagcggtctcaacagctgtctctctggtgacgtttcagtgccttccccttttcctctgaactcatggatttggccacaagttgctccccctggactaagcagcccagaagccatgcccagggtccatccctgggcaaccccccaccaggtgccagcagcattcacatggggcagggggcccatgagtgccacctggaccccgacagcctgtcatggcatccagaaacctctgtctccccttggctctgccaaggacacatcctccatctcctggtcagacccgagacaagcccagaacacaggacag

SEQ ID NO: 211375 - DNA, 746 bp, Homo Sapiens
  misc_feature (728)..(728): n is a, c, g, or t
ttttttttttttttttttctttgtaagtagtgtattttaaatagctttcaagatacacatattttttcctttaaaaaagtctgttggagcagttttgttcttgaattttgctggtcatcctcatggtcccgagcccccctactccgggtcgtggaggcggccgagggggaggctgggggcccacgtggcccgtcctggcggcacctgcagcactgggggagccgctgaaccccgtgcttcagcgctgggggagccgctgggccccgtcttccgccacaaaccatgcatggccgccacgtgagctcaaacgtccgtttatttcaaagcagtaataatttaaaattataaaaatctttccaccgctgaacgtttagagggtgaggttagacagaggacggggaggctggggacgccccagaggggaccatgtggcccacgccttcccaagccagggggccggtgggccgggcccgggtcctgccctggaacaggcgggacctgcagcgctgaccagccaagcgtggcgccgccggggcacccagtctgtgggtgccgtgtggcgctggctgagggtgggtgggaaaggccccgtgctttcccgacggccgacgtgggctcacgagttgcttgtggcgttctcgttgctgggcgagctggaggaggacgatgacgacgaggaggagaagtcaccccagtgaggccaggggggttcgtggccgtgttctgtnccgtgaggctttttcggc

SEQ ID NO: 211376 - DNA, 192 bp, Homo Sapiens
caggcttaggaatttttaacagatatttatcctggaaaattcagttatgagaagacccacttgactgctaatttgatgacgaatctgcaagtgtttttacaaaggacttttctagttgatgataagaacataggtctttataggtactaagggctttcaattaaatggctcctccatctcaacaaaaaaaaa

SEQ ID NO: 211377 - DNA, 281 bp, Homo Sapiens
  misc_feature (31)..(31): n is a, c, g, or t
  misc_feature (125)..(125): n is a, c, g, or t
  misc_feature (223)..(223): n is a, c, g, or t
ctcaaggtggagtggacgcatgtcagggtgnctctggtggcccactagtacaagaagactctcggcggctttggtttattgtggggatagtaagctggggagatcagtgtggcctgccggataanccaggagtgtatactcgagtgacagcctaccctgactggattaggcaacaaactgggatctagtgcaacaagtgcatccctgttgcaaagtctgtatncaggtgtgcctgtcttaaattcccaagctttacatttcaactgaaaaaaaaaaaaaaa

SEQ ID NO: 211378 - DNA, 550 bp, Homo Sapiens; identical to SEQ ID NO: 52860
  misc_feature (5)..(5): n is a, c, g, or t
  misc_feature (7)..(7): n is a, c, g, or t
  misc_feature (92)..(92): n is a, c, g, or t
  misc_feature (106)..(106): n is a, c, g, or t
  misc_feature (537)..(537): n is a, c, g, or t

SEQ ID NO: 211379 - DNA, 579 bp, Homo Sapiens
  misc_feature (80)..(80): n is a, c, g, or t
acaaaacctgtcttggaagagctcatttcacccgaataaggactgtaatgatcacaggtgcaatcttcagactgcaatancagtggccagaaaatctggaatggtttctgaaagccagaaagtcattctcattgaggcaaatgaaaccaccgggtcctcatcagcatctatatcttggacgttagtagaagagaagaaacgcattatgtatgggaatcaggacaattacattaacatcagggatgaagtctctgataaaggcagagaaggaagttaccattttgccctaactggaaaatcctttcatgttataagtcaacatttcagcagcctactgccaaagatattgatcaatgggaccatctttgcaagaatgtctcctgggcagaagtccagtctggtggaagaatttcagaaactggagtaggttctttgccagtgcaggtggcatgaactgcatggaggcataacagtcagggggagtggaagaggtaccaggagtcactcagtttgacaagggcagtggtccgtacttcggctgcatgagataatcacttgggagctttggagaaaatagca

SEQ ID NO: 211380 - DNA, 297 bp, Homo Sapiens
ctccaagagtgaccaattacatgtttttgtttggttggttttggctttgaaaccatcactatgaattcatggttttcatgtattagagaccactttctaggtgcttgatgtgtctactgctactggggcagaggtagaaaatgtgtctacggtaaaagaacaacaaatgagttcacgcttatatttctatttcaaatttagtatacggttttacacctttttctcagaaaaatcttgttttattttttgagatagagttttgctcctgctgcccaggctccatctcaaaaaaaaaaa

SEQ ID NO: 211381 - DNA, 1000 bp, Homo Sapiens
ttgaacgtcatttcacctctctaagcctcagtttccttatctgcaaaatggaccaattgtgactagataatgagagaagccatgtaacagtatagttccaattgccagtccatgaacgagtgctgctccaggatgattagtatagtctatgagtgtgtcagtgtgaggatgctaactacacattcttgaaaggactgccctctgttctgagttacagccctcctccttctcttccccctcttccttattctccattttcttccctttcccacttgcctttccctccttcttcttctttttttttttggtgtaaacctgtcttttaaaaatggaattattttaaagaatttatcctacaatattcctgacatgccaaagatataaagagtaatataggccgggcgcggtggctcacgtctgtactcccagcactttgggaggccaaggcaggaggatcacaaggtcaagagatcgagactatcctggctaacatggtgaaccccgtctctactaaaaatacaaaaaattagccaggcatggtggcaccagctactcgggaagctgaggcaggagaattgcttgaacgtgggaggcggagcggaaggcagaggttgcagtgagccgagatggcgccactgcactccagcctgggcgacagagctagactccatctcaaaaaaaaaaaaaaaaatggtaatatggctgggtgtgatggctcacgcctataatcccagcactttggaaggtgaaggcaggcagattgcttgagctcaggagtttgagatcagcctgggcaacatagcgagaccctgtctctacaaaacccacaaaagttagctaggtgtggtagcacacgcctgtgttctcagttactcaggaggctgaggtgggaggattgcttgagcgcaggaggtagacgctgcagtgagccgtgatcatgccactgcactccagcctgggtgacacagtaagactctgtctcagaaaaaaaaaaaaaaaa

SEQ ID NO: 211382 - DNA, 1000 bp, Homo Sapiens
aataatgaggggttcttgcaactgtaaaattaaaatctgtataaagttacaataaagaggacaataaagaggtattggtagatctgtggaatggaattgcaaggtcaggaacaaaaccaagcacccacaaataagtaaaggtgatacttcacattcgtggtttaagaatagaccattcttgggctggaacagttattaactatttggaaagaaattataactatattcagtacaacaaaattagttaacatttattatggtgcttatgtaaaaaaatccataaaagattggggaagatatagaagtaaatgtgtctctgatttctgagtaggaagatgtataaatgtgtacatatacaagttgacctttggacaacactgaaaacagctttgaacacaatagcaatgctgacatctgccctgtgcagttgaaaaatccacatataacttttgactcccccaaaacttaactactaatggcctgctgttatccagaggccttaccaataacataaacagttgcttcacacataaatagattggtgtctacatatattttatgcacttaaagacatacatttttcttaattttttttgatatttctaggctagacagtttatctgcgagttttttcaaattattgcacatttccaaaacatttttcaatatatttattgaaaaaaattcatgtggcctggcatggtggctcatgcctgtaatcccagcactttgggaagctgaggcgggtggatcacttgagatcaggagttcgagaccagcctggccgacatggtgaaaccctgtctctactaaaaaataaaaaaaataggtgtggtggcatgcacctgtggtcccagctacttgggagactgaggtgggggagaatagcttgaacccgggaggcggaggttgcagtgagccgagatcatgccattgcactgcagcctgggcagcagagtgagactccatcttaaaaaaaaaaagaaaaaaaaaaaaaaaa

SEQ ID NO: 211383 - DNA, 1000 bp, Homo Sapiens
gaacactgggatcattttcatcatgccgacagtggtggtaattgatgtatccctttccatgacccgacctgtgtctattgaggggtccgaggaataccagcgtaagcacctagcagcccatggtttaacgatgctgtttgagcacatggccacaaattacaagcttgaatttacagcacttgtggttttttcatcactttgggagttgatggtccccttcacgagagattataataccctacaggtacaaaatgtagtaagttattgtatgtacagggcctaaatttattgggaggaaaacagtgttataatgcgttgaatatttagaactttggcattatttaataagtctatgagtacttaatatgtgtaactaaacagcaagaattcacaaccagtaggtcttatgcctactgtttcttcggtacagctatgagttacagctgtgagttgttcccttattttcctctcttggttttctggaattctctgtggaaaagtgagcatctcaggatgtagtgttccattccctaaaatttaggatctttaggctcaacacttaatttttttctactctcccataaaacttgaggaaatgaaaaaatagccctttcttattctagagtaattcaaaatgatatttcctttccaacaaatagctttgattttgataccaataaattataatttttaaatctcagttggtagatattatctttcaaaggtgttttctgtgttatgttagaatttactttctgacaacatctctaaatcataatattcataatatttccagcagtgcctaacacagtgtcttacccatagtgagcagtcaagaagtgtttgtgggccgggtgtggtggctcacgcctgtaatcccagcactttgggaggccggggcgagaggatcacttgagcccaggagtttgagaccagcctggacaacatggcaagatcccgtctctatttttaataaaaagaaggaaaaaaaaaaaaaaaa

SEQ ID NO: 211384 - DNA, 503 bp, Homo Sapiens
atggccgggagttggcatattgtttatggagacagtgagataaggggatcaggatccagagagactattaaaatatgtgagtccatctgttgtgatctgaggtttcattagagaaaacctgtctgctagtacaataaatggggacttagtaaggatgtttttatataaaggattataaatcagcagaggtaaatacattaatcttggccaaacaggtcatgtccttttgcgttttcctgatggcaggttctgccccctgccgcccgggcactgttggtcatagcatgaccttggcatcagctgtgagccggtaaacatggaaatgtaggcccctcccaacctgagtcagacccttggcctggggtccaggaaactgttttaacaagcccctgggtgattttttttcacatgttcaagtttgagcgcctcgagggcctgtgaatggctgcatataaggtacagctggccatatgtcttaaatgacttcaaaggggtgtgagcca

SEQ ID NO: 211385 - DNA, 485 bp, Homo Sapiens
taacaccaagatggcggacggcccggatgagtacgataccgaagcgggctgtgtgccccttctccacccagagatatggaatatatgaacgctgtcgagaattggtggaagcaggttatgatgtacggcaaccggacaaagaaaatgtcaccctcctccattgggctgccgtcaataacagaatagatttagtcaaatactatatttcgaaaggtgctattgtggatcaacttggaggggacctgaattcaactccattgcactgggccacaagacaaggccatctatccatggttgtgcaactaatgaaatatggtgcagatccttcattaattgatggagaaggatgtagctgtattcatctggctgctcagttcggacatacctcaattgttgcttatctcatagcaaaaggacaggatgtagatatgatggatcagaatggaatgacgcctttaatgtgggcagcatatagaacacatagt

SEQ ID NO: 211386 - DNA, 601 bp, Homo Sapiens
tcggccttatggccggggacaggatgagctctaagtacccgcggtctgtccggcgctgcctgcccctctgggccctaacactggaagcagctctcattctcctcttctatttttttacccactatgacgcttccttagaggatcaaaaggggctcgtggcatcctatcaagtattcggctggccaccatgagtgctatgtcggtgctgatctcagcgggtgctgtcttggggaaggtcaacttggcgcagttggtggtgatggtgctggtggaggtgacagctttaggcaccctgaggatggtcatcagtaatatcttcaacacttatgtgcacagtgcggtgttggcaggaggcgtggctgtgggtacctcgtgtcacctgatcccttctccgtggcttgccatggtgctgggtcttgtggctgggctgatctccatcgggggagccaagtgcctgccggtgtgttgtaaccgagtgctggggattcaccacatctccgtcatgcactccatcttcagcttgctgggtctgcttggagagatcacctacattgtgctgctggtgcttcatactgtctggaacggcaatggcatgattggc

SEQ ID NO: 211387 - DNA, 635 bp, Homo Sapiens; identical to SEQ ID NO: 47148

SEQ ID NO: 211388 - DNA, 644 bp, Homo Sapiens
ttatttcccttaacataatgatctccagttccttccatgttgttgcaaatgactgaatctcattattttttagggctgaataatactccactgtgtgtatctaccacattttctttaatacattaatctgttgatggacacttaggttgcttccaaatcttagctattgtcaacagtggtgcaaccaacatgggagtgcagataatttcttcgatatactcatttcttatttctggggtatatatccaacagtgggattgctggatcatgtggcacctctattttcagtgtttagaggaacctccaaactgttctccaccatggctgtaccagtagtaccttaaaatgcaaatgcaattggtaaaagaacaaggcagcatgtagtgcttgcacttacaaatactaccagttttgtaacaatttgcatttttttttgtccttgaaagagtaaccacttacttaataaaactaatatttaaaagcgcaatattccttcctttgcatggcatgcaggaatggtgaaaacaaagaaacagtcatcccttctcttccccccacttctggtctcccgaaataggaatgccaggtcagacaggtggaggagggaaatggggcacaggtcaaggtatgatgaatctcttaaa

SEQ ID NO: 211389 - DNA, 691 bp, Homo Sapiens; identical to SEQ ID NO: 45669

SEQ ID NO: 211390 - DNA, 470 bp, Homo Sapiens
gcctactactactaaataccccgccggtcgactatagtttgactgtaggtatggcagtgagagataaaattactttttctagctttgcaaaacgccaaacgtctttgaaattaagagtaaaaggggtttaaaatatgtactgctttataaagcaggaaaaccccactggaacattttgggtgtttacagaaatgggtattccatgggagagaacgtggtaacctatgttttgtcatcatttgtttaatcactgaaaatatattaacaggccaggcatggtagctcatgcctgtaatcccagcgctttggcaggctgaggtgggaggattgcttgagcccaggagtttgagatcagcttgggaaacacagtgagactccatttctacaaaaaaaagaaaaaagaaaaaaaagtcacatgtggtggcacaccctgtggtcccagctactttggaggctaaggtgggaggata

SEQ ID NO: 211391 - DNA, 511 bp, Homo Sapiens
aattagctaggcatggtggcgcatctgtagtcccagcaatgaactgtgatcaagccacttcacttcggcctgaactgagacttcatttttagaaagtcttttggggtttaaagtctgctcacagattcctctgccccactggcaccatctgtgggctgcggagtagctgtcttcagtaaaaaaggatttatgtcctacctttaggcaaacaaaggagaggtagagagagcccctgcactctgtcttcagctcaacaatacccagtatttgagagagcaatattttagtttcctttagtagaaaagatgacaaatgggtatcccaaatggtcaagagtcataaataatttcaagtaaattcaaattaattcctattagtggttatcctaagctaaaggtatccattgaggaaagaaatctgtagtggctctaaggaactgtaactttgtttcaaatccagtctcagcgggaatgctgctaattccctggatgacagactgagagactgtgtc

SEQ ID NO: 211392 - DNA, 498 bp, Homo Sapiens; identical to SEQ ID NO: 60878

SEQ ID NO: 211393 - DNA, 489 bp, Homo Sapiens
gacaattaagcagcatatcaaggttcatgtaagttacagttattaggtttaatatttagttttaatatttttcacccaacatcttgttgcatcttccagaataaatctggggtccataaaccaaaccaggagagggaaaatggaaagagtgggcagaaatctgacagctcttaggtttcttctatttgtgttaatactgagacttttaaaaatcatttttatatgtagtgtttattatgaatagttgtaatttgttctgataaattagttgtattaaacactgttatttggctaatattactaggtataataaaatgatatttagtgggaagacattcatcaaagtagaagtagttaatttgggccaggtgcagtggcttacgcctgtaatcccagcactttgggaggccgagatgggcggatcacttgaggtcaggagttccagaccagcctggccaacatgatgaaaccccgtctctactaaaaatc

SEQ ID NO: 211394 - DNA, 576 bp, Homo Sapiens; identical to SEQ ID NO: 59603

SEQ ID NO: 211395 - DNA, 580 bp, Homo Sapiens
taataaatggcaaaactacaggagcagtcaactatgaagactgagaagcctaggaatgaaattcagtactgatcaagtaaaagttacttcagagttaatgacagacaccaacgatacatcgatactgcaccaaatggtaacaggtatgacagaaatcaatcatcggccgcccacacacacgagtgggaaggtgacctcactgtccccaaatacagaatggcctcacctacctcctaccttcttctcatgctgttcacctctcccttggctcagcaccccttgccagttctcccaaggtcctctctgccagttgaaggcttccctgatcgccatcctcaatcccccaggactcacaggttgaaagagtcgcagccaagagttagggaacctgaccatgagccaatcccagtgctaagccccttgcacgtgttaattcagttaacttagcaactgtactaagccatgcacacaactctgtagtattattattatcatcgtcatcactatctgtgcctcagaaccccttggcaaatctttaaattctcccagaagtgtgtgtttcccagtttgaagggccctg

SEQ ID NO: 211396 - DNA, 436 bp, Homo Sapiens; identical to SEQ ID NO: 38773

SEQ ID NO: 211397 - DNA, 403 bp, Homo Sapiens
atccatctgaagagcaagaaatggactaggaagcagcttcaaccttggctgcacaggagaccctgctggggagctttcccgtgtccagatgcccaggacactcctcagaccaatgacacagaatttcaggagatggaacccagcatccctattctgttataaatctctcacatgactccagcatgcagacagagaagactggatgccatcccgacgcctggccaccccatcagcccctaggtgatcgctctcctaacaagctgccgccgccacggctgaattcatgcccctgtgttagaaaacacttgtagtcccggtctctcgctcaatacttgaaccagctccataaggagtgttccccttcccattttataggtgaggaaatgcagggactgctggagag

SEQ ID NO: 211398 - DNA, 1000 bp, Homo Sapiens
gcaatactaagcaaaaagaacaaatctggaggcatcacattacctgatttcaaactatgctataaggccatagtcaccaaaacagcatggtactggtataaaaacaggcacatagaccaatggaacagaaaagagaactcagaaataaacccaaatacttacagccaattgatctttgacaaagcaaacaaaaacataaagtggggaaaggacatccttttcaacaaatggtgctgggataattggctagccacatacaggagaatgaaactggatcctcatctctcaccttatacaaaaatcaactcaagatggattaaggacttaatctaagacctgaaactacaaaaattctagaagatatcattggcaaaacccttctagacattggcttaggcaaggatttcataaccaagaacctaaaagcaaatgcaataaaaccaaagataattgctgggacttaattaaactaaggagctttctcatggcaaaaagaacagtcagcagagtaaagagacaacccacagagtggaaaaaaaccttcacaatctatatgtctgacaaaggactaatatccagaatctataaggagctcaaacaaattagcaagaaaaaaaaaatgatcccatcaaaaagtgggctaaggacatgaatagacaattcccaaaagaagatatacaaatggccaacaaacataaaaaaatgcccaacatcactaatgatcagggaaatgcaaatcaaaaccacaatgtgataccactttactcctgcaagaatggccataatctaaaaatcgaaaaatagtagatgttggcatggatgtggtgatcagggaacacttcaacatggctggtgggaatgtaaactagtatagccactatggaaaacactgtggagattccttaaagaactaaaagtaaaactaccatttgatccagcaatcccactactgggtatctatcagaggaaaagaagtcattatacgaaaaaaaaaaaaaaa

SEQ ID NO: 211399 - DNA, 568 bp, Homo Sapiens
  misc_feature (49)..(49): n is a, c, g, or t
  misc_feature (536)..(536): n is a, c, g, or t
ttttttttttttttttttaaggaacaggcccaaaataaaactttttatntgaggaagtaataacacatctatgaaaatacattctctcacctattgcacatgagtatttcttaattctgttcagtgcaattcaaaagcaagtgaagaattccagaaacattcttcatgacacatgcagatatctgcaaggctcatcttcttcagtcacagaacatgcaggaaaaattaaccattttggctcataatacattagatgaataattattagatttattaaaaacacccatatctgtcttccccctatctcgcctagcaatgtaaccagctgttactctttaatatgtgtgtcaccatcctggcattggggtcaaactcaaactgtgatgatccactgaagaagtagaaaaatccaaatgcctgtaatacagcatcaaccttaggctcaactcctggaaagtcatcagctattagtctagggaagccttgctccatggactggctattttcatcaaatctccagtatttgtccgctgcanagaagtatgttttcttcttttccttgtcagaa

SEQ ID NO: 211400 - DNA, 582 bp, Homo Sapiens
ttttttttttttttttttaaagtgaaaaagaatttatttaatttttgccatatcaggacaacaaagcagcccttttatgtcaccactcattaaaaggacattacaaaacattaacataatgtagtagcccatgttttctttcaggcattttcaaagggcatctcagacccacaatattttctattgagtgtgcagaaaaacagagctgcaaaatcattagtaaggcaaaataataaaatgtctccctttttattgaaacatcaattttccatgttttagagatattctgaatttaacattcatagatatgcaatatttaagttttaggatattagcatactatcagcaatattgggtttaatagctactatcaagcaactgatttctaatgcacacaacataatttgatagtatatgtataagaagatggcctgaattttgccctcaaatgcacaaaaagaattttccatacacattctcaaaagtctttggccttgctgaataataatagagctgttattttactgtgaagcacaataagccttcaagtgtcccttacttgatcttagaaggtcaaattct

SEQ ID NO: 211401 - DNA, 587 bp, Homo Sapiens
  misc_feature (531)..(531): n is a, c, g, or t
  misc_feature (570)..(570): n is a, c, g, or t
ttttttttttttttttttcaagtaagttcacttttattcatacagtcattagagaaaatgagcaaaatttccagtaaccccaaccactgccttttctccctggacctagtaaattcctatcaactctttagttgactctaagaactgggctctatgagatcctgacagctaaaacacaggtacagaggagcctgcataaacgttttggtccaggtcttggcctccagtcttatgatgggctggtagaatattgcttcatcagatgcttgtgacagggattgcaaactcgctcaagcttgatacttgaaggaagaggcagttcatttgttgaacaggcatcacagaaggttccgctgcagttcttacacacattctttgttaggctgccgtcttcctggcatagctgacacaactgtggcttttcagagagcagcagctgatcctgttcatccatagggtggggttgcagcctgtggctttcttccaggggcttttttagtttaacattttcctcttgcattttgtgcttcncatccatcttggattctgacttctgggaacccttcctgngatgctcctgtcgtttt

SEQ ID NO: 211402 - DNA, 607 bp, Homo Sapiens
tttttttttttttttattattattatactttaagttttagggtacatgtgcacaatgtgcaggttagttacatatgtatacatgtgccatgctggtgtgctacacccattaactcgtcatttagcattaggtatatctcctaatgctatccctcccccctcccccctccctcaagtaagatcactttcataggttctgggacaacatgaattttgggggatactattcaattcggtacagagcaccaaccttataagaagtttatacatgtaaggtattatacttaggactatgactggcacacaatatctgctgtgtaaaggttggctactcttcttcaacatctctggcaggtagctgctgccaaaaggatatgtgggtgtgttctcttatgtaaaaatcactctccctccattttgagtcagaggcaagaaactgaatcaaactagagttctgaaataagctgactagcacagagctagagcacatgtttattaccattcagtaccccttatcaatatcccaccaatattctcagtctggagtgaaaaatacctgctacaagcatttgttttttgaacaacatagactttatcattccaaatga

SEQ ID NO: 211403 - DNA, 548 bp, Homo Sapiens; identical to SEQ ID NO: 52926

SEQ ID NO: 211404 - DNA, 624 bp, Homo Sapiens
  misc_feature (547)..(547): n is a, c, g, or t
ttttttttttttttttttggtatttattaagtgtttattaaatgcctccctaaaggtcctggatgccactagaatctttagttaggactgagatgtatatgcaagagtggcacatatcaaaatatctgctcattggttcagatccaacgtaagttttccttgaaccagaacctcatattaacttaaagtactcaatggcacagcatcctctaatttaaagattttaaaacaaaaacataaccagaagacccagttttcaaaattgctgttaaaggccaacaaattagtgggagggaaggaataaaaaggaataacctctcttaaaataacaaatctacaaagtcctctgccacaaaagcagatctttgtcatttcccatgagataatcatcaccttgctgaaaatgagaaaggcaccccccgcaggcagggggaaaaaacccactcgctgaaacagcttctacttgtttttaccatatattccaggggttatgtgtgtggaggggttgtttttacatttatacagtttacattgcttgacccaatangtacacttgtaagattaatagggccatagttttaaagagtacttacatagccccaccatgcatacagagcctttttt

SEQ ID NO: 211405 - DNA, 627 bp, Homo Sapiens
  misc_feature (616)..(616): n is a, c, g, or t
ttttttttttttttttttacaatgcaaaaatgcaaagtttattttcttaaataaaatactatattcatatctatacaaataattattacaaccattaaaatgttacatttaacaataaaaatttccaaactttaaacaagaggatggttcagaatattcacaccctaatacaatgcatttgtaaaaagatgtcaaaataaacaggacctattcttatttacaactgtaggacaatcctgatcatattatacatatctgctctggattccattacaaaacaaattagtttccataagaattataaaccaggagatttacagtaataggacacagtgtgcagcagacactgctgccatggtaatagatacaaatattacactattgaaagcactaaaattagttttttttgggtgactgccctacagtaagcttctcacccagtgtatctataaataatttgtgaaggtaattatgttctcctcagatttttcaacttttttttaccaaagtgaaaatatatatatatatgtatatatatttatatagcctgctgaaagtggaagcgaatcttttcttcacagtaacacaactgcagcatcttaacactatctggtcnctttcttcttg

SEQ ID NO: 211406 - DNA, 560 bp, Homo Sapiens
  misc_feature (525)..(525): n is a, c, g, or t
  misc_feature (539)..(539): n is a, c, g, or t
ttttttttttttttttttcatagcaattgctttattaatataattgtcatcaacatcatcaccaccaccatcatcaagaatgaaatgccttcgttctcactcataggtcggaattgaacaatgagaacacttggacacaggaaagggaacatcacacacctgggcctgtcgtggggtggggagggtggggggggaaaggatagcattaggagatacacctaatgtaaatgatgagttaatgggtgcagcacaccaacatggcacatgtatacgtatgtaacaaacctgcacgttgtgcacatgtaccctagaacttaaagtataataataaaataaaataaaaagaatgaaatgccttttggccaggcgcggtggctttatttttatttatttatgtatttatttatttttttgagagacgtagcctccctatgttgcccagattggtcttgaactcctggcattgtggtgtgtgcctgtaatcccagctactgaaaatacaaaaaaatagcctacagccgcggncgctccaacatcanaatggcctcgtgccgaattct

SEQ ID NO: 211407 - DNA, 593 bp, Homo Sapiens; identical to SEQ ID NO: 53064

SEQ ID NO: 211408 - DNA, 578 bp, Homo Sapiens
ttttttttttttttttttaacagaaaatggctaatgggcataccccatatacttaaactatcatcaacaaattataatgagtgcttacaccttttaaataatacacattattcctaagggcaaagcaaaggttgtttttaatgctttctcatctcatcacttcaaaggttgtttttaatactttctcatctcaccagtctgcaccttcctatctattgtctccttacaacctcatgctatgcttacattacataaaggagcctctatcaggcctgtcccagtcctaccatgtcccataatgccccatgttccaaaattaatccattctctcccatcatttcagtcaagtttcccattctctcagtgggacaaaactcagctagatgttgaaggcaagaaagctctctccaaaaatctaaggacagtaccaacatatgaataactaatacgtctaatattcccaaaggttatctgcaaataaatactagtaacaaacataaataaatattgaattattatgaaggaagacttttgagaaatttcccaatgggcaaagaagggaaggaagaccctcgtgc

SEQ ID NO: 211409 - DNA, 625 bp, Homo Sapiens
ttttttttttttttttttggtaattacagaagtttattaaaatttcacttgcttttacattaaaaaaactgaaaaaattaaacttaatatatataaaatatatttaatttgcaaaaatgtgaaaaatctgcctcatccagtaaacagtcactgaaattttaattaagagtgccatacccatgaggctggaaaagtatgtcctctcaagggctaaaaactgagaaccaagagacaatcatttctgtaactccagctcctctttctcccacaaaatgttactgcagccagctgagagctgcagggtatgtcaggtcagacacaacctggtgctatgagatgtgggggaggcatgctgcagaacactgcataaagtcaaattcgtcttcattattacaacacccatgataagaatttctttaaaaaaagtattccatacttgagttatgagagattttagttttgggtttctatagaccagaactctctagaacccagtctctatttgttggatctatactttcagttacaattcgatgcagcataactttcacttaaggaagaatttgtatacatgtcatttaacatcaaaatttcattctgtggaaattagggttcccaccctcct

SEQ ID NO: 211410 - DNA, 691 bp, Homo Sapiens
  misc_feature (552)..(552): n is a, c, g, or t
ttttttttttttttttttgcaagtatgagacattttattttctaattgaaactgtattaagacatttacttggaatcacattattcccttaattttttcacagagaatattccatttactgtttagtttgtggtcttgtggacatgttctaagtaatatatttgttagcatggtagtttcagttgggcaaaacttactgccaataagacttgaatttaatttgtcacgtatttccaatggcaaccaatgatcaggtgcttcaatattacaaatttcaattcttccattctttatgtctatgaatactttaatttccaagtgtgactgttcatataacacatgaaaggaagtatttatactaaactttggagttttgccatatatccactcccaagtttgcagttctttggctttgctatttattccaggaaacagtgtctcatccgttgggtttattaggtgaatgtgattatcaatttgatgataggcagcatactctgtagcaacagcattcattagtacttcacaggtcagagtgggatccttttccanaagatttttcactaaggaaggtatgctagcagtggcattgctcctgatcccttggtaagggctctttagcaaagaagacaggaacgtcccatcagtactacataataaagtgcaatggtgataggcagtagtccgggcg

SEQ ID NO: 211411 - DNA, 675 bp, Homo Sapiens
ttttttttttttttttttcatagcaattggcagactttaatattcaagaaaaattaatttcatcatacacattaaaaatataggaaatttcatgcagacatgaagcttccaattcagcttttgtggcaacttttagaatgagagttacatataaatacagtacattttacagttaccaaacttcataattttatactgtgatttttacagcttctccttatattgtacatgttccaccttgctcacttgattagcataccctatatctgcactgcttcagaatatagaaattaaacaaaaaaacataagcacagtggactatctcctcccatttcataaagtaaatgaaaatgtttgtgtataaagctaatttaagaaaaacattttaaactttaaggcttacatactttagtagctaggactaaaattaagaaatacaaagctaaataaatcctccagtgatacttctattattgattgataccacattttcaagtttagaatatattaactgcaaaagctgtaagaaaagaagtgatgcaaatttgtatagaacatttaaaaaacaatattcatgatatgagggataattaacaaatgaagtaactgatttcagaattaactaaaacatatgctataatttagaaatttaacattattgaagaaacctaatag

SEQ ID NO: 211412 - DNA, 654 bp, Homo Sapiens
ttttttttttttttttttagagagaaagaattttaatcatcagcctaaaaaaattacaaaacctcattgaacataaggtacgcaacattaaattctgggtaatacatgcattgttatttctatgtgggaatacctcattgtgagcaaacctgacatacagcagtaggactgaccgtcactagaaagctttgacacaacacttttttttattatagcacactgccaaaatgtgtttaacatagagtttgatttttaaaaattgatttgcacataattttagagagaatatctattggttaaaatgaggtatatctgtgctgccatgaagtgtgccatgagaacacacttcagtttctgataaagcatttttacacatcataataaaatttcattttatgaaaaaatagttgaattcatgaggtatgcatcttgaccacatgcccacagtgtaagtacaaagtgtaaggtcagtgcatgagtgcacaacacagtataccacaagtaaatgcagttcccagtcatacatctcccccattataaaatgtgtctaatctcaaaacccccgatgaagtgcttgtgtggcacagcccaggctcacctacgggtatgtgtatatgtgcaaggatgggtatgccgccatgggagcacagcctc

SEQ ID NO: 211413 - DNA, 727 bp, Homo Sapiens
ttttttttttttttttttaaatttctactaaacctttaatcagctaagcaggccagaattttttaatgctgggcaagggctgtcatgaagaagatttatgaaagcagtgacaaaataatttcccaataaatacagtgcagatggggaaaatgatgactgggtcatcctcccacatagaaagaataacaagaggccagtacattgatcccacatataattttcaataaatgaggttcagtttggtctcaatgaactcttctgagaagaaaacattgaattttattaggtgtaaacagagttaacaaatatattcccaaacagtttagtatgaaacattttgaacccctttagatccaatattgaacattttgcatggaatattcattgtgtagtcaactgttcctggcctttcttggtagttgtcttccctaagctcaaacaaacagtgttaaactaaaaaggaaattaagaatgcaaaataaaagaaaataaatggaatggaccaaaatcctcatggatgaatgtgttggtttgcctttattttcatctaggataattcaacagactgtattctgagatcatggcaaggcacctctaacccagccactgggcaacatgagccccagatgctgagctagaggcatgtactggtgaaatacacagtaccggactcagcatgctgagctaaaaaaatatttttcctaatatgtccagtttaaaacttgtc

SEQ ID NO: 211414 - DNA, 655 bp, Homo Sapiens
  misc_feature (599)..(599): n is a, c, g, or t
ttttttttttttttttttaaaatacatttccatttttaatttaaaaaataaataacagcaaatctgaacaaaattttcctacttcaatgcacatcttcctaactgtccatgtttgaaatccagatagcaacaaaatcatggcaaaggcatttttgacaaagtttagacaaacgactcacaaaatatggctaatagtagatgagtttggacatctgatactgcagaccagccttggctagatcctaggcgtcagagtgaaatcatgaatttccttttgtagattagaattgatggtccaactctcaacccaccaaagagaaacttaccttttccaatttaattgtaaaagccagatatatcactgaatgaaggtatctaaggaagtgatatttatcaacttcccaaatgatacagagaaggaaagcataattattaaaatgaacctaaagtctagatacagtgggccaggctggtgaagccttagactactatggaaatgacattgtttataagatgttgcacaaattatggtaatctgtgtcaatatttcaatgtgtgctggattattactgacatattcataattttaatgtccacanatctttttatcttaatagccagggtatggcagggtcaagcaccacctgggatgata

SEQ ID NO: 211415 - DNA, 736 bp, Homo Sapiens
tttttttttttttattttattaaatttattgttcattgtaaagcaaatcaattacacagtaacatgacaattccaacttgttcacaaaaagtgataattgagttctattcttaagctctgctacattacaccacttatcacctgattaaataaagtaatgaacatttacaaaggcaccgctgtgtaccttgacagattcaatacattcaagatttcaattcagaagtttctttccaacgttttggaaaatgtactcagaagcagaacgattagtcatccttttccctcttgttactttaaagattttggctgagtttgtttggcaagaatagcatcaaacttactagcctctcttttaaactactattttttttttttaaaactaagcagaatacaaaaatctaaaaatctctcatttggataaataatttatgaaaattattcaataaacttcatagtacaatcttcagtattgtctttttcaagcacagtgatcagtgcatctcaaagatgagggaactgtcaaagtaatatacacactaaaatttaaatttttaaagaaatcaaagccttcaagttatccaatgaagaatgaggtttgtatattaaaaaggtagtgtaaaattataaagcatttaaagaaaaacaaccgaggaactacattttgctacactggggacagaaactggacttttcgaatagcttctaaaccgagaaacaaacataactaatagca

SEQ ID NO: 211416 - DNA, 587 bp, Homo Sapiens
ttttttttttttttttttgaaggttcactgtatgttttaatcaggctcagactgaaataaaagtagtcaattgaaaccccaacctggaaagccatccctgctatggctgtgatttcatcatttcggcatcccgaaacattcacttagagcaacatccatgtaaacagttcgacatatggtcccctgctgtggatctgtggctagtaacagcctgggagcagcagacagacaggggacacttaaacctcagaaagcaatagcagcctctgacgccttgctcaaggcttctcatctggtggctcagtgagactttgggaggtggaagtggtgaaagtggaaagccatgaagacatagctgtctttgcactggaaaaagctcctccaactgactggccaacagcttttcctgtttgtacaacattccggctagttgtgaccatgacgtttccaatttttttgccacgttcactattctgaacagaatgtgagaaccttaacttcatgtctgatactgagtattggccttgaaatggatggtttggatttatttctgcaagtgctggatgcttgttgctgttcacaccctg

SEQ ID NO: 211417 - DNA, 793 bp, Homo Sapiens
ttttttttttttttttttcaaggtttaagtcatttaattcccaaactaaaataaagaaattatccaaacaaaacagaaacaaaaacctttctatttcaaaatagtaatacaaaggtcagtctggtaagcttgcaagcattataatacctggttcagagaaagtatcactaatatcatcatccttgtcatcttcataatcctcttcctcttcttcctcctcctcattttcagacagttcatgctcactgccgaatccttcatcatggtcctcatcatcaacatcctcctcgtcctcctcatcttcttcaggactgcatttagttggctgttcacccaagttgtcggagacaaaaagagaataattgtgctcttcttttttctgggatgaatctgagactgatgtactggcagaaagactgctgctctctcctgctgcaagtgacccaggaccttcctggggcaggggacttagtaatagttcctgggtttctttaaaaggcaaagcgggagtggcatgaccttgaagaggctccatcccttttttctcttgtctctttgccactgcaccacagtagcaggtgttctcctttgctgcatctgtgtgaatctggctcaacaagggccggctctgttgcactgggttgatctttacctttgccttttttacatagtctttacattcaacatgaaagttcaccttttcattatgatacatgttggtcttcaacatgatttgtgtgcttgaagtgggtttacttgctttttggaacagtctgacaagggactcagctgc

SEQ ID NO: 211418 - DNA, 478 bp, Homo Sapiens; identical to SEQ ID NO: 55864

SEQ ID NO: 211419 - DNA, 559 bp, Homo Sapiens
ttttttttttttttttttaagagatggtgttttgctaagttgcccacactgatctcaaaatccttttgtttttgctttggaatggtctggaactcctgagctcaagtgatcctcccaccttggcctcccaaaggcctgggattacacgtatgagccaccgcaccaagcccaggttgagcttttaaggtattaaagatccactaggtgaaaaaaaagagtgaaagatacatatgccatttaagggaagcacaggaaaactcctattttgtttatatgtgaatagaggcgcatagatgcctagaaaagtgtctgggagggaatgaaaccagattggccacaaaaatcacctctggaaaaaggaaaagaatggggactttcactttttgcttcatatgtttcatgcacctttttttttttttttttttgagatggagtttcactcttattgcccaggctggggtgcagtgggtgacagagcgagactctgtctcaaaaaaaaaaaaaaaaaaaaaagcctacagccgcggccgctccaacatcagaatggtaaccctcgtgc

SEQ ID NO: 211420 - DNA, 748 bp, Homo Sapiens
  misc_feature (647)..(647): n is a, c, g, or t
ttttttttttttttttttgctatattctctttaataatacatacagaaggattactcaataaattttaaatacataaaatgcaacaatttaaatgtacatgtttttaaatagatgtatatcgatgtacataagtaaaactatcacccacatcaagatctggaacatatattttatatattaatgtcatattatttaccatatagtttgttaaatgttacatcctatattgtatgttttacataaaatgtcttatgtttagattttaagaaaaatgttgccatttctatgatttatagtttccattatctttaaactctttgatcatttgttttatacaaatgtatctcaggttagagattgatttttgacccaatttcaattgtaatagggctatttaaccagtttataggtcatctgtactgtcaatctactttttgctaattttagtgtctttttgctatttttctttttaccacttcttttccaaacattggaatgtatatattctatttttgtagttaacacttatttccatgtcaaatttacttggaactatatgatttacttggaactatatgatgcagtaactactgtttttccccatgcatcatgtacagaaaatgaggatgtatccaccccctcccanaccagtgatttggaagtttctttacagtatcagtagtaacatggacaaacttgttatttttttcctgctatacttaaaaataagggaaataaaactgtact

SEQ ID NO: 211421 - DNA, 694 bp, Homo Sapiens
  misc_feature (664)..(664): n is a, c, g, or t
  misc_feature (686)..(686): n is a, c, g, or t
ttttttttttttttttttgacagaaaagagaattatttaattttattaaaaatctccaatttataaccaaaatatacaaccactacatttaaaatcagtttgtacactcacagttaaagtgctaagaaaaaacatttacaaaaactgacatcagtctactgtaaacaaaataaatctacaagagcagagtgcaaagcacatcagagaatgtgaaattcccagttcatgctctaaccaagtgcacttgccctgtacatcccaacaacagcaacttttccactcatttggaagtgaacaattttaataaacatataaaaaagaaacatgaagaactaatgccacaaaatacaagtctttagcataaacactttctaattagatgtttatatgataaatcaacattagacatttagaatcacctcagcaatttgattcagaataaagtttggaaaactaaactgctaagtgccagctatttaaaaatgacatattttttagaataatgaaaaggaatactttttctacctttatagctcttgaaaaattgtaacagtaaaatggggaaagactttttttttttttaacaagcatggatagtattcatatgtaaaggtagtatcaatgagaaagagctggaagacagacctagctgtctgtcaggtanaatgagggtgaaggagatctangatgcttc

SEQ ID NO: 211422 - DNA, 665 bp, Homo Sapiens
  misc_feature (619)..(619): n is a, c, g, or t
ttttttttttttttttttaaatgagaacattaatttacttacactcagataactctctaaagagccattgtccaattttacaagatgtgcaacaggcagagaaggacaaacattgcaaataagttcttgcccattcatggtgcaagttctcagaagttactcttgtccaaatccttctgtttcttctatggcaaacaacagcttttccttcagttgctcatagctcttgtatggtggcaggtccaggcgattaaaacaggtatgacttctgggtagccaattttctttcccaactttttcaatgcagaatttctgtggtccattgctccccatgagatcagcaaatcctcctactgacaatcggcaggttccagtaacaaactgcagaagtctcattctcttctcattatcaatttctttaacaaactgccaaaaccacatgatttgtttgctggtccttgcataatgacggtagatggcatgtctttgccagtcattcaaatcaatctcttgcattccacataaaaggacctctaattcctttgcatcaaagtattgcaaatattgctggggaagaattcattaaagccttcaaagaaagcttgtgtctgttcttcancacctcgagacaactccactcagctaccattctgatgtattcctct

SEQ ID NO: 211423 - DNA, 642 bp, Homo Sapiens
  misc_feature (625)..(625): n is a, c, g, or t
ttttttttttttttttttgaacatcaaagatgtttgttattgcagccaggagacaatgccataaaatgctaacaaaaaaaagttatactgttttccttaaagtcagtaaattgcataaaagtactctgagcatttttggaagaaaggcaccagataagtccaaaatcttattgctactaggatcatacagggtcacagactatggcactctgttcagccaggagactaagtctcagcaagtcagtctctgaccttgaggcttaaagagcaaggaaggaaaatgtcaataaaacagagccctgtatcacagattaaactggagtgaaaatgatttccagttttatgtcaaagtagaagctggttcctaggacgctggcgctattttagatggacactctgttttctttggcccatttcttcatgatccggatcatgtattctacttgggtgttacctgtgcttctcagtaaatggagcacttctcgaagggtctctttgggttctctcccagctatgatcatctggaaaatgcccacacaggcaccccgtttgccttcccaatattcagggttaggatccagcctctcaaggacatcaaaagctttggcagaatagtaaaactggnccatcttgtagcagtca

SEQ ID NO: 211424 - DNA, 729 bp, Homo Sapiens
  misc_feature (563)..(563): n is a, c, g, or t
  misc_feature (585)..(585): n is a, c, g, or t
ttttttttttttttttttaactctgaattcttttaattctgaaaccagagacatgtacaacacttacagcattcacacaacactattttcaaaataggtttttgacccctaaaaatgaaaattcttagtgacaagctttagatatgaaacttagcccagtgggtattcactttgtcacaaaaagcaactacagacaaatagtttttccctctccccgacacaaaaactgaaattacagacttttaaagcagaaaaaattttctccaaaatgcaaatgattaaggtccaaggaacaaatgaacagaagatctcaattattcaattgagcgagtgatttagtttgcatattaactccttttcttactacttcctgatatctgattctggcaatatttatcttgtatctactgggcaagacactgggaacacaaagaaattttagacaaggtccagtggtatgctggtaaaggtttaacaactagctcttaagggaaaggtaggtcttcacttatagcatttctatggtgtaaatactccaattgccgcagatttcaagctagcancaatttgacaactgtctcacanaattcctcaaactaacgattgtcactcataagacattacaagccagctccaacacaccaccgtacagtctccaccttcaggtagttcataatctcttcatgggtaccttgtatcagatcttgggcaactggcggctggggtgac

SEQ ID NO: 211425 - DNA, 707 bp, Homo Sapiens
  misc_feature (677)..(678): n is a, c, g, or t
ttttttttttttttttgtagagatgaatcttactatgttgtccaggctggtctcaaactactggcctcaaccgagtctcctgctttggccttccaaagtgctgggaatacaggcatgagccatcatgcctggcccatatccaaatattttatgtttggtcaaaaatagaaaattctattataaaaaataaagttactatggcaacattttcccaacatagttcccagtatataaacttatttttcttaaaatgataacaaggtagctcaataacaatacaataccagtgataaccaaatataattgaatttttctaaaactacattcttacattccctatccactcaactcttgtaatggttttccacttttaaaaactatcaaaataggatttttaaaaatttatcaagaccacataatgcagttgaacactcaaagtgttccatgcaactgtggttgaactattcagattccagacttctaccaagaacaatccaaagagcaaactcccaaaatgacctcctgcgtggtacaaaacaagccaggctgaaatttcgggaaacctaagggatcttatccagaaccatattttggaaaactgtgatcaatcaattttttgacagtgaaagagagtactttccagagtatgtgttaattatatctctatcaagctttannaagttaacagatacttaactcttgttcat

SEQ ID NO: 211426 - DNA, 749 bp, Homo Sapiens
  misc_feature (675)..(675): n is a, c, g, or t
ttttttttttttctttttctgggtgttaaaatgtttatcatgcctaagggagacatttataattaaaccatttatgctacatataactggggaaaactatgatgctttcggtgctgggaatgcagtgaggtcccacgtgggcagagcttggctgggctgggcaactccgacacacgtctctgggggtgtggcggcgctctcagtcggcaccggagaagaggctgcaaggaagtcgctgtccctgtctccactggaagtgagtggtgcagcatctctttggcaggtggggggcatcagtagctggccagaggggtcctcgtcgctgagctcctggatcaggggtcttggggacttggtgtcttgttttcggatttccaagtccctcttagcttcttttttaaagatgtctgtgaagggcacccgagccgcctttgaggtgtctttagagactgcaaatatatttgacagagtgtctgtgggcaggttttccagcacagggagtgacgtgtagtccagttcagggtcactgtcatcactcaagctcgagatgacctcaatcttcggaaagcacatattctatttacagaagaaaaggtgtctgaaagtttctgttttcacaacagaatcgctctacaatgcaccatgccagttctgctttttcacccaatgtcacanagtattctgttgccacatccaagaaaggcccaagggaacacaggactctgaaagttaggcctgggggtggcact

SEQ ID NO: 211427 - DNA, 595 bp, Homo Sapiens
ttttttttttttttttttaacagatttgtatcagtttattttggtgcaaaaactgtgaaattcatgcacaatttttccataatatgtatttttccatgagcttcttgaagaccacttgtactagaaaactgtattcaagaggatatataaaaggattgtagatatgcaagtgccatttacttctggcatgcaaggatggatcaacatattcaagcaaatcaatgtgatataccacttgaacagaatgaaagatgaaaaccacatcatctcaacagatggagaaaaatcatttcacaaaattcagcatctgatcatcatagaaatcttaaacaaaatagatggagaaggaaatttacctcaccaatagaaagaccattgatgaaatgaccaatgtggagataaccaagcagggaaaatagaatccttttcccgtaggatctcacatgatgcaagaacgttctcactttttctattcaataaatactggaagtcctagccagagcaatgaactagcaaaagaaatgaaatgcctcaaaatcagaaaaagtaaaattatattttttgtagatgacatgatcttctgtgtagaaaatca

SEQ ID NO: 211428 - DNA, 729 bp, Homo Sapiens
  misc_feature (608)..(608): n is a, c, g, or t
  misc_feature (615)..(615): n is a, c, g, or t
ttttttttttttttttttgctgttgttactgtggaacttcttgcatgagaatatttgcatatatgaatctccagtaccaagcatacaccaaaaatgtgtacatttcagatgaaggacataacagagccctaataaaatacagaattgagcttaatttaactgtcttgggcaaccatcatgcctggctaatatgccatattatttccgttgtacacagtacatgttttggtttactaaacattgatcaaaattgatcgaaatctctaagttttggttaccatgtacagagaacaattgctcagcatggcatttaaataaaacagtaatattttaaaaattcacaaatacaatgcacaatttattttaaaaaaataaaatttaaaaaccttgaggatggatgaggctttgggtaattaacctgaaaaacaaaactaacaaaaaactacaagaacagtatgttaccagatttatactttaaaacactattaaaagaggaactcactgacactgctagaaatatttctaaaattcagctttttaaagctttttttttttttttttttgagacggagtctcgctcggtcacccaggctgagaccctgtctcanaaaacanaaacaaaaacctgtgttcttggtagttgaaatggtatgagcctaagaagcttgcaccccaaatctagccaccaatcatccctgtaaaggcacgagctaggatacactaaccccc

SEQ ID NO: 211429 - DNA, 584 bp, Homo Sapiens
  misc_feature (560)..(560): n is a, c, g, or t
  misc_feature (573)..(573): n is a, c, g, or t
ttttttttttttttttttgctatcaaaattgttttattatattgaattaccaatgacaataaattacaaaaaacaatgttttagacattgctgagtctaacaaaataggctgaagtttgatctttgtgaaaggacttgaaaccattgttttttcccacaaaaatccccatcaccagcactgcattcgaattttcttgaaaattgtttcctgagtttattcatggtagtatgtgcttaaggacaacaggttgttagtctatttgagcaaacctgatgttttctctaagaaaaaaaattcaatatcctcccccttcaagaacaataaaaccccaaactgtgctatcattaaatactaccaaaaaccattaactagaaaaaacaatgcaaaatcattattcaagaacccattagaaaccacagtattctaaagtcttatagaaaagatgtgtttttactagttaagcattgatagaagtccatcaaaaaatgttcaatccaaatctgcatttttggctatggagttctagccaaactggacaggattaggcatccttacctgngctccttctacanaatgacagtat

SEQ ID NO: 211430 - DNA, 740 bp, Homo Sapiens
ttttttttttttttttctgtaatcgactttttattaagattataaatttaaacaatctgaacagttttacccggtgatatacaattcagtatgcacaaaaatacagggtaatgagggaaaagggccgagaaaggaaggattggcaactcgttttggagtccacacggtgctgatggcagagaaccagaggggctgcagacgaaccccacctttttacaacaaaaggcttttaaattaaacaaatctatcgagctgaagacacaggacggggttctcacaggctcgaacaatgctggtttcatgaaatgcaaccgaaggctgaaccaaggcagtgcaacttagaagcacacacacaaacaccacagctgaccaggaacttagtgcaaagtctccaacgcagtcggcggtcccggcccctccctcccccggggccgccggggatccaggtgaaggaattgacttccttttttgtttagtgaggaccgcagtgctaggcatgatgggaaatgtagtccgccgtgcccgccccccaccccttacccaaacagtgtccgagagtgtcggggtgtcaggcgccacccccgagtccgggagacgggtggaggaggggaggagaacggagccagaggggcggggagaagaggggttcaagacacccgccccgggaagaaaagaaaaaaaagttgaagtgttttcatttctgccttctcattttgagaactttggagtccgccccagag

SEQ ID NO: 211431 - DNA, 681 bp, Homo Sapiens
  misc_feature (657)..(657): n is a, c, g, or t
ttttttttttttttttttcaagtaatgttatgtacagttttattgccagtatatgcacaacagtaagcatagaactataaatacacaatgtaattaacagtagaaaacaaaattgttacaggtagagggagaggatatagagaaacttttcctgctgctagaacagaaagaaaggggaaagcctatgacaaatcatccattcagtactcttgtcttaaattctttacatatatttctacatttttttcagttaaacaaagtacagataactctgcaacaatggcaaactgcttccctaatagctatttgccttttcaatcaaattcactttatattaggattaaaaaaaagtaaagatgagaaatcattagtatcctggttccaaattatctaatttagcctttcaccaaaactggtaatttttgagtcggctgcacatgaaaagaatgggtgtagcaagaggtgattaaaaaaatttgctaaaaagtaacagaaaatcaccctttaagtagttttccaaaagacactataggcagcagctcagttaaaagtattagccctgaagaggtagagaatttgagcccattatacaaagacagccttggcaccatcttctctctcatcaggatcaatattttcaagtaagacaatttcatnggtaaaggaaaccaggttccacca

SEQ ID NO: 211432 - DNA, 620 bp, Homo Sapiens
ttttttttttttttttatgtcagaagtttattttattggtaaaatattaaataatatacagaattaaaaactgcacttacacttctgagaagaaataaatcttggacaaattatatgcttgttcctgagattccctaaatttattccagtagctgtgcactcagacagtacaaacctttataatataatccttttcacaaagtattacaaagtttctgcagcttctttagttgtacacacatacagacacacactcacacatgcatatacaacactcatacacatatacacagtaaccacatacatgcacagaacatgtatgtgtgtgcattaaaaacaaagaagatacaagtcccacattttagtctgcagtgataaaactatttagcggaggtctccaaatcagtatgtagtagagtgacttgtcacacagctgcaaagactgtttcagtatttccatagtaaacctcattttctgaggtatggtatttgagccttaaaaaaaactacattacacttagcatacctgacatacaaggtatgggattttaacttgacatatatatttatatatatatatatatatatatgtcttttttaaacactaggttttatttccc

SEQ ID NO: 211433 - DNA, 651 bp, Homo Sapiens
ttttttttttttttttttgctttcttgattttatttcaaaagtacacaaggtcacaaaactagagcaagttgtttttcttaacaaattttgttcttacaaatttcaaaatctgcaccattggatatataagccagaaatcgtacatacaaaatctgaaactgacactgtcagttctatactttgcacacgtgaagtgtcagaatattttcttcagtagtacaggtgtatttatcactaaaattcacaattagggaaaagaataagtgaatcaatgaattgtggttctcttaaaacttgtgtcattaaataagttagcagaaaacacaaagttctgttttgatggagcttttagtctcgatgaccaaaaccaaacccaactgatatgtactatattcttaaattataaaataagataaattataaaagttaaccataatgaataagaggctggggttatctgctataagataaatgatcagccttccctaaagataaataaactgaaccacaattcacaaatgtgtttattattcttccctgcttctataacatttataaaaggaatttgtgctcagttgtggtctattttagtgttaaaataggtaaatgagtaagaaatcctattgcagaacatgatgccttttattgct

SEQ ID NO: 211434 - DNA, 708 bp, Homo Sapiens; identical to SEQ ID NO: 50316

SEQ ID NO: 211435 - DNA, 571 bp, Homo Sapiens
ttttttttttttatatttcagaacacagatggggtgaacttctataacatcttaactaaaagcactcccacgtctacaatggagtcgagtctagaattcacacagagccacctaggtgagtgaaccttgaagttattaaagtccctgcctcagcctccatgcaaaaagaaacctgtttattaaaaaaaaaaaaaaaactttattaacatataatttgcataccataaaattaactcactgtaagtggttttcagtatattcccagagttgtgcagtcatcactacaatccagttatggagcatttctgtcaccccaaggagatcccacgtgtctgcttgcagacagttctcattcccactcccagccacaggcaaccactcatctgccttctgtctctctagattttccttttctgaacattttatataaatacaatcgcacaatagttagtcttttgcactggcttctgtcacatagcatgatgtttttgaagtttagaaaccagcttccatacaccaaattacaacatcagttcaagactgaatttagtcatctttcagcccctcgtgc

SEQ ID NO: 211436 - DNA, 613 bp, Homo Sapiens
ttttttttttttttttttgactaaaaatgtttggttgcttttttgtcacaagtaacttggaaaatagaagcagaatagtaaaggttctattcagcaacatagttcatggattttgtggaggttctattcagtaatatggttcatggatttagtggtgactgataagattttatttttgaaggaaaaattgcttatactaagtccagagacatgcaggtgagcccttttgtcaggctgcaaatcatgacatgccgatggttgtttattttgtttttaggtgtgcattctttttcttcttagcaattcctttatgatcaccttcccttcttgtttcactccctcccgctctctcaaaaggaacttgggaaacttgtgaaacccaggaaaacctttagtcttatacctcaactacctttcagtcctgtctgggttttaaataagtgaagtagaagaaattgagtattttctgacataagaatatattatcaatacagttttatgcagtaagctctccttaccataaatgtttcttggttgacaacatctaagacaatattagtgggatgaagaaagaaaagcaggggtgcttttggaagcagtgttagtgttcctc

SEQ ID NO: 211437 - DNA, 679 bp, Homo Sapiens
  misc_feature (648)..(648): n is a, c, g, or t
ttttttttttttttttttaacagtgaaaacatttaatagtttactgccacagtatcaacttttatatgtgtgcatatgtttaaatacaaattagaccataaataccagatggtaaaatagctgcctctaggctgaaaaaaaaaaactctctaccactaaataaacaatcttaagtaatactgaagaaaacagatgtgaggtaattttccatctaaagtgactacaacctacattaagacattttaactaaaaattcaagtagttataagactcttgtaactcaaaaatgtaactttaatacacattttcaaactaaagaaaaatactttaattataaataggcaaaataaataaaattattcctgctgaaataaaatcaagacattatttatttgaggactgtatatagcccagataaaaaaaatgaaacttacttgagaccctactaagaagctatataatactctaatacaaattatctatacagatacccatataagtatgtaagtatgtgtatacatatatattcaccaatgcatatatggaactttcattctagatgagaactaactgttccttttttttaagaaaagtatattccaattatgaaaatattcttaatttacattaagagatcactttttgtangatgcacactaatgtgacaaggagcattttc

SEQ ID NO: 211438 - DNA, 675 bp, Homo Sapiens
  misc_feature (624)..(624): n is a, c, g, or t
ttttttttttttttttttaaaggtacagtatttacttcacattcaaaataatgcatttcaagcctgagcatcacggctggcacaaaactagtgtttttttgaacaccaactatcaaatatgtgatagaaatgccttgaatgtcaagataaagaatgtatatattctctgggtaacagggatcaaacagatttttgagcaagaggacactgatgagaggtacgtgtaagggactggatcctgagtcgaagtctaagccgttgcagtggttgcaaccccacttacttctgtctcactcccatccaaacctcctaccctcaatccacaagcatttcaaaaccatgtttctaaaaaccagccatttatatctgtttaggtaagtaacaggagtgaggtggtgtatttacaagttggcttgtccagatatactataacttagtgtctgtatttaatattgacaaccaaaaatatatataaatatcttgcatctatacacaacagggcaggagtctccatgtcttcttgagcagtgagtttgcaggctcccacaggccctcttctcatggtaatagtgtggccctcagtgcaaaggagactagaacccggcagcccagactggcccttcncctctcctccctgcactccagtgctcccaactggtctcaggtaaagaaaga

SEQ ID NO: 211439 - DNA, 505 bp, Homo Sapiens; identical to SEQ ID NO: 52036

SEQ ID NO: 211440 - DNA, 662 bp, Homo Sapiens
ttttttttttttttttttacccccaaatattttatttttcttagcctgacattaggttatgagaagtacaaaagatccacaagtacaaaaaaatctgtatagctttgcggtagttgaaaaaaatgcaagagaacaaaaaaattttttgagtaatattcatctctgcagatctgagtgacagtccgcttgaaacaccgctgtaaaagtggtaaaaaatgatttcattgggattatgttaaaatttttgaggtcccttttacttgtttaggaaatctgtcttctgacatttatacgggatagttcttttcctgtattttgctgaagctcaattccctgcctcttcagggcttcaatgatgacacttttgtttttatagtcagctagtgatgttttgtccaaaggaagattctgacaacagcttcagcagaaagaaaatctggatataggtttatagttattgtcctttccaaagtaaaaaaaaaaaaaaaaaaaaagttgaaaaatattgatgactttttcttagggttaatttctcttcctgcaaggatttaatttgaggataaattacctttgatgcagtttttttcccaaagtatttttaaaacactttcttgaaaagatgaattcttctacctatccctaggattctgagtaaagatgac

SEQ ID NO: 211441 - DNA, 627 bp, Homo Sapiens
  misc_feature (563)..(563): n is a, c, g, or t
  misc_feature (601)..(601): n is a, c, g, or t
ttttttttttttttttttcccaaaaaagagaataggactttattagcattggtgcagacattgtattacacaggaatgggtccctagcttgcacaaccccagctgagctttcagcagataaatcacagcagaaatagaatcaccctaggactttcaatcaaaagctggaagtccaccttacagaaagacaaaaagaaacccctttttatatcttaacaaagcaatagctctcaagcagcagagcatctcgaggaagaaagcttgcccggtcgccatcccatcatgccagagcgtgcagtgtccacccttgactacgctggggaattgctgattttttgaaaaagcttaacttaacaatttctgatgtctatcttttagagttctgtatgttcccattttttattcttctgaattttgaattgcaagtagctgtaaaatccaatctttgagtgcatgggggtgggtgtgaggcggggctcagcttcaaccccctgtcctgtaaagcagtggctggtttttcctgagcccaccctgggaggtcgtggtaggtgtggaggctgcanactcctccagatgctgccctcgctgtgcctcacaccanagaggatggaagtgggctctggtgtc

SEQ ID NO: 211442 - DNA, 711 bp, Homo Sapiens
ttttttttttttttttttgagacggagttttgctcctgttgcccaggctagagtgcaatggcacaatcttggctcactgcaacctctgccccccagattcaagcgattctcctgtgccagcctcccaactagctaggattacagaagcaggccaccacgcctggccaatttttgtagttttagtagagacaggggtttcatcatattgatcaggccagtcttgaactcctgacctcaggtgattcacctgctttggtttctatccagtgtgagtcctaccatgttttcgaaggtgtgaggtagatctgaaggtttttccacattgcttacactcatagggtttctctccagtgtgagtcctttcatgttatcgaaaagaagtgaaagaaataaaggctttcccacattgcttacactcatagggtttctctccagtgtaagatttttcaggtatttgaaatgacttggcagaataaaagcctttcccacatatcttacatttataaggtctttctacagagtgcattcttacgtgtgtttgtgtcctttcatgaattcgaaggttcttggcagatctgaaggctttcccacattccttacactcatagggtttctctccagtgtgagttctaccatggattcgaaggtgtggggcagatctgaaggctttcccacattgcttacactcgtagggcttctcttcagggtgag

SEQ ID NO: 211443 - DNA, 695 bp, Homo Sapiens
ttttttttttttttttctgcaaagatgtttaatgcacttagattacagagaggaagagggggcaagaaggaaacgacatctaagtgagtcacccaaaaattcttacaaaagtcccaggctggctgcagccccaggaaccgagtcgccactgacattaaaaactaatataaaattttacaaaaatctgcttgtcgcagcattcaggtacttgtacaaaaggaggggtctccctacagggctcctgacttgtaacagggacccaggcacctcacctggcatggatgtcctagaagccagaaagggaagaccagacacaaaaatacagtaaaggaaattctctactggtcagccccataggggcaccgaccttcaggttttctccctgcttgcaactcaatccgaaaccccagtcccaagaccctgtgtctatttttaaaaatgctctagcccttttagactctccccttggcttctccagtccctgccttggagcactgcccttggaagagaaagatacgggcaggaagaggcaccagctccccacacaggcctgagacctcgcacaagcctcccaaacccccctcagaattgcagctgagtctgcagtcctcctgcagcccacactgagccagcagagccacaggaacctgccttatatagcaggcaaagaggaaagggaaaggccttctcagaag

SEQ ID NO: 211444 - DNA, 704 bp, Homo Sapiens
ttttttttttttttttttgagtaaaagtgatcgtcatttgagagttatttggctgctttgggcttcaaggctggagaagcaggtaatggcacagtatctcactcactgttcttcctgccctggggttggcagcaccaccagaatgcccagaccactgagttggaattgtcttcccagatttccaactcaggtaaaagaacaaaagccaacaggaaccaatggctaaggaggagcaacatgtaaaacagtggtgtaaaagaagaaatgcaacgtaagagggcaggagagaagtcaagataatggagccgagtggtggccagaaatgtgagtagctctgtgctgactagcgtcagtgtaaaacaaatttaaggaaagcagcattatgaggtctcaagataatgggagccacctgaaaacggagataaaagacttgtctaaagcttgagggctccacatgaagatatgagatggaaagactataattcaggcaggaactcctgcacggcccaccaaaagccaggacaatgcacttacaaacatggtgtcattttaccagtgccagacaccctgcatgccagcttcctgttctctgcctggcagaaggctggcctagaggcagtcaccgttacacagcccctctcccctcagtatcttcctcaggttagtttatggtttcacatagggaagtccaacttgatgaccag

SEQ ID NO: 211445 - DNA, 643 bp, Homo Sapiens
ttttttttttttttttctgccaataaatactttaatgagaaccgaggtctgtaacacatatagcaataaccaccctggcctatgccttctgctctagcccaagtctggggctaaccaattacatttaaccacatttggaaagcaggccgttttcaatgtcacccatcagtatccatcttcatagaagataccaatctggggccagagtctcaatgttaacactttctctcggggaaaagttaacatggtaacacaaacatagaaataactttgaaccaccccactgttcttccatcaggaggcccttaggagaccaacggcttggtaaacacttacaacattgtcaaaatacattagaacacgggaaaagggcaaaggagtagaaaggctggcagggctgggctcacatataattcagttcttagatttgaagcctctttagctgctcgtatgtaataaaaaaaatgatgttccagggtccaagccgaagccagtttggccaaaatcctttatagagtgcaaaaaagccctcatgtttccacatctttaaaataccatcaacagtgcccttatagagatccacatgtcccacgattgccctctggttcatcatgcgagttcgaaccacatcaaccgggttgga

SEQ ID NO: 211446 - DNA, 638 bp, Homo Sapiens
ttttttttttttttttttgcagatattaattcagtttaatcatatcaattcttaaacaaaaaacttcctccaagagacaatagttcacagtaactgcaaagcttactcacaatttttaaaaatatcgctcatgcttagcattcaaagaagatattatagaataactgtaaaaacttttaccaggaacatcagcttctgacttgaaaaattacaaatactgaagcattttggtatcagacacagtagttttgacattgtctgttcatttgatgagtttctggaagtttggaaaattgtacctctataattggataatgcgcttattctaaactaaacattttcaaatgtagaaaacaaactagcaagctacacatacaaagaaaagccctctaagacaagctttccacatgttgaatgccagcatgtgcaccgtgaatcctggaagactagaattgatacatacgcttggcttgaagtcttacaccccaggctcaacgatggagtttgcattcacctacacattaatgacaaactctgggttagtataagagaagccagcaattcattttggtccaagttcatgatgaagagttatcagtgggggtcagttccacaggctgtctggtgactctttgtcg

SEQ ID NO: 211447 - DNA, 670 bp, Homo Sapiens
  misc_feature (587)..(587): n is a, c, g, or t
  misc_feature (609)..(609): n is a, c, g, or t
  misc_feature (636)..(636): n is a, c, g, or t
  misc_feature (655)..(655): n is a, c, g, or t
ttttttttttttttctttcaactttatccacagtttgcatcggtaatatacatttaagtgttccatttatttttaaatgcatcagaaaagcaattatgatagatctgtgaccaatacaaacatttctgatttattcaaaaaattcagttaaaaaagtcattaaactagcattctgtaaagataattattaaacaaatggtaatgcatttttactccttatttcatttctaacatacccaatgtcacttctttcttgtgccatacagtaataaaatgtaacagaaatagatatctattaaattttgggggcctaataaaatatttttgattattcaactgtcattaaatcacaaatcccactcaagtaatgaaaatcattcttaattcaataactgatgaaatagataatagccataaaaacatttagaataaattttacacttagaaactactaaaagaaatacatcagagccttggtataacattgtaggggaccatgctgtgaaactgctttagacgtggtgttgccatttggcacaagagtaaatgaactgccatgatgtggacctcagagaagcccatcttanattgaattttgctctgcagtanagaatgctacagtgaggttctgctgtnatttctttttaaggaatanttaactgaaagtact

SEQ ID NO: 211448 - DNA, 623 bp, Homo Sapiens
ttttttttttttttttttgggatttttaatctttaattttcaagatggttaaaatattgaaatgtttaagtggataactatattattcataaaatgactgagtgaaaactaatatactatgagatgaaaagtacttgtcagggattttcaagcttttgctcaagtaattaccatgaagtaacaatttctagaaatgaagaacaatctgtgaagataaattaccattggtgtggggaaaaaaagccaaacagaagtagaaaaaggtgtagctggcatacaaatgttatctacagtgtatttatatatattttttaaacttttaactaaaaagtaaactttaatgtcgaaaatgcaaacttggggaagacagaaaagatcacacacaaggctgtcacttcacacgtggaaggttgcacagcggccgggcagaggcgcttgtcacacttcccagatggtcaggcggccaggcagaggcgctcctcacttcccagacggggcagcagctgggcagaggtgctcctcacttcccagacttttatattttttatacttgaccaggtctcttatgtcctttttctggaaaactacttttaactactaaagtgattataaatgaaaaagtg

SEQ ID NO: 211449 - DNA, 650 bp, Homo Sapiens
ttttttttttttttttttgatgaagtgcatttactttgacattgatatagcttgtaactacttttggaatttttttcccctaacactttgatctcattaagggtattacaccttttccaccagaaaatgcagaggtatcatctttcttggaaaccaattgaaagcgtcccattttaacaaaatgacataaaattacaaacatttacatgattaaattcaaagcctgatccatctggtggtaagaaatgttaacttattttaaaagatgtatttgcattattaaaatatagtaacgacttccatctttacatcaaaagaaacgggcttgcataagcaatggctcccagctctggggagggtttgagccacgcccttgcgggggccgctccaagctctgacttcaaaagttggagtttcccagctgcgaacagctggtcaaaggcactctcaaaagttcaaggaaatgcccgtttgcggatggccgcagcaggcctgtggggctggggacagcgccaaggagctggccgttggttcctgagatgctcctgctctgccgtgttctaaggacctgcgagctggagctcttctcgggaaaaagaaacgctggggaggcctccgtgtgggcgggtcaagccagataaccaggcttg

SEQ ID NO: 211450 - DNA, 661 bp, Homo Sapiens
ttttttttttttttttttcaaaagatttagctaactttatttatagcacggtattaatgagaccaaaatcatgggatcagaacttagtgtgagccagcagattggttttatcccatgggcacttcctgtaggcttaaaatatcaatgattgctaaggtgttcagtccaaaaggtgtaaatagatcaacacaaatttattgtcactactgagaaacaaagcccaaaaaacttaactggtagttgaacaactttgacactgaagaacagtacaaggaactaagaccatcacattgtgcattaaactctactaagtcggtggttcaaggggaataacctcagactggtatcatgctagaacatgtaatggaatcagtcagccatgattccaaatacaccattacttccaattcagtttaacctagttttaacatgtcagtagctcctaccaataagtgggcctagctatatttcccacggaaggtgatcaaggcaatgcaaatctgttcacatctcagttccagctttgtatgcacaatgggccagttgcagtagggtttccacgaatgcaccctgagcttagcagaggaatacggcaatagttctccaactcaacaagtaagccagtatacacaggacccttcacttcctggctcttgccttt

SEQ ID NO: 211451 - DNA, 685 bp, Homo Sapiens
  misc_feature (643)..(643): n is a, c, g, or t
ttttttttttttttttctcaagttgattttattaacaaaaagtgcaaactattttgaacaaaagtaaactatgagtcacagcattcagcaagacatcagacacggaagagtgaacaatattcactaagtaaaatacagcagatgagatgtctctcacatgtatatttaattattcatgctttttcaatagtctcttagtcaactttcagtgtaatttccacaaatatatagcagctcaaacacaaatgcaggagcacaatggcaaagtttggcaactgttttgggctaattatgagtatgaaagaaaaccttatatcacagtttcacgttcatgtaagccactgtgcaacatgaatgaatctttaaatgtgttgacactgaaatcaatgtacaactaatgaaaataaagaagaaaagggggctttaaaatatttgttgcactacagtcgtatagtaagaggcagaaaaaaatgaaagaattttaaataatcttacacgtgtctacagggccaggaacgtaatgaatccatgttaacttaatttcatttaaaattacatttgtagaagtcacacaacagaaagataccatgcggttgaacagtgtgcctgtacttgaacaagtgagagaagatacatactccanaaaggagattcagtctagtgttacttcagttattcacatagt

SEQ ID NO: 211452 - DNA, 599 bp, Homo Sapiens
ttttttttttttttttttaacaataaaatcactttaatgtgctactcttcactttggaaggtcattacagtatcattcgacaaggaaagatgccgctggatggctgtgtcctgtgagtcactgggatgagctggctgctttcaccccaccggatccggggctcagacagttacaagcccgagtggctgggaggtttggagggaaccaggtttagctgtgatgaaagcacctggctgtgggctgggaggcaggagtgcagggcagcctgggctcccctggccccagactcaggtcggcaagtgcccagtggaggccacacaaccccagcaccaagcaatggagggtgtatggctcagtgtttccacatcctgaaaagtgacacatgaaccgtttcctaggaaagttctcttccaccgtgttctagctgagacccgggatccttccagtttcacgaagaacgtgcagaagatgaaaagagtgagggacgcggacctagctgtagctgcactcagccgcctccgcggtaaagtctgggtgaaggcctgggtgagtgcagataggagagcactcctcttactgttctctggctgggtctcgct

SEQ ID NO: 211453 - DNA, 556 bp, Homo Sapiens
ttttttttttttttttttaacaaaaaaaaggaaaaacaaaagcctaaaatctgagttctagaaccagagagatttgggaaccataagatctagaatcagaaggagttgagggtggtaagatctaaaaccagagaaatgtataaggcaaagtctaaaatcagaagatatttgaaggctgaattctagacccagggtaatttggagtcagatcttgagtgaggaggagctggaaatgatgaagtctagagccaagggaacttacggaatgaggtctagaatcagaaggcacttgtaagtcagttctagaaccagagaaacagcagatcaccagatcttgaatcaggaccctggaggtggcaccttctagaagttgtgtagtctggaactagtgagtggtacaggtcatgaggttcagaatctaggagaactagagcatcgtctggttctagaagaactggttattataagataaggacagggtcgggcacggtggcttatgcctgtaatcccagcactttgggaggctgaggcgggtggatcatctgaggtcaagagt

SEQ ID NO: 211454 - DNA, 610 bp, Homo Sapiens
ttttttttttttttttctcagaaaataccattttattacttttagcattagatacgtttacaataaagaattatgttaatagagcctaggagttccaattgctagttgagaatcacctcaagaaaaatagaaaatttgtagaaataattattaaattttaaaaatctaagccttttagacttttcaaaataaaaatttaagtatgctgtcttcacagtgaatttaatgtgataagattttcattcaaatgacattatttctatttaatgttttaatacagttatgcatgaaatcaaattccaacttcttaaaaaatgtggagtttttttggatcatttgatcatttcctataaaccatgtattccggtctctatattactgagagtgatgttagattcttggtctactgttgaagataccaaacacatgcaccatttgaatgtgttcttgaactaagtcctaaaacaaagtgaagcagtgtgtttttgtagagctcaggtctaggtgctgccaggtggggtagtgccactcctccagaaggccctggtccttgtgaggcccaacagatgtcatattctttgtttatattcaattcggcattgcccttccg

SEQ ID NO: 211455 - DNA, 579 bp, Homo Sapiens
  misc_feature (485)..(485): n is a, c, g, or t
tttttttttttttttgttgtcagcacagttttatttgctgtggaatccatgagagccggaagcatcgttggggccgtggctagcagagctcatggtgaccagtcctgggcctgaccaatgggtgattacatttaaaaaccaaaacaaaacaaaacaaaataccaagaacagatcacttgccatggacatcagtaatctattggtaatggtgaaaatttcatgaaaatttcccctaaaccataacaaaaactgtcctccttaccccaaaagtgctggaggaaagatggttgcatgacttgacctctctttgaacttgaaatgctaccttcctacccggaaatgcgacacactatacttaaaaggccagatggctgcaggctgtttgcacccctggctctgcccagggacacccctctcctggttctaatgctcagacccaggaggcagagtccgcagcccgagggagcttcaaggccgaggggtangacctgcagggcccacaccacccttctgatggagagctttgcacatgcattcacacacacatgcctggcgggatcgcagaggatgggtctcgtg

SEQ ID NO: 211456 - DNA, 676 bp, Homo Sapiens
  misc_feature (97)..(97): n is a, c, g, or t
  misc_feature (633)..(633): n is a, c, g, or t
  misc_feature (656)..(656): n is a, c, g, or t
ttttttttttttttttttacattcaataaacatttattagcacctgcagaaaaggcacagagggggatataagactttatgaatctgaccaactgtnggaggattcattacagtcaaaaagaatggtcagagaagcagcccccaaatcacaaccatccacccagtagacatcaccaagtgctggtttagggcaagtagccagtctaaacatccatttaattctagtgggagagaacaaacagtttcaggtcttacctcttctagacaactctcccgtagcctcctatcaaatatgttttgattacaaaccccttctagaacttagaagataatttgtctaacccagtctacattttctaacacctgataatgtgtagtggtaaataaagcccagcccacaatttctatagttgagactccagggggagtggcttcagatcagtgacaaatgagcaccaactctggcatgtatggcatgggtcactgtgataggatgtttttccctacatggcttctctgatgttgaacaaggtatgaaattcgggtgaagccttttccacacgcattacactgatagggtttctcaccagtgtggattttttgatgttcaatgaggcctgtattctgagtganacttctttcacactcattacatnttatagacatgggagtttca

SEQ ID NO: 211457 - DNA, 662 bp, Homo Sapiens
tttttttttttttattttaattgagctttattttctttggagggagggtcttgcttgtcatccaggctgtagtgaatgggcatgtcataactcactgtatccacaacctcctgggctgaaatgatcctccagcctctgcttcccaagtagctgggactacaggtaagtgccagcacatgtggctaatttttttacatctttgtagagatgaggtctcactattttaccaggctggtctcaaattcgtggcctattgtgatcctaccagctcaacctcccaaatcgctgggattgcagacatgagccactgtgcctgactcaaaaatcatactttattcttgagcccattggtcagggtagattcgcacactccctctgcagtgactccaggagcccctctcacagctcagagcggaagctgaggctgcagcctgccatcttctccgcatagtccgcatcgaagcgctcattctgcgccacggtgaaggtggtcttccagtccccagccatgcctttcctcatgaagggggagatgctgtggtccatgagctcctgggggacggtggtgtagttggtcatagggttcttcttcatctccttgaacgacgtgtgctgaaccatgaagtccatggtctcctctggcagggagcgccccaaaaact

SEQ ID NO: 211458 - DNA, 683 bp, Homo Sapiens
ttttttttttttttttctagatctgtcagtttatagaacatataggggacagaaaaggtgtacatgatcccattaggatacattcagtaaaatccactgaaggacaattctataggacaaacaacttagtttcttcaaaaattaaaaacaggaaagttaaatctatagattatattaacaaaatgcaagatctagatcttgcctggatcttgactcgaataaaccaactgttaaaaaaaacttacgagacaatcaggaagtttgaatattgactggtacttggcatcaaaaaatgttttagcagtcttacacaatggtattgtggttatgttcaaaaaagtaccctatctttggagttatatttgaatgtctctgatcacacaaacatgaaaatactatgcctgttaatgggactcaaactgatccctgtgggttggggcaggggataggtggggatgcaggtaaacaagactgaccacaggacagctgttggaggatgggtacacagagcttcattctgctattctttttgtgcatttgtgaaaacttccataataaaatgtttttaaaaatgagtttggatagcattatactataaaatattttaaaatttccttctttaatgaagacttgcaggcagaaaaatataattttctaagggtcaattaactagtacattacct

SEQ ID NO: 211459 - DNA, 586 bp, Homo Sapiens
ttttttttttttttttttccgaccaatatggtttatttctgccccagccaagcttctttggaccctggctgggggaaaggaccccaggcaccggcaagttccagtcattgcagatcctccaggtctaggtgtgactggtagtagcctgggcactgttgctggacgttgtattctccttccttcttccgccggcgggtggtcaccaggacaccgcagatcaggcatgtgatgactcccaggagtcctgccaagccgatgaggatgacagcccagaagggaaggtcagaattcccagttaagggctcatttctgttgggagaatacccatccacaaggacactgctcctgtccagggtgaagttctgcagctgggtaccattccgggtcatccgcagaaattcctcatagatggcaactctgtctactctccgagccagtggcgagaagttacacagggagtccaccccggtgtggtgcctgttggggacagacctgaatgttgaaacttgacagtcagaaaaataactcttgatgctgctgtttcggaagagttggttgagcgcatcctcaatattcctcctcgtgc

SEQ ID NO: 211460 - DNA, 665 bp, Homo Sapiens
  misc_feature (652)..(652): n is a, c, g, or t
ttttttttttttttttttggtggggctgctgcatatcttcatattgaggatgttggtatttctacttcatcaaagttatgactaggcagtcaggatgcctacactcactaactcactatatttgtacttcaaaaattaatctccttttctcacattctaactcaataatatatggaggtatattcatagtaaagcctattaagcagaaacaagttattttttaaggatgattatagaaactatgtttcagaaccaaaacatgtccttcaggacactcttagggacttattagaaatgtcctattctttgaaaattttcatagttaagtaaagctcttctaggagttctcttctgtaaactccccctccacatgcaatgacccagccacagtccccctgacacacatactcatttattggggcaatataatttacattttaaaaaccaaacaaaggtaaatacacttgggaaattccatgaaacctgaacaaataactgtgcatgagtcataggaaacagcaatggaagaggaagtgtctaaatatcagaaaacagatgttctcacaaataaatctagttgagatttaagtaagtggctctgagcctcttaccacataattgtttttcctagttttgagtaaggacaacacanacattttgggatc

SEQ ID NO: 211461 - DNA, 565 bp, Homo Sapiens
ttttttttttttttttttgcaactaatgcaattatttgcatagcaatttattaatttataatcaggatagtgtttcaaggccataaaatatcaatgtatcccatccagaaaagccccttccctgtcctggaggacaaagaaatcattagcaagtagcttggtagacatggagtccgtcttgaggaccatttccctgggccacggtaaagtctggcgaagcaccactgtgctaagcagactcctaccaaatggagcatctggcaatctctgctttttttttttttaacctctgcatttttgaacgtcctttttttagggtcttaattgaccattcttctttgattcacatcatctttatgttgcccacactccaattctctgcctacttactcagttgtaatcacaatccagtcctgccttcctcaagtttcactggctcaccatggtagcaattcgtgtgtggtcccaaattcttccaagcgtccactacatcctgccccacctgggagctgacctcactcttcctgtatgggcttgactagttaatccacagaaaccctcgtgc

SEQ ID NO: 211462 - DNA, 636 bp, Homo Sapiens
ttttttttttttttttttccagctataaaagtttattaaaaaaatagacaacatatgtaaacatatttttcagtcacaaggcttcataatacagcacattaggcccaggccttaaatctctgcagtgagagtaccttaattttttactaacagtaattgacttatctttcagtgaacattaagcctacacaaaaataaataaccagattctgctaagtttactaacacagaaaattgcaaatgtacaatagattgcagcaaaagttaactatctgcagtaacatgtgagattgaattgttatattacaattattttaatacagcttcattttgaaattcatcataatgtagagttgactaaaataaagctaaaggggaataataacagagataaacaaacacccagatcacatacactccccaacacacacatgcaaacacacatttactaatatgcatgcacacacacacacgccaacatacatgcacacacatacagggatgttttggtagaagtaaaactgaggacatagtttccatcctttttctttcatgtattgatgattttaggtatatatttctctacccttaagctggaagctacgtgttccaaaaggactgaacacaaagcaatca

SEQ ID NO: 211463 - DNA, 624 bp, Homo Sapiens
  misc_feature (604)..(604): n is a, c, g, or t
ttttttttttttttttttggaaactaaagatttttatttaatccaaatgttgcactggaagaagaaatcaacagtggtatatttacttaacaaggatgtgtgtaatacaagacaaccctggggattacacacttgaaggaatggaagtggcaaaggttaacaggcagaaagcagctggatgaaacagtttattttcatcttagaagattctagctatctgtggagaccaccactgttccccgaaaagctaaagttgttaagtttgtaggagtaccacaggtccttccccctgctgcaagacagagacttgctctgttgcccaggctgcagtgcagtggtgcaatctcagctcactgcaacctctgcctcccgggttcaagcaattctcctgcctcagcctcccatgtagctgggattacaggtgtgtgccaccatgcctggctaatttttgtatttttagtagagatggagtttcaccatgttggccaggctggtctcgaactcctgacctcaagtgatccgcccaccttgacctcccaaagtgctgggattacaggtgtgatccaccacgcccggccacacaggtccatttttcatattccanagcccagtatagaataaata

SEQ ID NO: 211464 - DNA, 590 bp, Homo Sapiens
ttttttttttttttttttgcaatttaaataagatttatttttttaaaggtggttatttttattttttgcaatgccacagttataggagtgtatgaagaggtaacatgtctccttttccttaaccatgtttttttttttttaaccttctgcacaaaggtaaaagtttttgttaatctcatagttaatggtataaaacagagattggcaaacctttcctccaacaggccaggtagtaaatattttagatttcacagaccacatatttttttcttttataactctttaaaaatgtaaaaatcatttttagtttgcaccatacaaaaacagactgggccaaattcggcccgtgggcagtagtttgccaacccctggtataaaatatctactttgtcttgtcagagaaattgctgtccttaggcttctagacaatctgctgcctgaagtcaagtggagaagggccttatttacaatttaatgtggtttgtgacagaagtagaaatggagagcttctgctcacttttgactctcccagtttttccattcactcattcattcaataaatttgttgagcacctactatgtacactctt

SEQ ID NO: 211465 - DNA, 571 bp, Homo Sapiens
ttttttttttttttttatagtcatcggtttgtttattttttaatctgtatactgtttaatacattgtcagcaaggactgatgaaaaggtcaatgacactttttctacaatgtatagtattatttcaaaaagaattaaagaaaatattttaaatgttaagagacattcctatttaattccttaagaaacattttccttgagattctgcaaccttggaaaaattcagttctcaaggtattccaaatatgcagcaaatgatatatgttttataattaatgtataacaaacattttattaaaatgcatagaaggttatatggaagactaagcataacgaatacaataatgaaaatggtacaaccttttagacaacaaatatgtttccgtttcacagagaacagctgtgtaaactactatagcaaccacagtctatgtaatcatataactgaggcatactcttcaagatcaagtgcttggttatagtcagccataggttcctcaatcagacctattttaccacgaactttttgctctaaaagtatatactagaggatcattaggcttcaaagacag

SEQ ID NO: 211466 - DNA, 629 bp, Homo Sapiens; identical to SEQ ID NO: 53897

SEQ ID NO: 211467 - DNA, 696 bp, Homo Sapiens
ttttttttttttttttttaaaaacagcagcattaaacttagtgacatgacaccgacatgattaataccatcttaacacactcagaattccgcctttcacattataatcaagcatagtggtaaactgttataaaagtgactttgctacgagagacaggttagggaacaaacaacctgacttatggtagaaacccatagctctgttcagattgcaataaaccatacacattttaaacacaacgtaacactgtaacagctggtacagggaaagaagaaatcttcactcaagtagtgtctctttgagcacaacacggtggtagacaagtaaaattggctgtagactttcattacaaacacaagcacacagagagcgacattcacaccagtgtgttcactttgtgtctctctgaagcaacaggctaaaaaaggatgatggaagtaaaaagttggtttcagaaaaagctttttgtccatttcgtacgtcatattttttcagtttcatatggtttgacttcttcctctctcttccacttattttcatttctatttggacaacaagcactgcatatatgtatttacgtgacgctgtttattacatatatacacactattttgggagtttgattcctcccataagatcagggtgaaacattctgcccttggtttatatgcagagcagtttacacaagtggggtga

SEQ ID NO: 211468 - DNA, 552 bp, Homo Sapiens
ttttttttttttttttttacagtaagatattctctaacataagctttgttttcagagtagcatacattttcctctataaattcattacttggactccatgttgatgtttttgttcatttactgttttcttttttcctatttgacagtctttgaatcaggaagaatcctcctggaatcctgatgcttgtcaatacacaggatgggcagattgcctttcaatagcaccatctctatggctgttgcatgaacacacttcttagatctaaagctcaaaggtgggttgatgtgccactgtagaagcagaccaaagtatagttttctgttccgatggagatggacacttgggtttccagtttgggactattgtgaacaccactactataaatattttgtcatgcctgttggtgcacatactcatgcatttctgttgaatatatatctaggagataaaatcctgagtcatggaatatgcacattttcagccttagtagataatgccaatgtcctgtgaatagtgaaccaaaactacttggaaaaatattcccctcgtgc

SEQ ID NO: 211469 - DNA, 625 bp, Homo Sapiens
  misc_feature (45)..(45): n is a, c, g, or t
tttttttttttttttttggatcttgctctagtgtgagcactcctngaacttcacatattctccttgtcccaaatgcaagggtttactctcaagagactctaggctcactgcccataaacctttgagttggaccaaatcttaacatccctgtggatttgctcatactgccctgggcagaactctttccttctttggaagtctgaattacttcatatttgacatctattttgaaattctgttttacagggtttaggatgggggtaggtaggcacaggaaagagagtagagcattctctcttttctagcaatttccattatcatgccccttctagcttttagaccagcagttctgagacagggattatttgcttttgtttgataggtcaggttgtctgggatggtttgccaatagaaattctatagactattattgttcaaagagcaagaattgtcttaactctcttcacttatatgtgaggctctggccatacttaacagataccacgtggcactaacacagatatgttgtgcctgctgtgctcttcccattgtccccacacaagccacagcatcaaagacatgccatttctattcctttcgccctccctctctacctgcctcgtgc

SEQ ID NO: 211470 - DNA, 622 bp, Homo Sapiens; identical to SEQ ID NO: 58162
  misc_feature (487)..(487): n is a, c, g, or t
  misc_feature (594)..(594): n is a, c, g, or t

SEQ ID NO: 211471 - DNA, 647 bp, Homo Sapiens
  misc_feature (619)..(619): n is a, c, g, or t
  misc_feature (631)..(631): n is a, c, g, or t
ttttttttttttttttttgaaaacacgggtcacagcaccttttattcgtcatcatacaacctgatgtgacaggaaatacagccaacatctccaaacagtcttaatgcctttcacaatccaatgggaaagcccaagacgccgcctctagtggggaagccatgagccttccgcctttggatgccacaaatgggaacgatagaggtacaggaggtctgccttccacgccggaccctccagcgcagtcccatgccggacacagcgaggcggcacttggcacagaacgttttcctgagaacacgtcacacgctagagcattccagaggcccgagccccttctcaacccacagaccaggattcacggggagcagctgtacctgtggcctccccgcaagactcacaccagtggatggcactcgagtccacagctgcacggagccacgggtccaaaacgaattctccactgagatgggtccacagagcctggtggccacaatggctggatctaatgtcttcctttatgaatacatctgtgcacctgggatcagttaaaaaacgaaatacttcctgtcatgatgatcaatatgcagaactgcgtataggtgaggactcttctgcctgngtggtacatggntgttgtattttgctat

SEQ ID NO: 211472 - DNA, 577 bp, Homo Sapiens
ttttttttttttttttttaaaatggacttgaattttaatttttttaaagattatctatatatatattaataaaaagtgcaaagaatagaccttcatgtttaaattatattctaaataaaatatatatatatatgtatatatatttccattaactgcgggagacaactggcaagtaaagagcctgagagagtccagtccctctccaccactacaatggacatatatttcaaggaagcacctatgaaaaatagtagagtgttcacaacacatctggtaacacagatagcttctgggtgttcttgagagcagtttgtttgcattttcaatatgacatgaaatgaagggaaaaatcaaattcacaaaccgaaatgacattacttagaacaatctagtattctgtattcatgttttacatgccctagagcctagcattttcatgtagcaagctacactcacatgtgcgttaagccgcgtatctcaaatggtgatcagctcttagtgcaagtgctctctgctcctaacactgctggttgagtaacatagctggaacatctggttagaactgaattttcctgtc

SEQ ID NO: 211473 - DNA, 612 bp, Homo Sapiens
ttttttttttttttttttaaccgtagtaaacattttatttacaaatttaaggcgtcctaagtgcctttgagccacgacctctggggcgagtcagagaaacagtttagtcaaacacctcacagtcgaaccagcctgcttccggagagaagtgttcggctggctagcaggacactgagactcccctctgctttgggcagtgtccgctgcagccagtcggagcagcgtggggcgaagcgtgaatgtcgggaggtaggctccacgctgcgtctcctgccctaccaagtcgccaacatacagtaagcacaaaacccagcccatggttgggaggctgcacgcaaggcccggatcccctccgccctagtacagtctataagcagccaagcgcgccttgggctggctcggggcttttgggagcgctgctggctgtgggctgtgttgcagggagaagctccgaggcgccgccgccgccaaggctgctggcgcaacccgcactggtgctgctgctactaagactgctggcgctgctgaagctgaaactattgccgccgccgccgctgctcccaccactcccagcactgctggcggtaatgagggcgccagtgaccggggcct

SEQ ID NO: 211474 - DNA, 688 bp, Homo Sapiens
ttttttttttttttttgtctctccagtcattctttattcaggaaaagcacacaatcgtaaacaacggagagtgaagacagtaacaactggtttgatattgaatttttaaaatcttgattcaaatggaattttcataatctaccacttaaaatttatttttaattagaagaaaactatgtaactgtgaagagaagcacatttcagcctctcagtcagccccatcgtgcctctgcttcacatccaggaagaagcgagtcctcggggcagccacgcaaatgcaaggacagagagtccagagaataccacttggcctccaggtgcatgccttccaagtctactctgcagacgcaaatgtcatgtgggtttttgccaaaatctcaatggaaacatttctatttgctttaatttatttttaaagtcaaacaccacagttcaggatgtggaagaaatatgaagtcagtggatgaaggtcttgcttctaccagcttatgatcccactggccatccaggaagcacaggacacatatcagcatctgaacagcagggagcattcttcctcctgtgttggcaactcgaagctggaggtgcctttatatgaacatttttcatcatcatctagtccagaaatcgctccttttatagacatacattctgtaaatcttacgtacatatggattgtcttgttttt

SEQ ID NO: 211475 - DNA, 725 bp, Homo Sapiens
ttttttttttttttttttcatgctaaatttttatttcaatgttatgcaactgcataagtataaatattttgttcaatatacaacaattatgacgtccataaggaatttcttagagaaaataagactgcaaacactttattgcacagatcctaacaaacttttaagctggtaaatctacagctgggagtactaccaaggagcacatcctacaatcacacagagactgaccaaatagaacacaatgaggagaatttctaccagctgattggagaggtttacaacaacaaacatgtaatacatgaatgcaaccttaagtactctttactcatttataatgaaaaacatatttggcaaaaatgatgatacactatacaaaatatacataaaaatatcatttgtaaacaaatagctagttgtgctttaaaggaaattggacagttaaaaagcaaaggcttgtaaaccatgaactacctccccgacagacttgtcccgatggctgaatgtaggattgggttatgacaactgccaaacacagatatgtattataaacgttgagaccagttttgaaatccattagtaaactcttgtaaagtatatatatatatttttacagcttcacaatatagtgatggggaatggctaaaacatatgggaaaaaaaattaggggcaaggaggaggctttttctttttcttttttttgcttgtttttttcctttttcccaaa

SEQ ID NO: 211476 - DNA, 633 bp, Homo Sapiens
ttttttttttttttttttccattttgtaagacttctattataacattcttaaatccagttcatattgttccagagtcatgtaacatcaaggtggggacacaaaatatgatagtgaattttaccttttcttaggaaatgatcacaatttcattgaaagtacaggataaagtgaatagccccttaacgacttgtgtactttattgtcttcaatagaaagttcaaatatttccattttttaaacctctagaatattatccggacatttaaaatattgatatttgagtttacattaaaggacatcatactctgaaaacaggctggctttaaatatagtttgactgattgtgggggtacttacggacagatttctttaccaagtaccagtttcttatatttaaaaaaaatcagcaagatagaatttaaaaaatcttcatttacaatacattgtaaactgcagacagcaactgccacatacatcatagaccagcacaggtaaaaatcttttttccggatgtctataagactttgtatcttcctttatttgttggttggtatgaattttgcagccggatcagctcttcttttatgagcctggtgatttctgcctttgctttctgcacagccagttcattg

SEQ ID NO: 211477 - DNA, 634 bp, Homo Sapiens
  misc_feature (436)..(436): n is a, c, g, or t
ttttttttttttttttttgagagcatcatttatggcatggactgggaacgcaatgtgttcacacaaatgcacgacaattgtacatcagcatctttacaatattaaaggagccatatacaagtctacagccattgtacacaggatggtgatggctggggagccccgcccaccagtcctctgcagtttctccaccggagaacacttggggagctgtcacaaggccagggggggtccatctttgggcctgtcgtggggcaggcagcaggtctgcaaggactcctcagggccagtcctcactggaatcaggggtcaagagcgccaggtctgcctgtgtctgggtctcatcggcaggctagtgtaacaacgtgaattaaaactgtgcatattcgcatgagaaaactggagctggggatggctccctgagctggggacctanaagacgctgctgacagatgggccccttcatggtggggcccattcctgaggtaacgtgcagccctgaggctggtccgaacgggaggagacttctccagcagcccaggtgccagtccacacagacaggactggaagcccctgggcagcaggtcaggtgacccggggagtgcaccctgagcccccaacggcagcaaacgtg

SEQ ID NO: 211478 - DNA, 667 bp, Homo Sapiens
ttttttttttttttttgtggatacatcaaaggtctttattagcataggaacaacacacggtgtgcatctgtgtgttccccaaatgcacacaaaccctgtctctctcaagaatcactgatgtatttcatcgtagagttgagaatttctaggccatgaagctttctcagttgagcagcaaatctgggctcagctgtgcacagcttccccagagcaatgcctgcgttcacctgcacggccgtcttctgtgtgtcactgcctgcaagctttaacaagacctgcaaaaggtccgtctttagcagggaagacgcaacgttgggcacctccatgcagttaccaaggcagagggcagcgttgcccaccagaacctcatcctccgagctgagcagcttcatcataacgctcaactttttatccagtcttattacttcttcccgagcttcatgataactattcgtgcagatagctagtatctttatagcataacgtgatgcagtctcacctcctgtcttcaggaatttcatcattttctttaccactcctgctcgcaaggcctcctcaacaattttcagagaggaagaaagggtccggctcagaacaccagcagctcttgtcaggattcctccatcctggctgtttagtaaagacaggcaccttctgctcacctcca

SEQ ID NO: 211479 - DNA, 693 bp, Homo Sapiens
ttttttttttttttttttaaatttagtattgacatttttattttgggaaaggaggtctttttttttttttaacatggatacaggaaaagaaaactctccaataaaaatattgtctaaaaagtttgttttgtctgcatgatttactaaatatgtacaatttcaattcacagcgaaggtaacaaagatttaaacagccaacatcacaaatgtctcaagttctaaaaaaaaatcactgtgcacagtttaacaatttaattgaaaaaaccaaagctaagccttcagtctgaatctttttttatgatgggcacaagccatgtattttcttcatctttgttacacgatgcatatttcagtgactaaaagccccttcccattttagtatattaggttatgtcagtacatacttaagagaggcataaattgcctcttggtacaccaatatgatttgtgatgtgttcacatatatgtcataatatttattaatatatagaatgatcagatgagtcacctgtgatttttcttaatgtcttcaaatgtaggaatgttttgttgcatgtataaaatttttcagaatttataggagtgcttatataagcgataataattggaccagtgtcccttgatgtaaggtgtctagaaagaactcttctgctcttgaaatatagagatttcacatctctacacaatacaggt

SEQ ID NO: 211480 - DNA, 734 bp, Homo Sapiens
ttttttttttttttttatacattaaatttttttattgtttaaaaatctgggttgaacagtcaagctgcatatacataagtgaacccaaacaacaacagcaacaacctttaaaatataacccaggtccttacaaattgttaacagactactggactatcaactagagggccggactggaggaacaaaaaaaaatcccttccaacgctgacactctaggacagaaaataggagtgacacccactttcccactcatgtgcccccacatgcacagggatgtatgcacaggtgcgaccatctgggggaagaaggaaaaagctggagacggtacaataacatcattcacgttactgaccgcttcctacatcgttcagaatgatgtttccagtgttaagaaattatgggtatcctctatattaaaacaaaattacagaacagtgaaaacgttaggacagttttgttgctattatttggaaaatacagccccatagaaaatattaaatttttaaataaaagcattgcgcttcttatctaagtagttaaattgaacagacttttgttagtcacagctgagcaaagggaccctgggacaggttatacttggaatctacccagaagagattgtctccatctctttgggaagatgttttgctctgtttcagaatgaaaaactaaggaaatgcacagcagtccattgcctattctattgctaaatttacagcaacatgctggtgtca

SEQ ID NO: 211481 - DNA, 563 bp, Homo Sapiens; identical to SEQ ID NO: 57892

SEQ ID NO: 211482 - DNA, 683 bp, Homo Sapiens
ttttttttttttttatttatttatttatttattttagtcttacatgtcaaaagaattaacaggattgtagcaggtgtttagtaagtagaggttaaaccattctatttcaggaactagcatttaggaagcatagcacttactgtgcaacaagagccctctggccatccctgttttacaggtcttagagaatggagggcagctaggaaggagccaaatgggactcctctcagatctgctggaaggcagagccctgctccccggcacagaccacactgccttcctccctggagtgtgcagttggaagcaccagatgctctagcagcatccagagagatgccatctgtgagggaaacctattcttagagagcagagacagtcggtagcggagttggccaacccccagcagcagtggcgggacttcaggagggcaggcggccaaggtttcaccttcagctgggggcaggacaggctaaaagcagggtgtgctcagtcctcaggggcacacttcctctacatttggatgctcttagaaataacagcatttattggggactcactttaactgtgtcatattctttaaccctccacaccactcgatgaggtgtgtgctacgacaacgcctactttatcaatgaggaaatagaggcacagaatggctcagtcacttgcccaaggaaactgtg

SEQ ID NO: 211483 - DNA, 702 bp, Homo Sapiens
ttttttttttttttttttgcaatcagaaatatattttaatggtatttctattacatccacaattgaaatttttttctaagaagaaaaggagaataatgtattcttttcactccattagcccttgcagacattaatgccacaatttctaatgctcagacttttctccttccatttagaagaaatggccccaggcaaagaaaaaagttgcctggactgatgtggggagcctcctatgcagataggtgtagttaacaggtgtgaagagattaagtgacacctaaagtcccaggttcctggctgagatgtttgggccacgggtttcgattaagatacaccataggctctacacgatcggccctggggtcagcattctgaattcaaagatggggcttttgctcaggacctgaacccacctggtactaaatctcaattttctcccctgtttaaaaaagggggcagttttaaaaatccctgctccgttgaacccactaaggaggctccagaaagtcaagaacgattggcagaaacgcttttcaggcctcagactgcgcagccaattgcacgaatgtcctcggggtaccccattgttgagagcattcggtgggacttccaggtcgccatggtgaccaggaaattcaaggtcgctgcggaaacaatcgtcaggaacttttccactggaaacttcagtcagttgctcaccac

SEQ ID NO: 211484 - DNA, 682 bp, Homo Sapiens
ttttttttttttttttttccagttaaacatttaaaatttattgaactttttggtcaaaatagttgaacaaatatatacaatcccattttactagaactgtcttaaggaccagggttgactaatgcttaaataactgttccacacctcagactttgtaaattgtgtcacaatcaatatacagtatataaattattttttagttaaaataaaggtacctttagattctcaatttctaacttaatgtgaactcaagtggcactgtgttagcattgattcagggtaatgacggacatcctgttcttgcccatgtggattagtaatcagcacacaccttcatctccacagggggatgggggatcagcacacaccttcatctccacagggggaccggggatcagcatacgccttcatctccacagggggatgggggatcagcacacaccttcatctccacagtgggatggcggatcagcacacgccttcatctccacagggggatgggggatgagcacacgccttcatctccacagggggatgggggatcagcacacgccttcatctccacagggggacggcggatcagcacacgccttcatctccacagggggacgggggatcagcacacgccttcatctccacaggaggacgggggatcagcacacaccttcatctccacaggggg

SEQ ID NO: 211485 - DNA, 516 bp, Homo Sapiens
ttttttttttttttttttaaacatagttgctgtaaacgtctatgggaaatacagtctttataataggttctgatagaataattgagtaattcccccccataagtacattttattgactgttactgcataataggcgataaatctgatgcttatttggaaaagaagtaggcattctttagatgagctgtgctttgaagactgttatgaaaaggaataagaagtcagcatagtggcactcctggtttccttttttggccccgccacagaaaagatggatgtagtaagaaagttggagtgaaagagaaagttccagggagaggggaggggagctagtagtcatcagctaaaaaagagaagaagaaaagtgattttaaggaaaaaaaaattaatagaataaaagataaaaagagtgattaattcttactttcaatggtaagaatacaggtactagctgcagatcctttattgttgactgctttacacatatactctcctccatcttctgggaaagtttct

SEQ ID NO: 211486 - DNA, 724 bp, Homo Sapiens
ttttttttttttttttttgagataattgaaaagttttattataaacaacataagcaaaaaattcaatgcagtgggggcagaagtgtgtggatgacctgccaaacaataagtattcaaagtgttgagtgagggaggtgaggttgcaactatctttctctagaaaagaagagaactgggtattcatcaaattggttaaattgaggttcgtcaaagagtttctacagatacagctgaatatactaaacattgctctattatctgttgaattgctgtatttcactttttcagcatttggggatcattatttaattgaatttgtagagatcgattttccagacaggtctctgttcttcaatgaacaaatgataagaaacaatttgactccttatatgacaatggaattaaataaattgacactcatctaggaataattctacaatcatctccatctctaagattacctactgcaaacaaagaattgatctttctttctcaaaaaccacatgggtaagatgatcattgtgactctgaatgcaagaataagtgagtggaagctacaaggggagattatctgccaacatagaaagaatctagaagaaaagattttattacaggtaacatgacatagcttggagccatctttttggtctcttgcatacattttctctgcatgtctaaggaagaattcacacggtagcaagcaccaatactttctgctttggag

SEQ ID NO: 211487 - DNA, 654 bp, Homo Sapiens
ttttttttttttttttttacaatggtttacatttcctttttatttattccttgaaactgctcgtattgcaagtttttcacggatgaaatatggaactgagcagattctttttttctacaaaattatggtataaacttgctcaattttctatcttattgctaataaaccttacaggcgcacagtttgtaaaataaaccccttaaggactgaatgcgtagagcatgctgcaaggtacaagaaataagctaaaaatgagcatataaacctacatctggaccaacacagtactgaatgctggcaaacatttatcacaacacaggggaaaattaacaaaaggagatacagttcagtcctgaaagggttaaacagaaaccctaatatattattgtttctaaccatccatcccacattacagtgcttgaaaacaaagtcataagtctggcacagaaaattacacacatttgttcagtacttatcagaaacacagctgcttttgcaatcaaagtaacttggttactaactgaacagcattttgtttcacaaggaacctcctccccagtggattttctggttagcatgactagttaggttagttctcaaaaatggcattggaagttttttgtgaaagcacagatggtaccagtttcattaaaa

SEQ ID NO: 211488 - DNA, 743 bp, Homo Sapiens
  misc_feature (701)..(701): n is a, c, g, or t
ttttttttttttttttttaatgtataaatccatttatataaagttcaaaaacaggcaaaatgaatcaaaggtgatgaaactcagaaaaactgctatgtttgggaggtaatggctgagaaaaggcaggaatgaggctgtgaagtgttgccaatattctacatcttcactttggcagtggttacacaggtgttcacgacataaatatctatcagactgtatacagttttgtccactttttgaatgcatggtatacttcagtaaaagtttactaaaaaataaaaataaaaaagacattgtgcttcttgttaccaaaataaaaccatggcagatattttggtaaatattctatttttcccatcttctactgttgctgatgacagggatggtattcaggtgaacactttgtcacttagaatatcatttagctttagcctgtgcagccaatgcagcttcttcacgccacttagctttctttgccaagttccaacttgttaaggattcatgtcgttctacagcccttttggctgacactatcacagcaaagcaggcgataattgtgagtccaatcattatgtaacaagctttcactcgagctttgtttcttgcggtgtctatcatttctggcgggatccgaggcgggatctcctccatcgatttgaaacgccctgtccacagcaggattttcttgtcgaactgcgaanggctgcgctgcgtggggactcggtgaatctccctccggaccc

SEQ ID NO: 211489 - DNA, 649 bp, Homo Sapiens
ttttttttttttttttttcaagatattacatttaatttttaataattagtaatatgtaataattcatgcttagaatatcattggccaggctggaaacagacccaggtgcactgctggattgctgagttcgagaataagcaccaggctcccatcccggtggagtccttgctgctggatgtgggtcttgctggtcaaatgaatggagacccggagcacaggcagccgaggattgggcagtcatcgggatggcggctcatctgcaaatagccagtgcacacctccaggcaacaggatgacgagtctctgcagtgtgccctgagaccctgcagctaagtcctgagatggaaaagccaagcttgcaggctcttccatggaccactgaaatagaaagtctgggataagggcccagaggtcttcattttttcggaaacactccagcagatttttatgcagttccattctggatgccatgattttccaattcaattattcgtcactccacgaagataaatgcagaactcatccagagtccatgagccataaatccacagcatagcaggcttctcattttgactactgttggtgagagtaagttacttacatttgaatcctggaataaaccagctattactgactcaaattcagaatc

SEQ ID NO: 211490 - DNA, 699 bp, Homo Sapiens
ttttttttttttttttttagttctttgaaagttctactgttttcctttcctttaaaacctttctgttggtgatttaaaaatacaaatattcaatatacctggaaccgattttttgtgtacttcaggatctggtttcattttgtttctccacatgtatgatcttgtaactgcatgatttattgattagttcagtctctccccactgatctgcaatactccttccattgtaagtcaagtgtgcatatatgcatgagattatttatgggctttttatcctgttccattggtctctttgtctgtaactacactggcaccctaataccaggctgtcttcgttattatagctttataacagaccttaatgtctctaaggcaagacagcccatctctactactttggttcttcctcaggagggtttttgttatttctgacccttcactcttccaaataactgcagaattagcttgtcaatttgaactcttttcttactggttgtttttaatgtctcctcttttgtttttggtgtccaccatgataggtctaactatatatgtattagtgctgcttggtatacaaagtgtaaactgtatcagaggattccaatgttctagcgttctgaaacgtctcagtcttaaattgtttctccactagtgggaaatattctccatgggactcacaacttttgcatattttgtgag

SEQ ID NO: 211491 - DNA, 657 bp, Homo Sapiens
ttttttttttttttttttgatggctctgattggatatatttttcattactgaacatttctatgaactattatatagttttaatatactatgtatgtacaaaatgaattgcatttcattccaaatttccacagatcataaagctcagaaatttagctgaatcctagcagttaaaatcaggattcatacacagagaacctaaatagattttgtcacttgtcactctggcttttttccacaacatggtttttaaaaagatacaatatgagcttcaaaaaaaattaattgatccattatttgcaaatacattacagaatctcagatgataaaaaacaaacaaacaaccaaaaaaaacaaacaaaaaagacatatcttattcggacacttaaaattttcaagtacttttgccttaaatatgaaaaggtaaaatacataggcaacctgagggcagggaaaatacaagatacactttttagtttttccttctgcttttccaagaaccacaatcactccagacatcgcttatgagaaacaagggtgggcagaggatgctgtgctgaaggcaatcaattctgcacagctcaccaagcaattgctgcacctgcaacacaggtatgcccatggattcagatcagtttatgacagttactaagaaacag

SEQ ID NO: 211492 - DNA, 622 bp, Homo Sapiens
ttttttttttttttttttgaccagaaatgtggcattttaattgaataacttcatacttgcttgataattgtatatttaacataaataatgtccacttgtcacatttatatttcttttaaacaatcaattagtatttaatgaattagtgtctgtacagtgaaaaataaggtagttgttaaaaaaacttaaatttttattggttttgcttacataataaaaaatcagtaactatagccactttaggcaaccaaaaaatcctcccagatatataattttttacattgttatattacacttttataaagttagctacagcatacccatgttttgctataaactgtattcctttggccatatgtaagctatcaatactaaaaggtgtttgaacatacatccacattagcagtggataataagggagaaaataggttaaaatcttttataaatcttttgagctgtaacatccatgttaacaataattttgtctgttgctatattaaagtccttaatactaggaaacatgttttgaagttgaacgatagcacctttttctatcttggttttgagtatgtaaagaaattataattgtttcttacttatcagtatgttaaagttttgaatc

SEQ ID NO: 211493 - DNA, 560 bp, Homo Sapiens
ttttttttttttttttctgtgttttgttttttattttgtgtttgtcctaatgttcagtaatggtagaaaataaatcagtttattcatcatagcatgtggcttaaaaaatcaacagaaggtgccagcgtcaacggaaccggcgggggctgcacccaccaagccacttcctcgaaaagaaacgtcagttagaggtttgatatataggactagatataggattcctttaaaaagcaaacccacattttctccaaagttagtggtggggtcggtctcctgacctctccgagcctgacaggagactgtgccctccgtgcggcccctgggactcggccccagccacgcaggccgtgggcagggcgaacggagcagctcgcgctaacggtggcttcggcggcgccacacagaagagtctgggccggacaggagaacagagcaaccccgtggtgcagcggggacctcggaggtcagaggaagaaacgagaaacttcgcaacgacaaatcagcatcagaaactcagaaggtgatgccagtgcggactctcagcgtctctggcgcgcgga

SEQ ID NO: 211494 - DNA, 694 bp, Homo Sapiens
ttttttttttttttttttagaaagttggttttcttgatttttccatgatgcttaagaaaaaacctcttgtcagttcttgctggattgtatgaagcaaggtatgcagcaattagaatgaacttagagtaatatggaagttccacatgagtatgcgctgagaggcctttcagttgccccggatctgtgtcatctttctgtagcttttcccactgggaacttgatatttccctgagataaacagtctgcatagctttcttcaaatgaggttcaatatttctccacagtttgcgagtatcacgttcacttgcttctcctttaaccacgggttcacaatatttaggaaaattaagtactgccagatgtctgagctctttcaaatctcgacaaacagtgtagaaaactccaagaagaatgttaatgtaggcagcatagaaatcagctgaatactctggaggatgatcatgggacaggatcttttgaaggttgcctatgctgtaatcagggaaatataagacaaacggctcaaagcatccagtatttggacgaaacttttcccaaacaatttcactgagaaagagaacagtcacatttctgtcagccaattcttgtaatctaagaaatccaggcaaaagatttgcttccatatctcttagatactctgctttatctagaacaatatatacagtctgatctt

SEQ ID NO: 211495 - DNA, 696 bp, Homo Sapiens
ttttttttttttttttttccattttcaaactgactttaatcatgttttgctgcccaaatactgtacatgcagaagccatgtgaagaattttctcctcaagggaattggcaagaatgttgtacgaaacagccggcagtccctcccagctgtgcacctgccacccgggaaccacaacaagttaggaaagatgctgcacatagaaaatgtatagagcacagatataaaaggctaattgcttcttatctaaacagtgtgcttgtcagtccctatcagctatctctctctttgcaggatgcatttggaaagtctaaaaaaaggggttcttgccttctgtgagtttacatgctaaaggagttggttgagctatcaggcccactcttcctaaggaagcagctgccccaccttctgaaatgatgtctggttaaagacattctggagggaggagtggtcttaagaagcaaactactttgaagggaaataagttccctctctcctcccatcagagaacatttcctttagaattctcagatcttcaactctcccactgatgtcatcccagaagcagaaatgaggaaagacccagcctcatctgctgttggggacactgacttactcaggatgtagcggaggttgtgacatcacatcagcaccttgaaaattgtccattgtagatgacccttaattatgtctcatcat

SEQ ID NO: 211496 - DNA, 641 bp, Homo Sapiens
ttttttttttttttttatcattgtagttatttatttagattgtttttaaatgagatagtgcctttaaatatgacttcatagcccattatccattaccattcattcatccactcatttgttcattcatgaattcatttagttcaaataatatagaggtggagatggggagaaatcactggggtgggggtggatgtcaggaagtaagcaaatgtaagactgcagctctagtatagaagagatgatgaacataaacaagtcttaggagaggacaggaagaaaaccttccctgtaggcccgtaaaatgtgcttgaatgaagggaggttgggcgctaccagtggaacgtaacaccacagcaaatgtgcgcccacaggtagagggttacatgttcgcctttgtagttaaaaaagaaaggtatagtccttttccatgtacaaagcattctatcattcattaccaaatgtaatcctcacagcaacagtgtgaattaggagtgttcccatttaacaatgaaaatgccgaggccttggggagaatggctggtccaatgttgtacaaccggtaaggcggcgatagaggagaaaagactaaaacccagatctttcctctaattaggagctttgtgcacaatcctgctaccacc

SEQ ID NO: 211497 - DNA, 599 bp, Homo Sapiens
ttttttttttttttttttcgttcattaaatatatatttattgaaggcaactatgtacctagtactgtgggtaattaataaaatacagactctgctctcaaggagtttacagtctaactagaggaaccaaccaagcaaaccattaatccattaaaagagcacaacgaatatcagagaagtgatgcctatggatgtaaaaggccaatgaacaagatactatgaaggataagcaacataaagccaaaggcagttaagatgaggtactgagcaaatattcaattagcacatctcagacacaagctgtagactaacagaccactcccaagcttacagcaggttcatacaatggtgtttattcaaagatatattaaaattaagatgaaggggcctggtgcagtggctcacaccttgagcgtgaaaaggctgattcggccaggcagtttataaaacaacccctctcctcctcttgaattggaatgtagcatagcattgaggcatgcgagaggggaagtcccacttctcatttcctttagtccttctgcctctatgacctgcagaatctgttttggtgtcattggagcatccgagtagttttctaat

SEQ ID NO: 211498 - DNA, 657 bp, Homo Sapiens
  misc_feature (620)..(620): n is a, c, g, or t
ttttttttttttttttttcgactgtaacctgctttattaacacagaaactgcaccacacacatttgaacctcatagccaatgaacagacccagcacttagcaacttctccctcctgcgccccagagaagggagaaaaagagggagcagaggagcaacagctacttcccaaacagcgccacggggaagtcctcgccatcactgttgctgtgctgcagctccccgctctgccccagctctctcccaacatcttccatgagttgctccaggtccaggtcactggaggcttcgtcctcaagggggacacttccagcctcctgggtcaggggttcccggtgtctgggctcttctttcgcagatgaggggcaggcccccttacacgctgataggcccaggttctttggcactgttctaacttcttttccctctgaaaagctggctgccaaggccttgctctggggagctttaaattttttcttagggcctcttggcttggttttttttgggtctgtattttgactcgcttacgaatgggcaaaattgggtctgttttctctccttcctccttttccaactcttcctctttctcctttttctctaagcaggatcctgggctgttcanaccagagagctgtaagtcttttctttccccattactg

SEQ ID NO: 211499 - DNA, 667 bp, Homo Sapiens
ttttttttttttttatttacaaaggatcatttattaaacacattttaaaaacaaaatacaaagatagttgttctgcatgaatacatcacatatgaaaaaataatgtgtttttaccgaatttaatttgaagatattcagaattttgttttctatcaacttgagcaaccagtttcgctttgcaccttgtctaacactgttgtcaatcaggaagaaatgttttcttgttaattaaatcatattcatacagctaatattttacagaaataaaataagacaatgtctgtcatacaaagctctttctgcaaggtaactgatttgcctatgatcctaatttttttaagctataagataggaagaattcaggagctaggtaagttttataataacgtattagcagcagttgatagtaaatgcaacataagatttgttttgtctgtggtacaagaatatgtcctatcagactctactgtatttttctctacttgaacacaggtaagcacatactgattgtctctgggatgacaaaatgtataaaaaagacaagaaactggctctggttgtcattgtgagtgcctattttcatcagctaatatgaatgcattgctaaattagtgaagacaggaaaatgacttaagggtaatatatacagagttaaaatacacttttt

SEQ ID NO: 211500 - DNA, 649 bp, Homo Sapiens
  misc_feature (599)..(599): n is a, c, g, or t
ttttttttttttttttatgtacatcagataaaagtttaattagagtgtagagtgccacttcacaggaattaagataatcatgttttaaacaaaatattttgccatgaagatatagataaaatgtacaaacatgtcacatgatacagaaaaacaagaatcatgatcttcacatttacaggaatttaaaaaatcttctctgatggaaatgtgttacaactcaaacttctcttcttgaaagtaatccgcaaaattgagatattcttcaagttgaccatatttctccttaatccagccattttcttttgaccgcctgaaaattctttccactgtttctttaacttgttcatcttcaacttcttctgtcattgcaatggtgcaacattcctggtatagtttgaatttaaaatgtttcagtttatgataaattctggtacggctggcacaaattctgccaacagtgaacacctgtttatcatgtgacatgaaattatctatttgcatggtcctggtgttataaactctcctgataaatgcactgaatatttacagtagcgatgcagtccacaagcctggcaggaacagttttcaggattcttcanatgaatactacattagaatattttctactcgctccttatattgctctttc

SEQ ID NO: 211501 - DNA, 644 bp, Homo Sapiens
ttttttttttttttttttgccgctgctacttcaggcagcctgcttttattcccttatctgacccccacccacatcctgctgattggcccattttacagacagtggattggtccacttacagagagctgattggtgcatttacaatccctgagctagacacagagtactgattggtatatttacaaaccttgagctagacacagagtgctgaatggtgtatttacaatcccttagctagacataaaggttgtcccagtccccactagattagctagatagagtagacagagagcactgattggtgcgtttacaaaccttgagttagacacagggtgctgactggtgtgtttacaaaccttgagctagacacagagtgctgattggtgtatttacaatcttttagctagaaataaaggttccccaagtccccaccagattagctagatacagagtgctaattggtgcatgcacgaacccggagctagacacagagtgctgattggtgcatatacaatcctctggctagacataaaagttctccaagtccccacctgactcaggagcccagccagcttcgcctagtggatcctatgccagggccacaggcagagctgcctgctagtcccacaccaggcacctgtact

SEQ ID NO: 211502 - DNA, 464 bp, Homo Sapiens
ttttttttttttttttttaaaatttcctgattttattatcaaatagtttttaatgccaaaacatttaaatccatagtttggtatatttgttgtaagaattggtaacgataaaataacattagtaccaaagtatctgaaaaatgagttacataaatttacatttttttttttacaaattactaatctacatgtgaatttataatcaatattaaaattcaaaacactagcatgcacattaacaactgatttctaatagtgatgaggaaaacagttctgttacgtaaaaactgtgttgaaaacaaagaaaacaaaatgactatttagtgaaaaagtttataagacgattgccttataatagtaccaacattactggtaggtaacatctcaaaaattcaaaaaggagaaaggttcttttttacccggagaactacatatataaatcacatacgtttttttttttttta

SEQ ID NO: 211503 - DNA, 618 bp, Homo Sapiens
ttttttttttttttttttcaatgtattctactttattaacatattaaaggagaaaaaataactcaatggacaaaaaaactgtttttcttttttttttttccctaattgagtacgcatccagattaggaaaacaaaacaaaacaacaaaaaaaacttttagtaaggtatctgtcacctaaccaccattaatctcccattttgactagtggccacgctgtcactttgggtccccgtgcatgaacatcaattcagagccaatgcttcagtcatctcagaaggcctgggtagtttgctttccccagtgcacagtcactctgtaaatagcacaggtcttctgagtagggcctagagggagacttacagtaggtacttgcagcagggctgcagagttcattctttgggggaaatccccccacaccctcacaccccagttcataaaggggccctggggctgtgaactgactcagtcctaagagctaggggagaggccgtgactctctgctgtggtgattcaaatcaggtttctggctaccagacccagaattttttctgttatacttgagtaggcagcccacaattttgttcctagagaaccatcattcattagccattgccaag

SEQ ID NO: 211504 - DNA, 633 bp, Homo Sapiens
ttttttttttttttttttactttttaagctttcttaaaacctaagacacaaacacacacattagcctaagcctacacagggtcaggatcatgaagatgtcaccaggtgataggaatttctcagccccactgtagtctcaggggattgtacgtgagagcggtgttgatggaaaccttgttatacagcgcatgaccgtatttctcttctcccgttaaaggctaagaaagcctctgactgaacagaatagcttggaaatcaacttcaaatcactgataccaatatcaatcccaatattttataatccttcttccccctacattttgcttctctttattcaaattcaggttcaatctaaaccaatctggggatatttccaaagggtaagggccataagctccatctttgcttgggttttgttgagctttattggcttggaccacgtactctgtaggtgccgtgtctgctacatgcatcactgtagcttgtggagggagggaggatggaagagatgctcatgcgagaaatcacctcttttgaaattcagagtccttcctagtcttcccaggaaaaactacagcatcaaaagaacctcattatccttttctctcttttcgtgtgggacaaccctttcag

SEQ ID NO: 211505 - DNA, 788 bp, Homo Sapiens
  misc_feature (685)..(685): n is a, c, g, or t
ttttttttttttctttttcaaatgcgatttattgtacataaaataaattaattacagtttaagccaaagcatgagtggctttttaaagtgcatctgtggaggggatgtggcaggtagcccctgttcacttgctgtaagataagtgttttagtatttcagccacccttaggcacaactcagccaggcctaggaagcaacccaacgtcattgccatgaaccatttacacaagtcacaccaaaatcaactgacacatttttttcctgatggaacagttaaaaaaacaaaaaactatacagtcaaagtctggggttgaagagcgtgaagttcacagctcctccacacacgcccaactgagcatgctcatcctgtgagggggaaccagagccttcctgtaaaccatgagagcttaccaatgtctggtatacaaaatattctggcccataaactcaacctgtttttgaggggtaggggattttccatcttgtacataaagaaagaaatctgggtatccttcaggttagaaaggcattctgtaagaatagtgttccagagttacaaatcatactggtaagagaaaagcaattcttcctcttggggaaaaagaggaaaagaaagaagaaaagagaaaaaagaaaaaagggggaaaaaagaaagctatcaatgcttaatctgttctttcattcncactgtaaatcacatcaatacatttggtgaaactgcaacggacaccatttacaaggtagttgaatgcagaaaccgaacattatgcccctcccactctaaggaa

SEQ ID NO: 211506 - DNA, 662 bp, Homo Sapiens
  misc_feature (587)..(587): n is a, c, g, or t
ttttttttttttttttttagaatgaaaaattttatcatcactcctgttcaccccgcagagtctgcggagtgctaaagggcacaccaataaggatccgagggagggggtctacatctgctttttcagcccccaaagccatatattggggtggcccaatataaagctactcattagtttggttcctgagcagacctgctaataaacctcaaaaacacaaaagtctacttcactagccagaaatgaaagcaggatctagatctgagtgggaagggcagagggcagcatgggttgactctagttggaattgtgccagtcttctctggaggccgactcactcgtggagtggggaaaggggtggccaggccccagtctagaaaccccaggcctatgggaagtgatgccaggggaagggaagcagataagctggtggctagttcccaggaaggcaccaacctccaaaatcacctaggcaaggacagatgcccaggggtgccatctgtgaaaggggggaaaaggcaagagagcccagaaagaaacttggatgctatagggggttccagaaaggtgctccttgctacccccatttngggggctctgacatgggaaagactccgagtcacccaaggaggagctgggcatgctgggcaggaacaccctgctag

SEQ ID NO: 211507 - DNA, 706 bp, Homo Sapiens
ttttttttttttttttttggggagaaaaatcacatttattagttaagacgaccacaggctggacacaacacacatgctaaaaagtggactgtcttttaaaacttccaaggtaaataggtaaatgttttccacagcccaacaatcatttcagtgtttacaaattaaaaggcccacggttaagacattaaacagtaaaatatgtaataaatgctccaacctaccctctcccccgaaagctgcttctaagtttaaaaccatgaatttgactaaccatgccattgaaaaccatccaggttactacaggctgaattagttttcaatgtctaagtcctagaaatatcactccctatcccagccctagcaaattctaactttacatttgacataaggcattaacatcaattaaagcctcagtttaataatcagaatttaaatgaagtctcctgaagacctctcttctggcaaaaaaaaacacgtatcagactctgggaaaacattcagacccacttctagctattactgaaataaatgattagaaagttacgttggtgagccgaagttaaacctaaagctatcccctggatctttctagcaataaacccatgttgaacctaccatgaaaactttcattcactgtgcttttggttacgttgcctcctgattagtcattaattttaatgaggttttttccttgtgttgagtatga

SEQ ID NO: 211508 - DNA, 664 bp, Homo Sapiens
ttttttttttttttttttgacggttcctatataacgtttatttctggaagttaaagtagatacagcaatataccaaaaaaaaaaaaaaaaaaaaaagacaaaaaacctcacaataatataaatttttacactatgaagtacacattggaatttgaatgcagtggccaggacagcagcttataaaccaccttataggtaggtaagcaacccacgggattccctcggctgggctggggatggggagggggcagtggacaggaagcgggcagggcctgaggaccctgttctttaatgggccacaacagggctcagctcctctcaaaacttttgctacaatcagagttaagaccagatacatgctacctaaggccatgaacttgacaatatctgctccaaaaaagccctgaaccctcgccctaggtccctatgatttaaacccaatggtaagcccaagtctcacctttctaaatattctgtttatcagttaagcttattatgtactgaaaagtgttgctggagaagtaagagctctgcatgacacatcaactgtctccaggcaggaggactggggcgaaccctgttcatcttagagaaggtcgtctcccccttaattcagagaccagctaatttgatttaacaaacagaattccacagaaactctgat

SEQ ID NO: 211509 - DNA, 662 bp, Homo Sapiens
ttttttttttttttttttggtttttattaacaaatgtttattatgcagaaagagaaacaatttaaatggagagtcgacgggatggcatcactatattgtactaggctcctgggttgctgggttcttaacacaatgggggagtcagggggaagagtctcacaggatgtcctgatatgagcagtgcttcttaaaccataacacaaggactattagaatcaccaagggcactatcactaccaaggcaatccaattcatggaaaagtggtgtccccagtagaggatgatgtcctggcctcctagactgctgtgtctcactcgacaagacaggccagcaggctcctcagatgccacctccaggatcacctgaagataccatgtcccatcagcattaggaagaatatcaccatgtttagtgcccagttgctcctgttcattccgcatccatgtcacccaaacaggctttgggtagaagccggaggcatgacaaaccagcaacagctggccagacccaaggctggggcgactggacagccaggcttctggcctcacttgcctgtgtacatacatcttccctgcatccaggagacccaagagaaatcgggggcaagtgcttcttatgagattatacactgtttctgtgacgccttcatactgatgattga

SEQ ID NO: 211510 - DNA, 759 bp, Homo Sapiens
  misc_feature (722)..(722): n is a, c, g, or t
ttttttttttttttttttaagaaaccaatctgactcccaaccaatggtttgcgatattaacaaaggccacaaacagtacacctgggccagcaaacagtgtgaaactgacaaaactccaagggggaaacatctagcaaataaatcaaaaagccaaagatcattgctggtgatattagcatactagaaacccttaatatgctgctactatgatttgttttaaattattgtttagtcatatattaaagagccagctgatgctcttacagttaaaaaaactgtgtagccacattactgttttcaacgtcctgtgtggaaagttgctatcactgtacaattttgcttgagcctttattttacaacagggctttacctctaactcagaattgcacgtaagaaggctatttaaaaagtacgataaaaatttgcacaaatcagacttaagaattgagtcagtatgctgtacactttctacaatagtatgctgataagtgaagggacaatagaagtgctgccactaaactttcagttgaggaataattgactggaattttttatttctttaaagtagttatcccaggtcaagttaagaccaagagcttaggcattaagccttaaagactgatcttctcttctccttgaagaaatgtcaatatctatagagtcttttccaactattaacctcaagcgcttagctggaggaagaggaataaaatcgtcttcanagtcatcatcatagtcatcctcctcttcatcgccctc

SEQ ID NO: 211511 - DNA, 701 bp, Homo Sapiens
ttttttttttttttttttcctgtttcataactctggtcactattttcatccgcatctgtcacttctgatgcgtctctaacatttataagatttctctggggagggatttgacgtatccatgccccacctctttctacatttatgggattgagctctccaccagccacccatgggctgatgtctttggaatatggatctagtaccaacagagtcagaaaaagagatggggtccaatgggctacagttgggtggtggtcctgggatacacagcacagtggcctctactgggggatggcagctttccaggagaagagtcgcaagcttgcctgtgggacttgtgtcttgtggagaggacagggctgcctcagcttggggagacagacagagtgttccgggtcccctctttccgccgcagcatgaagtctctgggggcgactggactcatggcatagaagacgttggcattgtcaggaatcaggagcacccggtccccaggaaggacttgaaagagctgatagtcacaggcccagggctggggcacattgtgcttctgcaaggctcgccggaccacgctgggggctttgtcctgactggtcagcaagatgcttcgatacaggttcccgtggtcattgtcgatgctgacgcggatgacacgggcctccgagctctgctgcgccgggagggggattcgagggctgccc

SEQ ID NO: 211512 - DNA, 630 bp, Homo Sapiens
  misc_feature (611)..(611): n is a, c, g, or t
ttttttttttttttttttccaactaagactttattgattttacaagtcaacagtttgtacataccaacaatgaatcagtaagaggtcaaaaaatacattttagtaatagatacaaacgcagtgataaaatgagactgtcaaactttacagtataatcaaatcaaattacaaagttagatgaccagtattctcatcttcagttctttgataaaaccatgaactatgtttcaaatacaacactatgtgataacgcaaggaataaaaatcagtatcaggccaagtgcagcggctcatgcctataatcccagcattttgggaggccaaagcaggaggatcacttgagcccaggatttcagactggccttggcaacatggtgaaaccccatctccacaaaaaatacaaaaaaattagccaggtgtggtggcctgtgcctgtagtcccagctatttgggaggctgaggcatgagaacttgggcgagagaggaagaccctgttaaaaaaattaaaaatataaaataaaaaaaatagaaaacaaataaaaatcagtaccactgtgattttgctaaactttccaaacttacgctatcatgaagttttttcccatttaatnttgagtattgctataacca

SEQ ID NO: 211513 - DNA, 694 bp, Homo Sapiens
ttttttttttttgtttttgaagtttttaataattcaagcctatcaccaacacatcaatatgttttctgttttacattgaaattatatgagaatacagagaattgctctgaggattcctgtttctaaatacattatgggctttcttattttctattaggtcttgaaaaaaagcaaatgtcagttaatgtcacccaaaagaacaagggattttactcaaatatttcttggatgatatagtactttttaggaaaaacatctgccacaaaaatgtttgtctcaaaatgatgttttgctggcatagatcactactgcaagtgccttgctctcctgtgcagaagggcatgctttgcacagtgcatggctgttatcggtactatgtaattgtccatcatcacagcactatgatattagtgctcagagtctatcagtcagttgggagatattttggcttaaatgatgttgtttcactgagttgtgtaatgtcaagagattctgctgttactaaaatagaacacacaatgctatattaaatatctaatttcttaaaatgggactctctggttttctaattccagaggaattcaatgatctaatggtttcactatcaatccatcagcaatccttctttaagagtgtctattggagtcttgaggaccagaccagctgaatatcttaccaggtaagcttttgttga

SEQ ID NO: 211514 - DNA, 687 bp, Homo Sapiens
  misc_feature (328)..(328): n is a, c, g, or t
  misc_feature (677)..(677): n is a, c, g, or t
ttttttttttttttttttgcgactttggttctggtttattgcccctcagcaggcagcgggagtcaaggcctaggctggggctgcccggctcagccagcgggtctaaacagtgtgtgcaggggcgccgttcgcgccctccaggaaaatgcgcgatcgggaatgtctcgaagtcagtccaggaaagagtcggcccctagtcgtgggggattgggccagggaagggcagggcggggcggggccacgccgccgggccagtcggtcccgccaggcagcgatcaaacgtcgagggaggaggcgggggacagggagggggttcgagaggggtggncgggcgccggccccgcgcccccagcgcccagcactcgccactggaagatgctggcgtccttgccgcccagcgagacgaggtgcgagtcgtcgtgcgtgaatcggacgctggtcacgtggctgccgtggcccccgtacatgcggctcggcgcctgggccggagggaagagttgcggtggcggctgagccctcgggcccaccggtcccaccccggcgatccacgcggcctcaccttggcacgagcgcacgggtacgtagacgtgaaagcccagcacacaggtgtaggtagcccattctcggtctcggctctcatagcattcttcagctgcttgcagcctccagccacgtcncagtaaagat

SEQ ID NO: 211515 - DNA, 679 bp, Homo Sapiens
  misc_feature (646)..(646): n is a, c, g, or t
ttttttttttttttttttcctgcctcatgctttattttccatagagcttgtttccatccatacctcctctggtctcatccatgctgattccagggtccaggttctcaggtctgaggtccataatgtcaggtgaagccctgcccataccattgcctagtggccaacacccccgcccaccacagcctgatgaagcctctgtcaaccagggtttcttattccaacagagaatctcgtatccctgagggcacacagtgaggctgcctcactcctcttccatgctaaggatttgcagcaggatattgtacacttcatgttccatgtaaccccgagcagcattcagtagatgattcctgtaggtggagatgatctcttcatggttcttctgggaatcctgcagctgcagggcaaggcgagcattttctccccgaattgctagaacctcttctgaaagctgctccagcttcttcaacaactccttgatcttggcttccttgtctcggcaagccccaatgagatgctccatcttctctttcagcagctctgccgttttctcaaactgctcggagcgcccccgcatctcgctggcctggcgctcttgttcggctgcctgagcggccaggtccccgctccggcggcgctcctcggncaccgcctcccgcagccgacccacttcccggca

SEQ ID NO: 211516 - DNA, 705 bp, Homo Sapiens
  misc_feature (679)..(679): n is a, c, g, or t
ttttttttttttttttttaatgaattattttaacttttatttgattattttcatttacagttctggcactgacactttttttaaaaaaagattttaattttatgtaaagattgaacttcaataaaataacttaaaaaacatttacatgtatatcactaaatctccataaaatatacaatacttttgatacagcataggctaggatgactttgaaggaaatggtacatattcataatttttaagagatatcccatatatcgcttgtgggaataaatacttatattgaatttgccaagacatctgaagtattaaatactatataacatgcactcagaaattaaaatatacagtttgaaatacatatattttaaaagcataaaactgtgatttgatttaatctaggtatacattagagcttctaaatagaaatttgaatatttattacaaataaaagatactttaacatcaagtgatatatagtccaaaagctgctaggagacagtttggacgtgtagaatataaatttctactttggctagagttgtctcttcttttttaacctttaaatgagatggaataatgttgtttgctaaaactttaaaactttacaaaatgttggttactcattagctgcatgatccacttctttttctcatttatgctgacatgacaaaatcanacacatgaacttaactgtctaaaata

SEQ ID NO: 211517 - DNA, 642 bp, Homo Sapiens
ttttttttttttttttttaaggtgcccggtagctttaatgagcaccttttcctcactttgtccctccctctctactcttccccttcccgtcttgacaggtccagcctgccctagggctcttaaaccgcaggtatcaatccttctgtccccttagccgctccaggcgcctgcgaaggtccgggggcaccttggccccagctgccagcagctcgcgcagcctctgtttgggagtcttggtgagcacgaaattgcaggggaaggggccctcttcaaaggtgacccgacagttccgtgtcactgaatggtagccctcggcactggcagtcaccatgtagtcccctggggtcagcagacgccaataatccccgccccacgccgtggtcacgtcatggttaatcccatccacggcaatgacagcgtcagcaatcccaagctccgtgtccttgtccctcaccactcctgcaatgcccatgcgcacctgctccaggtaggtgaggagggcgtctttgttgttctcccactcctggggcaattcattctcgtgagggaacttgtcacaggacagctccacagtgacctcaaagcagttggtgtgtaggtagctgaagtcattcatgctcccggggaccgtgtgccagtcag

SEQ ID NO: 211518 - DNA, 710 bp, Homo Sapiens
ttttttttttttttttatcaggctgggcatatcaatatttattgaaatactgaaaaaaaaaattccattttggttgagaagttcctggcaagaactgacatgacaatatgtatttcattgatacagtaagaaaacatcaacaagtaactgacttcacactctaaacattgcatggattcaagtccaaggcagctgcagatctgtgatacaaataatcagacattagagattgtctgtttacaaacatagagcaactataataaaccaagttaagccaaaaacctttatatttgagtctgcttttaccggcaaatcctgtaattgataaggcagttgctaagtaaatgccaggttacaaatcggctaacaatcaacattagagaaacttcacttgtcaaccttgggtgaacagacgctggctgtgacgctttcttgcttatcagctcctgtcgttggtgtgatcagcagtgtggatgtaacccgctgtgttgcccgtctttctaatcattctcatgatttaatctaccaggttaacaacataccaatatgtgacattttaggtttaattttcagtggggagcactgtatctttaaaataagagaacatagattttaagagtcaacgtagccaggtatgctggcatgcacccctagtcccagctatgggggaggctgaggcaggaggaatggtaaccctcgtgccgaattct

SEQ ID NO: 211519 - DNA, 719 bp, Homo Sapiens
ttttttttttttttttttaaagtataaagtgttttggaaaaaaaggaaaaaaatctatataaaaatctcttcacatataaaatcctgaagaaggtgcaaggtgagacccagtgcgaggggcgtgctcagatatgcagtgtgtgtgtgtgtgtgtgtgtgtgtgtatccgtgtgtacatgtgtgcacgtgtgtgcgtatgtgtctgtgtgtctgtgtgtgtgtgtgtgtgtgtgtgtgtgtgtgtggtgggtgcaagtgcacgtgtggcccacagagggtggggagaaagcttggctttttacttccatccaggagggaaggagggcggctggtcctccagcctggagggtctgcagctgggcgggacctctactcagccaggctgttgcgcatcgactccttctcctggagggcggccatggcaagacgcaggtgctccttcagctgctcgatctcccgctcagaccgtgtcttgatgtggctcagctccacatagacgtcctggtactttcccgaggtgaagcgcttgtccttctgcatcatctggagctcgtcccggaggcactgcacctccttctttaggtactggagttcgttttcttttacgcgaagcagcacctctagctcgcaggaactccgctcgttgctgcgcccgcagccattgcccatgccctgcgaggcaatgaagccgcgcagctggtctatctcctctgacaggc

SEQ ID NO: 211520 - DNA, 750 bp, Homo Sapiens
  misc_feature (711)..(711): n is a, c, g, or t
  misc_feature (742)..(742): n is a, c, g, or t
ttttttttttttttttttaaaataagtcaaaaattttaatggggaaaatctgtgcccagtcctagaacagacaattcaattcatagcgttaccataaaattactgtcaaaaaaacgaactgaagtgggagaatgagtggcgtttcaggccatctcgagtcgcagcagacacatgagccggcgccacgggcctggctgaggagcaggggctcatgggcaccaccacccatctgggttttctgaggtcgtcggcggcacgttcagtaacaaagcaacggctggcgatacatggcagctcacgcagcgctctttcctgcttatcccccaaacttaattagatgtactggagttgatgctgccagggtctccagcaggtgaggcagttgcaggttggggggtggccccctgccagctaccctgggcctgggactgcaggcagcctcccccaggaggaggctggagagaggccagagtccgcagggtgaggaaggcgtccccagcgctgggcagcgggaagggtccagaggagcctggaagagatgggagccggggtgggcagagtcgtggcgcctcctcaggtggaacccacccagcccctcagccggcaggaggcctcgaatgtggctcctgcccctcctcagcatccggcctctgctcctcagcccccacccaggcaggccagcgggccctccccaccacactactcatgtcncctcatggcttgtcttttttttttcctcgtngcgattct

SEQ ID NO: 211521 - DNA, 638 bp, Homo Sapiens
ttttttttttttttttttaaaaaaattaaataaagttctcattatttccccaatatacatcaaatgagttttcatgcaaagcagcagtcacagaggcagaactgtccccagctcgtgcctctcggcttgaagaaccaccttctcccggccccgggttctctggtgttctcactgaggatggacgacgcccactgtctctcccagctggaactggctatgacgaaacttggctggcgtagggagaggagtcctcccctctccccaggatggggtctcaggggacagcaagctctggggcctgatccccatcacttgtccttccatctgagactcccagtgtgacagcttggacaggtccctcttcccaggaatgcgaggctcctcctctcagctctcaatggacatggcattaatgagctgctccaccttataagccagccgctgccgccgtgcctgctcatcctgctctagggccccgatgagctcctcactatacttgctgacataggagtagatctcattgagggcactcagcatgttgaactccacggcgtgcaggcgggactgctcggcgaggtaggcattcatgtcctggtcactgatggctgggagcttggcgatgtctgcgtagtatctct

SEQ ID NO: 211522 - DNA, 695 bp, Homo Sapiens
ttttttttttttttttttcaagggaaaaggtgtttatttagaacaatgaaaacaatgagacattaacttccagcttaaataaagttgattgtgtgcataaaaatggtgaaaatattggactttcttggcaaaagaagaaaggggaagactttatattttctgacataatattcatcatttgtctttggtttgtgtattatgtgtatgattttgaaaaaaatgcatcaaagatataactttctggtgtttgctttgatattatccttgcaaacagaaaagttggcacatgtttctgtataaaactggtcaaagttggcctaggaatgatcttacattgtactttcactttacatcatactgtaagagtttaataatagctaaggcatcagcattgatgtggacttattatacctattcaagaggtggtgtgaggtttaggagagttatgtgccctttatcataaaacaaatctatgaagcatttatataaaaacccagtatttctggtttcaaattcagtactgtgccgtctgcttgatagatttgttcgcaggttagagacattttattgcataacttccatgaaatatcacagttgtactcttgactatgtttgaatcacaaaaagactttaatctgcactcagttcttgtaactaaaatcttcagtttgaatatgaatttcacttaaagaaca

SEQ ID NO: 211523 - DNA, 762 bp, Homo Sapiens
  misc_feature (684)..(684): n is a, c, g, or t
ttttttttttttttttttacgagacatgaaaggagaagttttattgggaaacatggcaccaatagactggctcaacgcagagttgccataaaccttccatttgtaaaaaatgcattatttgcaaagtgcaataaagcaaaacgcaataagatgacatatgcctgtatctgtatcaataggaggaacattgccattttcttctacatgacataaaattgtactaaaaggcactagtatgtgcctttctgggtggcaggcctccactctcatgatgttttaacaaagcaaagtagatatacttacggattcaaattttgactactgaataactcatttcaaaaagaaaattcagctcaataaaattcagtatctgtctaaaactatttgtcagggtaataagttcatgggaggtccaaagacaaagtatgtagtcctattctatactaaagtaaacctggattgagatttataataaaatcacaacacaacagtattacttggtaaagtcctcaaagtagattttatttatacatttcttcaaatgattgtggtattttaaaaaatctctcccaaatttgatgacatagggacagtggtgagaacaaagtatccctaaaggaaacaaatatcgattggtgctttcctagctcactgagctaacactcagaagccaatttattctantatcctaaagaacttaaatgtgggtttgtttgaattggcttctgagaatcattgaataaggaatatacggaaagagat

SEQ ID NO: 211524 - DNA, 688 bp, Homo Sapiens
ttttttttttttttttttaatgtggacacaacatgatattaggctttatttgaatttaaaatcttgattccatccagggacattttttaccgaagcgtctcagagactggctcagggtatttcttgacaagactgtacagggcttctcatcatacacaaaccctccacagcccacggctccaacccacagcacctcctgcagtccttttatgcttcttgtttcttctccatcaataatatgtcagtcaactgcttgtcagagacacttagctgctgacaggtcctcataacctgactcaggtaaactgccaagagatgcttgcacaggatgctgtcactcttccgtagcactgagaatgcaaatgcaggacatgaacagtaatgacaagaagccaaacatgtgtatgttttactggaacttccaaggacctggtaaacacgccttccactgggtgatgagattaaggtgatggactgtcgatcaactaggtccaaggcctgggtggctgatgagccaaagagaaacttcagcgataacagatattcatcaggaattcgcgcgctctcctgcaccgccgccgccatctcgctcaggagctcctccacaaccgccggcaacactacggccatcgcgccgcaggacacgctctccacgaccgggggaccgccgcgcctcgtgccgaattct

SEQ ID NO: 211525 - DNA, 582 bp, Homo Sapiens
  misc_feature (545)..(546): n is a, c, g, or t
ttttttttttttttttttgccagtagcaagcctttatttagcacccatagggtacagagcaccatacaagatgaggttttcagtgaatctaacataaatgcatataattatagttaaaaaataagttgttctggaaaaaagacatataatagttggtggtttgctgaggaattaaaggaaaactggaggtcttccactttcagcaggttgtaaagaggaagactgccaactagggatagcagaagagagaacattaaaaaggacaatttgtatagtcttgacaactatgaaatgaattgcagaagagtgtggggtctgcaaaacagggaagtgagcagaccctagcagccaatttttaaatttttttttgccctccatgcaggaggatgaaagagtatttcttgccaggccaaaatgaaaggccctttataaagagactgacattagggtgttccccagcaagatagctcaggtaggtcatagtaaaacaaagagccctttaccacactctcagcttacagtaagctttttgggtgttccacacnnttaaatatgagtagactaccaagaccattaactctg

SEQ ID NO: 211526 - DNA, 601 bp, Homo Sapiens
ttttttttttttttttttaaggtccattcgagaaattttattggttaaatgatgcccagatggggtcacatcctcagaacttctcagcctggtagcacaagtggatgcttgaagaaactcagtcttggaactcagacagcaatggagacgggatgtgagtgggaccagcaaggggctaaggtccattatgagggtgaggaagggcttctagaagtaacaaacatcccaggtccctgactggggagaatgaagacactgaccaagagatgtgaagccactcagggctgtgcagggtctgaggatctcactggggacggcctcccagcggccagctatcagcacgagttggagggaaagagccatggtgggggtcagtcacgtggctcccaggaatggtctccccgacttaggaagcaccttggtgcaccttttctccttgcatcctcacaaccacccagtcaggccactcaagtcttacagcaggtgacactcccaaggtcccagctaggaggactttgagaattcaagcattctcaggtctggattagagacaggaatctgtctccacttccttacatggctagacacagagcccgggagg

SEQ ID NO: 211527 - DNA, 591 bp, Homo Sapiens; identical to SEQ ID NO: 57897
  misc_feature (559)..(559): n is a, c, g, or t

SEQ ID NO: 211528 - DNA, 575 bp, Homo Sapiens
ttttttttttttttttttcattagaaagtcttatttatttattacaaaagcaaagcttcattcacaatatgaactgcatactagatatagttatttctgcattaaactgctttccggaatccctaaacaatatagtgtattgtacaaccataatgcaagttatgttttgcatacaaaatatgttctttacatcaaagcacatgttaacaaaaacaagttctagaaagcatataccctctaagactaatgaaaacgtctttagcagggaattaaaaaaaaattaacattcatttgataaatattttgtagaacttgaaatgaggattttatctctgagtattttttgtagtattccccttgtccagtttttgcagaagaatggcaaacacttatttctaaaatgaaatagccctggaaacacccagtggaattttttcaaagtaaatgtctagccttaacttgaagttcaagaagttgtagctacatactacattagtaaaatctgaaataaaattattcccagttaatctcttcacagtttcttaaaaaaatattagtggagataaattatctac

SEQ ID NO: 211529 - DNA, 626 bp, Homo Sapiens
ttttttttttttttttttgaaaaaggcaaccttatttatttacttctcctgtttccaaattcttgttactccaagagtacagacagttatttacctaaaatgcaaaacctccaaagagttcacacggtggctggcactcaggcacacacacgtcagtgctctactgggacacctggtacatgatatccctattaaagagtacacagtacctttaaagaggtcattaaacagaacacggacaaatttgccacgctcacatcctgaacaatacattttgtgaaaaacattcgctaatttaggttcttccaaccagaagaaaaaaaaaagccaagtctcccacaaagtgcccccaaatccacagctgagtgaaggtcataaagagttaaatgaatgtaaaccaggccctatcattcgtctcctccagaaaaagatgaaaagacatttctgatggccccaggtgctctcccacgaggagacagtctttcatttgaggttctgaagcggcctcacctcgaacccatgcgggatcttccaagagtgcattcccacagctccacttgctcaaggaagtctcggtgcacagaaggaagcctgcagcctcccagtaccaagaaaccggcagggca

SEQ ID NO: 211530 - DNA, 608 bp, Homo Sapiens
ttttttttttttttttttaattagagcaggtatgcttttgatggtagggaagggatggaaaaaaggaaaagcaatagaaactgtccaattcacatcagttatccgtctgctttttcttgagagcttgtggaaggtgttaacgtggctgggaacatcaacaccttggcatgcatgaatgttaagtcaggaaggccagcgatcaccttgatagcttcttcacttaggtgctcttctcttttcggtttcctactggtagatgtgcttgtcttctctactgtagacatgagtcttgcaaatgcatcagtcactttgaggcttgaggtggagatttccagcttagaagttgttaactcatacaactccggatccacaccatctaaagggttagtaaggccactgctactccagtcaaactggacgggtggtagagactcctggaactgatcagatgtacatgtgttcatatctggtgacatggtggctgtctgaccgatggaagctattttttctgcagcagaaagtggtttcagtggttccttggtgggctctaacatacccaatcctgctgcatacatgggcactataacaggctgcttcttattgcccgt

SEQ ID NO: 211531 - DNA, 588 bp, Homo Sapiens
ttttttttttttttttttgggttttctccatggtcatattttattcattattctactttctgcacactgtatatgcttgagataaaacaataaccaagatgataaatacataaagactgttagttgtagtctgggagcctaaatcagaggagtattcttgcttaatgtcccatggttctagcttttctccacagagcaggatttagacgttttcattactacacgaagaagtcatcatttgtcctaagatagacaaatgggaatttaaaagttatacaaaagacatctttttcttgggttagagatgtctaatacatcatttctacaggattaatttttttaatcatatgagcaacctgacccattgcattatatggattagaaaactctctaagaagcaagaatatcaaatcactctgtggttggtttttgtgaaattgtctgtcgtaaattgagtactcactagtattcatgttggcatttgcaaaattaccactatgttaaaactcgctcccagttgtacctgtgactgtgtttatctgacttcagttttactgtccacgatttggaacgtgaatggaatctggg

SEQ ID NO: 211532 - DNA, 619 bp, Homo Sapiens; identical to SEQ ID NO: 57764

SEQ ID NO: 211533 - DNA, 546 bp, Homo Sapiens
ttttttttttttttttttgaacttgggactgtagaaggaaagcattttattgcaaataactaatagttacaaaagcactttttaaatgttattattagatgttaagccgaaaatctagaaactaacatttacccaggttacaaaataagagcttcatatttttcaaagtctctaagggtaaggtacatccccagataaaatgagtataggccagtctcctttggctttgtggattctttccaaaaattttccagactatttagctttccttgtgtagttacagctcaaattagaaactgaagaaacagcaagtggccaggcagggtagaaagcaaataaactgagctacctgtgcctttttccaaatcagtatatgtgcttggctcctgaaaaaaaaaattctgatatgtaggcattctcattacttagtgagatattagtgaagacctttcaacgtataacacacagtaactgttgcatagttttaataaacacttgaattttccaggaatgtgactgctgtgtaaatcagggcaagactgtaag

SEQ ID NO: 211534 - DNA, 757 bp, Homo Sapiens
  misc_feature (743)..(743): n is a, c, g, or t
ttttttttttttttttttagtagagacagggtttcaccgtattagccaggatggtctcgatctcctgacctcatgatccacccgtctcggtctcccagagtgctgggattacaggtacctgttgctaggatctaataattttctcctgtgagtcactgcgcctggcccttttaataatttttaacagcaaaatttccttttggaattttagctggaagaattatttgatgcctggctgaaggtgatttcctgaagagggaatatatgtttgcctcttcctgaggtctgggggcactaacatttagggtcctttaaatttcgtttgagttttgtcagccaaaatcagaaaatattaattcaggctgcaaatttctgtgcagactgacatgtggttatttcttaacagcatttttcccttccctctacccagcactaatgctttggatgtatgagtttccttacagatccccaggaaactgactgagaaagtaaacacctttatttctagtttacctgtacattaagtcttctcagaattacaggaactgggtctcctattacacttctcatcttgtaaagtgagcactaggctttgtctcctgtactgtctcaacataaggagttctttaaatattacgttttaaattgtagtatgtaggttatttatggatcctaccctgccatattatcagaaataaacttcactttaactctttccttaaaattatatgctgctctcctgngtcaaagtcctctc

SEQ ID NO: 211535 - DNA, 729 bp, Homo Sapiens
  misc_feature (661)..(661): n is a, c, g, or t
ttttttttttttttttttagttcaataatattttattgtcaatagcataggagaaattcaatattgaatctcagaacaagaagaacctatttacaatgcatgtcaaggaagagatgggagaaggaatgtcacaaaattttttggtaaatacatattttttatagagaagtaatccatgaacctgcaacatggatagcttatccaaccaactttacaaattactattaatataagttacatgcttgccatctaaagtaactaaacccatagactgaaaaactatgtgtcaaggtaacgtgagcactttaatcactttacttatattttctaaaggcagtagtttcctctccttttcccgctatcatattagatgaagagacaagttccttcaacacaaattctgatatcggctattgtgagaatccctgtgcgagtcagctagaagcccctgccaccagtctagtgccaaccaaatgaccagatgggacagctatcaaaaatgaaagtgaatttatattaagatctgaacttcctcttggggtcttgcatttcagctactagaggtctataattccttatccaacattccacaatctgaaaagctctgcgaacgaagtgtttttgtaagttggtggcatacgcatttggcagcaaatttgancccttatgggctacttagtctttatgtatccattttgtctgaatattctacattttgttgcagcatat

SEQ ID NO: 211536 - DNA, 776 bp, Homo Sapiens
ttttttttttttttttgtacaaaacggggtcttgctttgctgcccaggctgttctccaactcttggcctctagcaatccttcctaccttggcctcccaaagtgctgggattacaggtgtgagccatcacacccagcctcatttatagtctcttaacaacaatcctatgaagtgggtattatcattgttaaccccattttcagaggaggaaagcaagctcagagaagttacataatttgcccacgtgacatggtcaggaagtggtgtgaccaggatgtgaaccgcggcaagctgccttcagtctgtgcttgtgttcaccctgccatgctgccttcaaaacagagtaaagacagagatttctagcaacagcgcctgaacgccatcccgcctgcccctggattctcagtgctgcgggcgaatccatcccctcttgcttaagactgagcgaggcttgcaagtaccggaggcgaatgaattgggcccgcctgcctcaccttcctccccagtggatgaagaggagttacttgtgtctgtcaatagctcctcactgggcagcagatccaaggggcccagggtggtgggcccgtcaggctgggtgggctctgtgctcgggggttcagccaccggggtcactgtctggctggaggaggcgtctggctggctgtctacctgctcctccttgtcctcctctgccccatggtctgcgtcgctgctggctcgggaaaggttgggcgtgacatggccacggcgcgaaccactgggcttggctcctggctg

SEQ ID NO: 211537 - DNA, 711 bp, Homo Sapiens
ttttttttttttttttctggaaccatttgaactttttattgctaactctagccagagaccagatggctctttttatgtgtgtgaccttattgaagacaattagattacttatgcaataacagaattgttaattttgtacaagagttgatcttcaatgtgaaagcttttctagattacatattattaagataaaacttgtaactttaattccttaatgagtgcttttcatcttgatttccttgtgccagagttatggaatccactttgccataattttagagtagcaaggttcacaatgtattgtctgtctataaatccaaatactatcacccgcttgtagattttccaaaggctgcttgcatatttcacacttaaagcaagtagaatggcagcaaatttgtaattcatctaaaatcattttagtttctacacccaagggttttcggcagtaagtgcacatatctctttcaatgacagacctatcagaagttgaataaacagtttgtatgtattttccagagatattctcctgatatccatccttgggtgatttactattctccacatatgtccttgtgtacacaacagtatcctgtggtcctgcctgcttggctccagtgttagagcttccattcttgttttcagacacatgagaatttacttcaattaaattttccaggttctggtctcgattagtgtttctaagagctg

SEQ ID NO: 211538 - DNA, 690 bp, Homo Sapiens
  misc_feature (72)..(72): n is a, c, g, or t
  misc_feature (650)..(650): n is a, c, g, or t
ttttttttttttttttttgcagaagaagagccattttattaggtgaggcacatgggatgttacacacgcctnggtgggaaaggagagggggcaggttcctcggagagaaggcaactgtgtcatcttccagcacatgggccagccatctgtgagcactgggaagcagctcagcagaggccagccccttcctggaaggcttagaccttgatgacaaactgtagtccgtggatcagcatgttaacaatgtcatgcaccagggtgatgtccaagcctctgagaacctcattgaccagagggcacacgttgccctgaaccaactcaggcaggactttattcaagatccctgtgaggctgtccagaagaccttgaatggggagggggccaagtccatcaagcagagaaatttgcaggcttccaggggaatgggtgcagtcaccaaggaccaggtggatcctctcctgcttatctctcacagctaagatttctgcagtgatgtccagcttcacagccagcctcaacagacttgcaccgaccaggggcgtattcacttggagctttatgccgagagggatggtgacatagagacggtggccatcagggctctgcacaaggccaagttccagcagctgggggtcagtgacctttatgtncatgatgttgttcaggccaggaatcactgacgtcactttt

SEQ ID NO: 211539 - DNA, 682 bp, Homo Sapiens
ttttttttttttttttttaacaaagcaacttgtatacttttaatgtttaaaacagagcatcatctttcctttccagtgaaacaaaaagaaaacttaaaaataaacaggaacaaaattacaatagagaatgtcaattccaaataagatgctacaggttccgctgatgctcccattgagtggcaggactcaagccatcattaggaaagaatttatttttaaagtgtcatcttaaactgcaaggacgattgtgccctcagggtgtctttccaaggtcttgagctaccttgttccatcctgatggccctgaccacattcttcctgaagcccagctctagagccccaggccagcacatcagctctaatctataggtagtgactgcctgggacactgtattgaaacacttatgaagccattgtgagcgctcgccaggaaaagataggacgactgatgaatgattttgccaatggaaccataagagaggtggatcagatggactgtgtactcctcttcccagcccaggcccaaatctcagctccacctctcattatgaagaccacacccaccatcagctggggcctggaacaatttgtccgtcttatccctggaatcactcccctagtctctaccacaggtatgcaatgggctttggaatgtttttccagagtggtccttgttcctcct

SEQ ID NO: 211540 - DNA, 519 bp, Homo Sapiens
ttttttttttttttttttaatggttgcagctctgcatttatggtataggttacagccaagactggatacaatctcatctcataatatccaaaagaataaagcaaaataaaacctccttcaccctcgcacattaaaaggaatcaacatcttgacccaaagttcaaactcctagaacttgtaaatatctgtaaaacccccaacaccaaggtttctgtaacctgtcacatcagagaaatagggagatcttccaccacggaaatatgactattaagaattcacagattacctgaaacatttactaatcacctcccacccccaacaccccctcctccgagggaaaaagaaaaagggagtgagagaggaagactcaaagcactggggaaagcctgctatgaaaatgccaggcctttcttggggcttagaccgtcaacctaatcctagccagaactatcgcaggactataatagggcaacagagtactttgtgtttgagaattggggtaggaggaccaggatgtga

SEQ ID NO: 211541 - DNA, 628 bp, Homo Sapiens
ttttttttttttttttttggagtttatttgactaatctggaagatttgatacttctcttcttgaaataccgcctttccttggttcttggaacttaaatgcattcactctgacaagtattgtgcattcattgtgctagctggtgcccttacccctgagttcataaaacataaaatttagtgaggaataacaactagtgtccaaaccatcaaaaattatgtgataagaacaataaaggggggaatacacagtgctatgaacttctagagaaaggtgctatctaaactgagacctagaacaggagaaggaggtgacaaattaaaaaatagagtgagggagagagggtcaagggaggggttttgcatagagagaacagcaactccaaagactcaaccaggagattagaaaaaatatgagaattgaagctggaaagtttcccaataatgccttccttactcccttctaacgattccagattgtcttgggtgatcttaactattttctgttttaaaaatatgctgacatccatcatctctatctctagccctctcccctaaactccaggatctaattatccaagtttactggtcatatccagtcagagagttcagaggcacatgaactcactca

SEQ ID NO: 211542 - DNA, 630 bp, Homo Sapiens
ttttttttttttttttatgtggcaaaacaaagacatttatttttcacagcagtactagaataataatgatgtatttcaacattctaaggtttagagttctcttaaacaggagtgggctgctttgagatactgagctcccgggcactgaaagtattcaagcagaagctggacgccatgggccaggctttcttttattaaaaccgagatgctactcttcctcttctcaaagtgcctacagaacagctgagacctacttacccagctcgtttgtcactattagtttcatgactataaatttcatacagctttactgagggataacctatgtactgtacaatttacccattgtaagtgaacaatttgatggttcctagtaaatctatacagttctgcaaccatgactacagtccagttgcagaaactttgtgattatagattttttccccaaagaacattgttagcatcaagggtagatccaggtcccatgggccgtggtctccgctgacctaacagcaggcctctgtgctgtggctctttcctcacatcctctcctcattccttcttgggagtcacctgatgctgccctgccacatgctgcttggccttcctgggccctgggcacctcgcccc

SEQ ID NO: 211543 - DNA, 719 bp, Homo Sapiens
ttttttttttttttttttagtctcttatgagctttattagtgttattccaatatttaggacatagtaggcactcaatatgtgaatgacaggttatacgaacaaactgaagtttatacttacgtttcaaggtttttgatattgccaaatggccccctaaaagtgatataccaactcatattctattcaccaaaatatgacaggatttccccacaactctgctaatagcaagatgtacattatttttattgtcagtcagcattgtttttatttgtattttttgtaaccaatggggttcaaggtgtttcatgttttgttggccatttgtatctttttgtgaatcgaaatttggtatgttttgcctatttttcagttggtcttttcttaccaattgaaacaaattcttcatatacttaagacattaaaaacactgtcatatgttgcaaatattttccattaccttctgctgtacaaaaacttaaactatacaaaatttcctttgtttttagctgtcatactttgctaatcacaatttcattcactcgatgtgttacattactaattatttacatataaggaaatgtactaagtattatgtgtgtgtgggtaccagataaaaaccagaataactggacacatggctctgaggcagtatgcaataagtgatttaatagtggtagtttgctctaagtgtttttatgagagacagggtatcttctcc

SEQ ID NO: 211544 - DNA, 792 bp, Homo Sapiens
  misc_feature (747)..(747): n is a, c, g, or t
  misc_feature (757)..(757): n is a, c, g, or t
ttttttttttttttttttaaaggtgaatatcaagatttactgattctaaatataactttcagaacaataaattttgaatctcaaagcatgaagtcaatacgtgtcacagattctgaatgctttcaggagtagcacaggaaaacttcagaattttgcatatgtaacatttaagcaggaagctaacactcagaaaacacatttgcaagtaatgtttgatttcaactaggatagcagttttctggtaactttgctcagctaatcagattttttaaaaaaattcttaaaactacaacacagtttactttcgtaaaaatttcggcaaacaaaaattttaagtcttttgtttccctttctttaatttccagtttctccagttatgaagtgtcagctctcaattccctctccatggacttcatgcttatgtttttttcaggcattagttttacaaattagcttcacccttcacgactatcttttcataaactctcttaacatattgagtcaagtagtttaattctattctttgtcaatccccctccttagttctttagggcccaactgtgtctcattcatttcaattttgccaactaatatccatacaatttcttatgcaagatctcggcactgtacctcaatgttatgagaaatgtgactgacagcagatttttccatgtgctcacacatccattcatttgatatcgattgactcaatactgaagccactcatcctttcttacatcctttcanaacactacanataagctgcattttttatgtgacaaatctatcttc

SEQ ID NO: 211545 - DNA, 764 bp, Homo Sapiens
  misc_feature (608)..(608): n is a, c, g, or t
  misc_feature (749)..(749): n is a, c, g, or t
ttttttttttttttttttactttttgggaagagtgattaagaaactttattacagaaaatgaatgcatccaacgtccccaaatacatttgtgacaagaacagacacacacaggagacacagacaatagtcactacatcacagccttgttctttccgaaggataaaatgtcattcaagaatggggtgaggtggttagagggagtaggtactatccttttaaatgggggaaaaaaaaaaaaaaagcaacaggttggcatcttaagaacacagacagtgggcccagaaatcaagctaagcctaagccttaggtaacatcatgccacttacatcatctcagagaaactagggcattattccactagaagagcaatcttgccacagtgtgaaaacgttgagtagtgatcttgctgccccagctaatggaccaagtggcctcaacttgacagcctctttaaaactcaatgtttgcctaatcaaagatcatctggctaaactgctcccccacttctgcttagctactttggaagcacaaaagttacccctttccatccttggcccttccctggttggtacatctagttatgagatagacgcgcaccacttaacanatcactcccttttgaccgcaggttgtttctcttccatatttgacgaggctggcaacagctcccgaatcttggcctagcacatcacgaattgggaagctaaagctttagcttagaatgccaagtgacaaggacatggctgangcaggaggggaaatt

SEQ ID NO: 211546 - DNA, 592 bp, Homo Sapiens
ttttttttttttttttttgagaaaactattgtttatttagaaaaaaggtacactggtagaattcggcagataaaaaaattctcttttaaaaatgtcactgtgaaacttttccagatgaaagttcagcaatacaaagctcctacagctgtagaattaaaacaattatgttttgatccccccgccgccaagatttgtctaacataattacaagaaaaaatggcaagggacaagtgatcgctggtacctttttcttttttaaacacgtttaatgttgtacatgtactatataaaatgattcctaagcatttcataagacaatgctcccactgcttttagtgactaatattaagaacaagccaaataataaattaaaacagttttaaaatgaggtaaaatcaaaagggttcaacaattgtttattttcagtttcaaacaataaaaaggaagcatttcagaatggaaataaaaactgaacccaggcaatatttagttaatctaaagtaaaactctgtacacaggtaaccttatgcagcacattgtgctaaaagtatggaacagttaacactttcagccattactgaaaataaacatg

SEQ ID NO: 211547 - DNA, 656 bp, Homo Sapiens
  misc_feature (601)..(601): n is a, c, g, or t
ttttttttttttttgtttcacaatgtgttaagtcagttgttttattaaaaaataagcactatgcttgggtttcataaaatttatacatgaatatgtacacagacacaaataaaataatattaaaaataaaaatcacacttgctttcaaggcagtggtcctggcaccccacatacataatcaacttttcctttaaagaaattgcttggcccaaggagaccacagttagagaaccactaataaagctgtagcccgttgcctgcaacattttcaattcgggtttcaaaaatatataaataatttaattacaaaacccaacattttttttctcttttggcacagtgaagcatcggtcaatagcaagaaatcactgaagagcctctgacatgtctctcacactcagtcatacctggaaatgccacatacgtacacggatgggggcccagaaaccccaaacagtagtcatatcatttatagtgtggaaaggttccctgatgtacttaggggggagggaagggacataaatcaatggaagttgcgacaaaaacagtagaaataagacgaagcctgggcgttaaagaaagacaaaaaaagtccttatgnaagggaaggaggagcaggcttcgcaaagaaactaaaacaagaattgccctcgtgc

SEQ ID NO: 211548 - DNA, 665 bp, Homo Sapiens; identical to SEQ ID NO: 52799

SEQ ID NO: 211549 - DNA, 745 bp, Homo Sapiens
ttttttttttttttttttcaaattttacaatttttttacttccaaaaataacagtaatcagcatcatatgtacatgtccgtgtcctcatatgtagtaattaagattacatgagccactgtattaagtatcacccacttgaggaaatacaaagcaagagaagaaaacctatttaagaattgggtttatataacagtggtgttgtcatttttgtaaactgctctccattcatgccaaattatagagcagcttcggaacaattatatcattaaatttacgttttgtgtgatttcagtactgaatgcccttttcttaactttcagagcccactgaaagtttcggggctcacgtggcccaccattgtcccagtcactcagcaaacacatcagtgccctcatgtggagggctccacgccagcttctgtgatgacagaggtgaatactaccggctgcttgtcctcgagcacgtacaatgtaacaaacttgtaaataaaataagcacattataatacagcatgttaagtgttacaacagaaacacaagagaccagaaaatcagcacctctgtagggaatctgatgaagtcatggagaggtgccatctgaactgggctttgaggaatgaataggagttttccaggtgaagggaccagggggaggaatcatgatgggcagacgctccagatgaaagcaggtgtgcctggggttagcgagctgcttcctgtgcaagcagcataggatatggaagat

SEQ ID NO: 211550 - DNA, 641 bp, Homo Sapiens
tttttttttttttttcttaaagtattctttattaagatcattaaaagttgtagaaacaactttatattataaaggcacagggagacagttcaataaaatattcaaattaacagtaacttacagtacaaaagacaattttaatgcacatacaaaccccaaatgtctgattcaaaaatattttactgcgtctattaatgggcaatgattaaaaatataaattgctgccatataataaatatctgatagtgaacatcttgatagcaaagtgaacaaaatatttattgcttttcacttacatatttttccctgtaattttaaattcctaattcttttactatcttctcaacttttcccaaagataaaataaatttcacataatttcatggaggggaaatggtagttgtaaaaaactacctcaagtagcaatcaccgctggcagtgttttctcactttctgttctgcaattgcaatcacacttccaaaaagaaaagcaaatgtttgctaaaccatagacagacaacctctttgtgactggtattataaggtttataatgaaaacttatcaaatataaaaggtgctccctcttgaaaatgtgtattttatttgaagttttgagtaagaggtgagtgtttggcaattt

SEQ ID NO: 211551 - DNA, 750 bp, Homo Sapiens
ttttttttttttttttctcacaaaatttcattttaatcatcttctttacaaagcacaatacttaagacttttctaaatacaactttataaaatgaagcaaaaaaataatctccatagatgcctggtcgagtccatgctgaatgcaaaataatttttttttttttcaaaagtgatacttccaagcttttcaacattctcgatgggtccattttgtaaagagtaaagatggtggcagtttgggtagcggctcgtccagttccttgatgcagaatcctcttgctgggtagcccgaggggccgcaatgaagctagacataccaacttctccttccagaatcacttctccctctccttatacaaaggaagccaatggcctctatgagggggaagacatcagctctctacattccatgttgccagtgttccatgagggtgttccaaccgctcaatttcatcaacaatcctactctgtatacacattatataaaactatataattagggattttcataagtaaatgagaaatttgaacatcaaagaatccaatctgcattcttagatcattaggtcgtggggaatctctggaatcttcaagtttaacgcagaaatgcttataactgtcaaggggtacagggatgttttacgctgctcttgggaacctggcactcctgtgcccaagcacactgaacccgaggctgctgaaaaggcaatatccagggatgggaatggagggtatgaggtttccttcctt

SEQ ID NO: 211552 - DNA, 609 bp, Homo Sapiens
  misc_feature (572)..(572): n is a, c, g, or t
ttttttttttttttttttaaattttaaagttcttttacagacagggtctcaccacattgcccaggctggactcaaattcctcaaatgatccttccatcttagcctcccaaatagctgggactacaggtatgagccactgtacccaagggtttttctttcaatatgtatgtgaccagctgacttaccgccttcacagtcttatatcactgtattcatttatcaggattattacatatagagggtaaaagacataggcctatatatttactgagatgttacaataatttcaaagcacagtgtcaccctggaaaagtcacatggcaagttgaatgattttcaaaagccccaggcccccaacactttaccttaacctccttggagctactggaagtcttcccttcggtcttcttctgctttgatgtggaggaactgtttttgctgctgccactcgtctccttgttgctgttactgcttgactttaaggaagaagactgactaatagtcctcttccgagagccatgctctgtttttggatcttttgaaggaacaggcccagcgggagaaggcaacanatccttttcttttgcagcactctgcttagatgacctg

SEQ ID NO: 211553 - DNA, 567 bp, Homo Sapiens
tttttttttttttttacagtaaaaatgaacacagctttttttttttttttaaccatgggaggacaaaagatttaattccttcactatcttttcgttggagaaactgaaaattattgccatattatgggatgcactccctcagcaggaatccacgttcactaatctgcattgttttaaggagcaaatacttgtcaattcttcagtgaaaaaacttttgtcttgtttaagtctaaagttacttccatattcctcagctgaatttggtataatttcaatagaagaatgaatgaaaatgaaagctttgtcctgtggtccatgaggacctggaccagattagtagagaaaacataagtatgtgtgctaatacttggtggcctagagtccccaaaataaacaatagttgtggctttaatctcatactgcagtcacatcgaactttccatctttgtgtttttttgagacggatctcgctctgtcgccaggctggattgcaatggcgggatctcggtcactgaagctccgcctccggggtctaagcaattccggctaagcccccaagtagtggga

SEQ ID NO: 211554 - DNA, 676 bp, Homo Sapiens
ttttttttttttttttatagcttgcagaatcctaggacgttttattaattcatgatgcccactatccttgtgggagcaagaatatgcggcgtttcaagctccattcaaagaactacatttgacaaagttttatatcagtccaagagcccccaccccatctccccacacagccttggaagtcaagagccttaatcagaaaacacatgagaaggccaggcatggtagctcatgcctgtaatcccagcactttgggaggctgaggtgcgcggatcacctgaggtcaggagttcgagaccagcctggccaacatggaaaaaccccatctctactaaaaatacaaaaattagccaggcctagtggtgcatgcctataatcccagctactcaggaggctgaagcaagagaatcacttgaacccaggaggcaaaggttgcggtgagctgagatcgtgccactgcactccagcctgggtaacagagcaagactctgtctcaaaaaaaaaaaaaagaaagaaagaaagaaaaagaaaaagagaaaagaaaacacatgagaaggtggctaacagtaaaacctttgttcagcagtttatcttactacatggttatttttgtagactcttggtatcttttatcctaagacacccacttcttgatttcatgcagcggcacatgaactat

SEQ ID NO: 211555 - DNA, 721 bp, Homo Sapiens
  misc_feature (642)..(642): n is a, c, g, or t
ttttttttttttttttttcagcatttaggaaactttattgcacttatccatttacatgtcctaattttccagtaacataaaagcaagaagcaaatattaccattttagtaagaccaacagttagagaaggaaataaaagtagaaagaataactaaatgagtcaataaattccccagttgtttctctgcttgtctgctggtgcttggtttcacccaattaatagaaacaccaccacacgaacacaaacacacacacacattaaccttgcagaaggtcctcctaaaactttcctggacagacccagcccccaaaagttttctccaagtactgggccacagccagggtcagatgatcattaaagggtccagccacaacctggatgcctaaagggagtcctttggcattcagtcccagtgggcattgggtcacaggcaaacccagggcactgaagacacctgtgtaagcaaagttgaagggccgtgttagagggacatgatgcttaggtgccactgtgggatgtgagggatataagaacacaccatcattacctagcatatccaccagctctttacgcaggctttcttccactgccttaaacttttggtatttctcattgctatatctgagcttttcttccaacanagccagtccaatggaagggatggtgtacactgacagacccaggcaccatttgatcaactcccacagaggactgacatgt

SEQ ID NO: 211556 - DNA, 595 bp, Homo Sapiens
ttttttttttttttttttaacttaaaatcgtttattttaaaggaaactttaaataaccaatggaaatgaaaaaccagccccacttgccatgaacagccccaactgttcggatttcattcgggcaggcggggtccacaagaggctctcttggcttaaagggagcccagcttgggccagatcaggtgttaaggacacgtgagcaccaaattgagcctttctcagtgatgaggtcaaaaaatgaaagcgcgcaggaagggttctccccaggggattctggggtgtccccaagtcatccggggccccgcacgcttcgggccatgctgttctggtctccagccctcatggccgtggcaatggacagcgtccactcctcactcagtgtgttcgcatcctgaccttgaggtgggggtgagggggacattgagtctgttttagaattggaaacggctcacagagggtgggctgtgtccagggccacacagggggaggtccttcaggtctcacccctgaccatgactcccccaattcaatttctttttttttttttttttttttgagacggagtcttgctctgtcacccaggctggcctcgtgc

SEQ ID NO: 211557 - DNA, 717 bp, Homo Sapiens
ttttttttttttttttgtctttttttttgcgtttaaaacatttgggctattccctgacgatctatacatgtaaatttgattactaaacattgtcactttgaatgtcaaactatttttaatctattgattttgattaaaaatcataatacaaacagagctaaaatcacgctaacaaaataaactaaatatgaaaagttgcattgaaagggcatcacattattcttaataggatcgtgtagaaacattccaatggcagtgttctcaaaataaaacaaaattacattagaagacctccagcctggccacttttgggaccttacctgtaactctggctggtgggtgtctttactcttgtactacatggctcacttacatcagacatcatatttgtataccctgagaaatctgacactgaagtccttactctatggtccacttctccattagagttagtgataaaggtcattggcaccctgctgcccgacttaaactgagaaccaaacgcttgtgcaaagttctcaatctgatacgttgttctaggctctatgtctttctgaggatctatctggctagctaactcctgagatggaatctgaaagcctgttgaagactctaagtttttctgttccttctggctagtcaatttctgagatgaggactggaaggctgatgaagtctctaagttcttctgagaatctatcagatcatccagctcct

SEQ ID NO: 211558 - DNA, 692 bp, Homo Sapiens
  misc_feature (661)..(661): n is a, c, g, or t
ttttttttttttttttttgagaatgaaaaacaccaatttattatacttatgatactgtttaccaggacctgagcagggtacataggagttctcaccatgatagccaaaccttaagctaaataaatacacaagcatgtgttacttatcaatctgaaatacttcttatttaatctatgtaatataaaaatcatagtaattctttttattgaatataacaagaaaatatacagtacacatacagttcaaagaattatcaaaaaacgaacacacctgtgtaatctggttaactacttcaagaatcagaacattatcagctccccagaaacctccctcatattcactcctagtcactacctccttcctcaaaagcagccactatcctgacttctaaaaccagagactggtcatgcctagttttcagtttcatattaatggaatcataatatgtgttgtatggcttcttttgtcaacattataagattcacttacaatgttatacatagctgtaatccgttactgctataaggcagtctacatactacaacttaagctttttaacaatgaactgggttgtttctacattaaggctatcacaaataatgttgcaatgaatgcacctatttttgatatacatgtatgtacaagcatttttattggatanttatgtcctaagatttaaatttcacttgtcc

SEQ ID NO: 211559 - DNA, 725 bp, Homo Sapiens
  misc_feature (704)..(704): n is a, c, g, or t
ttttttttttttttttttggctggctatctccagtagtatcctttttaaaaatgactttttaagtttgctgctgatacaggggtatataattacttttgtatattgattttgtatctagtaacctggttaaataattgaggctcacttgaaaaatgacagtttgatttcttctgttgcaatacttatactgtaggctgaaaatattatagtcaaaaatgtatttaataaactaacctggcaaacatcatagcttagcttagcctactttaaatatattcagaagacttacattagcttatagttggggaaaattatccaagacaaagcctattttatcatcaggtattcaccagctcatgtaatttattgaatactgtactgaaactgacaaacggcatggttgtatgggtactcaaagtacagtttctttgcatcatcctaaagttgcaccatcgtaagtcaagagctatctgtactttatttctttttgtcttctctgctagctaagatttgcagtacagtgttaattaaagtagcaatagtaggtattcttgtcttgttcctggttttctgggaatttttttttttttttttttaccaccactgggtctgatgattaatgtatgtttctgataaaaccttttaccacattaaagaatttccctctattcctaagatgtttccctctattcctagtttgttnagagggtttttgtttgtttgt

SEQ ID NO: 211560 - DNA, 747 bp, Homo Sapiens
ttttttttttttttttttcacttaattatacatacgttttatttaaagaaaagcaaaacacacaaccacagcatttcaattaaggagcttagaaaaatttcaagtgcgttcttggttctccagttaccattccaataaaaaactttttaaaccaaagttaaaattaagtgaaaaagaaagaagtcccagtaagcagaccgaacaatacaaattcaaaatactactctatcttcttgtgttcgttcccaccaaagtgtgctgtttaaagttccacaactattatcttcctcctcttgttctttagtgagttctacaaaaacctgttccaatgttgcttgagaaaagctatattcttcaatggcaaaagcatgtttagcttcttccagcttaaaaaaagattgtgaaagggactgaacatcttccttaggaattttataagccaaaatagaagaaaaactttcctgacggcttgcatttgggaaaatatactgaatttctctttgaaggcggtctacttctaggttttctatccagtccttcaatttaatttccaaaaagtagccttttccaaatttactctttagatgttgtactgttccgatacatcttaactgcccagacaccatgatagctactcgatcacagacagcctctgcctcctccatatagtgagtggtcagaatagcagcccgctttctgtttttaaatgcagttcgaattgctcgccacatgtgctgtttggctttg

SEQ ID NO: 211561 - DNA, 565 bp, Homo Sapiens
tttttttttttttttttggagcagcaatttcccaatttattgaaagtgatcgctttgcaaggatgtctaagctaatcccgtcacagaaaggaaacgcacaggcgcctaggcagaaacttggagactcaccgcagaggccacgtgaacccacggccacagagaggcaggacggcagagccatgatttcccaccgagcgattacgagaacctcttcccccaatagtagacacatctccaatacaaacacaggtttataataagtaataggaagtcaatataatatagattatccccagaaaaaaatcaacaatcttcaaacactgccctttttttgtgtgttttgtttttgttgacaggttgaaagcatgttgaaaaaaataaatatttaagaaaagcacacacagcaccctcactacaagtagttctaaaagggctgcatacaaaacacaatataagatctaaaaaaaaccaccaccattaagtatggctttcttaagagtcgcacatgtcacagaatgagctaaaataagattacttcttttataatattgcaaaaagttccagt

SEQ ID NO: 211562 - DNA, 667 bp, Homo Sapiens
ttttttttttttttttttaattatctgggcatagtgtcacatgcctgtagccaagatattctgaaagctgagatgggaagatggcttgagcccagaaattcaagaatgtagtgagctatagttgcaccactgctctccaacctggacaacagcaagaccatgtctcattcaaacaaaaaaattctaggcagagaagggaccacacattcaaaagacaaaaccctccaagaaatcattctaaaaaatccccatgaattaaaagacagattttcagactgagctgattcaagagtaaaacaaaacaaaaataagatacacaacataaagatgggcatggtgtcacatgagtgtagtccacattacttgagtgacatagggggaaagataacttgaaaccaggaattcacaagtctgtgcaacatagcaggagtctctttaaaaatgaaaaaaaaaaagaaaaaaaaaaagacccataccaagacacatcactgtgttattaatttagaatacaaaagacaaagaaacactggaagctcacattaacaaaaggctggttccccccaccttcaacagactggaaatcaaagcagcattcgggccaggtgcaggagctcacacctgtaatcccagccctttgggaggccaagccggggggaattgctggagc

SEQ ID NO: 211563 - DNA, 684 bp, Homo Sapiens; identical to SEQ ID NO: 57980

SEQ ID NO: 211564 - DNA, 702 bp, Homo Sapiens
ttttttttttttttttttcacaaacgctaaaagaactttattttaataaaaatgtcctatttttcaggtgaccccttcctttaccactagaaagcagctctattgctaaaaagcaatccatttatttagacattctcttcttaggcaactttaaacttttccaccgccgtaacaccactctgtatttttcactttcagtcttctcttcaaacacttttttcaagagaatccgcataactgtctctgttcctgcttctttatcctctccaatgagaagatccaatgtatctcccactttcaccgttctgcttttcttccataatttttcctcattcagcctgagttcacctttgtagaaagcatcttccactttgtttctcccaatatctagccccgtcttcaggacaacatcataccgaaaagactgaactgctttttccaggtctttatagtttttgactacagtaggatcatcctcaagctcctcttcctgctcactcatctcatcatgatggctttcttcatcagagtcctcttcatctactttttgcagagactttttagtagattttgtagaccttatattacttttgagtcttacggaaaaaggaaaaatacattctggagatagtaaaagccctgggagtctcagtgagaaaatagagaattcttaagattttgtttaaaccaaatgtttcatgt

SEQ ID NO: 211565 - DNA, 635 bp, Homo Sapiens
ttttttttttttttttttcagggtccatgtgcactttattcactcgtgtcgtcgcctctcgggtccatgcgtcggggcgagcgtctcagccgggcgggaccgcaaaggccccgggaccacccgactgaggacgccgcccaggcctcggcagggctggggcttttgtttttaataaataaaaacggaactctaaaaaatatatatataaaaactggggagaaattaagttttacaacaattggaactcaaaattccaaaatggaaaatgtacaaactcggtcccccagcagctctggccccgagaacggacagtcccgggcccggcgccttcccgctcgctcgtctcctgcaggtctgggatggggatggggtagagcttggtttttggtcagaagccaagaaaaaagatcggagaagaaaagaaggaatgacctcaacttgctctgcacggaggacggggacggctcagagataaatagcatttaggttaaaactatgtcattagcaaatttagttcttatatctttccctctatttatatctctatacacggtgggctgcgatgcaggatagattctggatttacagttacacgaagaaaaaaaaaaaaaaaagcctacagccgccctcgtgcc

SEQ ID NO: 211566 - DNA, 707 bp, Homo Sapiens
ttttttttttttttttttactcacttggtataaagtttatttgcatgtgtaaaaagtgtatataacaggaaacctcttaaaataaaaacatagtaaagttttaggaaaaatatgaatttagaaaatgggttgctttttcagatcacaaaaatactgatatatgtgtactaaattaccttaaactgttgaggtgttagagaaacatttttcaaaaaacaaaaaaagttggaggttggaggagacacaaaatatagaagaatgaaggtactgatatatgtcacacatgttttaaaatgaccacacaggcagaatctacaaaagaatcaaattctttaaaaatacagaaatgctagagattcccctaatagtgttaatggcatacataacattccaaatcaaataactaataaaaatttaattcacattcaattaaaacaaaaacaatatgagtaatgtgaaattgagtttttgttaagcactgacaaatatttagcattaaaaagtctcttgtacgtctaggaagagtacacacacataaattatctgagaagtagaaaaatatggattagaattttagaggcaaacttgaaacctaagacatggaggacactgttgctctgcaggttttaattgttctgagagttttctctatgtatttgttcagagggcaataaagatgcaaacttggggccaggcacagtggatat

SEQ ID NO: 211567 - DNA, 729 bp, Homo Sapiens
  misc_feature (672)..(672): n is a, c, g, or t
ttttttttttttttttttgagacagggtctcactctgttgcccaggctatttttaaagggaaatcaggaaataggtaaggtaggaacatcaaaagaagagcaataagctgtgtgcagtggtgcactcctagtcccccagctactcagcaggctgaggcggtaggactgcttgagcataggaatttgaggccagcctgggcaacacagtgagactctcccatctgtttaccaaaaataaataaataaataaataaagaagcagtgtaacccagaaaagggaaaggaactttgcactgctggagaaaaacaaataggaaaatgctgttctcagaacaggaaccaaggctttctgacgaagaagaaaccttggactctgggatgaccgccacaaataccaacaggtttgaggcagcctgggatgtgatccagaggaaagccaccacagtgaatactatgaaaatgactgtgtttccctgcatggctaactggaaactcaggatatttgctggaaaaaacaaaagactctgttgatccttttcattcctgctgactgtgcaacttgtaatctgcagtttgaatgataacagcataagacctgggaaccgcctataataaagcagtgtgccagaaaggggaagaatttgggacataaattggtgtttccgtcattcncaacttgacgctaagaattttaaagagaaaaaaagaatgcagaaagcaagtgggcag

SEQ ID NO: 211568 - DNA, 614 bp, Homo Sapiens; identical to SEQ ID NO: 57873
  misc_feature (580)..(580): n is a, c, g, or t

SEQ ID NO: 211569 - DNA, 646 bp, Homo Sapiens
  misc_feature (516)..(516): n is a, c, g, or t
  misc_feature (603)..(603): n is a, c, g, or t
  misc_feature (633)..(633): n is a, c, g, or t
ttttttttttttttttatgaagacagattttatgatgccagtcatttccagaggggctgcccgctgtggcacagcaccacctggtggccaccccaacccatgcacctccccccatcccagtaccctgacagcaagccaatgaaagaggtgttaatatggctattttccaactgaggaaacaggcaaaagtgtagtcatttctccaagtcagtcaagttagcgagtggtagatgtgctataccttgttgcacccattttgggacctgtttgaatggcatgccccaccatcgctcccacatctgccagttatgtttaaccccacgtgctatttccatcatggcctccccacatcttattttcaaacaggctgaaaacagatggcctcatttgccgactgagatcatgctcaagattagggatgcaccgggcacggaggctcatgcctgtaatcccagcactatgggaggctgaggcaggcagtgaaaccctgtctctactacaaatacaaaaattggncaggcgtggtgatgtgtgcctgtaatcccagccactcgggaggctgaggcaggacagtcgcttgaacccaagaggcggaggtggtantgagctgatatcgcaccactgtgctccagnatgagccacagag

SEQ ID NO: 211570 - DNA, 675 bp, Homo Sapiens
ttttttttttttttttttaaaattgcacttctgaatttactccacaatatcaaagtttaatcagtacagtccaaaagatctatacagaggtatgattcttaaaaaattataattgagttgtacagagccagtgctcagggaatgccactgacaggaattcccgacagctccagtcattgtgtgtgcttcttgggcatgggttcaggtctgtgcgtactcggtgttgttataaaggtagtccaagagtggaggattgggaaaaggggaaggaatattcagaattggagacatcttgctttacacattccacataaattacctgaggcacacatccaaaatatcctgagaattagatacagccatttccagtttggaagaaggacagaataatagagaaccttctggaacttattcagaaaatcaaaggagttcataaagcaagattagtgacagaggcaagagctgaactgaagtaccttgacttattccagcactaggatttaaagcagcagctaaaatcccatctgtctgatccaggagacttgaacgcttgggcactgtggctgggaataggggaaaaagtctccatcccattgcccacacactgtgcaatcctgaaatctttgttttctacagctccctctagctagtatcagtttccacatcggggtgggt

SEQ ID NO: 211571 - DNA, 714 bp, Homo Sapiens
tttttttttttttttgttgtcacctaatatttgcgttaatacaatgatgttatttttatttggatagtatttgtatgattggaaatgagtgttaatctttatatgtattttaccagtccttgactaacatgttttcaagacatcttaccaatccatttcattgaattaatgagtaaggagactctctagaaatggttggtttgtaaagcaaggacattatctggaagaatcatccagagtttactgtatgacgagcatttcttgatagcaaggttcattttggtgtcaatcgttacagtcagtccatttcagtgggaacaacgaatttctccacagggtcttatttttctgtttttcacttcaccaaatggggtagatattttttcagaatgcagttattagaaccttgggattttcttctgtctccattgagtctcttgtttttttcccagatctgaaccatttcactttctgcatctgctctaaggtttctggaagagtcattcccaaactttcagggaaaaaaagggtgaggattccaatcaggacagtcagactacccatgacgatgtagggcagcattctgttgtaagcaccgaggtaaacacagtagggggcaatgatgctgcccactctggaggccgtggatgtgaccccaccgccatgttcctgaccagggttgggtagagctcagcagtgaagacatacagcatg

SEQ ID NO: 211572 - DNA, 656 bp, Homo Sapiens
  misc_feature (80)..(80): n is a, c, g, or t
  misc_feature (645)..(645): n is a, c, g, or t
ttttttttttttttttttggctgttaacattgttttatttcctttatacaaaaagtagaaatgacagaaaaaacactctntgacagaaacaataccactgacctgatctcatgaaggagctgagccaaatctgcccacattatggggaaagggaggttcaatcaacattagcaaatactcatgcaattgatgaaatataaaatggtatcagtggcttggtgaatgtcctgtgggtagggtgaatcaatctactcttaaaaaacatacattttcccaatcatgcttttaaacggcatcttttaaaaaaacaagttatatatacagatatcaccccaaaatgaatcttttacagtctactactataaatttaaggcatcctgatattctgttcttctgctggtgaggcattgttttcatggttctctttccaaagaggatagtccagaaatttccaataatttccaaagggcatcagtgagagaaaatttaaaaagtgatttacaagaagagttcttttgactctggctcagcaatgtgctttatgctgtaggatttcttcatttttctattgatgtcattatgctgccttattctttcctttgctagcggagctggcagggtttcccttggcatctgtcttcctcncaagtgaggtc

SEQ ID NO: 211573 - DNA, 726 bp, Homo Sapiens
ttttttttttttttttttcatttagatttctaatttattattaaattacataccaaagcttcttctatacagtcagaaaatgcacatttagatgagaacaaaaattaagtacaaatacaataaaattggttccaagaagctattttaaaagcaaaaacttacaaagtgcatttggaaaacaataggttttaaaaatctgtattggcattttttcaagaggaaacatcttccatcacaggaaagtatggttggaattgatttccctcctcccttaagagctaacagggtgggaatggatgcaaataccttgatattaaagtgagctctcaggtatcttttaattttttttgcagagacagagtcttgctacattgcccaggctggtctcaaactcctggcctcaaacgatccgcctgccttggtctcccaaagtgctaagattacaggcgtgagccactgcacccagccctattgtcatggtttttcatattttttcagtgaaatgaaaagttttgagtggctacttaaaaggaccaaaaaggaaagattcattataataagacaatagttgagggggcataacttcccctaagaggtaacatttggatccagaagtagaaaattccttctgacctcctggctgtgactagcattaacaggtaactaactgttagcctctgaatctggtaactggtccgtaaggaggacagcaaaaaggagagaaag

SEQ ID NO: 211574 - DNA, 664 bp, Homo Sapiens
  misc_feature (645)..(645): n is a, c, g, or t
ttttttttttttttttttcaaactaaatattccttttaatagaaatgtgaatcttgccatgttgggcagactggtctccaactcctggcttcaagagatcctcccacccgccctagcctcccaaagtgctaggaattacaagtgtgagccaccacatccagccagtgtctttgaaaacaatcaaatataatccttaatgtttctttacattgtcatcaagtattagtaacagtgacttctagtgaacaccttgatccttaaaccacaggtctaagttcagttttgtgattcctttcatttttacactcaaccctgaatatggacaagaccggttagtgtgacctgttattttaggaattacaactttaaaaattcctaatagccacaatctaaatgtgcaattcaaagcttttaacaatttccatgttctaaagtttctaagagtcttgaggttatgctagggctcctggttaaagtaactgccaactgggactgtatgtcacctaagtcaggataactccctggtgaagttacttttatttcaggttctgtattatttctcttagccatattatacccgtaactgtcctttttacagaaacccttccatcttaagagcctgcaaggaagtcatatactgcccanaaatgcccacataagttgt

SEQ ID NO: 211575 - DNA, 627 bp, Homo Sapiens
  misc_feature (583)..(583): n is a, c, g, or t
ttttttttttttttttttaatgtttaccttttaaaacatccaaatgtttattttcacaagcttagtagtacaagatgcaacataattcaagaaaatcaaccacagtgctaatactttaatatattattccaaatattagacgttacagtttaaatctttttaacattagctctaatgttggaataacatttaagttaataaataactgtgaatataaccatatgttcagtctattctccccagtttatcctaaatgacaattttattgtgatttgggtcataaaagtgataaataattgtttatatgttttcataaattgcatgtttatttaattaatcctgaagagaacctagaaatacattccaatgggttacataaattagacgtattttttagctcttcgattttttttaaacatgagtgagtcacactgtaactgctcttaaatttagtgttcattgcacataacattttttgaaatgtattttcacaggctataggtagtcatttgcaaagatggccacaatttttgatccttgaattaaatgtctttcatttatttcagagaattatgagtttcanaagctactgctcttatggggcactctgtagagtactaaactcac

SEQ ID NO: 211576 - DNA, 614 bp, Homo Sapiens
ttttttttttttttttttacactctacatgctttttattacaagactactgaccatacgaggaaaattcatcatctggtaactacacctaaagcacaagtatttggaaaaaaaaaaaggataaacagattcattaaattatatgattaaatcactgacccaatagaaaatttatataataaagccagaaaaaaagttgtaaaatatagtttacaataattattcacattcaaggctgtacatcaatacatacaacaacgtggccccgaacatgaattcaattcaaataattcatatattagaatttaaataacacagactgaactagaggccaacaatagccagcaaataaccttatataagaataaaaatacaaaagtgtatatcctagtatcattgcatttgttttcataagttcttttaatttttgctttgtctgtacatcacagttacagctacagaccaggtagagaatattacgcatgttctgcttgccacccacctgaaagacgtactagtcatttatcctattttatgttgtgaaggaacagctacagcagctctaaatactgtaacaatttaattttgccaacatccaacttacttacagtcgta

SEQ ID NO: 211577 - DNA, 628 bp, Homo Sapiens
ttttttttttttttttctcattttagacctaagagttttttgttataagacaccccagttaagaaatattgaaacataagagacttgaccatcaagggagaaaagaagccaagagtgaaaaatgctatgaaagtaactccagacctgggcggggcgggaggtaggaggaataaggagaaaaggaggcataagtggaaaggccaggggcctgtcatctcagcagctccgagacttgtcatgtttgaaagtgcaaatgtcaatggattttaaccatcttgaggttgtgatcttttaaaaagctcaatgaatgaggaagtcaattccttcaaatgcaaaatagctggctttctggctggaggtttgttgggtctggggtatttcttccccatctacctcctctcccacccccaccccattccccaaagaaaggtacaaaaggttgcagttctgcagcattaccgttacagggaaggcactggttacccaccagcgggcggaaggaagacagggtcgtgtcacttcaaagctaagtgccatagtgccttaagtattactaggggctggatgtctgtcagggaggagaagtaaggtggggcagaaaatgtggacagagaggaataagggtaag

SEQ ID NO: 211578 - DNA, 608 bp, Homo Sapiens
ttttttttttttttttttagaaatatgcttttattatctgcacacagagatatgactgcctccctctaaagcattactatttgggagagggagtcttggggggtgatgggaggtcctgagtcatagcttccacataccatatgggcaggaaggcgtaaggtgcatcttggtgtacagacacggtgactgggccgccaggctcccaagagaagagatgaacgagcctggggtcatcctggacaaccgtgctctgggcaaagctaaggaaggcggcacagaagttcatgcacacagagggattccagccgtcacggtcattcctgacatattcaaacatcttcatggtaggaaaggtcttgagggaagagacaaaaccgtctgggttacggaagccagcaacaacattcgggacccctgggaggaatgactgagcccaccatttcaggagcttgtgtctgtagaaactcctccattggccagggctgtgcatctccttggaggtcttgagctccacatagcaggttgggggctgtgtggatggggcttgggggtctgtgcagtctacctcccctgagaagagcagagggtggcttcccaggcggctgcgt

SEQ ID NO: 211579 - DNA, 743 bp, Homo Sapiens
  misc_feature (56)..(56): n is a, c, g, or t
  misc_feature (698)..(698): n is a, c, g, or t
ttttttttttttttttgtcaccagaagtatttattcccaaaagaatgacatatctntgagaacaaagtaacttttgaaattcattttgtgtttaggtaccaacaattgttaatgacgctcagttcatattttcagaatatcacattgataatggtactataatatatcctggcctaccagagttccatggatttaaataaataaaatttaattctgccttttataacatgcagggttgttttatggttgttgagttttgtgtgagtgtgtgtatttgtgtgtgcctctccttcttattgaaggattcagacagctataatgctaaaatgttttgtgtgtgtgtgcatgtgtgtatttttaaaacaatgtctatacttctgcctctattgatgccattcttttgttgaacctgtaaaggtaaggcccagattctgaaacctggttaaagtcactaatatttctctgtgaggccccttgttagctaccagccctcccctatccacactccctatcttgctgacatgtgtgtaagcccaaatcatcagtaatcacctcaaggctgatgacctgtaggcttataattcctcaattaatttttattgctcttacaatatttgtaagatgagtgagaatagctatttgacaccttaatatatatgtatggtatatgttaagttttaggctggtatttcttttantatactgacagtatgatgacacatgaaaaagcactcgtgccgaat

SEQ ID NO: 211580 - DNA, 722 bp, Homo Sapiens
  misc_feature (714)..(714): n is a, c, g, or t
ttttttttttttttttttcatgaaggtggagactttaatcatctacaaagccctcagacctgttttactttatatgtttaatcatacagatgccatctacagtattttgtagttagtaagcagcaataaagtttattctgtactactttagcatattaactattacttttaagttgaaatagaaaaattatatcactgtcttttcatcttgaagcaataacaatgaactcataactcaaatctgtttaccagcttaagagaagcatttaaaatcatataggctttttctatgctttattagaaagatttatggagggggaaaaaatggtagaattattccaaggcatgttcaggaacaacaacaacaaaaagaatttgtaactgcaattccagcgtttcataaatgtcctctatttccatttaaaaactctctaaaattaacataattaaagcagctaataaaacacaatccctgcaacttttatatataaggaaagtcctcatacagtatcagtagaccatggcttataaataaaatatactgtatttgttatcaaatatagaaacaacagttccagatttatgttttttgaaaaaattaatttattttaagttaaggatctctacgtaaatttattggtatcaaacaactgcaattagtgatggggggactaaagcatccctaattgtggaaggatggtaatttatttacanaaactata

SEQ ID NO: 211581 - DNA, 725 bp, Homo Sapiens
  misc_feature (645)..(645): n is a, c, g, or t
ttttttttttttttttttggagctgggggatgtttactggtgtggggggacctgggaacatcactgtcgttcgtacatctctcgtaggatcttcatgctttctgagtaacgaagctggttccgatgagaggcctccttccacctctggcggatgcgtttccagcgctgcatgttgcgatagatgagtgtggagggtgagggctcgggctcagagggctcatcgtcaggggtgccctgcatctcaggctgcagtggagatgggatgcgggatctgcaggcatctccgggtggccccgggggtgtgggtggcggcagcttgtacacatcacgactcttgctgttggttacctctgagccctcctcatcctcaggcagcgggggcaggggtgagctgggagagcattcacgctcgcgcacagaggggctgttgcgcatccaggcgcggcagattgggtacagtggcgtgttctcgctgaactgggccaagtccacgctccggtcgaacagcttgatcacatatgtgttggatcgctgcggccctccctcagccagcccatcatccatctccctcctcttcttcctccgctggtgggggaagcgggcagatggcctgcgtagggagagggagtgtcaggactggggtangagctgggagcctctagtcagctggctgggaccctgcaccttacctttttgcagtggctgcgatggagcagtcctgtggg

SEQ ID NO: 211582 - DNA, 685 bp, Homo Sapiens
ttttttttttttttttttggtaaaaaatgtttatttaaattaaatatttgcaacaaattaatattgacaactgttccaaagtatgagttgttctttcaaaaaaacgaaacagtttagcttaatgtctgtgatactgttttatgagattattcatacatgctctggactgcgcatcagtcaatcatatcatcaacaatttactatttattaccaaatggcatataaagtaatagcataaagagtaatcataccttataagtgattttacaataggacatcttagaaggacaaaaaggatttatcaacaatacaaaacataagataaaaataataggagattatataaaacatatttcatacaggaaataatatgctaaaatcaaaaaaccaacaactgtctttcagcacactgttatgcatgctcctttaaaggaggtttgggggaaagatgaaaatattttgggggcaggggtccagggctcagaaacatttttggaatcacagtgagtttctgatttgcgggaagttgctctaaagcactggctgaggactttgcctgaggacctggctggtgaggaagacaaattctcacagcagctaaaggaagcatgcttgggataagtcaggggctgtttcagttagggaccagttcagcagtggaggaagagcagaaagaagagaaaaa

SEQ ID NO: 211583 - DNA, 746 bp, Homo Sapiens
ttttttttttttctttttaagagacaaggtcttgctatgttgctcaggctgatctcaaattctcaggctcaaaaaattctcccatctcagactcccaagtagctaggactacaggtgtgcaacaccatgcctgactaccacatatgatcttttaacagtaaacactatagttcttagaacatctgattgttccaagacatattcttcaacagatatgtaagacctaagctgcactgctgtgaaacctacactacccttttatgttcctcacctgaggggaaatcacagctgctcttcacatacaccataaataatactctattccatgcatatagggaacctaccgagtgtcaagcactggtggaaacaagaaggaataaggctcctgctgacattcctctctagtgagagaaataagatacacaaaaccacggagaaaaatatcagtgatagatccaataccactgacagattcaatccaatcagtgaccagtgatagatcagtgatagatccaactgaaaaataccagtgatagaaatatccaatcagtgatagatccaaacaaggatatgatggaaaacaactgcccgatgattttagatttgagagtgacacaaggcctcagagacgtgaaactgaagccaagaactaaaccccagaagacaagtaaagatcagagagaagagtagtgcacagacctgacacacaaagaagtttgtattggtcatagacaagagaaaagctc

SEQ ID NO: 211584 - DNA, 603 bp, Homo Sapiens
ttttttttttttttttttggaaacatccaagtcaaaaatttattcagacaagaatcgtcaaaggatgctaaacctaggaggggtagatttgatgaggaacagaattgtcaacaaggtctcaaagtttctcctcacaaattacccactaattgcaaaaggaaaaacaataacgatacactggagaaactggacatcttacccaagtgatcaaaattagcatcaccaataagggacaaatggacattctgtgcatctggatgtatacctgcaatacatatcacttacagcatttcaaccctcactgcactaccccaatctaaccatgaggaaacatcagaaaaacccaaatagaaggatactctatcctttagctgtcctgtatttttcaaatatattactattataaaaaacaaagaaaagctgaggaactgctccagattagagggttatggcaatacaacatatgatcctaggctggatcgtggagctgaaaaaaattaccaataaaacagcatatgaaattgaaatatggactgtaaagtattatggcaatgttaaatttctgaacttgatagctgtacttgggtaagacagcatgcttgt

SEQ ID NO: 211585 - DNA, 701 bp, Homo Sapiens
  misc_feature (607)..(607): n is a, c, g, or t
ttttttttttttttttttagatttttaaaaattcatttatttgcaaattacagtgaaaaatttctcttccagatgcatataaatccgaagtttttatcctagtgaagcgtacagaatgctattgttatgacatttaagtatcataacataatgtagctaataaagctttttaaaaattatggtaaagtgtatgtgaaatttaccattagtgacattgagtaccttcaccatgttgtgcaatcatccccaataagtagttccagaacattttcatcaccctagaaggaaactcctttttagcaatctctccccactcctttctctcagcttcttacaaccatttatctgctttctgtctccatggatttgcctattttggatatttcatataaatgcactcatgcaatacgttgccttttgtgtctgccttctttcacttggcaaaaatgcgctcaaggctcatccatgctttagcatgtatcagtccctcatttctctttatggctgaatattctattgtgccgtgtggagataccacaatttgtttattcattcatcagctgatggccatttgggttgtttcctcttttttggctactgtgactantgctgcgatgaatatttgcgtgaaagtttttgcttgaacacctgttttcagttcttttcagtatatgcccaggagtggacttgctgggtcatat

SEQ ID NO: 211586 - DNA, 680 bp, Homo Sapiens
  misc_feature (655)..(655): n is a, c, g, or t
ttttttttttttttttttcaatggaaatagtggatttttactgggtagcaggacctccgcgaccacccgctgcgcatgcgcttcacttgggcgtcacccggggaactgcgcctgcgcagtctctccccatccgaggtccgctccgcgagtgcgagcgcgcgccaggcccacccgggcgctgctcttcatgtccccgcggtcgaagacggccacatacgtccccaagaagacgtcaccgaggatccagaagggccctgcaggcggagggacatccagggcctggaaaccggacaagcagaggcggacgccatttcgagtagtctggatgacgtaatcatgggccgtgaggttaaaccagacccccccaagaaggaaggagactgcggggagctttgggatttccgagcacaggatgatgtactccccagccagcaaggggattcccccaatggctgcatgcagggcccggatctcctcagtgggtcctgtgatgagggacgtgcccgtatccaggatggcagcacagcccttggcacagagagtcagccctgggcccaccttcacacgctccatgtggatctgccagtaggcagggaccgtgactggcacgaaggtgaggggtgggatgtagtgtgccgggtccgagcccccaggnacagctctcctccatcaggctcttc

SEQ ID NO: 211587 - DNA, 723 bp, Homo Sapiens
  misc_feature (695)..(695): n is a, c, g, or t
ttttttttttttttttttgcatataaatgattctttatgcccttcccccatgcaatgggggatggagcagggggaactccccgccctcatgcagggaacgggaggtcaatgtatactagtcttattgccagatgccctgtggccatggggtggggaataggggtctacagcccctttcttctggcattggtcccccttcaccaagtcaccgtggtggagctggggggctggaggccctaggagctgaggtaaagacggttctctccagggaaggaaagctgctctccccgcctgcccaccggccgtctctggatgagtgggaggagctgccagcgggtactgaaatgtcatccaggtgtctctacccagtgggcagtgaggccagacaatgtctccagcttgaggctacccacacagatcctcggtgacgggggcagcatgccccaaacaccttgtccagctggtacctccagcagccatgagagttcttctctgactgatgcattgactcaagatccctgctcctggagtccagttcagactgtagtgaccctcatgacaacctctcggccagaatgggagctggaacgggcatctggtggccgcagctgcccaaggaggtgcaagattgtataaccgcagcgctgaggcaagagcgtccgcatgcgctgggcagctggggggcggctcgtggncccagaggtggggccgtccgtgagttct

SEQ ID NO: 211588 - DNA, 692 bp, Homo Sapiens
ttttttttttttttttttcattttcaaaaaggcttttattaaattctccccacacgatggctcctgcaatctgccacagctctggggcgtgtcctgtagggaaaggccctgttttccctgaggcggggctgggcttgtccatgggtccgcggagctggccgtgcttggcgccctggcgtgtgtctagctgcttcttgccgggcacagagctgcggggtctgggggcaccgggagctaagagcaggctctggtgcaggggtggaggcctgtctcttaaccgacaccctgaggtgctcctgagatgctgggtccaccctgagtggcacggggagcagctgtggccggtgctccttcctaggccagtcctggggaaactaagctcgggcccttctttgcaaagaccgaggatggggtgggtgtgggggactcatggggaatggcctgaggagctacgtgtgaaaagggcgccggtttgttggctgcagcggcctggagcgcctctctcctgagcctcagtttccctttccgtctaatgaagaacatgccgtctcggtgtctcagggctattaggacttgccctcaggaagtggccttggacgagcgtcatgttattttcacaactgtcctgcgacgttggcctgggcacgtcatggaatggcccatgtccctctgctgcgtggacgtcgcggtcg

SEQ ID NO: 211589 - DNA, 769 bp, Homo Sapiens
  misc_feature (281)..(281): n is a, c, g, or t
  misc_feature (686)..(686): n is a, c, g, or t
ttttttttttttttttttggggggaaaagccactttattaaagattctctatcacagtcccccatttctggaccagtcagattggctttgggttgaagtttctgattgtctttccttccagtttctctctttgtccatggctttctgagattcagtgtcctcgatggcatctggggaaaggtaggtgaccttggggtcctggaccaatgcagggtgagctggcagctggcagagggccaaggagtggccagccccacagcccacaaggagtcctgacgatnacagcagagcctgcaccggctttggggcccagacgttggcttcagtgccatctccgcacatgccatgctcattccagccccaagagtaacacactccaccaattattgccaaattatgctctgagccacaagagacctcagttgctccagttaagcaatgcggagatgaaggcatgctgttcggtggtcttgaacaggggagaaatgaatcttgcttttctagtttccagccttcataagtctccaacttcctccctagctgaccatagtctgctcggccccaggtaaacatcttgccagtttctgtctgagcaaccaggtgtgtccatccactccagatggcagtgaccttttcattctggaaacaatgtgcttctattttctggggcacaggaaggaaagcangctcattagccagttgcccatgcttgttgcttcccaaacatacacctctctgcatctgttaatgaagctgagtggtctgagcc

SEQ ID NO: 211590 - DNA, 776 bp, Homo Sapiens
  misc_feature (51)..(51): n is a, c, g, or t
  misc_feature (737)..(737): n is a, c, g, or t
ttttttttttttttttttaagaaagccaatatacgtgttttgttcataatntgaggaatcccacacacttctcaactaggtttaattaaatgcctacagggaatgaagatttttctgttatgaacctgtaaaaggattccaagaaatcaacatctttgctatttttttttcccagaaaccttaaccagaagacttaatccttggtaattaattaaattttcttgagtcctgacaggagagtctgaatcagaattaaattagaggccaaaccacctttaaattcaggaacaattataccttaacaatggaggcagaatgttagccataaaggataattagatatagaaatatctgatatgtggctaaaactgttcgtttttttgtttttttttttcaaaaagaccatgcccctgaaaggggactggtgttcacatgaataaaagcctcttaaactgatattataaaatataacttgtgatgaaataccttaatggttcagaaaagctgacttcagaccaggagagtaatagcgaatattagtgatgtgttttcatgaagagtttcttaccagtttcctatcagaagccaggccttttggctagagtaaatgaagacacgtttacagtgatttacttacagagggtcctgggggaacagtccgtccagcagcaccagggaaaccagtcataccctaagagccaagcacattagaattccacagtcaacatcaactccangaatttgggtaagatgggatttctttgttttggaaatca

SEQ ID NO: 211591 - DNA, 770 bp, Homo Sapiens
  misc_feature (745)..(746): n is a, c, g, or t
ttttttttttttttttttaaaagatttgaaggtatctttatttacttatttagattttttaaatcgaggtataacatatacaagtgtgcaaatcttaaccacacagcttgataaacacttgatgtatatacgtgcactctcaagagcaagatgtacagtgtttccagaaagctccctcctgcctccttccagtcataactcctaacaaggacagccactgtccttattaccatgttgtcatgtggcctgtttttgaatgtcacataaacagcatcatatagaatgtacccttttgtgtctggtttctttcactcaataatattaaattgtgagtttttttttaatgtgaagtctttcaacgtttagaaattcaatgacactctgttatacaggttttgtttgtttgtttgtttattgagacagagttttgctcttgttgcccaggctggagtgcagtggtgcaatcaggctcactgccacctccacctcccggattcaagtgattctcctgagcccaggaggtggcggctgcagtgagctgagatccatcactgaactccagcctgggctcagagcgagcctctgtcaatcaatcaatcaatcaatcaatcagtgtcttgtctgggcctaaattctctagaatacaatggaagagggaaagtgaaagaaggtggaagtaacccacagctgggagccctgaaccctgctggtggcaggtggctctcgtgtccctcacaggttgccnntgcatcacatgctgcatccttttt

SEQ ID NO: 211592 - DNA, 722 bp, Homo Sapiens
  misc_feature (676)..(676): n is a, c, g, or t
  misc_feature (686)..(686): n is a, c, g, or t
ttttttttttttttttttacagtcaaagtagtaaacttgcagatatatctaaaaccaattttcaaaccagcttcataacatatgctgtaagtaaataaataccaaaacctgataacactagcatggagaaaagaaaagctgaattaaaaagacattcctttacacaacttagtcaagacaaaatacacattactatgtgatgttacactaattattccaataattatttacttaagaagagggacaaaacagttttgttacattaaatctttctcttatttgccatccccacctttctactccattactgcctcctaatactttcccttcccaaggagattggagattaagaaatagcctctgcccctcaatctagaattaacttaccttttatttttacatacaaacactggatttcccagagtcgtcttttaaaggagttaagattctagctctggcaggaaagtcaagtgatttaatcacaaccatagttgtttctctactggtgtttaacatgtaccacataaactaactactaacatagccaattctaaggtcatttatgtgagatattaagactgaaaatacacttttaatttctgcctttttctccaatatataatccctttttaaagtctcttaactaaattagatgctggaattgatccagccaagntacaccttanaaaaaaaaaaagaggaagaagaagaaatcctcgtgc

SEQ ID NO: 211593 - DNA, 768 bp, Homo Sapiens
  misc_feature (716)..(716): n is a, c, g, or t
  misc_feature (726)..(726): n is a, c, g, or t
ttttttttttttttttttacagtctctgattttaatgagtcaatctcaaggcaaagctataaccttttccatgtgaaccttaaaacggaaatcctacgtgtttggctcagctaccatagacatgtcttgccccagagttccagtgtatttttcacctttagtttcttggctcctctccgcctctacaccagcctcatatccacacgggatgctctctgctgagtattgtcttgagttagttctccctctcatgttctggctgatgctactcatggtcatagtatcacctgacggggaaggagtatgctatgaaggtgaaaaatgctaccatagcattttgtttgtttataaaatgtcaggccctggttccatttttcccccctcttatatctaaattttgaaaccactggcctctaacagtctgtagtaggcttaagttcaaggtgccatttgcttctctggtgcctgtttgtgagccaaatagaggaagagtatgctagagagagcgctgaccaggaagatcacatcaaaccaacggtgatagaagttgaactgcagttctccaaggacttcagtgattatggtgcggtattctaaaggcatactcattcggatcagcagcacagaggagacaaagtacatgccctgtaagtcaaatgaattaatccagaagtgactctgaatgtagtgaggaacaggacaaaggaaattattanaattcttaanagtatcaagcacatttctgatattttacagctgtaaacataa

SEQ ID NO: 211594 - DNA, 785 bp, Homo Sapiens; identical to SEQ ID NO: 57853

SEQ ID NO: 211595 - DNA, 709 bp, Homo Sapiens
ttttttttttttttttttcgtttaatatctgtggattttatttgacttatgtctcaacatacaatatacacacataaagtacaagcagccaccgtaaaacatttttctgatgatatctctcattacttcaaatcctggtggaggaaggaggttcaagaatccatctcacaattaagacctcagggttgaagaggatcatcataaaaactatcagctgacaaccagctcttacacctgctctaccacacaatattattaatagttttctaatgaaaacaaaaatggatttcaggaaccatgctgacattattttttgcctgtttgttttcaatggagtcatctgaatggttctgtgttttgtttgtacaaaaaagaaataaggctgctatagtccagttagcatgtgaaaactctgccaagcacgaagatctcctcccagctcggatggattgctacctgggaaaatggaccgacccagggagtggcaggtcccaaggaagagggtcagtgaggctggacgtcacttgcactgttcgtggtctgtatagtcatccatgtccacatccgaatcaaagagtgagtgtccagtaaaatctgtgtctggggttctggaaaaactgttttctgctccctcatcttcagaggtctctgtccttgagtaaaagctaaaatccagcagcggggtgtgggttttgctgccttcgctgct

SEQ ID NO: 211596 - DNA, 673 bp, Homo Sapiens
ttttttttttttttttatattaacaaaaagttttttttttttaatcaaagtacataaaataaaggtggacacaactgtaagtgatcaccaaccaggggatgtttgggatttttagatgcattaaaagagagtatagagaatatccacctgcaagtaagattgtattcttttgcaaccctgcgattttcaaatggcaccccaacacagtctttggtcaggataagggatcctgcaggcctagccttaccgtccacatcaaatataggtggagggatgccatattctccacatttggagctctgtcaggctgctccctttccaccagtcctatccagtgatactgcagacaaagggtgaggcaacaggagacatcataccgatgttgatcaggagaggaagaaggtgcaatcttacttccaggatttcacatttggaagaatgccttgggagtggtgggtagcccaaggctgttcccaggaaaagaagcaggcacagggcccaggactcaggctccattttgacccaacgtttattgtccttttacaacatgtcattttttgggtttagaaactgcttgtgattagttttccaacattaactcaaaagcatgtaaaataaatcaacctactctctatataaacatccagcaactggtggccctacccacctaccc

SEQ ID NO: 211597 - DNA, 707 bp, Homo Sapiens
ttttttttttttttttttaaaatggccagatgtttattattttgttacattatttccattgcatattccacatctatttattttcacttttatttattatcattatttttcacaaaggtacaaggaatttcagaaacaacattaaaacaatcattcaaactgtttcaggcacggtttcaattaaaagcatagatttgatttctgacttcctgtttccttctatgatacaatctcaagttttgtttcaggaagcacaattattgtagcgttaaggtggatacctgccaaagctcatctcctagtgctgtcctcattctcagaaagttcctgagtcaacagaaaggggacgcccagggtatggaataaggagatgagagcatgctctgccaactggctgggacctgaatgtgctaggcaagttccactacatcagctcaagaacataaacaaaaatgtaatttaaaaaacagatggtttaaaaaaatatctgataaaaattacctatccctctcccttgctgtgaaataatttaaataatttattctagatgtaaaaataataatacaaaaaagtttgttcaaagacacctgtgtcctgtttgttaagtgtgcagtctgggtcccttggggtggagggagctggccaaggaatggcattgtgcagaggcaaccgggaactctctggatgcaacccaccctctacgcttg

SEQ ID NO: 211598 - DNA, 758 bp, Homo Sapiens
  misc_feature (735)..(735): n is a, c, g, or t
ttttttttttttttttttaaaaataattgttcttttatttctttggaaagtagtgggccctgccctatggattttcaggtcaaactagggtaatgaatgctcccctagtctttgggctggagcactatggtcccagctttcccagggcccagaagcaattcctgtattgtccaacccaagcaactaggacccaaattgtctgaaggctcctatcaggccttctctcctgaccacccacttcccaatctttcctggctttccctctgggcagggtatttttttcttctaaaaccagtgctggaacctgtgctgtgcagaagagaggacaagacgagggatgttcccaaattcccataagaggacacagcccctcagtcagtccttcctctctgctggcttcagtctgcactcctctgcaagcccccactgtgaggcttgaagatggacaagaggaccctcataaaagggaggtgagagaaaacacaccatcccaacccctcctcaggacatactccttgtagtctcttgtcctagttctcaagggagcccttcagacagggatggggaaggctaggtgagtgggcaagggccccctgaccccagccctgcgaggctataccaggggagtgtccattagccccatcagtgtggcatggccgtgatgcgcatgctctgggaagcgatagggtaagtcaccatgggagtggtggtgtggctcattgtgattccctgcangggttgggccatcgatacagcac

SEQ ID NO: 211599 - DNA, 656 bp, Homo Sapiens
tttttttttttttttattcgggggcagatttttattgcaaatatttactcaaaaactactatatacagcagagtattttaatcgccatttaaaacattgaacattcagtgaaacaaaatttaagaatccaaagcacattttaagaagtaaaaatgaagcattttaaataaaagtttattagtatttcaaagcaaactactgttcttcatattattcatttctatatctattatattctagatgataaaaagaactgaaaaatcaatttagcagccatcttatagataaattaggctaaatttccaaaaccagttcttttacatcactgttttaggtcccatttgaagtttttattttacaattacagaaaagtcacttaaacatggctgaatacatgccaggacatgttttcagtttactgctttacaatatctacattataccatactttggtttggcttccagaccatttttatgggcctatttctaaggaagatcattaaaacaatattaaaagcataatagctacaggagtttcaacaatgggtttctactttacattaatacaactaatacatcaaagaatttctacacagcttacacactgacaaaaagcacaaatataaatttatatcttaataattccactttcactg

SEQ ID NO: 211600 - DNA, 673 bp, Homo Sapiens
ttttttttttttttttctggtttaaatcatttatctccatgtagagatttgagtacaaaaataaacggcaacaaaacagaaggagtgtgaaatccggggatccacagggcttctgtcctccaccttccatgcagctgggggctgcatcctctgtggggtggcttcatcctctgtggggtctgtggggcctgctccaagtcatcagcattccatgcccacctggacctggtcccagactttcggggaagccctcagcctggggctcctggcacccccgttgcggctggggaagagaggtgtggaatccccagagaaagggaaggaaaggcatgaggggccttccctggggggaaggtcacaggctgggggctaagatgacggccaggaggctcagggccagccccaggctgagggcactgtgggcgagggcggtgcgggtgggtgcaacgttgtgcagcttctcattgcacaggtcctcctggcagcactgggtggagctggtgccgctgctgacctggccttgcagggtgtagctgggtgtgcacgactccgcacagtccttcttcaccagattccccctcagaggctccactgtgttcgtggtcttgcagaagcgagagctggccgggcagacacagaatgcttgcagttgctggagctggtgcacacgtgg

SEQ ID NO: 211601 - DNA, 663 bp, Homo Sapiens
tttttttttttttttgttcttactgtctttaatagtttcctaacactgccacagaagatatctgcttatatctcactgtctaaagttcagtcacatggccacaatctcaaggaaggctggggtactttaatctttattgagggcagtcatgtgcccagctaaaaccaggggttctattactaagaaagatacagctgccccccaccccaaaacaattcaataaaaatacaaataaacaatagtgtagtaactattttcatagcatttacacattcattattataagtaatgtagagatgatttaaagtatatggaagatgtgcaaaggttatatgcaaatactgtaatattttatataaatgacttgagcacctgcagattttggtatccctgagagttcctggaaccaatccccttcagataccaacgaataactgtacatgtttggtagagaactagttgtctctacctagtctccattctggtcacttctttagtttcctaatttcagagtaaggccagtctccttctgtgatggttaattttgtgtcaacttgagtgaaccaagggatgcccagatacctggtaaaacattatttccacgtgtgttggtgagggtgtttctggaagtcattgacatttctactggtagactgagtaaag

SEQ ID NO: 211602 - DNA, 718 bp, Homo Sapiens; identical to SEQ ID NO: 57860

SEQ ID NO: 211603 - DNA, 756 bp, Homo Sapiens
  misc_feature (20)..(20): n is a, c, g, or t
ttttttttttttttttttanattttgttaacatttttattggtacgtgctctcagtacaacaaacagcatcagtagtgtacactttgataaaaaggaatttttagcttagtagaaaagaaagcccaaaggtcagaagtataatgaatatgtacatctttatggaaactgtttgtgtgaccatctttatcttcccctgtggatgagatgtatgcacacacaagtaaactagagagaattttattctatgggaatttttaggaaaaaaaaaagacttaaggcttagggattgttttactatctggaatttgcctaatttgaccttcaaagttcttgcacaaagtagcagcaattctttagaggtatagagtcaatagtttaagctgttagtttacaacgattaaaatgcaaaagttcttgcacattctgtgctttgagaggttaattcatctacattttagtttgtataatatatttttagacagctcaggtactgacctcaaaatcattatgctgatatcactatctcctctcatgtacatgtaattcatgatgcacttatctctttcaaaaacttttaaaaatgtttctaattcacaatttcattgaacagctagctgagtccatacaatttaatgtttccttgaagggaaacaagtcatcaacttaatatcaactactaaaaatgcaagatgtttgcataacatcaaatttgttcagttttagcttttgagttggctgtagtagtttgcttaaag

SEQ ID NO: 211604 - DNA, 697 bp, Homo Sapiens
ttttttttttttttttttgaaatgtttaaagttaaagtttatttgtattctttgtaggaatatcaataaaagacctcaaacgtatctatatctgtacatgtacaagaactgtcaaaaattattcacagaacaaaaataaatcttctttagaacaaacccaggtaatgaaatgctgatacggatctcacatacggaataatctaaatgctactagcacaaaaatatggctttaaaaataaaataaaatcttgggttttgtttttctaaggtgtatttctctttcttgaaataaaaaataaattatttagagctatcattgtaaaatagtcgtgtgttaacacactcttattaaggccctggagatgaaaaacaaaatcaaatttagaaggtcatttcctcacaggtgtaactcaggttaatgtgctgctgtctgcttaagttaatataactaggaaatgtctaagcaccagtcaaaatttaacctaatttactatttaactttcctgaaggtggtcattgagtcaattagtatttaaccttttgttgaactgggaattgaaatgtttccctcgaaaatttgggaatcacataaaatgatatttacacataaatatctgtacccccacaaagatgatggagggtcctaaaacacaacttctgtggaaatctctctacaacaacaaataaatctggtttt

SEQ ID NO: 211605 - DNA, 748 bp, Homo Sapiens
  misc_feature (66)..(66): n is a, c, g, or t
  misc_feature (681)..(681): n is a, c, g, or t
ttttttttttttttttttcaatccataggatagatatcctgctataaaaatataaaaaagtccccntaagatatttatctcataacatcacgtctttgctcaaaaatgtcagtgcctgcttccatttgaaaatgcctgatttagaatagctagcatgatgtgcacatagttaacattcagtgtcaaaatatgagcgcccttactaacctgaacctgtcttctcagtctcccctacgctccctacaaaatctgtgtttcagcccttattctctaaacattctccctcctctttcattcttgtgctttcatcacaatgcttgatacaagataagcatgcaataaatatttactcagagaatgaataagtgcccaatgttggctattaaattttaccaatccttcaagaagtgaagattttgtatatttctataaaagctttcttgatcctgctagtgaaggaatatgattcttcctctccttcccttgcaacactacagcattttaattgtacctccttacgaggagttaaccaacagagcagactattactagtgtattattttcatcctgagaatagggtcagttttttaaaaatatccttctaacccttgttgcacccagtagactgccttgcatatgaacaccagtcaactaatatgcctcaaatagtagcaacaatanagcttagcttgattctaaactcactgctggttttagcactctgcaattttaagtattacctcgtgcc

SEQ ID NO: 211606 - DNA, 687 bp, Homo Sapiens
ttttttttttttttttttggaggtttgtgagtcggtttgttttcttcatttcagatattcgagtcatggaactttttcaaagaactgaagggggattcccggtgatttttccaccccatacagatgaagacatcaaagggccccgccgcagtgacgaagacaaaagcatgaacagatctgggtccaaagaggctcggcaggtgcggtgggcacgagggagcgacccccgggtggccgagggactgagggatgcgcgtccagccccggagggcggcgtccacctgaccccccagcccgagccgccgccgccgcctcccagcccggcctgcgctgccccctggcggtggggccaggagccatcccagcctctaagcccccgaccctacctcggcccccggggctgccgcggaagggcccccaaagcctgctcatagccaagggacaggtatgtggccaaggccccccacagccctgaactggagtgtgtctgaggctccggcaggggccccctcacttgggcgcggagccctgggagtggagagagcggaccccacacctggggccggaccagcctggggtggcagaaagggagtccgggtctgtgggtttgatgagggcagagggaggggcatgcgtcctggtaagtcgggtgctgcggaggtgaggtggttccattttggaaactga

SEQ ID NO: 211607 - DNA, 679 bp, Homo Sapiens
tttttttttttttcttttctccaaaaggtgtttaattttatggagatgttgaaaggtacatgccaaatctgagtatacgtgtgaaaataatatgaaagaggagcaaatactaaaccttgtatatcaagtttacatggggaaaaaaacattagataaataaatacatttacatgcctctttaagaaatagccctttggcccacaggatatactgtttgaaaatggaaagttattactaaaaagtctgctataatttattttagtcttgcacttaacagtcccactttcacatagttcaaaatcaggatatgtggatcttgattgggccttaagatgtcagttttgaagggctcagtcagctgcgtgatactaagatgggccctttgaatctttaggaaagttcatccatttttagtcaataaaattggtgtactgtcaagtataagatttcttgaagtaagccacttgaaccattgtgaagctacacataacttgatgtctgaatgaggttaaaaatgggtgtataagtctttaatacagtaaaccatgctattaacccaacatctgttttataaagaagcaagtttaacctgctttgcagtcttaatttctgttaatgtgcaactttaccatgctaagacattagtaaatttataaattttcttgttgaacagcagctt

SEQ ID NO: 211608 - DNA, 804 bp, Homo Sapiens
  misc_feature (694)..(694): n is a, c, g, or t
  misc_feature (764)..(764): n is a, c, g, or t
  misc_feature (775)..(776): n is a, c, g, or t
ttttttttttttttttgtataagcccctatttatttagaatctatattttcgaaagaatatgccttaacaaaaggaggtagtattctgaaagaggcaaactcactaaatctaggtagagataaagattacgtggaaactaaacaaatgtaacatattaataactgtgacacttattaaagtattttgatattaatgaatcagcttttaaaatcaaggctatcttatcactttagctatatgattacagctctttcaagtagttttcctttggtactagaaagtcatttttctaaagagcattaacatttcaaataagcaaattttatttaaagatgtaaacatgtaaacattaaaaactcaactaaattttatctttattatgatggtcactgatttaaactattaatgaaaatatgtcatgtcagagatataaagaagaatatatcacccagatagtaacatgcaattaatttccatttgattaatataattggtgatttaacacacatacatatatacacagtagtttggagcaatatataggcaaaacaccataataatttatgcacagtatttaagaatgtgggccttgataacagaattccaacaagattttttttagtgtattaaatgtaattggataaaatacaattaaaagcagcagtgaatatatttcctatctcaataacttanaaaaacttctttatgtaaactttatacatgtgcattcttgctcttttctatatgttttacagttcttggntcttcttttannatagtatttgccactcttctaaattttt

SEQ ID NO: 211609 - DNA, 700 bp, Homo Sapiens
  misc_feature (656)..(656): n is a, c, g, or t
tttttttttttttttcttattcaaaacaatattatttaatttaatattttcacctatgagaggtaatgaatgcagaaatatagtctccattatagcagacaggaaaaaatacattatcctactattttctagaaaaatgattgtggcattagcaaatcaaatggaaaaagtgaataagcagactgagattacctgaaaatagttagttgctagtaagattcagtacaatgtatgtttattaaataatcgctactagaacaaacatctgcgacaactatgaagttaggaaatgctgtattagcttgaacagtttatctgttggtcacattaataagtgactcagaaatattacaagtatggaaaggcatgatagtgaacaatgccacatgagtccattaagcaaaaatagataatggcccctatatcttagaacagactcacttattcattggtatgaataatttagctctaaaaagaaaaatccaaaagaagcgaagactaactgtggaaaggactttgaacttttccttttagaaagttaaaaaaaagaaaaaagtgtacatgactaccacagcttgacaactaccatgtggcacattttatatgacatgagaaaaaatggtcaaaagatctcaactttctggaagtcaactcanaagctgagggcaactagcatttttggattttacagtatagaatg

SEQ ID NO: 211610 - DNA, 671 bp, Homo Sapiens
ttttttttttttttttttaaattcctttaacttttattaacagttctgacctctatgaagataaaatatatgcagtgcactagttttagtcactggtgacatttttaattgcgcttgcaaaggagggaggaagaacgcttctcaatacacttatcacaccttttctcctacgtgttaaaactctaccaagcaatgcaaaagatacagcactccacttttctttcttcacagaatcccatcatgttcatcttgaaaggtgtttttctaaatcttcttaatactcacttggaaaaagcatttcttctgttaatctccttttgggaagaagcagaagttgtgctaaaacttctcctaaaaccaggataagaatggttctgtttatttgaagaaatttctgaaagggtatccagggaatctgttactctttgcaccctggatgggggagcaaatattccatatcttggagaacagctaaaatactgcacacctccaactgaaccatcattcttgccatggggtttttcaagctctataccataccaatatcctggagcgaagtttgttgtcccaaagaacctaatggtgcccagtctctgtcctaccactaacactctctctccgaggcggagttccccctcgcaacggctattatttgctgtagatgttgctga

SEQ ID NO: 211611 - DNA, 555 bp, Homo Sapiens
tttttttttttttttttagggtttgtggcacataatttgtttaatccagattggatacatcaggtacagcagtggcacacgactcaatactgtaaatgatatacatgttttaacatatgcactacagtttcaaaagaagacgacaggaaactcaagggtgtttttttttttcatagaaagttttcatgttttatcttcctgcagttttgtacagtatatttcttctttgccattgtgatgttgataagcaaagcccatttattatacgaaaatagaaaagaacacacttgatgtatctcacgatgacattaatggggggaagggtgtgacctctaaggaaaacattacattggaatgtctgattatcaaaaatataccatccctcccacctcccaggtttgtaaaatagtccattggtccaaggagccccccaggacttgggtcagtgccgtacactggttagagtgacatcatccagtgtagttgagtaacctgctaagataaatgtcattcccacacttgagaaaaaacacagaacattctgaatagaaaaca

SEQ ID NO: 211612 - DNA, 490 bp, Homo Sapiens
ttttttttttttttttttaaaattatgagatacttttttatatatgctacattaacaataaaaacattgcaaagggaagtaatactcaagagaatatcatcattttggaaaatacctggcattattttgcaaaacttgacaagccaacaactccactcttacgcataaagtctcttgcatatgtgtaccaggggacagtcaaggatgttttgagtgtactgtttctaccaacaaaaactaaaaacaaatgtcaactgataggaaaatgaacacttaaattgtggtatactcacacagaatactatagagcaagtaaaccatccatgcatataagcgcaagaatgaattttaaacataaactcaaaaaagcaagttgagtaagacttcacattcagacactatatgtagaaagcttcaaaaaatgaaacagtatgtttggagaacatacatgtgtgattaaaaaatggcaagggacaataaaaaatgacat

SEQ ID NO: 211613 - DNA, 406 bp, Homo Sapiens
ttttttttttttttttttgggattgaagcaatggctaaatttattttaaaatatgtaatgcctacaataccacacatatagttaatgaaaattctgaagaaatacaagctggcatagtcaaagcacctaggctagaaacagcaaatgattcggatgacatgggctaaaagataacaaggaatcattttctataagcattaacaataaggaagacaaaaaattttagcaagagtcaacatcaagaagataaaaataatagtaatgacaaagaaagagccagagagcagacaaagtatcaagacttgagtcttaagggatgtcagggaagtattgagatctcatcctccccagccactgttccagtgttcatattgacagcaaaactcctcaaaagagctgaagggga

SEQ ID NO: 211614 - DNA, 422 bp, Homo Sapiens
ttttttttttttttttttgacgtttccatttactttggattatatgtcattataaatattaacaaataagacttaaaaaggacaccttcgggtaggtcagaccaaaatacaaaacttgtctgtgggactgcagtttgaggacagtgtctgcagccgtcacatggcagcaaaacggggttaagcagtgcacgagagtctgcgtcgacgacagccagagtccatgcatcgggaggttcactcggtttgcgaaggaacaacgggctcggcatgcacggcccgggctcggcgggcggacgggccggggcgcagttccccgcgctcgccactagaggtcaggaggtgaccgcttcggggctggaagacgggcccgtcggggattggcgcaagcggcgggcggggcggcgggcggggcggcgctggag

SEQ ID NO: 211615 - DNA, 535 bp, Homo Sapiens
  misc_feature (439)..(439): n is a, c, g, or t
ttttttttttttttttttataatgcgaatactttattatcgagtgactggtattagctttttgtctgggcattaatatctcaaaaaccatacaccaaacccaggcttttccacctagctctgctgtatcattttctttatatatatatataaaaagtaaggaagaggaaggaggaagagaaagaaaatatatctgtattgaaagaattataagccaaagtgcgtctttcttgttttgtccatatacacacattgcaccatacataaataattacattgtaaaaatgactccataattacaagtataatatatatttccatataatatataaaactttatattaaatctaggtagatgatatctggggggttttgtccgtgggggctgtgtctctgggcatcggcccctctcgaggccggcaggtggcggtggccgcggnctcccacccgcccctcccgccggggccgccactatctggggttgttgaggaggatctccagccagcaggggcaggaggtgatgaactgccgggagt

SEQ ID NO: 211616 - DNA, 520 bp, Homo Sapiens
ttttttttttttttttttcataccaatgacttttatttaagatgatttatgagttgatgtgtgagaagggttggtgaagctatgtgggtggctctttaaataccttccattatattttcaaatttttctttattctattaaaataccttttattctctttattcccataaaaaggcaaccaagcagattatactctcaactaagatgccagcagtaattggggtatgatgcaagtcatcttggagcagctacataccctgcccactgcagtcagtcagcatctgcagttgctttttatagctgtttttacccccaaccccgcccccatccacatcctgaaatggtgaattggggctcaaagaaaaaaaccaaaacagtagcatctgatgtcatgaggcagaagcagagtattattcaggccctttttcaaacaggggagccatgtgtgcttctccatgttcttctttcctagagctcctttcttcctctactttctttcgggattttatctccatcctca

SEQ ID NO: 211617 - DNA, 265 bp, Homo Sapiens
ttttttttttttttttttccagagccacattttattccaggatgcgacacggggcggcggatgcctggcctcggaaaccccctccctgcctatgagggcttgtccagggctcccctggaacacagctcagccaggcaaggctgggagagggctgggccccccaggtgacctgcagacgcctcccccacctacatgccccacgcaaggggagccctggagcccggcctgccttgacaggaaggagataggtgaaaaataaatacac

SEQ ID NO: 211618 - DNA, 618 bp, Homo Sapiens
  misc_feature (397)..(397): n is a, c, g, or t
ttttttttttttttttttgcggtaattgttatttacaaatcccacctttttttctctttgcttgttatcgattaaggcctggtttgaatctgagcaaatgggtaggataccatagaaattgttcaggtgttatgtcacagactggcacaagactacacctgcatcctttacaaaaggaacaagggggtgggggaacagccagggagaggtggaaaggaagcacaacaggacaacgggaatgacaaatcttttgtttgccagtgtacactgcagatgcatgcagacctctctggtactccccaacacccccccaaaagcagcaacatattatatgaaagatttctaccaatgtgtcttctatttaaaaacagtgatcaaagcaagtaccactcttggncttctcgtaggaacaaatgattctgaggtggcagacggagacatcacatcccagtgttctcaaagtattaaggggactggctgaaatgcaagcaatatgctttttcagcttctgttctgtggacaaaataacagaaacaactcttgcttatggtttgtgtattagaatccttctggacctggaggagtgaaagtcaattccatttttcaactgttcacctc

SEQ ID NO: 211619 - DNA, 651 bp, Homo Sapiens
ttttttttttttttttttacttagtattagcatttgttgaaaaaataaatggccaaagtgctttaattttcatttagaatgaaataatctggcttacctttgactaattaaagaaaatatagggtaatacaattgttcaaaatctaacacaaataggagcgtttactatttttgtctgctttaagattttaacttgatcgaaaataccaacatccccaaacaaaatttactgacctgacatcagcttactatagactgaatacactttcaacatcagtccttagctacctcaaataatgacacaaagtcttagtttcttttgcataaggatcaagatcaagctatttttaaaacaatttaaatggtctcaaaacattctccaacttaagtgcaaatttgagtacacataatatttccaaagagtagaactgtttttagattatctttggattctaataaccattttgtccatttttaaataaattacaaaaaataacagttcagtgttttttttcttcaaattttcctaggcctttgttatggcaacacaatatatacttaacaggccagcttgcaaccagtactcagtacaaatcaaaggatgattgaagcctccaatatgattgaagcccttgtaaccacagctccccc

SEQ ID NO: 211620 - DNA, 605 bp, Homo Sapiens
ttttttttttttttttttcaggttgtttgttttgttttatatatgcttttaaaattcattagcaaatgacattctcatgcacacgagtgtttcaaacacaagaagcaagtccatttataggtagtccaagcaatatttgtgtgtgtgtgtgtgtgtgtgtgtgtgtgtgtgtgtgtgtgtgtgtgaatagctgcagactgaatggaacattgagacttttgtgcagtccatagcattgacatcagctcatttctggatgtcgcactgcagaagtaatacaatggaagggtcgctctttgcagcttctttgaattcatccagtgtaatctggtcatctttgttcttatccatcttgctgaaaatcttgtctactcgctgctcaggcgtcaggccatcctcattcattttcatcatgatcacagtgcctaccattttgtagatagcctcgatgatctccagcatctccactcgggtgatcttgccatcaccatccaggtcatacatattgaaggcccagttcagcttctgctcaaagctgcccctggaggtgatggacagagcgcaaatgaactctcggaagtcaatggtgccgtccccattcttgt

SEQ ID NO: 211621 - DNA, 671 bp, Homo Sapiens
  misc_feature (633)..(633): n is a, c, g, or t
  misc_feature (663)..(663): n is a, c, g, or t
ttttttttttttttttttcatcatttaacgagcatttattgcacacgtctgttcaagcaccaggctcaggctggaaaccatccaaagcgcaatccctgacctcaggcagctcacagtccagtggggaagccgagaagcaaattaatgactctgaagaagcgcaggcaagtgctatgatcaaggcatgtgtgtgggtagggtgtctgggaaccccaaagtcagcctcaggtggggaggtaagtcaaggaagggtgaggggactgggctcagcctgggtctcggaggagagcggggccagccccggggatggtagagtcaacctgccaggcactgtgcactgctggccaggcccggccaatgagagcacaacttgttcagggtccaggaagcaaccccaggagaacaaagcctcgtggggagggaggaacctggagggtggaaggagtttgggcttttcctgaaggtgatgagagccactgaaggattctgggggaggagacatagggttatcctgggtcatgggggagagagctttgaaaggcagggaggtgggaggccgcagggactctcagaagtggagtctcagagctccttaagaggtgaaggcagccgggcgcggtggctcacgcctgntatcccagcactttgagaggccgcctcgtngcgaattc

SEQ ID NO: 211622 - DNA, 607 bp, Homo Sapiens
ttttttttttttttttttgaagtctctcaacatttcatttttaatttttctaatagtacattctttaaaagaagttaacgacttcaattccaaatataaggattaaataatgcaatgaaaagctgtcattttcagtgaagctattgcctaattaccctggaaaaaagtattcttatgactgaactgatgcaaaaatcccttagaaaagcttcatttgttgcctgtaaagagtcttcttaaggtcacttttacttctagactgcccccttgtttccagtgaaagagttttgcttggtaatggcttgtggttccacagtgttttgtgtatgaaaagcgtagactaagagatactactgaagtcgctcaaattgtagattctgccatgaaaggaagtcccaacactgtaacatttccccttaatcttcagcaagacacatgaaaaaaaaaaaaaactcaagtcccaactgaatctttactttgatcatcacttccagcggcattcagaggctgctgtgcggtcagacacagagctccctcgaggcccctgtgtgcttatgaagtacctgcaggttctgagcgtcggcgccagcccgggccaggggtctgc

SEQ ID NO: 211623 - DNA, 656 bp, Homo Sapiens
  misc_feature (633)..(633): n is a, c, g, or t
gtttttttatttttgtatttaaggctgaaggacagtttcaataaacatgtcttcttcccagagggatttcaaagaaagatcgtttttgcatgtcatataggggagaatgaggacatgagacaccaagaagatgaagttttcaggagcagaggagaaactttacaccaacatgtctgaacttcattgactcactacctggagccattttttagctgttgagttaagaaacagaaaaaggagcctggggcttctgactctttcaccaggcttaggggagtgagaggagggtttagacacgggtagggcctcttggccccttggtgcagccccgctgagccatctcctcctttggctgggtgactcctttctgctgccttgacaactcctggaggagaaacagatggggcctctgggctcctcccagccctgtagggtggggctcctgccctccttcttgaagtttacctgttgctgccacaagttctgctcccttcgtctttcctttgaatcctgggtggtgcaggaactagccttgttcagtggacttggggagaactggaggggaaattcgctgtgttttctgttaagccagcactgaccccaacaactcccctctctagtccaacttcccanaagtctaaactcctcgtgccgaa

SEQ ID NO: 211624 - DNA, 306 bp, Homo Sapiens
ttttttttttttttttttaaaagacttaaagcaattttattcatgaaaatatgctgtacaatgcactctacacagcctcgacacggcacacacgcacacgcacactctgacggcacggccacggtacactgcctacgatacgcgccggggacgccgcgcccaccgcccgtcccggccggacacttataaatatgggagaagggccagaactggcgcggagaaaggggcgtcggggttgggggtggacggggctgaggcccgctggagaagctgagaccagtactagggggtgggggcggttgaaga

SEQ ID NO: 211625 - DNA, 394 bp, Homo Sapiens
ttttttttttttttttttgcctatgttaatgtaaatatttcaaatcttaccatccaggaaaaaaaaaaaaatctccaaattgcactgtaaccagggagatataagaatctggtcttaggtgtggggagtactcttccattaataaacaaaaggcctactgtattattaactaagagaaagtataatgtgaatcatgttaacattctaaaataacagaaagttaggaccatactagcaatgtgaactgtgcctgtttgaaaagaaaatttaaatactcaggcactaagcattagcctacctgaaactctaggatgaagtctagtgctgtattctttcttagaaaatagcaacacagagtaatagtaaataaacccaggtattcacccctcgtgcc

SEQ ID NO: 211626 - DNA, 652 bp, Homo Sapiens
  misc_feature (615)..(615): n is a, c, g, or t
ttttttttttttttttttaccttgatgagtctttattttaggaagcatattattagcttttgattttaagaggaatttactccttgctttccctgttttggggaaaatgaggagagctgcctccaaatcagggaattatattgacacaggtagatatagggaatggaactgaatgaacccaaggtgttacattttgtttcactacacatgagggagaagaataagccctgctatagtgttggccagagcactgcgactgacgccacaggctgggttaccagttaaagtctcagtgtgactacttggacacctatttttgtttagacacactattcaaagggctgcatgggaaccagaagcttggcctcttctgataaatgcctggtacctgctatgtaaaagagctggaggtttctgttctttttgaactgacagaggaaagaggaagacaaggctggtggccttgggtagggctttcgtagttgcacagtactgggcaattcttagccttcccttggttctagccttgattagagatagtcttttttagtgtcattatgttgcccagagtggttctgaattccttgcctcaggcggtcctccgcctcagcctcncaaaatggtgggattacaggtgagcgccacagtgcct

SEQ ID NO: 211627 - DNA, 555 bp, Homo Sapiens
ttttttttttttttttttggtttctgatctccagttggtgcagattatgttggcagccggtgactgcagaaaaaataaaaatatcaaaacagaaaaaaaacaaggccctccccaaaccaaatgacttaaaaaacaaaacccatatggcgaggaatggagagaggatcctattgtcttggaggcccatggaatctacttccgtctatgaaacgttctccgaaaagagcatcgctcgctggctggctgggacagctctgttctctgtgtttcctacttctgtgtacattctcgggttcaagtttgcttggattttgaccttttttttaatgtttaataaaaaaagcagtgtctgctgccatgttgcgtctctttctctctttgtctctgtatgcctctgtctctgtgcttgtagctgttccttggagcgcggtgtggtgttcttgatgtagtgagctcaagtctgcggctgtttctggggacgtggtggaggctgcatgttctgttctctccaggaagagctagtggttttctaccctgtgtgttggtgagcaatgt

SEQ ID NO: 211628 - DNA, 576 bp, Homo Sapiens
ttttttttttttttttctcttactcctcagggatccttgttctgatgcctggtattttctgaggctaaatgtaaagaagggttaattatcacctgctgtgctggcctggggactaactgggtcatgctgagatcctacggaagcagcagaactatagttaccaaagtgagttctgaagcttactttttgttttaaatggctttttaagattatgctgcattttagatatacctaagactattttaacatacgtgtaaattttcatgcctaacaataaacataggtctatttgccactagaactagaattgcactatccaatatgagttactagccatatgtgcccgcttaaacttaaagagaattaaaaattcagttcctcagtcacacaagccactctctggagtgctcaatagccacagaaagctggtagctactatactgaacagcaccgatatggaacatttccattgttgcaaaaagatctactggacactgctgaactagagcattacctatatcactgtatttgccgtgtgaattccttccttctctggcctcctacccagatgaaacc

SEQ ID NO: 211629 - DNA, 769 bp, Homo Sapiens
  misc_feature (631)..(631): n is a, c, g, or t
  misc_feature (718)..(718): n is a, c, g, or t
ttttttttttttttttttgaggcagggtcttgctctgtctcccaggctcactgcagcctcaacgttttgagctgaagtgatcctctcgcctctgtttccccaccccatttgtattaatccttcatacaattagtgtttctactaatgtagattattgaaaattagatattgaattaaagctaatatatgagaagttatattgacaaagaaattgttacatatgtaatttccagaatagtaactcaggagttcaaagtcttccattttacttgagaaaaatgaatagtaaatgtctctaaacaggcagcatacagattcagtgaaaagtttgaattgtgagcaatgacatcactgaattgctttggatataatttagcttttaataactacacattagttataattctgtgcagttttaatttataacactagatggcacctgttatataattcagttttaaattgtagttcaaactacctaaaacgttttttatttttgtgcttaatagtagtacttctatgctttaaacaaacaaaaaatatgtttttctgttattttgaagacaaaattatttttgcttggttgcattcttggacagacagctctggcatccgatgaagtgatcttagntgtctgctcatttatttatctgcttttagcaagaatcacataacttttatttctaagagacagttgttaggcagttgttgcaaatanatgatgtagctggacattttaaatgtatgctctggaatgagtcactttttt

SEQ ID NO: 211630 - DNA, 674 bp, Homo Sapiens
  misc_feature (579)..(579): n is a, c, g, or t
  misc_feature (602)..(602): n is a, c, g, or t
ttttttttttttttttttccgagcaggaatatccactttatttggactccatgacaccgttcctatgcccttgactagatgtgaatgtattatacattgttctagatttgggggaaaaaaatctcttatgacataaaattggtagggaatgggtttatcagaaaggggatacaaaacataccctaagctccaaatcattcacttcttcttgggtaaagagctaactgaatgaaagaaattgatttaacacttaaattagacaccaaccacctttattggctgccaccctaaattagttttccttaaaacagtaatatttcacttttactgttttttttttccattaaagcaacaccattgtgctgcaaaactaactctatgcaattaagtacctgatacatgttttctgcttttaacaagtgatagaaaaggttacatcatctcattaagaaaacattttccttagacatttcgtttggttttggttttctgttgaaagagttatagcagatggctatttcaaagattggttctttctcctttcacaagtcgagctcgaaacatccaaatatccttcangttcacgctattttcagctccanagaatttatgtgctattcctacaacttccttctcgatgttttcttgactggtgccttcacgtcaatgtagtg

SEQ ID NO: 211631 - DNA, 599 bp, Homo Sapiens
ttttttttttttttttttgaagtcactttgatttctttaaaaaacatcttttcaatgaaatgtgttaccatttcatatccattgaagccgaaatctgcataaggaagcccactttatctaaatgatattagccaggatccttggtgtcctaggagaaacagacaagcaaaacaaagtgaaaaccgaatggattaacttttgcaaaccaagggagatttcttagcaaatgagtctaacaaatatgacatctgtctttggcacttttgttgatgtttatttcagaatgttgtgtgattcatttcaagcaacaacatggttgtattttgttgtgttaaaagtacttttcttgatttttgaatgtatttgtttcagcagaagtcattttattggatttttctaacccgtgttaacaccattgaatgtgtatttcttaagaaaataccaccctcttgtgcccttaaaagcattactttaactggtagggaacgccagaaacttttcagtccagctattcattagatagtacttgaagatatgtataaatattacaaagaatacaaatatattactgtctctttagtatgggtttcagtgcaatt

SEQ ID NO: 211632 - DNA, 614 bp, Homo Sapiens
ttttttttttttttttttaatattgcaattatgtttattaaaaaagtgtaaaatgggaagactgtgcatcggtctgagtaaagtggcgaacttgagcctccccggcctgggtgcggggccagctaagccacacccctgcgccccccacacccctgcacacacctgcacccacaaccacctccacctgcgtgtgcccccaccagagcgagcgtccaggtgtgggggtggggtggttccaggacctgcctctgtggggctcccatccaaacagcacagcgtggaataaaaaaccaaaatgccttccccagagtggccctaacctgtccctggcacccaccagtggccccaccagggtggtcccggcaatgtggacagggtctccggaaggcaggcctatgcatctgtgtgtggggggactcctgggccactcggggctccctggctgctcctccaaacctgcccactcactgctgctggggtgtgactgtccagggcccccacaggccctcccaccctaaatccatccatcccccatggcaagtggaggccggacagggggtgacacggcaagatggccaggagtgcgtcgcacagcagaagctgcatttggcttt

SEQ ID NO: 211633 - DNA, 677 bp, Homo Sapiens
ttttttttttttttttttccagagaatgaaacatgctttatgccctgaggtgatcagggtagacttgagcaggggcccagcattcacactgcaatatagaaaagtggtctgtctccctcatcccacctgcagatccagtcccttcggtttcagagtattcaatgcacatttggttgttcaaagtatggagagctagattgtcctcttgattcctctatcccagtggtacacagaaagtcaaaggaagttgcatggtggggctggtctgaaacaggagacacatctaaggatcacaggctctcacaaccgggaaggccacagcaaactaggattagaccaacccaggtgccagaggggtggatggagggaagttctgcatcccagagagatgcctcactggaagaacatcagaggcccagttggtatagtcagtggtggctggccagcccagcctcgctgccgggatggcataagtcttccccagctgcaggggtagctgatgggcctgaacccactgctgcctcgagagcaggcatggaaccagcacctccccgtgactgttcacttgccgctcctggagccccgctgtttgctcatggctgtgagcatctggctaatgtaggaagtcaggaggtcatccatcttgtagcccagtgacgtctcgcagagcagtttgc

SEQ ID NO: 211634 - DNA, 641 bp, Homo Sapiens
ttttttttttttttttttagctgcgtccccagaaccgggagacttaaggcatctttattgcgggatcctcacacggcctcctgggcccggcgatactcatagacgctgccgtgctcgggaaaggccagtgcttgcgggggcgaccccggcggtggggcggggtcctccgggtccccatagccaccgccgccgggcgtgtggagacagaacacatccccggggtacacggtcaccgacgtcttgccgcccagattcaccgtccggccgtttttgcggatcagcaggtttaggccgcgggcgccaggctcgcccccgtggagcccgtatggccggaaggcgcggcgctcggtcagcactgacagcagcgcctcctcacgaaagagcagctcgcgggtgacgccgtcgccgcctcggaagcggcctctgccccccgagccccgccgcagctcgaagcggcgcaggatgaccgggtaccggctctccaggatctcagggtcggtgatgcgtgtgttggtcatgtggctgtgcacaccgctgcgcccgtgccagctgggacccgcgcccgcgccgcccgccaccgtctcgtagtagcccatgtgggcgttgcccagggtcacgttgttcatgcagccctgggaggc

SEQ ID NO: 211635 - DNA, 752 bp, Homo Sapiens
ttttttttttttttttttgttcaaattctccatggagaatatttttatttatttatattcttcttgcatactctaaaacgcacagtgtgaatttcccttcttcaaaaacagttgtgagcctggtcactttatctgagatcttcagaaggtcttcggaaatgttgccttaggtttcagctaagcgagtcacagagattggtcatcaactactacaaaattacaggagatctagttattatccaacagttgctagaaaagcattgagaacaccagacgtacagccagacagagagcgtaagagaagagcagatgctatttaagtaacaggatttccatatatatgactttatgtacaatcttagaattctcttacagacagtaaaatgcttaaatcattattttaagggcactctaatataaatacaaatctcactaattttaatcttttctctttggctcacaaatgcacgaaaataccataaacagttttcagaacttacttcatatataaataagatacattacaaatgggaagaaaatacaagacgcctctttaacatggtacatctctgaatataaataagcaaatatttcattgacctacaattaaacaatcattgaaatcatgacacatagtctccccctcccaccaccaaggtcagacaacaggaatttacacaatctacacaaattaatctctaaaaatacagccatagtacacctggtacaatgactctgctactattttcccc

SEQ ID NO: 211636 - DNA, 583 bp, Homo Sapiens; identical to SEQ ID NO: 44961
  misc_feature (547)..(547): n is a, c, g, or t

SEQ ID NO: 211637 - DNA, 536 bp, Homo Sapiens
ttttttttttttttttttcttactcatttgtgtttattcttggacttatcctgacataatggggtttttttaattatagattcacactgcatttattcatcacccctgtcctctcatccataactcaaatttactaccagcaacacaaaatacaaagatgtgtccagtttcactacagctcttcgcgtttacaagtgtcgagcgcttgctttcggaacgcccttgtgattggccgagccaatgccagtgacatcaaccaacttacttttgattggaaggctggttgctgggactgtagcgtttgcaggaagtcacttaactgtttgggagctggaaaaccgaagctgaagttctcttttgccataggaacgagcgcaactgactaggaaagatgtgtcccaaagctccgcaagctggaacgtgagccaggaggcccggaccggccacgggaccgcgaggcactccgaaagtgtgcggctgccccttccctgcctcccagctgttacccttttaaatgtcagtgttcgcctcgtgcc

SEQ ID NO: 211638 - DNA, 584 bp, Homo Sapiens
ttttttttttttttttttaatgattaataatgtttattataatgattgataattgttcatgatcatctctatatataattatgactattattattctattttctttattatactgaaacagtttgtgccttcagtctcttgccttgtcacctgcataatcctcagcccacaactgggactacaagtgcatgccaccaaacctgggtaattttttctttcttttttttgtacagatgtggccttactatgttgctccggttagtctcgaactcctggcctcaagctatcctcctgcctcagcctcctaaagtgctgagattacaggtgtgagccaatgcagccaccccaaaggtggtgttcaaagttgatttctcatccaactctgattctagactgaatagcacagaccctcaaatgtgaggtgctaactagcaatcctggaatccagagatatacccatgatggacagcccagagaaagccccagtgctggggcagaatccacctgctcaggtgcaagaggcctagccacttgggagtgttcatcacatgcacattatctgaggttaggtctgggaatgcctc

SEQ ID NO: 211639 - DNA, 573 bp, Homo Sapiens
  misc_feature (551)..(551): n is a, c, g, or t
ttttttttttttttttttaatcaaatcaatattttattcatacaggagtagaaaagtagaagacatgaacagaaataaaaattctgaccaaatcttaaggagtgtgaatgagaactgaatgtatgataaatgttgcatgttcagttcaatgggaaattgatcgcttatttaataagtgattgtggcacaaaggctgtcttcagcaaacaccaaataactctgtgctctgctttgagacacttttctgaatctgttagcaagagaaatgctgaagctttctcagatgtctgctgtgtctagggaagatgggggatggcttcagagcaagaggccacaggtcggctgtgagcatctgtgtctagctgttgagcatctccaacagtggatgagtgtccaggtagacctgaggctgtgccctgagatttctgatcatctcccagcactgtctccaccagctgtacttcccgcccctctcgggagaaactagctaaaggccccctgctacgcagcttgaagaaaggaaaagaggaatatattggggagcagtttcnccaatgcctcctattatcttcc

SEQ ID NO: 211640 - DNA, 625 bp, Homo Sapiens
tttttttttttcgttttttggctcttgatttttattatttttcacatgggcagcagaagatggagttgtcccatccttgctccccttgcattgaatgtgccttgggtcttaaaaccccggagtgtcattggagccccctcctcttgctcctagtgtaggagggacaaggaggaaagcactgtgagtatgtgtgttggaggggaggggtcccagctccctgagccaggctcagcacccctcagcagctccctgaggccctctctctgtgagacttttgacagacagcaggacagaaacatatagcagagaaagacataggcagactaggagacaggctacacacacacacagagaagctggccccttcctttggcatggttcaccctagccctggggataggatctaagggtagcgtatgggacctgagctttgggcttgcccgagagagagatggggctacttgaattcttgagaccccaaactccgagaccaaagaagttctctctcctgcctaacctggacccacacctcttcatgtccccacccaccacttagagactgagattgttcatgtaacaaggatagaagagggaaaagaaacggaggctccactctcatccagtc

SEQ ID NO: 211641 - DNA, 565 bp, Homo Sapiens
  misc_feature (487)..(487): n is a, c, g, or t
ttttttttttttttttttgaaaaaaaaatccactttactgagtcacacccagctgtaaacatgtcaccgtgagagtcccgccccccacccccaggccgcacagtccgcgatgaaatgacaggggagcggggagggtcgccggagcgggtgccaagcaaggcagggcaggcaagtgcagcaggcgctgagtttccgggaggaagcccggaggaggtggggtggggcaggagcgggggctggggacccggccgaagaccagggggcccaggaagcctcttcccgaaggcctccccctctccagcccctccactcctgggagggcatctgctgcggccagggagcgccctgccccagaaccccggcaaaggcatatccaacccagccgtgtcttgttccctgtgagcctccgggtccggcggggtcctcaggggaacaggtgaggccccccagctcctgagtccagccctaggtctgggcggctccttanggggcggcatggggctctttccctggggcctagtgcccccgtggccgtccactgggatgtgggagtgaggtgggcaag

SEQ ID NO: 211642 - DNA, 663 bp, Homo Sapiens
ttttttttttttttttttgatgattttttttttatttggaaaagaaggggttctgtatccagagggggttccatacccacatcgtcggtggtgggcagtgtggccacatgcccggatggcaaagccggctatctagcaggcagctatctccgcctggtttttgtgcttgggctcgctggccctttctctgggagcctggagggttggtgagtcctggtagttctgggtcatgaactgggtgcttgcttcaggttcgcccaggtggaaacggttcagaaatctgtccattttccaagagcctcgagttttgttttccttgggaaggagagagatgacttttccttcctgaagatagacaaagaactggtagcgatggaagccactgtgtgccggtggggagggagcctggtaggctgataactcctggccctgaatcttccctttcttcaggtcggcgcccttgatatctgttaccagccaatgtctccagaatctctgtctgggttctgctctgctaggggcatctggatccaccatcaccaggatataggttgcgccgtccacggcccccgggaacttgactatcggctccatccaggaggtgatcttctgtctgtagttgttacaatcaggaacaaccttgcagccaatgttccccaactc

SEQ ID NO: 211643 - DNA, 590 bp, Homo Sapiens
  misc_feature (471)..(471): n is a, c, g, or t
ttttttttttttttttttagcctccaatgacctagtattttatttttagtgcctaggcaaggtctgagaaacaaatacattggacaaaacttgttggtcttcttcatccagaaattaagggactcagctcaggaacctctcctggagttgtggctctccccattggttgacattagatattgaattcatgtcatttcctagacaactgtggtgagggatggagttggggggctggagaggaagataatagcacaaattccagtattaggctggattcttctgaaggtgcctggcggttgagaatttagctatgggacccagtgtttcttttctgaaggatcccagtagtctcaaccaagaagcaggacgtaggtgggagagaatgctgtagatttgctccttgccataaattctagggcagtgagtggggagctcaggttttctgcttcagagaagtctggatgagtgtcncaaggggttatagcaccatgaggaggctcagccttctgcagttgccatataactgtgattccttcatgagaatgatcaatccccacagtgaggggcccagatgtgcaactgtaaacagg

SEQ ID NO: 211644 - DNA, 733 bp, Homo Sapiens
ttttttttttttttttttggctgggtcttcgcctttatttctggtgcacgtctagaggggcccgggcagaggccacccacggtccctgaagtagggcctcagctcctccaggctgagcggagggaagtaggctccgatcctcttccgcacccaccacttgccctcggcggcgtgcctgcccccaggacggctgaacttgtacctgtagtgctctcctcggacccacctgggcgggggcctgcccgcgaaggggttgtgtgccagcagggacaaggcctcggcgtcgctggccaggagcttgccagccaggtggatgatccagtcgttgtgctcgtaggtctggaaggccgcgaaccacatcagccagtccaggcggtagtggtacggggagatgaggcagggccgtctgctggggtcacctggcttgcacttgaactcgtagtcctcccacatggcatcgggggcgctggcgttggagctggctgtgccctgcaggatcacctccgcccgctccttggtgatgcttccgaaggccccgtaagtgttgacgatgtgaagagagttgaagtgggtgttcatgacctgcctggagctcagcaagttgaggaccacgggcacgctgagccaggccagcaggacgcccagcgagacgttggctgcacgccgcaccacggagccgaatctgggctcgggccgggccctcggatgtcctctgcatctgcagactcggtcc

SEQ ID NO: 211645 - DNA, 709 bp, Homo Sapiens
  misc_feature (694)..(694): n is a, c, g, or t
ttttttttttttttttttaaaaaatttttattttttgctttgctgttgttccactctgtccatacattgtttaatacaggatggcacacaataccattcctggttaaatgtttcacttaacaagcgccaccctctactcctccaactcctgtctcaggtttgacagctatttttttaacctaatttgcgcacgccaagaggatttcacctagtaactacacggagagacatccgatgcgtacaaagacgtggcatgaaacgctgcaggtttattgtctctataaaaagatcgttaaggtcgagcgtgctaacgtgtgcggtactaactgtactcactacgccctggtcactttatagcacaagtccgaggcaaggaaagaagttttacaaacaaaactggtcaactgttctatcttcttactcctggaaaacaataaaggtccactttcaaaccatttggacgcacttgctccttctaaagggttagggagtcccggcagatagcgtacccctccccgcccagcagcagagagcaaagtccttcctgccgatcctgcagaccccggagtccaaatgggaccccgtccacacgaccgcggagtcgcctccgaagacggcggtgtctggggcgtggagggcacggctggaggctgagtggggtcaccttcgcgtggccaggctcttcattcacggngggcccgccaggttc

SEQ ID NO: 211646 - DNA, 750 bp, Homo Sapiens
  misc_feature (587)..(587): n is a, c, g, or t
ttttttttttttttttttactgacttgcttccggagtttattgtgcaggatgaagcccgagtgggcagggttgctttggcggggagccggggcaggggctcggggaaggaacagagcagagacatccagagcgtgggggtcacctggctggccgggatcccagcttcagccctggggagtcctattgttccgtcatgcacttatcggtttggggcaggaagacaatggtatcctctgtgaagccctgggccttgcagaaggcggtgaatttctcctttaactcagccctgggggtctgggttcggctgtagagggtggccatgcggaagtcctcgccagggcccttgctgccctggctgtacagcagggcgtactggtcgtagtcggtctccaccactgacacggagtaggtgctgccccagtggggactccggtagctgtaggagccgagggaccccgcgggctgcagcagcatggttcgggtctcacactggtttttcctgaggaaggtggaggtcaggttgaggccaccatccgtggcaggggccaccacagacttgcacatggacaacgccgccttcttctcncggagccagctcgagttggaggcgaggcccgcgctgaaccagcgccccaggaacttgtcctgctggaagttgggctgcacggagacctgggcctccggtgctgcctgcaggtcgcccagcacccccagcaggggcagtcccatccacagcgtgtgatgagtag

SEQ ID NO: 211647 - DNA, 671 bp, Homo Sapiens
  misc_feature (271)..(271): n is a, c, g, or t
ttttttttttttttttttgaagccttcccgcttctttaattggtgtaacagacatgacgttgtatacagagcacactcaggcccaatgatgcggggacagcagggacggatggggagatggggacactgctcacacatggcccagagaaacagacggcacacggacagaccagacgggaggggctgagacgtgaaggctgtgatggggtgggcagtgggactcagaccgagccagggaggggtggggggtctctgctgaatccctctttanaaatcaaagagaaggcaggtggtggggcgtgggggtgtggtgggagtgggactaaggcttctattctaacaggcctggggggtggcagtcagcaaggcctgcctcaccctttggttatgactggtcaggcctgagccctgcagctcagcacccaactctgtaaacatttttggtatttttaaaggacgctgccctccctctcttagtttcagaaagactggtacttcctcaagaggagaatgtgccaaaaggaatctgaagggaggtggaaagcagacctggatacagaagagacttcccatgggggggcaggctgcccaccttgccatctatggctgagggccgctgggagagcccaggggactattgctgttgtccttggcatggctggcggctgggc

SEQ ID NO: 211648 - DNA, 497 bp, Homo Sapiens
ttttttttttttttttttaaaactgcgtttcttatttattcgtaaacatctgggcaaacccagcgaaaccttccaaatcacaattgtttgagaaaccggctgtttttcaactttgtgaaacccaacttttgctgcagccacgaacctacgtgatcccagcggggtcggctttcatttgtctcctctgcccgaaatggatggcccccactttaactcggctgctgcccctcgcttgttctgctgctgccctccagccgtctgttgcttccctcccccgctcccatttttcagcttttcttgaaatctggcaagcgccagaaagggaaataacttccatccaccttaatttaaatcattcaagtgtaggtttctttcttagagggatgtttgctcgttcctttcccaagtgggtgttggggcggtgggggagagatttcgtgcagtttcttggtgatgaggtaatgagttccagatttcaggacagagcacctcgtgcc

SEQ ID NO: 211649 - DNA, 674 bp, Homo Sapiens
ttttttttttttttttttacaagtggaatgtgctttatttcagggaaatataaagggaaatgaatgctattataacttggtagaacagaagaaatggctacctagctttgctttccaactacaaacataaatgaggatctcagcatttaaggtaaaacatgataagcacaaaaggagagttcactggggactggactccctcatttactctagaaattatgagaaccagcagcaatattcctcaagcatccatctcaacatcaagttcctttgttttatttaccagatgaccaggaatcatagatgagtttggctgcaactgtgtcttccactgccattcccaaagacttgaacaccgtggtcttctcacagtgggctggtttcactcccttaatcacttctcccagctcagcaaagatctcggcccctgacagcaggacatctccagactccttcagggcagcctcctgggaatccacgtacagcacagcttctttcatgagctcatcatccagttctctccagtcaggtctgctggctccaacagcattgatgtgagcccctggcttcacccattcaccaaacaaaatgggctctgttgccagggtgactgtgatgatcacatctgcacctgccacagcctccctggaccgaagaacagacccgtacctctc

SEQ ID NO: 211650 - DNA, 611 bp, Homo Sapiens
  misc_feature (466)..(466): n is a, c, g, or t
ttttttttttttttttttggcatcaagctgctgaaaccacctgtgcaaaaatgataacagtgagagaggtctggggtggctgattccaccgagtcccgggcatgggtcaggctaaccgcgggaggaatttaatctagagtttaacttgtgtggctgactccactgagtcccgggcacgggtcaggctaaccgcgggaggaatttaatctagagtttaacttgcgtggctgactccactgagtcccgggcacgggtcaggctaaccgcgggaggaatttaatctagagtctaacttgcgtggctgactccactgagtcccgggcacgggtcaggctaaccgcgggaggaatttaatctagagtctaacttgcgtggctgactccactgagtcccgggcacgggtcaggctaaccgcgggaggaatttaatctagagtctaacttgcgtggctgactccactgagtcncgggcacgggtcaggctaaccgcgggaggaatttaatctagagtttaacttgtgtggctgtccccactgagtcccgggcacgggtcaggctaaccgcgggaggaatttaatctagagtctaactttcgtggctgtccccactgag

SEQ ID NO: 211651 - DNA, 655 bp, Homo Sapiens
  misc_feature (564)..(564): n is a, c, g, or t
ttttttttttttttttttgacacttattatccttcagtctttattttaaataaggcccctgtcctttaccctcccaaagtacttttagacattttccttctgcccagaatcctctgcccggtcccctgtagctagtgtccagacactggtcacagacctccactgagcccagttagagcgctgacctcccatctcaggacttcttggcccttgcccattgccatactctactgtcagattttaaaactgctagaccatgtgccaattcacattgacttgtagccactaggaccctgtgtctttttctattgtgcttgttcatggccaggaatcaacgaactttggacagacaatcagtagactttgggtgtggccttggtgaaggcttcccactttggtgacttgcatgtgcccctctttgttgagggggttttgaagcagcttctgcgtcattgggagctggctgctgcgcccagcctgaggccctggaccccttttgcaccatcctaatttcaacatccagatgtcaattcagaaaattattatatcattctaatgactcanaacataaaatcccctcttttgtctcatgttgaagagctgatgacatcggacctatcaggtcagacttattttcctagtcagagactgaatg

SEQ ID NO: 211652 - DNA, 634 bp, Homo Sapiens
ttttttttttttttttttaaaatatctcaaacaagacttacatttaatagactgtatattaagcataattgtttgacataaaacattacacatatacatttcatgctttgtgaagggttcttgatactaaatcaggatcctattttatgtatagaaatttattgcttgacttcaagagtacatatttgaaatgatgtaaagacactcccttaagggaacctcgcaataagttcctaatcagaaacgtattcacagacgcggatttagtttacattctttatcagaaacccaaattattctgaaatgggcgattttcttccacttccctgcctgtgctctggggtagcaggttggggataattggtttcagaaacttgaactcatttgtcccggagcctccagtcaggcacacctcatactggtagctctgggatagggtcccggtgccgctcaagtccaccagatgtcgtggaaaggggccctcaggcaccgagcagcgacccaccggggccgcccagctcctcctgcacagccgcaccgccacgaacaggagcaccgagaggaggaagagcgaagacaccgaggccaacgccaccaccaggtagacggtgagcgagttggtctggtccggggc

SEQ ID NO: 211653 - DNA, 556 bp, Homo Sapiens
ttttttttttttttttttgccggacccgcagcgccagctccgtttattgaggccttcggcgcgtggagggcgggcctcctccgtgacccagcggcggccaggcgcgctcccttctccaagtcctgggccctccggggagcgcgggctgcgtcgagcgaggggccgaggtcaccaacaagtctacagaacgaggcgcgtctccaggctctgccgcggccccgctggttctcctccccgcgcagggccaggacgggccgcgctaggagtccctggaggccggggcgcgcagcgcgaagagcttctcccagcaggtggcgacggtgtccagggcgcgcagcaggagctgccttcggccgccgcgacgccgggcagggcgcatcttgggccgccggctccgctggcgcagcgtcctgcagtggcgccgcatcaccgcctcggtgcgcacagccacggtccaagcagctctctccagggccccgcggcggtccccgggcaccgccccgcgcagggtccgacccagggacgagatggacaggaggatactgtgctcctgggg

SEQ ID NO: 211654 - DNA, 664 bp, Homo Sapiens
ttttttttttttttttttaagatttgtttcagttttattttcctgtctcagtttcagtaaaagattcagagaactgattgacacacatcataagctatcacccatataccctaaatatacactgtttatgctttttctttttcacggaacaaggtgacactatctttgttcaaaccaaagtgaaaaggaagagatacaataattttaaaaagaggggtgtgtgtggtctttcactctcagatagtgaatgtacgtcaccacaacaaggaaaaagcgctgaggaagaatgtgcatcccacaggtcagagagtcaagcaggaagtaccagtagagcacctccaaatatagcaaatttggaacaactaggcattactgtgaaagaacttcctagtttttcatttgtctgccaccacattgctacattggaatttaagccctcttcacagtgcaaatatcaaaatgagccaagtcagggttttatggcaatcttttgctaaaatatattctattttaatatacatgctataaaagtatgctaaaaaggtcaatcgagagctccattaaaattaataatttgcttttttacatataggataatgtacattcaattctaaaagtatatttgagaaaagctattactgtgatcccaaatatttctagcttc

SEQ ID NO: 211655 - DNA, 580 bp, Homo Sapiens
tttttttttttttattttatttttatattatttatttattcttcggtagtttgtttttggagcgtgggttttgttttgttttttgatttttttctttttttcgacccacggatttattcttattgcccaggcttgagtgcaatggcgtgttctcagcttactcaacctccgcctcttgggtttgggtaattgttgtgcctcggcctccctctgcctcttgggcttgggcgattgttccacctcatccgccctccgcctcttgggtttcggtgattgttccacctcatccaccctccacctcttgggtttgggtggtttttccgcctcggcctcctgagtagctaagggaggagtcttgagattatcatccactgagggtggaagaggagagggtggaagagggacaaagagacagtccttcagattatcatccactgagggtggaagaggagagggtggaagagggaccaggagacactccttcagattatcatccactgagggtggaagaggagcaagaggacactccttgatattatcatccactgagggtggaaggggatgaaggagaattcgggag

SEQ ID NO: 211656 - DNA, 618 bp, Homo Sapiens
ttttttttttttttttttcaattccattcttattcggggtttctggtttttttggttttgttttcccttttaatttttttctagaaaaaaaaacacaacccgggggaatttatatgacaaactatcagtgtcaggatggcagagggaaagagaaagaagaggaaggccaaagacatggggagtgaataaaaagtgggttccggatcgtgcggaacagtccacagggtcatgtacaggtcctcaggagatgaccagtccctttggcatgcaggtccagtgcctggtcttctggtctgcctgctcagacacccaagggcagagagagctggccacaagtaaacctgccaatgacaaactcaggacttaacagaaagacttagttcagttccttggctttgtgctcaggcatcacatagcaggcagcctgcagcctttcttgcctgagagaagagtccagaagagcaggagagtcacctttgaacacactctggcatcacagcagtgaactgcaagcagccactggctcgtgtgcagatgtggccctcaccacccatgcaggcatctgtccggacatccccagtcaatctggccaaaggatgggacatgacagtccctttc

SEQ ID NO: 211657 - DNA, 543 bp, Homo Sapiens
ttttttttttttttttttacttcattgcacgtttaatgcttcatgcagtattcagagcagagataaggggggggatggctcacaggtccacagggacgtcacaggcacaggcgggacacggcgacgtggccggggctgggtggggagggggaccccacgcatcgtaaccgccagcaggggaggggctgcaacgagcagcctcggaccaaggacagcctccccgggacgcacgggacaggagcaacatcaggtgaactgcaatgacctcgcttgtctttcgggggaacccaggaatcccctgggaagcttctctgcactggcctcaccctttcgggcctggctggctcacgtcatcactgcgggatccaagacacatttaagggacaagtcggttgagcgggtcggggcgtgtggggcccgcggctggcttgacttctgctttcccccaacatcaacttgccctgggtggactttctaagaaaggtgaggacggcctgctggagtcccgccagcccctcccaaaggaacttcgagcctcgttcc

SEQ ID NO: 211658 - DNA, 695 bp, Homo Sapiens
  misc_feature (598)..(598): n is a, c, g, or t
ttttttttttttttctttcatggacatctgttgcccatggtcaagtaaatttttaatgacacatagtcactacacacctttcagccttctggagaggtaagtgtacattgatctgtcctaattagccttgcagagtacttcagacatccctgcaggaacactattatttaataaaatagaagctgttttttcacaagctcagcacttgctccttggatagctgtattgtttttttgctcttctctccttttaaaactcatatcgcatgtctcatgttcgtctttgtctttgacaatgtagtattaatgcagctctttgtgtttctccaacaggctctccagccgctcaggtgccctctgccctggccccttgtttctttcagcctcatactgacgctgattgatatcttcgtgcagactcagttggagggcaactcttaccagggaggtcatcagtttcatagcagccagggtgctagtgtgacagaaggcgcagacttgtgagtctgagaagccagtgagcagggagatgaggttgtccatagggaagtcatcatggaggaggatgtactggcaccgacagaccaatgtccccacanactcacagaagctgccctggaacttcttccaggatagacctggagctgtcagaggatagtcccccgagtcctttacatccacaagatcagatgaaaa

SEQ ID NO: 211659 - DNA, 725 bp, Homo Sapiens
ttttttttttttttttttcacggcttatttcctttaatctttgcaacaacccaaagtataatagtaagcacagggtttttgcgtgatacccggtaggccttattaagaattagctcttattttcatcaaaggtagagaaaatgagtaactattgaggcccccgctggctccctacggaggcccccgctttcagccctaggcgcctctgtcttgtagggctgtataggacagtccggtcagcagttacctcaagctgagctgggcttgtaggttggggagggtggtgggtgggagaaaagttgatggggaacgcagcggttcccaccccctgaaacaccggcaatgctggcgtggaattattagacagtccctaaaaccacgtgatcgctgctcctccgcctccctctcattctgggcccagtgctagctccgcaggcgctcgcccggactcacacttggctcgcacgggctacgcggcacgtactgagcagctggcggggcagggtctccgccgtcactgtgaaggccgtcgggagcatccttagtgccctgatcaaagatggcggaagacaacccaccagctggaccaatcagaaggcaagctgggcgtggccccttgggaaagctcacgctagagagccgaggaggatttctgcgcatgcgccctatctattggcgtgaaacggctgctgggtccgggtcctgacgccgtctgagtttgggct

SEQ ID NO: 211660 - DNA, 649 bp, Homo Sapiens
  misc_feature (621)..(621): n is a, c, g, or t
ttttttttttttttttttacaatagcgataaatagaatttattttatacaactgttaccgacatccacacggccacaggggcttccaaaatgggtattggggccaggaggctggcctttggcgtgacgcctaaaaagtgtgaccagacacacaagggctcccagcagctgtgccgggctgccccctccatggcggtcggggaggcaaggcctggactctcggccagctgagactcttggcctggagggcccagcatgggatggcaggggttaagctgggtgctggctgaggagccaggtaggtccccatcccccatgagggggttacttgtctgtcatgtgtaggcagtggacagggcatcggcagacctgtggcagaactggagggtccaggaggcatactgggcacagccggctccctgcccctcagcccacctggggctccagggacctcaagaagcagggtagggtgataggaggtccctgggaagaaaatcctaccttctaaggcaggtgcatgtaatcacagtcttcagtgacctctgaaataatcttgtccatttgtagcagacatgcccagagagggagagtgacttgcccagagtcacacatcagaacccanattggaaaccagcctcgtgccgaattct

SEQ ID NO: 211661 - DNA, 368 bp, Homo Sapiens
ttttttttttttttttttgggccaagatgagaatcacatttattgaagttacattacagaagatagtgaaggggaaagattgagaacttccttagtacacccttactccaatattttctattagcactgcacatgtattactgcctagtgtccattggcatagaagcctaagaactgcttatgttgccagtcttagacaaggataagcatttttaacaaatacaggtaaaatctcatttgttgctgcaatcttttcacaataaagttaagctgtgtcattaagaaccaacagcgtggccgggcgtgatggctcatgcctgtaatcccagcactttgagaggtcaaggtgggcggatcaccctcgtgcc

SEQ ID NO: 211662 - DNA, 545 bp, Homo Sapiens
ttttttttttttttttttcttactagtgctgatttattacaaaggatattttaaaggacacaaatgatgaagccagttgaagagatacacagggtgaggtttggaagggtccttgtggagttggggtgcaccactctcctggaacatggatgtgttcgccaacccggaagctctccaagtcctgtcttttaaggagttttctggaggctttatcacataggcatgattgagctccagctctactccccacgccagaggatggggaatggggctgacagcacaacgcttccaaccataggtctttttggtgaccagtccccaaataaggagcccaccaagagtcacctcatgagaacaaaggacgcttctatcacccagaaaattccaagggatttaggagctctgtgtcaggaaccaggtttaaggaccaaatgttagaacaaaagatgtgcaaccataaaaaacagcgagatcatgtcttttgcaggaacacagatggagctagaggccattatcctcagcaaactaagacaggaacagaaaac

SEQ ID NO: 211663 - DNA, 384 bp, Homo Sapiens
ttttttttttttttttttaggcaggataagagcagctattagtcaactgctattttctttcccactatggaggcaaaatgacctttaagaaaatagaccttattttttagagtagtttcagattcacagcaaaattgagcaggaagtacagaaagttcccatataacccctgcctccacacatgcatagcctcctagactatcaacatctctctccagaatggcacatttgttacagttgatgaacttacattgacatgtcattatcacacaaagtccatagtttacattgggggcaatactcttttgaagattctaagccagtgatctcccacagatttggcaccagggactggttgcatgaaagacaatttttccacagaca

SEQ ID NO: 211664 - DNA, 543 bp, Homo Sapiens
ttttttttttttttttttgctttgaactgagtttatttaagatgcgtggagcgcatgagtacagtgattgccattcgggaatgaaaacaacttctggaggtcttggcactcagggagggtaattactttcagaccagccctgttttcaagtgtaagtgatttgcggtgagatttaaagttaaaaccataaacatttgctaaacaaaggaaagcatatcacacatctttcctcaggaaatggttttaaattacatccaaggtgtgtgctggccgcctccacttaaatccacaacaaatacaggggcttgccttaggaaatgtcgacctggcatcaaacaggtgcagacaaaataaatcacaaattgactcgcggcagcaaagaagtggggattttgtcctggctttgaaggagagagacatgaacccactcatgtttatcttctggaaagtgttcttgacttgcgatgggttgtggctttgggtctggaggacaccaccattgcatcctgtctattagacgtactttcagcatgacctctgggg

SEQ ID NO: 211665 - DNA, 762 bp, Homo Sapiens
  misc_feature (682)..(682): n is a, c, g, or t
  misc_feature (711)..(711): n is a, c, g, or t
ttttttttttttttttttggcatcagcagcatttcaatcaatggtttttgagagtcttcttacacaatgtaggcggttctgtgttttggaagaagtgtcacattagactccagccaacagggagggaggacaggaggaaaggtatggagccagagtgtgatggaacaacactgaaagcttcaggcaccggcaggaacagggacagccacctctccagtttccccactgaccctgcagaaaatgagtcatgatttatctcctcaaacttcctggaaaagccagccaagagcttaaagtagataagaagctccttatggcctacctttgttattcatttactttaaaggaagatgcatctttaagacaacagcttcttttgtcaggtgtggtgttgagtcttttatatcccgtattaggaacagtgtacctatcattttagtcacggcttcctgtgcaccaccagggccttaaaatgctgagacagagttatgcacaggtatgtcaatgtcataaactatgaaaataaatgtggccaagttttaaaggcaagttaagtgtccacagtcaaagaaggaaggcggcactgcattgagctaaatggggcagagtcaaaatcctgggttctggaactggcttggcctccaagcaacccagcctccgagccttagtcccacttctgcanagtaatgctggttagtgagatatctccanagctttgagtagctcacttgagcttcactttcaaacttcaggtcactctgt

SEQ ID NO: 211666 - DNA, 711 bp, Homo Sapiens
ttttttttttttttttttcatgttttatacattttattcaaacatttctccaactttgaaatgacaaaagcccaattctatggtttcccattacacagcatcctacaggtatgtatattctacaaggaatactatggagtttctcttcttcccctgtcacacaagataactgattagggtttcatcaacttgtactgtgccggcagcgcaccagcattctggttgttccggcgacagggcaaagggatcaggatgggagggcgtgtgctaaggcatgtaaatagatacacacagagagaaagaaaagcaggacatttacaaagaatccaaacctttccaatcccttcagctcctgggtgttgagggacacctcctgcacaaacgctcttgcaagctaaggctctgctgtaccctgcaaatacttacaattggatacggtgaaatatacaacaaccattaacatctctctctttttatcactgagacaatacttcaacaccttttataaaaaggcaataatacatacagaaaaaagaacacgttggcaaaactttatgcaaaaccaccccagaactgagtttgaatggcgacgtgcctacactgcaattaaacacgatactcgggtcttagcacgtgaggattgggcggccttcacatcagtcacgctgcctgctgcacccggcagcccgctacctgcctgcacagatgaca

SEQ ID NO: 211667 - DNA, 749 bp, Homo Sapiens
ttttttttttttttttttgagaaccgtgtgcttgtaaactttattttccatacagtagagaaacatacagtacaagcaacactgggaatccatttacagcaaagctcacaaatgccccttgagacacactcgttccctggatgagggggtggtgcccagcagcctgcatgcctctgggcggcacttccatgcgagcggctgctgcatcccagagctgcgtgggaaggggaagccggctcagtcctcacaccccgcagctccacgtccactgtcctctgcaggctgccccatggccgccttggggaggagaagcttccccaggcagcagccaactttccacgtgctccccgcggcctcctgcctgcctggggaggaaaacctcatggcagggcggggctcagctccgcagccagggggcattcactcagtgcctgctctgggctggaccccacccccgcaccccaaagggatcagatgtgacctgtcctccagggaccccaggctggcaggcagcagccctggccctacagcttggtaagtcctagggcagagggaagctggggcctcaggtcaggtgggcgtttgtcaggggggaagaagcttggcagcccagacctgcagtaggaggggcaggagcaggggatactgcagatgggtgttcacaggggcagaggcgggaagctaggagaggaggggacctccatggaaggcagttttgtgaatatccggagaacttggaagtgactttc

SEQ ID NO: 211668 - DNA, 718 bp, Homo Sapiens
ttttttttttttttttttctttgtagttgtaatggctagaaatcttagacattcttattcagtagatctggggagaggtctcaagatgcccttggtgcttctgattggccaggctcctggccaccgacctctgagtgagtggagtggtggggccgggacggggtgagggcagagtgggaggctggctgcagctgttgcagccttccggcctgagggagctaggatgcctcgcctcttcctttccctccccacttcccctttcccccatggggtcgctaatggcattgccgcagtccaagggctccttcctgttactgactcactgtgtgaatggggggtctgcagcaggatggagggagtagagctgtagggtgggctggggcccccttccctatccggctgctggagccctgtgctctgctcacctgtaccgctcaccacatgagaagtggccccttgccttcttacccatctctgtgacttgattaactctgctcccagtgagaagttagtgggtcccagtcagaagtggtctacatctgtcaaggcccctcctgtggtggaggaccctgacctcagtgaccattctctgctgggaaccctatggctctgcactgagacttagaatgacagctctgtggatcatctattaatgcccgggccccagctccccccaccacacagtcactgagtacttgctgtacacccgcgagaacag

SEQ ID NO: 211669 - DNA, 668 bp, Homo Sapiens
ttttttttttttttttttcaactttatagcaccattccaaaatactaaactttctttgcacctttattttttatctttttttttttttttggtacacatgtaaagtctgggcatcctgtaaatttctgaaaagcctcatagaaaaaaaaaaaaccgactaatttttaggacaaagcaataactcagtttataggcaagatgatctcaagcaggctgtaaattcttcgtgggcttctgtaaatcttgattcgggggtgagaatatggaaaggaggctaaagtcttcctggattagtctctagagactgtgttgcgcatcaggatagaaaaacttgttgcccaacggtcagactctgcgtatcggttacaatgcaaaccataacaacagtcttttgttaattattttactcttctgattgacaaaggaattggaatactggatatgttcggagtttgtatacaccttttatttgtactctgtaagagagaaattagaataatattgaattccctcttacaaatctccatatttgaagcttggagcactgaaatctgttcttagcaagcagatgtatttaaagcagaattataaatgggtctttaattcaacatatatttggttgcattgttatgtaagaagactgtttgactcagtaatgtgggagttga

SEQ ID NO: 211670 - DNA, 638 bp, Homo Sapiens
ttttttttttttttttttggatctttaaggcaattagaagatttattgaatattggttaaaagtagattgacaatgacattaaagaataaagtgtaatttatttggtgctactttgtgaatgcttccaagtacaaatcatctcacaataccatatacaacatactttcaatcacaactcaaatataaaataacctacaaaatcacattgctataatcaatatacaataattgtatttttaaaagaagaaaaaacgttagcaattttaagttaagttgcagtaacttttttcaaataaaatattagcaccataccagataaaataatctaaaactattggccttctcattcttcttaaataactaaatagaaactttttttcaaagcacaaatattaatttgtaaaatcagttctacagtagttaatatttctttctttattgtttcttttttgcatttttccctataaggaaaaatatgaattaaaaactttcacgggatatgaaaatcaaacaaataaatctgacccaaccaagtactgtccttcagcaatgagttccgacagaagcaaaagtggacatttcacggcgtatggtactgaaaggcgagagttcgagttccgtggtgtactcgttgtca

SEQ ID NO: 211671 - DNA, 710 bp, Homo Sapiens
  misc_feature (522)..(522): n is a, c, g, or t
  misc_feature (592)..(592): n is a, c, g, or t
  misc_feature (637)..(637): n is a, c, g, or t
ttttttttttttttttttgtttgtttgtttttgacacaatgagttttaatgatgcctaaagccagttaacaaaaaccgggattgaaataaaaacctagggccatcaatgtaggatatcactaaggagtacacacagagcagcattcgtaaaggagatcaacattcattatctggtgcgtttgttaatgcagattcctgagtctcaatcaaaatatacggaataagtcatttaggcctctgaaaattttgagaaccactgaagacaaagaagcacacaggaccacgatggaccacgatggaattttggtgggatcaaacatgcgttctgtatggcagccagtgagtcagaattttatgaatatctgacactgaagtttttgattatttcaggacacaagctacagagaacaccaaagttagccatcttggctacacttacgctgtgaaatctgcagctgctgtagctgctttggtggcatccttattcagtgttgcaccccaaacagcacctttatgacccanaaatgttccaatccagtctcctgtatctccctggcgtagcataggtttaccatctagaaaatttttttanaacatgtaatttataagttcagattacttaaagtctaagattcanatgtaaatatacaatgatgttcaatgacaaagtggaaaaattgtttcagctattttactaccaccacccactg

SEQ ID NO: 211672 - DNA, 515 bp, Homo Sapiens
ttttttttttttcacaggcacatgtggctttattgaccactccagccactcagctcagagaaaggtgctgggtgctaggtccaggtacagaacgggaaaggcagagaggatgagcaggagcaagaagcagggatgtggccccaacccatcagccaggcctccggccagagtgcccagcagcagcttccccagctggctgcagcgcatcatcccagtgaaggtgactgtggtgaccaggcctcccaagaagtgctgcagacataggctcagcaaggctgaccctctcaagattgtgccagcgtccatgctggcccccagggtgtccaggtggaagaccaaggcagtctgacaggctaggcccccgaggcggaagcgcagcaccgacctcaacagaggcagcagtttccagtgcttggccagcaaggtcccacccagggaggagccagcgatggagcagaccacagcacccacaccattccacagtcccaactcgggagcagaaacgccctcgtgcc

SEQ ID NO: 211673 - DNA, 617 bp, Homo Sapiens
  misc_feature (490)..(490): n is a, c, g, or t
ttttttttttttttttttcaccattcaatctcttcaatttatttatttatttttttaatacatattttgttattatactttaagttctagggtacatgtgcacaacgtgcaggtttgttacatatgtatacatgtgccgtgttggtgtgaatctcttcaatttatgacacttcaatctcctgctcttctttaataaaagaagctttacaacaggtactagcaggacaataaagaacagccagccaagtgtcacatacctgggatagggtggccaggcccttgcacggggcccggcagggagagtagcccctgactgctagcactactgcttctggagggtctccagtgcttctccacacttgtgggccttccagattagggaagacaatcacagttctgggggtgaattttgccatttggctgctgaacacatatggctgaccagggagggatgtaatgaggaaatgaggttctcagacaccccacctgnggagctgctgttctggccaattcagaagcctcctgctataatgcctcgctgctggcgacagagtggatactgcagtgtgaggcaaagaggaggtgggtttagaggaaaaaggacttttatgactgct

SEQ ID NO: 211674 - DNA, 650 bp, Homo Sapiens
ttttttttttttttttttcttagcttcatttctcttaaaaaacaaggaacaagaaaacattgcaccagcgttctaagcctcaaacaaaacacaaaacaaatccccctgcgaagcaacaataaactttacatctctttggcaacaataacttaaaatcacccaacttccattcgctccaaccacagcagttagttagttacaaaaatattccctgtgctgccctgcccccagctccaccccttccccaccatccctctccctgtaggcaggagccccccaacactgactgcggggcatggcccccactctcctttggcagctggggcacaggaccagatactgccccacagaggggagctgcctgcacggtcctgccaagggcacctctagaacggggcccacggggcaggagtacagcctggaagcccctccacccctgatcttttgggctgcccaccgtggccacagcgggacccaggtgggagcagcctgttccctgtgggaagggtgggcttacgggtctagctgagtcagtgaaggggaaacagccacggactttgagataagggcagcggaaacaggaccgacacgggcgcccagggccactccttgccctgagccaccaggaaccaggcaagggtgggggcaca

SEQ ID NO: 211675 - DNA, 535 bp, Homo Sapiens
ttttttttttttttgtttctttcatttccaagttttaattaaatatctctaatggttagaaaatcaatgtcaaatacgaacattggtatacagcttaaaatacaaatgtcagcaattattaaagaacatgattaatcattgttccaagtaaatgctagatcattatttcccaggaggcaagttaagcatcaggtgcctgaggggtaagggacagggcttcagtcggctctgatagctgcatggctgtcccaatgagctttccactcagatagtgccaggggcagctctcatcacaggctggctcactggcctttatccccagctccaaggaaacaccagggctttttctgccatgagaatcgtgtttcagagtcaaatgatccactttaagatgaaatttggacagctcagttccagaatattctagtttaacctgggaagttaagacttcccaaaggctgaagataggctactaggggctgatggacaagagtcaggccagagtcactctaaacacatctttgttttgttctgt

SEQ ID NO: 211676 - DNA, 709 bp, Homo Sapiens
  misc_feature (62)..(62): n is a, c, g, or t
ttttttttttttttttttacttctttgagtcaataattttattactattatttttcacactngcggagacttagttacataaagtgatattctatgaattgattatcagtagtagaagcacaaaggtatggacagtgaaacaagaagaaacaccctttatcagaatgaagtccatgtgacagaagtacatacttcagacagcctatgtacaaataagtagagcttcctgtctatgtacagacatattcacagagaataaactgacatagtatcaccatgtatctcatcatccagtgaaaattacgcataataaacacaacacatacaaaatgacagaagtaatttggaagtgcatccactggatttttgtagggatgaggataggggttacaatgctcctttaaaacggaggcgaacaaaggaagcatgagaccacgtctatcctaaaaaagatcctttacaaaaatggcattctgatatttttaacataacctgtctaaaagacagtttatatgttatagagcaaatgtctatgttggcgtcaacgttgacaacattttctttgttttaaccgtatctgaagaacacaagtataatttctcttgcttttagtgctagcagcaacttcactgaatcaggaaggtagcttttgctattcttagctttgatggctttttaagtatgtggattgcttgatggtggaagctgt

SEQ ID NO: 211677 - DNA, 701 bp, Homo Sapiens
ttttttttttttttttttagtattatatatattttcttttttttctttttctttgttttttacaaaagtgctcaaatacaatgcttgcaaatgtttggtctcttggatttcactctgctagcaatgggaaaatgtggaaaacaaaaatccttccatgcagaacatccatgaagctaaaattaaaccaaagtagtatactcataccaaaactctttaagagttccttgggtattttgaggattatttaaaatcatgtaatatgtggcaaacttatgccatcatccatggcttcctatagaaattctgttggaagaattgggggtaagatacatatatatatatagtttatttccccttttagaaaaatcctaatggaatatcaaatatattccaaagttgccaatgatatttgttactaaaataagtttggtgcagttactgcatgttccagagcggatttggaagggaatataaataaaacaagtagctttttctgatgttgatgattgattataaaaggaagaagggccctgattatccaagtgctttgggctggtacaatcactaacatccccgacttggctgaaaactaggaatgcatattattcacagagtttttgtacatgtggtcaacagataatgctttaatagaaagtaacagatacgaatagtgaatggaaatacgaaccaaaagctaaaaa

SEQ ID NO: 211678 - DNA, 624 bp, Homo Sapiens
ttttttttttttttttttaaggaatgaactttttaatgtttttctgtttccattctaacaaacatgcatttttgccttcagaaaataatagagtcaatagctgtgcagagttgaagaaaaacgtcctctggtgttccctctgcatttatcttgtgtagctgtgtttttgtctcgtagtaggcgatcacggggatggacgctcggtagtaggcttctaggcgcttggcgatggtcttggtggtgtcgtccacaggcaggctgctccggctcctttggagaaggcggttggtcatggtgtctgccgagcagtccatacagatcaccaactgtgggtctccaatcctgcgtccgaactcttccccttgcttcacctcccgaggatagccgtcaatcaggaagcccctggtgtccccgaggctggccaccatggcctccttcaggagctccaaaacgatgcctgagggcaccaggtctccacgttccataatgtctctgatcaatttgcttctttcagattctgatgccagttcctcacgcaggagctcgccagttgagagatgtgtaaatccatatttttccaccagcttttcacactgtgtgcctttgcccctcgtgccgaattct

SEQ ID NO: 211679 - DNA, 637 bp, Homo Sapiens
ttttttttttttttttttgatcttaaaatacttttatttatgatacatattaaccaaattatattatgcataaacccaacaatataagaaatattaacactgttaatctttttcaaaatccttttcaaacttttctaaacattttgtggacataaacagtaacgtaagagttctaacttcattgcaatcttaaagaattgcatttgaaaattctgggactactattatcagaaaattaaactagaacagatcaaaagcctgatatttacattcaaacaacaacaaaatattgtatttacctacaaattgagagaaaccacatttaaggatagaactcacttagatgcatattagggtcattgaagtacttttaaaaatcactgtacctgggccttatccccagagattctgatttaattgatcaagggtaaaacaggatatcgctatattttttcaaagctctcccaagtgattttaatgtccagcctggcttgaaaatcattgatcttttaaatcaacgtggtatgaccgcggtaaaaatacataaaatcttgggcttcatttctagaatacaatgacgagatcaaaggaggctatcagaaccactattatagccaggttgttcgatctgctatcc

SEQ ID NO: 211680 - DNA, 600 bp, Homo Sapiens
ttttttttttttttttttaaatttcacgtgtaagatttttattcaaatttgatttacattccaaaagaaattataaaatgtattcacttgtttataaaaaaaaggggggggggacaaaactttaattcaaattataaaacatgataaattttcagattaaaattgggcaagttgcttggagtaacaagtttttaaatcaccattttccacctccacaccaaggataaccttctaattaatgatcagccatgttgtaataggatagcactgagacttgaggaaacagaaaaactgaagagctcttccaagccccgaccaggaacatttttatgccttctcatagtggcgaacagcaaccacatcaccaaaagtaagggtcataaccattttgccatccttaatttctcttacaaaatttgtttctttgccatcccatttctgtatgtgaacaagtttgtctccatccaggctaacaacagacttacagtttctatcatctgcagtggtttcatcaaactcttctcccagctggaaactaatctccgtgttcttgaatgtgctgagagtcctgatgaccactttgtctccttcttgactgat

SEQ ID NO: 211681 - DNA, 634 bp, Homo Sapiens
ttttttttttttttttttgggatgcatgccaactgttttattgatgatgcctatttggaccacaaggccagccagcatttgggccccaggaagaatatggccccattcatgtcattactccacaatgcggcggaaagactggacagctggggaggctgcaccccaatcgatgggcttccggtactccttcttgtccaggaggtactgcctgccacggtagttgggtagctcatagaaaatccagacaccctccagcaccttacaggagtggatctctcgcatgtgaaattgctccatgatggaagggcaatcttcggtggtttcatacatctgaccactaaaatcccctttctcaaagatctgaatcttatactggcctccactaggcagatgaacagctctgcaggagctgaggcggtcgttgaggcccatccaacgctggtattcagggtactctccctgtggtaagatgtacatgtacccagcaaagttgggcctttcataaacagcccaggtgcctccttccactttaatggagttgcagcgacttaggtatgtgtggaaatctgcacagtcgcaatcacagtcatagcgacggccttgaaaatttttgtcttcatagaaagtaatcttg

SEQ ID NO: 211682 - DNA, 455 bp, Homo Sapiens
ttttttttttttttttatatgctaaaaacaaaagcattaaataaaggtttattaacatcatattaaagacacattatgccatatgtaagcattacatcaaactctatataataagacacaaacaaataccaaacaaagtttttatggtagtatgagtcaccattaaaatgggaaagttctacacaataagagcaacttagcaatactttgtcaattattcgtcttctgtccctaatgcttgatatttatctatgtcagagaaaacttgtttataaatatgcaggccaagctttaatatactttgactttctccagttttagtaagggacttgtcatgtattctattctggtgagattcactaagtagcactagaactcacaagcatacaggtggatgtggaaaaacgcattcatttggtaccagatgtatctgtgtttaaatatcactcgtgcga

SEQ ID NO: 211683 - DNA, 539 bp, Homo Sapiens
  misc_feature (491)..(491): n is a, c, g, or t
tttttttttttcttatttatttttgctgtttaattttgggggagcctcggagatatttactttcttggaaacacaacagtctattaaaaatgtacgctcatagtaattcatccagaagttggttgttgctggaaggccttttaagggatctagtacatcatattgccagcagggctcagcctgtgaccagcaaggtctgggctccgtctggggccaggatcaaggctcattccgtggccttgagcacagcctggtgtgtggctgggtcgagtccagcagaagtctcggggttttccagcctccatccgagtccggctttgatgcctttcctggtcagacaggagccgggccagtggccaagctgccaggatggcttccccggggccgcggccgccttccttcccctcctgcccgggctggctctggtcgccactaggggttgaagatgagggctctcctgggaagctcttggctgaggatccgcctggtcncggagccgtgaaaacaacagctgggcctccgcagggtcgtcctccagc

SEQ ID NO: 211684 - DNA, 606 bp, Homo Sapiens
ttttttttttttttttttaaacagtcagttaacttttatttatttttaatagagatgcggtcttgccatgtttcccagcatgaccccccagttcctgggctcaagtcaagtgatcctctggcctcagcctcccaaagtgctgggattagagacatgagccaccgcacccggccaagccactcatcttttaacccatttcccgtttagagaaaaaaaaagtgcagctcactgccagcactcattccttggggcaaatgggagatgggctaaagggatttaaataacgaggaaaatcctggatggtgcacatgctcttcatttttcttttccctgaagcacatcatttaacatttcttgtagtgcaggtctgctggggatgaaactcttagtttctgtgtgtatgaaaatgtctttatgtcaccatcgcttcggaaagattttgtcaggtacagaatgtgaatttggcagttttctccttagtacattccactgcctctcacccatgctgctcctgaggagtcagccatcctcatcagctttgtgcctcccaacagaacatgcccttgtcctctgactggttttaggattttctgtttatcactggtt

SEQ ID NO: 211685 - DNA, 658 bp, Homo Sapiens
ttttttttttttttttttgcggtttccaaacttttgtatttttagcagcagaagccatcctccaaacaaaaccgtatgcaaaacctcagctacaaaacagatcagtgggctgcttgcccgtgtggggcatgggctgggccccgagctctccctccagcacccagtacttcttccacaaggccctatgtgagctcagtttaaaaccccagggccttggcaggggtcaggtgggcgggagcagggggtggaccttgtagcactggagctaaagcagccagataaggtgggctagttcttaagacctctggagggtgtggctagtctctgagacctggacaacttcattctccaccagggcctggcccccatccccattgagctgtctcatgcgcaggttaatggagccgtaggtcttcctggagcccttgccggggacgaaggtcctccggcggtacagctcgcccttgcacagggagaccatgagcagcaccgacaagagcatgccgcccaccgtgagcagcccgaggcctgcgatgatgcacctgtccaggtgggagcctaggcgggcgtagtacatctccagtcgttccatctcccgcgctgtcactgtgtccggattgactcgagcctcacgggggaatggggtatgctgtcacca

SEQ ID NO: 211686 - DNA, 594 bp, Homo Sapiens; identical to SEQ ID NO: 43907

SEQ ID NO: 211687 - DNA, 647 bp, Homo Sapiens
ttttttttttttttttttccacaaaccactttaattgtgtgctcatcaccgacttcagaatctaagagaactttgacacttgtttttgacaccccattgccttctcatcagtctaactccaagaccttcctccgagtggtaggctctggtaattcagcgaaagcaaggcgctaacaggcgagtgtgaagccaaagggctcccagtgacatccttgacatctttttgccagctattcacatgcatttaatatacagcacttccctgtgactgtctgcagccttttctaccagcaattcctcctgatttatccttctccagcaattcccagttgccttgcctttctaatagatgttgcagtctgacaaaacacctttgccttcatgctggtgttgttaaaggactgattataaccgtaaggaatgggaaataagaagctattccttgtaagtttgctaatcttatctgttcagaataataaaagttctctgtcaaagacttaggaagggagatttcatcccccagccttgctagtcctactctttgtgcattcttaagacaggaggcaagtgctttccattctccttggaaaaactgaggctgaatatgcagcttgtcatgcagttttgctgaagacagagagagggtc

SEQ ID NO: 211688 - DNA, 589 bp, Homo Sapiens
  misc_feature (498)..(498): n is a, c, g, or t
  misc_feature (571)..(571): n is a, c, g, or t
ttttttttttttttttatcgttataaaatgtcacgtttattgctacagtgctgttatatacaggacaggtctctgaatccacctgaaagagggtcgttttaaagtcccaatcatccagccagctgtgttgacacgtatacaattattttctttaaaaaaaattttttgaaaaccatcttgaggcactcagatcacaccccccaccccccataattgtggttcccaggaactgctgtttcttcctcctcgcgctgggtgaatctcgtttgaattctatgcagaacgcacagttccagaggctatggggccactgcccacccagacctaggggcagggccaggagcaaaacaagagggagaggcaagttcccttaagagatcaaactcccagggcgcaggggaagccaccgagaagggagaggcagccggacagcccctcccctccgcctggcctggactgggggcagataccaggcattgagctggccttgaggtttcncttgcatctaccatggggcccaggctcccaagccagtctggggaggggagtcaggcagtccaggatctcctgngggtaacggtgggagtct

SEQ ID NO: 211689 - DNA, 664 bp, Homo Sapiens
ttttttttttttttttttacagtctctgattttaatgagtcaatctcaaggcaaagctataaccttttccatgtgaaccttaaaacggaaatcctacgtgtttggctcagctaccatagacatctcttgccccagagttccagtgtatttttcacctttagtttcttggctcctctccgcctctacaccagcctcatatccacacgggatgctctctgctgagtattgtcttgagttagttctccctctcatgttctggctgatgctactcatggtcatagtatcacctgagggggaaggagtatgctatgaaggtgaaaaatgctaccatagcattttgtttgtttataaaatgtcaggccctggttccatttttcccccctcttatatctaaattttgaaaccactggcctctaacagtctgtagtaggcttaagttcaaggtgccatttgcttctctggtgcctgtttgtgagccaaatagaggaagagtatgctagagagagcgctgaccaggaagatcacatcaaaccaacggtgatagaagttgaactgcagttctccaaggacttcagtgattatggtgcggtattctaaaggcatactcattcggatcagcagcacagaggagacaaagtacatgcccattatctgtgctaatagc

SEQ ID NO: 211690 - DNA, 652 bp, Homo Sapiens
ttttttttttttttgtttgaaaattaaagtttattaggatatattaatgtatgatattatagtattactcatcacatgtaagctttacatctgaagcaattcatgcttactgggagggaagtttgagtacttacttagcttttcctgctattcctaggtaaaggccctcctgtggtcattctgaacagaagagtgagcttactgcaaaccacaggctggacagtagagggtgcatatcctcactgagtggagctcagaaaagaattaggattctgcacacatttattccagactcagttcccactgttggtttttatattgagattattttaaaatcttttcgaaatataatttatttgctctttaagtatgggtggggtgttaagctaaatttaaattgttctgtgaggcacaggcattatacttaagcatgaacctaatgaagccctgaacataccaacaggtagcagtccagttaagctctttataaggccacatgcctaagctccaaagggaatcttaattttttattggggagacatttcgttactacatttagtggactttgttagattataacaagcacaatagatttgtgatgaacattttttatttttttccccctgaaaagctttatgatacaacagctctg

SEQ ID NO: 211691 - DNA, 651 bp, Homo Sapiens
  misc_feature (611)..(611): n is a, c, g, or t
ttttttttttttttttttggaccggggcacgctttaatcgggagggctggagcagagggcggccccgccgaggggcgtggtcagtgtgggcggagccttgggggccgagtccgctggtgggcgggacccaaggggagcagccagtagggaagttgggcgagttccagaatcagggggcgtggctgtgtggctgtggcctccgtggggtgggcggggcttacatgccgggcaccaccccattggtctccatgttggtgaggttaccccgcaggttctgctcctcctcgaaagccttgaacagtgagttgaagttgccggctccaaaaccctggtggttgtggcgctggatgacttccaggaagagcgtgggccggtcctgcaccggtttggtgaagatctgcaggaggtagcctttctcgtcgtagtccaccaggattttcagctcctccagggcatcaatgttctccttcaccttgatcttggccgtcttcagcttctcccgcagttgtttgtagtacgtggagggaacagataagaactccaggcctctctctctcaagtggcgaatcgctgtgatgatgtcttcggtcttgagagcgatgtgctggacnccagcgcccccgttatagtccacatattcctggatctggg

SEQ ID NO: 211692 - DNA, 540 bp, Homo Sapiens
ttttttttttttttttttagggttatataacttttaatggaaaatgtcaaatagatacaaaagtataaatcgggttggcaagtgaaatacaggccaaaattgggcccaccagctgtttttgcacagcccaaatgttaagaatgatttttacatttttaaatagtgaaaagatgtaaaagggtaatatctaatgacataagaaaagtatgtgaaattcagattttattgtccaaaaagtttggaacacagccacatgcactggtgcgtggccccctggtggcggcttcatgccactactgccaagtggcaagagagccccatggctggaaaagccaacaatctttaccatctgctccaagccctgcttcactcccctgtgtgtacctatccttgcagcctcaaattcccggccaatcttgtttcatttatagttactcccagccccacggattcaaaggaaatcccagacatcctataatttcatcttcatgttgaaatttaaaaagtttgaaaattcaccaagatgtaatatatatgcac

SEQ ID NO: 211693 - DNA, 676 bp, Homo Sapiens
tttttttttttcttttttaagatgtagacttttcttgagactttcgtacaaggcaatggacagataaccttaacctcccagagaaaacacacattggccacagaaaaaggcgcttctccgtatacctgccatagttatcagcaactttgaaatggcttctcagactctcaggggttggcttgttgtgtttgcttttgcaaataactcaggcttaagtcctgctactttcagagcctaggggacacttaaggactaccatcagtttaacacagtggcacttggagcacatgctacttatggtggtgaggaggggtgctggtgtgagggtctgaacgcttgcttctcctctggcagggtgtgagcagccagaggccactacctgggcaaggatgcttgctcagtgtccatggagggacatgtgatccagcaggtgggcaggaaccaggcccctgtggccgcccaactctccataatagaatccttggtcatccatgggcccgtaaaccatgaccacgtctcctgccctcagcgccagcctgcccttcccctggccccccatttgcccatccccaggatcatagtccagagctgctatcatgatctttggagtcacagtgggagtctcttggagttccctggagcccagggaggaccctgggggatgatgagccctgaa

SEQ ID NO: 211694 - DNA, 701 bp, Homo Sapiens
ttttttttttttttttttacataccatactttaataaccaagacaattcagctgtttttccagagtatatttcaaacagagttggcatataacccgtatgtaacaatattgctgtgattttagtcatatttaagggtccaaaatatgttcacaaaagaacagtttgtgaatgtcaaccagtttttgctttatattccttcaaaaacattccaccctggtcattcacactaatctacatcactgaaaataaccaaaataattcacagtctcacctctatgtaaaaattctaattgactcaacagggaaaggactgccctgctccttttgaggaaggaaacctgcaaggcaagttctcaatccctaaaaccaagcaaaaatgttccagtgcagttgctgtagccatgtatttaggatttgtatttatagaattaaatttgagaatgaaacatggccatacacatcgcaataagctgcctctcatatcaaaaatacaatgcaaaatgacttgaagacatttccaataacacagatttgaaaaactgaacgcttagacataactcctgcatctttctttaattaagaagtcattgccacacttacaaagttagaggcagtaatctatattagcgtgtgattaatcacagagtacacttactaccatgaacttgggccctatgtcatagaatatttttgcctttcc

SEQ ID NO: 211695 - DNA, 663 bp, Homo Sapiens
ttttttttttttttttttaaacaaagaatggctacttcataggcagagcagccacttttggctaatttttaacatccaaagctaataaataatcaagaagaaatagagaacattaacaaaataaattatgttctatttgggaatacctaatatcagatactaacaagtacagtgataagaataaaaaagataataatcacacataccttctaggttagtagaaaagttaggaaaagatattaaatttaaagaaacaatattttgcatgcacacaaaaaacaaagaacttcgctcatgatgtggaaatcatgacccagcagcaatccgtcttcctggtccagatcactggaaggcccgggtggggccccctgggggcagccacgcagaacctgctggacttaactcgccagaaaaatcaccacccagttcaggaagtttgcagagggaaacctacaaatggtccacggatatgacttccctgctcctggagggctccctctggaagaggcttgcagcattccagtcatagaatgtgggtgagcactacagcgggcagcctcccacacctgcttggctgtaggcccaggaagccccggaggcccctctggctgaagagatcagactcagcttgggagcctggagttgatgcagcaagacatgttt

SEQ ID NO: 211696 - DNA, 544 bp, Homo Sapiens
ttttttttttttttttttggacaagtgtatatattttaaggcagatgcttgtctgtgcaaaatacaccagaagaaaatcaacattgtattatatgttcacatgatctcagatttttttcaataccatttgtcaggatatttatttatgataaagcacattaaaacagtttttttctaataaaacataaagaagttgatgaacaatttttaaaaattatttagagatttcattacagacccttcatagaagataaagaaaagtcaatctttttttcttgtttcttcttttagaaatgtccatatcaatttgttcactatgtcaggttggtcttgctgaagccaatgactggcttctgacaaaatagttagcctgaaatagtttttaacataaatctttgtgacttcagccatctcaacctccatgaatgcgtcattctctccccacagtagtagtgttggagtggtcaccatgtgatgtttgagaggcaggcagctgaagatatttcggtaatggttaattgggccacttaatgctcctcgtgcc

SEQ ID NO: 211697 - DNA, 603 bp, Homo Sapiens
  misc_feature (550)..(550): n is a, c, g, or t
ttttttttttttttttttgttttcagaatcccagagcccagcctggccgtgttagagctgtttattaacagggagggcctgtaaggtccttggggcagtggtgtggtgataagtcgaggactccatctcagctcacccagccggggcctctctttaactcaccctggtatggctaaagccaagggccaggcacctggaagactctgcttcaccctgacatgatgtgcttgacaaaggcttcataattgatgcagccattggcatcctcttgcccagctaacagctgctccacttcagcctcagtcatcttctctcccagggtggcaaggacgtgccgaagctcagcacccatgaccgtgccattgctctccttgtcaaagacacgcaggccctccacgaagtcctcataggtgccctgctccttgttgcgggaaatgtgctgcaggatgggcaagaacgtctcaaagtccagcatcttgacattcatctcttcaggcttgggcttgcccagcacacgcagcacctcggcattggtagggttctggcccanggcccgcagtacatccccgcactggccgtaggtgatcttcatctctccagtcg

SEQ ID NO: 211698 - DNA, 627 bp, Homo Sapiens
  misc_feature (550)..(550): n is a, c, g, or t
ttttttttttttttttttagtctttcctctgtttactctttacttcatttgatcaattccaaattttttcataatgccattattattgagggaaggggagtaacttcaaggtaatccagagagaagcaaatgcaatacagttctgactgagatgcagattcctttttgttaaatgctgactgtgtccttggtttcccattcacctgggaagtagaagaataaaaatcattccatagttccatccaaggagggcagctgcaacagtgtgctcttgagcaggctgtctgggtcatcaggaaaagccattccagttactcacgcattctctgagaaaccttgtcatctctgccatctgtctctgtgtaggaactgccaaagtccttcggttccccatctcaaataagcagtgcatgggttacttccctcattctaatccttcagtccctccttgtgtccgtttggatcttccaggaagcagctttcaagatggagttagaagtacgagtaatgaggggtgattaccgtgaaagataaaggggagaggctgtangggggaaggcctcagaccaccatgcaggctgactgtgaaggaaaggcaggggggatgagggaagactaagatgagcc

SEQ ID NO: 211699 - DNA, 637 bp, Homo Sapiens
  misc_feature (562)..(562): n is a, c, g, or t
  misc_feature (605)..(605): n is a, c, g, or t
ttttttttttttttttttccaagtccagatgtaactcttgtcttttattccagcatctcccagagctccaatatgtacagactttatttatacacatataatatacaccatatatacttatttatagatattcacacaccagcccacacactcgcacacactcacacgcacacacccttccaggaggggcgtgtggctgccttggagtcccgctagggcccaaacaagtgatactgggcttgccaggcagttgtgaggttttgtgttttttgcttttaaaaagaaggccatttcctccagatgtgtcctccctctccccaagccctaaaactcctccccaaaacactctgaaaaaaatttttttaaaacaagaggttttcctttgctctggcccaagtagtttctggagagtccaggcccatccacaagtcccgtgcaggtcctagagcacgagagccgggcgtggccttggtcaggcctgcagctgtgccctctgaggggagaggggaggcgctatagcatcaagggcacctgccagatgaggagggtgctgtccgtctcnccacacggggcctgcctcccactgctgcccagagcgctgccanagttgcggtagccctgcccgccggagatgatg

SEQ ID NO: 211700 - DNA, 431 bp, Homo Sapiens
ttttttttttttttttttgacttcgtaaaagaactaatatttgcaaagaaaggggacgaggacattttctaataagcattagccaggagcagccacccccaagtacattttattcccaggtatatttattttgggactaatagcaatcaaaacagagtaagcggaaggtcttttttgtaagggtaagatgactgtgttcctgcagcctggacactgactgctgcaatgaaattggatctgttgagcatgtcttccaaggacagatttggatagtaagccaggtagaaggccagagctcccacaaagctgtcaccagcacccgtggtatccacagccttgactttctctgtgggaatgtgctttggctcaggttctgtctgtgacagcaccacacatccttcagcccctaaggtaatgattaccctcgtgcc

SEQ ID NO: 211701 - DNA, 540 bp, Homo Sapiens
ttttttttttttttttttggttttttttaaatatattctgatttgcacatgtaaaataatgcacacttatgaaagaaagtctgaactcctacggtgaccttgacaagtccacgtcaattcctaaaacaggcaatggtaaaaatactgaatgatgttgtaccacatatagcctgacaaaaatgcaaaagactgtatgagaaatatccacaagttgctgagggtcatctccctggaaacagcttccttatggcccttggaaggtggaaaagctcctgtttcataaaaatgtgataagaggtcttctttttcaacaaaccgctgatagagccaagtggtaaggtcatcagtctccaggggtacatctttaattggaaagatcctgtaatgtacatgtgtgactgttggtttcctgtatccaaggatccaggtttgaatatctataggttcagctttgggataagctatcgttgtatctattatccactggaggccttttgatttgctgtctaattctttagcatctccctcgtgccgaattct

SEQ ID NO: 211702 - DNA, 773 bp, Homo Sapiens
  misc_feature (738)..(738): n is a, c, g, or t
ttttttttttttttttttgattatacagtcacatgaaaaataaacatctttatttttttgcctactttatttcattttttcaaataaaatttaaatctgtacaaagtatactgttacagtatatattttgtaagaatcaatgcctaaaataatcacaatacttcaataagcagtacagcagacctcgctagttttcagctttgatattgaacaaactcaagccggctgatgcacaacacgtttgcttggtttccacatggtgatttcccagcactgagatgggagaacatgacagcaaatatggtaatattacagcccgacacactgcgtttcttcatgtgataataactgcacatatttaatacagaatgctcaaatttactttttaaattgcatttgcttacttcttagttggcaaaattcagcattcttaaatggggtccccaaacagtgcaaattaatgatattctaactgtatattggcacatctccaataaggattaacttgtaaactcaaagaatatcaacaacttagtcctaaattttaactaatatacatctggtccatttaaccaaagtcattttggaaagatattaaagaacaattctatttctgaaaggatattgttttgaccattctttagagaagataatttttaaattgtcattaaaatgtttcactataaaaattttacaaacttgattagaaatttcaagattatgattcacagcagacanatacaaactgtatattccaacaatacctattctta

SEQ ID NO: 211703 - DNA, 730 bp, Homo Sapiens
ttttttttttttttttttccacttttcagattttatttcattatagaatatatttgacaaggatacatacaaacagattcatcttcaataatacatggtgtttactggtgccctgcacttctgcagtaggctggtgatgtcatcaaaaatgtttttgaaagttgcacttcatcagtcactctaaacaaccagtgccatagagctcagataattccattcatttacttgccttgaatgagtaaaaatcttaatatttgctttaaagtctgtttattactcttctatttaaaaatttgagatacattccccaatgtaaacaataaatttcaatctgtcacacaatcgaaatggataaggccttcttgacaaatttctgccacctccgtttaacgcatcagaactcaatcttatctcatactgtaatgggtcgcccatgcacaaaagacaggaaaagcagctgcccttggtacctggtggagcctttcgagacttctctctgcaggtttatggtgcgctcgagagagatctttctgacttggtctacttggtcataaaatacaaatatacaatgtccataagcataagacagtaaagcctagtcttacatatttattatgaattgctagaatcctttacaagtacaatatcatctcatgccaagtaatatacacaagaaggtggcaaaatgtctcaccgtgaatcagggcgtgtgaacaagggatgggggatg

SEQ ID NO: 211704 - DNA, 720 bp, Homo Sapiens
ttttttttttttttttttcagtatataatctaatctctttaattttatgtacatgaatataatgtatgtcaactttgtacatgagatacatatagtatttaaacattttactcaacaaacaagaatttacaatagcaatataactgactagagggctatcaacttaataatacttagattagatctgtactttaataggaaaagaatttaatagtttacaatcatagaaacactgacatttaaaacaagaatttataaaataatttatatatatcctagcatctacagagaggaatgatttgcatttgtgggtgtgtgcaatgaatggcatattttaaatttttaggtaataaaataatttagaagcagttcatgcagtggtcaaagcaaggaatggcaagttccttcaagaagccctctatctttgacaccaaccggcatcagacacacactaggtaccatggggcacgctagaacaagtctccttcaagagttacttatataaacatcaatatacacacgttgatatccttccttccatagtacaagtacaggtcacaacttctctcaactgtgggagtagtcagtttatacttaaagtgatttaatgtccctcctggagttctacataatatatctctataagaagggtactaacagaactttctagttttcacaaccttactctgatactttacagagtgcccccatgtcctatga

SEQ ID NO: 211705 - DNA, 600 bp, Homo Sapiens
ttttttttttttttttttgagtgtgtttttaatgcattttttttaaagattaaagtaaaatgtctcaattgtaaaaaatacacaccgggcaaatccttacctggataataaatatctacatcacagtacaataaaatttcttctctataaaatttaaatatggattatagtctatcactatcaaaagaaacactatgctaatatttccatattattaaaataacaggaaaaattacgagcttattttagaacctgatgccatagccgttggaaagggcaaagagattcaaatgtcgatcatcactctccatttgaggaggaactgtggcttggttattcacttaaattcagttcatgaaaaaggtttagccttacaaatgctggctacatttcaaaaactgtaagactgatttcataatttatgactcatgcagcaaaaggtcaatatgacacgaataggttagagttccatagaataaaaaggtatcactgacaatgacatgcttcaagggtgctcagcggttccttggaggctgagtctgtggggggcttagtgtcgaggaggggccagggcttgtacccctgttcatggaggagcaa

SEQ ID NO: 211706 - DNA, 789 bp, Homo Sapiens
  misc_feature (766)..(766): n is a, c, g, or t
ttttttttttttttttttaaaagtcagttggaatttcttttaattaaaagaccaaggggacaagaagctcctttgttacagtacattacatatggctcttatgtagaataaaatagacatcagagtcaaatgtttctaccagcaccaaactcttacttgtagcaggtgaacagtgaagcaagatttcttttactggctttgagattgtaatacatcttttacatgcagtgtgttctttggtagacttaatcgttgagtgaaattacagaatttgcaaaggaaaaaaatgtaaaatttgagcacagtacttctcactataagctatttatacagaattcagaaaaaatgtcaatcctagtaagatttttaaatacttcttaaaaacttgctaattagcttctgtgtgttcagacacacaagacaagtgaaatacactgtagtaaataattagtttttaaaatatctttcatgatgtttctggtaattgggctaatctgaagggcatggaattctttgaactcctgtatggctactttctccccttcattttcccccaagcacatctataaggcctcccattttggatcaacttgctaatatgtcttaagtatgtaaataatgacggcaataattttcaactactaccacaccgtagtatcttcaacactttgccttttactatatgaagaatatggaagttgaaaagtgatcaaggtaaatcagttactgaaaaaaagaaaacctagaatggagaaagggatatcanatgattttgatctgtcatgacat

SEQ ID NO: 211707 - DNA, 720 bp, Homo Sapiens
  misc_feature (638)..(638): n is a, c, g, or t
ttttttttttttttttttccgcgaagctgcaccaactttatttgcaaaaagaggctccaagcgcacggagaggatgggggctgcaaggtccccaccctcctcccggcctcccgcggctcctgccctcctccaggccccccacggccccagccccgccggctacacgatcccgaactggcagatgtagggcagctgatcgcggcagcgcttgtcgaaccacttgccgttggccgcgcctgacaggaccgcgcagttctcggtcttgccgccatcgggttgcgcggtgatctcagtctcccagttcttgtaggcgatgcgggcgccggtcatgtccacccaggtgccctcggccgccatgtcgttgaggcccagccagatctcggcctcgttgcccacgctctggcgcaggtactcatacagggcgtcgttctccgagccagtctgaggggtgctcagggtgcccccgcgcgagatgcagtcctcgctggcctcgtggaaggtcttcgtctgggtgaaggccagaaagcatttcatgtgcaccttggtccccttcaggcagaccgtctgcagggcctgctgctccttcagcagggccacctcctgggccagggtgtccagacggctcttgagctcctcanacatctttgtgttcacaacatctttcttggcatttacaatcttcttgggcttctgggttggtggctcggtggtgacctggtc

SEQ ID NO: 211708 - DNA, 694 bp, Homo Sapiens
ttttttttttttttttttaaaacataatacatttttatttctttaaaaacgtatgacaaaatttcttctgccatcggccatgctcagatttatacattataaaatgatttaattccctaaagtacaaaaaagaatggctgaatctccaaagagttgataaagactgaagatgtttataaggcatgcttatgtatactatttcaagccatctacaggacttgagacaggaatgtttagtgtttgcaaagccatagtcactgagccagactttgtggtgatccagagatcctttcatttcacagaactgtccttgacggcttctcccaataaagatttacaaccttatctcttggctgtggcagtatgagaggatcttctttcagtacatatactaaagcttcattggagtagccacgcttaggaagtaccaagtaaatgacaacataaggccaaatgcaggcagcaggtatttttcaataatgaattagcaggggctccaagaatacaacaagagaaagtgatttttcacagtgcttgagaggctcactgggttgtggagagtatctaactcagtgagttgtgagataataaacataaagtgctcataagccataatcctggtgcactgcaattgctcagtagatggtcattcatgttattggtgttatggaagctgctaatgtaaagctttatt

SEQ ID NO: 211709 - DNA, 682 bp, Homo Sapiens
ttttttttttttttttttaaaagcaagactattaacattttattgttatacagcttaatggtggaagataagactgtggtcaatccatatagaaaattaagaagaccatgttttagaatattttgcagggcttttttttttttcgaagtcccctctttttttttccttcagtgtggtccttaagcatcaatgtttggtggttgtttctagcaagtcttttgcttcatttattttggctgctacgtaaggagatccacctttatctgggtgattcaaaatcatgactctcctatgagctgttctaatcttagccttgccagcagatgggcttacacctaaaataagaccagcttctcgcctactcattttctgttcaaatcctcctttatagtaggatgaaaagctaggagttgaaatcttctttgcagtttctgtgataacttgttctagaggtttccagatccgaaatgcgtagcgacctgcaaatgcaagagctgcaacacccagtcctacagctatcaaacttcttaccagtctctgctggtcgacgtcggcgtctggccgtttggccgagggctgcaagtactcagcgtagcgcaaactctcgccaactggagcgatgacaccacgggcagccatggcaaggcggcccggagactcaaggcgccgcggcagtgactac

SEQ ID NO: 211710 - DNA, 722 bp, Homo Sapiens
  misc_feature (643)..(643): n is a, c, g, or t
ttttttttttttttttttaattttaaacacaaatctcaaataaataggacataattattatcatatacaatattttgccatcagaacactaagctatgtaaagatcattgctgtctactcaaatcaagtctaaagatatgacaaaggaactctatgtataacctggctttcctcataggaaaggtatagtcacatgtttccctcatgatgagcactgggaatttatttcatcctttatcatttaaaaacattatggctaatatattaacagtttttgtttgtttgtttgatagtagtgggctcagatggtctgatttggggtaagacaccagttgggggatggagaagtgttgtatacagagcataagggaggttagcaaagcccccaaatctctcaaaatttcatgcctcttaaataaagacaccaagtaaccaaaaaggaaaaaataattgtgcctcaacatatcactcaggaaacctgctttcctgcttcttaaaaggagtatatagtcattttgtgctaacaattggatctgaggaacagtttggcacagtacaaacaaacattccttcgctcttggtcggactagacaaaacgttctctctgattatcagaaagggggctataaagatcttgtcttangccatgccccagtccacgtaagcaagcaaaaggatgaaatgtgtagagatttcagaacaagcgaggcaaataatcacat

SEQ ID NO: 211711 - DNA, 599 bp, Homo Sapiens
ttttttttttttttttttaattttaatgcattttatttaatccaatacattaaaaatgttacctaacatgcaaacaatatacaaattattttatacgacgtctttggaatcctgtattttacacgtaaagcgcatctcactccggactagccaggtttcaagcacgtgatagccgcacaaggctggaacccaggcctggggaattaattcttgtcctcggtgctcaaaccattcttcccttcaagcctggcctaatccccagtctctctcatctcttcgaatacgctccgcggttatgcccctcacctcactgcactgcaaatatttcgtccactgagtatttgctgatcgtcactcagtgccgggtgacccagcttgaccagcacccgcagccgccctgccactgttgggccgggtatggtgtgtctggcttccctctgttctgggccggctccgaaacgcgctcaagagaaatcggaatcagacacggggcagttcagctttggaaatgaggagctcgaggctcctgggagtccgttgcgggcaggtgggcgccgctgttgtgtcgggagagccaggagcgacagactcaaactcag

SEQ ID NO: 211712 - DNA, 618 bp, Homo Sapiens
ttttttttttttttttttgaaacacaataagcacttttattgctcctaaagtcttcgacttggccgcagtgctgggctcagctggtctcgctcatatgtctttatagctactcttctcaagtggtggactcagtttccccacctctgaatctgggtgagccctgggactccctttggccagtagaaggtagccgaagtggctgcgtgcggatcagctggagctggctggtctaggatggcctggattgggacccctgaactctccttctcatggtctctgcttgtccagcaggctggcctgggctttctcccgggcagaggcggaggtccgaagcaaaggagcagcacgcaggttctcttcaggtggaggaaagcagaggcgtcagctcagactatgcctttttcacataaaaaatgattttcagctgaaggcaattaagaagcagaaagtgcaggaaaagttcaggtttccctccccttttctgcctaaaggcacgatataaactctccatcactggacacaacccttgactcagaggtggtaccagaggctgctgcagacaaatcctgttgcatcagcttcctctcggatatttaccatcccatagtttaccacct

SEQ ID NO: 211713 - DNA, 521 bp, Homo Sapiens
ttttttttttttttttttcaaaccacttttttcttttttatttaaaatattataaccaattgacatactagataacattgtttacattccagtggtgcatgtttaatgactagggcatgaatgatgaaaaaccacaataatgatctcagcattccctaaaaagtgccccattttgttttgtctagaggaaaggagagggaacggaacacagggaaggagaggaatggaggaggaatgacatcgcagagggagaaaagcaaatgtcagctatcatactcaggtttccaggtgtgacaccctgctgaccaggataaactgtaatgagaaaatagatgtcacagtccagggagacacgtaattcagtctaacttcattattcagctaaaagattaacagcttctcaaaaatataccaaatattgggcctacaaaagtaatttatttcttcgtaaaatttttactaagatttactccttttgtaaaatgtaaatggaccgatatcacgagcaggtttctacttac

SEQ ID NO: 211714 - DNA, 742 bp, Homo Sapiens
ttttttttttttttttttgaagtggagacaagtttattgaggagcttgacacccctcttctgccctagcttgagagaacaactgcagcatttttttctttttctcttcccgatgaccatcttttgggctggcgggccaggcccctgggtgtctcccatatcgctgtctttagtgagactgaggatctggtataaggaaacagatcagctgcagccagtgagggcccctgcgttgggcctgggagagagaaggtcctgttcctgcctttcctgtggccccaggcactctcagctctgaagccaggctattgctcgacaccgcaggatgcccaggactccctggaaccaggagcaaaagggcgcagtcctttccccgtcagagccacccaccagcttccaggcttcctgcatcttccaggggtccagcctgtgggacgtcagcaggaatttcccatagcagcaccggtctagcgggtagtgggtggcaccagccagcttgacacactgtgttggggcgaggcctcctcgtcgggcacttacccccacaaagacatcctctaatgggagaaggggtgcccggctggccaccttgagaatgagctgcacagcagacgctgacagcacataccccgtgcctgaggcatagggtggaaaggggccccaggtgtgaggccactgctcctctgatacgcggtgcctgccccccggtgtccgagaggggttcacgcgccagtgcacccggc

SEQ ID NO: 211715 - DNA, 793 bp, Homo Sapiens
  misc_feature (604)..(604): n is a, c, g, or t
  misc_feature (745)..(745): n is a, c, g, or t
  misc_feature (750)..(750): n is a, c, g, or t
ttttttttttttttttttcatattggggagatttttattaacttaaattgacattcttaattttgtctgtaagtccttggtatatatgcctttatttgaagcaaacctacaggtgtttcttaatatgacagaatcatgaagacttgcagttaatcagtgtttcctaatgattaaaacaatgttcaaataattacaaagttacttcatcaaaatacttagaagaatattctgaggagtgtttgaaagctctgtttataaatagtgattgatacatttatcatgtatttggtgctgaagataaacactttttacataaaacattgttttaatatactgctctactaatgaggctagttattagatatactgtattttaacactaaagaataaagctttatcttcgtatttatcttatttataggactcttatcaatgaagaactttgtatccaacaataataaactggcaaattgcaagttacgttttgtaggagaagcaaaaaagactggctgcgacgaaagaaagaagataactgcattatacatgcttcgtacaaacagtccattctgaatggtacaattaaatgcagtccaaatccttttanatgtttgtgtgcctagatggcaattacaatctccacacactaaaaagaaaaagaacaataacacagaacacagtattcttaatgattatagcacatttaacaccttcagccatccactgggttttcagatcatattggcanctganatttcacatccacatgtgcttgctttcgctaggtcactatttc

SEQ ID NO: 211716 - DNA, 761 bp, Homo Sapiens
  misc_feature (716)..(716): n is a, c, g, or t
ttttttttttgtttttttacctggcatatttaagtatgttttaatacaaaaggaacttggtaataatgagataattgtcttcaaaagtccatagtagactcctgatgatgttacccttccattattattaaggctagcaaagatttttattttttttatgaggaaaatgaaacgtagttgaggcaaattagtttattgaagcaagcgaagaagatacagaagggcatgcatgctaaagaggtgatctgtaagataaagcaggctgctgcaaatcggaagcaaccatgcacttcagttggtatgtgcatttccttttgcccagagcttggtgttgaaatgtagcatctgcaattttctgagctattaattgccatagtaacaacagtcgattagtaaatagtcctgtgaaatcacaatttcaaagacaacagtacaatggagactgcccccccagcaggagtaaagctgccaccagcttttatttatttttaatagacaggtttgagaaaagagtactttttgtggggtagctcacactgacttatttggaacatctaaagtagttataatcgccagacggttgagaatgggaacagtatgaaatcttagtaaccctttgggctggtatcctttaaataaattgtatgcacagctttctgaataggatataaaaatattaacactatgtaacattatttttgtttgttattcttaanaaataatcacgttgagaagatcacattataccttttgctatttat

SEQ ID NO: 211717 - DNA, 654 bp, Homo Sapiens
ttttttttttttttttttgggggcgagaaaatagtactgttaaggcaaatcttaccccgtagcagttaccagcaggacaggcaattttcagtgggcttttcagaagctggttgccatgacaaagagcacaatttattcctcagtcccttatcacagctacgatcacagaccataaaaattaacaccgctcttttccatctgatttcagagttcctcatccttacctgaggccttttgttcccccaattaaatggaatgaatgtcagtcatttagcaattcaattaatgctgattcaaaattccggccaaaaccagaatctataatcacaacttcctaatcacagttcagtcatgagaatgaaaagtaagcaggaaattgcactaattactcaattagactaatactgtatttctaagcaagggcttacgaggttgtcagccctgacaaaggacttcggagtcctcttcaccttgtgtgtccacagttgtccaaccaaagctggtattttcaactggccataatttctgtccatctaacatggatggactgaagctgggcaatgggcgtcataactgatatactgaccacaagtgagggccgctttggtgggcttcaaggggcacaggccggtgtggtggccagggctttcccat

SEQ ID NO: 211718 - DNA, 715 bp, Homo Sapiens
ttttttttttttttttttaaaatagagcatttattgatggaataacaaaagtgcttttcttaaatattcttcaaaatacatttgtacaacttacaataatatatccaaaataactgtatatacaaaacattacctagttttaatgtatgtgcttttttccccaaaaattacaaagtaacttcttttttttttggcaaagttcaaccttaacagaggtgacaattttaaaggttggtttaagaaaatagaacctgagggaaattgacacgcaagagtcaatgacaagcaagagatttggaggaatatttttagtttgttaaattaaaaatgttttttagagtgatacttttcacattacaaaaataaaccaaaatgaagaaaaggtcactgtaaaatgatggaaaaaggatctgtagatttgcttttagtatttcaaatagccaacaatgcatgtcagaaaatgaatgcaagatcacaacagtcttgtatttactttgtatttgaagaagatagtgaaataagtggccacattctattttcttttaattgctattaatatggttgatctgattggctcttcgatgaatttcatccaagaagttctccagttgttctattagcattcgttttttaaaccttgatgcttctttaatgacattttgtaaaaatattagtcttgtttgtaaactgccttgcacatgcttcagtaaagtga

SEQ ID NO: 211719 - DNA, 741 bp, Homo Sapiens
  misc_feature (602)..(602): n is a, c, g, or t
  misc_feature (629)..(629): n is a, c, g, or t
ttttttttttttttttttcaaatagtataatccactttataagtttttaaacaaatatacttatgcatagagaaaatctggaaaaatatatgccagctataaagtggttattgctcatgggataaattgtgggagactttttccctttttgcttctctgtgttgtgatttcctaaagacagggcagtggtgtccctagactgctctggaactgcaggacctaacagcctcactgtgtctgctcacccaagtctgacaggtggcagggcagtgtctgaggcccactgggatgcagacccaggaaagctggggtggggggcttctggtccccatctctgcagcctcatcctctccccagctacacagacccagatggtcactgtcctggaccagatgaaggcaggcacctacaagctcaccttcgacactgagggctactggaggaagagggggcaggaaagcttctacccacatgtggaggtgagagccccagtgggctggagggggctgaggctcatgactcactgggatctgcaggccaggtcctgctggccgggcatcatttaggcagtgggcagactggtcctgggcggtggcaggtangtgagctcacttgctttgagctcccanaagaaaggtgtccaggcagcaaaagactctacgaggacacacccgtcactcacctgcccagggtcaggctttgtggggaggctgggcaagggtgatcatccctctttgttga

SEQ ID NO: 211720 - DNA, 615 bp, Homo Sapiens
ttttttttttttttttttaaaactcaaggattctttatactcagataaggggtattctcaagtaccaatagcatcacaatccaagattgataaccttgaagtgaggacatgggttcagatttggcttcatcatggggccaaattcctgaccctctctggatttcagtcctggtctggaaaactggacaacacataactgcttcatttggctactgtgagaactgagtgagctctgctatgtgtaagggaaaccagcaatcatcctcataaacatcaaacttgggcccaaagccagcaagggagaaagagtctccagatggggagggaagaggccagacctcatggcctcaagtcctctcttctgagtcctttcttccccttggtggtggtagtggggatatttttcatgaattaccacttggaggacctggcttgatttattatacagggagccgatagttttcctaacacaagtggtcagaggtacagcagttctgcttggccgagctgttgaaggagactgttctcagagctcctccctctgtgatctttttgaggaagcgaggagaggtgtgaaagtgcttttaaactgtcaactggggttcccctcgtgcc

SEQ ID NO: 211721 - DNA, 660 bp, Homo Sapiens
ttttttttttttttttttgaattttgtatattttatttaattttaattaaacgtaaaaaggcaggacattccaaggctctctaacatgagtgtctgcagccccattcgctttgagatgtgaatgtgttaacccagggtggacaatggtgttgacttcattactagataaaaatccatgttattttgtttctcgcattgaaaggctgcttggctaaggttctgtgaagatccgatgacatttccaacactttgccttgtctgctttgctctgacaaagtgcttatgactactagatcttgctcggttatgtgagattacaattcaccggtttccatcctgtatgaaacagaagttaaacagttgtaaaagcaaaattccaggtctggtggttttcctgccaggtcatgatgaaaccatcctacttctgttgaacctcgtcccaggcaggatcggggcctgcggcctacagcctgtcttcccagcgctccagggctcgtgaccctcctcctcccctcacttcattctgcgctccaagggcactggggagagtcacagtggtctcctctcccccgcattggcctaaagcaggaagagagcagcccagtcactgagcagatccctgctagggcagggctagaacccagactgcagctcactcga

SEQ ID NO: 211722 - DNA, 689 bp, Homo Sapiens
  misc_feature (82)..(82): n is a, c, g, or t
  misc_feature (584)..(584): n is a, c, g, or t
ttttttttttttttttgtagatctaaactttgatctgtattttggataatcaaataaatataaagctttttgccccactttngggagggattttttttttctagaacaaaatgaaaccttcaacatattcttccactgaaaaagccaaagttccatttcagacatgaaggtgaagggcccttggagctgtagcaccagaagaaggaggaagaatgcgggtgatggctttgtttggagtcatcaggctctacaacctatcatttggtttctcactagtagctttttaaaattcccaaacagtcttagtattcttgttgttaatgttactattaaaataagttcctatggagtaaaagagaaaaattaagctgttaataaaatgtcttcaaacctcttctcagaaaacaaagcagcaggttcatcgtacacgtaccagtctcaatcccacagaaacgcttggttcctttcatccctatgctgtctatacagtttaatctctacctttaaaaaagagacgaatgcagtcattttgttagcttaggtttgtgttttgtttttgtgaagtgctgctggcttttggccanaatacatatatttcaactgaacccaagtgttcagacaattgccagcccagtgaaaggctcatgagctgtcacacgacgtatggcatcttctaaattgcaacttgc

SEQ ID NO: 211723 - DNA, 586 bp, Homo Sapiens
ttttttttttttttttttcattaaaacatgctcatggtgaaaatttattttacatatttaaaatagtacatttaaactgattagttacattacaggtacaacgatgagcactgtgacgccatcatattgcacatcctgacttcatccatatgggtttctttaaatagtgcaaaatactttatacaggaatgtgttcggaagggtcttgcaaccaaaataaggaaaagaagtatcttacaaattactatgaacatatattcaagtgacggggtgaagggaaatttttaaaaagttacaatctgtacagaggaattgccacagacaaccaaaaagttccctccctcctgggagaagcagcgggcctctgaccttcacaggtctggcatttgtgccaaggtaattttttggtgtcaatcaaaaatatatatatatatatatatcagttacttaatacaatataaatagaagtccagtccagtgagtcctgtggtgggtcaaatgtggcaacagaaggcacaccttttgtcacctagggtttcagtagggttcttaatgaatgtgggggagaaaggggaaaaatgaacag

SEQ ID NO: 211724 - DNA, 695 bp, Homo Sapiens
  misc_feature (591)..(591): n is a, c, g, or t
ttttttttttttttttttcacctggcagttgagtcagattgtaggaaaattaacccagatgggtctacatttttcttcaagttcaaaccacatggtttcctagtcagaaagtctcatggactttcttcctaaggtgttctatgatcagaccacctcctaaatgtggcttttacccattacaggctacagttgaatcaggcaggagcagctgctggagagcacccagccgacagacctgcattccagaagcagcttggagaaactgggaagacatttttgacccattcttgggtttttactgtaaggttagcagttacatgatgccaccagtccaagacttagatcatgagagaaggcctttttaaaagtttaccagggaacatcgaggctcataaagaactcttttgtcttcacccatctctcctcctcccactcccatccactttctcatagctcaaaaaccactcattggtaagcacagtcaaacccaggcctgtaatcacctctgaaacaactactcctaagcaagcaaaccccatggctggtagaccccgtgggtattttggcatcaacactgctcccctcccctcncatcccagtcactgcagtttagaattgcatgccaatttccttttctggcagggcctggacggcatggaagccaggacagcatgggccaggtgcgcagcagcagc

SEQ ID NO: 211725 - DNA, 538 bp, Homo Sapiens
ttttttttttttttttatagtctaatcgattattgttttaataagaatctgtattttttcatgcaaaaaggagtttaactgtcacccaggaaaattcgcctgtggttggagttgccctgtgcgacacgcccagggaagcgctggaatgtccctttccgctcccatctgtctgttaacctgtaacccgttgtgcatgtatttgattcttcccggttagaagttttacaatctcggtgacgataggtgggttggggagagactgggttttgcagccagatattgggttacaatatcttgctgtaccatttttttgcctgtgggaccttggtcaagccatttcaacgtgccgagcctcagcctcccttctataaaatgggaagaaggaatctcctgcagggtttctgggaagattcgggctgctgtctctctagggcctaccatgttctgagtgatcagtggagaagggtgctcatgggtggggactccgacggtctgagcctggatttcttccacctgctcctccttttggccccgtggc

SEQ ID NO: 211726 - DNA, 680 bp, Homo Sapiens
tttttttttttttttttagctaatgagaaatgcacacagtgtcttcaatattgtttacaactgcaaattgccttcatgaaaataatttaattgctcctgagaggcctgatagatgtccctgaattctgtccagccatgccatgactgacagaacagagaaaccaggaaaaggtcacacacggtttgagaaaccatcaaaatgtggtgtccatctcctggccaagacaggaatttacagcaccattgtggtgttcaaaaactgtcagaaaccttaggaattgtcacagttaccacaactacacattccagcaaagaggaatggaagacagaggcaacatgaaccaggagggtagaaggtctgtcccccagcactgaagcaggcacaaaggcataacgtgaaacactcatggagaataaacaaacagtttaaattgcacaattaaactataaaattcaacactgactgcaaactggcttttaaaatgtgtagacctatcaccctactatgttttatctcttttaccaaaattctgtcagttcacctattttgttacataggtattttctcccttctgtagtcagactaaactatattctaatgccaatgctacaaaaagggaagccaggtaattgaagcaccaggctgcatgacatgttctaacgggaatccagtgctatga

SEQ ID NO: 211727 - DNA, 637 bp, Homo Sapiens
ttttttttttttttttttgagatcatgagaagtttgcttcaagtttaatacctttttccttttaaataacaagttagaatagctccataaatacaaaattaagcctctgatactatactcacacactcaaaggatgaacaaacttcaaaaataacatatttttctttgacaaaatcagtaaattggcaagcttgtcaaagaatcatttcagtctaacattttacttagtggataaatatttgtcaacaatctgtaaatagtataaatgcttttctcaaaatgctacgtgaaagaagccaggcacaatagattacacattgcatgattccatttatatgaaattctcaaacagcagaactaatgatagaaagcaaaccagtgtttgccaggggccaaggataggagcaggggattgactgcaaaaggaaaaatgagaagttttcagggtaaagaaagtgttctgtatcatgatcactgtggcagacagacaactgtatatatgttttcaaaattcactgaatttgacactgaaaattggagaattttgtgaaaattatacctcaatttttaaaaagtcaatacataataaatcaatatgcatttcaaaggatcatttcagtcaaaatattttacttgg

SEQ ID NO: 211728 - DNA, 554 bp, Homo Sapiens
  misc_feature (93)..(93): n is a, c, g, or t
ttttttttttttttttttacaatggatccatggtatttattaagttcatattcataaagaagttaattaaaacaaaaggagagccacccacgngagataagagtaggtcacaaaccaatgaatatgactgatccagttacaagaaaataaagctgattgatgtaaatgaaaatactaattggatagtgcaggtgacagcagcgaggaagctgtgaaggtgtctgctcacgcagcagttgggaaggttggcctgaggctttcaaaacccagaacggtttaggatctcagtcaccacctctgggaaccaccatcatcactgttcttttaatgaggggatctccagtccccgccctacctttcggcctcccccgcgtgttgaggggtgggggctggacagtgactctggggctgggatgtgacttcgtgctgggcccccccaggtgaagctgttcatgcaggacctctctgccatgctggccggcctgggtcaggctgagcctgcagcccctgcctcctagccctgacacaggtgagcagcgggagagggaaccctg

SEQ ID NO: 211729 - DNA, 618 bp, Homo Sapiens
ttttttttttttttttttggcatttacaattttagattattagactgttgaatctctgtgtggccaaagacctgtacagggggctttggaggggtcacagggggccaggagtcagaggggatggtttctcaacccaagagacaggagatcaaacctaaaggagaagaaaagccaaggatgatgttagaaaaaaagaacaaaaacagaagggagcctgggaggggcccaaactaaggcgtctagaacgagatatcaaaattagagcttgagtagggcttaaagagccagaagtaaaactaaagcatctcaatctgtagcatctcgcaaaaagttaacctggctggcacagttttggggagtacaatgcttttccttggcttcaggagaccccctttcccaactcctttgaccttcaaacatcgattgcagaatcaatgttcattgattattgtgctttcattgggacacagcgcagacacgcacaaatcagccagctcttccctgactatggtggtggcctagtccatctgggctgctataacaaaataccttaaactgggtggctcataaacaacagaaatgtgtttcccacagttctggagactgggaagtccgaga

SEQ ID NO: 211730 - DNA, 663 bp, Homo Sapiens
  misc_feature (577)..(577): n is a, c, g, or t
  misc_feature (607)..(607): n is a, c, g, or t
ttttttttttttttttttaccaaagaataaatgtactgtattaacatgaagactaatgacaaatgcactgcagtagtaagcacgtcatagatgcatagaatattctctatatagtctgaatatggatataaaataagttatactcattttgttttccatcacagtaggagcatagcatacaaagtgattggttcagtggccatgaagcaagccaggggagagaccacagaagagaatgtagggcattgagtacagtggggatttgccaaggacactgcagagtccctggggaccctctggggaacaaggccccaaacctctcaagttagccttctgagaatagtatgaggtcccacttgacaagagacagtggctgcatctgagctgggatgattcaggcaactgggtgggaggcagagcagggacaggcacgaacagcatccagcaggctagcccactctcctgctggtgctgttggatgtctatgatgctgggaatatggggcgcagagccagaaggcacggtttgcttctgtgacgtgacagatggccagactgatgggccaccaaatgctggncggccctcctcccttgccagcctgtcctgngaggctgcagggggcctgcatactttgcttgttctccatagtttgtcattgggtat

SEQ ID NO: 211731 - DNA, 642 bp, Homo Sapiens
ttttttttttttttttttgaatacttgcttatttattcttatacaattaatgatcccctcttaagaactaccattgcagtggctgctcccacagagccccctccaggcccttcccccaccaccctgggtatccctagcacctgtaggacagcatcgttgaaacattaggggtgctggggtctgagagggtatcctgctgggacaatgcccgcggaacctcctgcctgtctttagacatggacaaggaagatgcactgatctgttttgaggagcacatccgagctttggagagggaagaggaggaggaacgggagcgggcccggcttcgggagcgacgccaacaacgcaagaatcgggaggccttccaggtatctttgctgtcctttctagatcagagctcagctctgccctagagcacaacctcttcacccattccctgcccccttctggatacgctgcctgttctttctgtgcctagccctgtccaagctctatgagacctctctctgcctgcagtctgtttctgctgtacctcctcaattctggactgtgctcttctagggagactagatgtatgcaccacccagaaactgccagtagagagcacctacaggcatgacttggcagctaggccatgtttat

SEQ ID NO: 211732 - DNA, 538 bp, Homo Sapiens
ttttttttttttttttttacttttcataaatttatttaagaaattaaatgtggtttctggcttggagaaggaatagtgcaagagtgactgtccatgctgctgaatcctgtgggctccacgccagctcgccaggccctggctctgctcctggcgccccttggcaggacagggcgccatctccacacacccgctgcctgggctgtgggtcagtcctgtgtgctgagccacagaattcggtctctctcttatggcttctcacgctcacgagcgtaaggcaatcttctgtgtcactaagaatcaattctttttctccattgtttgttgttagaaaaacaagatgccaaaatccaaacaaaaccaggaacgaggtggttctggagctaccgcacagcagcaggcagactgaccacactcccgactgggagtatgcagccgactgcaccgtcttgtccttttccgctacacacacacacacaagtgaagagggtgtccagcagccagcggtgtcttgaggggctggctggggacttggagaact

SEQ ID NO: 211733 - DNA, 624 bp, Homo Sapiens
ttttttttttttttttttcaaaaagaaatgaactttattattttcaagtacataggtagtacctcaaactaatgtcttacaaaaggtcaccaataaagatcctgtagatgtttctttaacaaatacataaagattgatgataattagcccatgcactcgctgcttctaaaaggatatttctaaagtgcctgaaaagtattgtttttggtagactaaacatgccacctctagcaatattgtttatgctcttaatttactaaaaaaatgccatttttattgattgtgcaaagataaacttttgtccacagttagtaatctccaattaatcggatccaaattaatattgtctcccacttagattcccaggcccaaggcaatgactcccttacttccttgcttctgataaagcaaaattccagtgcaatgaaatgacagcctttgggaggtggtttatgggtctgacccaatgcttgtcttttgtgcttccttcctgtctgccttaggtcttccattttcctcagatgtctttctcacttgcatgacctatctaggtctctctctacaggacattcccagtgccttctaagccaggcttagagaatgggcaacgctgcctgcagagca

SEQ ID NO: 211734 - DNA, 623 bp, Homo Sapiens
tttttttattttttttttgctgattaagtttaccgtgttatatgggtgcggttcatggcgccccgaaacaattacaataatatatcaaagatcactgatcacagatcactataacacatataataacaatgaaaatgcttgaaatattgcaagcaattaccaaaatgcaatgtagagacccaaaatgggcacatgctattggaaaaatggtgccaacagatttgcttaaagcagtgttgacacaaatcttcaatttctctgctttgcttttcttaacctattgctgtcacatatatgtcccaaaaccttcaatttctttaaaaattctgctacctgtgaagtgcaataaatcaaggcatgcctgtatactctctcctgttatcctttctccagcctctgcacccccctcagcctcagcccctctgcacccctgcccctggcaccttcccacacctgagctctgcgttgttaccctggggaaatgccaccctttagggaagtctccaacttattcagtctgtaactgtcagagcatacagatggctcatctatcttagcagttactgcatgtcactggtacttaattcagtcagccactcagccttttggggagcatttgtcct

SEQ ID NO: 211735 - DNA, 612 bp, Homo Sapiens
ttttttttttttttttctcattacttaaataatctttatttctcatgcactaggaaagatggttcgtatgaaacactgcagttcacagcaaaggcctcagtccagaacacaacataggggccagctgggatcacaatctggtcaaagctctgggagccacactgggaacaccactcccggggttgagtggcagatccaggactttgcagcaactgtggccccagacataacacaaggcagctgccctctcccacagaggcacaggaagctgacacccaaggagcacgtgggctggggacaggacggagaaggctgctgggcagtgacttggcggagatgtggtccagcacctctgccgcctgcgtctacccactcaggccaggaagcccaggcctgtgactgagctctaggcccagctctacccagtgcagagctgctggagttccacagaccctcagcagccccgtgcccacagcagaggtgtagaggtcccccgcctgcccctcggctacatgaacaagacaggggcctaaacttcggccctggccaaggcttagatttgcccaggaaggaccggaaaggctagaggggccagccccccacaaccatccc

SEQ ID NO: 211736 - DNA, 648 bp, Homo Sapiens
ttttttttttttttttttgagacaaggtcttgttctaacactcaggctgaagtgcagtggcactatcatggctcactgcagcctcaatctctggggctcaaatgatcctcccaccttggcttccacaagtgctgggattacaggtgtgagccaccatgcagcaccctgtgtggcattctttatagaagtgagaaagttaaaagatccacctgtcttcattcccagcatgctccaacaaggatgtagaaaagtgagctcctgtttcctaacacgaaaacatgtcaatgttcaaaacttgcaggttaacatatcacaaccaaacattcactgaggaatttgtttaaatctcataatgatgtcaaaatacatttctacaggacttgcactgacccttcccacagaattgagaacagtggctccccactaagatgtgagggagggtggaaggctggacaggaaaagggatgctttacctcttggcacataaatgtatcatttcactataaaagaaatatatacatgatgccatgttcaaaataaaagaaacaaaatgttgactcataactggtaaaacagaaatacagttccattctctctaatggcaaggttgttctgcttatatgccattctcacctacaatacccgacg

SEQ ID NO: 211737 - DNA, 700 bp, Homo Sapiens
  misc_feature (678)..(678): n is a, c, g, or t
ttttttttttttttttttcctgttgtagaatattgtttatttctgggcataaattgttgaatgatgcaaaacaaattttatgacacaaattagtattgcttgacacaataaaaaaaggttaattatttaatgatatatcttcatttaggttcccttgattggggacatgggtaactaacttaaacaaactaccttacttgacataaaacttataacaagggaaaaaagttaacaacttaaagagataataaaatcaaagcctattatgttattaaaaagattcacgagttactaccactactattactagttaatatttattgaattactctgtgcttggaactgttctatgcattttacttgtgttatctcatttgatgctcacaacaaccttgtgaggtaggtattattgttatcatcatcatccccattttaaaaggaggaaattgaggcacaaagagattaggtagcatgcccaaggtcgcacaactgaagatggtaggtttggaatttgaaccgagacagtctgacaagatatatgagactaaagtcaggaattttaaattggttaggcttcttatttacaaatcatataatcatagaactacaggataaaaatagttatttcagaatatcataatatctaaaattagtaattctgaacctttgtcttggcanatgtaccatcaattaagacaat

SEQ ID NO: 211738 - DNA, 581 bp, Homo Sapiens
ttttttttttttttttttggcagtaatgaatgccatgttggcttttattattttttttttctaattttaagttccaggatacaagtgcagaacatgtaggtgctatatagataaacatgtgtcatggtggtttgctgcacccatcaacctgttgtctaggttttaagccctgcgtgcattagctatttgtcctactgctctgcctcccctcgacccccacccctcttaaaattctttttatttttcacactgagtcttcaaagtccggtgtgtatcatacagcacatctcaatagccacatgcaggcagggcgcggtggctcacgcctctaatcccaacactttgggaggtcgaggtgggcattggacgatgcaggtctggacaagtgcctggtatattgtgggcacaattcttgaatggacccacgccaatgtacgcgtcgcttttgcctgggccgttccttcttcctagaatgtcctgcttctttctctttgtctaactcatatgaatgaactttttaaaaaattagtatccttcaaaactgtatttgctcaggcgttctgatgtgaggccctcctgac

SEQ ID NO: 211739 - DNA, 636 bp, Homo Sapiens
ttttttttttttttttttaagctttaaaaagtgcatattctttaatccaggaattactcaagaaatttatacattttttaaaaagatcaccaaatgcatcccacatagttcctttacaataaacaaaagataaacaacctagcgtcctgtcctatatgcgctctaccagatgactcaattatattccatccatccatggaatcctagacaatcataaaaggacatttatgttaacatggaaagtgaagatacgctttgaagaataggctacaagagagaatacattacacaatcctactgctgtataaaacaaaacatctggaagaatctatgcttaaatattaatagtgtgtcccgcaaagtggtaggataatagtgacttttattctttttacttatctctattttctcatgtttctgtaatgaacatgtttcataaaacaaaatgggtctgttataaaaatctgaaaacttgtttttgaaagagagcagtattacaggctgtagtgtcaaataaaatattaatgttaaatatcacacgctcccgtgaaaataaccaacattcttaattaacctttcagttctgtgaatctaatactagatcacaccttgctatttctgaaaatgttagtcctg

SEQ ID NO: 211740 - DNA, 602 bp, Homo Sapiens
ttttttttctttttatttcacgtttcacaacacacgccgtggtggcacagtctaccaaagtgcccgcagcgccacgcttgggccggaaggtctcattctgttcgtctctatggactgattgaatttgggatggccagctccagaatgttccacgtgggggcactctgtgggcagagaggctgagcccttgcccacactggcaccaaagaggttgcacgatgcagcttgcagtgggtccaagccgggtgtgctgtgttcttcccgtttgggaaaagaaaactccattgtacctaaatatctgcaaggcaattttcaatttcttttttaaaactcttttccccccaaagtattctttgttcccctccctcaaatttctgtcccatgaggctgtgtttcttctaatttcatttgtatatatctgattggttgctgtcggtgttgccattgctgttgtgttggtggtggtggtggcggcagcctttcccgggtggggaagtggcactcacatcaaaatttgagaagcaggtgcaagaccagaagaggcagcagccagacgcagcctgccctcctcgacgtgccgttgctcacctcgctgacggcgc

SEQ ID NO: 211741 - DNA, 709 bp, Homo Sapiens
ttttttttttttttttttaaagaatttccatatttattttacataattttaccgtacacatctcatgccaacacacaggaggcatatacaaacaaacgcaccagcttctgttttccaaagtcatatggcaataaataaggatgggtgggtctttttttttttctttttttcttttttttccacaggaaacgagacttcatttctctttaactgtacaaaatttacattgtgaaggatgagggcaacgatccagagctgaggggatctggggctttgaggtctgattgcaagctcagagcaacttctggaatcccgcagccctgaacctgcttgtttggccgaacacagtcctcaagtgggaaagttggtgtgattcttgcctctcggtgggcaatagatgagagtgggggtgtccttcctctgttcacctgtgctctgcctccctaagcaaaggaatgcttggtgcacctcccaaacctgcagctgtctccttaccagagctagcagcatgaaactgtgcttttagtgtggtcctaccaagcagagtgtggatgggatggctttgctgagctctctctttttggctccagtcactcactgtttagaacagttggagcaactactgcaaaaagggccaattgaccaatccaagaaagagagagccagtgatgtgcttttcatttagctttcagcatgcccagagcccttc

SEQ ID NO: 211742 - DNA, 729 bp, Homo Sapiens
ttttttttttttttttttcagtaaatcactaacaaactgggctctttatttctgtccaaaacaaggccacaatttgtgttttatcactgggatggcatggccattgtgtcaatggctcagggagacttcaagatcttcgctggaacctctaaggattggaatgttcgattcagcttcagtgtgagcagctgtcagggcatctttcttggagagcatgtccatgcctgggtctattatcttgtccaaatagatcgtctgcccaggcagacacatcctttgtcatctttgcttcttgtttcctgggtttcctagtactgtcaaatgtgaccttgtgcctcagaatcatcatagacgcttggaaatgggagagatcttcttatctcgttgctgatccaataccacagcatacacatggggaaactgaggccccaaaaacgaaggcaaattagtgacaggaggagaactggagcccaacccctacttgcctccatggctggaacctcaaaggtaacaccaaggatccccttgggctctaatccatcatcttagaacagcaggagggcttcacagacagctttgtcaatgcttctgtgcccacttgtattaacccgtcactcacccctgcaaatttcaacttcccaaactcacctgagtcggtgatgaactattcactggcagtgccccccgctctgaattgggttttaagtgatgacaagtcggctgagcctc

SEQ ID NO: 211743 - DNA, 688 bp, Homo Sapiens
ttttttttttttctttttataaaaaatttatttctctgtaaatacaaattccaacatcaacaaacaatagtccagtggaaaaatactagccattaacattgaaaacttttttcttaatttaataaatagaactttggcattcaaaattctagctgtaaaccctattaaaaaacagaacaacaagaagaaaacccctttacaaaaaaagaggcaagaatgatagatcagaaggcataagccaaccagtggcttcacattctttttttttttttttaaacaataactgtatttcaattaagtcatgaacactgtatttacacatgaggtattctgggtggttcaaaaactgaacccagcttacaaaaccaccagtcatagtgactgattatacactgtgctgtgctttttaatgtaaccacctagcaccttactacttcttgtcatcacaacaatgcgatgttaagttttatgtttatgtatttaactatttatacatatatgtacatatacatacacaccaatgaatacaatctaaaggagtttccagctcactacacagggaaggctgggctccaaagacatctatctgataattcccctcatgtttactaaggtatccacctagtgacagaaaacggctccttgctttaaaaaaaaaattccttaatcaggtttatatacagaagaa

SEQ ID NO: 211744 - DNA, 716 bp, Homo Sapiens
ttttttttttttttttttcaagatctctattggctttgctttggttcctgtttcccccctaaaaaaatctaacttctaaaaacattctgctcagacaaccatttcaagttataggacacatgctctaaaggaaaccatccaggagaaacatttgcacaagttctcctatgacttgagattgcatctgagaagggtgcagggggagaacagacagaaacagcccactctgtgtgcagaacgccgtgtgtcctcagtgtttctcggggcccatagctcattagctgcagttggtatgaagcctgcaacctgtgaggccataaaattccgaataataattcatcaggtcctgagaattctcctaagtacatttagatcaagcgcatgacatttcgcccctaatagcagcattggcaaatggcctaacggaatttagatggctccaccaagccgcacaactatattttgtgtgttcaaatgaggggcagccgtagaggttgatgggtggacataaaatagcagtttaggctagtggtcaagatcacacaccacgacactgggcaaattagaacctacgcatctcaatttactcatctttgacgtaggatattaatatggaaccactcaatctagtgtgaggactacatgaaataaatgcttagctgatgcaggaaattaaagatgatggcatgtttttctgttggagtttattttaaacc

SEQ ID NO: 211745 - DNA, 716 bp, Homo Sapiens
ttttttttttttttttttcacatttcttacttttatttcaacatttaaaatattcacagatggagtattatattcagacatctccatggaagatgtacgaaaacaaagcatacaagcattccacaattacagaattacatatttgtgattatgtgaatgttcaccctacagtttatctggaaaaacacttttaaaaaaaaaaaaacttttgagtgtttcactggattaactgccataaaaaatgaactgcaaagaatttcaggagagatacctaaatttaagtacttttactttttaaaaatttcaaacttttatagtattctgctaacatatctcctgtgaggaacacttaatactgaattttcccctcaatagccaagtcagaatatacttatttcatttttcacccaagtctttgtttctaaacgcattatgtagaatagatttgatcgtcacagcatcttgagtagctaatgaggtaggagtattcttaagttcttaggcattaatgaagcaaagcaaaagacaatcaaattacaaagattttcttttgtagtggttgttctttaagtaaaatgctaagagcactggaaattggtcaaatgctactcacattttaaaaacgaagaggaaaaaccattagaaagccctgatacacatagagtctgttaaagggaaaaacctgagtactggaattaaattcattttggcattgt

SEQ ID NO: 211746 - DNA, 677 bp, Homo Sapiens
  misc_feature (563)..(563): n is a, c, g, or t
  misc_feature (649)..(649): n is a, c, g, or t
ttttttttttttttttttgatttaagtaaaaaaccaatatttaataacaattttaaaaacatagctccaggccatccacatgctttaactcatgctcaggctcctgatattgatgggttgtctttgtatttttctgatgcccttttatgtgaattcacctctataagacaaaaaattataatcaaaattattagtattacagtcacagatattgcgaagatgagtttgttcttatagtcatctcctggaacttctttcatgagctcacttgacttctgctctttctgttcattctgttccatgttctcattaatataatttgtttttttgttggtccgtatcccattctacattcaatgcctttgcttcctgctgctcgctgagaagcttcatcaggaggcctgttcgcaacatgagcttggcacagctcccttgcacatgtgtttctgaacattccattttcaaggtccggataacatgagacatgaactttctcacatcctcgttggggatgagggaccgtagctgctcggttagctgaatttcaagctgatcacccccanagcctgacaagttgatgccactgctgtctgagggcgcctccgactcaatagtcagctgagtgctcatgtgctgcttccgggcttgntacatcttcatgaacgctccttctggat

SEQ ID NO: 211747 - DNA, 723 bp, Homo Sapiens
  misc_feature (687)..(687): n is a, c, g, or t
ttttttttttttttttttgggaaagttaccgcagatgattatctgtattttctaattttctacaatgtacaaataatgcttttgaagtaaggcttatgtttttgaaaagttatggatttaagtcattacttaccagcaaaactttatatgccaagtagctaaaaatcatagttcaactgactttgtggatatttcttagaactatggtcctcaaattgtgagttgctgtagaatggaacttttctgaactattatctcccatccaaatgccatcttttgcactatgagataagaatcactgtcacaaggctgggtgtggtagctcacacctataatcccagccaactcagttttttagaggagaaaactgaggctctgaaaagcaaagctacttaccaaggtcaaagctagggtggagctgggatttgaacttgcatctctgagccctcagcacatgctcagaaccattaaaccagtgattctcaaagtgtggaccctggaccatcagtatcagaataaccccagggagtggctgtttaaagtgcagattcctgggccccacccaaatccactgactcagatattctgcaggagaatagtctcaggtctgcattttgaaccagattccccagatgatatctatgtttgctgaggtttgagaatcaccatacgagactcaggctgcanagcttccttgacctacccgatataattggagtactg

SEQ ID NO: 211748 - DNA, 711 bp, Homo Sapiens
ttttttttttttttttttaacccttgactgtttctcttttttattttgagaaaaaaatttagaatacataaaagtatatataaatataacaactgcccatgtacccatcattcaaattatataaattaacatttttagtcaaatgcttcatatcttttactttgtaatacaagaaataaaacattacacataaagctgaagtactcactgtcgcctattaatacatttctgttttcttctactcccccatttgtgttccttcctatgatgaggtgcacacattgtggttaggaattccatttttaaataatggtggtctaagttattgggactaatagctctctaaaaagcaatcaaggtaactagatttaaaaaaattacaatcttaaaactacaggttagccaacaaaaaatggactcaatggagtggggaagtatattccatctactatagtggaaggcactgaaaagtcacctggcaaaagatgtccagttataattctgtaaaagggaaggagtaaagaattagaaacattaatacaatctaccaaagaatgaaacaaactaaaaagtctacttaaaaaacttgcaaatcacaactgtaaaatgtgaagaaatgcaatgccatgagagagagccaacaaaatcaactttggaaaggaactgactctaagtggaatttctcttaatagaaaaatgtgataaacatat

SEQ ID NO: 211749 - DNA, 673 bp, Homo Sapiens
ttttttttttttttttttccgagtgaaaacagtctgtttattacagcgtctagaggtggggatgcagaatgcaggggtgcccagaggaaggggcgcctgcagcccaggggcggaccgtgacaatgcgcgcaatccaaatacagttcacccggaagacacggcagagcctcccacgttacaaaggctgacacagaccagcagcgtgttgtgttgggaggggggtctgaccacgatggcgagggcagtcggcggggggtggggggcctgctgaccactgaacagactgacgcatcctgggggcagataaattaagggggaagtcttaaataagtcactgtgcgtgcctcatgggccgaggagggggtatcctagtttttagggttcctatcaattcctgagcaagagccactcccaggcgccgcccgcccacccacagtcagcagcagcagcacaggtccccgccagctgcccacggaaactcaggccaggtgccagcaccaggctccagatccccagtctccacagccaccctgccacccgccacacaccacccctcagtctgggagtgtctgagaagaaacaggcccagggctcaaaacaggagggtgtccgcaggcagccaccacactagttcacgtgtggtgacacgcatatgacccagtgggctcaagga

SEQ ID NO: 211750 - DNA, 703 bp, Homo Sapiens
tttttttttttttttattcttctgattttaataactcatatatttatatatatatttatatttttgcttatcttcatttcctcagcaaaaaagggaaataaaaatattgatctataaaataagccgatgataacacaatgccaaaaatagcttatgttaagtgcaaggggtgaagcttgaaagcaagctaaattgcaacaacatattgatttaacatttaaatacaagacttgcaataaaataattcttgaaatatgcttctcatttttagtttacttttgaaaaactactctatatacacatatccagttgtaacacttgacagtagcattatggggcatgatataactttggtacacattgcagatatggatgtttaatgtctgtaaatgatattccttcaccagttagacttctgtacatccaggtgaccagccacctggttctaagtcatatcccaccagaatccctggagtccttgccagagccatcagagacagcaggcgaaagcaggctcactgaatccatattgtgtttcctctctcggttctcctgggttccactgtcagttctccaaacgtggaaaaaaactgctccatttctttctgtagcatgtcatttcttttctcggcatcttcttttgctcgctcggcatttcgcatttttatttctatcattgtgaactttttcctctccctgatca

SEQ ID NO: 211751 - DNA, 751 bp, Homo Sapiens
ttttttttttttttttttggtttcttaaggtaaaaccttaagattctagacctttcttcttttcccatataagcacaagctagttttcctttaaggattgctttagctgcatcccataaattttgacgtagtattccttattttctagtgaaattcaggtcagagattcaggaggtggaagctaaggacctgcctggctgggtgtgctgggtgggaggacaggggagtgaggagaggagaatgactgtcaacttctagcccagtcatctgggtggttccaggttcacccactgaaatggggaaagacagaagctggtgtgtctggtttgtctgtgccaagtgaggggtgcatcctgggtctcggcaggacactctggcctgatgcatgaggtctggcctcaaaccatagagccgatgaggtagaggatgaggagacagacagcaggcgcctgggaacagcatgggcatgagataagcactcacagagggtatattgttctggaccccccacacctccctgttgtcagccttgtggttattgggcgcagaagctgccagtctaaactcaagtgttgtaaatgtaaaacacctgctggctttcccagactctacaaaaaaaagagtaaaaaagatgtgacaatttttatatagattacattgttgaaatactattttcaaagtacatggagtgaaacgcaatacttcattaaaatgaattttacttatttcttcttaactctatatgtggctc

SEQ ID NO: 211752 - DNA, 724 bp, Homo Sapiens
ttttttttttttttttttaaaggaaaaaattcaaagtttattcaacattaagaataacagacagataaaggtttggacttaacagcataaataccaccaatatcatggtgtacaattaaactaacctcatgtcaacttgtacctgtttaacagatgcgatctttgtggtgttgccaaaaggataatggattattgttatgtttggtaaggtgctcaaaattaaagactttatgtcgacttattcacacacatacacacacacacacatgcacgcacacacacacacacacactcttacacttagcctcctgcaaaatgtattgactttagttgctatatccgattcggataaggctttgctcattttttaaatgacattattaattgcagaaaaaacgtggaggagaccttggccttgccagtgggggtacctaggagcagaaggtgatcgccacctggagggcagatcacttagtctcagacacctgcagggtgctgagaccccagtgctaaatccagatctccaattgccatcacacataggcaagcaggcctggtcccatgccttgggatcgctctaattgactgtgataaagattgagttttccttaaaggaagaatagggtaaaatgagataaactactagaaaaaccaaagaatagctttgcatttcacagaatgtctattgttttacactgggggcagtggggagggtgcactgata

SEQ ID NO: 211753 - DNA, 711 bp, Homo Sapiens
ttttttttttttttttttggttttcagcaagatcctttatttatcttctgttccccagacatgtcacatgaatgcaggtagctaggtacctgcgcgggctgttggttttgtaaacgcagagcagagcagtcacgatgtgtagaaatcatgcacctcagtgattctttaacaagataatgagtaaaaagacttcaggtatgtttgaaatgtctgccttttcctgcattctcatcactgacaaatatctgtgtagacattttactcaaatgtagacgtgctctttgcacacttgctagtacctgcctggtgcatttcaactgtgttttcttccaacagttgtacctcttagaagctgctgttttccatttggatctaaacactggacctgcacctgcgaccagctgtatattccaaaccactcctcggctttataaatctgacactgctcataatacattattcagaaaaggcatctctagtgtggctggccggctacgctttcacacatcagctaacacaggctatttctagagtgagtgcctcaaactggtctcctgggaccttttccttcgggaagagatccacatgttcttcacaggagaccagaaaaccagcacaacggccacgggtcctctgggcatgtaggtcttctctgtctcctcactagcacacactggcttgggtcattgtcacgcagtgcacacctttgtg

SEQ ID NO: 211754 - DNA, 633 bp, Homo Sapiens
ttttttttttttttttttacctccagggaaaacccactttatttctattcagaagcatccaaacaggtacagttaagccatcccccacgccaagcaagggcctccttctccaccctgggcggtggtcggggaatcagggctggtcagtgctggatggacaccagctctgccatcctcagcaggcccagaacacagtccagaacaggcagagaggggcagggagcccactctgcagcccacctggccggccatggcacctggcctaggacaggaaggtgcgcacgcggctgcggacgggggctctgcagatggggcacagctgcaggccgggggcacactcagcacagaccaggtggccgcacggcacaaagacgatggacacggcgcggtccaggcacaccttgcacgtcctctcctcctgcagccgccgcagctgcgcctccacatccctggctcctggctcctgggcactttcagactggacctctctcctgggtgtgggcagctcagggtacccagaggcagggacggagggggccacaggggctgcgtcttccggttcttcccacgggtcccaagagcccagcagctgggagtgagtctcctgcacactgtggacaaatctcttccttt

SEQ ID NO: 211755 - DNA, 752 bp, Homo Sapiens
ttttttttttttttttttgcatttcctctacatttattgcaacggctaaatgattaacaacattcacaacttcttagatcttaaaaaacagaaacaaaagaaaacttccattttgtaacatcacaaatgtcttctaggctttatcaaggaccaaaaacactacaattctctaagtgatttccagtgatggaaacaagccagagacagtaaagcacccagagtggcgagagagcacttccagatgcctgttgtcctctcgggggtgaccctggaactatttgttggcccgcttgtgtctgtacatctgcatcatcctctgtcggaacacatcgaatgtgtcttctttgtgctcctgcccgtcagcacccaacccttccccttccgagggggttcccacgctgaccggctccctgatgccctttccgagggagcccaggccatggccctccttccagcccatcttctgcagcatctggaagcccaggttcttatcggtcagcttctgctgggcgaagtccaagtccttgggtttcttctttttggacatgggacgaccccgaggcctgtcataggcaattcgaactggttcatggacttttggctcctggatgagacacactctcttgggagctggaatcatgccaccttcaatgacttgctgctgatcctcttccgagggaagcaggtacctgaggaggcctgtgacaaggcaggtgctccaagcaggtcgtcctcggcagcctcgccgggaa

SEQ ID NO: 211756 - DNA, 558 bp, Homo Sapiens
ttttttttttttttttttgatttgttaaaactctttaaaacagaaattggccatttgggatatgagtctgaactgggtttctcaatttgggatttttctctttacttttttaagggggtctttttcttgtagtttttttaatgcagggggaattatcagtctttcatttttttcttcggggttctacctgtttcacaggtaaaaaagccttagctctttgagattatgtttaaatgccctgtattttcatctaggggttttagggttttattttggaggttttttttcaaccacctggaatttattttgctgttaaaatatgaattagagatccaacttaatttttttcaaatggttgttgacttattgcaatatcatgtgttatataatccatctttactgattcgttgctaattggtttctggacttttaaggctatctgatgaactgttgatctggaaccacactgtttcaattattggagccttaaaattgctgtacgctttggtagggataattttctgttaagtgtttttgttttttataattttccaatta

SEQ ID NO: 211757 - DNA, 666 bp, Homo Sapiens
  misc_feature (643)..(643): n is a, c, g, or t
ttttttttttttttttttacacactcattcaaacctttattaagtacctaccatatgtacaatactgttccaaatattaagggaatacaaagatgaatttttaaatggtgccaaatcccaaggagtttacaatataataatagtaaaaagtaatttaacacgaactgtaggaagaaaattacaagtaaacatttgcccctgatggagaaaaatgaccttatttttaaatttaaagcataaattgccagtttggaaacactgctattacatacacctgtattagttcatccttttaaaatgatgctgattgtttttagaaaagaaaatgtcttatgctatattatctttatgattggcttcaaattttaaaacaaaaatttgcttaaagaaaaaaatatagatttataagatcagattaacactgtacacagagagataaagtgtgttggcaataatatgtaaaaagttgaacacaactgggtctagcagtgaagagttaaatctgaattactttggagacttgccctagccaagttattatgcacaatttcatcatataaaaaaagggatacttgcccctaatttagattataactcacacatgccataattacttccatctgtaataatacatagggttaanaaaactagtataaaaactttcct

SEQ ID NO: 211758 - DNA, 600 bp, Homo Sapiens
ttttttttttttttttttccaccatttacggtttttatttgccatttgttaaaaaaattggttctttattttacacaaaaggtactttaaaaacagtgaagtttaccaaaagctactgaatctgtggcaaagggatttaccaccaaaaatgcagatttacacagtaaacctgagggccaaaaacattgaacaaaatcttccattttctaataattcattaccaaaagcaaaaacaattgtacacagataaatatgtgaaggttaacaaatgctagctttcactcttgcacaaaccaaataaaatgtctctattccaaattggcccattatttcactaagtgaagtatttgaaaaatttaaaaaaaatcttcttgtaaacattaatatttaaatacaacatatatatgcacgaacacatccattctaactctaaacccctttgtattcttaaaattgcaccatctctgttagagataatgtacaacatgcagaaggcattcataattgtttttctcagcagtagtgtattatacaagttaaatgcaaaagttaaatatgaaattaaactcaactgaaagccatctcgactcagtactttgg

SEQ ID NO: 211759 - DNA, 765 bp, Homo Sapiens
  misc_feature (687)..(687): n is a, c, g, or t
ttttttttttttttttttaatgactgaataaagctttattttaatgtaaaatatgaaaagaaaaatttatatactcatatataacaacttccaaaatgttttctgtggtacaaatggatcatcttaaaaagtctgtaaagaattcatcctccacccccatatgccaaaatatgatttcacataatttatcttcagaacttatgaacagacttggaatcacaaaagcacaggaaacaccagaaaaagtgatggtacaaacaacaggttttgttttaggttccagtagtaagcagccctacagatggaacaggagaacactttctgaaggagcccagtcaggagacaggttagaagagtctttggggttggttcatttcctgtagccaagcttgtctttaaaagtcaggctgtgtgtgattctgtgactatttaaggacatgagggagaaaagagtttcacttagaagtcacagctgtgtgtgagattctaggcttattttagatatctaacttttttttccctcctttttatcagaaaggtgactttgtagggataccttaaggcgactcctctttctggtctcgctgtggcatcgtttccagctaagttggcaggaactgggagtgctgagaaatacttctgtggctgtttctgagtccaaatccctcctgcctaattgcactaagnacagtctttctgttgctcgtagactcagaaagcagtagggtgttctccaatttaacatcaatttgaggcattgattgt

SEQ ID NO: 211760 - DNA, 653 bp, Homo Sapiens
ttttttttttttttttgtatgagtctgtgatgtatcaagtgctccaactactcaaggtagcgcagaagggaaaacaggcacaggccggggggttttgggtgattacacaaatgggcttggcctccttaccccactgcaaactgctgaggcgcaagggagctcccagccctcagcctggaccctgggacagtgccacctgagcccgaggctctgaagcactgcgtgatgacagttcccacctgcaactcagcagccagggaatgaatgagagttaggggtggcaggggccccggccatcagtggggcctgcgctgccgcctccgctgcactgcctggcgcagagcctccagcagctgctcctggttgttgcagacattgtaatgtgtcaggtgcagcagcttgtccacgtcctcctggctgtaggtcaccttcgtgtagtggtagggagagtccgatgaagacaggttcacctccccagctgccgcctcctcgggtgtccgccggaccccaggggccgagtactcccggaaggagtcgctgaccagaggaaagtgcagcaccgcaggggctccggggcaggtggggtcggagaaggtgtggcactcccgaggctggagctgctcttcggggctgggcgagatgggtgggaacgg

SEQ ID NO: 211761 - DNA, 704 bp, Homo Sapiens
ttttttttttttctttttaggactattcaaagtaacaaactttttttgttgttttttttgttttttacatttttgctctggtcataaatatacagagaaaaagagggagagaaaaatgaacaagtcatccaaagtatggagataaaacagtattcctaaggcacgtggcagtctttgaaaatacagaagctctagccaacttaaattatttgttgtttttcctcgctcagtccacaaaactgtacagtgacacaaatgttgtgttgcaggtagatcttccaagttgttcctcggtccacaccgctgcattagccgggcgcacacttcttttttttacctctgtttccaggcgagatcctaaaatgtggttagttagttgctcaaagcctctattttaaaatacacttggaattcaactaaagataatttcttttttaaagaaattgtggggtgaggggttgcgagtcattataaaaggttggtaagagtcgtttgtgaggggctgtgaggctcatggccctccaggttgccaggcacagaagttaagacggacgtcacagttggcagggtggggctagtcaagtctgtcagggtggtgggcgtgctggaggggctgagcgaggcgttggagagctccgaggccgggcccgatggcgtcactgtctgcagcgccgcgtctgtcgacttgtccagcgccgtgtttt

SEQ ID NO: 211762 - DNA, 715 bp, Homo Sapiens
  misc_feature (63)..(63): n is a, c, g, or t
ttttttttttttttttttaggaatactcagggtggaacctactatacaaaaccatcacacttntgtaaataaaaagtatcagatacttgacttctttatccaccaacaaaaaaataaattattttcttgttttgtaaaagacctacaatgggaaaaagaattatatctcataattgtacaggaaacaaaacccacatcggtttcttgaattcaatttggcagttagaaatggttgggcaagatgaaaaacttatccagtgaactcaactttaaatattatattaatggctctgaacaacaacaacaacaacaaaatagcctgattacaaatccacacatttgtacagcacggttggagaaatttaaaattacacacagcacatatattatctatagagacccccatacacctatggggacccctacagaaagtcactaggggctcgctatgggatttggtccataacttaacttttgaaagctcaggtcgagcacagcacagccgtcctggtaggggagggggattttaagaccaatactcattttgttgggctgcgtccctttggaggggtttcctgggatcccagaaacggggcggcgaattaaagttacctgcgctcttcacagacggctgggggctagcgtgcccgctctctgctcccgggtctgagaaaaggttggtggacatgttttgtttcttttttgcgtctctgca

SEQ ID NO: 211763 - DNA, 683 bp, Homo Sapiens
  misc_feature (651)..(651): n is a, c, g, or t
tttttttttttttttttacctgtctcttgaagttccacttagtcaatgaaatgtagctattaaaaggacttcttcaaaaacaaacaaacaaacaacaaaaaatcctctgctttcaccaaagcaaatattttcagttaggtaatgaaaaagacattgtgaaattacaatggccaaatttggaaagaccctcaaatatccaacaaaagaaaatggttaactaaaccatgatgtcatcctatgatgaaatattatacaccattgaaaatgatatttacaaatactttgcataaatgtaggaaaatattcatgataaaaatgctaaaagcaacaaagctgtatgcattatgactttttctatgtaaaaattatatatgtgcacatatagccatagaaaaagactggaaataaatccaccaaaatattaacattgcttctgggatttgtgattatgggtggtttttatttttttctatatgcttatctttattttccaagtttttgacattgatgaacaatttatgatgagacaaagaggtactaagaagaaaaataccaacttagttacctccggcttataaaattataggcacatttaattttctttttaaaattttctataattgacataaaaatgggaggaagttactttanaaagtaaaagaattcaaaaacctagttttctc

SEQ ID NO: 211764 - DNA, 609 bp, Homo Sapiens
ttttttttttttttttttccgtacatagtaatattttattttcttcccaatgtggtaactaaaatacatttaaacgaaggctagaatttaaaacaaaattcttttactgataagcacacttgcaaagtaatgaaaatgttacatgcattgctttgcatataaacgtccaagaagtatttgttgaccaaatgtctgaaaatgaagtatttttatctgttccgaaacgccataatattgcaaagaagcatttcaaattattgttgtgtgaaatgttcaaatttagcattcaaatttagcgttttcccacattttacccttcaatttacacaatttggaagaagagtagatgagttggtcattgttacttaaaacaatgcgtcaccttgttagggaaagaaattaacataatggtcaaggagtgataattaaacagaacaggacatttgctgtccattcaatgttaaagttctaagcaaattagcatggagaaaagggatgggtagaaataataacagagcactagttgattagtccgcctccacatccacgctgcaggcgttggacagatccggctttactgagtccaccatgcagcctcgtgccgaattc

SEQ ID NO: 211765 - DNA, 761 bp, Homo Sapiens
ttttttttttttttttttaagaatgagtatttttgatttattcaaagtttcaatctaaaacctcaatgaaatctaccacctttattacaaggggactgatggttcctgaacagaaagaaacaaaggtcaggaaagatggcaccggacattggagagggaactggccgagtgtgcagaaggtttggtccaatagatcactgacaggctaaaagccacattttgttgagaaattacatcagaactgtttaaagagtataaacctccataagaaaactaaagatggcaaatgagattcaactctgttacttcaagtctataatgtcttcatcggagaaagccgtgagctggaaggggctgctgccggagaccgggctgccctctctgtctgccacagggtcctggtcagagctggctgagtgcccctcagggttggcttcggaagtagaagcactttccaaggagcctgatgggatcctgtcactgctagatgacctcactgcccctggcttggggcctccttggctttcttctaaccgcttccggggttttgatttggcctttggcgctccttctgacttgggtccaccttcatccgagaggcccagtagttccctgcgggtcctgcttgctatttctttgatctccatgcgagacagggacaaggagtgcgtgactggaatggcagcaaggcccacactgatgggagtgggtggggtgatgaccttggagactaagggtgacttcagaggtcgttcgatgct

SEQ ID NO: 211766 - DNA, 742 bp, Homo Sapiens
  misc_feature (649)..(649): n is a, c, g, or t
  misc_feature (685)..(685): n is a, c, g, or t
  misc_feature (701)..(701): n is a, c, g, or t
  misc_feature (722)..(722): n is a, c, g, or t
ttttttttttttttttttccaaagtactacaaaaaagaattgtatttacagatgacatgaactaatcagatacatccaacatcgtctggaaaacttaatggcatgccataacttaatatcacagtcaacatgcacaacagacctcataattattttttctaataacaaagccaaaagcaaagaagtaaatgaagcaatataaaaatgaaacagtgaaagacaaagggaagtaccacaaaaacgtttcaatgatatcactgaaatgacttgagaaaccagttaggcctctggagctttattattattattattattattattattattattattggcaagtcctgtcatgaaaatgccctgaagattcagacctttgcaatttttccaaagctccttcccactggaacaagtcttaatggaaaagcacaagatgtacagagaagactgggatcacctctcccacggcattggaagagctgatgaaaaggagcagttcctctatcccagagcatcttctgggtggtgactttttttgcctgtgggccatgcctctctgtcctcacaacagctgcagaatgaaacaccgcacctccaacaaagctcacataccctgccgagctcccctgcgatggaggcttccagaatgcanatacgagctaggcatctcagatggatttgatttcantcaacattagtgccanatgaacatctttgatatgcanaatgtctatgctactgaata

SEQ ID NO: 211767 - DNA, 720 bp, Homo Sapiens
ttttttttttttttttttcgcatcagcatccttgctgctgccgatgctggaatggctagtgatgctgttgaggcttgagatgctatctgaggagttttgtctcttgatccgaagttctttgggtgtggtttctgaggcattaagggctccctgaatgactgcctgggcctcagagttctttttcttcagaaagtctatggtttctcgcaaatccagcagctcagtgtccttctcctcggccgtctctgccaggtgtcgcaggcgggatgtcatattcaccaggctctgctcaaaagcagccaccagattagcattggcagaaagctgagacgtcaaggtggccactttttcctgggatgattccagttccctacgaagcttccggatttgctcagattgcatcctctcctcagctgaggagtaggtggaggaggcactggaggccagggacagcactgagccgtgaacatcgtccgtggggtctcggaaggatcctgaccgaatcattcccttgggtctctcggccagggacagggtgctccccatttgggagccgctgtacagctcgaaggccgcctcgtgggtggggatgctgttggagcgggtgattcttggcgtggtggccgcagtgggactcactatgttggtaagtttggcctttgcactcagagacatgggaagtgcagggggagaaggcagctctgactggtcatcggattc

SEQ ID NO: 211768 - DNA, 693 bp, Homo Sapiens
ttttttttttttttttttaacaataataaatctttattgagattttttaacaaaataatttttgaaaacaaaagctcccacatgtaaacaagaacgtaaataagttagatggcattattatgtacattcaagaatcaaaacatgttctggtaaacattccataatccggtaaaatgttttcacccatcactgttaagagaaactgtgtatttaatactatcaataacaaaacctaatctttgaacattataaaatggtttacggaatataaactatacagtttagtttttcattcctcctagcaatccgtgtcacatgtatactagtcctaagatgtattttgtcagtattagcccaaaatgtccaccatcccaaattaaccaggttacacatatctcctccagtttttatggtaggatgtgttagaacccatatattacaacatcatttttcaaaactaacctaatcctaaattctattctaactagtctggcaatccttcattttatctccctgtctacacattcattagataccaaggcaatttcaccttaaaaaatactgctaatacacatttagatagtaatttctggtaaaactgtagtttatttatcaaaaaatgtgaatttttattttagaaatgtaggtcaagcattgtcatagttgtagtacttaattgtgtatattgaatct

SEQ ID NO: 211769 - DNA, 684 bp, Homo Sapiens
ttttttttttttttttttgggtggagcgggtactttatgaataccacagggacaaaggaaggctgctcttctcacacactgctgaatctccggatctccgcaaggtcatagccagtcacagcaaaggagttgcctgaggaatcacaaaatcgagcaccacacagctgggtgtcggcgacacactcaccatgacagtgttccacctcaatgtagccactctctgggtttctgctcagcttccagatatgcacaaaggtgtcctcacctgcagagagtagcttgcccacctcagaagccaggtccagggcgcagatggcccgggcatgggcattgatctggacatgtagatttcctgtagtggcctcatatagatgcacttgtccgttcccatagcctgctgctatgatcccctgccacagctgcacagaggggcacggaactccaaatcctggaatgcgggtcaataatgtgaattctggccctgaccgccagacacacagcaagcctgagtcatctgccgtcaccatgtcagccacacaatcctgtccctgggcaggctcggtggcaatgtctgtgattggcatctggtgcccagccagctcctcgctcagtacaatgttgggaccctttgctgggatgtcaacaccagcacccggcctgaccacgttcccacacagatgaagt

SEQ ID NO: 211770 - DNA, 512 bp, Homo Sapiens; identical to SEQ ID NO: 39845

SEQ ID NO: 211771 - DNA, 582 bp, Homo Sapiens
ttttttttttttttttttcctattttctgaattatttattaacatttctcagatgttctaaagccctcccttgcctcctctctgccaaaccagggccctctgtcctacttcaaaagcccaagagctcacttaataaagcaagccccagtccccacctgggaagggcctggtcacatgggagggcaggtgagggtccctgagggacagcttgttgccctcactgttcctgagatgccccagcccaagaacgaaacaaaacttctcatcatttctcctcaggcctcagccgagctggcccctcttgtgctttctcaccctgttaggactgcggatcaggctgaagggctccccagggtgagcctttcctggtccgactcactggcatcaccatgaggaggcctggcggcagctctgccctgtgcacaccgtggtaacctggcaacaggaacatttgccaccctgcaagtctgaggagcaggtgagccactggagggggcgaagtcccagagccacctctggcttcacccagactcattaaatgaaagacactgtctctgctagggccaagtccctcctcgtgcc

SEQ ID NO: 211772 - DNA, 750 bp, Homo Sapiens
  misc_feature (649)..(649): n is a, c, g, or t
ttttttttttttttttttgctttctagaaactttaataattcaaaacactgagtacaatattgtatttcataccatatagcacaaagattaacacttttatatatctgttattctagtttttaaatgaataaaatgaaaaattttcaataacctgaattttggaaaaaaccttttaattaggagtttcttaccaagttatgatttaatatttatcagatgtgtaaatatacatgatagcaatttttaaaacttgtaaatagttggccttacaaaattacaacacactgtaaataaatccttcccacattttatacaaactacatgattttgatatacaaagattctgtttttattacactgacaatgtacaacaaagactatttacaatgcaaaaagtatataaaccacaatttaacagtctgctactggcagccactatagtttaggaggtagctttaattaaacgaaatgaacagaagccacatttcccaacttgtgttctaaaaataatttacataagataaaaattcattatatgcacagtatgtacagtttaattattaaactgcaatctagctggatttttttagtatattcagaataactaatatggcagtgggtttgctattgatttagcacactgttcanaaaacatattgaacaattataactttaagactccacccagtaataggtctaaagcccatagatgggaatcaagtaaatttttaaatttttaaaacacagga

SEQ ID NO: 211773 - DNA, 611 bp, Homo Sapiens
ttttttttttttttttttcagtagaggatgtaatttttaattaagatcccaacataaaaggcaaagatacaaaggttttgtgctgcataggacaaacatatttatggctttttattatgtctaggatgttgagacaatgcattgtagttagctggtgtcattcacagcaattcaggacaggtgtggtgcttatggcgtcagggacacagctccttgttgctccactttgcatggcctcgacctcatgatctaagatagcagcatatgtttcaagcagcaggacagaggaagaaaaaaaagaaactggccccacatgacagtcctatttccacttacatacaaggagatggaaaatgttatctttatgcttgacagctgtttataaaaaaaaatacaaaactggagcatgtattaacacaggtgaatgaaagaatggatactgggggacaaccagtaccctctgccacaagcatctactgcaggatgtctccaccttggcaacactgacattctgagtgagagatcattctttgttccagtcctgtgcattgtggaatgggtttaacagcctccctgacttctatccactaggagcattcccctggttatga

SEQ ID NO: 211774 - DNA, 587 bp, Homo Sapiens
ttttttttttttttttttcccctgatacttagctaggacttagggcagttgagaggcagatcatcatgcctctactttcttagcagagacaaggaagactggggctgtttgataatgaggaaggggaaaatgggacaaaatactcctctttcaaatgaacactgtggagaaaatctttctgggtttggggaagtcagagtaaagacttaggggagtaataaagccagagaccccccttcttttcctttccctgccttggatctaaggcaagtgagccaaatttggaagagggagtaggaatttaagcttaaggctgcttaatgtcttcctgggggctggtgttttgggaaggcagacaaagagaaacaggtcaacctcaaagctggtctgctcatcctcttagaagaggtctggtatctgtggagtagagccaagagaggcaccacagagagcacagtctcccaaacagaagtaataaccggctcatattttatcagcagttttcaaaagcaatgttttccggggttggagaagtgccatatcttcctccctttccccaaagctactgctgcgaccttcctcgttcc

SEQ ID NO: 211775 - DNA, 620 bp, Homo Sapiens
ttttttttttttttttttgatacagggcctggctctgttgcccaggctggagtgcagtggagtaatcatggctcacctcagctttgacctccagggctcaagtaatcctcctaatacgggcatttctctcatcgcttcagaacccgccccacaaccaaacattcagatgcttattaaggcaacaaaacaagtgacagacgggacaatttttccaattctagatctaattgattaggctatgtctcatgaggagactgtacttgacctctaagctagcatctggaatacaatcttccagcggcttagggaaggtcggtgatagtagtatcgtcaggatcaattccgaagtgcagcttgccgtccttggcggctgcccagggcatggaggtggaggtccactttgccacccagtctcctgttttgctaaccacgatgaggccacctaaacctttaacccttgacttcatataacccaacgataggtccgcagcctcttctaccgtctttccttgttctatgtggaacagggtgagtctagccaggttcaccttcaggatgctttccccatgccctgtggttgagacggctccgatgtcattgtcggcatacctccagctcct

SEQ ID NO: 211776 - DNA, 578 bp, Homo Sapiens
tttttttttttttttttggctctctggactttaaaactcagcatcttctgaaccagaggcatttctgattagcccttccctacctattttcctagtatcactctttaatcagcttggggaggtggcagcatttcatggcctccgtagtaactcacaatgcttcctggggtatttaaattctactctctcatcagcactgagcacctactttgggccctttcccgtgctagccatttgggggaaatataggtgaagagtggctggggtttgaacctttaggatttcacagccatgctggatgggataaaaccagctcacatggagaatcagagaatgggacagtgccacaaaacagtctactgaggcacaagttctgagtgcctgggaagtggtagagagaccccagagagggctgctgcagtctggaacagcttcctagcaagctgtaccaaacagggccttgaaggatgagaaagatctggctgagatgatacccgaccctctagggaaattcttagagtaacttctaggaaatgtcattgctcctttaaaaaaaaaaaaaaaaaaaacctcgtgcc

SEQ ID NO: 211777 - DNA, 335 bp, Homo Sapiens
tttttttttttttatttgttcatgattttatacagagaaacagaacgtgtcaggattccttggcagtgagcatactggaagctcgtggccacactctttctttccgtaccacagctttccctgtctttctctgtccttttatctacatacattttcttcctttctggggatgggggaatgtcggcagggggaggtttggacaaattctctacttattattttgatttttcaattcttaaagcttccgccattgttttcttttaatcactaagtatttgctaagtgtttttacattccaggccatcccacagacttggagggatcactgggaaatt

SEQ ID NO: 211778 - DNA, 236 bp, Homo Sapiens
tttttttttttttctttcaaagaccttttgaaacccatccatggtttcctcaaggttatttatttctgatataggcgtaaaatgaaatcctgaagacagataacatcaatgaattgacagagaagaacaaagacctggaagccactcttcacatctgtacttgtatacagatcttatttccttccacttgtaatttctcaattcctgttttattagctgtaaaatgggaatggcaa

SEQ ID NO: 211779 - DNA, 425 bp, Homo Sapiens
tttttttttttttttttacaggtcaaacacattttagagtgctgggttacacccactctttcttcatcacatgtacagaaaggcaaagagtgtgggtaatctcttaaattttaaattcccacttggtatgaggataaaacatccaagaaacatttcctgtgcagaacacaccaagcttaggtgtagaaaatacaacggtgtggaactcgagaggatggttctaggatacaaataaaaacaaccacgcagcacgggaagatttttgtttagaaaacagatgggacagaaaggcagatgcaatgttttgagtcaatgagatacagttcgttcttaattatatttcattgatttcttacatggacagaacatcattcttgctgccactgttttattttgatcagcggtatatctatctgcctcgtgcc

SEQ ID NO: 211780 - DNA, 693 bp, Homo Sapiens
tttttttttttttttttaaaagagatgggttctcactatgttgcccataatgtttatgagattaagttcatcttttttatctgagtagtattttattgtatgaatataccaccatttatttatctgttggttatttccagttttgggctataatccaaaatgcttttttcaaacaataggctatatatcattaatgtccgtttatcagcagtataaaatatcttaccataaatattaataaaagaagcattcatatataaaatatagatatttcaaaccctacagagggccttttaatgattaaatattttgtccttacaaaaaggtccaggtaattacacccatgaggttaacctgccttagtgcaggacttaaaataaggcttctcctgccatctctctccatttgtagaatgtgaaattctttaaaatgcatcctatattaggaatactatagctgtgcactggtgtttgttctcttctttaaactcgggaccgtatatatctgctcaaattgcccaagtatacatatgctgcactccatcaagtgtcaggccacattctatcagcacagcgtgactgcctatcagtgacaatataagtgagctctatttggattcctcttaccctaccttttatatttatgacagcattatcatacaactcgaatattcttcaataacttacatgtttg

SEQ ID NO: 211781 - DNA, 609 bp, Homo Sapiens
ttttttttttttttcttctcacatctttattatgtattttataatcctagctcaaaaatcactcttgtacttttagatcacaaatttgcctttaagtaacacataatacacttaaggcagatttgccttacaggtggcctcagcttctaaacaccactacactgctttatataaaaaacaaaaatcacatagaagagaatctagtgacatctttcttggtattttaaacttaaaaactgcataataaattgagttcccataaaatttcgcccttgagataggaaacaaacactactactattttatagttgcctttatctgacttgattgatgcagttataatagtattaataacataatctttaaatttgtgagggaaaaccaatactttatattcactcctcataaaaggttcaacagcaagcataatgaggagccattataaaatcatattgctaagtattactttaactcataattctgcttatataagtgtatgcatatcacagttaacaaatactatttaattatcaagacatatgcaaaagtattctttgattgcattaatagcaggaggctagacagcattaaagtttccttctctgatct

SEQ ID NO: 211782 - DNA, 627 bp, Homo Sapiens
tttttttttttttttttggatgagacgtgagtaggcaagacatttattcactcatgatatatcagtgcaaagtgtgcctacagtatacaaggtaaactcacaactcatcaaaactaaaactttttacaatgtgcaatacatgtagggatattaattcaatatataaatgtcacatgtctcccaaatgtcacccaggctttctgttatttcttaaaatatacaagtcaatattaccagagaaaagataagaaaatcccattattttatcctaaacttatgtatacttctctaaagattcttaggcttgtaagcaatgagatttaagtctatttttagatgttagcatcctggactgacttgcaggctgtggaaacacaagacagagtggtcacatgactaaatgaaacgggactggctgctacaggtgagggataaaattgagagagaagaatctgatttatatcacttagatttttcagtgtcttaaatattaacctatgacttgttagaattcatatagttctctcacttaacctgtactatcagggtcattgttaggtttattaacaatattttactttgacacaggaaaacatttaatagcattcaacataaaggtaaatatca

SEQ ID NO: 211783 - DNA, 498 bp, Homo Sapiens
  misc_feature (416)..(416): n is a, c, g, or t
tttttttttttttgtttggctaaaatattgctttattcacatttttgtccttggaggaaaatctaggcacactgcaacttggatcgtgtaaataaaggtacaaggaatgttttaagtcagaaaagggcatcacgcagtcagggggctgtgtggacgagctcaatttcgatgcatctcgggagacccgggcaaaaggccgcttggattccgggaggcaacgcccccaagtcaggatcccttgctcgccgcccccaaccggtcaggatccctggctcgcgtccccaaccggttccgtgtctcacctgggtcctgcaggcgtccactggaggaagccggatggcgcgggcttggtctttcaggaaggctggctggcaccgggcttccttctggctccagggggaaccgtacagaacggngagaaagggggaagctggtgagaggcagaaggggcgtcacaaggtggctctcccacccccaagtgcaaaggcaggcggatgc

SEQ ID NO: 211784 - DNA, 438 bp, Homo Sapiens
tttttttttttttttttcaatgcatcttattttaatagtctattatgaagcaagtcactacaaccagcctttacaaaacagcttatgttaaaagttgggatattctgaaaggtagttaaagagtaatttttatttgttctgcacaaaataacctttcctctaatttaaacaatgcaagtgtaaactaacagcataatcccaatatataactctttccaaatccagagaaagaaatgaagtgatgtcttttaaccatctttctgtctctaagaataagagattatagaagatgaaatgtaggagacacagtatgagatcttctcagagagctttagggcccctgctacttgtagataagaatgagctaattagtgggtttgagcaacagggatttgatgatgccacaccaggaagaccctcaatcagtgcccattgcag

SEQ ID NO: 211785 - DNA, 617 bp, Homo Sapiens
tttttttttttttttttgctaagcacggaggctgtttataggctgggccgcatattacaatgctcagggctccactgcaccctctcgggggtctgctagcgctttccgtagactgtctccacgccctccccactcccagccagtccagatcctctccggagggactgcagcaaggatcgttaagtctgtccaccgggatgggggaagaccagggccggagcagattggccatccttcagaagatcgacttccgctattggggagagtctgaggagtccgttctcccacggggcctcgtcactctttgcgaagggcgcctggcaggtcaaatgacctccatttccacctcgccttccaccttcttcttttgcttctccatcactgcctccagctctgacactttctctttgtcctccagcagcgagcgctgcacggtgacctggctgtacacacgtgccccctcctcggggctcaccgcccgcagctcctccctctgcagcgagaaaagctgcgccccggtcagcacacccagcgcgtccacggtcccggagctaaagcccttggcctgcagccaggcgcggacctcgggaggcgtccgagcccgggctgagctgcgg

SEQ ID NO: 211786 - DNA, 695 bp, Homo Sapiens
tttttttttttttctttaataatgaaataatttattatttgttaacagttgaacaatacagtttacatatacacagcaaagattctctaaaacatgtagtagtttctaaaaatgcatgtgctaactgtagtaaaaagcaccattctctatgatcttgacacaggatttacattggcgtcatatttacataaagaaacatctggaaacagaatagcataccctttcatctgctgctcccctgtcaggctgtgtgtagcattaggaagatggccccccaaaaatgatggtaacagcaatattccaagagcaccaattctagggatggggtaaaggcaagtttggttgtcaggtaaaagctaaaatgaagaatgctccctcaacttgccaccccacagagagaagaaatcaaaatgtaaaaatctggataaatcttaacattgggtgccttatgaattctcactttatgattttgagagaaggtcaaatactcaatctcttcagccattcaatagctgaatctagcagtgcctgtcaatttcttctttcagaagaatctgagaaaatcatccatgtaatattgataatgaaaaaaccatgataaatcacctattgcacaccccaccctctaacccagttatctttgaaagcaaagatcctacagtctatagagatcagaggatgtagaatgagaaacc

SEQ ID NO: 211787 - DNA, 700 bp, Homo Sapiens
  misc_feature (605)..(605): n is a, c, g, or t
tttttttttttttttttaaatcttcaaaactgaaatacaattctgaaagtatttgtgccttgtcatttgttcaataaatttgatttgtttttaaacaggtcacaaaagttcaattagctaaccagaattctatatctattgcctgtctactggggttcagtcttaagtctgactatatcaaaagcagcagctcagaatttatttcataaaattaatcccaagagttactgggtagcttttaaagtatttcatcgcttataatacaactcactagatagatagtctatactagtgactcgtgacatcaaaattatctggagagttttttaaaaaatacgtaggatccacatcataactacactaagaatcaagaatgtctgtattttttttaacgttcccaggttataatgctatgcagcctagcgtgggaaaccccaacgtaccactaagcctgtggttctcaacttttcaggtgcactggaatcactgggggaaactttaaaaacaaaaagcaaagcaaaacaaacaaagaaaacagatgtgcttcagtagatagagaattgtgtgcaggaaccagcattttaaacaaccactgcagttggtcncaaatgactcagaaacgctgtactacctttgtcagatatcatattataatgagtacattcagcaatttaggtgacattgtctgcaagcctaatga

SEQ ID NO: 211788 - DNA, 681 bp, Homo Sapiens
  misc_feature (610)..(610): n is a, c, g, or t
tttttttttttttttttcagtgtcttaagtatttattccagtggtgccatcttcaagtacaaagaaaatggaggtgaattttctatcttttaagaacattataaatgtttcctacatttccatttggttatgacaaaccttataccagaattactaacatctgtttaaatgtatgttgtcagagttctacacaaattatatttctaacttattgtgttaggcagtgtgctagtaagtgctttacacatattgtttaattcttcccataaccctatgaagcaggtaataccgacttaactgacagatagggaaactgaaggaagtttgagaaagcaactcgcaagggccatagtgcctgtgacaacttaatcccaggcgctctgactttagggcccatgatcataacccttccacaataccgccgtgaaccatatccttcataccataggaggcaatggagcttctagctgtcgtccaaggaatgaaagcaggcgcctccagatgaggccacttcccatgaacataattcctgtaatcagccaaaaaattctatggtcctcttcaagggaagattccaaattcattccaaaagcaactcccattagtccanagagcgaaagagagaaggttcccatggtcagctgtagattaacctcatcatcacgtttcggtggctgtcca

SEQ ID NO: 211789 - DNA, 631 bp, Homo Sapiens
tttttttttttttttttacttttaaaaataaagaggtagaaagtggggaaccttgcttttctgggcattgggtcaagaccacacagagcgtgggagcaatggcagctggctggggctggctaaggccgcactccctttgctctgcctttggccataaccactagaccgcacgtttgcactattttccaaataaccaaaagggaagacttttaaaaccatactagaacataactttgtttttaggatgtgtttacttgttctggtaaaggtcatggggcaggattttggggaacacaactaaaaagaatgcagtaaaactggcatcataagctctctcaatttgaccacatttgagcccagttcagcaaatccaaagatacattttcaaaaatgcatatcctgtttcacacctcaccacaaagcaaacaacctaatttgcagactttctaatactcataatgcctctaggtcctcctgtcaacatgtgtttttaaatatcatctttgatttgatcactaacaaatattaccactttctggtttttggagaataagaaaaagctgcagaaattgacagaaaagccagctccatcattcttcaaatgaacaaagtctcactcttatcctcgtgc

SEQ ID NO: 211790 - DNA, 344 bp, Homo Sapiens
ttttttttttttattttattattattatactttaagttttagtgtacatgtgcacaatgtgcaggttagttacatatgtatacatgaacatactaggttattttctatcaagaattcagactagggaccaccagatgatggcaagttcatgaaactcctcaagctgtcggtgaaattggcagtatgtgtgcatttatttttctagaaaaagaagccatggctttcatctgccatgagtaattgcaacccaaaatacaataaaatgttagggttaaaatgttataaaactataagattgatttgaagatacgaaattttgggatcactttattccttcatttcta

SEQ ID NO: 211791 - DNA, 626 bp, Homo Sapiens; identical to SEQ ID NO: 57864

SEQ ID NO: 211792 - DNA, 682 bp, Homo Sapiens
ttttttttttttttttttaacagagtttgcatatatatactttttatactatcttaacctcctggacttttaagtccagatcattttcttgtaacttctattaataattaagattttctggttgtttcagaaaattacaattattttgacattcatcctgagtcttactggtttactgcttaccaccatttctttcatatcacatctttcccattcttaagatcttcagtagattaatctcttatcatacagaatcctatttctagtaatttctttcaggaagagtccatgcacccttgtacactgaacttagttgtggcaagaaggctgttgcctttgtatatgaaaaatcttggcctatttcaagaattttaggtgatcgtaaaaatgttccatttgccctttgatatttaagcagaaaatctgaacctgtttttttttttcacctttacaggtaaccaatgtttatgtgtgttaaatgcttatatattcttttattcttgaaattgatactttttattatatgtgtttggattaatattttttcattaattttgcctggtattctgtcttctttatgatttcatgcctttttctggaattctgataataagcatattggatcatctaaatctgttccctatatctcttaatatgctcaccaactgtcttttctctgaat

SEQ ID NO: 211793 - DNA, 650 bp, Homo Sapiens
ttttttttttttctttttgttgttgttgttgttaaaggacaatagtccagagacctaaaacccgaaaaacaatgatggaattaaacctggtactgaagatggcttttgtagattacagccccccacaagctgttcccaatccctttccagtaataaaacttattttttagttgtacaaccaacacataaatatattctttggctaaaaatttaaactatccagaagcaaagagaatataaaccaaaagtctaccttcatggttcctcaattcccacattgctttccagaggtaaagatgcttataaacttgatgtattatctttccacaccttttcttctgagacactatgcttttgtatgtaaatgtacacagaaaaatataacttaaaatctatttataaatggcatactacacacattgttctatagcttttttccatttagtaagatctttccaaaaatgtcagtgcttatcaattcatcttattcttaactgctgcacagcattccacacagctagtattccacattgtttagttattcaattcccaaccccttttctagtacaggtgctacttcagactctacacctctattcataaccaaacagtcaaattcctatcttcaaagttgattttatttcctcaac

SEQ ID NO: 211794 - DNA, 548 bp, Homo Sapiens
ttttttttttttttttttacaattcaattctatttttagtttttatttttctataaatgctacatatagatataaaaggtctttaaaatattattttaaaatccacctacctactcttaaattttctttaaaaaaaaaaaaccccatcatagtattgataaataggggtcaaataaatgcatactatgcggaacagacagagattttcgattttttttttttagtttaataaagtttgaaaactttcaaagctcctgtacaattccattaataccagacttggcaaaacgctaattctgtttgaaaaggtgtttttttaaaagtagtatatttgaacaatgtctaagtatgtggggtggggagaatccatatccgaatatcttcataaagcaagttcttaaaatttgcaaagctattaggttagtgcaaaagtaatcatggtttttcttttgcaccaactaatatttaccactgaacacgctggcatttagatcacttccttctttcagcatgctagacagtaaagagaatgggcatgagcctcgtgc

SEQ ID NO: 211795 - DNA, 641 bp, Homo Sapiens
tttttttttttttttttatcttgtaacactgccttccttataaaattcatataaatatcttgggattaatgttcataaatacatgaaaatatgtttctaaaatattaaaaatctgccctaggattcatctgctattaatgaacaatcaaaagaacgaacaagtagtctgcctgccaatttagaactttaaaaaggtttggattatcctaattttttttttaaaaaaagatcaacccaaagaaattcaaactacttaaattttgctacaataagcattaactatcatttgataacaattcctctaaaaaataaccaccctttataaacactggctatttatttctcctccacaaggtttcccacactgactttaccattcatctttagtaatttccaaaaagcccagagataacaaatacccaagcataaataaatgctctccctcctaaacccataggcaacacggtagaaaatggggccccagattcctcaaaactacactccaggaagccaagataaaacccatatcctactcatgtctcacacacagtatttccagttccttccttaccgttcccactttagcctctaccctaaagttaaattcatcttttaccagtactgctttaatccctcctcta

SEQ ID NO: 211796 - DNA, 551 bp, Homo Sapiens
tttttttttttttttttaaaccaaaaagctttgttgaaatataatttacatactatagaatgtatctgttttaacataaagttaaaagatttttagtacattttctgagctgtgcagccatctctacaatccaactttagagcatttccatcactgcaagatccctcacgcccattagcagtcactaccagcttccagccccagcccttcacaaacattattctactttttgtacctatacctttctcttttctggatgcttcatgtaaatggaattatacagtatagtaaacacactttttatctactgatttttatattcaactaggttcaacatgtatccagaaccaaatgtttaaactttctttctagaagtttgaaaatatttatcttccttgatacttactactgtttctgctttctgtctctcatattgaaagagactttcttttaaatgatcatattcattcattagattcttatttttctcttctagcatgaggtctttctttctactctcaataaagcctctttggatattaacctcgtgc

SEQ ID NO: 211797 - DNA, 681 bp, Homo Sapiens
  misc_feature (615)..(615): n is a, c, g, or t
ttttttttttttttttttagggctttctggcaaaaactgaaaagcctgctagacaaattctaaaagagctgttaacactgccaaaagcatttctaatttaaccatgaaattgtacccggctctaagtcctcactacaaactccacatatctttatatgaacatgaggataagattacaccaagatttaacttctcaagataaaagattaactaaagaacaattccgataccttgtactaagtactaggaacacaacaaccataagtgactatatgatacacttatgctcatgaacaccctcaaaaatcttttgtttcatcactcaataacaaaataacttttgctgaaatcattaaaattagctcagtaaaaaaacaaatgcacaaagaagtacaaggatatttattttatagcattattagtagtaacaaaagattggaaagcatctaaacatacagcaacaagaaagggctaaacacattataacacatttagaaaatgaaacgatttaatcattcagaatgattaagtagaggcagttccatgttaatcacatggaacaatttccaagaattttcagatcaggacaatgggcatagggtgttatcatctgtngaagagaaaaaagcaaaatgaaatatatgtgtagactatctctggatagttacagaatgaactagt

SEQ ID NO: 211798 - DNA, 529 bp, Homo Sapiens
ttttttttttttttttttcagttgaataaactttttattgactaatttcaaattagattctagttaaatgttagaacagcagctcatagaagcagatgtagtcaattatgttaactctgtggtttcatttaagcaatttgttttgtgaagggacacaaatccaaccagattttaacagtgtataaatacttacttactaattcaattacaatgacaatactctcaacaccccatctgaataaagcagagcatccgatctctgttctggggcactgtacattataggtgtgtggaaataccgatgccctcagctgtggggcaggctcagtgggacctggagtgctggagaccctgggccattcacctctggtcacaaaagctattgtccatttacccccaactgccatagaaatattattttcagtggttgttatgatgcaaaagaaaagaagcagggagatttattaaatttttacgtataaattatgtaaataaagtgaactttctcctggcttaactcctcgtggcg

SEQ ID NO: 211799 - DNA, 615 bp, Homo Sapiens
gcacgagcatgtgaataagtttgtgaacagcatcaacaagccaatggcagctgagattgaaggcagcgactgtgaatgcaaccctgctgggaagaacttccctgaaaaccaaatcctgatcaaacgcatgatgattaagtgtgctgacgtggccaacccatgccgccccttggacctgtgcattgaatgggctgggaggatctctgaggagtattttgcacagactgatgaagagaagagacagggactacctgtggtgatgccagtgtttgaccggaatacctgtagcatccccaagtctcagatctctttcattgactacttcataacagacatgtttgatgcttgggatgcctttgcacatctgccagccctgatgcaacatttggctgacaactacaaacactggaagacactagatgacctaaagtgcaaaagtttgaggcttccatctgacagctaaagccaagccacagagggggcctcttgaccgacaaaggacactgtgaatcacagtagcgtaaacgagaggccttcctttctaatgacaatgacaggtattggtgaaggagctaatgtttaatatttgaccttgaatcattcaagtccccaaat

SEQ ID NO: 211800 - DNA, 569 bp, Homo Sapiens
tttttttttttttttcaaggtacagagctggctcaacatatcccaagagccaagcagactttatttctgcagcaatctctgctggtcagggtgcctgcactcctctacccactgcccttcatggctgctgcagtggccgcagctgtggcccatggccagccacactgtcaaggttcagcgatgctgcagtcatagcagaagttgaagttggtggggggtgggggcacagggggtggccgctcggggatgggcacgttctccagctccagcagacgcagcttggtctccatggtcagcagctgctccaggtccagccgtgtctgctcgctgcccatgggactgcccagcaaggcactgagcccatctgtccacaggtagaactcccgcttggagggggcaatgaagttgaggtacgcttcctcctccccacggtcatagctgattgagaaggccaactcatagaggtccttgttctgcttcccggagcccttctcccggacatgggggcagtccttgcctgtcaggagtgccctcatgtcggccacagggagttgctcgggcagactctc

SEQ ID NO: 211801 - DNA, 511 bp, Homo Sapiens
tttttttttttttttgctgtttttatttaaaattttattgaaaccctctttcacccgtttaccacttcctaagtaaaaatgcatgtaaactctgagcctgatggtattagcttcaaactattccttaaatacctgaaaatgtgacttttgaaacttgggaaagtgacgttaggacaaggatccattttacatgcctgcttctttgttcattcatgagcagagctagactaagaaacctttcaatgagagggagagcatgtatgcaggagtataactctctattctgaattctaccctcgctgggcccatgaaaggtaaggaacactttagatagggtggggaaggaggtttggaaaacttgtgataaagaggagtaaatttttcctaaattcttagtaaaacctaacaggttacccacagagtccgtgtcttaagttaatgcacttatataactagcatcagagtctccttcaagtgccctgtatatctgtcatcagtttcctccttcaaa

SEQ ID NO: 211802 - DNA, 645 bp, Homo Sapiens
ttttttttttttttttcacgtttgtataaaattttttattatgaccataaaaatgaccctgtaatcaataacattgtaaatttaaaaataactaaaagtgtacaattgaattgcttgtaataaaaagaataaatgctagaggtaatggatatctcatttcctctaatgtgattattatatagagtatgcctgcatcaaaatataccatatatggcatacatatatacacatattatgtatccacaaaaattaagaaaaataaatttaaatgtgaaaataagaataaaaatttaacccataggaacaatattctttaacttattggcaatttaaagccactggcaaaaaagattgctagagatgtcagtacattatcttaccaaatagtgtattgttaccatcttttacctacatccttgagtaagggaataggttaaagttagtggcataagaacacttcattgaattcacaatagtatttaatatgttaaaaatgttgaattgaaaagctaagttcacacataatttataatttaaaaatagactgcatattatttcatagaagtacaattaataaaataacatatgactaacttaattttaactaaaattaagaatgcttttcattcataataatgcagagga

SEQ ID NO: 211803 - DNA, 600 bp, Homo Sapiens
gcacgaggttcaacaaatatttattgttcatcaaagacgagccagattttatgggcatttgtgatggaggctggccttagctttaggagaaggaactccaagagcagtagtgatctctgagatcaccttgttcaccctcctcggggcagatttagtcaaatccatcccaagctcttcaaatataccagcaaagaggttttttttgttttgttttttttttgagacagagtctcactctttttgcccaggctggagtgcaatggcgcaatctcggctcactgccacctccacctcccgggttcaagtgattctcttgcctcagtctcccaagtagctgggattacaggcatgcgccaccacacccagctaattttgtatttttagtggagatagggtttcaccatgttggccaggctggtcttgaattcctggcctcaggtgatccgcctgtctcagccccccaaagtgccgagattacaggtgtgagccaccacacccggcccccagcaaagagaatttttaacaactgctttggtctccagagccagttcttgtgccctcttcttactgatatacccatctcaaacgtccttgctactc

SEQ ID NO: 211804 - DNA, 538 bp, Homo Sapiens
ttttttttttttttttttagggataatgaaaagatgtttgatgtttatttccaccttgcactcaggtctgagccacaagtacattaagacattgaatggtatcacccagggaatacgtaaccagacaacacacaagactgagatgcacaagtggtggtggtggtaattcacgcagaaggaaccagacagtaaaacaaaaattgcccaacacaccaaatgatcaaatccgccacctctaggataggcaaacttgattgctgggttaagaaccctagaggtctgttaaggtgggcagagaaggggttttctcagcttagactgtcctgacatctaactgccagcaagcactgtacatataatttcctgagaaaccaagtccttagtgggaagggtatccctttgaccagatcttatggcttaaattggtcaggtttgcaaaacctcaaagcctccataaccaaagctagggagaggctctatatgctacaagcagtacctcctcactgcaggtagtctgcgccttaaccctctgcaggga

SEQ ID NO: 211805 - DNA, 647 bp, Homo Sapiens
aacagccctttaaaaacccaaattaatcaaatgaaagaagcggcaaaagatctaacctagctggcactctgcaagtgtctctcctctgtggaaacgaaatcctgccctgagcacaattcttgacataactgccttctgcctcttgagataaaaatgacctgaccgatggctggcaccctcagccagagctaagaagatggattcctaccttgttaagtaccacatttgcatgtagacccaaaacgtttaagagccacttaaatattcaagacaaatgaaatatgtgagaataaggttttaaaaaaccctttagaagatgttcaagagatattgcctcgcctaacgtgatgtttccaatcttcaaacgtgagtaggtcccaagaggaaaagcacacctcactcagattgatcaaaagtttaagggtgtaccagcatgtttttatagaacaatgtgctcactttgagaaatgagaaacatgaattgcaaaagaatatctcatatcctccatgtttcaatctgaagcagcacacaaggctacttattttctccattaatgcccagatagaaattaaataaccttctgaaccaaagtggggaaatccaaaactgttgagatgtttgtcatattatgatagaacaaggtaac

SEQ ID NO: 211806 - DNA, 634 bp, Homo Sapiens
tcgagatgggggtctctctattgctcaggatggtttcaaactcctgggctcaaacaatcctcccgcgttggcctcccaaagagcttggattacaggcatgagccaccatgcccagctgagaagcaaacttctatcttgtacaagcaattgctgtttggggacacagccaacctcatacatatgaactaatgcatgccaagttttaatttccttaactgaaaaggctgatgcaaatgacatattgcacctggtggcaggcagttacatctactgctaaaatgacataagatagaagaagttttctgtagagaacattgtgtgtcacaaacagtgacattttcaaaagtgcttaattcaatatgacttcccagcggcaaagcttgcacctatggttttaggaaaacaacaacaaaaagtttagtctagcttaagatgcaaaatgactgacaaagtccctccccacaagagaactgtaacgagcaatttaaacaaatcaaaaatggtttgttttatttacaatactcaatgcatcttatgaataacatatttgcattccctaagtcttttggaaagtaattccagtttgtgcagtgagtttacaggaaaatcttaaagatatctagtagacatctta

SEQ ID NO: 211807 - DNA, 575 bp, Homo Sapiens
ataagctgtgcattaagtacactttgtttccatcactctccattactctagagctccgctttgtctgcctgggccgggctggcgaccccactgcctccctcggcggtgccactgctatccgcaggtgtaaaagacaaggcagccgaatttatgcagtatcttttcccagttggacgaggcccatcatcaaaaatgtgcccaaggtgagcaccacactgagagcagcttgtttccaccctgtgcatcccataggaaaagtcatctgtgaatgtgattgcctcagaattgatcacatcgtggaatgaaggccaacctgaaccggagtcaaatttggtttctgacttaaacaatggagttccacaaacaacacatttatatattccaggatctttgtgatgtgtgtattctccttcaaaggcactttcggtccctttctcctgagtgacatggtactgcaggggtgttagccgcttcctcagttcctgctgggaaaagaccaccttacagttctttttatccctacacgaccctgagggaagcccacaggctcgaagggctactggctggctctttgt

SEQ ID NO: 211808 - DNA, 473 bp, Homo Sapiens; identical to SEQ ID NO: 40462

SEQ ID NO: 211809 - DNA, 606 bp, Homo Sapiens; identical to SEQ ID NO: 51250

SEQ ID NO: 211810 - DNA, 592 bp, Homo Sapiens
gaaagtgtatttgttactgaaaacacaccagctgtctctggatgcttttctggttgccttgaagttcatgcaggtggaggacgtggacattgacgaagttcagtgtattctggctaacttgatatacatgggacacgtcaaaggctacatatcgcatcagcatcagaagctggtggtcagcaagcagaacccatttcctcccctgtccacggtgtgttgaaagtacacggagccccgaggacggactcggctggttctggagtctttgtgagacttctttgaaggaggctttgcgtgaaggctgctcggctcacttttcctaagtgtggttcctgaaggctgtctttgtaactttttgtagttctttgtgtaaaaagcgtattctgaatttatacacatggcatgttcttcattatatcttccaggatacatctatttttatatattaaatttgaatgtgttatcaaaatgcttggttaacttaaggcacctttttaaaagcagaatttaatttgatttaaattttccagattttatagcttgcctgtatggatgctcctcaatttatgatggggttacatcccaataaact

SEQ ID NO: 211811 - DNA, 593 bp, Homo Sapiens
ttttttctgctcattctgtcattttattacccaattatccattacatttccaatcactttacataaccaagcattttcatcgttgtcacactattgtaaaccacatcagcaagttaatacataaagctttgcatttcaaaaaactagacactttagtaacaatattacaaaggttttagcttcaaaaataactgaaaatgaaaaaaataaacttttaaagaattagcatcataaaattaatttattccaataaaaatacaaaataatattatgacattgaccagatatgaaagtccctcccagaaacaactctattaatgattgagaaagcactccttaaagaaaatacgaaataaaatgaaaaatatgtaaatatgtttaatttttttcttagcaaaaaatctttctaaaaataacaatgaaaatttgtctcagtacaaaggctacattactattgaaaaaataccagcatgaagaaaaggtacatatttgacagtagaaaaatgatttcagtgaatcacaatgtctaaagtttgcaatgaaaataaatctgcaataaagatttatgccttttttcttttcttttttttttt

SEQ ID NO: 211812 - DNA, 527 bp, Homo Sapiens
aagtcaatgatactagacaacagcattttatccctgggatcactagacacagggccagtaccattctgctggcaaattaggaacttggggatgagagtcagtggacaggtcacttccaatgagactagagcagcaacactggactaaagacgggaatgattcctggaagttcagcaacataccctgagaagtaagaacaactggatctttgagagcttgaaaatacatatggagaacataaaaaagcaaccatgtacttcatttatttacaacttacttgatttacaaccatttatttgatttaattcattttacacatacatacacatgctctcattggttaagatcatctacatatgattcgtgttgctataccattttaaagaaactcatcacaattttatttttaaaaaaacctctttgaaactactgcatacaccagaaaataatttgaaactctttccttattatattttcaaattctttattttgaaattcactgggtttaggctttcaattctgaaaaa

SEQ ID NO: 211813 - DNA, 610 bp, Homo Sapiens
atcaatgatgaaattatgatgaaaatagtcaatgaaagcagaaaccaactttactactagcattaaaagtctcttagaccagataagcaaagaataaactataatgtagtactcaagtaaactgaggtagtagaaagtattgaaaactttatccacccacctttctatttacattacttacaagagtttggttccatattagcctttcttacaagcaacactctatagtatgtacaaaggcaacaattgagaagtgaaaatctttgaaaaaaatacacttttggaagggaggggctcttagaaaaaaagagaataattttaagagttatgaatagtgtaaattgaggattattaagcagtgaaacaaatattcagctcctatgggttcatgagggttgataccaaaagcaagggccttggctacctgagcacttttaaagaatatagtattgtttttgccgatgctttggtgcaatttttaatcctaattttcatttatgttaaattagtgaatatgtaaatattaatatttataagaacagttcatacttataaacaaatggtataaagtagtattctcattttgggaatctcagccttaaaaaaaagg

SEQ ID NO: 211814 - DNA, 494 bp, Homo Sapiens
ttcacccacgcgtccggcgcgggggaacgggaggctgcaggatggtcaagctgacttcgcccgctgatcgagcaggcggcgcagtacaccaacgcggtgcgcgaccgggagctggacctccgggggtgatctggaccctctggcatctctcaaatcgctgacttacctaagtatcctaagaaatccggtaaccaataagaagcattacagattgtatgtgatttataaagttccgcaagtcagagtactggatttccagaaagtgaaactaaaattttaatccaggtgctggtttgccaactgacaaaaagaaaggtgggccatctccaggggatgtagaagcaatcaagaatgccatagcaaatgcttcaactctggctgaagtggagaggctgaaggggttgctgcagtctggtcagatccctggcagagaacgcagatcagggcccactgatgatggtgaagaagagatggaagaagacacagtcacaaac

SEQ ID NO: 211815 - DNA, 642 bp, Homo Sapiens
tttttttttttttttttctgttttttctggtggcagggggtggcgttttaaacttgggggcttggaggggctgaggtcaaagggcagcgggtctttcactggctagaaagggaatagaaaggctgaaggaaaaccatatctggataaagtttaagttcactgagcatgacctaagactactgggagaaagttaatttccagcactcattttaccaaacctatgtaaccctgatcagggatccctgagttagctccagagctggaacagacagggcaaagggactgagcctccaaccctgagcagtggccaggcactcgacatgacaagctggaagagcctgaagaacgagctctcagaggagaaagaagggaaagagcctccacgactcctccagacgctcagtccagggccgccagggtcagccaccctccccgctgtctctatctgtggccctgccaccagtcactcaacccgactttttggtctagagtaagagcagcagctgtaccccaatggcacagcaaagcaaatccccctacaggcaccatgcaaggccagcacaggcagctcagtgaaggcaacagactccagtgcaggtccacaagggccccctgcgggagcgcctgtctgcaggatgcggg

SEQ ID NO: 211816 - DNA, 625 bp, Homo Sapiens
ttttttttttttttaaaataatttacattttattttcatgtaaatgtgacagcagcagcaataacataggcattcagtaaatattcttttgaattaggccagatcctaaatatcctgaaagaaacatgacatgtcactatctactccttcaagacaaagatatactttttttctttcttcacttcagtaagctggtctacaatgatggacttttatttatgcaacaatttcaatactgttcaacatattgggctttttttttctccctgtaagtagaatctgattttgaaatctagtagtgtactgacaagtgccaagctgttctaattaggttacctttcacatttataaaaatggtacgaagttctctgaataccattccagaaatactaattcatacttacctattttcagtctcctaaaggttccaaagatcttaatatatgttcactcagcacaacatggctgcaccaacaactaccccatgttacaaaacaaggcaaagagaagcagaataactctccctatgccccgggagaagtatgacagaggtgcagggtaagagggtttctgggtcccagccacctgtttcacattcctctttcaccttctttcttcctgggta

SEQ ID NO: 211817 - DNA, 393 bp, Homo Sapiens; identical to SEQ ID NO: 40474

SEQ ID NO: 211818 - DNA, 635 bp, Homo Sapiens
ttttttttttttttttttttttaggattaagtagtaaatttattttttaattgtaacaaatatatgccattagtatgttcttaagttttgggtcacattggcaacagtgtctttattttttttttgaaattcttttcaggaatcctaaggttatagttcccttaaaaaaatatttgctgttttacctcttttaagactgtaaacaggacaaaaaggcatggatatgagaattagctagtgatcactggctattctaaatagtcactaaggcttgaattgtctcttcaccagatgcctgtcagaagtcccaaaggtttccctgatcatattaataactttataaaaaattgatcattattcattaaatattagatattagtaaggaaaatataaatgaagtctaaaccaaaactcttaaccagactaacttcaatgttatgaatcacaaaatctttttgattgattgctctattgacaagctcttatatgcttttagagaaagattaagtcccattataagagatgataaattttagtcaaagactagaacacaacttacagaatacataactggacttgacagttaacaacttagttatttacactgtacaatggaacaaagaaaaatcttaatt

SEQ ID NO: 211819 - DNA, 625 bp, Homo Sapiens
taggttcctatgcagtacatacctcaaacataaacttaaggttctgtttaacaacaaccaaaaaaaaaaaaaaaataggatggaaatgtgtcactaaataacaaagtaaatgtctttaaacatgaagaccttaaattcatatccaagcaaaaagacgaagaataagttaacccaacttgtttacaaaaataattatttatcaagtaagcttttatagtagagctgcctcaatgaactgcctcagacttaatctcaatggtgtagcttgaaatagatttcctttattagcagggataagaagtatctgaatgaatgtgtcattaaattaaggaatactttcccaaaaacaataaaaagtttaaaaataaaaactgtcatttatttataaaatatcaaataaggcctctgactgaaaaaaagaaatctatataatgtttgggccattagcccttttctattcaatcagtctcatccaccccattcaccccaaacttaagataaaaaaattctcaagtgtagttttgaattttaccaatatatgaaattatacataaaattaccatataaagtaatatttaacaaattatatactcaaagtataattttccatttgtcttaattttaa

SEQ ID NO: 211820 - DNA, 571 bp, Homo Sapiens
ttttttttttttttttgcagtcaacacatatttactgggcgcattctatgcacgagttattgaagacagctgttgtaagcatttcaggacaatgcacctcccttaacaccgagtccgggatttggggcggggtgccggaaaacgccaggtcccgccagcagagggcacggtcccggcctcgctgcagcctcgggacccaccgaggcttccaggctcccacgctcgctcccgagcgcgtccccgccctcgcgtcacgtgacgtggccgcggaacctgagctgcggggcctaagccgagctaaattcgttgcaggtggccgcggcgggtgcaaccacaaaggctaatccgaaggagtcggggaggctcgtggagtcgatgcttcctcttccaagtcaggtcggctcccgttaccttctcagcattcgccgttccggtcttcctgagcgcgtgcatgaggtctttcgcgtggggaagctccggtgaccatgtaggggacaagagtgaggaagctcctggtgcttgggacgaggtcagcgctgtcggcgcgctgctccagcgcccaccacaccct

SEQ ID NO: 211821 - DNA, 550 bp, Homo Sapiens
ttttttttttttttttctcggccaataatttattagtaaaatatacatttctcattattaaagaataaaagctttcagccctgctgaacacacatctgaggtctcaagaaaaccagacaagatagctgactctcccacatagccctttccataaaggcgattcctaagcttaaacacacacaaagctggggctgtccctcttgaatcccatgggaaacaggccccaagatcaggggacctggagtcgggagcttggggtgcagtctgctcactgacaccctctcgaagagcacgcaggggaacctggtcctgggatggagtctttctggggatgccccacgtctgtgctgcctggaaccgggtgcccagggcagccggctcagcaggccccagagcaggggcaggtgtggctgggaggggctgtatatgtggcctcctgaacacagcgggagaccagcggccacctggagacacgtacacacacacgcacccgcaagcacacagctcatcccagcctggtgcctgcagacagctggggctacacgtggcc

SEQ ID NO: 211822 - DNA, 601 bp, Homo Sapiens
gcacgagctcgtgccgtttttttttagtaattaaaataaaaatttatttatatcaagaagtagttacatcatgtaattagtaacaagacaaatgccttcattggcataaaaatagaagcagaaagatgatgtaacaaacatttaacgtatggcttacaaaaatacaagtaattacagttcccttcatttctgctgtatcagtagctacaaatgacatgaaataataattaattaataggacatttgattgcatcacacagaaactggaataatcacagctacaatagatgtacctactaaatgaattcttttgcatcgaggtaacaatggaaaatgtgcatgtaacaaaggggagtccggttttacaggacgtttaagacacttattcaccttatcttaatgacaagcagaattcaatataatgcacatatagtagttcaatccagttcattaccaccctaatttatgacaaaactgtgcaaaaataatctatacaattctattatataaatcaataatcatggccttttatttatgtacataatatacatcatgataaaaataattttatatacagatgatggaaaaaaagtaactttca

SEQ ID NO: 211823 - DNA, 615 bp, Homo Sapiens
ttttttttttttttttctggcaagtcaatgtttattaagaactgacggtgtgcacagcatcacgccaggctggcaaaaaacaaaataatcccaagcgatcatccttggcctaaaaaaggcctgaatactacattataacgatctaaaatccaaacatcttttagtgtgtcttatagttcattaaatttttgaactgttaaacactgtgacttgactgcttagtctggggaagcaaaaactatgttggcacagcctgaaacacttgggaaaatttattgcaaagcaaggatgcagcattgagggttaaacatctacaaagcaggaaatgatgtgaattttaacaactggcttagaaagctaacatctctttagaaaataatcctctgtaaaaaaacaaaatacaaaaagccaaagcacacttcatttagtggaatatattatgcaggacacagaaaaggccagtatgttctacagccatgtgcaggaaatgatctggttaagactaaagggcagggacaatgggttctgaaaaatcaaacatgcaaaccaacacactttcagacagactcaggcaagcagtccatctaaccctaaacatctgttaacaaattcctc

SEQ ID NO: 211824 - DNA, 574 bp, Homo Sapiens
tttggctgcatagcctttacacacacacacacacacgtgttgctagaacgctgaacatggaccacacacccacccagcatccccaatcccaaatgcagagtagccaggctccagacataaattaaaaaataaaataaaataaaataaaaaagagttggtctctgggaaggagagctcatgcagagatgaagacagaagcccttgggagccaggaccaagaagaaggagaaatccctgccccttccctcaggatccccactccctggtggcctctgccctaagacaggatcattaacactaaccatcaggcctctagcccctttaatgtccagtctcccaagctatttgattttggctccagccctcatttttccaccacagcccaagggaatagcatcctagggggtaggaaggggaggaggtgggtgcagcctgcaggtctttagctggtttctcctggctctaggtctgggtcaggaggccccacgcactccttgctgagccgcacaatttcctgggacagaacttccatatccttgtgcaagtgcatattcttggtgagctgctcctccag

SEQ ID NO: 211825 - DNA, 596 bp, Homo Sapiens
cagttttcttttgattctaattttctttttctttgttatttcttcccgtttttgttactcagacgatccttatgtggttaaaatgcatgctttcttttgatatgtgctctgtgataccaataaacttttctgaaaaaaaagtatttctgaactccaaagatttcagcatccatgtttttaaaaagcaccagttgggccccaaggcacacggagattctgaggcagcagggcagccagcgcggggctctgtgcactctcatttgctgcttgctcttacacatctgccagacaggggccatgaactgtcctgaagtctgtgttggggagaactttaccagagaacacttttcttacaattgggggtccctctagaagtgaaatctaagacagatcagtgaggaaaactaaagctccaataaattgtttaaaggaaatgctatgaaagcattaaaccaaaaggaaaaaaaaggagactttttactgaacatagtaaatagccacaatcaaagtaaatgctgtgtttgaagttaaagtccacagatcaaagtacttcgcaaaatgtcaagtgcaagcgtaacgagggggagaggggagcc

SEQ ID NO: 211826 - DNA, 1000 bp, Homo Sapiens
  misc_feature (507)..(507): n is a, c, g, or t
  misc_feature (511)..(511): n is a, c, g, or t
  misc_feature (791)..(791): n is a, c, g, or t
  misc_feature (803)..(803): n is a, c, g, or t
agggtaggctggaattaacacataagctaaaagcaacagcttctttttatctcttacctacataattgaattgattggcgaggggtggaagtttggtatctgttgtcaatggtaacactacagaagataactactagatctaagtaaccaaggtaagaacataggtcttttagctgagcaggtgacgccgaaatttgggcttttttattttgtagtaagggttttgagagagcgttccggacttaatctcttcagcagcctcttgcataaatcacattgatactccttttcctgcctccagttgttttcacgtctgtatttttctcctgttatatttacatgttcagtttttatttaacctttgaggaatggaaatgaaggttgtgtccataagtcgaggttccagatataaaattctgtcttcctttttgatcattaacttgtttgtttcagaatatttggtgaatgcaactgtgatgatactagtgtgaataacaacggaagacnctcncttggctttggctaggtgtagtgtcgactgcagaggtgtttaaaaagtggcctgagggccggcctgttagagctcttttggctgtggaagctaatttgtgctgaatgtggtgcctacagaaaaacccttcagaggtcatacagtgtgtactctttctgccggtcagttgaggctccttacctagcttagcaagaggtttctgccctggtcctcaacataaccagagaaagtaaatgggaaactttatctggaaaattattcaaaagcaggaaataaatcnccttggttagcnttttaataatttatccatgagactatttacaagttactactttgtcaattcaacaaatatttattgtctatactcttctagacagtggggtgaacaacacaggccaagttcctgttttcatggaacttatgttctgatgttgggaggcaaataacaaacaacaaacatgcaaaaaaaaaaaaaaaaaaaaaaaaaaa

SEQ ID NO: 211827 - DNA, 1000 bp, Homo Sapiens
gacgaagtaaggtataagctggccagagactcctttgtgacacaaaaggtgaagttacagatattccactaaatttaatttttattatgacataagacaactggtaatatgcaacatgattgaaaaaaacttctcattcaattcgattgggctttgacataagaatagacataaagaagctaagaattgacaatctaaaaataagcttgcacttttacagtcaattgattttatacaaacttaacgaaagaacacaatgggaaaagaatagtcttttcaacaaatggtgctgggacaactgggtatccataagaaaaaataaataaagttcgaccaaatatcttatttaaaaattaactcaaaataaaatagttaactgtaaaagctaaaactataaaaccctcagaagaaaacactggcataaatctttgtgacagcatttgccagtgttttcttagctatgactccaaaggaaaaatggattcaatggacttcaaaattgaaaactgctgtgcctcagaagacagtatgaagaagtgaaaaggtaagacgccaagtagaagaaagtatttgaaaagcgtgtatatgataagggacttacatatataggaaatataaataactcttgcaattaataaataacaagataagccaattttaaaaaatggtcaaagattttgaatagatatatctgcaaagcagatataaagatggataagcacattaatagatgcttaatgtaattagtcattaggaaaatgtaaatcaaaaccacatgtggtatcacttcacaccacaggataaaatctttgttcaagaaaaaagagggttagaaaaaaaatgtaaagaaattaaaacccttatctaatgctgctgggaatgtaaagtgatgcagccactttggaaaacaaactggcagctccttaaagggttaagcataaagttaccatatgacacagaaattccagtcataagtatatactctaaaaaaaaaaaaaaa

SEQ ID NO: 211828 - DNA, 341 bp, Homo Sapiens
tttcataaatacaaaattttatttgcacttcattagtgtagaaagaccacaatgcttttcataccacaacactcaagacacaccaagttattcaaatacataattacttaattaccttgactaaacaaaacagtgcagtttaataaaagatataccaaagatagagttcacaaattcatcatcagaccaaaaaaaaaaaaaaaaaaagaacacagtctaggcttaatcagaataagcttcaccgtaaagaagggggaagttttatcattacaaaggtacagagtgtttaggcaaatacacgtatgttctttgatatagtaaaatgcatctctttaaaattc

SEQ ID NO: 211829 - DNA, 872 bp, Homo Sapiens; identical to SEQ ID NO: 46662

SEQ ID NO: 211830 - DNA, 760 bp, Homo Sapiens
  misc_feature (707)..(707): n is a, c, g, or t
  misc_feature (748)..(748): n is a, c, g, or t
cggagcctacggtccctgcagtgcctgctgctgaggaggccaccgaagctcggggacgcgaggagccggcgtggccctggaaagacgccccgatccggacgctggtgcagcgcatccaccagctgcaggctgagcgcgcgcagggcttccgccgactggaggagtggttggcgccggtgcagggcctgagagcctgggggcgcggcctcagggtccccacatgccgcagaggccaccgccagtacctgcgcagcggccctgactacgacttcgcgcgctaccggagcacagtgcacggggtgacccaggccttcgccgccgcctcgcgggaggtgctggcggtggaagcagagctgggcgggcctcgcaggcagccgctgctcgccggccacgtgcgcagcctgcaggagctggagcagacgcggctgggcacggtggccctgctgcagttgatggagacgccagagctggcggggcaggaggacgctgtacggatgcagcagctgaaaatgaaggtaattaaaaccatggaggcgatcagcgaggttctccaggaccttaggtttgatgcggaatctgccgagtgatggcggctccccagggatgcgccgagggagatgggaaacggggcggatggcgcccagcccagccctaactgccagctggctggggtcgcgccccactgcgctgctgaccttcctgcagtntcagacacctcccacaataaagagctcctcctctgtaaaanaaaaaaaaaaaa

SEQ ID NO: 211831 - DNA, 814 bp, Homo Sapiens
  misc_feature (777)..(778): n is a, c, g, or t
  misc_feature (788)..(788): n is a, c, g, or t
ggggaatttttctcttcaaaggtccttaggtgtaaattgatgccatcgtaggcaagagctgcaggagaatatctggcaaggtgcatttaatatttggaaaaaagatatgaccagtaacctactttaggaagaaaataagcatcacctggcatcagatcccctgccaggtcgggcctgatgaggatactcaactgcacatgagcgacgatactgtgtatccagctacaagacaaaagaggagacacttcttatgatgcatcttctcacaaaggataatattttagcaggttcacaggaacaccttgaaatcaacagtggtaaaaggcatagactaccaacttgagggaaaagtcagctgagtgcactgggttgaatttcaagtagaaaatcccaagccagatgcccacaaagccatttattgtaaaaattgcagattcttcaatattattactatgccgttaaggaaatcaggagttataaataatccatatggtttaatatttcagttagttctaagggggttcgtctcatttctttttgttggctgctgcatatattttaaatgaatgctttcatttaaaacaaccagccttttcagcaacattgaaatactcatgactttaccaccatatcgaaaatttaactttacatttactttttagcattatgaaatgcaaatatttcacagttaccctcagggaattaaaaaatggagagataacgactacaatattaaaatggcaaatatccaaataaaagctattatatgaccgcaannaaaaaaaaanaaaaacaaaaaaaaaaaaaaacctgg

SEQ ID NO: 211832 - DNA, 569 bp, Homo Sapiens; identical to SEQ ID NO: 49072
  misc_feature (538)..(547): n is a, c, g, or t
  misc_feature (549)..(559): n is a, c, g, or t

SEQ ID NO: 211833 - DNA, 847 bp, Homo Sapiens; identical to SEQ ID NO: 45327
  misc_feature (576)..(579): n is a, c, g, or t
  misc_feature (582)..(582): n is a, c, g, or t
  misc_feature (587)..(587): n is a, c, g, or t
  misc_feature (594)..(594): n is a, c, g, or t
  misc_feature (728)..(728): n is a, c, g, or t

SEQ ID NO: 211834 - DNA, 707 bp, Homo Sapiens; identical to SEQ ID NO: 50190
  misc_feature (678)..(690): n is a, c, g, or t
  misc_feature (693)..(702): n is a, c, g, or t

SEQ ID NO: 211835 - DNA, 788 bp, Homo Sapiens; identical to SEQ ID NO: 54334
  misc_feature (682)..(682): n is a, c, g, or t
  misc_feature (692)..(692): n is a, c, g, or t

SEQ ID NO: 211836 - DNA, 795 bp, Homo Sapiens; identical to SEQ ID NO: 40870

SEQ ID NO: 211837 - DNA, 784 bp, Homo Sapiens; identical to SEQ ID NO: 46885

SEQ ID NO: 211838 - DNA, 750 bp, Homo Sapiens; identical to SEQ ID NO: 41167
  misc_feature (531)..(531): n is a, c, g, or t

SEQ ID NO: 211839 - DNA, 970 bp, Homo Sapiens
  misc_feature (16)..(16): n is a, c, g, or t
  misc_feature (879)..(880): n is a, c, g, or t
  misc_feature (886)..(886): n is a, c, g, or t
  misc_feature (891)..(891): n is a, c, g, or t
  misc_feature (903)..(903): n is a, c, g, or t
ctaggagcgagcctgngtggcgaattccgcacgaggattttctccagtccctgggagcaagttgcagtctttttttttttttttttttttttccctcttgtgctcagtcgccctgttcttgaggtctcttttctctactccatggttctcaatttatttggggggaaataccttgagcagaatacaatgggaaaagagtctctacccctttctgttcgaagttcatttttatcccttcctgtctgaacaaaaactgtatggaatcaacaccaccgagctctgtgggaaaaaagaaaaacctgctcccttcgctctgctggaagctggagggtgctaggcccctgtgtagtagtgcatagaattctagcttttttcctcctttctctgtatattgggctcagagagtacactgtgtctctatgtgaatatggacagttagcatttaccaacatgtatctgtctactttctcttgtttaaaaaaagaaaaaaaaacttaaaaaaatggggttatagaaggtcagcaaagggtgggtttgagatgtttgggtgggttaagtgggcattttgacaacatggcttctcctttggcatgtttaattgtgatatttgacagacatccttgcagtttaagatgacacttttaaaataaattctctcctaatgatgacttgagccctgccactccatgggagaatcagcagaacctgtagggatcttatttggaattgaaattccctattgaaaattttggtcccgtttaatttttaaattttccttttgggtcccctggaaagggaaagatgaaggctcagttttaaaacgttaaaaagggtacaagttggctttggtttaccataaaactaaattgtggtcccccnncttagnaaccnaagagatcattnctcctcgagggcttttattgtccggggggggaaaaaaaaagggtaatgaaaatggcccacttgggtc

SEQ ID NO: 211840 - DNA, 362 bp, Homo Sapiens
  misc_feature (329)..(332): n is a, c, g, or t
  misc_feature (334)..(334): n is a, c, g, or t
ggggctgctgtgaccgcaaaactgtttctgtagaattttctccggtgtggtcatcctgccttcagaggtttctccaggacgtcacctgtatgaggtacacagtgtgatgacacactctgtgcttttcctacttgtgtccacgtgagtgtctggagctgcccttcaaggagagcaatagatgaatgattctgccttcccgctgagagggatgtgggtcctgcggatggtcggggtgaagcttcctctcctttctgctgacagcacttcctcattaaatgcagagacctgcaaaaagggaaaataaaaacacaagaagaaaaatgaggcannnnanaaaaaaaaaaaaaaaaaaaaaaacatgt

SEQ ID NO: 211841 - DNA, 1000 bp, Homo Sapiens
cacccgctcaactgatccaatgcaaccaatacagtattggaagctttctacgaacaaggcacccagagagggctcggaggaagatgacagtgccaacgggcacagggagaatcgtgagcttactgcaccttcccagcaggcagagtgagcccgtaggacaagagccccctttctccgtttcccatctgccctgcagccccgaggaacggtccattctacagacaagaggcctgaggctcagaagcaaagcaacttgccacaatcgcatcaccggagaaagtaccttcaagacagtcctggacgcggtggcttcacgcctgtaataccagcactttgggaggccaaggcaagaggatcactggatcacttgagcccagaagtttgagactagcctggacaacatagtgaaacccctgtctttacaaaaattgattaattaattaattgtttaaaagagactattcctcattcttttgacatcattttaaatgagaatgcagaatatgacattgtacatactgatatttgattccttttatataacctttcatgtattaaaaaactgcactgaaaatctagaattaagttaaaattggtgtgggttatttgtgaatggtgggattttttaaatgtattccaacacccatatattccaacttttccacacttccaaagtctggaatactttgaggatggggaggaaagatatgtttacggtccttgggaaactgaaaagcatttcctgtgatgtcccagggagctggggcacaggagccagccttgaagtggaaaccccaggccatccacccacaatctgagtatccttgggtgagtgatctctctaacctcccatcgagtcccctgtaaactagaaataattatagctgcccacatcactgtcttactataagagtaaaatgagataatgtattttaaaacattggtatagtgtgagtattcaataaatattctttgagtgaaaaaaaaaaaaaaaaaaaaa

SEQ ID NO: 211842 - DNA, 1000 bp, Homo Sapiens
  misc_feature (471)..(471): n is a, c, g, or t
cagcaatagcatttgagcaagttttatcagcaagcaatattttcagttaataaggtttcaaaaatcatgtaaggatttaaacttgctgaatgtaaagattgaacctcaagtcactgtagctttagtaattgcttattgtattagtttagatgctagcactgcatgtgctgtgcatattctgattttattaaaataaaaagttgaactgcacagtctcaaaaaaaaaaaaaaaaaaaaaaaaaaaaaaaaaaaaaaaaaaaaaaaaaaaaaaaaaaaaaaaaaaaaaaaaaaaaaaaaaaaaaaaaaaaaaaaaaaaaaaaaaaaaaaaaaaaaaaaaaaaaaaaaaaaaaaaaaacaaaaaaaaacaccccacaacacaccaccaaaaccaaaaaacccacaccccccaaactttctcaatcacaaccacctccttaaaaaaaatattttttttactcccctatcacaccnaaactttacatcttctaaataaatacaaccacctaacctacttactttaaataaactcccctacctcaaacatatttaattatatttaccaccttcactcaacctccttcccaataattcctaaaaaaaaaacttatcctactaacatttccaaaaacaaattcttagactccaattttccacaatctttccctctaaaaaaatactcccaaactttacaaccatttcttttccccccttcattactcccctatattaaaaaaaccccccaccaacatataaaaaacccccctccccctcacaataaaacaccccacaccaccacacaatcaatttcaacaatttattatccccttaaaaacacccacacccacacctcaaactttaaataaaaataacaacaatctcctacttcctcaccacacactcttattacttccccaaacacaccaatcttccctacaatcccccacaactttttctccccaatatcactcctcaaccaaaaacccacaacccaacccacacc

SEQ ID NO: 211843 - DNA, 560 bp, Homo Sapiens; identical to SEQ ID NO: 39910

SEQ ID NO: 211844 - DNA, 473 bp, Homo Sapiens
gctttattgtgatatttgctttattgccgtggtctgaaaccaaacccacaatatctctaaggtatgtccgtataagttcctaagcatagtatgggggcatatctaatgtgtaccattttaagtagtggctattcttgaatttacactttcacatgaattttagaatcagtttgactagctctaagtcctattgagagttttaaaacaggattcaaatgaattctttacaatataaccttcccattcatggccatgatattctgctccattattgaagttttcttatctatctttcaaaaaagaacataagactctagcatatttcttgttaggctttccctaggtgatttttaattgctattataaataaatatccatttttcccataaaatattgctatatgttagtgtattaatcttgtactgttacctttttcaactctattggttctgatagcttgtcagttgtctacc

SEQ ID NO: 211845 - DNA, 461 bp, Homo Sapiens
tgacagggtctcactctgtcacccaggttggaatgcagtggtgcaatcttggttcactgcaacctccgcctcccaggctcaagcgatacacccacctcagcctcctgagtagctgggaccacaggcatgtgccatcacacctggctaatttttttgtatttttggtagagatgagttttcatcatgttgcccaggctggtcttgaactcctgagctcaggtgatctacccttctcagcctctgaaagtgctgggattacaggcatgacccacggccttcggcacagagacagtttctataaaagacggcttcttgccatctcagcacaccatcgcgaaggagtgacgggctctttcagagacatggagggccaggcaccttgtgaccacatgcacaagtgaccagcacacagaagtggtggaggcagctgggtccctgggcgcctgacccaggtggggccc

SEQ ID NO: 211846 - DNA, 382 bp, Homo Sapiens
ggtcgacggaagggcactgtagttgaggtgaaagtcgaagaatgaagtcctggtagggggaggaataagcaagaagagatcatgcaggaaacgggccaaactacatcaaatgatttattggagaataatagagaacattagatattaataacaatagttataatcatagcagatgccatttatagagtatatactatgtactaggccttattttatttaagtgctttataggtattctcattttaattctcttcacaaccttacgaggtaggtattgttatttccattttactgatacagaaactgagacacaaaaagaaaggtcaagaataggcccaggtcaggtgcagtggctcacctctggaataccagcgctttggga

SEQ ID NO: 211847 - DNA, 581 bp, Homo Sapiens; identical to SEQ ID NO: 55887
  misc_feature (548)..(567): n is a, c, g, or t
  misc_feature (569)..(576): n is a, c, g, or t

SEQ ID NO: 211848 - DNA, 699 bp, Homo Sapiens
  misc_feature (657)..(665): n is a, c, g, or t
  misc_feature (667)..(687): n is a, c, g, or t
ggtaatgaaaacagaacccttttaacaagtaatactaccatgctactttggaaactgcctagtacccaaaatatttgatatgctttttgagttggatacttaaatgcaccaaccaaagcaatgttttgattggctataatttgtatttttgaaaccatttacaacaaacattctcaagaagagtttgtatgtcaaaagtcatttaggttttaaagtcttttgatcttttcttactatatacaatcagtctgcagagactgttatgtgtctgtttgcctttgtacatatatatagcttgtttgaataatcattgtgcatctccattaatgttgttctttgctttgtatataaattaaaagagttgacccaggtgttgttacacagtgtctgtcatccttagagttgaccagaggcacacaaatacacacacacacacacacacacacacacacacacacacacacgtgtgtatgtacaatatatcaaaatttactacttatttctaatagaactatgaaaggattttaaaattttatttatactgaatgagaactgagagtatacaaaggtattggtaaaagttgctgtttcatgaattagtttgagaaaatattttaggtcaaatttatatttaagaaataaaattttattagtccnnnnnnnnnannnnnnnnnnnnnnnnnnnnncatgtcgggccg

SEQ ID NO: 211849 - DNA, 806 bp, Homo Sapiens; identical to SEQ ID NO: 41745
  misc_feature (543)..(543): n is a, c, g, or t
  misc_feature (725)..(725): n is a, c, g, or t

SEQ ID NO: 211850 - DNA, 724 bp, Homo Sapiens
gggttgagaaaaatagaagaaattaagatgaaatttgaacagttgtaatccacagtcccatttttccctctattttattgccttctactaagttattgaaggcccagatctgcaaaatttacaagctactaattcattgtctcctttaagaatttggagcaaaaattattccgactatgcggaaatgaattcacatcatcatggcaggttttgactatgagggaattcaggttaggttcaaatagaataatggtccatggagaaaaatactttctgatttttcttcaagttggatggaaaggtttttctttatttaaaaaaaaaaaaaaaaaagtcctcctgagaattttgccttcgaaaaagaagttttataacagctgcctgtagctacattataacttcggtaattaagtgacaaaactgtctcattatgcttttaaaatactgattaagtgcattccagaaataatacatatcattcatttcaaaatcaacctacctgaattctgactcttcaatcatgagtagccattttacaaaaccaaagggtctcatttcccaaacagtactttaaatatcatcctaatagtaatatcctaatagtaataatcctattaatactcacttcaatgcataaaataaacagccaatgcactttccatcaaagtctgcagggcactattataaataataaattagggtttccaaaaatccactttaatac

SEQ ID NO: 211851 - DNA, 834 bp, Homo Sapiens; identical to SEQ ID NO: 53081
  misc_feature (488)..(488): n is a, c, g, or t
  misc_feature (494)..(495): n is a, c, g, or t
  misc_feature (497)..(509): n is a, c, g, or t
  misc_feature (512)..(555): n is a, c, g, or t
  misc_feature (557)..(566): n is a, c, g, or t
  misc_feature (569)..(576): n is a, c, g, or t
  misc_feature (616)..(616): n is a, c, g, or t

SEQ ID NO: 211852 - DNA, 634 bp, Homo Sapiens; identical to SEQ ID NO: 52936
  misc_feature (591)..(625): n is a, c, g, or t
  misc_feature (627)..(627): n is a, c, g, or t

SEQ ID NO: 211853 - DNA, 629 bp, Homo Sapiens; identical to SEQ ID NO: 47953
  misc_feature (594)..(610): n is a, c, g, or t
  misc_feature (613)..(614): n is a, c, g, or t
  misc_feature (616)..(619): n is a, c, g, or t

SEQ ID NO: 211854 - DNA, 729 bp, Homo Sapiens
  misc_feature (570)..(571): n is a, c, g, or t
  misc_feature (576)..(576): n is a, c, g, or t
  misc_feature (578)..(578): n is a, c, g, or t
ggggtgggcgcctgtagtcccagctacttgggaggctgaggcaggagaatggcataaacccaggaggccgagctgacagtgagctgagatccggccaacagagcgagactctgtctcaaaaaaaaaaaaaaaaaaaaagtacaacacagctgggcatggtcacacctgtgatcccaacactgggagactaaggcagtaggattgcttgatgccaggactactctggtcaacctagtgagaccctgtctctacaaaaaataaaaacattttctaagtgtggtagcacaccctgtagtcccatctacatgggaggctgaggcaggaggattgcctgagcccaggagttcaaggctacagtgaaccaagatcacgtgatggcagtccagcatgggtgacagtgagactgtatcaaaaaaaaaaaaaaaaattggctgggcacagtggctcatacctgtaatcccagcactttgggaggctgaggtgggagaatcagttgaggtcaggagttcaagaccagcctggtcaacatgatgaaaccctgtctccattagaaaaaacccaaacaacaannaaaantntcgtggtcggcccgcctccggcccctccaaaaaactttttctaaaaacaatttcctttttgggcccccccgggccccccagtaaagggttaaagggggaaccctggggctccataagccctgggtttctcccccaaggggaagaaattccc

SEQ ID NO: 211855 - DNA, 811 bp, Homo Sapiens; identical to SEQ ID NO: 40564
  misc_feature (754)..(762): n is a, c, g, or t
  misc_feature (764)..(765): n is a, c, g, or t
  misc_feature (769)..(771): n is a, c, g, or t
  misc_feature (773)..(773): n is a, c, g, or t
  misc_feature (775)..(780): n is a, c, g, or t

SEQ ID NO: 211856 - DNA, 826 bp, Homo Sapiens; identical to SEQ ID NO: 57971
  misc_feature (425)..(425): n is a, c, g, or t
  misc_feature (679)..(680): n is a, c, g, or t
  misc_feature (685)..(685): n is a, c, g, or t
  misc_feature (688)..(688): n is a, c, g, or t
  misc_feature (691)..(691): n is a, c, g, or t
  misc_feature (698)..(698): n is a, c, g, or t
  misc_feature (804)..(807): n is a, c, g, or t
  misc_feature (810)..(810): n is a, c, g, or t
  misc_feature (812)..(813): n is a, c, g, or t
  misc_feature (815)..(815): n is a, c, g, or t
  misc_feature (818)..(819): n is a, c, g, or t
  misc_feature (821)..(821): n is a, c, g, or t

SEQ ID NO: 211857 - DNA, 764 bp, Homo Sapiens
  misc_feature (662)..(662): n is a, c, g, or t
  misc_feature (721)..(724): n is a, c, g, or t
  misc_feature (726)..(726): n is a, c, g, or t
  misc_feature (729)..(730): n is a, c, g, or t
  misc_feature (733)..(734): n is a, c, g, or t
  misc_feature (736)..(738): n is a, c, g, or t
  misc_feature (741)..(745): n is a, c, g, or t
  misc_feature (747)..(750): n is a, c, g, or t
  misc_feature (752)..(757): n is a, c, g, or t
  misc_feature (761)..(761): n is a, c, g, or t
ggcacatgtttataaagctgaatagttctgtatgtcagctcagcacccctagtgtcagtcatgctactctcctgctgtgcatagatgggggcctgtccacacccaaatctcctgggttcccgctgtccgcacctgaaggtacccaccagatgtgtctgtcactgccctccatccacctttcttgtggttctcatgtttctgcctccctagagaccatttctctctacagcagtagtttccaatagaaatacaatgccagacacatacgtcattttagattttctagtagtcactttagaaaagtgaaagggaggccagctgcggtggctcacgcctgtaatcccggcactttggaaggctgaggtgggtggatcgcggggtcaggagatcgagaccatcctggccagcatggtgaaaccccctctctactgaaaatgcaaaaaattggctgggcgtggtggcaggcgcctgtggtcccggctgctcgagaggctgaggcgggagaatggcgtgaacccggtaggcagagcttgcagtgagccgagatagcgccactgcactccagcctgggcgacagagggagactccatctcaaaaaaaaaaaaggttacagagaaacagggtgaatttagttttattttcacctaaaaatgttagcattnatcccaaaatatcactttcaacaatcttatccaaaataaaaaattatttaatggagatnnnnanaannaannannnccnnnnncnnnntnnnnnnaccncct

SEQ ID NO: 211858 - DNA, 828 bp, Homo Sapiens; identical to SEQ ID NO: 44767

SEQ ID NO: 211859 - DNA, 777 bp, Homo Sapiens; identical to SEQ ID NO: 53023
  misc_feature (687)..(687): n is a, c, g, or t
  misc_feature (716)..(716): n is a, c, g, or t
  misc_feature (730)..(730): n is a, c, g, or t
  misc_feature (744)..(744): n is a, c, g, or t
  misc_feature (746)..(746): n is a, c, g, or t
  misc_feature (751)..(752): n is a, c, g, or t
  misc_feature (754)..(754): n is a, c, g, or t
  misc_feature (763)..(763): n is a, c, g, or t
  misc_feature (769)..(769): n is a, c, g, or t

SEQ ID NO: 211860 - DNA, 882 bp, Homo Sapiens; identical to SEQ ID NO: 54232
  misc_feature (416)..(416): n is a, c, g, or t
  misc_feature (423)..(423): n is a, c, g, or t
  misc_feature (614)..(614): n is a, c, g, or t

SEQ ID NO: 211861 - DNA, 900 bp, Homo Sapiens
  misc_feature (710)..(711): n is a, c, g, or t
  misc_feature (833)..(833): n is a, c, g, or t
ttttttttttttttcaaaacgagccagatgctttaatgggctgcctccagggcccatcggctcatcagaatcccttaaatgaggcccagagcttgccagcctttggttgagctcagcactccacaggcaggtggctcacagcaggcctggctgatgggctctggcttggggagtagcagggtcctcagtccagatcttcagagaccttctaggactgagctgccactcagcctacctgcaccagtccctgagtcccagcagctgcttagcttctagaaaacataagtttcctgggataatgccaggggtgggggaggcagttcagggaagcactgatgtcaattcaggacaggcctggggcctcctggggtggcggcagcagcaggcccagaacaaggacgccagctccaggctgcatccctgcaccagtagcggggattgggagcagggagtgcaggctccctcagggagctccaggctggagtagggccaacccaaccccaaatgctggggggtgactcctgaaagtgtgagtcacatccactgcctaaggtaccactctacgatagccaagtcctaggacacacgaagactttctataggaaggttctctgcctccaattctaggccctgtcccagagaggaagcagagaccaaatggtgacagggtatgtatcaggcagcatccccacaacaaccctgtgaggtanngtgcgttgtcccattttacacatgggggaatgagggctcagcagaggtgaagtttcttgcccaggtcctgcagcaagaacacgagccgggattcaagccccagttctgtcgggctcaaaagncccatggtgtgttctctaggcaagaaaaaaagggaagtagcccctatcccaataaaagaccctcaca

SEQ ID NO: 211862 - DNA, 586 bp, Homo Sapiens; identical to SEQ ID NO: 46899
  misc_feature (551)..(578): n is a, c, g, or t

SEQ ID NO: 211863 - DNA, 820 bp, Homo Sapiens
  misc_feature (316)..(317): n is a, c, g, or t
  misc_feature (397)..(397): n is a, c, g, or t
  misc_feature (438)..(438): n is a, c, g, or t
  misc_feature (458)..(458): n is a, c, g, or t
gggagcccacacaagaagggtaggagagaaaagccatggccgacaaggtcctgaaggagaagagaaagctgtttatccattccatgggtgaaggtccgatacctggaaattagcttagtacacaagactcccaattactattttcttccttcccagctcttcaggcagtgcaggacaacccagctatgcccacatgctcaagcccagaaggcagaatcaagctttgctttctagaagacgctcaaaggatatggaaacaaaagttgcagaggtgccatgttcagaatacaataataaagtggagtgaaagatatannacaaaaaaaaaaaaaaaccaaaaaaaaaaaaaaaaaacacaaaccaccaaacacaacaaaccacaaaccccaaccccccnccccaccacccccccccaacaacacacccccccaaaccccncccccccccccatcaccccncccctcccccccccccaaacacccccccaatccccatctcttccactccttcccccctaccccactcttccctcttctttccctccccccccacctctcaaacaaatactccttacattccttcctaccttcactccctcaccccccctacaaccccattactccccccccctttcctccctatttaaaacaccccccttaccaacacaacatttcacatttctctcccccttcaacccatcacctccccccccctttgttccatcccccctttctcacctatacaaaccctagccgcggccgtgcttccaccctacacctttcccctaagtctcccccgctgataccccttccccccaccg

SEQ ID NO: 211864 - DNA, 888 bp, Homo Sapiens
  misc_feature (789)..(789): n is a, c, g, or t
agagaactagtctcgagttttttttttttttttttgaagactacaactcttactgtttgagatgtttatttctagtttttagtgttaaaccccagctccatatttattccttaagtgtttcccctcaccctgggaagaagcttgttgtcgtttttgattgtcctctgccagcagatctgcacgagatgtgtttcttcagtctttcccacttgtgagacaaatctccattaaagtctcaacaaatgcaactgtcccttgtagagtaagcaagcctaagagtgctgcttctctgccctggccctggctggtcagagtactaggagttcttggatttccgctcttttctggccctggaggccatgaggctgaagaagagcccaggagccagagttcgaagataaacagccaaggaaggcagtaagtcagccaggatcacatctttcttcttcttccccacagcagcaagaacatcctgggccacctccacagggcttcggccctgggctgtggtggtgtccataactccatacctagatccatccgcggtgatggcatttacagagaggttggtgtggatgtagccggggctgatgacggtcacctcaatttcatactgttccatctcggcacgcagacagtcaaagaaagcctgggttgcgtgcttggaggctgcatatgctgatcgaaaaggaatgctcatcttgccctggatgctgctgatggcgacaatgtggccttgcctcctcttgatcatggagggcaggagtgctttcgttagagcaactgggncaaagtagtttgtctccatgacccctcttgtccacatcccactgtgggctactttgggagccattaaagtaaccttcaggccaaaaaacgaaggccctt

SEQ ID NO: 211865 - DNA, 919 bp, Homo Sapiens; identical to SEQ ID NO: 55504
  misc_feature (624)..(624): n is a, c, g, or t
  misc_feature (626)..(628): n is a, c, g, or t

SEQ ID NO: 211866 - DNA, 762 bp, Homo Sapiens
ggggtgtgattcaggatgaccatattccatttttaagaagaggtgttccagttctgcatctgataccgtctcctgtccctgaagtctggcacaccatggatgacaatgaagaaaatttggatgaatcaaccattgacaatctaaacaaaatcctacaagtctttgtgttggaatatcttcatttgtaatactctgatttagtttaggataattggttctagaattgaattcaaaagtcaaggcatcatttaaaataatctgatttcagacaaatgctgtgtggaaacatctatcctatagatcatcctattcttatgtgtctttggttatcagatcaattacagaataattgtgttgtgatattgtgtcctaaattgctcattaatttttatttacagattgaaaaagagggaccgtgtaaagaaaatggaaaataaatatctttcaaagactcttttagataaacacgatgaggcaaaatcaggttcattcattcaacgatagtttctaaaccagcacttaaatacccggttggaaaaccgagccttccatttttatgattttttcatatgtggaaaatctattacatgtaataccaaaaccaaccttgtagtttggaaaggcggtcagattctctcttgagaacacttttgcaagaggttaatttttatgggaaatttacaaatccgaaattaaatggctaacgccccgtgaccacgataaacccccccccgcgccctttccctccgccagtcccctcat

SEQ ID NO: 211867 - DNA, 644 bp, Homo Sapiens
tttttttttttttttgaatttcaaattttgatttattctttcttggaaaatgatttataaatacaagcattatggttatatatgtttaaatatatgatgccttatgtttattttgaaacacacacatatatggtgcttaaaaaataaacttatggagcccataattacataaataataagatgttacctctcatctacctcctcttcctgaacctatcatgctgcttgtaaacgtggggaactttatatttttaggagatacgtgtcaatgctgccacagaaaattgcgctagtaagacacagcagtacttactagtcacataatgtgctatatgtaaaagtttttaactttttataatttacagagttcttttcacaaatatcttatttcattaatccagtgaagcattatgattttatagagaaggaaagaggttcagagaagtaactgacgtcacataatcagtaagtacactatatcacaaacccatgacttttgaatctaaaacccagtctttttactatgttatgctgaaatcgagggcaaaatggtctatgcacactgatccccacaggttagaaagcaccaatagtttaggttttgaccagagaaatccaattaaacaaactggctagtctaaact

SEQ ID NO: 211868 - DNA, 551 bp, Homo Sapiens
gcacgagtttttttcagtccaacacactttattcatttttaacttttttcttaattttcaataatcaagtattcaagatgctgtaaaccaagattagtacatcgacaacagatttcattaaacacacggaaattatacatcttttaaattaccttaaaaagtctccaaatgaatatcattttaaaaatcacaaaatcaaacttctttatgcaacagtgcaaaacctttcatcacaaacatacctctacacaaaacacacacacacacacacaaacacacactccactaagaacctaatgccagtttagttgacacagtattacatttccttaaacaaaagagtcagagcctgacctgcctgtttcaggattctaaattaacatttggggtttggggtagaggtatgtattttaagaaaaatgcccactatttggtactactcttaccaattatcaattaccaattgccaataatcggtactagtcttaccaatgattcttatttttcatttctagatacaaactttaaacctcttttgttcacccctttgg

SEQ ID NO: 211869 - DNA, 560 bp, Homo Sapiens
tttttttttttttttttattttacaaatccaatatttattttatcttgtatgtacaaaaagtaaactccaagtgaacatcaaatcaaatctaatccttttggccacatgactggttgttctttatctcatagttacaatgaatcatataaactgtagactgccactaccacgatacttctgtgacacagaaggaatgtcctatttgcctatctatctgaggaatgttaaatagagaaaaatagattataaaacaacctggaggtcacaggattctgagataatccctctgttaaaaaacatctgaacagcaaatgtccaatctgtaataaaatagttaaaggtccaagtcaagtccacttctacttggctggcccagcacaagaaatctaacagcactttgtaatcattttgcttttctaattttcccggaggacatgggccattgacatataaggaaaaaaaacaaaaacaaaaaacgattaagtaagttgtgtgatccctaacctgtgagttcaaaggaagattttgcagggcaccattatttccatagaagattctt

SEQ ID NO: 211870 - DNA, 544 bp, Homo Sapiens
ttttttttttttttttttaatatttaaaatgtttaatagttaaaattttttaacaatttaactttaaaaaggtcacacattttctgatccagcaatgccccaatcagattgtttcattttattattattatcaacactgtcccctttttggcacctgtaaaatagttcctttcgggagtttggagccaggccaggcaccgtcggtgcatgggatgagatgggcaggtttggagctcctctgtctagtgaggatcacggtctgcagagaagggttggcctccccgtctcctatcaaggcttaaagcaaggagaaccatcccaaatttggttccttttcccctaagtatccttagaggcaatccaccctgtgactaggtgactaggtgaaggactgaggtccagaaaggagctatcttaaacctggaatcccatttcctagtctgcagccttaagcagttaccctctcagacaactagccctctccttcctccgcatgaaaacccatggcttacagggatggttgttgctttccctaaagaaattc

SEQ ID NO: 211871 - DNA, 491 bp, Homo Sapiens
ttttggtatcaaaatacaactttattttcagatacatgagcacatatctatagatcataaatgtgctttaaggtaagacatacattattaatttctttcataatatcagaaaataattttagataaaaatgtaacaactgaaagggtcaaagaagaaagacagtaaaaagtcctgtagtttcaattagcattataggctcagtctttctcattaattacacagaaaagcatggcctttaactaatctaaaacacctttgatttttactgaaactattttataatccattttctcctaaaagtttccaggtcagttataaagtgtattacagagattgttagaaccttcttttctttctctggaaaaagaccaccataaaaaagccatttgatcattccaagttatgatttgaaaaaagataaacacaaaatataccagttacaactcattccagaaactggcaggaatgcctggggcaaggggatgcttac

SEQ ID NO: 211872 - DNA, 599 bp, Homo Sapiens
ctacaaatattttacatttattataggaatacaataaagaggttctgcagacacatgagtggtaactggtctattggaaaagaaaagacaattaaaaaatgatctaagtttacaaaaatgatgaatcatgctttaaaaatgtagaaacaattaaaaaatatcctacaatgttagccaaagttcaaagtgtatttcttttgaatgtaaaaactaacaaataaataagtgttaaatacagatctgagtaaaaatgataaaagatagacaaccaactgctttatatatttagctttcatccatttttcagacttgtttataaagccagataaacccgccaaagccttgtttgtgttttacactgaactttccagaagaagcaccctatttccagtgtttatccacttcacaaatacattatcttaaaacaacaaaaatgattaaaggtgctttagcctaacattaaatggaccataaatcggcaaaccacagcagtgctttactcaaaatgctgcttgcaggtggaatgtctttaccagaagtgcctgagggccccactcctactccatcatctcaaactcatctatcaaaaggaaaaggaa

SEQ ID NO: 211873 - DNA, 580 bp, Homo Sapiens
aacactcctttcaagctgtgtccaacacccacaaggaatgactatttttaactaatcttactgacctcatttaatctattcaataaaacctctgccctaaggagcaaagaaacttgcagaggaagtaaggcaaactggaagaagcatactgtcagcggattaaattcttgagcaaggcaatactccttatggattcttcccatgtacaatccgtaactcttcccatgggcctttatatcaaccctaagataattacactcctgcctcaaaataaaataaaataaaacccaccacatcttgtattgtagacatcccagctgcatgttaagctgagtgaaagtaccatgctgtcttttaaatcactttatatctacttaatcatcccacagtaacccgagttgaagaagttactttggtttctcataaatgaatatgcacgtgctgaacatatcggaaagaaccacaccctctcactgatgaacacgttggcagttctcccaactgttttatcaagagaagctagaaggtaaagaaaaggaaacagagccctataggaaaaatgattgacttcacacgtttg

SEQ ID NO: 211874 - DNA, 461 bp, Homo Sapiens
tatttttagtagaggctgggtttcaccgtgttagccaggatggtctcgatcttctgacctcatgatctgcccacctcggcctcccaaagtgctgggattacaggcgtgagccaccacacccagccggtctcttggtttacaaatatagacaaatacataggaacactgactggtatttccatgtcaagaaacatggtcatatgtacagacaagacatggataaccaacaagttttaaagaaatgtatacatctctagttaaagattctaaccagaaatgctacgagagagctggcaaatgacaaccaccaatacatagatttctacactcctgaaaaagacaacaacatcaaaaaaaattaagaaatttggcatcaggtggacaacatctaggttttagggttaatatactgtttcatatactgtacaaagtttcatcattgcccccaaccttggaatttc

SEQ ID NO: 211875 - DNA, 560 bp, Homo Sapiens
ttcatgttttagcaaaatttattagttcgtgttgggccacattcaaagccatccacacaagcttcttgtaggccattgtaacacaatgttaaaaggtacagtaaaaatacagtattatcttattgtgtagcacggctgtgaggctcattgttgaatgaagcatccttaggcagcacgtgactgcatgcagatatgtgtgctgaaagaactttgcctttttaactaaattaatggacccaggaacagaacttggtcttttacttgccattcattgtccttcataagggatggcctcccaacacttaacttcagctcttcaaatacttgtcattaaaccttctaatactacaaacttactacccagagtatacacattcctagcgatttgtggatcttaacccacagcatgaatgcccttgttatagcccttgcatttactctccactctgcgcccttaaaccaaggctgttactactgagggggcgccaagatttccaagcaacccattctccaggacactgattaacagcacagcatgactctggctaaatgcttgcaaa

SEQ ID NO: 211876 - DNA, 523 bp, Homo Sapiens
attattagcccctctgggaccctttcttctaattgaatttttgtccatactcaaactgttagtttgccatataccatttaacccatgtgcgtcatttctaatttttttcaaagatggagtctcactctgtcacccaggctggagtgtaatggcacgatcatagctcactgctcccttgaactcctaggctctattgatcctcccacctcagcctcctgagtagctggggaccacagccgcatgccaccatgccctgccaattaaacaaattttttttttagagatagggtcttgttatgttgcccaggctggtctggaactcctggactcaagcaatcctcttgcctcagcctcccgagtagccggaactacagacgcaaaccaccacacccggcctctgaatatttttaccttaaaaacataggggagatgaagacgcatttctgagtcctaatctactgctgccttggttgtgctctattaatttctgagattcttagtcctgtttactaaggaatcctag

SEQ ID NO: 211877 - DNA, 613 bp, Homo Sapiens
cacgcgtccgtttttttttttttttttgagacacagttttgctctttgcccaggctggagtgcaatgcaatggcatgatcttggctcaccgcaacctccgcctcctggtttcaagtgattctcctgccccagcctcccgggtagctgggattacaggcgcccgccaccacacccagctaatttttgtattttcagtagaatcagggtttcaccatgttggccaggctggtctggaactcctgacctcaggtgatctgcccaactcggtctcctaaagtgctgggattacaggcatgggccaccacgctcggcccagacagctcattttaaagccaatctgaccatatcacatccccacatctaacctcagaaagcttcgcattttccttagggccaacacggaactccttcccaagccccgcaggacctgcctcctccctggtcccagggccgctctcttgcctcatctgcagttgactaagctgcagccagtccagccttctcatcgacccggataactcagcctcaggatctctgctcctgtggttccctgcccccagctagcccagcccttcagtctcaagccttgctcagatctgcctcccccaaggga

SEQ ID NO: 211878 - DNA, 543 bp, Homo Sapiens
ttttgaaatagacatgtcaacatataaccttgagctagctctttcttaagtaaaggaaacagtggcagaaaaacggtcccaactttcctgagaggtataccgtttataaggtttactgtgcaacagagataaatccaattatttgtttgaaaacattcaaccatatatttttctaatctaaggaaatgacatatatttcagttattctaaattactacaagaacccagagaaataaaaatatactttaacgtagccccacctgtgtaggttgtatcgacagaggctttcatcactaccaaagaaattaattaggtccctgtatagcataccagctatacaaacatctgggattcagattagtctgatctactttttgccaattcaagttctttaatattttcatataactaaaagtatataatgggagttgaatttttacctacttctgagtgtattgtgtttaacactgaaaagaggtatcctggttcaaaatgcttgagaccaggaatgtttcaaatttcttttttttttttttttttttt

SEQ ID NO: 211879 - DNA, 615 bp, Homo Sapiens
aaatgtgctcagtgttaactttattgataataaccaaaaacaaacctaatattttatgattttaaaattatttttaagcacaaaatagacccatgttggggatgaataacatgtctgagtttgttaattttgtctgctacttttccctatatttccttgtttccttcatcctaaaatttttaaaaatgaaaactttaatcattgttgcatgtttaaactattgaatattttcttttgttaactgaagtaaaaggaaacattcttgtagaattatggaaactaataatgcagtaggacttaaaattgaatgttaggaggttcttcgttttaagaatcttcccgtgggagaagtttccatcgaactgttatatcaattttatcatcaacatttcccagcgcctgctctttacagagttctaagaacacctgctccaaggtagcctgagagaggctgtattcctccaggttgaaggtctgtttcactgcctttaatttgaaaaaggcctgagacagagggtggacatcctccacaggtaacttacatgccattaaagaggaatatctttcctgccaagcagcctgtgggaaaagcttcaaaatctctgtgtggagagc

SEQ ID NO: 211880 - DNA, 442 bp, Homo Sapiens
aaacagggtcacactctgttgcccaggctggagtgcagtggtgcgatcttggctcactgcagcctcgatctcccaggctcaagcgatcctcccacctcagcctcccaagggtactaccatgccaccagccaccatgcctggctaatttttgtaatttctacagagatgggggtttcgccatgttacccaggctggtctcaaactcctgcactgacctcccaaagtgctgggattagaggcatgtgccactgcaactggctgctgaaaactttctaccaaaagaaattgaagttacttaccactgggttgaatttatctccctgatgtttcttaattgagccaacattctatggaaagcaaaaaaagaaccaaaattaacaataaaaacggatctttatgactttaaggaacatctctttaaatacctaatttatataaaagt

SEQ ID NO: 211881 - DNA, 682 bp, Homo Sapiens
attttatttttttgtggaggcagaatcttgctatgttgctcaggctggtcttgaactcctgggctcaggcaatcctcctatctcggcctcccaaagtgttgagatctcaggcaagcggcaccatgtctggctgatctgtcttcactcataccttaacaccttttcctctgccaggcgacagtcttttgagaaaagcaactatactaccaattctggaccccttgaaagatccagcagcacacaccttgggtgctcaagaaatatgcgttaatttgaatttcaaaccctatcacaatagctgctacagtttactgacggcctactctgtctggggccctggacaggagtgtgcctcttactccattaatcctcaaccctaacttaaggaggtaggtagtatcatgcccatttcacagaggaggaaactgactcagagactgtaaggagcatgcccaaggtcacactgctagtaaatggcagagggggaatatagctcaggtcccagtcaactcatgcaggtgcctgctgtagagacccattggcctgtctatggctctataaacaggctctataaacaagagaatttagggctgtaaaaaacaacttggggtccaagaagggcgatttcacaaccaagaaataatattctacgtttctttttaaaaaaaaagaaatagctatg

SEQ ID NO: 211882 - DNA, 471 bp, Homo Sapiens; identical to SEQ ID NO: 60667

SEQ ID NO: 211883 - DNA, 409 bp, Homo Sapiens
gcttccccaaatattagtacatcagcagcagctgtgaaccttgactgtcaacaaaaatctcaagcccatggagtagacgaagaaagacagcaccacaactactctactcacaacttttgcacagtactttacagagcaaaaagaaaactacatgcacacactccccacaggtgtacatatccctcatcaaaatgaaattttttctttctgtaaccaagcaacaacttgaccctctaattccataccctgcttgttttcaaaatgacaaattttccatgttacattcgaaagaaaaactctgaaatatacctcctagtccttattctgccaaaacttactttgatagaatgaaccaaatcctttgttgttcttccatccctttaaatgaaaaaactcaacacaactttat

SEQ ID NO: 211884 - DNA, 267 bp, Homo Sapiens
gtagagatggggtctcgctatgttgccgaggtttcatctccattatgtttgtgtaccaaactcatagaccaacaagaagacttttcatcccacaatatctttgtccagcaaactcaggggccaagatggaggcttctgatcccattctctgtctaccaaactcatcccttccaatgctcaggtaggatatgtctcaccccagcccatcttttaaggatggtgagatgggctggtctcttctatttggctgatcaaatctcttagctg

SEQ ID NO: 211885 - DNA, 381 bp, Homo Sapiens
agtaagacccaactacatacttataataagaaaatcactttaaacataaagactaataggttaaaagtaaaataatgaaaaaagatacattgcatcaacactaaaacctagtgtaaatgcttcacttaagcatatatcttgtaccttttcatctgatatcatcatacctaaaaccttggcaatgagttcatgtgataatggttaagaagagtaagaaaaatgctcatttgaagtttacttttatatcttttacaaaattagcagtgaaggtataattcattgttacagatatcccctagtaagatcatataatatattcttcacagaattcaatgccaaaaaaagtctgtactccatgcaaattcatgtgctttctttaat

SEQ ID NO: 211886 - DNA, 410 bp, Homo Sapiens
  misc_feature (410)..(410): n is a, c, g, or t
ttttttttttttgagacggatttgtctctgtcacccaggctggactgcagcagtacgatatgggctcactgcaacctctgctccccaggttcaagtaattctcctgcctcaccctgccgggtacctgggattacaggcatgtgccaccacgcccagccaatttttgtgtttttaatagaggtggggtttcaccatgtcgaccaggctggtcttaaactcctgacctcaagtgatccacccacctcagcttcccaaagtgctgggattacaggcttgagccactgcgcctggccagcatagctttcttaatgcattcatgaagctgcaatgtataattgtcttgagataacattgtatgttaatactacagcaaattttgccatgtagaccacacatttattaaaaggatn

SEQ ID NO: 211887 - DNA, 456 bp, Homo Sapiens; identical to SEQ ID NO: 62020

SEQ ID NO: 211888 - DNA, 396 bp, Homo Sapiens; identical to SEQ ID NO: 60608

SEQ ID NO: 211889 - DNA, 476 bp, Homo Sapiens
gagacagagtctcactctgttgcccaggctggagtgcagtggtgtagtctcggctcactgcaagctctgcctcccaggttcacaccattctcctgcctcagcctcccaagtagctgggattacaggcgtgacaccacacccggcctggatttccagttttctgatacagtaaagtctagttttgcccaaagtagaacatttgatactgtttgtgtacttcaatcgtagtttttaaaggaagcaataagaacagctactctagtatttcaaattaaaggaaaaaactgatgcaaatattctgtattcaaaccattttttaaaacagtcaagatttataatgaagggaatgttgcatatagttacatatatatgcattatttatcatgtgtgttagacttgaaagattcccaagaattaaattctaaaaagagagaaaactaaaacatgatttcagttttaaaaaaggaaagacatcc

SEQ ID NO: 211890 - DNA, 702 bp, Homo Sapiens
  misc_feature (663)..(663): n is a, c, g, or t
ttttttttttttttttttcaaattttaaatttttattaaaaatcacagtttttaaaaatgtccagtgacacaatgtagctcttctgaaatgaatggaaaacacaacacactgctaaccagtggagggagctctctgcagggcggggagacctgacaatgcagctgtagcctctgcaagtgaaaatccaggccgacttgcagtcattggactgatgtccaagtgcaatcaccatacagcagctacaggcagggctggctgatagggagtatgggagaaggacacgctcagatgaaaacatgcatgcaacgattttcaccactgaacacactgttttctgtgatagaaactgtcggccctgctgggggacaagatattcacggcctcactagccagtgtgatgccaccagggcagcctgcccctgatgctcctttgttacctgctaaagaaggaccataaggtaaaaggcaccttaccttatggagtgagcccagaccccagggaaaagcttgggtagaacaatccaaggggcagcctgggtgtgagaatccagcccaagctagctgctctagaagcctggaggcctttcccagcttcccaaatgtagcccttttcacatgaccaatccttcaattaggttacctttctctatttgccctccttnggtggctacaggggaaaggatattattcctgaccacaag

SEQ ID NO: 211891 - DNA, 782 bp, Homo Sapiens
  misc_feature (760)..(760): n is a, c, g, or t
ttttttttttttttttttcagaataaaaaagttttattgaagggtaggcacttttgaaatttggacaagtcaataaagaagtaatttgaaaaaaatattacatttgcatttttttcttgttgagcatcttaaatataatatttttggagtactaactattctttattgctgtaactgttaaaagtttaattcctgagatttttggagtcggtaaaagttcttaaagtgagcagaggaaagaaatgtctttcccagataggaggctgaactgtgaatcaacagtgtcaatcagttactttctgtcatttttccatacagcagttttcatctgggatatgtttacactgtagtttattccttgactgcccccaaaatatactactctaagaagctcttggaagaactgaaatgttcagttgaaagatggtatataagtaaaaattattattgtgaaatatttgtcattgttaagtagctttcctcttttaaagtatgaacttgtatgtgagtgttttacatctggtttgatttaaataacaattcaagtatctcctttaaaatgatgttctgaagaacattaatatttatgaagcacagatataaatacactttctgaaaggcagaatattgaatattccttgaaaatcatttgttttgatcattttttagactatcaagattacaacctagcctttggtccacatcacatttttaatagttcataactttttatccatatacttaactaaaaatttagaanacgtttatcaccaagtgcatga

SEQ ID NO: 211892 - DNA, 660 bp, Homo Sapiens
  misc_feature (479)..(479): n is a, c, g, or t
ttttttttttttttttttacaggtccagttcctttatttttacaaaagggtgaacacagtttgcagataggagctgcctgttcccagaggttgggctggggcaggaggaagtggccacgccaggtcctttgccctggcttttttttttttttttttggcagggggtggggacggagtttcactctcgttgcccaggctggagtgcaatggcatgatctcagctcattgcagcctccacctcccgggttcaagcaatgctgcctcagcctcccaagtagctggaactacgggtgtgtgccaccacacccagcttttttgtattttttagtaaagacggggtttcaccatgttggccaggctggtcttgaactcctggccttgggtaatccacctgctttggcctcccaaagtgctgggattacaggcgtgagccactgtgcccggcctgccctggctttttaagtccaggatgttccctngtggtgcccataagacttgtgagggcaaagccgggtcttccttgcacagccagatgccaccagatcagagcgcgatgatatgactacgttacttggctgcctccagccctgtcctctcagtcctccccgtagccttctgtggggcgtgtccttcacgcaagggaaagggactaggcctgag

SEQ ID NO: 211893 - DNA, 679 bp, Homo Sapiens
  misc_feature (644)..(645): n is a, c, g, or t
ttttttttttttttttttggggcaagcattttatttgttaatacaagaatagaaattctgcaataaatatcatctaataaataacatctccaaataaataaatattaatacaacacacttagagtcatgagtgggtggggctggggggcagggccttggggagctgccaccctacaccccaaaatgctactgcattgtaaactttcaggaaatcctgtggtgtggctatggttgccctccccagcctggcaacccacagataccctgggaaagggggcagagaagaggcaccgtaatactggaagacaattcgaggcaaggtcctgatgctcagctcgggttttgtttgccactctgtgctttggagactcctgggtctggtctggtctgtccctgcccctgtgctttcagtattttctcttctggtttatagggcacctccaatgcagaccccaaccctgcactgttaatctcatctctttttgtgtagaattgccaccatgtttgtttcctgaattggatgtatagagtgatttggggataagggagcaacacccatccaaggagagtggggcagccaaagggcttcaccccagaaaggcatgtgtggtgggtggcccctcaacccctgccctccagatgtnngcacctgaggggctgggtgggcactggccaagtg

SEQ ID NO: 211894 - DNA, 749 bp, Homo Sapiens; identical to SEQ ID NO: 57761
  misc_feature (650)..(650): n is a, c, g, or t
  misc_feature (720)..(720): n is a, c, g, or t

SEQ ID NO: 211895 - DNA, 680 bp, Homo Sapiens
ttttttttttttttttttaaaccatatcatatatatttattttagaataatcactgaggtagcagggtagaagatgcattggaaagggtggcaagaaagagggtactgaaaacaaagaagaagataatacaataattcagataggagatgactgggcctgaatttggctaatagcagttatgatggagagcagaggagggatgcacaagatacttggagatagaattagcatgacttggtgtaacccttgtaacaatcaggttcatcctcgccaaagacttactaggtaaggggacattctgtcctgtagtttatctctcaccaatttcaagaaaagtgaagatttacagataagtagaagagaggcaagtaggacaggtgccccccaggcttttaaataatgtgacatggaggcaggcttggaggaatcagggacaattcgagtttttaaaggtttcaatgttctgtcccactgggtcaggatggcatttctggctccatcccattttccagggcccatgaggcggtactgataaggagtacatggtccaaagaaaacttcccaagctagtctgggatccttgaggaacagaagtgggatgctgggctttgtgcctatgcaggcagcgatatcatccatgtaggcaatgtagtcaaatttgtctttgctggtgtcttta

SEQ ID NO: 211896 - DNA, 809 bp, Homo Sapiens
ttttttttttttttttttagattcaattagtttttcaagttgaccacacataaaccagacagcctactgaaaagttcatgagggcgttgagaacacagagcttcgtaaaatattttccccttgtctccatatttttattccggtacctggactggactatatactctcaattaaaaaaaaaaaaaactaaataaaaataattctcaatgcagagttcttcaaagaattcctaataattcacacgttccagcttcagttatcaccgagaactggttaggttccttccacactgggaaactgcatcaaggaaaagagctgggcaaagtcagattttcatgccagccggactccttcgcacccactttcagggagcctcccgccagcctccagacctggtcagatgatatgaccttagctccacacgtcctcagggtgtcggtgtctggggctcccagccccaggcaggccgggcggcagctacagcctgagctcgcggtcgggcttcatgctgaagggctccagccgctcgccctcgggcagcatgctgttgagcctgtccagcaggggcacagtctggtcgatgcccatctgtatgcggcggaggatggcggacatctcgttcactttctggatctgctcggcatacttggcgtatcttttctggcgctcctgcatgaagctgaacagagtttctacagacagatctagtctctttgattcgtttaaccaaagcattctggtcaaaagcaacggctctgcacactgatgcaggtgatcttgatatcggaggcagagctgcacacctgctg

SEQ ID NO: 211897 - DNA, 748 bp, Homo Sapiens
ttttttttttttttttttgaaaatcaaattattttattgtaaaaatttatataaaataactcataagggcaacagttaaaaacaagttaaacagaactaaccaaatatataagatatttcaaataaaaaagtaataataaaagccttgctagcttgtttgaaagtatatataatactttatttcctagacttaaaattgtgatttccattacacttaattagtatacaaaatattatttttaaaagacaggttctcaaactcaaggattaacaaatatttgcaaagtgatcaccaaagtctttgtatatttgttaacaaaaacacaaatccagaatataaaatctatctgaaattatctaagccaacatcaaattatttaaatatgactcagcttgtataaagagaaaattaaaatcttccttacatacaaagttttgtacacaatgggttttatcagtacagactttttttttttttttttttttgagacagagttttgttcttgtcgcccaggctggagtgcaatggcgcaatcttgatcttggctcactgcaacctccacctcctgggctcaagcaattctcctgcctcagtctcctgagtagctgggattacaggcacctgccaccacgcccagctaatttttgtatttttagtagagacagggtttcaccatgttttcaccacgttgggcaggatggtctcaaatttctgcctcatgggttcagtagagtagtatcccagcta

SEQ ID NO: 211898 - DNA, 722 bp, Homo Sapiens
  misc_feature (615)..(615): n is a, c, g, or t
ttttttttttttttttttgggtttgggctttatttattttgtcattccataaatacggtggctgtgtcgcggtctgagtctcgtttggaagctcgaggcataggacagtctctgcctgggtagggaatgcagttagctgaggaaccacggtaggttttaaaaaaaaagactcggggagagaaatagcacattatttacatgactggacaaggacagaaggtgggaggaagcccctgtcactccttgggacctgggatctgagcacaaagctgagtgggaaacagtgggggctccgaagcgcccagcagggccagcgccctcctttctagaccccgactgcccttggtcttctgccctttcttggatggtcctacccaataccccctcccgagaggggggacctggccctaggaggcagagccccctcacatcctccctgtagatgggtgtggagcaagcaggacatccaggaaccaggtcgtggaaagagctgcgccagaggctgactgcatcctgacactggggcctggcctctctgtgtttggcaaacccgcagccttcggggggctcagctgccccaggtgtgcctcgcattaagcagcagtgcccaccctngggcaccacctcgcgctggtctctcttccaacagtgggtggggctgggtggcactggggatggggccagcaccctccctgacggcgagggtgggcacctgcctctgg

SEQ ID NO: 211899 - DNA, 687 bp, Homo Sapiens
ttttttttttttttttttaccaataaagtgatttgtatataactggcggcagggggaggggggcggttggagactgaattgcccattcaaatcattagactttttaaaaaaacatttcctcgatggaaatttccagttccacaaaagaaagtaatcaaacagatgttcctccttaagtcttaaaccacgacattcagatgatctatgtgcaaattaataaggttatgacataattcaattatgtgacaaagccgagggagagttgacaaagaaccagactggcatcattgacttctcaatgaagtggagctcggtaaaaaatctagatgaatcacaggttgtctgaccagaagatccctgacaatgggctgtttactttagagaaaggagctgaaccctgaaaactgaatgtgcgaaattctaattatcaaaaaacccacggcgcatcaggtagacatgatcatctgcatttcttttccacgctgcaaatcaccgcgatcccagattagtccagccggccgggtgcctccctcccgtccgcctgggcagttgaggccaatcagcagtttaggcgcacaggtgcgggctcagaaagcagcagcaatctccggcgtgttctggaatcagaagttgaggtccacgtctgattagttcccttcgtttcattagacttggctgaatgtgtgc

SEQ ID NO: 211900 - DNA, 741 bp, Homo Sapiens
  misc_feature (696)..(696): n is a, c, g, or t
ttttttttttttttttatacaaaaatctattttatgtgaaaatttgggagtcatacatatgcaaatatgtaattatataataacaatatgcttccatagggacatcatatcttaacaattaaagcaaatctttgcactgattcttgcaaggacttatacaatacccccatgaggtagagaagggaggagcatcccacagtttttacagcactgagatgacatatacatccaaggctttatgttcaaaacccaccaaaatccatggaagattaaattaaaatattaataacttttaaaatctactaagaaaaaccatgattcacattattacataaagctcatattccttagaattagattaaaataatctcagaaccactctgagaaaggacagggtatacaaattatttgtttctcaagtcatggcttgttttcagttcagtcatgaatgttcaaagctttggagtttgggttttcttgtccaggtgcttcataaagtcctggacccacttctgtgtggggtcagcacagatctccttgtccagtttggtcttgaagattacagcttcccggggacagtggctactggtggtccttctgtagctctccagcctctgcttagggattttcttattgataaatctgtagcagcaggtagttgaagtattaatcccaactggctgagcaagcccctgngggctgaaagcagctgctgtgagcagcagacacagaagtgctgca

SEQ ID NO: 211901 - DNA, 774 bp, Homo Sapiens
  misc_feature (693)..(693): n is a, c, g, or t
tttttttttttttttcttcacatgaaatttaataaattatcatgcaagctcatttttattcccattttttttacccagggagaatcagtctaccagggcaaataatgaggttaccaccttagtccctcttcccaaccccattttttagttactttcctttcattaaaatatccttatgcacttacaaataaaactaagtcccaagagggcaacaaaatataagattcttaatgatacaaaaacaaatctttctgatactagatcttttatactagaaaaataaattcttgtgcttgaacatcatttttaagcacttagtgaattgagaatctgaactgccacttgaaatattcccgggaaagaaacattatgaaccaaatgaaggaacatagctattcaaagggacatatttttgtacttgttttgctccaatttctgctacatagactgctccagtctttctgtcgacttctaggagatgtggcaaaacttgatctgctagttggattgtgctgatcacagaacactccccaatgcttcccactgggggtgctgctacgactgagagcctgctaagattcagctgggccacaatcaagtacttcccatcaggagtaaacctgactgaagaaggtctctcttctgtgaaacaattattccatgctcctaaccactccccagtgtctttatcanatacttggattcttttatttcctcggtcagcaacccacaccgacagctgaacaagtgtacactgtgaggtatgttgaacta

SEQ ID NO: 211902 - DNA, 492 bp, Homo Sapiens
ttttttttttttttttttactttcaaataaggaaggcaatttattgtagtgaaattacattgaagttttatatatgacccccaatgcatataaaatcatttacctccacattataggataggatatcatgaactacaaagatactcaaagtgctatagatgagttaatattgatgtaatacattttcattaatctacccacatttaattggatgattgaaaggacacgttgaagtgtttttcatgatttttgctacggccccagcttttactggagtttttaatgcctttgatgactccagacactcaactctgttccttgcagtctgtttctttcttctatggtggtgattagttattgcaagactgcttatatagagtaatatatagtttactctggtatggagtaaacttataccagagatttaaacatttctccctaaatggagtttgtggaagatgtgaaaattggcatgacatttgatgccacatt

SEQ ID NO: 211903 - DNA, 654 bp, Homo Sapiens
tttttttttttttttattatacagaaattatattaatgggtgggataaatactttacaggagagggtcacactctcagacactttggctcccaaagggcttggagcttttgtgaggctgagcatcttccaaccaggtgcatgcactggtttgccaacatcctcaccacgcccaatccagccccttcacacactgacatcgcctacctgggccctccttgtggccttaagttttatctaaccagtgtacacaacatatttataaccaattaatacgtgtgagtcatgatttgtttaaaatgtcagcttttgtgaactgaaggggatgggcagaaggcaggatgctgtccttggtcaggaatgtgacccagattttaacactgctcctaggaaaaaaaaatatttccttttatgatgccacttcctgggacatgatgagctgaagattaaaaactcttcagagatgtgcgagaaaaaacaagcccagggaaaagtctgcaggcatggtggaggaagaaattagggatgaaatcgcaagtggcagagcaagcatgaccaggctgaagtcagcagagacaagagggcagcgaggcccagcctcctcttccctctcccacagcgtttagggccacgtccatggcgccacccctctcctt

SEQ ID NO: 211904 - DNA, 758 bp, Homo Sapiens
  misc_feature (744)..(744): n is a, c, g, or t
ttttttttttttttttttaccatttacaatttttaataaccataaaagcaccattatataagacacttaaaataatttttcacagaacattagaaagaagctgttggccaacaagaaatagagcatacgtcctctgtggtcttgtctatcatgatctcacattaaatctgattccaacctgttggaaattaatttggattcataaattcagcatcagtataagaagacattccagagttgtgaggacttgattgtcttaatgccacataaaacatcaactgctcattttgtaatgagcatggcttttatatatccctgtatgacctatatcctggggtgcctaatttcttgcactcccaaacatttgagctgccgactaattacacatgttaataggcataattttagaagtcgtttattccttttaaaagttagtgttttatgaaggcaggcttattttatttacactattagcacaacagccaaaagttattcaggtttaatcctgctgaataaagtagtaaaaacacaaggcgtgactttaaataatgacactgatttccctcagtagctcctgtagctattaaggatttgacagcatttttaacaatgatacatcattaaaataaagaaatacttcccaaagtgtctactttgaaggacaatgttcccttagatgtatgctttctggcatattacattaaaggaaatcagtatcataagagcgcacatctcacatttttnatacatagattatc

SEQ ID NO: 211905 - DNA, 672 bp, Homo Sapiens
ttttttttttttttttttacaagatgccacttgcatgatgctgtgggtgccttttcattgcaatgcctccatttcagatgtgagaaagttctgggcctgtagggcatttcaagcctaggtgtgtatgggggaggaggggatagatgttcatctatgcaccagatcctcagatccccgaggtgggttgcggggaaggcccagggagctgatggataaagccacagcttcagtcctggcagagttcactgccaggaatggctgctgactgcggggcactgatggtgggcagccagggccgaggtgcaaacttcttcccacaaggagttccaggtgttcagtggcagccagttcctcagttaatgggtcacctgctgctgcggccactctctgttgatgcagtaagccggttgaggggcgtcaaggggctggacaggacaccccgcaaactttccagccattcctgctgttccttctcactggggcaagtgaggacaaatctccgctctggggtgacaatggtgagtccggctttccagcgatttcctcggatgcccttgggcaggtcttcgtaggcttcatatccctgctccttgttcccaagaaaaacctggccctgctcgaaggcatccagtgggttcttgtaatagagcagcctccgctcatggcaatcca

SEQ ID NO: 211906 - DNA, 788 bp, Homo Sapiens
  misc_feature (610)..(610): n is a, c, g, or t
  misc_feature (620)..(620): n is a, c, g, or t
  misc_feature (645)..(645): n is a, c, g, or t
  misc_feature (702)..(702): n is a, c, g, or t
  misc_feature (719)..(719): n is a, c, g, or t
ttttttttttttttttttgcacaaaagacctttaatggcctcctatttattgttcttttgttcatttgttagagttgaatgaactataataacttgtctgacataataagaatgccacaggtataacagataaacctggcaggtggtccaggaatgagagtgtcacaaaataatcactcaacacaagggccacagacctggagattcttcccagccatccctcactcctgccccaggacacaacccatgcaggcccccattccataggaagaggcaggtcccacagtgtctgtggctagaccttaacactgagcagagatgcccgggaagatggcacttcctatgctcgttcccaagtgctctgctcatctgccatgcaggtcaggaccataccccgagtttgtgaggcacccacctctcatactcaccacctcatatgaccacctatcatacccacctctcctatgacccttgcaattgtcccagtgaggtgggaagagcctggactagccccattttgcacacagggaaactaaggacacactcggaccgaatgtaatacacccgtgtcatgcgcttgctgtgccctgagcttcacattttcacctanaattccctgnggggtgggagtgggggacagggcangcagggttttgtgccaagggctggtccagttctcactaaagtgtccaggattcctgngggaatcctgccctcanaggagggactttttgtcataaatcctccctgagtctgtcttttatgtgagccaagatttccatccatcc

SEQ ID NO: 211907 - DNA, 801 bp, Homo Sapiens
  misc_feature (694)..(694): n is a, c, g, or t
  misc_feature (708)..(708): n is a, c, g, or t
  misc_feature (731)..(731): n is a, c, g, or t
ttttttttttttttttttgagaagttagtgcatatttttaaggtatcccaaattccatgacatcaaactaatatcaaccaatacttgggcaaatctccctttcccagttcaagaaccacatccccacaaaaaacaggaatcacaagagtcccagtccacagcctattttttcccttaaagttgtcgcgctcatctctccatgcccaaagatacagagcaaacctcatggagcaaacccattttcacagctgcataacattccactggttcaacccatcccctggtcatagaactttccactacaaaaaacggggctacagatatccctagacatggaaccggtatgcacgtgttccagagacagaaccgctaggccacaggagacacatgtgtaacccatggcagacggccttccagaaaggctgcccagtttttattctggattactgttcctgatttgctgagagctgatctgggggaaggatgtttctggacagtttcagtgagattcgtgtgccctacaattcaccaggtgtgcgacgcaggagcttgtgtattcacagagtggggagaccatcttcgccatcaaaggtagagcattttcatcctccaaagaaaacccgtccccatccgttgtcaccctccagcccccacacccaagcatcccttcctgcctctgagcactggcttgtcncggacatttcatanaaatggggtctcgcacggtgtancctctgggtctggcttctctcactgagcggggtgtcctcagggttcacccacgctgggccttgctccttc

SEQ ID NO: 211908 - DNA, 705 bp, Homo Sapiens
  misc_feature (659)..(659): n is a, c, g, or t
ttttttttttttttttttcactttatcttttctactttattacttcaaattaacaaccacgataaagctcaaaaaagtccaatatttacacaggaaaaaagtacaaaattccccccaaagttcttcagttttttttttttcagttttttaaattacaaagtaataaaaagctttgctctttaattaaaaaaaaaaaggaaaaaggggaaacagaggtaaataaattaggaaaacacacacacggagaaaacaaacaaaaataaaataaaataaaaacaaaaaggtgttaactaggaaggatgggttaatccaaaacccagccctgactccaggctcctcctcagaaaggtggaaccagggagaggggggaccccaggtgactgtcaggaccagggaagtaatttataactcagagccagatgccttctggaagcagtctccatggattctgccctaaaaccaggaatggaagatggagctgccaccggctgatgacgggctagggggggaccggtggcagcgaggaccctctgagctctgagggatgcggaggtcaccgcccacccccatgtccttgttagtagacacaggagaacgggaattcgggctggcaggcggggcgggccgtggcacctgctgtcttgggaaacacaggtcantacatccacacacacacacacacacacacacacgcaggggacaccg

SEQ ID NO: 211909 - DNA, 754 bp, Homo Sapiens
  misc_feature (673)..(673): n is a, c, g, or t
ttttttttttttttttttagctggtgattacagatttaattcatgttattaactccctgccttttacctcctccctcctcccttggcacaactgccagatggatgtggctggaagtcagaggacattctcgtgggttcgtgggcctagggtacaaatgacctcagcgtgacagcaaacaggacagagaagaccaggctcttactcaggaatccaccagccaggagaatgacaatgttgaacaccggaaccctgatgatatctgtcacatttgtaaggttgatttcagagtcaggagtggagacatcggcagttgacttgggtggagcttgggtcacagttctggggctggtatagagtgggcacaaggccttagtggtggtaggaggaatcttatacacattctgggtagaattctcattggagccaggggtccctgaaaaacccttggtcaccaccaagcggatgcgatcgaacagcatgtgaggctccttgggaggctggtagatcacacactgatacagtccagaatcttccacttgaaggttgaccattcggacgcgcagtaaaccatgatcatggtagtcttctagtatgatcctccccacttggactggatgggaattctttgaaggcctctctgtgcatgccagggtcttgggcatctctccgtcncttattatctgccaagctttctggctgctggcaacttctctagcgtgtagtccatttcacatccagggtctgccctctttc

SEQ ID NO: 211910 - DNA, 713 bp, Homo Sapiens
ttttttttttttttttttggcaggggtggggaacactttattttaaggcatattcatatcagcatataaggcatattcatatcacaatggcacgatctcagctcactgcaacctccacctcctgggttcaagcaattctcctgcctcagcctcccaagtatctgggattacaggcatgtgccatcatgcctggctaattttgtatttttagtagagatggggtttcaccatgttagtcaggttggtcttgaactcctgacctcaggcgatccgcccaccttggcctcccaaagtgctgggattacaggcgtgagccaccgcgcccggccttttaaggcatattctaaagattgcaccccaacctccaaaattaaaaaaaaaaatctctaaaaaataaaaagtgatttcatctcctaggccccaatcaatcatctaagtaaagctttttctttggtccttttatcctcaaagtcatctcttgttcccacaacccactgcacctgggaagctggacagcaggcccagctgaaacaaggaggtctctttggttcaggttggcactaaggtgcccagtggtcagatgagcagcctcaggtttgcaggagccagtagttcctgtcttgctcctgggggtacttccagaaaagccagaagcggataaagctggtgacgattcctggaaagttggaaccatgatatagggatctctgagt

SEQ ID NO: 211911 - DNA, 610 bp, Homo Sapiens
ttttttttttttttttttcccttaaattatatttattatatgaaatacaaaatgtggaaaatttggaaattacagaaaaaccaaagatgaaaattacagtgactttgttccaccatacaaagataaccactcaacattttttagtatgccttccgtcttttttatctgctctacgtatacaagcatacacccatattttaaaaaacaaaattgaaatcacataacatgcactatttttacaaccttttaatattcaaggagcatttttctttcagtcagatgttcttttacatgacttttaatgtctgcgcggtactccaccatctggatggagatacaataatttacttaagcaatcccctattgcaaactttcgttacagcagaaaaggaataaattcccaaccaaaccattgcttcccatttttctccattgcaatgctgggatgaacatcttatcactaactaaatccttaagtattttcttaggataaattcccaaagatagaattcgtaggtcaaatgacatggaggcttttaggccacatgacacatatcacccaactgtcatccaggaagcctgcaccgatgtatactcccacacgcaatgt

SEQ ID NO: 211912 - DNA, 737 bp, Homo Sapiens
ttttttttttttttttttcaagaacccaaaggcttttatttttattttttcaaaatagaagtaccttttttccttttattatacaagtaacatacttacggtcaagtcagtcaaatattacataaatttatcatgcggaaagggaaaatcacctataacccaattcctcagagataactgctatcagaatattatttcagagttctgctatacacaaatacgcaggtttcaatgggtacttccagggaccgcatggagatcccttaagttgaaactggacaaacagaacagtggatggttctagctgagatctgggatagtttctgaattcagaagtgttcaccagccacattgcatgtattagctggaaccatatatgaaactacgatactcagctgtttctaacctacaaacacagtgattacatatggctcaacttaatgtatatgaagcctagaatgtcagaactgatagagccttagagactttcaagtctatttcattatgttgaagaggaaaacggatgagggagagaagtgtccagcctaagatcatacatcaccttaagtggtagaatcagggctgcttctcttcctactggaccatgtacctgtctctcatactctgcttcttttaatataataataatttaggtgcgatatcagtcttttttgtttttgtttttgtttttttttttgagacagagcttgctctgtcacccagaattgtatgacttc

SEQ ID NO: 211913 - DNA, 693 bp, Homo Sapiens
ttttttttttttttttttgcattcacacaatttctcttgtgtgtgagttttattctgcctagtaagatttggaaactggttgaaggctttttcatgtttaacacacttaggcattttcccctcagcatgacttttcttgtaaaaactatgaggaaagttctttcttaaggcttttccactctgattatcctcagaagttttctctccaatgtgagttatcatgtgagtcataagaaatgggtgttcattgaagacttttccagaatggttagagtcatacagtttctctgcagtattgcttctctccaattgtactccatttggtgatctttctgcagaaatatcttgcagcagtggggagcctttggttttgagttgcaaatccaattcctgcagaactcctgtcactcctgtcctcagctcttccatttgttccaatccagacatgagactacgtttgaataattcagaccctgctagtataatgagattcttgtagttctccaacatcacatctctgtagagatctctctgggcttgatccaacaaagtccactcctcctgggtaaagtccacagccacatcctcaaaggtcactaagtgctgagaagatccatcagtaatccatcagtaacccagccactagccttggcttctcgatgttcctgtcatgaagacagaaagtgtcctgga

SEQ ID NO: 211914 - DNA, 728 bp, Homo Sapiens
  misc_feature (656)..(656): n is a, c, g, or t
ttttttttttttttttttaacccacaaaagtttatttgagaacaagagtgaaagcttttgcacatctgacaaggtagacttgttttacagtagatgccatccatattcagccctaccaatactatcacaaatgaaacatactatttcttacaaagatataggcataagtcaaggactatgactaactagagtgaaaggaaaggttagaccccaaatcttatcccttagaccaatcataacataggatgtaaattaaaccattcagtcttctaatgtagtggttctcaacctggcttcttatcagaatcccaggaactcttttaaagaaattcccaataactaggctgtaccccagtctctagggatgggatccaggcatgagtattttaaagcttctcaggtgattccaatgtgcagccagaccctgtcgcaagttcaccacagcactagaggcaggtaacgattactagcagattcctcagccccaacaagccctccaagaaagggagacctggtgggcaacactggctctcactgatgctatcctttcactccacttaagaacgacataagttatcacttttggtataattttgagactttccatatgccatggtgatttttagagcaatatttaatcaggtgaataccagcanagagagaaaatacagaaaaagaatttccataaggcatgatatgaataaatacgtgaaaaaacaatctcgggt

SEQ ID NO: 211915 - DNA, 689 bp, Homo Sapiens
  misc_feature (641)..(641): n is a, c, g, or t
ttttttttttttttttttgcatttcctctacatttattgcaacggctaaatgattaacaacattcacaacttcttagatcttaaaaaacagaaacaaaagaaaacttccattttgtaacatcacaaatgtcttctaggctttatcaaggaccaaaaacactacaattctctaagtgatttccagtgatggaaacaagccagagacagtaaagcacccagagtggcgagagagcacttccagatgcctgttgtcctctcgggggtgaccctggaacaaaccgtacttgggcactggctccaggccgatccagggcagggatgatgttttaagggcaattgctgcttcaaggcttatctttcacatcagtggttttgatctatttgttggcccgcttgtgtctgtacatctgcatcatcctctgtcggaacacatcgaatgtgtcttctttgtgctcctgcccgtcagcacccaacccttccccttccgagggggttcccacgctgaccggctccctgatgccctttccgagggagcccaggccatggccctccttccagcccatcttctgcagcatctggaagcccaggttcttatcggtcagcttctgctgggcgaagtccaagtccttgggtttcttccnttttggacatgggacgaccccgaggcctgtcataggcaattcgactgg

SEQ ID NO: 211916 - DNA, 714 bp, Homo Sapiens
ttttttttttttttttgtatttttaatagagacagggtttctccatgttggtcaggttggtctcgaactcccgacctcaggtgatccacctacctcgacctcccaaactgctgggattacaggcgtgagccaccgcgcccggcctgtcctggcccacttctagctagttatatatgcttgggtgagtcacgccctcctctgtcagttttccttaatgaggggattgactcgtttagcaacttacaagtgttttctcccactgaagagcaagctggaccaatacgttctgcagctaaaatcaaacaagggtctctccctagacccttgtaaaataacaacagcaataataattaatgtacagaagtttcacaatgtaagttctccccccataaatatctccaaatcagtggtacctgctaccctgtatattagactataatacaaatggagtctgagtctgaaaacaactcatatctaataaatttaagattaagcgatatatatgctattctgcagtaaggaacgtggctttcagatgtttttccacctgaagaattctgagagacatggggccaggtggacaccaaggctcttgcagtgtgaagtctgattcctctctgggttttcagggaactacggatgcaggtgcaaggacacagcttccaggagttggggcagtcacgttcccactgacttttacattcctggtgactc

SEQ ID NO: 211917 - DNA, 816 bp, Homo Sapiens
  misc_feature (702)..(702): n is a, c, g, or t
  misc_feature (766)..(766): n is a, c, g, or t
  misc_feature (789)..(789): n is a, c, g, or t
  misc_feature (800)..(800): n is a, c, g, or t
tttttttttttttttgttaaataagaatttattatttattaacctatgcatgttcaaatgagtctctgtcctcaagggggagaaaactggttcttttatgtacaaagcacagatgtaggtacagtatataaacagatacgtagtacatctgtagtattaaaatggcatgggaggaggcagttagaaaaaacatctaaaacagctccttagaaggccaataatacagttggaaaaaagggagtttccacgcagccagtggtgagctgcatgggataccagcaccattggcaggggaggccctcggggagtgatggcttggcgctggcgcaccactgggtaacctccaggcaggagccacaggctggaacaggcgaacactttcttcccatcacctaggtggaaattaattctgccaatacttttttttaaaggccagtcaatggttatgagtggataggttcaaagctgaatggagttcattagaccttttttattattctaccttttctgcatatgtttgcagttttccatcaacttcttcataaacaaacaaacattttctagaaaccaaaatatgtagtggcccaaaggagctcttaagcaaagtacttggtacaaagagaccatattctataaacatgttaagtttgttctaagcattcagacttttagaataagaacttcatttcaactttttattantacatgagctaaactttaagaaacaaccctagtcttctatttcccagagctgttcaaagtctanatgacaatataactcattatganaatatactganaagtacaagagctgat

SEQ ID NO: 211918 - DNA, 740 bp, Homo Sapiens
  misc_feature (332)..(332): n is a, c, g, or t
  misc_feature (679)..(679): n is a, c, g, or t
ttttttttttttttttttcaacttagaaataaccctgggggcggagcccggccctccctgcattcctgcagagcctcggtccactccaagcaacatttattgagggtggcgggagccgcgctggacaggggtcggggctgccctcggcgtccagacgccaggctctatagaacacgtatgtacaggcacggggcggcaagggccgagacgctagctggggactgcgctccagcctcagacggcagacgccagcttccgcttggtgctctcgctgcagcggttcaggatgaggtcggcgctcggccgcgggggcaccgccggctgcggtttanagcgctgcgtctgccgctcctcctcgagcgggctcccggggctctgcggtcccggccgcgcctggcggcgtcgctgctgcagaaaacggacgctgttgcggcgataggcgtcctggctgaggcgcttccgcgaccgctggtggatgctgtgcgcgttgcggatggacgacctgcggggcggcgccccccgcttgatctggcgttgggcctgggacacgtcttgccctgacttttgcaggtacatggacgggaagtagcctgtgacgtcgtctttcctgatgacccaccagccgtccaggagcttgtgaatgacctcaacagcttcaccctcgagcagggacacctcngtcccctccacagcagtgtaggccttgatggcgacgtatggctcacctgcatagttgggct

SEQ ID NO: 211919 - DNA, 612 bp, Homo Sapiens
ttttttttttttttttttacaacaagccaacacatatgctttatggttctgtttcaaaaacatgaaaacccaggccctaggattcaagtgatgttgagaggcagaaaggatggagaagttgttggcgccagcatgggggcaagcagccagacctcaggccctcactctaggctccacgtggctgggcttgacttctggccaagggctgcttttcccgcctgcggcccacctgaggccagaccttgcctgaggaaagggcctgtggtgggggggaagctcaggcagaaggaagacgtggccaacggccatccctgaggaggtagtgagcagctcctggttcggcaagggcggtgggtaggagccaggccgaggagtcttagggtcccctctccacagctctggtgggccccctgctcccctagccaactggttgctcacctgccttctatgctccctcctgaagccagcccctgggaagagaacatctgaaggcaagaaggaaagagagccctgcctaagcttcttcctccctgcttggccaagtgggagaagcagctgaggtcctttgtgtaactgaggaagcagggaggagctggaatgcctaccaagctc

SEQ ID NO: 211920 - DNA, 674 bp, Homo Sapiens
ttttttttttttttttttcgctattcagacacatttttaatagggaaactagatgtacttggcttaaaagcaaccagatgctgaaactggacagagggcaagaactctgtcacttgtcaccatgcctaacaatgcaatggagaaaaccagtaactaagcacaaaaatagcctggagctcccaggaagagctgcctactccgagacaggtgtgcatggtgggtgccccctgctgatggtgtgaggtcagatccaggtcactgagggagatgggagacctgaaacagggggtgaggggacgcagcttccagaggagggctgctggagcgtgccagagtccggaggcctcactccaggtcggcctccacctgctccgtgtcagagcactgcaacttgttacgctcccattggcaaatggcgttggcgtactccaccaccagcttatccatccatgtcaggggctcggggaacagcacagagccctcaaagaagcccaagtggcccccatgcagaggcagcacaaacatgacgttctctcgtttctctgaaagagattttggaatggttagaagactttcatgcaccaacggatcgtcagctgcattaaccagcatgagaggaacataaatcctgtgcaggtaccgcatgcaactttccctccgtgccgcctcgtgcc

SEQ ID NO: 211921 - DNA, 639 bp, Homo Sapiens
ttttttttttttttttttaaatatatgaaactttaatatgtttgcatctgaaacatacaaaagcctaaagataaagtcaatatctaactaaaattctctaatgtatcttcattattataaagttaagtctttagtcaaaaattcagctctaaaaatacagtctcaaaaaatcacatatctacatataatactaagacaagtaaattgtcggccaggcacagtggctcacgcctgtaatcccagcactttagaaggccaagacaggtggatcgcctgaggtcaggagttggagaccagcctggccaacatggtgaaaccctgtcattactaaaaatgcaaaaattagccgggtgtggtggcgggcacctgtagtcccacctacttgggaggctgaggcaggagaattgcttgaacctgggaggcggaggttgcggtgagccgagatcacgccattgcactccagtctaggtgacaagagtgaaactccatctcaaaaaagcaaaacaaacacaaaaacaaaacaagtaaatcatcttaagctgcatcatcatcatcatcatccactgcagcgtaaatggcttgattcctcctcttaattttctttctttgttcaggttcatgttcatcactcagcctctt

SEQ ID NO: 211922 - DNA, 553 bp, Homo Sapiens
ttttttttttttttttttcaataaattacataagacattcaatactttattaaaacaggcttcgtgttagacgagtttccccaactacaggctaaggcgttctgaacaagcttaagatggaccatgctaagctgtgatgtttgggagattaggtgtattaaacacatttcaacttgcaatactttcaacctatgatgtactcaccggaatgtaacccattgtaaactgaggaacacctgtactcaccccactggaagggatgtgggaggaaggtcaagcgcctcttccaggtcagaaggggcagaggttggatacaaaccaggcagcctgggtccatggtaaaagaacctccactaagtgaggctggggctgaatcccacgtttcctgcctcaaggagattgcagcaggcccccctcttttcccctctctccagagcgagtcaccccctggctcccagacagccacacctggtgaaggagaatgcggtgacaatggagagaacccccaggttcagtaagctgcctcgtctggctcactacacctagctgtggg

SEQ ID NO: 211923 - DNA, 613 bp, Homo Sapiens
ttttttttttttttttctacaaatcacctttatctgcattttagtgtgcagccttgtctgtctccagacatactatagatacacatttcatatacataatatatattatttataaaaaacagattagagcattgactccagattctacagtaagaactgattaaaattgtacaagaataaagtctgttggaatctgtagaggtttctatacagtggaggtgtgtagtaagtgcaaaaaaaaatactgtcacttagttaatccaggattttcagttctcttgctttctggaaaaagcagaggctgttgattcacccaagtgacaaagtgccgcttctcccactggggggaggggaaaggaggtggcccaggaagtgcacggtgtggattctccagcttctggtctgaggtccagccaggcggcagcatgttttagagatggggctggtgcttgcccaaggtgaccaggcgaacaaagacgccaagctgtggcctgaggaggggtgcttgctgctctcaccgtgaggttgtgcctccctggtcattctctaacttggaatgcagctggctgggggtggtggagcccatcggagacagtcttgccgcctgttttat

SEQ ID NO: 211924 - DNA, 548 bp, Homo Sapiens
  misc_feature (189)..(189): n is a, c, g, or t
  misc_feature (526)..(526): n is a, c, g, or t
ttttttttttttttttttcctgagatggagtttcgctcttgttgctcaggctggggtgcaatggtgctgtcttggctcactgcaacctctgcctcctgggttcgagtgattctcctgcctcagcctcccaagtagcttggactgcaggtgcgtgccatcatgcccagctaatttttgtacttttagtanagatggagtttcaccatgtagtccaggctggtttcaaacttctgacctcaggtgatccacctgccttggcctcccaaagtgctaggattacaggtgtgagccactgtgcccagccagaatatatcatttcactggactctgcaggtgctttggatgatcaaggaataggacatggctgtagaagtacttttcttcttcttttttgtttttttttgagacagagtcttacctgttgcccaggctggagtgcagtgacacaatcaaggctcactgtagcttcaacctccggggaacaagcaatcctcccacctcagccttctgagtagctgcgactacnggcataagccaccatacccagc

SEQ ID NO: 211925 - DNA, 558 bp, Homo Sapiens
ttttttttttttttttgttggtaccagtcactagatgtgatttatttgaggggctgttgtagggagttaggatacacagcatgcagggagaggaacgcagactagccaaggcctaaggtaccccaagactcactttcgccactggtccttggccttgatgacctgagttggcatctgaggttggcacgcatcccatctccacccacctgccaccaagggcagttggtggttttgccatcccatccctgtcccctgctgcccaccctctgccacctaagcaccaggatgagggtgagttgcattagggcttgccactcccctcagggacctcaagctgttgcctgagaagcttgagagggtcctgtggtagtgccctcttctggcaccaaggaagaccaggacatctcaggaaagcaggcaggagagggttggagcaaagggagggctgaagaaagagggctggggtcagaggtcagccacaggcctcagggtggctgccgcaccctccagggctgtcaccacaatgctgagctgtctctggacctcagcccaagcttc

SEQ ID NO: 211926 - DNA, 723 bp, Homo Sapiens
  misc_feature (1)..(1): n is a, c, g, or t
ntttttttttttttttttctccaagtaaacatctgcatttattttaaatcgcatcctcggtgtgtctgccccttttctgtccagctgtcaggtggcccaataacgccttggactccgtccccttgtcagtgccactggctgttcctggctctagttcccaggggagcctcaaactggggcctagcccagaaagccaccggctagcatcacatagcttctccagctcaaatagcccaaggttggcatgtctgccgacctccaggaataaccgcagtcaccgtgcccaggcaacacatcctcgtgctatggggagaagcctctgctgggtgacccaccagccaaccctgggccaatttaatttagataaatgctcaaagttcaaacggccacaggaaacccctgatgtaacacctgttgtgccggccagctgtgtctcaggagctgactgcagacacctggtctgggtccctcaagcccagcagagcttgttatgtcccctaacacaaaggaggaaaatgtggctcctcgagaggaaggtgctgagcacctcaccccagggtgtcaccgaagatgggcagtgacagcaccgtatggactggcggcccacaggccccaacctcacctggcccagggggtcagcagtcggtaaagcgtggccaggcgtgcccatggccgtccctgctccccaccctgaccatccggggccaaacacacatggacagt

SEQ ID NO: 211927 - DNA, 683 bp, Homo Sapiens
  misc_feature (632)..(632): n is a, c, g, or t
ttttttttttttttttttagtagagatggggtttcaccatgttggccaggctggtcttgagctcctgacctcaagtgatccgcccgccttggcctcccaaaatgctgggattacaggcatgagccaccatgcctggccaacaccaacctttagttacttgctgaatacacaggattaaggaggaagagaaagtatcaaggatgactcccaggttcctagcttggtggtcccagtaattgagagagagaatgcagcaggaagagcagctctagggggaacaggatgagtatctccacatgatgggttggaggtacctgtgagtcacatccaggtggatgtgtcctgtgggcagtgggacgcgagtctgaagctcaggcaagaggctagagttacatctttggagtcatcagcctaatggaggactgtggcatccaggtgccaaaagctagggaaacggctctggagagagaggggctttcttaattgacctgtatgctttgaagctctatagagacacaatcttatcccttcaggcctgtattttcttgggccactaagatgtggttacatattttctctcacatctcctagaacgtttgcaaaacaattcccagtcctatgatcatttctcncttcttctgagaactaattatatatggcacttaatatctattcacatgtag

SEQ ID NO: 211928 - DNA, 707 bp, Homo Sapiens
  misc_feature (78)..(78): n is a, c, g, or t
  misc_feature (118)..(118): n is a, c, g, or t
  misc_feature (358)..(358): n is a, c, g, or t
  misc_feature (661)..(661): n is a, c, g, or t
ttttttttttttttttttaagaacataatacatatattttcatttaattttaggcaaaatatttttacatcacacctnggaatctgcccaagtctttccactatgaaggcaatcgtanagtgtgcaggaggaaaggtgttatccaagcagccatctttccggaagctcatggagcacaagcagaactcggtgggtagagtggagtccgccagcgagtccgtcattgccctgtatcacattcagcgttcggtcactgagaaactcattttcttttcctgtgtgagtatgtgtgcacgcacagcagtggatctctaactaaagtgtctgtttccaccctgttcagatgttcacaatgcanagttcgttctgactggagtgctcactcaaacgctggactatgaatcatatccttgggggccttttttcatatccatagcttgatgaattttgcccaaagtggacggtttagaattgcagaggtcactacctgctcctgcaggtataagtaggagtcagctatttgtggtggggctttggggatgtcagctcttgggggttgtgtgttgtacatgttaatttaaaggacatttcagctattgctgggcctcagttctggccgcatggtggataccttgcggagctggcacaggtgctgatgtcnccgggctgagtgacctgtgtgtcggggctgagggctcctgtgatgt

SEQ ID NO: 211929 - DNA, 764 bp, Homo Sapiens
  misc_feature (679)..(679): n is a, c, g, or t
  misc_feature (739)..(739): n is a, c, g, or t
ttttttttttttttttttccattttgaaaaagttttatttttaattcaaagagattaaaataaggagcaaaactgatatgaatttcaaatactctttctctgccaatgatcaaaacaattagagatgaaatgaaaacaaaatcttaggtaattaacagactggatagtcaagtttaaaatcagtaagggttaactgtcaatatactttgatatcagaaagcttatatcaaggtttgttagaagggagattaaacagttgttgatacattacacagaaagaaaagagtaaaaggaggtatggagagaaagttctgagtcctttgggtcctccccaaatcttctatcactaaacaaaagtcactagttgcaagtgtgacaggataataacattagcccctgggctcactgcagaaaggaagtcagccttcgatttcaataattcagggtcctgcgggagagacagtcttctcagtggaggaaggggaagtttgtggtgcccagaggaagagtcctttggttctttgaaactttgagttttgagttttctgtatagaaaaaagtggagacttaaattcatctttggggaagactttttcctttgttatgagaaagccgccctttacttagttataggaactgaaacaagtcctcacctgacccagtgtttttaaagagcganaagtggtgacatcgaaatgaattcaaaagcatccattctagagttagactgagcagccanatgagctggtgtattttgagttgta

SEQ ID NO: 211930 - DNA, 708 bp, Homo Sapiens
  misc_feature (522)..(522): n is a, c, g, or t
  misc_feature (617)..(617): n is a, c, g, or t
ttttttttttttttttaatttttcacagttatactttaatgtcattttatataacgtttatttatataacatactataatgttaattttataaaaccaccagtttgctactgttgaatggaaatagaagacaaaattctccccaattacactatgtaagctctctataaaaagttccctagaaggtcacatcattccatgttaaattcgtcctattctattttaaaagttgcttttcagctattaaatgaatctttatggccttctcatttaaccattttcatggacatagtacaactttccaagtaaaaagtaccagatgtattttatgtgaaaaacaaaaggacaacttaggaggagctggccctactatgaagtcacactttgaacgatcaatttcagtggtaaattcccaatccatagacttaacacccacacaactgaaaatcatccctctgcttctccaaagcccacaattggaataatcacaacacaagtcagcccctaaatgtccatgcagttnagtcatccagtaacacctgaattgtagccttttttaagtgcttgagacagcagatgttgaggtttccatgctgtttacaagtccttttctatctnagttcctccaacatatacaggcccagacaattttccactggccaagagctgactgtgacacttggtgatcccctgttagccttttgaaggt

SEQ ID NO: 211931 - DNA, 757 bp, Homo Sapiens
  misc_feature (738)..(738): n is a, c, g, or t
ttttttttttttttttttagcaagagattttagtttttatttgtttaaagagtataggtggtggtttcaagaaaagacttttgctaaaagcagctagcaataagattatggctatcaaaccagtttctttcatagaaagtgaccattccttgaagtgctactgtttttgaaagtttcttagaacagtctcagcattctaaacagtctgtagttctacatatttgttgttgcaatcttgggcaggaaaatcactaataacaggaaacagaggccgggcacggtggctaacgcctgtcttcccagcactttgggaggctgaggtgggcagatcacaaggtcaggagtttgagaccagcctgaccaacagggtgaaaccccatctctactaaaaatacaaaaattagccaggcgtggccctgtaatcccagctactcaggaggctgaggcaggagaatagcttgaaccagggaggcagaggttgcagtgagctgagttcacgccattgcactccagccccggcgacagagcaagactctgtctcaaaaacaaacaaacaaacaaacaggaagcagagagctttttgaaaaatagccttgatcaatccaacaaatacagtattcagaaacactacagagcaacaaagtcttctcataagagtcatatttatagtagttcttaacagaaatataaacctaagaattccattctctagattcaaaagattggcttgctcataancaggtctcagcgcaatctg

SEQ ID NO: 211932 - DNA, 636 bp, Homo Sapiens
  misc_feature (454)..(454): n is a, c, g, or t
tttttttttttgttttttaactcagaatcaggtttaattatgggaaaaagcactaaagtaggtaaatgattttgtttgtcatgcttctcttgacaggtctgtggggggagaatggaaacagagatgccccttggggcctgagtagacacagcttgcagtgcacaggcagaggctctgggtcagtgcaggaagcagagtcaccaccagtgccttgggatggggatcacagaaggtgacctgtggctgcatgagccactgtaggactctgacctcagtgggacagggtgacacaggcagctaggaattctgggcaggggcaggtgggcattacagaagagtgatgaccaatcccagacaaaagtcctcaggagtcagtgcaggagtcctggatggggagatggtcactgtgggctccacttgccgctgcaaggtcgtgcgcagctccgcctcgtanttgtgtctgcacaccttgtccaccgcggcccgctcctgctccaagaagtccttatagttgttccagtcctcgatgctccgccccagctcggtcaccgcctggaactccccaacgtcgctgtcgaagcgcccgtactcctcgcggttatagatgtatctggccacaccgcgcacgcgctctgt

SEQ ID NO: 211933 - DNA, 678 bp, Homo Sapiens
  misc_feature (643)..(643): n is a, c, g, or t
ttttttttttttttttttaaaacaaacaaaacttttatggtccaaaacagtttttctcaagaatctgctctatgcaaacaataacaactttttacaaagcattttcacagaaaaggagacaagtccttccccagcgtgggaattgttcctctcgcacctcgttttcgggggaagagggggcgctattcactagtgcgggatggaaggcgcactgggtccctcagttgttcggcagctccaaaagccccagcttcccttcatacctcaacttgccatctccctaagacctaagctcccctgacctcacctgggtggaggagaaagcacttccaatcctctctgactcaagatcctcctagctggagggcatggcagagggcatgatccaggcctatctcacccctcccctggaaaacagaacctctgaccccaaacctaatcccctggccctgcccctttcggatccatcagatctctgacaactcccgcaatccctgaggctggggtgttgcggggggaagcttaaggtacctcagcccaggttccatccagactcaaactttgccccttcaaaccccaggggactcttgaagttaggccaagagtcctttcatttaccacctctgcaaagtgcagcttgttntgtttccactctttaagggggctgagtttgggtgt

SEQ ID NO: 211934 - DNA, 723 bp, Homo Sapiens
  misc_feature (1)..(1): n is a, c, g, or t
  misc_feature (689)..(689): n is a, c, g, or t
ntttttttttttttttttattatttatagtaaactttattttcattgatatttcacttaacataatttcaaagtcagtctgtggtctaagatgagcaaaagaaaagatattctaaatctctcaagagattttttttcacactgttcctctgagcagggaatggggtttcagggttctcaatgtcaacacctaacattttacccttgagatttacctatagatacagaaagagataaaatcaatatacaagaatcgatctctatgatggtctcaataagctcatgttacatgctcaccacctctgtagggttataatggtaacaactgattttccacccctccgccaaatttggtgtcttttttttttttaggtaaaatgtcagatgcaaaaatgctgcacttatttctcttaatacattgaaaatagtggaagatgcagatttttaatccttcatgagtccaagctggaacatgacttctgctaatcagatgtcatcaacatacgaactccaactttggcggccatcagcaaactggcacctgcaattaaacctacaggcatgaattttccatagtagtaggatctcattcccataacaccaacaaaagtaacagatgtagcggctaggaaacccaaacgttccttggatcctgatacagctggtaagacccaggccggctagactgcngaagagcaccctgcagcagggacggacgctcctg

SEQ ID NO: 211935 - DNA, 621 bp, Homo Sapiens
tttttttttgttttttttaagacacgggaatttgtttcctatggacatttcttttttaccaaaaaaaaatataataacatagtttgcattttacagcatttccaatcggccagggcatccttggctggaagctcatggggttgagtgtggcgagaacgtccacagcttcggtaccagggtcaggcctgggcccagggcacgcggctcccagcgcgcggccctcaccgcacggccccaccaggaccgcagcgcccaccgcagcctgtgactcatcaggagaggaagggcagcggcccacggagtcagtccgtgccaacctcacaagggttcagccccctctcctgggcatccctgtacatcctctggaagtccttgaagcgtggggcacagccgagccgcgcctccccgaagtgcatgtggccagtgaagaggaagtcgccatgccccggccgcacgccacactccagcagcgtcctgacgcgcccctgccagtggccgtcaccctcgggcaccggctcgaagaccctgcttttctgccgatagagtctgctcacgcgcaagtggatggctgagtcctgccgctcaagctcgtgggtaacttgctggatggagcctcgaacg

SEQ ID NO: 211936 - DNA, 703 bp, Homo Sapiens
ttttttttttttttttttgaaaagtgatcaggttcattttattgactacacagaagcaattccattttccactaacaaaataatttaggatgaagaattctgactcagtgtctccacaggaacctgttcctcagctttctggatgtcattgtttctgacatcacaccttcctagacaggtatttctggaaaaggatctggtaagaggatgaatttggctctaaacaaatgcccatggccccggaagacctgtcggggccaccaagttagtttctctggcaaaatttgattccttccatctcaccactatagtaactgttgttgttatgttaccaggagccacacaaaggttgacccatcaaggtggagccacgttaccaggagccacacgaaggctgaaccagcaaagtggaggaccagctgtttaattgactcgggtctggtgacaggccaacatggagagagacagcccagcttcaagaacagcaaggcagccctttgcacagttcccactggggtggggaggctggagatgaggactgcattccacatcagagttgttttatttctggatattcacagacagctagaagtcagaaaaataagccaaagtgggaagcccctggcagaccagctccactggcttcctctccagagtcactgttccgaagtgacaggtggaagctctttcagttcctcctttt

SEQ ID NO: 211937 - DNA, 764 bp, Homo Sapiens
  misc_feature (619)..(619): n is a, c, g, or t
ttttttttttttttttttaaatgaattagtttattgaacttggagatggacacccttataagggcaataacaaacaaaaatagaaataggtttaagttataacacacaagaataaaattagatgtaaagacgactttcctcagttttaaggtggataagtgggttgttaaattataacagatttctctaggagggtctggtgtactccaggctcgctgggaggcagacctggataatctctgagtatatctgtccccacctggcattgttgagacccttcagagtacttctttaggtccatgattgaaaattaagaggcagccagtgcctccattgttataagggccataaggtttggttatctttgataaagagaaatggaaacatataacagagctcttcctcaagtcctgcattgggaacattagcacacaccaggacctttcctatatgtagacacagtgcagatttgatctgtggtgcagccaaactaaaacacaggtcatggcattgtttccccacttttggtacaaacaagcccttaatcaagtctctaatctagggacagtaacatcggctatttgagtgcaggcaccctaggttgttaatgtctgtttcncaacactattccattccaatatttttctttaccctaagtgggataatgatcataaaaaaaaacacaataattttccttacaacactgctgataactaataatcacacaattgcatggtagttattcttttaatttaatcagtcat

SEQ ID NO: 211938 - DNA, 708 bp, Homo Sapiens
ttttttttttttttttttagtatttcaaatcactctatttacaagtttatcttttcaaaaaaaaaagtaaaagatacagtaattcaacacaattcaagtttttcttttcttctttaaagttccctaacaaggaattccagaaacaggaaacactctgaagcaacgctgccatccaaggggctcctggggagcttgacggtccatcggtttgtagtttgtctagagtcacccttgcaatgacattcacatgtggaagatacggataactctgttgtttgcaggccaagtgaatttgaaatctccaggtagtacttccccatccaagacagtcttccacaagatccagcctcttttcaccagcaaattccctttttcagagggtactcatcccaccctccaaccttgggtttcttcctgaatcacaatggcctatattagtctcaagccttgaaagactgagaaataattccctttttcagagtggcagtgaacatagatgtgcttttaaactataggccatacggttagcctaggaattaaccttgaaaaccaccacagcaccagtgttcagcagcccagagtagggcaagggggctggccagtggtgggttagaggcaggcaagggtgggagcagagatgggtgaatgggaggacatggggaaaccagtcagatggcatcacccattggggaggcagcatcttaccct

SEQ ID NO: 211939 - DNA, 574 bp, Homo Sapiens
ttttttttttttttttttgctgacaagtccaagatggcagtcggaactctgacccataaaaccagaaggcttagatgaagaacaaaaagaagggaaaccaaccctgcttccttttgcctgttattaatcgctgcaataaagccattagaatctaccaacatatcacccaacttgaaaagaagagagattctgaaaaatagtcagaaaagaagggtaaatggaaatgatgagtccctcccctttatggctattttaagaagcacaccatgttattcatatggcccgtgcttagcccactccctgaattgtttgattttagtggatataaaaattcttcctaagggctttcttagttccactgccagcagtagttccccatttctatttctcgttaggtctcaactcttccgtcatgagttctatgttccccaggattccaagagcccaaatcctgcggtgggagtgaaggggaggcagatgctggctactgattggctctgggactcagagtggagtcactgtggaaatcactatttccaagttctttggcagtgggagggtggcgggggggggg

SEQ ID NO: 211940 - DNA, 686 bp, Homo Sapiens
ttttttttttttttttttaatatttatcaacagtatatttgacaaaaaccacccccaatcgatggcagaaagcagtattttctagctggcactgaaacttaacctatttttttgagggagaaaaagactaaaatgtaagcactaacttcctccttctgcatcttccacagaagacccacttgtgggcattctctttctgtccgttatcagtgggtttacatccgaaggccggcggcaagacacttgaaccacaaacaccagacatgcaggtgtctcaatggcatgcagattatttaaagtgcatcacttgtgagaagcttctcaaatttctgactgtcataaccaggtgtcacctaaaatctgtcctgtaggccaagatgctacacgcagcgcccaggcagtcagaggtaagtgagcgcctcccgcctcagaaagcttttacagggccacgctcgccaggctttcctcgcccacgctgaacccacgtcctgggcacagcagctcccaagctgtcagcagtcggctggcagtgccaccacaccctctcggaatcatgcacagtgctgcctctatcacctctcaccccagcctcgcaaggcctgttgagaagagaagctctctgggaggacacccacggagctggcacgagcgcagcaggagagacggacggcagcctccggcgggcg

SEQ ID NO: 211941 - DNA, 854 bp, Homo Sapiens
ttttttttttttttttttaagctctcatctctttattcaataagatgtgtctttacaagtttaaaaagactggacaccattattttttatgaataatgcacataaccattttaaaaaacattttacttggccgggcacggtggctcacacctgtaatcccagcactttgggaggccaaggcggggtggatcacaaggtcaggagttcaagaccaacgtgacgtgaccaatatggtgaaaccccatctctactaaaaatacaaaaattagctgggcgtggtggcacgtgcctgtaatcccagctacttgggaagctgaggcaggagaattgcttgaacccgggaggcagaggatgcagtgagccgagattgcgccaccgcactccagcctgggtgacagagcaagactccatctcaaagaaacaaacaaaaccactttacttactgtattgtgacatgtttattaagcatgaacccctatcagtactcctaaactgtaaacagtaaggaactaaggtgtcaaaagaaacacattagggatcatattcatagacaaaaacctttacattttcttattgcatttatacaatcaacacacaataagcaaaactgaatcctttctaagcaaacatttttgcatatactgccttctctttatctttctgtgcctttatcttttgtttgactttcagcaattctgcctggatagctttatcttctggtgctatccctgagcttcttaaatcagcaatgctgatcatatctttatccttgcatcttgagctctgcggacatgcttggtattgatgggtcagtcagagctctaacactgcattgctcctgcatttgacatctc

SEQ ID NO: 211942 - DNA, 687 bp, Homo Sapiens
tttttttttttttattttgtaattggtttattcagattccaacaatgagaaatgctccacataaatgccaaagtttgctgtatagcttaaataaactgatcggaaaagaaaggcatgtcccatgttactttcacacgtgaaaacaggaagtataacttggtataaccactagaaaaacaaacatctattctgctttttattaaaacattttaaaaagccatccattaggtcaataatcagtaaattcaacccatcattttcttttgcacatgtattggtcatggaatttccaggtaaaaatcttatctgacagacaaggtccgctcatgtgatttagtaatctaaggaattcgaatctttgggcctaccctgagctcctctttgtgccttggggcatgggttctggggccttcttgctcatctgactcatttattgtcatgtatcactcctccctgacattgctttgtgctggttacatgttaaaagtctgtcttggaagtaacttctttttttttgagacagagtctccctctgtcgcccaggctggagtgcagtggtgagatcttgactcactgcaatctccacctcccaggttcaagcgattctccaccctcagcctcccaagtatctgagactacaggtgcgcaccactacgcctggctaatttttgcatttttagtagagac

SEQ ID NO: 211943 - DNA, 758 bp, Homo Sapiens
ttttttttttttttttttcaactttttggtaattttattgttttggaatatagttattttcataaaagtgttattcatgtcaaaatacaatggttttgtactgttattttaaaataccttaaaatcttatttcaatttcgaatatgacaaatattaacagctataacccatataacagaagttctttggatctttaataattttcaagaatgtaaaggggtactgtttgaaaacttcaggtgaggaggcagaatctgcaagacttgctgactaactagacaagagaagaaaggctggaggaggaactcaggatggctcttggatggtacttgaaataggcaatacaggaaatgaagacagtttaggttgaggggatgggagaaggaggggtaaaaagatttggtttaatttgaggtggtgagtcctacatgaaatttatgaaaaatctggaattcagaaaagtggtctagtctagaaatacagaatggcatattttgtgtcagtttgagctgggggagaggattagcatagaatcacctaattttgaacacctactatggtatgataaaagaggtcttctgacagaaatttagtgaatgtcaatgcatttaaggtctgagtagagctgctgcaaacagttagtgaagctgcactgcaccgtgccaaggagggcctatcacatagactacatatgatatgaatgatgcctcctagagctgtgcacaatttgcaaaactaaatgtggcaaccctaaagag

SEQ ID NO: 211944 - DNA, 817 bp, Homo Sapiens
  misc_feature (626)..(626): n is a, c, g, or t
ttttttttttttttttttaagctagggggacctcaggaatctactagttgaatttcttcattttccagaagaggccctgaggcctggagagggcaagcagcctactgaggctgcacagcttgttatatctgcttgggggtcatggataggggcagaggggctgcagtgagcaatacaatgcaggggaaccttgcacaccacatggtgagttacattcagacccccctgcaaatgaaaacttcccacccctgggctgtttcccgttgatttgtcacagaagtggacaggtcctggactgagcttgtccatgggcttccctcaggaggggaggaggaatgcaggagtctctttacttcccagttcgggaggccatctggatggctctgatccactctgtgcgctccttgggggtggctgcttgcaagaaatagtgcacttcatctgctgtgatgatctcaaaaaggttctcttcctcactcttcctgccatttgagttgctctccactgaagtcaccacacagcctctcaagtgaattgctcccaggggatcttctgccccagcagggtcatagtagtgcaggtaggcagggtcttctctcaagatgaacttcctcactttccagttnttccttctatgcccctgcttcagtaaacatccctgcttgataatgacccctctgaattcttctttcagaatcacatcatcatcactggaattctcttcacagaagaaccactgtctggaaagtagtaaaggcatcagggttgtccaggaaaggttttcagcagttcatccactgcactcttggacatgtct

SEQ ID NO: 211945 - DNA, 666 bp, Homo Sapiens
tttttttttttttttacacaattctctagtttatttgtccgaaataaatacaacctggagaacatccatttcaatgtccccaaacactatttatcccctgaaaaagcagcttaaaatatgggtgcacattttgcagcttatgttctttggttaggctctgaagggtgtttgttctgggctgggctaggctgggcctagctgtagagacacacctaagttccgttctctgtttggaggctgcacccagcctgagtccccaccagtcccctccaagagccctgatgctgcttccggagcacctgtcttcattgcctctcccttctgcagcctgaaaggagggatgttcaggactctgcagctctgtgtccagcccttgcagagagctttgtcctctgacatcagctaccacacaggctcattctcaactggcacagaaagggttacttctgaccctacagcagcttacccagggcaaagtgagagaaactgaagcacagctggtatatgggtttaaagtactctccctttaaccctgccaggaggctgagagtccctaaaaaatacagaaggggacactgcctgcctactccagttattccctgggggccctgggccactagggagcaggaggacgggggccacaggccaccctttgtcttctctttt

SEQ ID NO: 211946 - DNA, 690 bp, Homo Sapiens
  misc_feature (562)..(562): n is a, c, g, or t
tttttttttttttttagtgtacacagctttattgaacagcaccctcaaaacagaaaccgtaggccaatctctgtggtgacagaaagaaatgtgagctttaaacaacacaactgtggttcacagagaacattccaaaatgactgaaaatgggaaaaaagggaaataatcatattttgggttaatgggtaccatgcaccctggaggaaccagaacagctcaaagtattataggaatattttagggtagaagaagtcatgttatccatctagacgcatccaccaaaagcaccgtccgagctcctggtaataaaaggacttcctgaggagggaacagagtgggagaacagggtgtcgttcatgctggttacaggtctgggaggcacgatgtgagccaagttgagtggcttctcaggctgatctgggaacatggggtgcaaaggttcacggctggaagcacagctcagggacttgcttaatgcattagtcagcttcttagcaggtgatttccatgacgtgtactctttcatttggtgctggttgctatgagaaccaccggcatgtcncctccagaagcagtcctgacagagctggtaattgtgacactgttggcatcggtagcgaaatcccatcatactctcactgtggcagtaggaacactcaaccggatggaagaattttccacatttgctag

SEQ ID NO: 211947 - DNA, 749 bp, Homo Sapiens
  misc_feature (706)..(706): n is a, c, g, or t
  misc_feature (731)..(731): n is a, c, g, or t
ttttttttttttttttttgaaaactaataagatgatcgtttattggaagaacagcaacacaaaccaaaataaacctataagaaaacaatggacataatgaaacagaaaacaaagctcagtggggaggacacatatttactcaaacatcctggcaattcatatctagggcactccctctgtgtgtcagacgcccttgcatgtgtcaaatgtcatctgataacattgatgaaaaatatcattcacttcttcttggtgcagaaggcatagaccggattatgcaatcactgagaagtagcttctggatgtgttttctggtggcgtcttaacaatttcagccgactgaaggctcttggacacttggaacatttgtagggtttctctccggagtggatgcgctggtgctccttcaggctccccctgtaggtgaaaactttcttgcagtctttacattcgaagggcttctcccctgtgtggcttctcttgtgacacttcaagtaggacttctgggtgaactgcttctggcagacgtcacacgtgtagggcctctcgccagtgtgggttcgctggtgaaattggaggctaataagctgcatgaagcgcttcccacagagattacattgaaagagtctctcgcctgtgtgtgatctcttgtggatgactagcttggaattacacgtaaacctcttctcgcacacgtcacatgcanagggcggcagtgccttggcttcttnggcatccgggtgactgac

SEQ ID NO: 211948 - DNA, 780 bp, Homo Sapiens
  misc_feature (674)..(674): n is a, c, g, or t
  misc_feature (763)..(763): n is a, c, g, or t
ttttttttttttttttctagtcttctaggaccctttatttgggaacataaagggacaggctccctgagcgggtgctgatgagcccttccctcccctctgagtccagtggtcccctaatctgccccatttccatgcccacgtgggtaccatttttgtagcacctgccattcctgggccatctaaggggtcagccttgagggggtacacgagaggcaaggacccccattttccctgagctccacctttccatcggatcccacgctccttatgttgaccagggggcaccatggacatggagccacatcctttacgttgccgtctcttcctgactcccttgagcaacactcactgcgtccctgatgccctcgtgggatacacttctggggtagggctccccatcattgagtgacagcagaggagggccgaagctttcagccggggccatggggtggcaaggggagaagatgcagttaccagggctggtgcctctattccgacgtatcatcacctgcatggccttgtgcttgatgcccgatggccacattaagtccctgggctgtcactcaaaggcagggaccacatcttcatcttggagtcatggtgcctaacagcaaggctgggtggacagtcaatgctgggccacaggttatccaggttggcatcaccaggcccanatgcccagcttggagagccctgggggaggcatccatcctccagagcctggaggggcacacatcttccagggtgagatctttcacacgangatctcattctatactg

SEQ ID NO: 211949 - DNA, 608 bp, Homo Sapiens
  misc_feature (271)..(271): n is a, c, g, or t
  misc_feature (297)..(297): n is a, c, g, or t
tttttttttcttttttttaaaacaatgactttctttcaaaatgcacaccaaaatcttaacatggaattgtaagccacaaaacagaagtgacaacactgatctggtccgcaggaaggaggggtccctcagaaccctccctgctccatctcccacgtggccctaccttcttggggcctctagggtgctccggaacccagtttgaaaacctggaccttgaacctcagctggcgctgaggtccgcatggggaccgcggggcttggaggctggtanaagtggttgggggaggtgggacgcanacaggagaccgtgttccctaggaggctgtttcagtgtggacaagatcatcatacgcttcactcatcaaaatccccgaaaggctgctgaaaagaggatttaaggccacatttcttgaagtagggatggccaatgaggtaagaaaggctggggcccagtggccttcaccaggctgaccactggtggccttaagcaccaagccacacatctgtactctccaccctgagcttgccctggcttcagtgtcacaggataccagggcgttccctgcctctcacacgagctctcgccctgagcctgcatctgagcctgt

SEQ ID NO: 211950 - DNA, 768 bp, Homo Sapiens
  misc_feature (650)..(650): n is a, c, g, or t
  misc_feature (745)..(745): n is a, c, g, or t
  misc_feature (751)..(751): n is a, c, g, or t
ttttttttttttttttttaaagaggccaaacaatacatttattattttcatttaagttgcttatcagggcaaccttccccatctgggaacaatctagcagtcatgtaagaagcacatgcccccacaattagtttgaactccatcctggaattgcagctggttgtgattctaaggtacaggcatgccaggagcctggatttgaatagtcagtgggattttgtcacttagtggaatggataataagccaaccaatggtcatcagtctcacacataaggagtgcaggctcgtagggtatacacagtactttctcaaaagcattgcaaatgactgatttctctatgttgaaatttgaaaacccaacatctatctctctaacaccaaaggattgagccttccttgcctggctggtgagtaagagtgagcctctataccaaggatgtaccctttggctgtgtgaggttttcagaagtatcagaagctgtatacatttcctgtggttgctgtaacaagtgactaccaatttgttggagccttaaaacaagaaagatttattctctctccgttctggggaccagaagtctaaagtcaagacgtcagaggggccaagattgctctgaggggtataagggagaatccttcctgcctgtcncagctcctggtggctccaggcattgcttggcttgtggtggatcactccagtctctgtctgcatcatcacacgaatatcttgtcttctgtactcanatctcnctctacctgtctctgat

SEQ ID NO: 211951 - DNA, 762 bp, Homo Sapiens
ttttttttttttttttctgttcaaaaaaggttttatccaaaaaagttaatcaagacaagcaacagatactgcaaagcattatatacagcaccatagtccaggggccaaagaaatcaggaggggctgggcagtagaggaattccatatattaatgaatgtgagattaagtatagagtgaagacattaacacacaattctaatttctgttaggcagaatgctcccctaccctgatgccacagcctttcacgtttcctaaaccctagtaacctctgatctccatctgcctcatcaacacgtcaccaccctttgctcttcttccaattagtcacatgttggctgaatttatttcactccagtactttaggaccttgacagacaaatcgattacaaggtcaattcccaggatttcttcagggtgtgttcaggagtgcagatgttctttggatgacctttctactaaattagacctctgaaggagaaagctacttgccagaggctttccctgagagcattaggttgggcaaaatctgactaaaatttaattactaaatgaaagtgtgtaccttagagttcctggccagagttgactctaggtagtgatgtgattttcttgggatgtttttctaaatattcttttatgctaaagcacatggcttgatacttctgttgattaagctcgtgtctacttacagtcatctagtgagaacctgtggtgtggtgagatgatacttggtctttggtcttcatcatttcctcgttcc

SEQ ID NO: 211952 - DNA, 833 bp, Homo Sapiens
  misc_feature (629)..(629): n is a, c, g, or t
ttttttttttttttttttggtacacaaatgttcacagcagctttatttgtcatggccaaaacctggtaacaacccaaatgtccatcaacaggtattcaacaggtattgtggtccacccatacaatgggatcctaccaacaataaaaaaaaatggagtactgaaatgcacaaaaacacctgatgaaaaaagaattgtgctgagtgaaagaggccagacatacactgtatgagtccatttctatggaattctagaaaatgggaattaatctatagtgacagcaagccaagcagtggcggtggggatgggggacagtgaggagcaggaaagaggggttgctggaggcgcaaggccacttttgggagtggcggatcaattcactgtcttgattatgggggaggtttcatgggtgtccacacatgccaaaaaccctccaactgtacactttaaagacgtgcagtttcttgtatgcccattataccttcataatgctgtcaaagaaagattaaacaatcattgaccttcaggtctgcagcaggcctccatttcccacatgaatattccccggcggtggagaaggctctaatttggccttcctgaacacaaaaggagggcactgcgctcctctcanaagtccaaggccttcgattaaaggtatataagaatctgcagagcagctgtccagaactcctggaggaccccgttttgtgaagacagtgatagatgcactggggctggcatcggatggaaccagctgcgagtcccatggcaagtgggagcccctgagacacgtggctggggcccctggtgtcaagacgtccctctcatgttgctc

SEQ ID NO: 211953 - DNA, 647 bp, Homo Sapiens
ttttttttttttttttgtacaaacactatctggtaacagttttaccggttacaactgggaaggcatctggaagaaggtcccctctttgtctttctctctcccctgtctcaatgaggctccgagctctgcctggcggacattcccacacagtgctggttttgaaaggtagtcaagacacagtcgcccgttcaggacgggtctccacagtcctgcccctgggccctccccgttacaaggcctttttgtgagggctgctacgcaaactctctttcccccgcctctgccgtaccacaaagtccttctcattagaaagagagatggggcggtcagtgtttggggctggggatggcttggtcacgtctctgcccacgttctgtttcctagctgggggaggctgggctggggcagggtccttccctttggtttcccctacggtggcagtcaccgagagagccctgtcccggtggctggccccgcccatggtgtttgggtcggggtggtgtgactccagaggcagggtggagacccggaaggagggcagggagtcactctttgtcatgtgggttcggccctccccggcaggctgagccttcctatggtccctgttgctgggggctggaagctccagcatgcccccggcggccttg

SEQ ID NO: 211954 - DNA, 786 bp, Homo Sapiens
  misc_feature (736)..(736): n is a, c, g, or t
ttttttttttgttaatggttactctgtctgaaatgggacatgaaaggagtaagaggatgggggtgaagggaagggaaggggataaggaaaggctaggtggccacatctctctgctgtgacctcgccatctggaaaatgttctgaaaggaaaaaaaaaaagagttattgggaaggcacatctcctcttatctggagacaactccacaaacagaagctaaaaaggtatgcctggatgactcaatctgattggccacatctttcttgatataacttctcatctagaatcatagccttttagagccggaagggaccttggatattaattacgtggttcagtcttcctgtttcacagaagagaaaactgaaagctagggaggctgatttacccaaaattacacagagggaaaaaaaagccaggagaaaacccagataaaattcccagagcccaatgttctttctactgtactaaaatataaattttcatgttcttgacttgacctcctgattctttcaaagattttctttgagaataagtaactaattattcagaatcttccaaattctgttccagcactggcacatacagacagcagtaaagcaacagcaaacaccttccctcacacaaacattcttggttcgcctagaaagactgccaggactatccagtcaagacggctacaactgaggacagcttcccctgtgggtcaggaacaacatggagggtgatctgatttanaaaactggcagaggagggtccatgaagtcatgagagatggaagagcctgt

SEQ ID NO: 211955 - DNA, 781 bp, Homo Sapiens
  misc_feature (665)..(665): n is a, c, g, or t
  misc_feature (708)..(708): n is a, c, g, or t
  misc_feature (767)..(767): n is a, c, g, or t
ttttttttttttttttttagcagataaggataatttctttatagtttgtacaaattgattattaaaaggatgaacagaaaaactgctaaagaacgcaaataagccagtcacagaaaataaatacaaatgacttttaaacatgggctgtggtacccagtttcactcatagttgaatgcaaattaaaatatgagagcatttttcatttatgagatcagaaacaacacaatagtttcagaggattcaggggaatgaacattttcatacacacactgggaactacatttccaatttctatcaaaataacaaatgcacctacgatttaatttcatcaatttatccagggacagtgtgcggggatatttggcacagtactgtttgtaatagcaaaaggcagaaaagaacctagaggcccatcaacagggggactgtatgaattatggtacattcatacaatggatatcacaaagcagtgaaaaaaatgaggtagatcttacaggctaatagaaagccatctccaagacactgaaaaaagcaaggtgtagactgtatcctaagcttttcattttttgtgcgtgtttctttaagggggatacataaggttgtaaatgctgggactatcttgaggaaaaatcaagacatttaaaaatagctaccactggggtangagactggttatgtggactgggagggagtctcacatctctttngtatgctttgcacactgacctttttactacaggcaagaactgctctttcaatttaacanagaactcttacatg

SEQ ID NO: 211956 - DNA, 819 bp, Homo Sapiens
  misc_feature (678)..(678): n is a, c, g, or t
ttttttttttttttttttcactatgcccatctgtgtggaggccaggaagtggcaggggaggtgctgctgctccagcgtatgggatgctgggaggagggccagatgtcactgtgacctctcccactggcacggcagaaagtcctaaacttctcttggacttggagtgtcgcttctctttatgcttctccttgtctttcttctttttgctcttctttgacttctttttcttcttgatttctcggtaagaatcatctatcactaactccccagcctctagttccccaccagaggatgagtctgattctaccagaataggttcaagccctgaaagatcaaggttagcactgtgggactctgcgaactgggaggcgtcagacccacagccttcagggccaggagatgaatgtgcgtctgaggatgacttgtgctttttccgggctgttttcagaaagctctgtaactcatgtcctaggagtaaagcaccctgctcatcccgagctgatttctttgaggattttttcacagtcgcttgttgggagggatattgaaaagactcctcatcaacagagctgcttcccttctcctttggtgacagaataagtttcatttttaaaccatcaggctcccgaagggtcagtgtctctgtgttcacatagagaggtttcatttttttcgatntgtgggagacaccatcctctaggggtagttcccactgcttccactgactttcttcctgtggtgctctttttactctccgaatggcttgaagagccagaggattctccccagtctttttggagggcttggagctgctgccat

SEQ ID NO: 211957 - DNA, 747 bp, Homo Sapiens
  misc_feature (715)..(715): n is a, c, g, or t
  misc_feature (736)..(736): n is a, c, g, or t
ttttttttttttttttttgagacagagtcttgctctgtcacccactgcactctagcctgacaacagagcaagacttcgtctcaaaaaaaacaaacaaaaaaagaaattacattagttgaggacctgctgtatgtgatatgaacaatgaggatcaactctttttgtaatagtttttttacatatgttatttcatttgtttatttcctctgtgagggtaagtattgatagtccagtcatagactggtaacacaggcacaccattaaaaataatagacatacagtatgcagtattttgttttacttatgaaactccgtattttatgtatgatgtattgagtatgaagaatagtacatactgtttccttttaactttatgtttcttgcctttgtatattttatatgaatagcacttgtcactaacatagaaagcagtagaggtggaagagggagacttgccagaataagtttttaatgtgaatcagagatttttattaggaattgggagtggaaagagagagatagtattagaaagtatgtatgcagcaaaggatggagaaactgtccttgttgttaaggcatctaaggatgctccaattactggggaaaacataccaggctcaaaatggtctgattatgcaaataccttctaatacgtttgtttcttttgttgtgccctataaagatgccattaacttcatatttatgtcactaatanacttctagaatccacctcgtngcgaattcttg

SEQ ID NO: 211958 - DNA, 617 bp, Homo Sapiens
ttttttttttttttttctattttctaaattaactataatttataaataatctataaactatcatttccttaaaataggggtttaaacacattttccctaaaaatagagtgaaaggacttgagaccagagataaccgaccattgagacccgtaatatcctaacaatatgaaagctggttaataattggtaactatttcctatttagaaacagagggcctggtgtggatctctatttcctttcattctattttcactgctgctgctactaaggttcagatcctcaccacatctggaccactgcaccacattactgactcattgccagtcctctaatcctacatgtcactaccacctgactcctaaaacacattccacaccatgtcactccttttcaaaatatttaatggctcctagagggagatattcttttggctggaaaagaacaatggtatttttctaattcacaggaaagaaaattaatagatggatttttcataagtttctctaccataattttttcttacctacttagtctactgctagcactacagaaacttgaacacatagtagcacaattaagagggaaaaaaatcaaagcagtcaattggcctcgttcc

SEQ ID NO: 211959 - DNA, 657 bp, Homo Sapiens
ttttttttttttttttttgagggtgagtggtattttttatttattgttgctcttcgcattccatgaaatttgtaatcactatgacagtaccaagcaaacacagttcaagctgtgattataaatcatttcacaccacctaaacatacagtgtagctatgatcatgtacttttattaaaggcagagctcattattaatgaaatctggaagctggccaaccccaaaagattaagaaaaattcgatgtatattcttgggggaaaggcattaaagcctgctcacccaacctttttctattttcaagaatattaccttctgcacttcataagtgctacaaatcagttcactgtggtaaaacaccaaaaatatccataggaaaaattttcctatatacagattacaattaagacacattatttgaatgtttctagttgtggtggaatgctatcctaataatgcctgttctctttaatcagtgagattcatttttaaaggccaaggtatagtctagtaacataaaaagaactggtacccttaattaaatgtacaagtttggtctcattaccatcattgacacaagttaatcattactgcatgtttctaaaacaataggagtccagctcataaatcaacacaatctctgtggctctcaagtcaatt

SEQ ID NO: 211960 - DNA, 701 bp, Homo Sapiens
  misc_feature (632)..(632): n is a, c, g, or t
ttttttttttttttttttccaggtcaacacgcttttattgccacttctggctcccctcgtcccagcaagattcctacctcttaccctgtaggaatactgagctccgatgcaggggaatggggtgggggtgttaccacttctcctctgcacactgccaagttaaagaaaaccctgcttgctggagagggagggccagacagggaggaattcaagggcatgtatggctcagtcccacttctgactgcagagtatagggaccagggttccaaactttttttcgaagtaagggaggtggggaagaatttggctgctgttgtaccccgtgtcctagctgccatgtttccatggaaatgaaggcggggcaggatgtagctcactctgactacctgggaggatggcaggacaggcatttggtaaacatatctccctccactcctacctagcacatacggctgtccccagccgacccccaggctctctcctcactgcctgctccactcccttcccttctggagctggtatcatgccaagtggagtccaggcagggctgccagtgctactctccacagccaggtctcactggcacgttaggatctaagtatgtccgccaagctcaggagcatccctgctanagctggtggtggcagtgcctcggtgaaaaggcagcagcagtacccccaactctctgtgcaactgctgtt

SEQ ID NO: 211961 - DNA, 706 bp, Homo Sapiens
ttttttttttttttttttaagttgtaaaaaaaattttgttatttataaatcaattacacaataaaataattatttttaaaagtcacaaatacaatcgttgtataaagtcattttggcatcaagtatctcttaaatatgttgcaaactattttccaaagagatgtggtccaaaccctctgaaggctttataattttgtattagataacaagtgaacaaaactgacaataaatactccaacaattattttttaaaatactaagtggcaaatgctattctaagtggcaaaacaatctattactcagactacctgaaaatttcactgaagtcatcaaaagttatacaaaatttgtatttacatgtttaaaatcctgattgcatttttctttaataataatacatacaaaaactcagagggttaataaagaaataattcaaagtcctaataagtcaacaaacagatttcattataagctgaacataaaagagacaccattgtttgcttctcttttcaaaaattatcacggcactttgtcaaatggaagcagcattcagaacaatggttctcaaatctctgtgtgcataaacaccatgcaggtttgtaccacacagattcctgggccctgttcccagtctgagctctcattattgaatctgaggaatctgcattttgaacaagattcacgactattttattttattttatca

SEQ ID NO: 211962 - DNA, 500 bp, Homo Sapiens
ttttttttttttttttttgacatattataatagggggtgtgtgtgtttgtagaggcagcatcttgctatgttgtctaagctgatctcgaactcctgggcttaatcacttaagacctcctgtcttggtctcccaaagtgctgggattacaggtgtgagccagtgcgcctagcccaccatgcctcacttttagcgcagtgtgatcctacacaaattgccctgtgtatattccaagggacgatctgggtttgtagggccagaaacacgtgcagttctggggtagcggggaggtggtcggtggctcttttaacaaaaaaataccaaatgatgaaaacaaaattaagttcagggccttgggcaggtcctgcaagttaggggcctagaagctgaaatttcattaacatctactagtggtaaatccgcttctcctacatgccagtgccctctgggaaaaaaaaaaaaaaaaaaaaaagcctacagccgcggccgctcccctcgttcc

SEQ ID NO: 211963 - DNA, 706 bp, Homo Sapiens
ttttttttttttttttttgcagtttaagatttatttgtggttgtttggtctgtaggatatattccattagcaaagtacagacaaaatactaagttttcaagtcacttgaagtaagtcttctgtggggttatatcaccaacttgacagactgttaagtttgttttagttttaagagttgccttttcaaaaaatgtttattatataaaacattgacagggcctcaaaataaaaggtatgtaagatacagaaatagttgccatccttgtctagctccctaccaccactaacaaggagatcattttattagttattggtataactaattcttctattgctttacaaaaaaagcaaatacatattttttccatttgtctcttcgttatacaacagacagcacaccatacattctcttctgtgctttacatttttcatttcctatattctggagatttctccagaccagaactacaaaaatagttcgcagtcctttctacagctgtgtagtatcccattgtatagatataccctagttccttccatcaattccctatcaatggagatttggctggcttccagtctgtagctattagaaacagtgctgtaatcaagatctttgtgcatatactatttcatattcttgcaagtgcatctcatatggattcttagaactgggtctgccaggttgaagcctcgtgccgaattcttg

SEQ ID NO: 211964 - DNA, 765 bp, Homo Sapiens
ttttttttttttttatttgcttactttaattctacagcaacattcgaggtggcttactgcaacaaacccagtgtaataaatacatacgaattactttaaaatcaacgctaaggaaaatatacattttaaaagattaaggctggggtaaagctggaacattactaggcaggaaggaacatctgaaacatttgctgaaatggagttgaccctttacctagccatagatttgttgcctcacgatttcattgcatctgagcaccagggagggtggtggcagttcaggtcaccagtcccttgtttcctgattcaggaacagcgtcctgttctacacttacagtcaaagcaaattacatcattataagatgtttaatgatgaagtcaaagtccacagagtcagcaagcaagtgtaaaaacctcaggagtctaaggacagtctacatttctccccagaaatggcctccctatgtactgttgaagggagagggtcctttcaaggggctccaagacgcagaagcaactgggctgcagctcgaaataaagatgtcctttctacctgcaggttccacgaagcctcacaggcaactttggtgatctcacctgagctaggaattcggttttttgatgtgggttctctttgagccattgtgtgagctttacaatgtgatgtggagattttgctatactggtgtttccttgccggaatttgacatccatggtggctctggcttccctgtctggtccaagaggaaatggagtgtcctgcac

SEQ ID NO: 211965 - DNA, 677 bp, Homo Sapiens
ttttttttttttttttttagaggtaaactcctgtttttaataatattttctaaaagttctgcaattgcagcttgacaggtagaaactttttgctcatcaaactcctgagcactaatctgcttacagtatgagtaagttggcaaaggagcatatagtccatctccaggattttcactatgtcccttttttacgtagtcaacatgtttttccactgcagtctgtaagtaagagggtacttgaagaatttcctgatgatgatccattaagaaagaaactaatcttccagcaagaagctcatcaagatccacttcttcagcacagcataacacacatcgagaaaaggtatgtatcatcagtgacctcgtacccattgcatcatgaagtttgggcatatcaacattttgactcattcgggaaatcatacgcattaagagttgaagctttctacgatttggtgggggaagtaacaaacaacataactgtagagcatcgatggcaaccctctctaaatgaggttgcagcaagctttgtgtgccagtcaacatagaagaagctggaagtaaagaattttctgaaagttctattgtacttttgcagagtcttttattgattgtgggactagactctccgagttcactttccatagctgtttgcacacttgcctcgtgccgaattct

SEQ ID NO: 211966 - DNA, 778 bp, Homo Sapiens
  misc_feature (732)..(732): n is a, c, g, or t
ttttttttttttttttttccataccaccactggagatctcatttattgccacagatgcacaaaataaataacccaaaatcacaaaatgtgttaaatatgggcccatttatacttatggggaagggtgtgagactatacacaaggatgagtttggagatgtctgaagtattcccaggttgaggaggagagaggggaaatagcaccattggttcctttccgtgagtatgtgcggggagaagtttcaagaaggttcttatggaaaaaaggctgtgagcatagaaagcagtcataggaggttggggaactagcttgtccctccccacccccagatcctgcaaaagaggtacaaagcttcccagagggccacagggcccagaccagagtcaagcctcttgttttaggagaaacctcagtggacaggcagggtagcccagtccttagatctgtggggaaggccctgagcccttctggagctaggagtggcaagagtgggagtcaagtatttgaccagcagagcctctatgtaggaatcatggtcactttaccaatactgatggggagggcctgttccccattgcaggcctagaatggtttgaatgggagaagtcaggaagtactgtagtagctgtaggggagagaagttctgagagccagaaggcaggaatggatttggttttgagcagggacgtggaaacgtggagaccaggtgaggtctcattattttggggcganaatgtgggttgctattaatactcctgcaatcctcgtgccgaattct

SEQ ID NO: 211967 - DNA, 693 bp, Homo Sapiens
ttttttttttgtttttttgagacagggtctccctctgtcacctaggctggaatgcagtggcagaatcatggttcactgcaacctccgcctcaggtgaggctcaggtgatccttccacctcagcctcaaactctcctaatactgatctatatgcatcagtttccccaattaattcataatactggctcttcaccatggctgcatctcctaagaagctttaaaaaaatgtgttagccaagcgttgtggcacatgcctatggctgctactcaggaggctgaggtgggagaattgcttgagcccaggagtttggggctgcagtgacttatgatcacaccactacactccagtctgtatgacagagcaagactctgtctctttaaaaaaaaaaaatgcccagccacagatattttctaaaaacttcccaatagagttgagaacaactgccttataggctttttaaggatagacccctacattcacctgtataacctgtctaaaagccagcatactgtttggaagatactattcaataaatgctttgaaaacggaatcactgtcaattcttacttctagacacaagatagggagcctttatcctactgtttcattaagcttctctgactttaagttttgtttcttttggggcagaggacaaataaagatggtcaatgtgtcctacacctcgtgccgaat

SEQ ID NO: 211968 - DNA, 749 bp, Homo Sapiens
ttttttttttttttttttaaaccagaccaagttgtttaatatagtacaacttaacaaccctgtcatttgtttttgaatacagggatctcagaaatgtaggaaatccatggtaaatgatagcaagaatgtttaatgccattgcctggattttttaaaaggaaaatttgctacagttgtaacacaacttctaaaaaatactgttttatgggctcacagtttccagattgttaactttataaattaaatgtgaagctacccatatataaacaaggcctctttttcattgatttccatcttgtttaaacctttggatatttcaatcttcagattccacaaggtaaggctgagtttatcagataaataagatgtttaagtccacgatgtattgcagcactgaggaaacgaatgcatcaagtatttacaggctggctacgataactttctttttttaaaaaaaattcaaatgtgtatcaacatcaagccacagtcgtttttcaatttctctggctacaaaaatgggcaacagcgttttttcctcattcctctttcttcttaaccctcaagtcacaggcaggtcttaggttaaagggcgtggtcttttgggaggtggtggtggcatgagctccgtgtcagggtccagatgatgttttcgcttctgtccttgagaagctgcagtacatctgtcgatgaactcaaacagcatctcctttggtgacagggtttgagatgctgttacacacagccatggc

SEQ ID NO: 211969 - DNA, 677 bp, Homo Sapiens
ttttttttttttttttttaacggttgtatatttttaatttcaaaatttgaaggtaaccacaattgtatatttccctcacaataaaatcagaagcaggaaaatataaaggtggcagctttacatctcagcattaacaaactgtaagtcaactgtttaaatggatgttattcttaaaagataatgtaacaaatgaactcataaagcagtagcagatacatcaatatcttccccaccccagactgacaaatactccactacagcacagacagccaaagcaacagcaacacaaagtttcaccgcacaaaggaaaaccagaaaagaatcctcccttccccattacactctactaggtcaccccttttccataaggtttgtcatgcaattacaattaacaattgatcataagagtaaaatgatgtttgtgttactttctccatctagaactaagatctagaagtgttaaaactcttgttattttctccaagaggacattcttaaagccagaccaagttcccttttgcaatagtaatccaaaccaaaaagctctgagcatcaggcaactcaagcagcagaacgttaaaacaagtccaacttgactactgatcacaaaaaatttatatgatattgcattcttgatcaaaaactaatacagaggttgctctaaggtggtgagtaaa

SEQ ID NO: 211970 - DNA, 487 bp, Homo Sapiens
  misc_feature (384)..(384): n is a, c, g, or t
ttttttttttttttttgtcccaagaggcagggtggctttatttgacattagaaacccatttaaaacggcaggtaagagcatgaacaaaagcaaagtttagttcctcgaatgcctgcttttgtaatgcaggtggatctggctctagtctttaaggttattaattggaatgaatgccccaaggctgctcttagtttctctgtgaagcattttatatgggagctctggggtgactctgggtccacagtcatgttcacaagccatctcttccgcaggagtgccctgccttgaaggctgttggctgggtccccagatattctcagggcaagatctgttgtgttataaccacctgccatctgttggtgcaaattttctggattctagatnatgaatcacttacttctcctgctgttccttctgctgccaagactaatttacctattggactttatgagggaatatactagaataacctatcatgaaggtttgt

SEQ ID NO: 211971 - DNA, 488 bp, Homo Sapiens
ttttttttttttttttttgcaattttataactttatttgatctgacgatcagcgattagttctcatccacattgactgtctgtagatctgtaaaggaagtaacagtcaatttccatacccacatcacatttcatatttcaactctaaaaaccttttgtagacgggtctggacattctattttccacaacctttttacatcccagatatggatcagttttgcattctttagcatcttcccacaccaacaatttaaaaagggtacaatgacgtgtgtcacccctagcttaacagatgaattcacattttaagaggtaaggacatttttctaatgaatttaaatggctttatgggatggagaacttacttttgaaagtggtaacaggtacataggtaaccaaagtatatagcttatttggtgaatcttcatcctcattacgttttctggacagccgcacacggattcggtatggcacattcccctcgtgcc

SEQ ID NO: 211972 - DNA, 670 bp, Homo Sapiens
tttttttttttttttcttatttaaatctttattaaaagaaaaaagatttaaaacaagtaacaacaaatttcattaaatattaaacattttaattatcaaagatatttagacaatacgtttctaacatttctgcacagcagaagcacactgattatagagctcagactgtcatgtgctcatgtgagtttatttttggcataaaagtatctaaagtcacatttaaacaaatgtgataatattttataaactgatagtaacttactgatgattgattctcaaagctttcacaaattatcattatatgattgacattctcttagggtgaatacttttctggactctttctgtaacaaacactgagtaaccaactgaattaatttccttaaaagttagtagtactggtaaaattatttaaaactgaattggaaattatgttcctgtttatagtagtacaatacaattaacatactgtaagtaaactgattttttcataccaaaagttagaaaatgaagtggcatatatagaacaggctttgatgaaaataaatgatcatttaaaagggagctattcagtacatgacatctgtgagcaccctttcgaggagtacagtttccctttgcaactcctagaagtttctctttctgatctttgtaaacactgagaaatgca

SEQ ID NO: 211973 - DNA, 836 bp, Homo Sapiens
  misc_feature (646)..(646): n is a, c, g, or t
  misc_feature (668)..(668): n is a, c, g, or t
  misc_feature (684)..(684): n is a, c, g, or t
  misc_feature (729)..(729): n is a, c, g, or t
  misc_feature (796)..(796): n is a, c, g, or t
  misc_feature (822)..(822): n is a, c, g, or t
ttttttttttttttttttgggaaaggcattggccactttggactttattagcaacagtaatgtcccctgacatccgcacaagcttgtagctccacggccaggtcttcccccaacctcacaatggccccgtgatgcaggcaggcaggcgagtgggggtctcccctccttatccacaggccaccgaggcccagagagggccttgcccgaggtcacccagggagtggcttgctggagccctgggaataacagccccacacaaggctctctccctccgcagctggacctgtacgcgggggctctgtttgtgcacatctgcctgggctggaacttctacctctccaccatcctcacgctcggcatcacagccctgtacaccatcgcaggtatggtgcctgcagcagggaggtccacccaggggacgtgtaaaggggtcagaaggccacctccccctacaggcccgagggagcagcccaggaagtggccccagcaggagccccagaagttcctccccgtgtccctcctccctggggccagggccccctccagcaaccttgcttccactggcagggggcctggctgctgtaatctacacggacgccctgcagacgctcatcatggtggtgggggctgtcatcctgacaatcanaggtgaggacagagtctgtggncatggcggggctgtcnccacagcgagccctttggagtctggcactgcccggcactgtgcangattcatgccgttggggttctgggtagcatcgctgggagtgggtgggttcaggaggttgagcactangcagtcagccccctgctggccctcanggactgcctggctg

SEQ ID NO: 211974 - DNA, 516 bp, Homo Sapiens
ttttttttttttttttatctcttatatttcagacacttaatacccttaccccattcactgaatccaatttcattgctatttccttgttttgtccttttgagtggttcgggatctgcttcaaatgacaaagagatgtgagtaatagggttcaacgtctttcttattttcagatttaaagctcttcaatgatgtagctcaaaatgaaagttctttcaatccaacaactttgcagagatgctgatccctctcccaggtgaatcctggccaggcctttctgacaatcctgggataccctggggccagtatagagttcaagggcagaccagactgggggaggggttcctgagggacctggaaccagcatcaccagcacagtcagaattgcaaccccatgtgaatccttgtcagaggaactggagccatgatactggtttagagcactcgtctattttcttgttgcctgattctggttagtccctgatccactcagcactaattagcaaggatcctcgtgcc

SEQ ID NO: 211975 - DNA, 828 bp, Homo Sapiens
  misc_feature (708)..(708): n is a, c, g, or t
  misc_feature (732)..(732): n is a, c, g, or t
  misc_feature (748)..(748): n is a, c, g, or t
  misc_feature (773)..(773): n is a, c, g, or t
ttttttttttttttttttaaaaagtggcggtgttttaatcaagtctcattacaacggcagaattaggaatgagtcccacctagcttccacatgcgtgggcagtagctgtcacacgggcctgtcgtggcactcagcccatggcacagacatatgtggctcagggcaagaaccagtggatggggctctgcacaggaacgctggcctcgggatgggagacccggcctgcccaacactgctcagagcccctcccaactctgacaacaggctcgggtcaggactccccgaaatcaggcaccctcctgccccactgctgagatccccaacgggccagacctagcttggaaactttcttccacctggctggccaggaaggcagcaaacagagatgatgactcggaatgatgggctattcggaaatggctagggaaacaactgtttccctactgtcctggcgggacccaccctgggctaacgggcttcccaaggaagtcctagtggctctggggtcctgaagtccccaaatgggaacctaggctgagagaagcaaggctgtgagggcatccaaagggctgcctcaggttttgttcctgagaacgaagcgtggccccggaggctcaggcgtgctcagtggggccagggccaccagcatgggagtgggcctgtcctagcctatgcctcccagctggtgctggtcccctcctcttgcanaaagctgtcagcctggccacctcnctcctccctgactgcnagaacccagtgtcactacactgcanagagctctctgagggcagactgtgttctttctgggtctgtccctgcctgagactt

SEQ ID NO: 211976 - DNA, 750 bp, Homo Sapiens
  misc_feature (177)..(177): n is a, c, g, or t
  misc_feature (742)..(742): n is a, c, g, or t
ttttttttttttttttttcacaatcaaaaagagatgattattactttattaagttagcacagattggacttttacaaattgtagaaatggtcaacaaatagaattgtcctattaggggctgatattcagaaaatatataatcaactgttggtgtgataacaggataaaattccaccnctgtatatgagtaattccatttttatccatccatttacaataattacttctcacttttgtttacttagtcatatacagagtgatataagtgatcgtcaaaaaggatccattttcaatgatttctacaccatattatatgtattctccactggaaaatttatttttccttaggtctttgaagtgtgaaaatatatacatatgcctgatcttatttctaaaaatgcttaaatcaataactacaaataccacatgaccacatttatacactatactgtcagaaaaatattttagaatattttgagtcgtgaatagcttatgatttcagtggtgttggtgggtataattgattgcttttcactttcaagcacattcaaaatttattacaaaagaagaatggtgaaacaaaatatatgatctgctcttggtatttcaggatgctcagcagtcacacagaaacaaatgtttaatttcttgaggaagcagaacaacagcccttcagagaggggtgagcctctcatcctctgtcatgaaggcatcattaatatgccctcccttcatgtccagnggatcaga

SEQ ID NO: 211977 - DNA, 734 bp, Homo Sapiens
  misc_feature (693)..(693): n is a, c, g, or t
  misc_feature (714)..(714): n is a, c, g, or t
ttttttttttttttttttaaaaaacctattttaatcctaattgtatttctctattcctgaagagttctgtaacatgatgtgttgattggttgtgttaatgttggtccctggaataagattctcatcatctccttcaatcaagcagtcccactgatcaaaatctttatgaagtcctaaatgcttttgtaagaatgctaatgaagctttgttgctaagatcaatagctgcatttgaatctatgtctccctttaatttgagcatgtgtccaattattttgccagttgcaaaagtgaagtcagcaaaattctggtggactgaacccctgattgtaatcatctttctttctttatcaggtgagtagcattttttcatttttatgatattagcaggatattggaaatattcagagttgataaaaaagaggggctgaggaattctggaatatacttcatcacccagtggaaacatccatgcatccagggcaataccacatctgaatctctgatcttcactaagagtctgaataaccgttgctccaccaaaagaatgtccaattactgctattttttccctatcaatagagtccttcagttgttccatatcaaactttaaatctaatgcattcttcactggctttccatgatcaatgtcaagaatcagactgagagcttgggaacattcttttgctctttngcgtacctgctcatttcgtanatgtgtctcctcctcttgtt

SEQ ID NO: 211978 - DNA, 594 bp, Homo Sapiens
ttttttttttttatttttaagaaataaatttattttacttgtagttacttaaaccctagaaataattttttcaaacagtagaagtacagccttttataataagatagttcatgatttgttctttcgaggattttttttttaataaggttcttctacaattggatggtgacaaagtttgggtttgttaggattatttttcagcagccaatcagctagccaaatcaaaggatctgctggtttttgcttacaaagctctgtgagtccttcaagcagagttggcattatatgtaaatttaaatagtccttagcagcttgtccaattggaatgggctcaacaatcacttcaggaaacataaaacgtatttctctttccgcagcagcaaagtcattactcccatgaagtgcattccttaggtcatctgtgccataaattgccctcagactgtctggatgtgtctccttcgctactaagctattatttggtcccaaaagttctaaccaataagagatggctttatgtctagctaatatcatggcgacaagtggtccagaactcatgtaagctgttaagttggggaaaaaattcctcgtgcc

SEQ ID NO: 211979 - DNA, 600 bp, Homo Sapiens
tttttttttttttttcttgcaaagcactttatatacgtcagcgcatttgactcccaaaacagctctaggaggtaggtgctaaatgaggaaacgaaggcaccaaaaggtgaaggctcacctaaagccacacagctggaagtggcagaagcagaatgggaacccgggcagcctggttcctggccctgccattcacccctctgccatctagaagatgctactggtggcccacccgagtccactggggggtgatgcctgctgctgagggttcacatctgtgctctctggaggcttcccttggctactggaaggcaccctgccctggaggtaagtgtctgggaagttattcactcctctctggccccctcatccaggagccagtaaccggtggtgtgggcacactgtggtactgtgggctctgcctggagctctccgtggggccagctgaggctggacgtcctctgaagccacttccttgcccagctgctccctcccctcccctgcttccctgactccctcgctgaagccccattccagaccctgcttctgacaaacctgaactaaggcagcatctttgcccatagaatgacccagaagctggca

SEQ ID NO: 211980 - DNA, 757 bp, Homo Sapiens
  misc_feature (657)..(657): n is a, c, g, or t
  misc_feature (713)..(713): n is a, c, g, or t
  misc_feature (723)..(723): n is a, c, g, or t
ttttttttttttttttttaaaaaacttaatgaatttttatcatcttaataaatatatatcaagaaaacctcactttattacaacacattcatatacaagcatctattagctaagttttgaacatcaaatgtttatcaaatattgaaaataaaggacaaaacattactagactatttaactataacacaagaaaatgttttaaaaattggtctttgtggacaattgtccaaatgatcctactcatacactgtatgaatgagacctatatttaatattaatagcaataataaaaaaagctttatcttggagaaactgggagggcttacttatttcctccgtttggcatttggtttctgtgaagtattatttgaacaggcccaagtcaattagtaaacttggaaactggaatacagtttagcaggaagagttggctggagtggaaggaaggatggtaggagggccactctgaacacttttcaaatgtacaagttaaagatattatttggaaaatgtagaccaaatacatagtaactattatagattaagtcccatttctccaaaataactttcaaaaacctaaagtctttacattctttaagataaaccttattgatcaccacatcatttattaacattgtgcttcttaatcaacagcanagttcatatataaaaacccacatgcttttataatctaaacaagtgaaatgatgcanaacagagaanagtataatgcatgccactggttcgtgaacttcat

SEQ ID NO: 211981 - DNA, 689 bp, Homo Sapiens
ttttttttttttttttttgacacatccttgttcacaactttaaaaatattctttataaaaaagaaaaaaggtcatcctgttatattctatccctgttgcatactgctgagatgttctgagattccaattttgttgccttggtgcctttctcagatcttcaacaatttggtaggcaagctcactataatttcttctaatgcagacataagtattaacactagaaacggaatgtaggccaggtgctgtggctcattcctgtaattccaacactttgggaggccaaggcaggaggagctatcgaagttttgggaggccaaggcaggaggagcccagtagttcacgaccagcctgggcaacacagtgaaaatctttatataaaagaaatggaatgtaaaccagatgaccatctgacaagagatatttagaagaaacagctatttgggtcaagattagacttcataggttctaaggtttcttccaaactcctattaaaaaccttaaaactttaataattctttcacgccattagctacaaccaaatggatccaccagccttcacaagctatcccaacaaccgactgtcactagtgactcaagttccttcactaggtttcaagattatttttagggggtttagatggtacagaaagagacacataaagtagaatcatgtaaaaagaagtaaatca

SEQ ID NO: 211982 - DNA, 471 bp, Homo Sapiens
ttttttttttttttttttcacttttgtcacctcttggcaaatccctcacccctcctctactttaccatctgttatgagtctctctcattcttcttttctctgtctcaggttttctactgctctatgtctgtctcctgatccctttggcccacagaattgtggtaaaggttaaaaagaaaaagaaacaagttttcttctgcttagcagctcacttcaaggaaagttataagataacgctgtccaaaaagctaaggctaaagtaatgggctctagacactttttaaattccagaacaaagtgaaggaaaaaaaagagagagagagagagaaagacaaattcttctactgttactcatttccctagtctcttaagcatgactatgttttacaaatgtctgtatttagccagttcttttttttgacacagctacaaggccaccagctatgtagaatccaacttctccctcgtgcc

SEQ ID NO: 211983 - DNA, 691 bp, Homo Sapiens
ttttttttttttttttatgtttttaaatctgattttcaattttattcaaagcaatagactgcattcctttcccaggacacattccaaccagaggttaaagctcagaaatgaatggatttctgagacaggaggcagctgtggaaatccttactttagagataacttctgcaaagctcctgttatacagtggactcgcccatacattggaaatgctgctgctgcctgaagcagagaattttcagcctgagatacttcttcctcaagattttccatcaagcatttgataaccattaatgtgttcctttccaccacagcagcaggcctatctccattatcacatgcaacttgctgagttaagtaggcagacaaggatgacggtagagcatcctgccagattaagaagttcagcaggtaggaagctgtcacacagtcgtatggtttggtgcttgtgctgagctccaatgctgcctgaaataagccttgcagtttccccgaatcctgaaaatgtacagctgtttttgataacttcatcagaagatcaaatgctaaaattttcacgtcttcaaaagtgctggtaaaacattccattagtgtttggaaacgaccaacatcaatatcatgactcagctgatatactgtataaattctgccttctgggacatgaaaaacttcagctattgaacctaaaatg

SEQ ID NO: 211984 - DNA, 676 bp, Homo Sapiens
ttttttttttttttttttacaccaaagctaatttttaatgaaattggtttacagaagtaaaaaacaaaaattggaaagcaaagtaataaaacttagtttatataaacaggttgaatgatatatttatcaaatctcacagacatcaggcaaattatagcctggtgacaaaagtgttcatagtgaattagttactcttgtaatacttctataattagttcatcaggaatttcatccacttcactgttataactgagaagactgttctctgcagcttcagctaattcagcatcttcagtagcttctaaaaaataagcatcatcaatgccattatcccagacagcatcagcagatgcacctgttgacagcctgctaggtgatggtttatgaggattctgggtttcattgctcctagtttcatctgcttcatctgttgtaaactcttcttcctctttgaaaagaaacaggagacatacttcagcaggtaatgggaaacagtcagatttgaagttttctgctttacatacagggtcatgacatttttgataccaaacttcatttttcagatcaaccagaatcattatattattactcttatgggctcttccaatgttttcacaccaccgatatttacaaatatcataaaccagtaattcttctgcctcgtgccgaattcttg

SEQ ID NO: 211985 - DNA, 757 bp, Homo Sapiens
  misc_feature (676)..(676): n is a, c, g, or t
tttttttttttttttcttaagataatagcattatattaaagtgaaaccatcttcttttaaaaaagaaagaaaaacaaagaaagggagagagaaagagaaaaagagaaaggtgcaagtgttggtttgaacaatgaggttatgagttctgggcagcagggctctgatgttggcccaatcggtgccttgcgtctgggccccgacaaggcaggcgggagagccccgaagcctccaggcggcaggagacagaagagaggacacagcattccaccattcaggagcagccagaagctctgacggaacagacttggggggagatgggaaaagcaggtttggacgcttccactcgagccagacgctgctttgtccccagggttagctgaacacggtgttgtgctgctgggtcacccggatgaatgttgccctcctgctgagctccttgagtttggcggcccccacgtaggtgcacgtggacctcagtcccccgagaatatccaggatagtgttttccacatctcctttgtaaggaacttccacagtcttaccctcagaggctctgtactcagcaactcctcctgcgtgcttgttcatggcggtgtcagagctcatcccgtagaagagcttgagcttccgtccgttcctctcaatcacttctccagcacactccgtatgacccganaacattcctcccagcatgacaaaatctgctccagctccaaaggctttggcgacatcccctggacacgtacagcctccatca

SEQ ID NO: 211986 - DNA, 769 bp, Homo Sapiens
  misc_feature (719)..(719): n is a, c, g, or t
ttttttttttttttttttccctgcaatatttattaaggaatttacacatacacaggagaaaggcagccaggaactgtggttcccacacatgaaatcttttaagcaaagttttcttgtctgaattttcaagtggggtgaacaatgactgagaggaaagctgtcccggccctctgcctcgtacacctgggaacggtggggaaacagagcaccctggatacacaggcatgaaagagtgatcagcagaccgggagaagggaagggagaaagggagttatcaatgacatggcgttttttaaaccataagaaaaacacaacagttttaggctgctgataaattaattcctctctgttgtaaacctaaaactaaacaaaaacaaaaatacccagagcagatggggagagggtgggaggcggaacacacactcatacacacacacacactcacgcacacacacaagcagtacacgttaagctctgcattcccactataggggttggtcctccagccacggagccagatcctactgaaggcaggggggaggcgggaagggatgtgtgtctgtgtgtgggatcttcataaagtctttggtgctaataaaggctgactgaagcagcaagtcctgaagccccagatccagaaagcaactcagggcgaagagagtagtatttttgctcatcctcataggagggggcttgcctcaccccagggctagggtcanactgacccaggacccagggagtatttaatttgatttcagtacttgcctcg

SEQ ID NO: 211987 - DNA, 654 bp, Homo Sapiens
  misc_feature (588)..(588): n is a, c, g, or t
ttttttttttttttttttccaatgaactcagaaatcatcctttctgggtgctgagccctgaaatggtcatagaaggggccagtccccaaacagctgaagcctgacaaagcctccctttagacagatggagacagatgcccggctgagcctggctccattcttccttcacattctttccagtccacagtgcccacgctcaggctctacatctcctgcccaccccttgagttgagaaggcttgagcttcgctcaagttctctggtccacctacctggagacaggagccctttccagagatgttgggtgtgccacaaaaccacaggtagtctttttcatctcatcacagtggtagaggggacaggagctgggctgcctgggtttgaatctagtctcaccatttttactgagattttgcacaaggcaacttctctgtgcctgtttcctcgtctataaaatggagatgtactgatgccctctcagggttcttgccaggtcaaatgagtccactcacgtattattcagtgcaagcatttagtgcctgacaaagtggtgagtgacatgcgtttgccatgatcaccccgcctctcnccttgctcctcccactccttcctgattctcaaacctctactgcaatgttcctcccgccctcgtgcc

SEQ ID NO: 211988 - DNA, 562 bp, Homo Sapiens
ttttttttttttttttttaacatctatagactttattaggtgttccttatacagtcatctggtatgtttaaagagtgagcaatcatataaaaggaaatatggtcataactgattgaagtaataaaatcctgaaactaaataacatctcataattcattgcacaacatatattagatttcattacatcagtatatagcttagtagtaaattctcctgatggccataaacctctaaggtgttgtcatcctgaaaaatgaaggaggggagggagttggtggggcgcagaatggagaaatcttccatagtgctcgtgtgatgtacactaagttgtaaagttatagggcatcgccacctagtggcagaatttcatgccttgttctaataaagggattttccttgttttccaaagagcaacctgtcttactcactttctaaccatccctctctgatactgtccctcctaaaatccatgcttcctcccatacaccataaacccatctgctcttcatccatcaagctgtcaaggatttggttatgacaatcttcatgttcacctcgtgcc

SEQ ID NO: 211989 - DNA, 726 bp, Homo Sapiens
ttttttttttttttttttaggtaaaaagatgtatttcaaagtgggatcagtgaatcttcaactaaataaataaatgtacagccccccaagatgcagaatttcccatccctagtttaacagtcacggttcactttgttttacgtgcgtttcgcagatgagtggtgctctcatcagcagacacaagacttctttggcctctgcttttttttcctttcttctaataaggagactacactctagataaacaaaacagacaggcgaatgtaatccagggttttggtggtttttctgagtctagaaggactaaaaattagccttgataggcagaaagagcatcccaacctgtctgtcaaaaactctggccatttctaggacacctttgccgaactgaaacaggaaacaacaaaaattttacatgcttataaatgttttctccccctccgaggaaaatctttacataaagatggactcatttacctcattttttacacttgcatctgcccctttgtcaagaagtaactgaactaactcttcatgattatttaacacagccaccataaggggcgtctttccatttctgtccttcacattcacattggccccagcatcaattagaagagaggcaccctctgatttcccgacaccgcagagactctcatgagtggggtccatcctgaaccagtgtccacgacgtctacatttgggaagaaggtggtgattggctct

SEQ ID NO: 211990 - DNA, 678 bp, Homo Sapiens
ttttttttttttttttttggctaggcttcttcaaatcgtgggaataaacacaatctttaaatacaaaataataacagatatatgactgatatgaacaaaatccttaaaagaccatgctagtgctagtttacattttctgaactaaaaggggttaaatgtctaaagaaaaggagcagcaaagaagcactgagggtgatctcttccttttctttctccctttagtacagaaagggaaggatttaaatctgcttatacacatcagctcacaagggagaggattaggaaggttggaacagagttggaaaatgctcagaacattctggactccaatattaatataacatttaacaaggaagcatctgtagtggggcttctgtgaaattaaacattttaacattacaacctacatgtatgcatatttgtgaaatttcctaataatcgatttatggtttcacaaaggagtctatgaaattagctcattttaagggaaagaaattgtcaattggaaacgtaaggtgggaagcagatgtagctcaggaattgctttgagatttaaatgtttggtgaggttcacaaaacaactccgcaactccacgatcttctttggatctccatatgaaatgtaggcattcctgtacctgtaacccttgatgaaagcagaaagacagtactgtgtcc

SEQ ID NO: 211991 - DNA, 667 bp, Homo Sapiens
ttttttttttttttttttaaataactttataatttcctggtggatttagtttgtgaataaaaaagaaaaaatgaacaaagtgtttacaataattatcaaggcaaagttgaatataacacaatttctttgtaatgtcattatcctgtcagtaacacaactccagcaggaacacacacatacagctgaaggcagcgggtgcacgtgcatcccagacaccaccatggaggctgctactgttaccaaaaggaactcaagctacaagggggcaggtgctcctcagctcctccactaaagtgcaacacttctcttctgacgcatcagggagcagtcacaggccccactggatatcctgcaatgcccggcaggtgcctgggctagtcctgcgatgggccagcaggccagagtgggtggtgctgccctcaggatgtgtagctgcagtagatggatgcaatactggtgtggtgtggaatgaggggctggacccagagggcctgctttggccggggtgaattctctggcttcagtagggttcacttcctttcctgacagtggcttctctggggtcaagagagagcctgggcctaggagatctggggtctaaaaaagctcaaagggaaagaattgagggcctgaagccagaaggaactgacatggaggacagtctgtt

SEQ ID NO: 211992 - DNA, 746 bp, Homo Sapiens
  misc_feature (664)..(664): n is a, c, g, or t
  misc_feature (688)..(688): n is a, c, g, or t
ttttttttttttttttttgatttcattatgaaatgaagacttttattaagaatatattttatcaggcattttgataacaaactgttactctaagtataggtgatttacccagtgtattttaaaaagtaaatgaatcccactgtagtttttcttgaaggaaaaatcatttctccagttgctgaggggtactaaaagcttcatacacattagcagcaaagtctttcacttgctccattgtcaacagatcctgaacaaaatgactaggtgtttcactgcaaactgaatggatctgtccgtttactattggaattatcttagctaaaggcaggctgacactggaaagactattcatagagttaccatgttgcaggtcctgttcagtaggtcgaaagaactcagccatattgtctagaagtctactaaaacctcggtttaaacaggtattcaaaactgtactaaaatctgggctttccaacatgtctctagtttcattgagaagtttaatagtggtaatgtctcgaggagaaagtccacaggcctgcactgctaatggagtttcttcatctggcatcatataatggcataataaaggtttggatccatctttattaatccaagaagaagacttatgctgctcaacgagatttctgatttcttttagttnttgctccaagtccaaaagggacanagaatgtttaagagaaaacttcctaaaacttctgcacagcttgtttaatgacagtgat

SEQ ID NO: 211993 - DNA, 753 bp, Homo Sapiens
  misc_feature (725)..(725): n is a, c, g, or t
ttttttttttttttctttcaggtttttcagttgccttctttcctagatcacgtatttctatcgttgttccttttttattgttcctgtgaccactggagcactagtaataaatccttaactcaaataggttatatttaatttcagcacccaagctccaaatgcatcagctaaactgggttatagcatggagaatacctcagacgaccacagattttatttttgttaagattctatcaagactgaggcaaattataataaaagttctcatatcatagaaaacaaattacgtggaaaaggataaacatttatacagtactgaagcgttatcaacaatgagtagcagaaattctttttcactgaagtccaaaagccatcccagccctccagcagatctaaagattcttgctaaaggtcaattcaggatatagacctaatacaagaacaaggtatttactgtcaagatttgctatgaaagttccacgtaacttgtaacaactctgtccttggccaactatatatacaaggtgctgttacaatgaaatatattttaaggcacagtattccaaactgagtagaacattttgctcccagagtctgcacagattttggattatttataccagctaatagaattagtaccaattaacccgagttggaaatctgggtggtaacagacttcagagggctatccaaggtactcatgcctggtgactatgaactacganagatcagaaagaatgggtcacaggaatc

SEQ ID NO: 211994 - DNA, 499 bp, Homo Sapiens
ttttttttttttttttttactttaacctagtttacaatttatatttattatgcccactgaacccacaaaagcagtgtttaattttacagtttaaagtcacacatagggaaatgctttacaaaataggatattgttcctcaatgaaaatattacagtataggtcccaaacggctcagttcaagtcttttacctgaataacagagctgttgtggaatgcaggctacaagacacagtaatgctttaaatagttgattaagatttgaaggttgccaaagctgagagacattttaaacaagacccgtcttagttttccaagatttttggtttttcaactgcattatataccattgcttctggaaaattgagggtaataagcagcgtacattttacatcttatatacagtatgtaaatcttcaatgattttctctaccatcaaagcaagtttcaaggtttaaaaatctgttatacctacttaggtttattacttgacctcgtgcc

SEQ ID NO: 211995 - DNA, 711 bp, Homo Sapiens
  misc_feature (690)..(690): n is a, c, g, or t
ttttttttttttttttttaaaaattatatttaatacaagtgaatagattagaagatctgaaatgttataaagcaatatacacaacgaataaataatttgcacaggagagtcatgtctacattacataacactgtctagtatgggaatacttaaagtaaatccagtgataatggagaaagtccataaaaatgctaacctgtcttcccttgtatgaaattgttcaagtataaaaatccaatacagtgtaaaatagtattcaatttagtttaagaataaaaattgcaagtattgcagtttcagaagaaaaatgtaaagcagcatttaaaaactacataatagtgttaaactaatgaattaccaataaatgaaatctacacaggcaaaatcagaggaggaagcatgaaactagcaatatatcgtttaaaaaaaaatctaaaaactaaactaaaatgtgttaatgtaagagtactctcttatacagtgcacatatgaatttaaataaatccaagtcaacatctttagttgaataggttaatatttaatacgctacatctagacttactaaataatttatgccatgagatgaatacataattttacagtgtcacatctaaagttcctttctttagagtgcagcatagtaaaacttaaaaataaatatcttaaatagcattactattaaggcacagntataaccacattatcattaac

SEQ ID NO: 211996 - DNA, 707 bp, Homo Sapiens
  misc_feature (521)..(521): n is a, c, g, or t
ttttttttttttatttttgttgagatggggtctctctccgtcacccaggctggagtgcggtggtgcactgcaggagaaacccacagtgcttcatgagcatatctgggctcactgcagcctccacctcctgggctcaagtgatcctcccaactgagcctcctgagtagctgggagtacaggtgcacgccactgcgcccggctaattttttaaatttgagtagaagatgaggtctcactatgttgccaaggcagtctcaaacgactgagctcaggtgattctcccacctcagcctcccaaagtgctgggattataggcatgagccaaatcccaaagaatttctaataaaagtaaaatgacagcttggatttggtctacaataaacacctcttctgctttcgtcacaaacgtgtagcccttctccagtgagggtcagccaggcatgttaattcacaggtgtgtgacacaggctggctcttagccccgctgtgtcagggagcaggatctgcccaacaagacgctnaggccacacagccctcgggagagcctagccccatcatgacaccttctgctgaagctccttaggttccaatcatttcactgttcagtgagccctctctagcctccatgtcttcctcggtggcaagaaggaggccaacagagcacccaggacacaggatcacagagaaggctcttccagccacaagtg

SEQ ID NO: 211997 - DNA, 678 bp, Homo Sapiens
  misc_feature (626)..(626): n is a, c, g, or t
ttttttttttttttttttccttagcacgttttctctactactggaggaaaatattaacagacatcatacatgctcacaataaactaaagatacacaattaggatactactatagaccgttcccccagtgactctcacttgccaacagtttatcctcctggttctagatgcccagataaccacaccataaattctcccaagtgaggcacatttatgttgcttccagatcttctccacaataacccagcaacactagaataaacttgtacacttccatgctggtgcttttcattctaaccaggtttggtttcaaagtgatagtgcccaattaactgcagaacatttgcaagtcatgcttcttccacctgtgttaaaacaatgacctggtcctcctgcctgcccatcagcactggatgttgtcactgctgggtatttttgctgtggataaaagacagaagaatctgtgctgctgcctcccacggcatttccctgcccaccggcgagtgagtgctctggtaagcacactggaacacccgcccacagtttataattttctaactattttctgatcttggttttcatttttcacatttaaattttttttttttttttttagacagtctcganaaaaaaaaaaaaaaaaaagcctacagccgcggccgctccaacatcagcctcg

SEQ ID NO: 211998 - DNA, 603 bp, Homo Sapiens
ttttttttttttttttttccaagatgccgggcactgcacggcttttatcagtttttattacatcaggtcaaggaaacaaatggaatctatccacatggtcctgcctcgttgggcatatattctaaacatacatccattttcatacccaatgagaaagaactcaattccaaaggatctcacctttcacaaaattctacccttaagatcctaaaacagtcatatcactgtgcacaaaatttttggcagtcacaagctctaacacaaagcagagcttaaaaacaaatggagaatataatcagtgttcaaatgcaccctcactgggtgggtcaaactgcatgaggcagtgtggctgtgtggagggagaggtccggacctgtggcaaactgctgctcctgccaggaggctaccaaagccaaggctcttaacatattgaggttcctcagctgccccagtgcctatatctctaacaacagtaaacagtgaaatacctgcaggcaaccatgtctaaataaagagataaatatttgaatcttcaagaagtggccaacttcagaaaggcatctcttggcaccctagaggagactgggatgaaagttgtaccgg

SEQ ID NO: 211999 - DNA, 749 bp, Homo Sapiens
  misc_feature (701)..(701): n is a, c, g, or t
ttttttttttttttttttgaggcaaatgctttttaaaagagatggcacatatttcatatcagttctcacagggaaacattttaagtctctaaattcatgttgactaaaactggcattttacaaatcagacgtgtttgtttaaaactttcttctcatctgtaatactattcggcaatcaaaaaactatagctgtaaactagagatttaacaagtgagtaatggtagcagaagaaaatactaaagtatcttcacagaagtgagtgaataacaggataataaataaaatggagaagaatttgctagcggccaataaataaaaacaaaaccaaaacccactatggctatgaggaccttagaaaggtcacagatgataaagaccaattcaaacatcaaccctttgattttcactaatttgtttcctgttctgagccttatacattttaaataaaccattgcttacatttttactatagattttcacttagccaactcatatactgattttctattccatactcaattttaagcccattataggaaagtgctccatggaatccatcttcactgtggttatgtgtcacttgaactccagagttctaaagtcgcgtgatgtacatgagtccatcatctcttaagatgtcatattgacaggtgatgatataggacagggggtaaccatgtaacttgtcattggccaacanaggggctgccctcacatctaggaaccctggatattttttagctagctc

SEQ ID NO: 212000 - DNA, 784 bp, Homo Sapiens
  misc_feature (734)..(734): n is a, c, g, or t
ctttttttccctttttcctatgatctgtgaagaacaagcacactgataattacaaagtgcatccatgtgatacccagatttgtgcagtgtgatactcatgctttggttcttatggccatcattgccttttcatgttaataaataatgacagctaacaaaaataagtcaccttttttaatgtaggacatctttctttgacaggctactgtatctataatcaccgttaatctagctcactgcaatgtcattcacacatcagttttacatgaatatgcaaagaacacaataatcaactgtcaaacctaaacgattaattacttatcacagaatctgttgaatatttttgttttctaactgagcaagggaaatcctgtcagcttttaaaagtaagggctagattcttagtcataattactcatcatctgtcaagttgacacctcatatggatgaaataagccttacacatttgatttaataacaaaaataggtaattttattcccctattgtaagtacttcatagtaacaatttatttatttcacaactctgctataggcagattgattgttttatctttctatacttttggatttttaccctttagagatgtgaacttcatctgactttaaaatgaggacacttaatttaatgcttttacaaatcataactaacttttgtgactttgaaataaaagaatgaattaaaaactgttttgacatactcaacaactgttanataaagcagaagcttagtctctaattttacggctgtgctatccaatatag

SEQ ID NO: 212001 - DNA, 697 bp, Homo Sapiens
  misc_feature (588)..(588): n is a, c, g, or t
  misc_feature (655)..(655): n is a, c, g, or t
  misc_feature (665)..(665): n is a, c, g, or t
ttttttttttttttttttgagaatatctgccctttaatttgcatttaaaatcagtttctttaaatactttagttacaagttctgaatagtgaagacagagtagtagatgctgcaggcactcagtattggctcccaccccttcccccctcccccacccccaggcctcacttcttggcttaagatacaaaagggcactctctactggccctggtgtcaaacgtcagcagcctcaggcctggatgcagttggatacaaagccatgaatcccagtggctccaaggaattccaatgattgtgcccagatccacgggcaacacaccttagaaatgacctcatccatttcaccactaggtactaacaccctcagggtggtttcctaccccagtccacgtcctccagatctgtgtcctgcagaggaagagacaaggccccgctataacgcaggaaggaacaaaaactgcctcctcagcccaggtgcttacagcaacttaactgaaaagctcaaggcaatgtgagtcagtctagaggagacctcccttccctagtctctaccaggctctggcccttcctcgggaccacgcttggtcncactgccatgatgtgctagaatctgctctaagaacaaggtgctagaatgaggcccagcaaccagcanaggggttggnaagggttgctacagccccagctgtgtgagatt

SEQ ID NO: 212002 - DNA, 727 bp, Homo Sapiens
ttttttttttttttttttacttttacaactttgtatttctttttaaaatacaggcaggcaaagaagataacaaatatttttaaatggatgcttaacagcacagtgttaataaccatcttcagaaattgtacagtattaaacatgtcttcagccaagctccaacactcagaagacaaaagacttgaggtcaaaagctattaatccctttttttttattattattaaatgtcctcattttctaaaaataagcaaccagagcttgtcaacattttcttaagactgattattacaaagccattccaaagttaaatgtacaatccacagtacatcagagagagacacaataataaatgtataatcaaaggtactattattgatcacaatttattttaaagtcaggaaaagcctgcaataggctggacaaatacttgattgtgcccatgtttccatgggatggacagcagcactgagtcacacaatgagagcaacacttccttttccaccttcctggaaaaatgtttgttagataaggcaaaggatgggtggctacagaatggtggtttgaaccatgcaagaacagcaaataataggtaataggtgtgcagtaaacatctgactgctgaatcttgggtgaaaaaggcagcaagaaaaatgaccacagaaggaaatggttgaaaggcatttcaactctgaactttttacaataatgcaagaaataataagcttt

SEQ ID NO: 212003 - DNA, 597 bp, Homo Sapiens
  misc_feature (588)..(588): n is a, c, g, or t
ttttttttttttttttgtattacgggcagttcattattacatgagctcaggccgtctgcacaaagccctgggagctaggcagtcagctctcatttcatggatggggaaactgagactcagagaggcactcttatatctggccccagaggctcggtacagagacgtagagagggaggcgggctgagaccccgtcctgccctgatgcaggccaggattggggcagacccctggcgagggctgtgaaggcgggagccctgtcctcatttgaggccacacatccttccacagccagacccctaagtcaggcctctggggcggctgaggcccccagacaaaggtgttcgtggagggcagaacagggcggatcaggagctggagactgtggttgggcctcctcttctccccctagcttgctgggtgcagggctgctggtctcatcctcagaggattcagctttaccccgataccataggccaaagaaactctgtattttggactccgggggtgggggatggtctcccttgtcatcggagagcaggatccatgggccagcctcatcctcactgctctctgcttcctctggtgtcncctcgtgcc

SEQ ID NO: 212004 - DNA, 825 bp, Homo Sapiens
  misc_feature (773)..(773): n is a, c, g, or t
  misc_feature (782)..(782): n is a, c, g, or t
ttttttttttttttttttcacagctaccttttattcaacatgtcctgtgtgccagctccatgctggtcctcatagacatcatctccaagcccacaacagccccgcgaggtacagccattattatctctttactgacaggacaccaatgcccgagacgcagtgactcgcccaacatcacagcgctggggagaggtgccgctgcacctgatccccactctgctcacctgtgtggcaacttcctgagaaccctcacccagacctgcctggcaccttgagtccttatgaccacattccaagatcctccaaagctgatctcaagccatgctggacccggggccagcagccagcatgcacactccaggctctctcgagaattgacctggccagggaggggctggctccgtcccccgaggcgtgcttggtggtgttcaccagtgctccatcagtcaaggcctgaagccttggtgagggagtcgagcagctggaagtaactatacttgaggtcgtattccatgtcataccagaaattcactgcgatgcagccctgggactgctggacgtggtggaaccacagagccggcagatagagcatctcaccggcccgcaccgtgcagcgaagggcctgggcctgactgtaactagggtaccgtgctaggtctggcgccaaggggtccagtgggattcagggcaccttctccatggcctcttcatccaccaccttaaaggtgccctcttcagttagctggtaggttgccggcgtgtacagctcatangggatgaangggcggtcgctgggcggatggaacaggaaatgttctctcctga

SEQ ID NO: 212005 - DNA, 700 bp, Homo Sapiens; identical to SEQ ID NO: 44155
  misc_feature (616)..(616): n is a, c, g, or t

SEQ ID NO: 212006 - DNA, 722 bp, Homo Sapiens
tttttttttatttttttttcaggtaggcacaaaagagaggatttttatatccctttattaaatgcctactgtgtacaaggtattgtgcactaaaaaaatctgaaaataatttcctaagaacataaataactaaagacaaatgagcatatcacaagaaaatacatgtaaaattagtgaaattagaaatctatgtctcagagataaaacattcatcatttgatacaatttaagtttggaaattttaatatatttcaaattggacaagatttttcagatacatattaatgacagtagtagcagtgctcaaaaatgttaaggccttgaactccatttacattcctgcttacctcaggctgcattaagaaagagtcctgcatgtgatctcgaacctccttcaggaagcttggatggctacctacctgtttgtattcactgacacaactttgacagcaaaatcttttctgttgaccatcaatcaccagaacattatttccagcacctttactgggcaagtactctccacactgttcacagcaattcattattaaaccattggccattctatatctattaaagcagtggtcactgcacagcttatgagtcatatttttaaagctgacttcatggcgaatctcagttagtttaccacagattgtacatcttgatttatttagagctcctttagtaggattctgtttgtcttcatagagagataacaagat

SEQ ID NO: 212007 - DNA, 768 bp, Homo Sapiens
  misc_feature (743)..(743): n is a, c, g, or t
ttttttttttttttttttacaaccaaatgttatttaatatcttaaaaagtaacacaatccaaaatggatatttcacacaacactacataaacaacatgaacacagtatcaccatagggagggactttcaaatatagacttacaaaaatccctgtccttttttttcttttaagttattatactaagcatgacaagtaatcatcatttacagtatggtacactgacacgataaaaaccatgttacaaatgtgctgttataaatcagtaacattagggaagacatttcatgaactgtaattatttcatatgaaatactatacaatataaacagaacatccatcttggatgacctttacagcaaccagagaccaagtaatttaaaattttttttcagtgcaaacacattttattcaaggcagtcttggctgcaaaactcctttctaacatacagtaaatcccacttgcacgtcttaattcatttaccctaatgcaatagtcacattaagtcactcagagaaagatacctgcagaattatgatccctttaaacttgacgtttaaatttaattctcttctagaacgtagtatctgtgtcaactgctctaaggactttaatttgtagctgtcaatacttgcatgaaggtgaccctagggcagctctattcctaacccagcaagtgtgcacgatactgcacagtgttctgcccttccaatgtggaaaccgtggcggtgtgtcagtatctangtgggagaatggaaaggaggacctc

SEQ ID NO: 212008 - DNA, 694 bp, Homo Sapiens
  misc_feature (671)..(671): n is a, c, g, or t
ttttttttttttttttttacatgttttgtgttctcatttattatcatttttttctgtacaaatctattatttctagatttttgtataacatgatagacataaaattggtttatctcctccaaggcagtttgtctttttctattcctcccccttcaacctgcgtcacaaaagaccaagaacagatgtcggaaaagtttttttttcttcagtattgtttaaaagtttcaatacaaaataagttataaataaaaggcttgtatgtacaaggctcctcagagggaatgagttgtcttcaaccccatagaatgatgtgagtccaagctggctctagaggatcacagcccaagtatcacaggcctaggtttaaacaggaaaataattagcttaaattgtattctagtcatgaaagatatctgataaaagttgtaatcaatgagaattctacacattagatgaggtctcctgagtccagtttcaattagttcagtagtgtagtttgtcatgatgaccgcccctctttggcattgctggacctctgtcctgcagccttcaaacaactgccctgggaaccatcagcatcaatagtcttcaagctaagatcaaatcctgtagatgaactaatcaaacatcctcaccatcaggaaaccactgaccagaaagattgtattcanactcttgatagcctggagctttt

SEQ ID NO: 212009 - DNA, 667 bp, Homo Sapiens
ttttttttttttttttgtactttccatgctatgcaaatggaattttatttataaaatatcccataagatagttctaacatatccttattcttcctttcagcttcatgttatacatccagaacacgtgcattatgtagatgaaagagtacataatagcacttaaaagttaaaattatcactgttagcctaaacaacaacttaggtataaaaatccagacctctgctaatttactacaaattgtacatcttgacttattaaaaactccttttttaagattccagttgttttcacagggagacaaacaagatgtactataaaattcttggaaggatttgcttgattctactggaagaatgacattagccttctttgtagatgcatctcaggactatgatgagttgcaaattctccattctgaaataagtctcctgccacattcattctaccagggttaaaaggtcttactccagtcttggtcttacttcttgaaagactggaagtggagaaatccaaatcgttggttttgtttttagttccaggaagtccccattcgataaaacaggaagactttttctctgctcctccatttgtttctatgtcctcttcatcatcaataacaattgtctcacttatatttcctttctgagatgcacatctcctcgtgcc

SEQ ID NO: 212010 - DNA, 671 bp, Homo Sapiens; identical to SEQ ID NO: 48368

SEQ ID NO: 212011 - DNA, 764 bp, Homo Sapiens
ttttttttttttttttgtgtttagatagttaacatttattaaggtcttacaaagtgccaggcatattctacaagctctacatggctttatacttcatttcattcttacaacaagccctgagatagatcttatcttaaaatttccacattctaaaacactctttaagcggggggcggggggagcagaggaaagtgcataaaatataaatttacagcttaacaaattattataaagcaaatcaccataaagatcaagaaacagaacagatcagaactccagaaattcccataagtccttgcccaatcacaacctctttcctctctccaaaacaaaacaaaacactctcatgacagttttagctgttgctttcttactttcctttatagctttaccactcaaatatagatgcccaaacactactgtttctggagctttatgtaaatagaactataatgcatatatccttctatatccagctcattgcccttacaattatgcttctgagattcaacctggttgcatgcggcatcggttcatcattctcagtattgtgttacagctttccattctacgactttacaagaaattatccttttactgtcggtggacatttggactgtttccagttggggacaattatgaaaaatgttgctaagaacatgtttttaatgtctcctggtacatatgtgcacacacaaggtatatatgtaggagaggaattgctggctcatagatggtgtatattttcaacttcactagataca

SEQ ID NO: 212012 - DNA, 721 bp, Homo Sapiens
  misc_feature (680)..(680): n is a, c, g, or t
ttttttttttttttttatcaaattggcaaatattttatttcctaaagtgagaaatacacaagcatcacttgtattataagcgtacacttcattttaaagatcctgtttaaacaaaatgctccccagccatcaagagacgcacacagcggtcgtccacaccagcagggccgccagccatggggcctcaggttagcataagagccgagcctcagcctgatggatggcacctgcccgtcagcggtagccacacttagaaaaacactcaggtccagccccaggtgtgagtcctctaacaccaaagcacagactcatcaggtgtgaggacgcacatcaggtgtgaagaacacactggaaggttcccctttgaaggatctaaggaactcctctggagatttggaaactgccagcagtgagcactgtcacagcggctactggccttgctgctccgtgggaggaatgtggggtctctcctgtgtttcgctctcctaagcgaggcctcatctgctctgacaccacccacaggacctttagcgtgaaatgacttttctgacttatcttcaagatcgtctctgcccctggtcctggttcctgcttttgtcgggcttgagctaaaagcgtgtggtaacacaaaagccaaggttctgaagagcacagagctgggaagggcgcgccctccctgngtggcgcgggcagggcacgtacaggtgtgcagacactcggt

SEQ ID NO: 212013 - DNA, 563 bp, Homo Sapiens
tttttttttttttgttttagttctaactcaagctggttccgctgcctggtgagctcctcgacttccagctgcagactgttgatcttgtctccaaagtcctgtttgaagagccggttgtccaactcagcagattggcggcttcgctcagcctggcgcaatctttgttcaagttgtttaatggtagcagccatctgattagtcttctcttccaagcgactgtttagttcacttttctgttttactcctaagtctgaactctgcagcttaaaggcaagttcatgcttgagagctctgaggtcatccagctgctgccgaagagataccagggcatcctgcttctcacagacatccttctccagcatcttcatagccaattccatctcctgcctcatgctgatctgcatctccagttctttctcaacatccaatcgtaattgtgtctcttcttttaaatgctttcttgcttcacttagtgcttgcccttctgcagttctgtcttgcttgggacccttccgattggattccagtatgtatgaactttcctctttaactcgttccatttc

SEQ ID NO: 212014 - DNA, 641 bp, Homo Sapiens
ttttttttttttttttttagaaaaaaaccagtttattaagtaatatcatataaataacttgttacaaaaattgatttgcaaaaggcatatttactctttgtgagaaatcactttttaaattgcattcttttcaaatttataagtctaagaaaacaaaaccaaataaaagaagccatttcaaggagtgcgtatttgccatttgactgcaacaaaaggcccggccacactgagctaaaaggtaatactctcgaccccattcttctaacacagaaaactttctcaggtaaactgtggggttatgagaatccccctaactagaaatgttgatgggaactgagcattgcttgctttcatcaggtgttcttgttgccaaagacatgaacgatactgaggaaaacgacaagagtgagcattcccgccagtaaatcttcaagggtggcatccgtttcaatttatacttggaagtatttttaattaaaaacaatcaataccaaaaagcttttattttgtgggtttaaaagtcacaaatcacagtgggagaatgccaaattgctttagcttggaactactgaagacgcacatagcatttattataaggcctactcttaggcagttcactctcaaagcaatgaaaataatct

SEQ ID NO: 212015 - DNA, 699 bp, Homo Sapiens
  misc_feature (683)..(683): n is a, c, g, or t
ttttttttttttttatttatcgtttagtctgtatttcaaactgatctttgtgtacaggtttatctgttggtctgagaattcacagcttactacaaggaagctgagaattgcttggtgccccctccccccccgactcctctgtcctgggaaacgtggctttgcctcccagacacgtgtcagatgccagctctcctcagcggagcctcctgatccctcaatttgccatctgtctgactcgcgtcttcccggggcgtggggcgtgcttgtcaggcaggcgggcgggaggaaggaaggaaggagatccagggtctgtctgggtgcagaggccttcctccacctctcagggggtgttatgagagtaaacagatggtgctgataccagcaaaggactcaaactcagctgccgacgctgcctaacggaagtcagcctgtctcggtggcagagggttgacaagagggttgactgccagctcactctggccccggggaggaccaggtcaattcagattttcccatgacacatccctgacgagtagttttgttaagggtgtggcagaagcctccccccacattactgtttttctaaatgaggcctttctaggccgggcccacgcctgcttaacccactggtgatgtttttcagaacaagaacctggactggttccccggatgcgggcatgtcncttgtcagcatcctcg

SEQ ID NO: 212016 - DNA, 495 bp, Homo Sapiens
ttttttttttaccataatgagtcttaagtaggttcatgatctacattggggcctgggattatttttttaattttaagtttgcaccgtgcctggcctgcttgttgttttcatctcatcctgatttccaaatacaggagagaagctgaattggtgttcactaacaagcacaggagctttgttatatttacagtgtcattcttggcaaaacctgaagggtgtgttcgtggggtgatgaggttcagtcacctgtgatctgtgcatctggccagcactgtggtgacatccttaggaatccatggggagagagaaagcattcaggagttagtgggtcacgtttgacaagggccaataaagaaatatgcaaagacaaaaaacaagaagaacattgtcatattttctaccttttgtttatataaatttatatcaatgattttagcttatgttaatatgcaatgtatataatatgctaacatttacaatatatgtttatagttt

SEQ ID NO: 212017 - DNA, 593 bp, Homo Sapiens
ttttttttttttttttttaattctgaaaaataattttatttcataggcaggaaacaaattccagcagtgtatcacttactcctttccaacccttcccctctctctatgtccacaccatcacttcagttgtcaatgacctcagctgctactcaaggaggaaattcattaaaaaattacccacacttctaaaaatcaggctacaattgtgtgtatgtggctgcacagcagcaggcaccaggttacagcattgccacttctacgtttgtcatttttacaaaaaagaagcaaagtctacctcccccagaaaaaagtacctgaaccaattagtcacttagccccttcccagcctctccgtgctcaccagacctgcctcacctcagcagcacacgtgtgcatatatctgtgtgttctgtgcattaagaaccagcaactctactgcctctttcttgaagtaacatcttctcctttcttacaaaactcgctgatttctataaacgtaattctctgaaagcaattaccgcctagaccagaggactccgttactctaccaagcttaagtctggcttgctttcttctatttctgtacatgttgt

SEQ ID NO: 212018 - DNA, 710 bp, Homo Sapiens
  misc_feature (654)..(654): n is a, c, g, or t
ttttttttttttttttttagtttttagcttctttattcatttgaacacttcaatattctgtcttcttcaatgattcccccttgcccgtattttcagctggaacagtttctcattttccctatttctgaacactttcaggggcttccttcagtgaagcccaacacacaaaacgtccctttcagcaaaatctcagcggtggtgctaagggactaacacagactttaaggtcacaaaaccattgttttaacatttttctctgtttcttttctgataatgatgacagttctgtctctattatatttgctgaaacttactaggacccagtgatactagctcatcctctagagagaggtcccaagagcattacaccagatctcctacgaagatgtgggatttcctctaggaaaaggtgtgtatccaggtaatttactaagccagaagctgctgtgattctatggcagccttatctcttatgacacgtccatttactaagatttggtgatctggatgatggcacagagtgctgtactaaagcctgccccagatggtgggtgtgcatgtcatcagctatgataatgggaaactggctgatggaaagagcacagctccgatatgtgacacaatggaaacatttgggcattagaaagacttcanattatgacttcgccactaattaattgtgtgattcttggatagttacttaacccctg

SEQ ID NO: 212019 - DNA, 669 bp, Homo Sapiens
ttttttttttttttttgtggttatcaattttagtatttattgaatgatggaagacaaggaaaatatctctcaaactccaaaaacaaatgttgcacctttgctaaatgtaaaatgaattttgagatatttgttttacatgacaatgaacctgtccaaaaaataatgcaaatttacccaaacggtgctagtttattatttacaaaaatgctcttatctgccataagtatttgggaaaaaactgttttacactcaggaacactaatgaaataccttaacgacaacttaaaaaataaaatcttccctaccctcaatgaccaccactcgagaaaagttacagaatgcattaaaaatgaatatatgcggaaacaaacataattatttcccacaaacatacacacacaaaaacaggcacatgcacacacacaaatacagtgttgtgcaaaatcaacttaatgtttatttaaggtcaacagccttggtgacaaggaagataatgaatatggcttcagtaaagtttgcaagtaaatatcacaaatgttaattcttttgctagctaaccagctatcctgagtatggaatacgtattatttagatagctaaaaggttataaacaaaatggaggggtagggagggggaagcactgtagcagattccactgaggtaccttag

SEQ ID NO: 212020 - DNA, 791 bp, Homo Sapiens
  misc_feature (743)..(743): n is a, c, g, or t
  misc_feature (750)..(750): n is a, c, g, or t
ttttttttttttttttttgggtggtattttgtttttaatctccatagtgtatttgttaagtttatttataagcagatcacttcactatttacagtacatgagcatagagattctacagtttctgtgatgtaaacaataaccccacagtgggagtttgagaaaagaagccagttctgaagtatttacagacattaaaatagaactttatactcacagaataataatacatagagcaatttggttaaattatctaggaaactatagaatctgacaatgtacaaatacaagaaaacattttctcatttagaaggtaagacagagaaatcacaccagaaataaaatagggacgatgacaaccacaataattaaaagcaaagaaggtttcctccttgcctcttacggataaagtatttatataaataaggacacaacccaacaaaatggaaaaaatatataaaaatcctctaccaattaaaaaaaatagcaaaactaaaaacttgattctcaatcattagcagtgtcctttaaaaaattaaaatttagctttctattataaataacaaagcagatgtgtccctctgtgtaggtgaaattcttgcacctttctcaataaatgcatcaatgtaattccacacacacacacacacacaaacacacacacacaggcacagacgtgtgtatgtgtgcacagataacacacacacacccccaccaaaaacacagccttacactcacgcactcanggcgtanttaccttgttagcttccctataatatgcccctacagtagta

SEQ ID NO: 212021 - DNA, 682 bp, Homo Sapiens
  misc_feature (48)..(48): n is a, c, g, or t
ttttttttttttttttttcaataaaagaattttatttctcacagttcntggaggctagaatttcaagatcaaggtgccagcaaaataggtttcattctgatccctctcctagcttgctggtggccaccatgttgctgtgtggtcatatcacctcttctgtatgtgtgcgccaggtaggcagagaaacagagcaagctctctggtgtttcttcttatcaggccactgagcctttcatgagggcctccctctcatgacctcatctagctctaatcacctgccaaaggcctcatctccaaagaccatcacactggaggtcagagggtcaacatgaatttgtggggatacattcagtccataataatatacataaagttattcaaggccctaataacataataagccagaacttggatatcagatgggtcaaaggctttcaatgcttaggaggcatattctgcttaaggcaatggtgtcccttgaaggctatctgtttgcttttggataaaatggacagaagggccaaagtaaatactcaagtattagggttagtgatgttatataaaacacaagcacaaatagattaagattgagaagcaagattgtgagtaatgttctctcttaccaagctgatgagcccatcattgctgagagcaggggcagtggttaggctggctggtttgt

SEQ ID NO: 212022 - DNA, 589 bp, Homo Sapiens
ttttttttttttttttgtatttgtagaaaacctttaatgttccccaggctgagggagccctgtgagccagctaaaaacccccactgtgaagtccctgccatgtcccagcagtgtggagtggcatggggcttcatcctgactgtcagaggctgaagccactaccatctcctcgaatgcgactcccccagccagaactggcctgctcctggtcatccagggagggcagagagctgcgggtaccaggatgtcggcagccagggtgcaggtcccagcacgggggcccctgagacagcccattggaactgggaggctggcggttctcaatgaccaggtcactgctgtcatcgtcactatcaggctcagcaggcccaggccctgcagagggaggacctgtcaaacgcccagatgcccctcgcaccacgttattgcgctggttggcgggcttgacagtgacaatgaggttatggctgttggcaaccatcatgtccgtcacttggtccaaggtcttcccggctacttcaatgccattgacctcgaggatctcatcactgaccgccagcagccctgtactctcagccagaccccacgt

SEQ ID NO: 212023 - DNA, 783 bp, Homo Sapiens
  misc_feature (738)..(738): n is a, c, g, or t
  misc_feature (765)..(765): n is a, c, g, or t
ttttttttttttttttttgacattctataagtttataaaagaggatatatggatgaaatttggttaatttcagaaggcacctcaaggctaaaggctttttgtacttctttcatcaatcaaaaagttaacacgcttttattgctattcaagtagcaaaggaaaactactctcacaaacttcagttcaacaaagaagaatcaccattaagattgagatatggaattgactaaaaccgaagtctccatacacgttatcaatggagcaactttcctgtgtgctttcaaattaatgaaatcgtgaaagaaaagtcaccattcgccattgtgatgttaatgtgtcattgaagatttcagttactacactaggcactgaagtaccattctggagggctgtccactgtatagaacatttatgaatagaaggtaaggacactctgatgattcccacgaactaggaggattggtggtaggtccttagatagagcttctaaccatgccatgtagagagcactagacacagcaccttttcgtgcaactgggagactcatgacaataatattagctgtgcttgaatgttcctttaataactcatttaacctgatctgccggtatgtcttggtcttaataagttcaagctcattatctgttattcgccatggttcatcttctttcattttatctgcaatatcttgctctttatcatcttcatgaagtctgtatggctcaatgatttcctcanaagctataatattttctttcctttggntttggtatgatatctcct

SEQ ID NO: 212024 - DNA, 435 bp, Homo Sapiens
ttttttttttttttttttaaatattataatattgttattgcaagaacaaagggttacccaagtgctttacaaatgaaatgctgccttgaggctaaatacaaattcaccatagagcattcaagacccagagagaggagtaattctcctgtggcagggactttggaggaagggggctataccctgggttgttgaacttcaggtcccattgctaactgatgaacacataacagataagctccaaaatctctcttgtgcacaccctgaacaccaaggaacaccttggaaatactagtgccatctcattagtttttattattactagatagacacatcaacccacaaggttataatctactatatatcatgcactatagtcataatttgtctcagcaagatttaacaacataacaaatagttttatataatcctcgttcc

SEQ ID NO: 212025 - DNA, 772 bp, Homo Sapiens
  misc_feature (511)..(511): n is a, c, g, or t
ttttttttttttttttttcacactttacagagtttgtttaatgtacttttacagttttaaacacatttgcagtaattaacattttttccttagcaaactgaagcattatgtagggctttgggaaatacatgggggatagctatatatgcaggcatgcacccatgcacacgtgcaccgtgctcaagggtagccagggagagccagggtgtattgggggaggatggagatggtggtctgggatgagttttgccccagcacacttccaggagatatgctgcaggcaaagccaagaggcaggaatttgtgagtcacagtggattaggtgattcctgaaacctcaaggagtttccccctctctgtaactctgctcgatattcatcctgtaagatgcatgcctgtccctacctcagatgcacacatgcaactccctcccagacaggctgaccatgccctcctctgagcccccacctcatcccctactcacttctgctatgtctcacccatcatgtanggggatgtcttcctctacacaattggaaggcagggacagagtcttctccctgttatcaccatcccctagcagtgcccaggacatagatggtgctcaatgaatgctggctggttggttgaatgactgtgcctcaaggaagcccatgtttggggatagatgaggagaattctgccagatcgatgaccgcaggaagaagctggtgagtgggcacggcactgcccggggatgcttgctgctgtgtgcctgtgtgggtcatgctca

SEQ ID NO: 212026 - DNA, 744 bp, Homo Sapiens
ttttttttttttttttttcatccaacaaatatttattggataccaagtatgtgcttggcactgtaccaggccttagggacacagaagaagaagtatacagcagtgtaaactgacatttcttaaccactatataaataaaccccactttactactaatgtgacatttcaacatgttatacctgataagacatatgtaaagagggcacgattttgaggtatatagcttctttttctctacaattaccatgtgatataaattcctaaaccccttcaaatagctttataaatgaagagcttccactaatgaaaacctcccaaaattacagttcagttttagggagacaaaggaaatgaacttcgggtataaaaaacaaaaatgaaactgggtatggtggcagacacctgtattcccagctacttgggaggctgaggtgggaagatcacttcagcccagtcgttcaagttccagcttgggcaacacagcaaaaccttgtctctaaaaaaaattttaataaaataaatagcctaccctattactatacacatcaagcataaaacgggcaacaaaactcaaaaagaactttagattggaacttgaaagtattatttattctaaggcttacagtattatagttccagaattgtgggagtttttttttctgagaaaatcatttttagtaattattcagtattacacactgaagtatttagggtttacggggaatgatgcctataactgacttt

SEQ ID NO: 212027 - DNA, 733 bp, Homo Sapiens
  misc_feature (724)..(724): n is a, c, g, or t
ttttttttttttttttttcagttaatttagaaagtttattttgccaaggttgaggacacactgtgacacagactcaggaagtcctgatgacatgtggccaagatggttggggcataccttggttttatacattttagggagacataagacattaatcaatatatgtaagaagaacattggttcagtggggagggagcttccaggtcacagataggtgagacacaaacagttgcattcttttgagtttctgattagcctttccaaaggaggcaatcagatatgtatctatctcagtgagcagagagataactttgaatagagtgggaggtgggtttgccctaagaagtttccctaagcttgagttttccttagtgattctggggccccaagatattttcctgtcacagttgacatccccaacacagtgtttagggctcagaaaaagataccctaaaatagggtgctttggcatgctgagtgctttgaataaaggagactgaagggcctcagaaataagagaacaaaggtctatctctgacccactgctgcccacctcccttcccttccaaagcacagggagggattttctttgaagttctcttatttgattaagggaagtttctccagaaggaaggtaattgtcctggacccccttcctggaatctacatcgatcagagaagttaactcatattgcaggacgggagaatattaaaagttgctcangacagcaca

SEQ ID NO: 212028 - DNA, 665 bp, Homo Sapiens
tttttttttttttcttttaagacagaaaaggttggctggatttaaaagcaaaaatgaattcaaattgtgacttttatgaagcaaatcctactttcaactgcacaaatcactcctttgttagattttcagagtagatggtaatgtcactaaaagctgtttacagcccagcaggtgtgttttggtttaaaaggatgtgctttccttttaaactcgagtattcaattaccttcccagccgcagggaaagtgtgagctagggaccaagcgagcttcagaggcagctctgaagatgcaggcaggagggagtggggcagggggagctccacaaggaagagcaacaggggagccaatgccttggactacgcgggatcagtctccttgctctcttcagaactgggaattctcacgacagatgcaccctcgccaatcacgcaggactgaccggggcgtcggaatcgccgtcattctagatgatctacaccttcccggtgccagacgcgccctcgccacaatcacgcaggactgactggggcgtcggaattgctgtcattctagacaatctacacctttcccagtgccagacactcacggagcaaaacaatgtgccgcctggtcatcagttatttgccttttgaacgttaaacgctggtttagagtgacaggctc

SEQ ID NO: 212029 - DNA, 601 bp, Homo Sapiens
  misc_feature (559)..(559): n is a, c, g, or t
ttttttttttttttttttagttcaatatttattttattaagaatacagagaaattgacagatgatagataaaagcagtactaaattatcccatgaagagaaaacttcctgaagtttaaatataaaataaaataaaaggcagaattcttgatgctttttctgcattttatatctgtaccttatgtaacagtgaaggtttttctgttgtaattacttcttatttttcttcacttcacaacttttttcttggcataattgcttggcttttcgttcatgatgcagaatttccttgggaaacaggtttttctcatcaaatacagctttcaaagttttaaaaagtgacggggcctccggaatttggggacgctcttcctctggttctttcctaaagtatttctcagggtctagaaggaaagcaggtttattcacttcaggcagctcttccagggctccaatgtttaatgacctaaatgtactgaatgatttttttataacttcaccataataaggtttttgtgtttctttcatgcaggtacttctttccttatattttatatctnaatttatatcttctgatggtctgacattgtatgcctcgtgcc

SEQ ID NO: 212030 - DNA, 588 bp, Homo Sapiens; identical to SEQ ID NO: 55683

SEQ ID NO: 212031 - DNA, 527 bp, Homo Sapiens
  misc_feature (46)..(46): n is a, c, g, or t
agatgaagtctcgctctgtcgcccaggctggagtgcagtggcacantctcggctcactgcaacctctgcctcccaggttcaagagattctcctgcctcagcatcctgagtagctgggattacagacacctgccacaatgcccagctaatatatatatatagttatttttagaagggacagggtttcaccacgtgggccaggctggtctcaaactcctgacctcaaatgatctgcctgcctcagcctcccaaagtgctgggattacaggcatgagcactgtgcccagccagcaattataaatgtttaatgatggtttaattaagctgttttaaaaaattcaaattaggctagtaaggtgggaaattttggggtttgttccctaagcttcattaaataattcaaataaacggtactgacaatctagagaataagcttcatctatcagaaaactgtatcctgataaaactggatgaagaaattaatagcacattattgtcacaagttcaaagttaaaagcatttaagatc

SEQ ID NO: 212032 - DNA, 641 bp, Homo Sapiens
ttttttcttcttatattctactttatttggtaaaactcagaaactaacaattcacatcctcccaccttcttctttccgaagaaggcagtttgcagagacaaaagggctgtggcgtggggatcatccaccatctccaggttttacacccaggctacccatggcttggcagtcaggcctctaggcgatgctctcagaggcaatagaagaaaagtaaaaggaaggtctcacttcacagacaatgaaaccctcctaaccctcttccccactacccacaactccctacactgccaatctaaataaaaagaggacaatgcatgagtgtgagatacacatacacacacacacatacacacacacacacgcacagcttcctttcagccaaagaactgcaaaatccttccccggaaggaggacaactggcaacaccaatcaaggcttggtggtctaaggtgatggctggaatcatgtgagactggtaaaaatccagggagaaaatgtttcaccttcagctcattcccaagtctctatgaagcccgccccacttccacataggggaactgtggctctgggggcagctggcttagggaaaggcctcccatggccaagaagacgatggtggagaggagggggagggcagcagg

SEQ ID NO: 212033 - DNA, 413 bp, Homo Sapiens
tttaacgtttgcaaaggtttatttactgtcagtgactgctacaggggaatcggatgaggggagtacatgctgaccaggaaacagagtgagggaagcctgaccaggacgcatggcaatgggaaaagcagatgggagatgcttatactggtacttggtgtgtgtgtgtgtgtgtgtgtgtgtgtgtgtggtgtggtttgtgtgtgtgtgtaaatgcagaggaaaaaatctgaaattaaacactcagaactgccctcagtagtcacatctagggagagaggagggtaatgctgttccatgcagaggtaactgacaatacttgttttctaaggtaggtgcatggatacacaaaccaaaatatgcattaagtatgtcttgctcatcagtgaaaatgttaatatctaacagaatgacac

SEQ ID NO: 212034 - DNA, 486 bp, Homo Sapiens
accatcacagtgtctgctgcataaaaagtgatttaaatcaggaaaagtaaattccctatttgatccaaaacaacttggcaatagtttttacattttgttctatatcacaggtcctttttctacagccatcaattcacactcccttgtttgcaaatctgaaacccaaaaagctctaaaaactcagatggcagcaaaacttgacccatttagtgtacacagctacacagcacagctgtcatatatttcactacaaaaacatcactgttacatagtacagccccagtctccacggggggtgttttgtaatatatggtagatgtacagtagcccccattattcacaggggatacattccaaggtcccccattatgtaagtggatgcctaaaactgcggacggtacctaccctatatatgttttttccaataatacataccccttataaattttaatttataaactaggcatagtaagagattaagaataa

SEQ ID NO: 212035 - DNA, 486 bp, Homo Sapiens
ggaatgtactttgagaataacagcatttcaggactggttttgtttaaagtatacccagcccccctccttattttatttgatttttggtttaaataaaaatgtagcaaagcactctttgaagtaaaagtacctgtcttttcttttttctttttttaaatcatagtttgttttacctgaaagttgagaaagaatgcagtataaatatagcttttctctacacgggagcagggggaacagaaccaatccccagcttagccacacccaacatcatggaaattactgtgaacctgttgtctcttgaggacaactaaaaccaaaacgaaatccctaacattattaaaatgttaggaaacttttcaggtaattgctgtaactctggtaaaatacagaaagattacattcactcataataaaaatcaagtgtgcccacgccatctgcaaagggaacttgcaccatcttggtttcactcgcattgttaacagtgc

SEQ ID NO: 212036 - DNA, 1000 bp, Homo Sapiens
tttttaaaaaaaaagtccataccttaataaacagtatatcaaatatgacttaatcttgtagaatcaagattttacaggtagccctgtagcacttagcccacttttcagagaagattaatgacttgtcattggtgtcatcttgtgacgtaatggcagatcaaggacttgaacacaattctactaactcttagtagagccgactttccaatgtacagtaatgcctcaggtttttcatttcgtgtcttattttactgtacaactgatccagaagagagagcaatgtgtgacatgggataatcagaatgacttggaagtattgagaaatggcaagtttgtcaaatgcatgagacttgtcctaatccagttaggcagttctttgaagcgtttgaagaaagtattaatttgagatacccataggaactgttaaaagtttgcagtaccgtttgaggttgtaatgaaaggttcaactattctgcgttcctaattgtcttcggttttgtgctttgcttctagctttcagttcttgctgcctatttccaccggctggtcttatagtcagtcccctgcttttatctattgtctgctgttatataggacaggcaaaactgggtcaacactgtctctgctgcttactagtttgtgactttaggcaagttaacttctcagagttttaattttattatcttaaaactggagtttataatagttcgtactttatagcattgttgtaaagatgaggtctttttaaaacataacaactagaactactctcaaagttccaaatacaaatgctattttctgtttctagtaattttcctgttaactactcaacatttaggtgactgttatagctgcagaagcacagtacgcttagagctttaggaagtgtcactaataaactatgatatctctaattaaatgtctataaattataaatgtctctaataaaaataataaagtaaatcttataacttacaatctaacaaaaaaaaaaaaaaaa

SEQ ID NO: 212037 - DNA, 1000 bp, Homo Sapiens
agtggctggtttgtactattcacttatgaatgatcaccagcgtctccctggattgctcctgtatttgttttaggtgtacagtcaggttctagagatccaaagtagttggtttcaatcattttttcccactcaatggttgcttgggtggaagtacttatacctagaacttcttgccacaccatttcgcctaaagtctctgtcttcatctgtattttttcttttttaaaaatttgttatttcatctgttttttttatgtcagatttacaaggatcttgtaactttaaaattataaaaataaatgttcggtattcttgtaatttatttttacattaaattttttattaaataatttttaaatttaagactttatcttgtattaacgtttatgtatgatgaggggtaggtggctccccaaatttttatttttatgttggaatttctttcggtgtgagacaagaattcaaagtaatatttctcagttgcttcccagttgttttatactacttttctgaaaaatttatataccctattgaaatttcattgtatactaaattccttgatatattgggtctgtttcagactttttttgtctgtttggtccgtcttttcttattccctacctcactgttttatttattgtagcttcataatatgctagtttcttctgttactcatctctttttagaattttcctgttcttggctgggcgtcatggctcacgcttacaatcccagcactttgggacgccaaggcaggcagatcacttgaggtcaggagttggagaccagcctggccaacatggtgaaaccctgtctctactaaaaatacaaaaagttagctgggcatggtggcaggcgcctgtaatcctagctacttgggaggcggagggacaagaatcacttgaacccaggaggtgaagtttgcagtgagccaagattgtgtcactgcactccagcctgggtgacagagcgagactccatctcaaaaaaaaaaaaaaaa

SEQ ID NO: 212038 - DNA, 1000 bp, Homo Sapiens
aataactttaggttgtttaaagtgaggatgttctaaatgataatatttgtgaagtcctctattttgatatttttcacttaagatcagtgatttagaaatcaagtgaaaatcttgttaccatttgaatgaacatactgatattaataaaatgataagtattttacatgatcatccaagttagattttgacagaatgcctagggtcttggagtaaccagcttttggcagttcctggctctctttttcatattcaaatttgtaaagaaagcagaggagagtaaatgtgtgtaggtgtcttcctcctggaagtaggcacaaactgcatggaaaaccaaccaaaaaatggtaacagaaaaatatgataataatttatttaaaaataaaattcttagactttgtcataactagaagactatctagaattgtgaatgaagtaaggaccccaaataaagacgcatttctaattctcatatttctggcccatgcagcaaatattgggtatgctagatggaagaaaaggtgttcaatatataacatcctcttccatatctcagttttgattctattaaaattaatacaaggaatatagcagaatactgagaaacaaacacatttagtctgatataggggatgcagatgaatttgatttatattcatggcagttgagccttctaatattgaattccagagttagtgcggaagcaaagaatgtgtgctttctgtgagtgattcctaaataaaaagaacagagacatatgtttttaacaagtacttatgtgggattcataaaattaatttttatattatcctctcccctatcaacaaattgttagggacaccatgtccgtgttttaaatgtttattaaaattgcgttgtattttaatctcaacaatatcaatatagatttaatcctcagtcatgtgtgtcaacttttgtgaaaattaattttattttctttcactggcataagtttaatagttattgaaaaaaaaaaaaaaaa

SEQ ID NO: 212039 - DNA, 1000 bp, Homo Sapiens
ggtgggcctcattcaatcagttgaattcttcaagagagaaaaactgaagtcccttagaaggaaagagttctgccttcagactgtctttgaacttaagactgtagcgtcgactcctgccggaatttccagcctgctggccagctctgcagattcacacttgccagcctccacaatcttcctggatttgaaactgaagaagcaagcaatctggaaatgtcagtggatgcacacaaagaaacaaccgcaaaagcctgctcgctctagccaagggacaagaataggggcagtccatcaagacagaatccttttaaaaaataaccactccactccagcaataccacagaagaatctggctgtaccccaggtacatcagcaaagataacctttacctagcagtaaagaggtcccccttacactgggagccctagtgaagagcagggactttcacccccacctagcagtgatggggccccacccaccacagtgccagcagagaccatgtgggagccagaatcctcatccctacccagcagtaacaaggagccctcctcactgcgggcatcaagggtgagtgagtgcaaaacctgggtgtcactcggaagggaagaatggtgtctccttccttcccatcccctgccagagtgatatcactaggaaaaagaaaataatttatcaccagcaaatctaccctacagctaaaacagagggcttaagttaggcccagaatctcatgacataatatgaaaatgtccagaatttaatagaaaatcacttattctactaaaaatggagaggatcacacaatgggtgaaaagacaatcagtgcatgccatacaaattgacagagatgttggaattatttgacaaaggttttaaaacagcgatgaaaatgcttcaataaacaattacgaacacacttaaacaaaggaaaacaaagaaagcctcagcaaagaaatagaaagcctcagcaaggcaatagagatataaaaaaaaaaaaaaa

SEQ ID NO: 212040 - DNA, 419 bp, Homo Sapiens
gagacgtagcctcgctctgtcacccaggctggagtgcagtggcgcaatcttggctcactgcaccctccgcctcccagattcaagctatgcttgtgcctcagcctcccaagtagctgggactacaggtgcccgccaccatgcccagctaatttttgtatttttagtagagatggggtcttgccatattggccaggctggtttcgaactcctgacctcaggtgatccacctccctcggcctcccaaagtgctgggattacaagtgtaagccactacacctggccgaaatgatcttatatgtagaaaaccccaaagatttaacacatacccaaacacaaaagtactgttagaactaataaatgaattcagcaaagttgcaggacacaaaatcagcacacaataatcagttgcatttctatac

SEQ ID NO: 212041 - DNA, 414 bp, Homo Sapiens
tttgagacagggtctccttctgtcacccagactagggtgcagaggcatgatcacggctcactgcagccttggcctctagagctcaagtgatcctcccacctcagcctcctgagtagctgggattataggagtgcatcaccatgcccagctaacttatttgtatttttggtagagacagagtcttaatatgttgcttcagctggtctcaaactcctggactcaagtgatcctcccaccatggcctcccaaagtgctgggattgcaggtgttagccaccatgcttggacttggaatttcttatatatcaaataattcaattaaaagtaagatgataaactaaatctgggagcaggtattgcaacctataatcgtcaacaatgagtaaacagaatataaaaggaacatctacacatc

SEQ ID NO: 212042 - DNA, 542 bp, Homo Sapiens
tttttttttttttctatccaaagatatttattgcagcgtggttttcaatactaaacaatgtaaacaatgcaaatatttaacaataaatacagtgattaaataagccatggcatatccagttgatgtaatactttgcaaccattaaattgatgtttacaaggagtttatattgacattggtgatgctaatagcatattaataagtaaaatgtatggcataaaattgtatttgtgtgaatacaattaaaattgaggcatgctttgaaaggttaatagaggaaagtacacatatgtgaatagtggttttatatgagtagtagaattatagacaattttttctttcttcctgcattttcaaatgtaatttaatgaatagctattactttcaaaaatgtaagacaaattataccaagaaaagaaagcattgcttctagtttaaatgcaaatatcctaagaaatacaaccaattatgagctgtcagtacttttcctaagagcaaggaaacagaacaaattatgaatccacctgagttcctggagctgg

SEQ ID NO: 212043 - DNA, 561 bp, Homo Sapiens
gccgcccttttttttttttttttttgagcttcacatcagatttaaactctcacatacaaaaccttggcttccctgacaaggcagatcttctaaactcaatgtgagaaaacgttatctaactctagtgtaggagtctaatgttggtaaaaagaattccattgcacagttcttggtagcaagacagtctctggacgacttaatattcctttaatacatttttgggtagcattctcctcataaagaaggatacattaaaaaaaataacttgtttcgcgactcggcatccataaggaactcaaatgctgcccagagaggggctgagtatttccttccaagtgagccttcgcttgcacaacaaagattagcatctgcaatggtccatttctgcataagtgaacatatagccttgctgcttgatcgaatagtccagggttctccgtgtagcagctcctgacaaccacccagcagcagttctgtttgatctctcctgcttccttaatttgggttgtcaaggttcagcagttggaggctgtttactttacttttccaaaaaaaaaaaaa

SEQ ID NO: 212044 - DNA, 651 bp, Homo Sapiens
ctttttttttttttttaaatttaacattactcacctacaaacatatccaatgcaatgggatataaaggttttagtaatataatcccagcagagtttttatgattgtctcatggaaaaattaaattgtggaaatacggttctgatttgtggttcgagtcagttcaaggcaaattcctggtgactgctaagtacttttccagatcaaacattaggcccaattaattaacatttctaaatttacagtcacatgagtatttatgagcttcaaaaaagtgcgctcacttttactttccctgttaaagaacataaacgcatatgccactgattcctaaggaagatctctttgccagggtcttgggaagatttttgttcaaacagtactacccccctgccttctctgtatcccagggaatcgtggaattatgagtcactactaatagcagtgtgtcaaacccctccaagaatgttttgagacccactgggccttttgcactagaaatatataggcttcatggataaacaacagaacaaggattcagtccctcaccaactttttccactgactgcaagggtgaaacctgtgttccttcattcacttagaaattccacgaatgcatattcactgaacacctgctacaggccaggcatcgt

SEQ ID NO: 212045 - DNA, 584 bp, Homo Sapiens; identical to SEQ ID NO: 58356
  misc_feature (448)..(448): n is a, c, g, or t
  misc_feature (460)..(460): n is a, c, g, or t

SEQ ID NO: 212046 - DNA, 535 bp, Homo Sapiens
ctttttttttttttttaaagagacgagtctcgctctgttgtccaggcggaagtgcagtagtgtgatcatggcccactgcagcctcaacctcccaggatcaggcaatcctcccaccttatcctcccaagtagctaagactacagttgcatgtgaccatgcctggctaattttttttttttaaatttttagtagagacgaggtatgctgctcaggctggtctcaaactcctgagataagcaatcctcccgcctcagcttcccaaagtgctgggcttacaggtgtgagccaccgttgccaggtatttttctttcttaatggtgatataacatgcctgaaaggaaaaatcatatggtgaccattattagagatgaaagaaattaagtaacaataatacaaagactaaatataatcgaattgcagcatttagtacagaaaattaggctctttgaggggaaaaggcaatcactctaaaaagccacttacttacctgaaagaaccacttccactaggtctccttcatgtatttcatctgctg

SEQ ID NO: 212047 - DNA, 559 bp, Homo Sapiens
tcttgcttaggtttacaggtgtatgtgaaaatagacctgagtcttttcaaagttagatcatttttctgatttcatcttttaacttttggcaatacatttgttttgatatccaccctacttggtagagtgtaagtacttccttacaatgttctaatgtaaaacagtgcataggagacctttctgtccttggttgcccaaaatctttttcatttctactaaattcagaaatacatatttttactagcttatgaaaatttggaaaatagcttgacatccttttggataatgaagtgattagttcatatattgaagtatataaaatcaactaggaagtaaattcaagactgaaggaatgggagagcttgtgtgagttttggttgtatcagtccagaatatgtaattttccatttccctgaaaaagacttcagaggaaatttattttccccactatacgctccagaatgtctttcggtgaaatgagagggcttgggctcttctgattctagacgtagctatcagagtttgcttaatgaaatatgggtctactcacaaataaagc

SEQ ID NO: 212048 - DNA, 393 bp, Homo Sapiens; identical to SEQ ID NO: 40029

SEQ ID NO: 212049 - DNA, 552 bp, Homo Sapiens; identical to SEQ ID NO: 50648
  misc_feature (460)..(460): n is a, c, g, or t

SEQ ID NO: 212050 - DNA, 606 bp, Homo Sapiens; identical to SEQ ID NO: 53304

SEQ ID NO: 212051 - DNA, 569 bp, Homo Sapiens; identical to SEQ ID NO: 43051

SEQ ID NO: 212052 - DNA, 648 bp, Homo Sapiens
  misc_feature (469)..(469): n is a, c, g, or t
cttttttttttttttttttagtaatacaaaattatttattagtaaaaaaggagacagcatttgttcgttatacaaaaagtaaaacaattgaaagtttcctacaaaaatttaaactatgagcatacaaagtaggagtggcgctgtgaccgggtctgaggacttcatatgaatgcttagcatcagaaaattggaaatagtgacatgtaaactgtgcttgggatattgtgttaccaagttgcatattttgcagtgtcatctagacgtggtagaaaaatagatatacccatgccatgttctgaattactgtaatttctattaactatagcagatgtcacagtttgtttccctcttatagaaatcactggtggcggctgctgagggggcaaagtccacacagtctgtgctcgggtagaagtactctgctgcctggagagcatccaagtcctctgcctcacacgatgcgcagtancagatggaggtggtggccgaggagaagcagctgtactgggcgtgtgaggacaagtgttggtaggaatggtcttctggggggtagccacaggttctggtgtccagagaagcaggggaattgtaattctctggagcatatgaaggcagctgcactggcgagtaactgtagtctaaggagcc

SEQ ID NO: 212053 - DNA, 519 bp, Homo Sapiens
agacagagtctcattgtgttgcccaggctggagtgcagtggcttgatcttggctcactgcaacctccgcctcccgggttcaagcaattctcctgcctcagcctcccaagtggctgggaccacaggcgtgtgccaccacgcccagctaatttttgtacttttagtagagacggggtttcaccatgttggtcaggctggtctcgaactcctgacctcgtgatccacccgccttggcctcccaaagtgctgggattacaggcgtgtgccactgcgcctggccgatcactggcctctttgactgtaggcagatcaaggacttgtgcccatctccctagggaattagggccaatacgagaaagcagatgagaagggccagagtgcgggactgccttcgggggatctgagctctgatggactcatggaccatggaaaacccttctgatcagtatctgggggacaggagaacctgtgttatgcggtgggctagttctccactgctctccaagcctaatggggtgaa

SEQ ID NO: 212054 - DNA, 529 bp, Homo Sapiens
aaaacgggaaaacaggtacagacaatagctgcctggagttgtacagaaacttgattgggtaaccctggacctttccaggctgtggccagcagttgaccctgcctgcctttcctccattgttttcccatgtctgaccttccctgttgcaaagcagtggcctactacagggtctctctggagggagcaaggaggctcagtggccccattcagcaattcgaagtccctttaattgttttgtgcttccaacctgttttgttcccgttcagatttctctcgccttccaataaaaacttccctgtcctgtgccccagtccctcagagtccacaagaggttcaacttgctcatctgatgtgtgaattacatcacacagttgaatgagaatttgttaattacaacagaacttttataaatatgtcacttactgtatccaattgtacaattgtccatgggtggcttaatcccaccatggcaaataagcgtctgtttatgcaaccctaatcaagtgctgagaaagatcaaaactcaact

SEQ ID NO: 212055 - DNA, 402 bp, Homo Sapiens
taacagctgtggtttcaagatgtctggccgcggtaagggcggaaagggtctaggtaagggtggcgccaagcgtcaccgtaaggtattgcgtgacaatatccaaggaatcaccaagcccgctatccgccgcctggctcgccgcggcggcgtcaagcgtatttctggcctcatttatgaggaaactcgcggagtgctgaaagttttcctggaaaatgtaatccgcgatgctgtcacctacacggaacacgccaaacgcaagacagtcacagccatggacgtggtgtacgcgctcaagcgccagggacgcactctttatggcttcggcggctgagcttacctctacagtacactaccgcaaaaccaacggcccttttcagggccacctatccactcaggagaaag

SEQ ID NO: 212056 - DNA, 585 bp, Homo Sapiens; identical to SEQ ID NO: 48993

SEQ ID NO: 212057 - DNA, 730 bp, Homo Sapiens
  misc_feature (662)..(662): n is a, c, g, or t
ttttttttttttttttttcatccccaaaatgaactgttttaattttaaaaagtttaaaaacacaatgacaatgaagcactgatatgccttaggaacagtcccaaatcagtgctgacttaaagctaagtcctctctttccaagaaaaagaaagcagagaacaaagttcaatctacaatgggagggaacagaatgaaaacaaccaaaagggtgctttccagcagcctaggttattctttgttttcaggccacaccactggaaatgcttttcttcttatataagtcttttcctcacaacctttattttttaaaaactgccatctgctgaacaagagatgtccacatttccaccagcaggtgatccacttctgtgcacagtttttgcttcctcactgtgagtcctccttccccgaaagtgcaaagagagcaagctgatacctgcaggccccagagccccaggactattccagctccacttataaagcagggtgaaggatttgctgcatttgtgcttcaaagatccagctcactttggttgtccttctcagttggcaaactgctcataaaaagcaaacttgatcctctctatgtgatggcaaagtttgatggcagggcccaattttaagtccatgcattcttgaacagcgggaagggtaaggagcancagggcctgcccatcaatttcctggtctaggaatattcttgctaatggagacagtcagtggatctgat

SEQ ID NO: 212058 - DNA, 683 bp, Homo Sapiens
ttttttttttttttttttagaaatatagaatttatttatattcataagacagtttcacattctgtacatggttaccagaacagatacaatactctcagtagtttacaacggcattatattgctgtcaaacattgcttatgctgtgtgagttggggaaaacttatttccccctctaaaaaaaattaaggctcagtttccaaaagataattatatcagtcatttttctgtttaagagactgggaaaattcgggaataaaaagcacaaaggggtggagggtgaggggtagctccacacactctcattcattcatactgaagttactcaatgtgattttttttttttttaaggctccttctatctgaaaatgtgtttggttacaaaaacaaacaaatcagtagatgggaggggtactaggtacagatctacagcattcaaacaaggaaaactaagctctttgttaccagttgctggttaaaatgtggtctacgagctgcctacatataaatgcgcacacacattaactttgactcacttttctttggcgaagcttactgaatagtatttctcttccaacacactaatgacactaatttacatttccttttgactttcagagcaggtggccacaaagttgtcccttttcctaaatacaatcctccatttttccctttcaacttgcagt

SEQ ID NO: 212059 - DNA, 749 bp, Homo Sapiens
  misc_feature (671)..(671): n is a, c, g, or t
ttttttttttttttttttaacacttaaaaagcaggctttattcaaatgcaaaattgcatgttacagggtaacctttcagtaagaagccaggaagaggagctcatcatgggttggattagtaaaggactagttataaaagaagtggtggggttgagggaggcctgagatgaaatttaaagaatatgtagaatctaggtaagtggataaaaggtctgggggcaggggaaaggagagcatttcattgtgaatcaaggaatttctccacctgttttaactcttccatatgacatcaaagagatgtcacttgcagctagcatttcagtgatgttttcttactaataatatcgtgataaaagaaacattgactataagaaataggaatgggtctcataaaaggaaacagcaaaacccccaaactaaaaaacagcgcaggctatttctctcttctctccttttgcttggcactcatgagatgctaggtgtggaagtcagccaactgaaaaagagaggtggctgaagaaggtggggaggctgaagccagttaaataggatggtccaattcacagacggcgaggctacagtgcaaataggactctttcaacttgagcaggaccccattacttcactggagttagaaagaaaggagagcgtagactttttgaactttctantagagtgtacctccacagtatacagaagacgacgtgaaatttgatctgcaagaaactgagtccatatcacatatgtat

SEQ ID NO: 212060 - DNA, 771 bp, Homo Sapiens
  misc_feature (738)..(738): n is a, c, g, or t
  misc_feature (740)..(740): n is a, c, g, or t
ttttttttttttttttttattatctcccacattgacatttattaataacatttctggcaaaaacaagtaacaagttcaataactgaattcacatcaacaggtttcattttgatccattagccaatttggaaaaaagccatattgatcaaagggattaaaattaaaaagcaccttttccttgctacatatagattctttaaactaaaactccaagcagggatcagatacaaaacccaactgcaggattgtttttattgactatgacatggacttgttgcttacatttttttaaagtcatcatttatacagttatttaaactctattgggcagaaaactgaaaatacaattgtgagaattatactccatagtaaatacctatgtacttaatactgaattcttgtgtcactgagaaccttaaccctactctaagacatcttgcgataacctgcaactatcaattttttggagacatttttggtatttcggtcaagtgctgaaggggttttactccaaaatctagggctagaattcagcttccaacactctcatacccaggtaacacaattatgaatattcagaaatcaatacctcttagatcatcaatgtttcagagctatgcctgataaatgacatttgaaaaataataatatagaaataattagctgaatttatactcctgaagccacttcatctttaggctttatatttacagtgttgtccaggaggaactaaagaananagtacactaattatttgtcaagctctattcc

SEQ ID NO: 212061 - DNA, 680 bp, Homo Sapiens
ttttttttttttttttttgggcctgcatggagtgttatatttcaaggtttttcacaggggttacagtaggacagtccccaccccaatcaggcaccaggataaaagcagggacttaaacagcaccccggttcttcagcctgagccatcacatgctatcagtctcctaacctccccctgggccttaagacagggcttgggcagagaagataaatggtgggacaaaaaaatgagttacattgccacctgagaaacctcagaggggaggacccagccttagcctccctcctcccaagtgcaaaatgtgtaaacagagtaaacggaacagaaaagtgcagtctaagtggttttctctcctgcccctcccaccgcccctccccccaccccctattatttggggataaagaatataaagacaaccctggcttttctattgccttgttgcttgctgaatataaggaatggggtggggcaggaaggggcttgcccttagccacagctctacggctgtgcctcattcatttccacagctgccagtgtccctagagtttatcaggtgaattggtcaggggatcagtctccctcgagcctgacttacggctgggacagccccatctttctgttgattatgtggcgcatatatatatatatatgtatatatatataatcctcgtgccgaattc

SEQ ID NO: 212062 - DNA, 728 bp, Homo Sapiens
  misc_feature (657)..(657): n is a, c, g, or t
ttttttttttttttttttgaagcactgttttaaaacaacttctcaaatttatttaactcatgtggttaacatggtattgtataaaaagaaaaaaaaaacaccactcaatacttactaagccttgcagacagctcagagttgaggcagcatattgggcatagagatcataggatttgtattatcccttgcaagatggaactccaaccaacaccagaattttccaattcaaattcagttttagtcgagaccccagcataatttttagaaaaaagattggattgttgcttttcttttaattttccattcctatttagacaaatgaccagaggcaatgacaaaagtaactgtttaaaagggatttctctccagaagttttttctaaaggtttaagtccaggctttccatccttctctccatcctttttcattttaaaaagaagggttttggaatatgtcaacctttactcagcttgctatacaaagccactgctttagtcctagacataatgccaggactcatctcccaaacttctggtcttaatcaagttcatgcttggttgctaaagaagctcatgttaatcccaaagtcagcacaatcccaaccttaaaaagcagacagctgattgcatcacttacgacatacaccatcttgaggcanaagaagccagtcagacaccccttgtctgctacgtgtgagacacatcagcagttgagcctgacccttccgca

SEQ ID NO: 212063 - DNA, 720 bp, Homo Sapiens
ttttttttttttttttttgttggggcaataattatttattttaaatatctcagaagctttgtgttaatagaaccccctcccccaattttcatgagcattaaacattcaccattctcaaaacatgcatgacatacaatttagatttacattgttttaatcattccctttcaacatgaatttttagattctataacattaatttagaggataccacaccaataagaacttaaaaactgatgtgttgggtttatttcacagtccatgtctacaaataaaacatttacctgtattaataatttgtaataaatttattaatacactgtattaataatttgtaataaatttattaatacactgtattaatattgcctatttgttggtataaatccaatgttctgggttattccacaataatagttgctaacacagtcccaatgctgagacagaggttattttatatagttaaaaatagaaaagttatcttgcagtagattaggatctaatttataaatatatacagtctctggcttttattctattatgttttgctttggctacatgcagaaagcattttattcctattgttcttgacttcgtctgatgcacaggtattctagttggtaccttcaggctttattttacccaactatggggaataagatctttgattatgctgcctctctttacagctacttcgcctattacttttccaaagcttgg

SEQ ID NO: 212064 - DNA, 766 bp, Homo Sapiens
  misc_feature (695)..(695): n is a, c, g, or t
ttttttttttttttttttctggctccaaagatcctttactgagatccacttgaaacacttcggtccttaacttgttaactgagttgacaggctgatggctgatctaggtaaaggtttcacggtagcaaaaacacttcctgcctataatacatcaaaacaggttcctgaatgtgtgtgaatatcatcaaggtctctgtcccatcttcttcagggttcgattaagctcctcaaatttgtggatctgacggatgaagaaatccccataacgcctggcgaccttggtgtccgcgatgtggatcatgtccttatcaatgtagaagtcaacctctgaggctgactgaaattcaccatccagggctgagataccgctggtccacacgaggttcttcatcttgtgtttgaagacaagaagctggatccggaactcctgctctgtgaggtccaggaagccagccagcttggccacaggcatggtggtgtagagcttcaggaagctgcggatggttgaaagctgggcctgctgctgtacttcatcagaaaacaccttcagctgctgcaggaagggctctttgtggtagttggggtgcacattatcatagttgggcactacaggcgacaggaacttggggcaggagtaactgaaaagttcttcatagacttgtgggtcacctttctgcatgcgcaacatcttgtcnccatatttctcccgcagctggaggtgaatgctctcatcaatacgcatggggtacatcgtgagggcaatggc

SEQ ID NO: 212065 - DNA, 721 bp, Homo Sapiens
  misc_feature (710)..(710): n is a, c, g, or t
ttttttttttttttttttacaagggaaaacaatatgtttattaagagccatgaaaatgcataaactcatttgtaaataaatgtagtataatttacccagtgaaaaaatagctaaaatccatgagtaaactggattttatatttgaaatgattttacatatttgatctccagtgatttcccctccatcatgatctactccatcaatgactatagaaaaagttgttaccaacaatcatcataccggggaagtttttcaagatgctctttcaaacagaagcagtgcaaacaagttcagatggcaagggatacgataagacctggagcttatcttcggacacgtaaaaaataaaaatcccaaacatgtattccttaagaaatgaaaaagcagaacaacattttgatcagtgaaaaatattataaggatatataaaacattcttaaccagtgatcgcaataattacatttataaatgttcattcaagtactattgttcaataaacattcaaattctcattaaaagtaacactagatgtagacacacctggacaacgcttcttttgatttagcaacaattgtgtcaacaggaggcaagtgacccttaaaatactgttgttggctctgttttattctgtttgtgaatgatttgttcacagtctgtatgtttttttctgcaaggactcgagaaatatctcacaacagctaattaaganatcatttctat

SEQ ID NO: 212066 - DNA, 723 bp, Homo Sapiens
  misc_feature (663)..(663): n is a, c, g, or t
ttttttttttttttttttaccaacaaggacgttttattgaacaaatctatgtacagtacaaaaaatttcttgaaatgagacactattgttgatttattgcagttcaatggctcagttttaatttgtactcttataaaatgcaaagtaaaataatttaacattcaacaaggaagcacaaatttcctttcttgctgaatctgtaatatctttcacatattaacaactccaaaatgcatatgcagcatttactcattctgaaaaggtgttttacagtaccaaataaattaaaaaataaacactatcatcccttttaggtttttcatccatacaacagtattaaaccaaacatgaaaggagtacggctgaaccttcagtgtgatttgaaaagaatcacaagttcaatgatataaattatttaagtattatataattggtggtttcaaaaaaatgaatatggctaaagcccaaagtaccagtgtccttgtccacggagattcccctttttacctcctccataatatctgagcagcaaaaattcagatttgctattttcttcaccttactgacacacagcagaaatttaacatttaattttttgaaggaaatttttatttaaaaacaaagatttgaaacttggtccatgtaggatgaatacatcctcanaacagaaaaaaagaagaatctgaggaataagaagcaagcttccttttcttctgaagcgct

SEQ ID NO: 212067 - DNA, 737 bp, Homo Sapiens
ttttttttttttttttttgaagctttctagaaagtctttatttttctgttatgaataattgcattttctaattatcccaaatgattttataaattccgtaacttttatatgcctgcctgggatccatgaaataaaagtattccttaccaaaagagaagcatcagatacactgaaaggctcaatgttttatattttcagaaataaaagtgactgtatacccttttattaactatatggtagcttggtaaaatttttatagaatttttaatgatctatggtgttctatgatgaggcaacattccaccaaattagccttccaaaagttgcagtatcatgtataattatgacagcagttttgttttaaaaccagagtcagattgaatgtagcttttttacagctgaaatttatgccttatgtgtattcataaaacattgataacttagtgtcacattatctttactctttggttatactcttcttgaaaagtaaatttacttatcaaatgataaagtttcagggaaagttaaaaaaagttttttttcttaaggcttcatggaatagaattccatgaatcataatgactacgtaagacccttttctggtaatgaaagcatggagtcttaaccaaaaagctaagcagaattgttagatcttttggtttctgtcataatgtactattggaacttcaagtagatatagtacattaatatgaaatactttgaaatacaccatcttt

SEQ ID NO: 212068 - DNA, 724 bp, Homo Sapiens
  misc_feature (688)..(688): n is a, c, g, or t
ttttttttttttttttttgggagaaattattttttaatgtaaattatattgtgttctatttgtttccaatgtcttgaaaagttcaatcacttctccaaattctccgaataaacataagaaaatatctctccccagcactacccggtcccccagtatcaccatcctaaaggcacttccacttcctctatcatcagggaaggagtgtgcagttctgatttagctcctcagtggagtaaagggaatttagaggaagggggatttctgcagaaattgtcagttacacaagtaagttcctcttggttccccgtttcatcaaaagtgaaaaactgttcacaggagtgcccatgtcccctgtttccctatgcatcactagagccaagaggggactccgccagcaaggcaccctctgctctgtcccgcagatcacagtccccgactttcaccccattgtttgtgcaatgtgcagaactggagcccaaagcagcgggctcaggatcactctccaggcccggcgggcccatagactccttccttggctgggaagaggggctttcgtgaaagcagagcttgacaagccccagtactgtcatggtcaagatcaccaacactactactgctgtgctcacaaatatgaagaccacggcagaggaggagtcgaaagcctgaggagtggcagaggaagtcgtanaattaaacttggaaatcacgctccctgatggggtga

SEQ ID NO: 212069 - DNA, 675 bp, Homo Sapiens
  misc_feature (24)..(24): n is a, c, g, or t
ttttttttttttttttttctgtanaaataacatttataaaaaacaaaatgaagttgcaaatgaaattatgtcaaatttacagtttctttttttaaacaaagggtcaatgtcatcaacattatctgtaaatcaagttatcatcagatacatttaataattaaatataaatatgacaatggatcaaaaatgatcccagctagtttaaggattaatctcattaatcccacaatttaatgagaccatcccaaccacatgttatgaccttagaagtttcatgaggatgccacactgcacctatacacactttatcatgagctttaaatcgactgtagagttttgtggtcttccagtcccaaatgtttaattttccatttccatctcctgaaatcacataactcatgtctggtgaaaagtccacctgacaagcatagcctgctaccatatggcccttaaaaatttttttcttatttaatctaaatctgttctgtgctccaaaaattaagatttggttgtccattgattggcatgctagccattttccatttggagacaaagtcactgcaggcattgagtgcatactgggttctgctatgtacttgaaatccacagggatatcccattcccaaactcttaggcttttatcatcagatgtgctcacaaatctcctattctcat

SEQ ID NO: 212070 - DNA, 708 bp, Homo Sapiens
  misc_feature (630)..(630): n is a, c, g, or t
ttttttttttttttttttgtttcatagtcacacattttattacaaatttattttttacccaatagaaaagcaaatttggaatctatttacaagtactatatatttacatatatacagttaatgaatttaaagaaaatgggcagagaaacacaatataaatcaaagaatatgccactgtacaaggtttattatcattatcatggtccttaatgttactgaacctttactatagtaataaatacagttctatatttacacatcttataaaacatctcataaatgtattttttcaaatccaagttaaaacatctgatcaaaataaacatgcttatataaaaataaatctacctaacagccatttggtttggatgtattgaagctaatataggataatagaaggtaagaattaatactttgacttttcttatttaataacttgcttcttaaaatacctaacacagtattaatatggaataagcagagaagtaatgttcctaacatcaagtgggttatccagagagaacacagctaaaaccaagctaaataaacaggataatacgttactgagtctcttgagtccaaagtggtgtcagatattgggtttgccagagctactagagatacatgtgntagaagttgtatcagtggacttaatttatgtaatgtgcacatttgatcattaagatgcacatcagtttgaatcaactg

SEQ ID NO: 212071 - DNA, 687 bp, Homo Sapiens
ttttttttttttttttttaatacataaaaccaatgggatattttattataccttcttatttaaaaagaataacatgttagtatacttatgataattgtttacattaattatctgtattcaaagaatcttggcagatctgaaggctttcccatactgcttacattcatagagtttctcccaagtgtgaacccttccatgccgttgaaggtgcgaggcacatctgaaggctttcccacattgcttacattcatagggtttcactccagtgtaagtcctttcatgatatcaaacggaactagaatacactcatagggtttctctcccgtgtgagtcctttcatgacattgaaaagaagtaaaaggaatgaaggctttcccacactgcttacattgatagggtttctccccagtgtgagtcctttcatgatatcgaaaagaactggaaaatgtgaaagttttgccacattgcttgcattcatagtgcttccttccagtgtgagtctattcatgtccataaaaggaaccaggctagctgaatgctttcccacaatccttacattcatatggcttctctcccatatgagtccttgcgtgtatatgcaaggaagaaaaataattgaatgcttttccgcattccttacattcatagtgtttctctccaatgtgtgttcttgcatgtatttgaaga

SEQ ID NO: 212072 - DNA, 726 bp, Homo Sapiens
ttttttttttttttttatgaatgaaataaagatactttatttattacacaggcacttggagattcacatgcccaacacatctgatacacttaacaactatggaaacacgagtggaaaatgtctgtttgtaggatcaagagagaactttcaccatgtaaaggtaaatgagtgcattaacaatttttcctttactttcctctaagaattttcaaaatccactaaatttttaaaagttacacttgaaataataggcaacaaacactgatccacattccaactggtaggctaacttgaactgtgagcaatttaaacttttatcacaatgaaacatatttatagtcatgcttgaacagattaggttagtagcatgcattccattctgcaatatgaatattgttaatctatttcccaacaaaagtcaaaagatgcccagtgcatagaaaaatacaaatcactgtagtcaatatattacgggactgatcttgggacttacatggtgatgatgaagtcctgaaatgccatgcccacaaaagcacattaaaaagtggataaacatattttatcagacaatctctaaaaattaaggatgagagctttaaatttggggatgttcttgctgtgtgctttgaacagggcctttctgctcacctccttctggcttgactggtccatcagacatcaccttccctgagggctagctggctttggtcttggttgcattggctg

SEQ ID NO: 212073 - DNA, 717 bp, Homo Sapiens
  misc_feature (713)..(713): n is a, c, g, or t
ttttttttttttttttttcacttgacaattttatgattaaaaccaacaaatggaaaacagacagtgttgggtgttgctgacataatcaagcatttcgtgcggacccactcaaccaccccatttcttggatctatttctggatgtaccaaatgtgtctgaagatgaactcactttcgcacatcaaagatgtatccagtgttaaacaccggagccagaacccaggtgaaaatctgctggttcagggcaacaccacttccggctttattaaacactcaaaagtcaggttcccaagaaacgcttggatctatgcgcaagtataacatgtcaaaactgttaaatgtgaccatgagaaaaatgacatgagcatgtttcatctttgggtagagggtggtggttttctgggaagacactgtctgagacaccgagtagagaagtcaaatggaagacgtttagcatgtgcttaattcttgcttgataagaacaagaaatcccggaaaaggtcacccacagaacggtaagcaaagtccccagtgaacaagtttgaggtggggcttagcagtttgtttacagttgtggaaaactgttttagtcacttggccaaaaaccatatgaggggaggcaacctgaaaccctagactacttgactctccctgcatttttctgctagaagcaggataaaaggcctaaaattttggctgcatctctatttatgntaca

SEQ ID NO: 212074 - DNA, 746 bp, Homo Sapiens
  misc_feature (619)..(619): n is a, c, g, or t
  misc_feature (732)..(732): n is a, c, g, or t
ttttttttttttttttttaatgagacagaggatttttatttttttgtttaggagggacaaacacaaagctcattttctatcaagttaaaataaattagactaacaatggaaggctcttcctttcttgtaattcataattctatctggaactctgcctctccctttcaacatcattttgtcaggatagacatgaactgtgccaaaggcttggctgtctggagctgtttcaataactccttctaggttgacgtggtatacaccaaaaggatcctcagagtagccaccatcatgggtgtgaccagcaaagaaacacaccacacactcatgagaccaaatgactgccagggcatctctgtagttccaggccaggcacacattgtcagaggcgtccgggtaaatgggaagatggctcacaatcaccaccttttcttggtttgtgtcagagaatgttagcacttcattcaaccagtttagctgttcttggctgaatcctccattaaactggacaaactggggctcagaaagtccttaattgtccatcttcctgctgaataaaaggtagctgaagaatttaaagacaatctattagattctcagctcaaaggaataattcaccttngaggactattcagttccgtatttggattgtgctccctcaatatcttcatacactgctcgtattttggagaaactgatccacgcccaagaactcaagtcatatgcatcaagtanaatgaaccggaatt

SEQ ID NO: 212075 - DNA, 765 bp, Homo Sapiens
ttttttttttttttttttgagtttttccaaagatttattgaagcagaaccaagttggttggatacttgctggaaaaaaaaaagcagttttaatagtattcaaaataccttttaaaaagtattctagcacaagatttttctgtaaactagattatgttgtaaacttttttctaaatcttgtaggagtgtcggttgttaagaactagagcttattcctattccaaatctatcttgcgctcctgaaaaactgcagaaaggcacttgaaagctgtttctttaagatatggatttcttttttattcttgctggtaatatattgctgcactgagtgtgtgcaatttttattcaaggtcatcgtgatgctgagaagtttcgttgataacctgtttaaaaaaaaaaaccaaaataaatataatgccacatgccaaagactaaattatcctatatatcacggcaaataaaaatcctgctaaatatatgtaatttattgtgcaaatcagaaggttatgttgcttctgcatgagtgaaaactagaaggggcagacacacaagaccctcttccactacaggcaatataaggatccagtggaatgttgtaacttacaaaaagaaatttcttaaaaaactgtgtttataaaagatggtataatagttgtacacaatacagccaagtttaaaagcaattaagacatattaaaatgtgcagcaggtacattttaaatttatgtgcaagggaagattcatgatgactacaataaatgcaact

SEQ ID NO: 212076 - DNA, 661 bp, Homo Sapiens
ttttttttttttttttttaaaagagcgtttaaaatgaattttattctttgaattttacaggtagtctttagaggcttcaaacaagaactctgttgcaaaactctaataaatagcttgccccaagtccccaaacaaaatgtaaaacaaaatgagaactaaactcagaaggataagcaagacttcagaatgcttggatgttagcaatatttctcatttacaaagagatatcaggcaatgtacaatctccttcatacaagtcaaagagagaaagagacagacaattgaaatcttcacaaagcactccgaaatcttcctatttccatgatagaaatgtcaccagaaaaaaaaaattccatggagaaatcacaatcaagaatgaaactgtagcataaaaatctggtagtgaatgtagcagggagaagagaggaaaatccatcctgtttctttcagggatggagagaggaaggaattgagattacttgggtgagggaacttccaatcagatgccgctagagtgctgaatgttcccttagaccagagttgccactgaaagggcagaggggtcggtttagtgacagttatgaaggcaacaaacaaaggggtctcctcaggtcagtcaacactggccagccccatgtctctgtgctctacagcagccttg

SEQ ID NO: 212077 - DNA, 773 bp, Homo Sapiens
  misc_feature (489)..(489): n is a, c, g, or t
  misc_feature (753)..(753): n is a, c, g, or t
  misc_feature (755)..(756): n is a, c, g, or t
ttttttttttttttttttgacagtccataggttttatttacattgctttgagaaacagacgaaagacatgtttttttacaattgtcttacagcaatctgttctgagagtaacatgtaacacaaatttttatatgcaatatatgaaaacataaatatttatatatacaataacataaccagacaaataaatgaagttactattaagtctctttaagtataaatttacaaactgaccaccagccacagaacttagccctgtaatggagaaaaattattactggcttaaaaaaatattaaaatatcactgtcactaacatgaaaaaaattaaaaacagaaaataaaaaacaataaccaccggaaaacctgtgtcttgtaaagatttctttccatcagaagatgcagaaacatttttccccctggagcaaatgaaaacgtttctcatgcaccccccgtttcttccctgctttctcccccaggcgcgggtgtanacggccggtgtggacttttttccagagatgagaagtaaaaatttgtactttatcgggagcgggtgcacttttccccctggcccccctttgctctgcctccaagatggtaggaaagttgtcgtttcggagggcagaggagcagctctctggtgttatgtcctcgcagtgcctgtagtggtgctgtaggaggctgctgcctcttcttgtacagccccggcagccctgcccttcttggctggagagtatattcagggatttcccttnanntatcacgaccctgggag

SEQ ID NO: 212078 - DNA, 647 bp, Homo Sapiens
ttttttttttttttttttggttttgctttcttaaagcatgtgctgagctgatgaagagagcagtttggcaattaaaaaggcccagcggcttgggcagcagcaggggggtgccaggtgagggtcaggtagtccctctttcctgggccagggagcagcaaagcccgcactaacttcataaaatataaaacaagggaggggcgaagggaagagggagatttgtaaaatacaatatcttaggggattggcaataataaaaaataaggttcattatttacaaacaatttctgttcttggtctctgtacagtgggggtggggtaaggggtgtctgtgagtggggtgcgttgatgtgtctgtttgggtgcaggtgtgggggcagggaggcagtggtcgtgttgggcatatgagagaggaggtggggtacccagtgagtggtttgtctgagaaggacggatggatgttggtgggaaggagaatgagaacagagtggtcggcccaagggaagagtccaaatgtcaggggcaaggaagggctgggaagtggagccttttctcctggaatgggaagctccaggaggcaggggcacgaggcggatccgggttagtgagcaagaatcctcttctgggtacaggggtccgtcctatgtcct

SEQ ID NO: 212079 - DNA, 601 bp, Homo Sapiens
  misc_feature (51)..(51): n is a, c, g, or t
ttttttttttttttttttattgcactcttttatttacagaaaacacagatnaagcatttcaatttcaatgttcatttagcaaactgatccactctttttttttctttttggcacaaagaaatatcacagatggaccccgagatcaatcagaagctcataagattcatcagtcatcactggtccaggggcggccacgagactcagacagacagacagcatcaccacagactggaaacagaaacaggtccacgttcacctcacagtaaaaacctgcctcaccgacaggcaagggcgggcaggagggggcagtttcgctgctctaaggggggaaatgggcgtcaggggcaggaggcagggatggggaaaggatggacaccattcataaattagagacaagtggtcctcttgtttgtatcctcttaccttgaatagtaagacagtgcaaaaactagatacccgaccactcacccattcaaaagcttgagaagtcgcctcgcgagtgcccgtgtgcgtgtgtggatgtgtaaatgtggtgcttgtaaacattgtcaccgtccgcacagagacccaacatccatgtgtctgaatggggtgggggggg

SEQ ID NO: 212080 - DNA, 714 bp, Homo Sapiens
ttttttttttttttttttgaaacatgattaattttaatgtttatccaccagcagaaaaaatttaatatgtaaatccaccagcagaaaaaaaattaccaaaactaacattttacagatttttagtatcaaagcacaatacatttttcatagaaacaaatatatcaccattataggtaccatgatatggcaatatttatatacaaggtcatttaccatttaaaaaaaaatcagtggcaatggtaatgtaatacattagttcatctttgttcaactttttgctattatacttcctggcctgcaggagtatttgccaggatacaaaagaaaatatgtgacctcaattttaacagtacatagaaagctctggctgtccatgcttaaccctacatttactacatgatcactaggaatgttttcataccaccactctgactttattacatttatttttaaggccattcccaaggaatcaaacattttaacagattcatttggatattaaaggattattttatataaaataagaagtgcaatatcagaatttaatattctatatgcctaaattaacagaaaaaaactttacagttattaagtggaaaattatttgagattatttggagttggtaatggcatagcattgaactggggaaaatgtgataaggtttctttcagttttagagtcgattatttttaaatgcactagatgattttctg

SEQ ID NO: 212081 - DNA, 728 bp, Homo Sapiens
  misc_feature (680)..(680): n is a, c, g, or t
ttttttttttttttttttacttctaatggcattgtagtcatatccacttttcaaaagatgcacactgaagtacagagggatgaaagtgcatgacattatgagatttactttaaaatatttcagcaaagaaaaagaaggaaaaaagattaatatgttaaaattctgagaactgctgaatctagatactagaactttgtattattctatattcaaaaaagagaataaccaggtggctattctgataataacaaggtttcaatatacgtataaaaccaacaagcagaatttcaattccattatatgtcattaaacaactatttaaattaagtagaataatgttacccagttcaatactgagccattgactcattcctattccttgcataaaggaataggtagattccgtctaatatgagaaagatcacacacacacatattcctacacatcctatctggttaaaattatcaacaaatacttcataaaataaaataatggtaaagatttaaaatttttattttatgcctctctctgacttacttttccatgatttttgttaatggtaacatctgacctcttacaagcactataaaatacaggactcttaaacatggtgtctcttggaagagactataaacattaataaaaaaaattacaagaagtttgcagcttacccctttanaaacactgctgacagtctgagcacaatgtgagtttttacagttcacca

SEQ ID NO: 212082 - DNA, 826 bp, Homo Sapiens
ttttttttttttttttttaaataaatattttaattctattgttgacatttacaagtagaaagcatacagtatgttacaaatatcaaaatgagaaaaatatgaatgttacataagtaacaaatataaaaaaagtattttcttaccttccctgaaagtaagaaaactattcagcataggaaaatatcagtatcaaaaacacagcttaggtgtaaaaaaagtttttacacagtatttaaaaaaaatgatctacaaaatgacaaagtaagtgttgaaatctgatttcatataaattataaaaactgggtacttagagtaaatgttatctggttggaaaataagtccaatcataagctttccttaggtcaattctttaaaatattaaaagcatacgaaaaattttcaataaataacttttaagagtgtttcttagaagtgctgctgagaacatcattcgcatagcaaggtggcagtgttctggggacaacatgcaatcattctgttcctaatggaagcctcatgaaagtcaggagactataatcatttgctcaaggatccagaagttttaagacaattctataagaaagcgttaaagtgctgaacaaaatgacttaatttcagtacccactgtcatgtaaaacttactcaaatactcagacatttctgagcaacatcaaatacagaaactatcattctgaaaagtgttaatatacttaatctttcattccacgataggagggttctttttacactttacaaggattggtttacatcaagatcttgcatgcaaatatattatatatacagtgaacataacatacgcatggga

SEQ ID NO: 212083 - DNA, 627 bp, Homo Sapiens
ttttttttttttttttttagaagaaaaaaaaaagctttgtattattcttccacatatgctggctgctgtttacacaccctgccaatgccttagcactggagagctttttgcaatatgctggggaaaggggagggagggaatgaaagtgccaaagaaaacatgtttttaagaactcgggttttatacaatagaatgttttctagcagatgcctcttgttttaatatattaaaattttgcaaagccctttgagctactgccttagtctacccactgtccttttgttatgaggtagaggatctcatgacaccatacacacaaacccatcattgcctgtgaatgcacgtagggccagaattccccagttcccgctcctctgagggttgatactgctgggaatgccaaccactccacaagcagagggaagccccctcaggcctgcaggaggagccgcagcagtgtgtccaattcaaaccagcagcaaagagcctgacattttcccatccatctatgaggaaagccatctcacagaacatggacataggcaacttgctctcccacaccaagggatgggaatctctcctacctatagtcatccctgcactcctgactttactccaggacccagg

SEQ ID NO: 212084 - DNA, 751 bp, Homo Sapiens
  misc_feature (636)..(636): n is a, c, g, or t
  misc_feature (683)..(683): n is a, c, g, or t
  misc_feature (714)..(714): n is a, c, g, or t
ttttttttttttttttttaaactactgtttaatcagttgtaaagacacacaaattagaaaaaaaaaacatgtcctaaacatgttacatgtaagttaaaaacacctttaaaaaccagcaataagccaccagtgcagctctgacagactagaaatgagtggttatgaaatgagcacatctcagtttgactgacacagtgggagttttaatttaccgtacatcaggaactaatttatgaatctgttgaaaaataacacttctttaaaaaaatattttggaataataaaaacagaaagcacagaacaccacattctattctcaacttgggaaggcaaatgtaaatactaaattctggctgctggagttgggtctctcctcatgtttgggcgactgagggctcaactactactaggcagagatcaagacaacgtttaaaggaaggcaggaatgaaatcacacattttcactctgtatatggaagaatttctcacttcacctgaatgatttactttcattcctatggccttctatcgtgccccttctggttcagaggagcagtcacataaaagtgacaagatggacaagactggtttggaacacatttgtgttcaatgtttgattcctttttccttgtgatnaagcagaggcaatgtacttcattgataaatctgtgtgcgcagaacanaaatacataaattgggaaagaggatatttanaagtctgtcaactctcacatatatttcgtctttatgc

SEQ ID NO: 212085 - DNA, 706 bp, Homo Sapiens
ttttttttttttttttttaagacatggggacttgctctgttgcccaggctggtctcgaacagctggcctcaagccatcctcctgctcagcctccaaaagcgttgggatcacaagcatgagccactatacccggtctatagtcttttattcagtgtatgcctccctcaggaaacttggtgctccataaggacaggaaccatggtgggtatagtttcgctttgttttggtggacaactttgttcccagcacctaataatagtaaagatgaaggtaacagtaatgagatcaacagcagagcagcaggagcagaaatggcagcagtggcagctaacacttgcttagtacctgctaggtgtcagaccccaaggacttcgttatgaggtcagtatggtcaacagccccattttcctgaaggggaaaccacagaacagaaagactgtgtacccagcacaacctcacacagttatcaacccgggcagttggactctcgaatccatgcttgcgactgtgatgctacactgcccttttacccagcacttaacttcacacacagaggcacctcataaatatgtattaaataaaagattgatcacacattcctttttacaatcctgaaaaatcatctccgtgtttggatgaggggaaatacaaaatcactcctctgggaatgaggcagcagaatgaaagaggtcgttctgaaaaaaca

SEQ ID NO: 212086 - DNA, 640 bp, Homo Sapiens; identical to SEQ ID NO: 47560
  misc_feature (523)..(523): n is a, c, g, or t

SEQ ID NO: 212087 - DNA, 662 bp, Homo Sapiens
ttttttttttttttttttaattcacaaaaactcacatttactttgaagagcaatttggcaatgtctataaggctaaatgtgtttattctgtgatacgtcttaggtaacacgcagtgagcccaatgcagaagaatgttccactacagtgttataatacagaaactggcaacaacttcatgccttcaactggagaacagataaattatggtagttcccgtaattgaattctgctacacaggactaaaattaatgaacgagagcttcagatataattatacaataatgagtgaaaaaagctgtagaatgagcaagtatgaggcttaaaaatatataaaacagtactaaagagtagatggtttaggttatacacagtgaaagtacaacaacacaggaatgataaacatcaaattgtggataattgttacctctggaggggaggaatggcaatgtgatctcgaagtggcaaaatgttaagatttgacaaaagtaggtgctgagaacttggatattcagtatgtagttcactatactagaaatagtacagtcacaaccaacacatacatacacctatttaagcccagaatgctgtttcaataatacattttagtgccccctgaagggcagatgccatcctaggaatttggggtacaggtatgaacaag

SEQ ID NO: 212088 - DNA, 679 bp, Homo Sapiens
  misc_feature (661)..(661): n is a, c, g, or t
ttttttttttttttttttcttttcatctttttttattttaaattacaaaggatgttgcatacactgatgaatctgtatctgactagaagtgctcaggggttggaaggtgacagaaaacaaaggcaaaatttgcattgcctttccatctgaaatgaaaaactgcacaactattaaccaacatttaataggataatttttaaacagctcatgcgtcaacaagataaagttctttctagacaagagacaagactgaatccaataaaaagtgtcatagctccagttgggagagaaaaaaaaaaaactacagaatatttatgatagcattacaaacaggatcctacgcaactatgcaaaagaggttgccacattgtatgaacaaatgctttgaattcttgcccttccactcttctcttgtgacttctgtgctgtcagccctagtatcgctgtcaaccacaatactaagctgtaggacaaatcctagggaaagaaggtaaaaaagcaggcagtggaatacagtgtcataaaaatgtggtggaaaggcagatacagtacacacatacacatttctgttatttggttctgaaaaaaacaaagggcgaagggcaagacatagtaatcagtcctgctcctatccacccagaatttaattaactacaccatntgtgtttacattgttatg

SEQ ID NO: 212089 - DNA, 699 bp, Homo Sapiens
ttttttttttttttttttgcttaatatattttattattatcataatcagtattaccatggggtcaaatacaaaataggcacttaataattttgtttgtaactacattgcaaatcacttgattttaaatcaattggaaacttttctgctgttagcacaggacaattcttcaggtatctttggactgacacagttacccctcttttttactcatagttctcaagaataaatatagaatatgctgagaatgcaacatcttaagatagggagaaactagcctgaacagcctaggttctgttctaatccctcatagaaacagcatgtccttcaacacattagcacagtgaatcatgttatgctggggtataaaacctagggtggagtgctttcttgggaccctcgactgcagtgcaaatgtggcacatgcagatgaaaccccatctgccaaactagctttcttgaggcttttacgaatcataggcttctgttgtcctatctgtaagtaatacactggcttcaggtaacctgcgtggaggagtgttctatctcactggattaagacaggttggtaatcagtagacagtgaaactgctctgtagccaagtcattctattttggtttgcatggtcttttctaagatagatagtccacttttagcacaagagaaagattggggaacactgttgaaggattcactttac

SEQ ID NO: 212090 - DNA, 659 bp, Homo Sapiens
  misc_feature (578)..(578): n is a, c, g, or t
  misc_feature (609)..(609): n is a, c, g, or t
  misc_feature (646)..(646): n is a, c, g, or t
ttttttttttttttttttggagaaagaaaagtgggcccaggggaccggtgcttactggtctctgagttccctcagtatttattgatcattatctctaccatctcggagagggggatgtggcaggacaatagggtaatagtggggagagggtcagcgggaaaacatgtaaacaaaagtctctgtgtcgtaaacaaggttaagaaaaggtgctgtgccttgatgtgcacgtgtacaaacatctcggtgcattaaagagcagtattaccactagcatgtctctcctccagccctaaggtggttttctcctatctcagtaaatagaacatacaattgggttttacactgagacattctattgcccagggacgagcaggagacagatgacttcctcttatctgaactgcaaagaggccttcctcttttactaatcctcctcagcacagacccttttcgggtgtcgggctgggggatgtcgggctgggggacagtcaggtcttacccttcccatgaggccatatctcaggctatcacatggggagaaatcttgggcaatacctggctttcccaggcagaggtcnctgtggccttccacagtgtattgtgtcctgngtacttgagattagagaatggtgatgacttttaacangcatactgccttc

SEQ ID NO: 212091 - DNA, 713 bp, Homo Sapiens
  misc_feature (653)..(653): n is a, c, g, or t
  misc_feature (686)..(686): n is a, c, g, or t
ttttttttttttttttttggtatgcaaattatatttaatgtaatattatttaatatttcattttttttaaatccacactggtagagtcaaacttattttgaacagaagtaaatgctaaataattgaagcatttttaaagcagttttctacagctttatttagtctcttactcttttagatgttttaaatataaattttcttatttcaacttatagtctacagtgctgcgtggttctttgtttaatggaaaccaacgtctatgggaaaactcattttaagaaagacacatacatatgcacaatgcatgcaaacaggtaacagggaatagtaaatatcacttctattatatttttcagtatcttctcaatcaataaaatggaatggtaacacagttccaatgcagcacacatgaatggcaacacaaaggtgaaagtatccttgcttaccatgccaaacggctgcatgtccatcccacagagttgccactgttttccttgcaccatcccataaattatgagagtaggcttctttcaatacattctttctcttataaatgtgtaagaaaataatagtaaggtagagaagaaagatagtaaagtaaggaagtattaaaagtattagtggtgtaaaaacccacaagagatagtttgcanaattcaaatagtcctccaactgctccacaccanaccattcttcgagtatgtgaatcagac

SEQ ID NO: 212092 - DNA, 680 bp, Homo Sapiens
  misc_feature (620)..(620): n is a, c, g, or t
ttttttttttttttttttgaagctcacaaagccaagatttattttttgaacaccgagtacaattgacaaatctctaacaagtttgattaagaaaaaagaaagcatgaataaacaattttagggataaaaagggaaacatcgctaaagatatcccagaaatgtaaaagataataagggaatattatgaaaatattcatgccaatacatttgaaaacttaggtgacatagacaaaaacaaaattgaccaaaattgagcaaaaaagaaacaaaatctgagtagtcctataacttagtaaaaattgagttagaaaagttaaagaagtctttacacaaatcaaacatcagactcagttttctaggagagttttgccaaacattcaagtagcagataattctggtctatttttggccccagaagatatattttacttgccatgcatttaatgagatagctgttgatttttttcaatcaccgtgacaggtgttttatattaggtgttattcgccagacatctagtccacctgttgccagatatggaattaatattcacttattttgaattaaaatttgttaataaattaataaaacaaagtcaaagttcaaattattaaaaaagtanaagaaataaaatatattttatagagagcccttacaaaacagtaccaacataatgagcttt

SEQ ID NO: 212093 - DNA, 700 bp, Homo Sapiens
ttttttttttttttttttaagtttgcaaatcttttatatttccagctgttgagacagtatttttgagggctgatgttacctctagcggcgaaaccagagccagctattaagcagccagaaagctacagtaattgaatacatgaccatttctcttttagcacgttctttgttctcctcttccagaagttgtagacgtctatttagtttgattatctgtcgtcttagtgaagctgcatctacaacagtcaggtcatctgacgttccttcaatggttgtatctatatttgaaatgccatacctgacgttgtcatgatgaggattagaagtggcggcagcagacccaccacgcaacacaggtctgcgattttcatccagcacatccaagatctgctggtatgccctacgagtagaagactggataagcgacaaaatgccacgagcagaggaaagattagctccatcttcaggtaacatatggggaggacagacccgagcctgttgtggcgatggtgtcacagtgtactccggtgcagaaatcggtgcctggaaccttgaaattttatttcttggggcagaatctgatctgtgccacagagaatcatttctgaccagctgtccattttggcgaacagcattttcactcatagaccgctctctttttagtctgccaactgctcggatttcttcattttgaggggtt

SEQ ID NO: 212094 - DNA, 724 bp, Homo Sapiens
  misc_feature (585)..(585): n is a, c, g, or t
ttttttttttttttttttgctcagcaacttcaaatctattatttacaaatctgtcacctcctactagactaagctcaggacagaggctgtgtctcaatcaccttttaacaatcagtacctggaacattagtaggtgctcagtaagtgaatgtttgctgaatgaatgattgtataataccatctaattatcataatcagtatcaactcaatatacacattgtgtaaggcacagggtttttttttttaaagctaaaaacttttaaaaaatactctgcaagtgtttattattattttcccattagaaaggaacacagtgataagtaatgttctacaggttcaagatttcagtaacaaagtagagaagggagatccaatgactggttctctgcattttacccttccacagtcagctgttctaccaggcagagattttatgatagggttaaaatattatttcagatagtcaagcattatttttctttaaatcaatctctcaaatatatgataaagaaaacattgtcatttaagaattctaattgagaggtcttttgaggattggtttttcagattacttcaatgaagcanatgtgttatctaccatcaagctataaaaaatttagaaaccaatttaaaaatactgctagcctctccctctgtgtacttagcccagtggtttatcaagctttttctaagcattctacaagcactggcaagactatgagga

SEQ ID NO: 212095 - DNA, 574 bp, Homo Sapiens
ttttttttttttttttttcttttattaagatttaatttctgctactttcttcaacaagctaagcaaagccaggtatatataattttcaagaacaaaagaataagcaggacaaggaaatgaaactactgaccacccttcaattttgttccactatttaactgctgagttattgcacattgtaaaaaaaaaaaaaaatgcctattacaataccacactaccctgttacagatcacaaaataagggagaaggtatttccatttttttaacaaaatatcaaactgttactcttaaaccagataaagagcaatacatgtgcgactaatattcataaattaacactctgaagctaactacctgctattcaaaggaaaagcatttagaaaatactgaaaaacaggtaaatctctacatcacccatatgggacagaaatgcaaagaacactacgttcctcgagccccacctggccctccactacctagaacctaaactgccctgttcaaacacaaggggaagaaactatcctagacttcactcagaaaaggagacgttgctggacatgacactcctcgtgcc

SEQ ID NO: 212096 - DNA, 566 bp, Homo Sapiens
ttttttttttttttttttcctaagggatattttcaattcaattaaacatatgagttgagtgcctactatgtgcctaccattgggtcaggcacatagcatttcaatttaactgttcgtttcgaggtttgttctttatctgactccctcattcccgcagtccttagcatccaaggaatggaccggagatactacgccatattcccagtgggagatggccgctgccacctgcccgagggaaagccattcttggacataactggtaggatttgcagctgacacaaagcctccaacttgggacaccattcctgaagagtaaagcgggagacaccctggcattgttttgcttcattttttacgtccccgacttcccttggtccaacttattccttcatagaggaaggggaacggggtctggccagaactattccagcccccgacacagggctgctccctgttcctgccagcttaaggaaatgccactcacacaatggggatgtctttctccctagaggtctctccatctgaccccatcctgagaagtggtctccctgagtgcggtgtaagag

SEQ ID NO: 212097 - DNA, 595 bp, Homo Sapiens
  misc_feature (449)..(449): n is a, c, g, or t
ttttttttttttttttttccaccagttgtcaaatgatcctttattgaaatgttttcctttgtgcttaactctgtgggaaagaaaaaaaaaatcagtaaaaagtttaaaaggattatcccaccccaccagtaaccatttccaaaacttcccagcttatctctgtgaatacactgggtggcccccctttcacccctactgtaacaatgaaaatgtcacttacggctgggcattccacagcaccactgttgatgtcatcgatgatgtcatgaggatggcggccatcaacattacagcccactgactgggcagtccccaggatctctttaatggttccagagagttctctggctaaggatcggtgccgcatctgtcgagcaatgttgacaatctcatcaaaagtgatattcccactgtgtttaatgtttttctgtttctttctgtctcttggnggttccttgagggctttgatgatcagggcagaggcagaaggcaccacctcaatctgggcctgtctgttctgaatggtcagtttcactgtaatcctcaggcccttccagtcacccgttgccttggcaatgtcatcaccaactttttt

SEQ ID NO: 212098 - DNA, 725 bp, Homo Sapiens
ttttttttttttttttttgagatgcatattttcctttattgctgaattaatgaggcaccaataatctcaaaaacacaagtcagactttattctgaaaataccataaagagacaaaaagagttagtcaagtattcttgcctgctggagacacagaatttcaatagcaccttttttaaaaaaagacatgaacatttataaaattgcagaacatatcttacatattcacatataaaatcatgaaccaataataatccggatggaaaaactgatctgtttcatcaacatcaataaacattttgttgagagtttgttccacatattatacttccctcagtatattagaagtacttcagctttctatttgaagtggttttcctaaaaataaccttttcccctgctcaggataaccagctattattatagtatacatattataataacaaggtatatgtctttgacctcatatatgactccccagttgctacaggaatagatttacttttcatacacaaattggaaaagatgtcaaatattgatgatagtatcgaagagttgtagctactctaaactgagtaaattagcgattgtacagacgagcacttcataatagttgaaggttttaaattcagttaattacatgaatatttgacaagtatgtgaatgttgtaaatattttgaccaaagtactaattttgattctaatgattgcatgttacatagtctct

SEQ ID NO: 212099 - DNA, 725 bp, Homo Sapiens
  misc_feature (521)..(521): n is a, c, g, or t
ttttttttttttttttttacatcttatagcacccagtgaattatgatatggggctgcggtttatttgctctggcgacaatatggcttacttgccgtggaatatcccggtatttcagaagtaacatattatttttaaagagggagctttgctttctctaaatcacatggtgcaaagttgggaatacagtggcctgtaaattacaaatattatttacaaactagaaggaaagctgacatgtgtttgtgcctgtgtgacagtttcactaaggaattccaaaactgtggatagcctgttacttgagaaaaatacacggtggcagtcttgcagatgtttttcccgcctgttagccctccaggttcaaaaactgtttggtgcattttaaggcggcagtctcaccagatcgcaggattctagtctaattggcttctaaccttcaatctaaccttgctggcttccttgcaaagcccggtgcaagggcctctttcaaaatgaacccactggtgtgcctagcaatcggtanaagaagcgggagggcgtccggtctgcacgcccgccgcgaggttacaatgctgaacgcatgagatggaagataccaacgggaggccgaggggatccacggcgcccgcgcgggctccggcttcctcctgctctcggcgccgctgggcgacgcccatgaccgctcttgcgggtctgtccggttgacaggcgacctgtggccggggaa

SEQ ID NO: 212100 - DNA, 753 bp, Homo Sapiens
ttttttttttttttttttcaaaagtgttctgtttaatacgctttgtctggtagtgcttgggtgcctgtggttggtttctctcactggaaccagtcctgggccccactcgcctggcttcctccagtcgccccaggtcctggggctggtgtgtcagaagctgcctttgtcctctccattcatccatccttgggcctgtctggcctatgatgccctcattcagctctcagggtccagaggtgactggtgtggatcctgctcgctgtgccaagatggccctccagatgcggcataccatccctcccctgatgcgggtgtagatgaggtcatctcgagtggcataggtgagcagagtgtggagggtgaagctatggttcaacagcatttggatggtgcctgaatccacattcagttcctgtagccactgcaccaggccctggtccgttgaaagagcagttggaggctctggggccaggacataggtccgggcttcctcattcagccgctgtagagcccgctgcaccagggcctggtactcccgttccttccccgccaggatttcgcgcagccgatcagtctctgccctcaagaggctcagctgcaccatcagaggagcggggccctgctcgggctccaccggaagcgggctctgctggcctgggctctgctgggagtcccttcattactcagctcctctgacctcggtgagaccgctccttctcccactccggtcctagcaacccagggctgccgcac

SEQ ID NO: 212101 - DNA, 753 bp, Homo Sapiens
ttttttttttttttttttcttgagccgtgatgcaaccttcttcagtgcaatacagttgtcaatcacaacaaaacgagggcatcccaagagaaaaggttttaaacctcctgctttttctagtatctgtcgagtttcttctgggaaaaactcatattctgcagagaacatcttgttactcatgtccaagggaccatgttcctccaaaaactgagagaagtaatcatatagagttgaacatttttgttttgggttcatgtcccatagcttcttattgcggacaacatattcgttactgtgttggtcatagagagcttcgaattcttctacatcttgccgaagatggtcaggcactgcaaatgggcctgcagaatctgaatttcgattgctatggtcttcacttgaagtgatgatctcattatttgaagttactgaagttgttccagacccaactaacataggctttgaatcctttggcttctttttcttgcttttgtttttcaccttggttgaactaaacggtgcttcaccactatcttgtttccttaacacagtacagcggctgtccattatatcaaagaattcatctaaagcactatgcaatgctgggaacttgtctctgtgttcttctagcagccatattaaacaacgggcttccttcaatgatgctggctcagagaaataatcaagttgctttccttctatagagtctagtttgtgacatatttctcattccagaggaaagtcatgatacta

SEQ ID NO: 212102 - DNA, 728 bp, Homo Sapiens
ttttttttttttttttttcctgctctttatttgattttattctttgaaaaaaacagatatgagaattgccgatgcacaggccaacctgtgctaccatatgtgggctttgaaaagattctggattttctgtctgtatgataatatgtgctgctgtatagagcaaggaaaacagaggtggttttccaagctccacagcccatctttatcactgccaggtaaagctctgtcccttaaaagttagatacaaccaaccaagtgacatttattgagactctactatgtgccagacctgggcaaggtaccttctcataaggtcgagctggatgactggctgggataaaggatacagccaaaacgtgggggtccaacaggaggtcgtggggaccacatgctcatccacaggacctgatctaagcttgttcatagaccttctgtgtattttccttatagaaaataagaggattttgcttatcatttcttttccattgttgtcagtttcagttttttatatgtcctaataaccatatatttcattttccacccatccagactccttactcctccccatttggtctggggagaactcataaatgtcattggtcacaaatccactctccacgctcaccagagtcacaaacccactttctgatgggttcacagccatgttgtcatagtcacaagacatgtcatcgggagtggttctcccgaaacactcggaatgaatatct

SEQ ID NO: 212103 - DNA, 670 bp, Homo Sapiens
ttttttttttttttttttcaaaaaaaaatgccgtttattattgtagattattcttttcttgatataaccagaattgaaaatgaaagaaaagcacataggaacaacacgcgtggttagttagtaactcaagatataaaacaattttgcacagcaaaatatgtaaaagaaaagtaactgacaagatttttttatatttattgtggtaagatttacttttcatttctttttaaagacaggatgtcagtccctgaaaataacatttactgattattgcctttaaaactgtggatttttttttaagttacagaaaatccagttctgcaccacaatacaactgtaaaaaaatctgcatcatcttaaaactgtgcagtaatgccatttttataactgcataaattttattagcgttctaaacagttttgcaatttttttttgtattatatgcttgcaggttatatcttagtgcaattcagtcccaaatactttaattttgaaaagaaaaaaaaacatacatttttgaatgtaaaatacccctacagatataaacaggggcgtttcccctcttaatactttggttttcaatacagtcagtggtatagcaaagactacacatacccaacttatatttaagttgcaagcacatgctgtataagctactttttttaaacag

SEQ ID NO: 212104 - DNA, 693 bp, Homo Sapiens
  misc_feature (573)..(573): n is a, c, g, or t
  misc_feature (674)..(674): n is a, c, g, or t
ttttttttttttttttttagtttgtaggaaaagtttatttaatgggggagactaagacgatgcaagatggttactagaaaaacatctttcagtctggataaatacacaacaaaggatcatagctgaaataccagtgaccatcacaataggaaaggtggtcagcttgtggaattttccttttggtaaccttaagaagtcattttagcagtactaaccatacagtatatgtcaggcactgtaataaactctttacaagtggtacttcatttagtcttcacgacactgaggtagatactattaaatgtccccattttacaagtaaaaaaattgaggttagagaggccacagaaggtacctgaggtttgggaagtgtagaaccaggatttaaatctggaactcctaggcaaaaaaaagtgttttaacaatcacaatatacagctttacattagtaaaattttgaatttgtttttgttcattgttcactatgcatgttttaaaatgtgagggttatagcttatctgttaggacaaactctctaacttctaattgatggctagccaaacatatcttcanaaaataactattataattataccttagttttcaacaaccaaaacaacatatccaaaaaaaactaaattccttaacagatcatttattagtaaatcttcaantactagcactaatcttttg

SEQ ID NO: 212105 - DNA, 719 bp, Homo Sapiens
  misc_feature (532)..(532): n is a, c, g, or t
  misc_feature (665)..(665): n is a, c, g, or t
  misc_feature (674)..(674): n is a, c, g, or t
ttttttttttttttttttataaggaagtatggattttattagagacttcttaagcttagaaggaacaacaataatacatatatatataaatctatagttgggttgttgtaaaatcctttaacataattgacaaaaattccatatgattaaataccgaaaataaagtactgtgttaaaaaattatagatatttgcacactcatgtttacagcagcattattcacaatagccaagagatggaggcaacccaaacgtccaccaacagatgaatggataaaaaaatgtggtaaatacatgcagtggaatattattcagccttaaaatggcaggaaatcctatcacattctacaatatggatgaaccttgaggacattatgttaagtgaaatatgtcagctacaaaaggacaaatcctgtatgattccatttatatgaggtatctaaagtagtgaaattcatagagaaaagtagaatgatggttgccaaggctgtggggaaggggaaaatgggagttgtttaatgggtatagagtcncagatttgcaagatgaaaaaattctgaagatctgtttcacaccaatgtgactggacttaatctcattgaactatacacataaaaatggttaagatagtaaaatttatatgtgtttttaaaaatcacaatttanaagatgcanaaaaagagagtactttgcccatccccccaaaagactataatctca

SEQ ID NO: 212106 - DNA, 680 bp, Homo Sapiens
ttttttttttttttttttcctaatggtaaactgaatttatttcctcttggaaaacaattccagtaatctccaggttcagactgcagagtaaacattaataacagtaacatacaggttagttcaactgattcaagaatttggctgcgtgaaatcattaaggaaaaccttgaacactcaaagcttcaaatgtatccagggaaaaaaaaattctttgacagtctacataacaactattgcatatatagtgatgctacctgtcacattgcaaggcttacaaatatatatatacgggccttatccagctgtggggttctgttctgtgagaacatctcttcatggtttgcaagaatcttcagcaataaaaaatagtcttggatttaagcgctgatatacctaaagagaaattctaggcttaagtgtaaagaaaaggaagtccaaccatagtctcatgtataacagttgtttttaatctttcttccttaaaaatactttatcttaagccattttggtcatagtctttttttttttttaatcttgcctgaatagggcccaagtccacttgtctttataagaccattttagtatcagacgacataatacatgtgcaacactttatatacaaggggtctatccggtgcgcaaaagttcaaacacatgaacatccaacagtttgataatac

SEQ ID NO: 212107 - DNA, 710 bp, Homo Sapiens
ttttttttttttttttttagatgtgttaattacctttatttcattatttcacaatgtgtgtatatatatatatatatttaaaaatcacattatatacattaaacatattttatttttatttatcaatgataccttaataaagctaaggggaaggaggtatttctctaactatctttgcaaaatacaattcatccattaacaaatcacagtaaattaggaagaataaaacttacatttcgacaaaaacctatgccatatttctgaaagcatcttccaaatcctattaaaaacatctttaaatatatttctctcagcttcttcccttatattttttattttttcatcatattttaattttagtaatttaatttctttctccttttcttcctctgatttatgcttatcctcttctactagtttaatttcttcatttaattggtcagtgtagattttcctcaaaacctcttcccgttgtttcagcctttcctctgtgtccttgtatatgtcatcagaaaagtaagccccttcgttgcactgcaccattttctctatcagctccaccaactcctgcacttgactttccttctctgccttactggttttcttgctgttgctaaaggcacagcagcggttcccgcactccttgacgatgctttttaggcccacatccgcatctgctatgaagtcatgggagctctgggcctccaact

SEQ ID NO: 212108 - DNA, 685 bp, Homo Sapiens
ttttttttttttttttttaatagtcatcaatgtacatttattgaggaaaccataatgaatacaaaattacagcaatcatgtgaccttttacatacaatgtcattaaagcaaactctaaaccacagttgtaaagtattcaatttacctcaagtccaagctgcatctccctaagacactgttcccatcacagtagccattttaagccaatcttctttttacacacgggtagtttcttctacattgagcccttctatggtccatgctcatcggctcaccaatggcatacactcaaaggattcctctttatgggtaactatctcaggacctgattttatgagctatgatttggtgcttgcagcatcttcagcactggtgctttttgcaacagaacctaaggtggaaggtctgggaaggcaagtgcaatgctccttgaaggaacacaatcaaggatgatacacagcacagtcctcctcacccctacagagctagttctatactggctggatcaaacctgaggtgctggaggatgctgtggcattccctggggacttgtctgggcataataggctgcttgttgtctataatactcagcccaggctgcactataatctggctgaccacctggaggagccccagtcggagcaggaactgcctgacccattttcttgtagtactcttcccaagc

SEQ ID NO: 212109 - DNA, 673 bp, Homo Sapiens
  misc_feature (414)..(414): n is a, c, g, or t
  misc_feature (536)..(536): n is a, c, g, or t
ttttttttttttttttttgcccaagaaaaatagctttaatgtgagacagttgtatgatggtacagatagtgccagtatatgcaacgaagaaagttcaggtttcaccaaaattttgcaaaatttcggggtttaaaaatctgtttatcgcaaaagtcacattgactgtctcacatttactcttcctcgtgtcctgatcctgctgacttgtccacatgggcaactacgaagctggcacaactatacttctttgttcactttggtcaccaccatttgttctgctgttgggctgcccatgtgtaggcaggtttcacgaaaatatcaggttccctaagcaacatgaactgggaggctcagagagggatttccctagtcactgacttactgagggattgactcaagattcccaggcactanacagaagcagtcgggaaaggaatcatttcctgattgcctgtgggggaaaaagaaacttttttggatagaacagtctggatggactctaacacagtaaaaagtgaaggcagtgcattcttcanaagggcggcagatggggcaccacgcatccccacagaggggctgtcctgcggtccttgcaggagttgccaggctcccaaaatctcctcctgctgctatcccaccctgcctgaaaagaggtgaggaggatgatggggag

SEQ ID NO: 212110 - DNA, 580 bp, Homo Sapiens
ttttttttttttttttttgactctcctagttttgtttaataggagagagggagggcccaggctgaaccacagcttaaggagtttcccactgctacagcgaaagacaagaaacagttcttcaggcacaaagccaagttagataccttcctggcaaatggcacatccacagtcagtcttctgcagccccagaacgccccaggtccacagtggctgctgggccctctggccacgagacaatgaccagctcacctgcgttggtcacttggctcctggctctgagagggacgggggtcttctgccacttgggatttgcctgcaagcacctgctggaccctctgcatccccaggcaaagccggtggacctggtctgagaagacaaagcgaaaccaaccaggctctttacactcgaaggccttgccaaaggacagcagcaccttgttgtccaaaaagcggcgccagagcagcatttcctcctcaaaggtgcccttgagcaggtactttctcaagtcaacccagatgaagaagccagccccacgactcaagaaggggatccccaatgccctaagctctactgagacat

SEQ ID NO: 212111 - DNA, 666 bp, Homo Sapiens
ttttttttttttttttttgcagaagacaaaagcaggtttattacgggccctgggggccaggaatgcctaagatatgagttaaggccagggccgtgagaaaaggtgactctcctgaggccaaacctttgcatctcagaagccctggctggagaccttaggagtcagttctgggagggacctggggatacagaggggtctctcctgaccctgggatctttgggcttttgccaggattggggaaatggtctggggggcagggagccttgaatccacagccttcatttcaataacgaccatttaatttgttccttggcagactgaagaacctgggccacactctgttcagtcaagccgccatcatctgccctaaaattcaccttctggatcacttgctgggggtcactctccagaatcacaccgccatccacaatctcgtccagcaccaagaaggctccgtccatgttctccagcaaccagcgcttctccacgttcttccttaacatgtggttcagagactcaaacaggcaggtgagaacagacatgagcatcagctcattctcgtaggatgagcccaccacgtataggaagaggtcaatgctgttcttgtagacgatggtcatacccccaaaaaatgcaatctcactctcagtccggctggtcttgttg

SEQ ID NO: 212112 - DNA, 717 bp, Homo Sapiens
ttttttttttttttttttattctgagttttaatttattatacaaaagtaaaggttttaatttaatattaatagtagaaaaacactttcttacgtgtgccatatggaaagataaaggatctattctaaaattagctgtgttggttgataagctggtgtggattctgccacatccagcaaggaagataccattaaattacacagtttagctctctctatctatgcattaggaatttgacttccatttgatgttaaagcatatacttggctttaaggacacactaaaactattcaaagtttaattacattcagacaaagatcatctaaccactgttgctacatagggaatatttatttaattatcccttgctatctctattaatcagtttcctcaatttatccttaaaattttcctcaaatgcttagttattttattatttgctttttaaaatattcagtgtcaaaacaaaagtacacagtttaaataattaagcaggcatacttctccctgtctcacctgcttgattctaaattgcaaggtctaccatgtcaaattttagataatcagaacaacactttgggattaaataccaactgacttcatttttactccataagccttctcattgctactttgcatttttcttcactaacctatctgtttgttagtaatttttcagttcttcttcatcttttctttccttgtagctgtgagcact

SEQ ID NO: 212113 - DNA, 672 bp, Homo Sapiens
ttttttttttttttttttaggaataaactatagtttctttttatatcaaaatgtactcttgaaaatgtgtttggcacagtgctaaatcatatatagttaatactaaatattgcaggatacaataaaaccctggagttaattgtttacaccctcttatgggaatgaaaataatagataccaattattcagaagtcagcctatacaaactgtataaacaatattttatgttttgctttgaaaaccagtgatataataaattttacataaaagactgtaaaataatataaatggatttaaacagatttttacaataagaaattcaaatggaaacagacaagtaacaaagagaagtaaaaaaatttattgcagtattcgctccaccagattacctggggatcccttttcttgtattgttttcagggtgacctaatacatcaaaatctacatttacaaaaactccttctgcagataggtcatagatactgcatgcttttttttttttcaacagaataaattatatatccaggagattctgccattttacagcctggaaaaaacaatgcttccctggaaactgggctaagctaaagaaagccatccgctgctaggttaaactccaagaacactttattaagaacattaacagactaatttccaacattcacttgttta

SEQ ID NO: 212114 - DNA, 667 bp, Homo Sapiens
  misc_feature (541)..(541): n is a, c, g, or t
  misc_feature (654)..(654): n is a, c, g, or t
tttttttttttttttcttgagaactttattcagcaaaaaaatcctccaaatgattcaaacaggactgtatactcttcctctctctccacgggtgtatatgtgtgtatacatatagatattatactagcaatttagaaaatttcctgagcctcctgtctcctttctacttatattttaactaaaggttacagagaaatagctggagcagtttcaaaagcctgtctccaataacatatcagcaattgaggctgggaggcagtattctcttcccacttcctgaggcttttaaatataattatgctaatttttgcctttgcctcctgattcaactggagtctttgagttcaccactcaaaagctttccttaaccagagtcacctgataaggtgagtcagaagtctgcagaatcacttccaatgacgaaagcctgactgtttcccagcctcaaaaaggatacagcctagtagtaatgtgaatcatgactggtagaggggactgagcctgacgttgaacggcctggaagtaacacagcagtattcanacactggagggttggggagggatccggaggtggaatgggggagacacacttgtagcgtggtagtccatttttttgtagtctgatgggaggagaatataatttggtcacagcangcagactatatgt

SEQ ID NO: 212115 - DNA, 629 bp, Homo Sapiens
ttttttttttttttttttaacactgacatttttattagaattcatttgtaacaaatggaacttgtgtcagcaaagaactgattttcatacagacttctttcgccaccaatgtaacgaagtaagaaaataaaaagcacgcctttcattctgtaaaacatttacgcgtactactaattagaggtaattgtattttttaacaagccattttacaagttatttgttttaatttttcagtctatgcatccaaaacgagagcaaagaacacaactgttattatctttgtaaagacactccaagctgggatggcaaagccacataacggatggatagaatggatctgtagccttctgatctctgctggagtatcagggcacccataaacccaaaaggaaccaaaacccaaaaagaaaaacaaaaagggaattaaaaataaaaggacttaaagcaaaaccgaaaataaacaggaaagaaaaaaaatacgtgcattactgcagacttttttcccttcctgtttctatgttgtgttatttacatacacacaaatgaatttccgaagcagtttcttacagatgggttcaagtaatatcattattgggtgtagaatcaatagggcagtgcatagtacaaag

SEQ ID NO: 212116 - DNA, 730 bp, Homo Sapiens
  misc_feature (25)..(25): n is a, c, g, or t
  misc_feature (696)..(696): n is a, c, g, or t
ttttttttttttttttttcagttanacattttattctctaataggtacaatactaaaataaacacaaattaaaaaaaagttttattaaaacaaaactgtacaaaaaagcagtatactacattttaattacagaacagtctactgtccaaaaggcactaatccagaataggagatacaatgatacaggactcatttgaactattttattcaaaacaatagagcgcttgtttctttgaccatttacatctagaaacaagggctttttgctacagccattacacattgttataaatatgagtcctacgggtgaaggtgcagtatcactctccctagaggaggttcccattagtgggaccactgtggagctcagaggcggatggcgcagtgggtggggcctgggacctgccacatggttggcccgtcagcccctggacacccggagcttgtctttcagcctggcctctggtggttggtttctggccattactggcagccactttcaccccctcttgtgttttagcaccggcaaagtgggttctgagaagctccaggtaactggggctggaggtgtgggggatgaagcgtcagcagcggggaggcattgtggtaacctgatctgaagaaaggcagcaactactcggaagagggagacgaagcccagggacagccaatgagctgggctctacagccaggcanagcacctgctgctttctgggcaacttctggcccc

SEQ ID NO: 212117 - DNA, 731 bp, Homo Sapiens
  misc_feature (686)..(686): n is a, c, g, or t
ttttttttttttttttttaatgtagcaaattttacttatttgtcatgatcagttttcacagtgcttgtaagtgctggtaatagaagatggacatggtttaggtcaaaacttggaccagaaaccaacttcctttgaaacagctctaccagttataagagcaatatgctgttaggtgaagaactgtttaacagaaatatattatgtttttgcaaacaggcagctgatccaaaattgtgttgaaacacctcagaaacataaatgacatcaatactctataaattaatgctgttaacaaatttaaaaaataaaacatacaattttcaaattgaaggcacacatcccagttggtactggcaagtttaaattgtttctaatactggtggactcttcatttgtaacctactgagcagttacagagggtactcccattgatacaaaatgctcaggtaccggcatttctccacatccagagttctttctatattcccttctgatttccatcccttatctgttccctgcttttgtccttccccggtctcacccccatctctagccatggtaagtgagatggcggaagcaggtgcctagaagcaagcagcaggaagcagcattttcccactcctcccagagctctgggctcccagactgtgttcctacctctggacaatgctttctcttcctcctgngctcagagggcttcaccagagcctggacaccagtggtaatagctg

SEQ ID NO: 212118 - DNA, 715 bp, Homo Sapiens
ttttttttttttttttttcaattgcaaaacaggtttacttttttatcaaacaagattatcacataaaaaatagctacagtgctacggtagtatataaagtgctcaagtatcctgaatgtaaccatgagtcatgacaagtccctccctgaacgagagagagagggcgggacttctgcctggctgcttgaagaaaaatcttcgcttgggctgatgaacgtggcctgagcgggggctgacgaggcacccgggttgtcgtcctcagacaggggcgtgttcttgggtgctcccccagattctctgcaggcactgtcttgattgaaataccaccggctggggggcgccatgccctgggtctcttcccagacttcctggtttgccaaggctgcctctttgcttgcctctgcggagagttccagcacctgggcaaagctccttcggagctcaaggtcctttttcgccgtcacgtccttgagttcgctcagtaagtccagcacctgcacattttcttccgaatcaccaacatcaagttctcccaggaggcgctgagtggtcaccagttcatgctgcagggcgtctaagagctgctgcccatctccctccaggtggatggacctcacgggcagctcgtgcctggtagtgtccagggccgtggcgaatgtcctgtattgctccttgaagcgtgtggccactgcctcgaatgggctgagcatctcga

SEQ ID NO: 212119 - DNA, 707 bp, Homo Sapiens
ttttttttttttttttttgattcgctacaatgagtttattggaaacacagagtgaaacaaagacaaaggagaaggcagcagagtcattagtttttcagaagctcttgagggcagccccggaagggagatgttctccccacacgcgtgggcctgtccctcgcagagtcatagaaccactatccagggtccgcgtctccattccacaggcaaaagcacatgggcagagtcccaggtcgtgcagacagggacattcccgggcctcccccgttcctccaagctttggggaagagctcaggcaagaccaatgcatacagcaaaaaaaaaacagaaggtaggcggaagaaaaagatgaatcctcgggacaacaaattgactaccaggaaaggctacagagagagaccatggcgcctcccggccctccccggactcctgcgaccggggatggctcccggagcggagcggtggggagagcgcttagagtgcaggcagcgggcggcggctattgggaggccggcgcgggcggcgcgttctggtggcgcgaggtactggctgggtggagagtgacggcgacaggcgctggcggaggcggcagcctcctagcacctcttacagctgccgccgcagacgccacccgggcggagggggcgcaggcgttagtagtgcccacaccacgttgctgttgctggggacgctactgactctggtgg

SEQ ID NO: 212120 - DNA, 622 bp, Homo Sapiens
ttttttttttttgttcttaccagagtttaaattttaaaaaatcaactagggctcaccctcaacacccccctccatttgtcaacctctacagcctgcatgccacaggaatcagcagcctgattgttgcacttgtccaaacacaactgactgcaaggctcccacagacacatgcccaggcactcctgccccttaggattctgtggtaagcagaccaccagcagacggaggcccccaggagacaggcccataggaattttctacttaggggaccgcaaagtcccaaagggctacagggagttgaacgagaagagtgcccgacagattgcaggttgtggggaggtgtcaggcatttatttctggagcagaggtgagatggagcaatggcctcagcagcggacgcagttgcgcatgaagtcgacacagaggcttgtgtagtaagtagggtagtcacggaggtggctgacgtgtgcagatgacacgaaatccacagaacgcgccaggacccggcgtgccaggcgtgcctccaccatgcgttctatgtctctggccaggactacttcgtcagccctcgagtagaggtagagctcgggccagcgagagcccgcgtcctgtagcctgtcat

SEQ ID NO: 212121 - DNA, 683 bp, Homo Sapiens
  misc_feature (587)..(587): n is a, c, g, or t
ttttttttttttttttttggcatgcagtaagcgctcaataatagcttttattatcatgttcggctcagaggcagggaggagtggaacggcatgggagggctgcgggaggcacggcaggggggtcaggggcaagtggcaggagggcggatggggggcagcggtgggcaccggggcagggcgcgctgacctgtcctggggcccgggttgggggcagaaatgagcctgcccacgctgtcccgccacggcaggcgccacgcatcctcgacacagccgccatggcaggccttcgggctccgtctccgggacaggcggtgcagggcaaattggtatgcagcgtccgccccgtgggcccgggagagcctgccccgcagggaccagagcccaaggacgggctcaacactcagtcaaggtggggttgacgacggccagacaacaggggagggaggagggacaagggggtccccacttccagggacgcacaatagcagagccacttacacgctggggagggggcggtgcgggggtcctcctcccgcccgggattcagagtcgggggtgggggccagccgggcgggtgagatgcgcanagaggaagggacagggcggataaaggcacgaggtggggctccggccaggccaggaagggacatgggaggggtctcgagggggatcctgagcgcatc

SEQ ID NO: 212122 - DNA, 637 bp, Homo Sapiens
  misc_feature (425)..(425): n is a, c, g, or t
ttttttttttttttttttgagacagggcctcactctgtcacccaggctggagtacagtggcacaatcatagctcaccgcaacctcaaattcccgggatcaagggatcctcccacctcagcctcccaaagtgctgggactacaggtgtgagccacgatgcccggcccactgcaactttttaaaacccacttataatttcttctttttctcattctttatttgctgtttaaaatcttttctatcatttcgagggatggaagcagcaataggaaactgatgggcatgctcagtctgcctacttaaattggaaactgtgtactctttttgcgtaaacttctagtttaagtaaaacatacaaaacttcacaaattaactctcactccttaccttccctgccttcttcatactgaaaatattaaatagctnaagaagaaaagatagaaaaaccatttgggcgactcactttgacatacctgactgtgtagttttgctttgggacttactagaaataggtgtttccagtaattttgccattgtagcaagtttgctagcagcattcataatctttttctcagccccttcttttccatcatcctgcaaaatctgttggaggcaaatcaaataatatttgcgcatct

SEQ ID NO: 212123 - DNA, 723 bp, Homo Sapiens
tttttttttttttttgttgtgaaaaggaatctgtaaaagtcagttttatcacaaattgtaaatattattgaaattgattgcaaatttagatcacatacaaatgagagtctgacattcaactgttttcctatattccaaagtaaacaattcctttcaacactcaagacttaaacaggtattcttagagggttatatgaattgctatcagaagctgttggctaacaagccagtaatttggttctttcaccagaacacagttccagataagcatctttgcactatttctcaagtatgaatccccatgtggggggaaaacggatatactttcaatagacacaagtcactctttgccttccaagtaagcagactccagattcatcttcaaagtgttgggaaaggggatctgtgacctgtacattatcatataacttcaaaaaggaaagctccttagtccaaaaagcctagatgctgaggtatagcccttgaaatgttttcttccctgtgaattttctagcaatttgaggttttagctaagatgggcatttatccaattttggcaataatgagatttttacacatttatacctttttaggcagcttgggaattcagaactacttatgaaagctctcaggttgaggcagaccatcagacccagaaagggttcccagtattacttctgctttcgggtcttacaggctgagtgggttttctcaatgcgggta

SEQ ID NO: 212124 - DNA, 732 bp, Homo Sapiens
  misc_feature (699)..(699): n is a, c, g, or t
ttttttttttttttttttaacattttgtatctttattactcaggaagggattttttaaatctacccacccacttccccaaagagggcaaaaataaataataattttttaaaaaaacctacggttctaaagccagtcttaataagacaggttcttattaatattattaagccagtttgtgttgacaatcagcaacacttttaccccaacattttctttgttctaccttgattggttcctcagccctaacaactcgagtctgtcttgtttttgaactgcatcttctagatttgaaccatgtgctttaccaacagcatttcaccagcattttactagttgcaaatctgccatgtgctataaagtatttcataggatgtttcatttcttatttgtcctccaagccaacgctgaaagtaaagttttgcttggatcttcattgctcctttcctgtttttccaagggcccatgcaaactcatgaaacaacttgaccattccctcttggagtcacatagaaaacctaacaaaaataccctggttcagtcctttcttcttccattgttcctaggaagtgggctggagtgaggtatcttcacatgggtccagctgcattctcagtgcaccgattttatgaagataccagagttggagaaattcctcgggcatggcatggaagccagaaaagggtaagacgttgtcatantagtggtggctgatgggctgctcatgcatattc

SEQ ID NO: 212125 - DNA, 743 bp, Homo Sapiens
  misc_feature (703)..(703): n is a, c, g, or t
  misc_feature (737)..(737): n is a, c, g, or t
ttttttttttttttttttgaaatatgcagaattgtgtttattggcatagatgcttatgatatattgttaattgaaaaagcaggtaacaaattaatatacagtattatgttaattatgtaaaaaaagtatacatattcatagaaaaagtttggaacaatctcagatatcatctgtaggctatttctgtttgaaaataaccaaatagatttttgggttgactcaacaaattatggttgagtcagtcttactttcctattttataaatgttttttacatcattgggtatttaatcattttaaaaatctactcaggcatcatttgtataatagtaataataatttaatcccccttatttctcatgtctcatgccttatccatcatccctcatatcctactcttagcccagattttccttgacagctttattttcttggagggcaggtatggggaaccaaatttgtttccttaccctagctctagccatttccacaaaagcttttatagataatgtccattttgcttattatttttagtttaaccaatacttaatatgtgcccacagctcactacctaggccctgatttaggcattaggaataaaaactatctcgacttagttaaaaccaccagatgcattgcttgaaaacctgttctgccacttaatagctgtgtgatttgagcaggttacttaacctctccatttngaagcaacatttattgggctcctgttacacatangactgg

SEQ ID NO: 212126 - DNA, 645 bp, Homo Sapiens
ttttttttttttttttttgcaattaaattcagtcttttatttaattatattaatttatcccagcaacttcaaagacccacaatgccaatgataaagttcagttaaaaaacagaggtcttgaaaaattttttttcttcagccgctaataccatttacacggtcgccatctgagaatttgtagctccgtctcagtctcaggatttagggaaatttgttttaaatatagatgggtctgaagcaagaagacagtgactaaagtctcttctctagatgggataatgaatctatctagattggtccaacagaactgtgatgaaatgttctatatccatgctcgccaatacagtagaagtagaccctagccacaggtgggtagtgagcatttgaaatgtggccagcccaattgaggaattgagttttaaattttctttgattttaatggatttccatcaaaatggccacattttgttagtggctaccatattagacagcacaggtccagagtgtattctgaggaaggagaaatgcagtgaacccttgacttagcaggtagacaatgaatacgtagttatgataggtattgtttggaaacactgcacttcccactcagtttttcttatttgaaggatactgtgttctgagaca

SEQ ID NO: 212127 - DNA, 737 bp, Homo Sapiens
ttttttttttttttctttcaatcacccctttctcctctctaggagcatatgacaaatatattgtttttatatgtgtattctctatgccacttttagttgagctccttcttctttttctggccttgtgtatgtttctatgtttccgtggctaacaaatgtgacccactctttacagcttaagggtgaaactctgtgaattttccaaatctttctgcctcctctttcctagcttgtcaatttcatttcttttttaccactctctccacctgcctagaaattaaccctcagattacagatgatcattctaacctctcagactgagggatcattctcggtatctacaaatataccaataatttctggggtatgaagactgagagcactacatggctagaagctggaacatcagaaatgactctaacataaggtctaaccttaacaccaacgtctaaccacatggtctgggttcaaggacttgttgtaatatttgggaattttccaactgggctccatccatgccaaatagagccaaggcaataccctttatcttaacgtagacagtagcttccctaatgtagtaattattcaggtaagtcttttcttctggtctcaaagcatgcatcagatgtatcagttccttctcagtgcagaatgaacacatgctgaattagcgtttcttcctctccatcttgggatcttttcacatagggctttttactaagaagagaggtgatatg

SEQ ID NO: 212128 - DNA, 693 bp, Homo Sapiens
ttttttttttttttttttctttgtacagatcctttttattcagatttatataggcaatttaccaacacagaaaaccagtctagcagctccaaagtaactgtaaaaacggtggtgctgacggtggtgtgccccacacagggcaggtgacctcagacgtggagcagcatctcccgtgggatactatttcagacgtgcactagtgagtgtatactgagaagggattataaaccttccctggcacaacagatacaaaaagagatagaaccaatgatattttgtctaggtacaatatctagatttacagtatctagtttactggcttcacttcgtatagcaatgcacaatagaaaacggatttctttcttcaagggtattcaagaatatagtaaatatgttactatattgatggctatgaaaacagacagagacaaatgagtgaggaggcacgttctctcacagagacaggacttcattctatttcacataaatcattaagggtccattcaaatataagacctctcacaaagtttcagtcatgtatgagggcgcttacctttaagaccccatttcaaaaccattttgaaatagtgaaggggggaaaaagtcacactcaaatgtgctactcttaaaagcagtgtttctaggcacagcttgcctttttcaaagagtgaaggtggcctttctgtttagtgg

SEQ ID NO: 212129 - DNA, 592 bp, Homo Sapiens
ttttttttttttttttttggatatttttaaatcattttattttgtaataatattcatacactacaacccattgaagaaacaaagccaaaaaacgcagtgatgtaattctagttcccgcatgtagcaagactctctctactccattagcaacagtggccaattacagccaatcaaagtcgtccttcttggtgaagacagacatcaacactcccggggatgagtcatgctggacagatgaataagtgaaaggctatcctctgagaaatattgttcaaaaccttccaaggttagagaacagaagactccaggagcctttggacagtcttttcctccctgtgattcttttcctcttgggcttctgggatttcaaactcggtacatctggtctcttggagacacatcctccctggaagctccagcagaagatggccaaagaccccttttgccttttctgcttctccaaagcacaaatgagagactgataattcagaaataattctaatacctttttcactgagagcctttccactcccctccccttctagtagtcgtgaacttcagaccctcgcttcgactcccactgccataactg

SEQ ID NO: 212130 - DNA, 716 bp, Homo Sapiens
ttttttttttttttttttgggcttcaaatcaagtttaataaataaaacagcaaaggggggttcaaggcagttatcacttcacagtgtggtccttggtggggtgagggatggtcgagtccaactcggaaaggggctcgagcacaagaggccggacgacacccggggcagggcgcgccgccgcccacggaggaccccactccaacgtgtaaacagaaacagaaacgaacgagagggccagggaggagggggaccaggactccaagccatcttgctaggaagcttcccacagaaggaagacctgcagggctggggaaacaggctggagtctggcccctgcgtggccagcagggccggctcctccggaggctccctgccttggtaccgggggaggacagcaaaggggatgtaaatcacctgtctcctcaaacccacgcctggggttgctgagggaccccaccccaaccgctcaggatcggggagcagggatggagggggaagaggcaggtgggggtgtaaagtgcggcttttcctgaagtggagacgatggggtgggaaggcgaggctggggtgggggccggacagcgaggtatatggctctgtgccccacggggttggcactgagtagcagctgcccacgacccccagggctggggcagcccgcggccctgccgggtgtggagagacagagccaagcagggagctgagggcgcccggcg

SEQ ID NO: 212131 - DNA, 696 bp, Homo Sapiens
ttttttttttttttttttaagatgacttgagtttcttgcactcaaagagagagacacagtcagatgtgtctatggtattgcctagaacgtcttaactactgagaaaggatgcgggggtgcacgcacgtggttactgagtggggggtggggaggagggcaccaaggctttctcaagatttacctgatgtgaacgaatcactggcgtgaagttgtggggaaaagaaaaaggcaggatcagaaaacaactgaaaataatttacgcttcttaaaaaatatctctgcttcgggtggttgtacaaaatgatttcctgatgcttgggatctgaatggccctggacgagctgcctgggccagccctgccgtgcggccctcgctctctcctggctggcgaggcccagccccgggtcagtccatgagctcgtttcaccgcgtaggatgccgcccaccctggctgggcgggagggaaggtcctaggcggagaccggctggcacctgggttatggcaggagccctccttccggctggtctcagacctcatcatctgtgccaacctggaattcaggaagcgccacaggaatcccaggcccctgaggttgcggacaaggctgggctgtgcccctttaaggaattttggtttgaagagtcaaggtgccccatgggacgcacggttgggcagggcctcgtgggtcgtgatgc

SEQ ID NO: 212132 - DNA, 631 bp, Homo Sapiens
ttttttttttttttttttctggctacaaattttattccgttacaaatagcaccgagcccttggggctgcccctgtggagagggatccccctcctggacccccacctcctcccctgagctacccatgtagtgtctgggagctggcacacggcccagggtccctctggaagctgggccaggccaaggggttaggcccaggcccttcgtggggtgggcccagggccagctgtggcagatgtgcaggtaggtgagcggcagcctctcagatgagcacactggccacgggcacgcgggtggagcggccccgctggggcaccacaatccggtcgtctgtggaccctgcttcgtgcagcaggccctgcacgtgcagctgtgcccgccggcggtcggcctcaatgaagatggcggtgcccaggaaggctgcgccgcccagtgccccaacaaacgcgcagagcatgagcgagaactgcagagcccggaactcggacaagaaggaggggggccagttccggcgcaggcggtcagagatcaggccaatgaggtaggggctcccagcatcacccagcaggtgggacagcacgatctggaaggcctcggcggtggagcgtcgggtagggatcaccacgtacagc

SEQ ID NO: 212133 - DNA, 736 bp, Homo Sapiens
  misc_feature (649)..(649): n is a, c, g, or t
ttttttttttttttttttggttactaaaattgcttaacatttattgcttcttttggggttagcaagttgtaagcctcattagatgcatacactaagaaatggaattgattagactcgaccgtaggaatggatcaaactatgtactcttcttgttccaagtttcctccaaaagtagtagttattttgtttttcttcatccttgtacagatacatttagtagagcttaccacatagccttcccctaacaaattccaaagacgtccacagcccccttatgtaatgaggtccaatcaatgatcaattagccatgctagtggctaatagacaaggagattatctccataatctctccaaagatggcaaattatggctatttatttttggttttgcagcattttttttttaaagacaaggtctcactgtatcccccaggctgaaatgcagtggaatgatcatggctcactgcagcctcaaccgcctgggctcaagcgatcctcccacctcagcctcccaagtagctggggctataggcagagggcaccacaccaagctaatttttaaacttttggtaaagacaggatttcaccatgttgcctaggctgatctcgaactcctgaactcaagtgatccacccaccttggcctcccanagtgctgggattataggcatgaggcactgtgcctgattgcatattttttaaaatttaccaaatgaaataatctgattatctggagat

SEQ ID NO: 212134 - DNA, 677 bp, Homo Sapiens
  misc_feature (595)..(595): n is a, c, g, or t
  misc_feature (634)..(634): n is a, c, g, or t
ttttttttttttttttttattttaaggtatctttaaatataaattgaaccccagaggcagaaaagtcatctacccaacaccggcacattttaaacatgattaggatttgtaggtcaaaatcccgtaacaaaaaagggaagtttttggttgtttccaaaacaaggaaagcatgttaaacagaatcttgtgacttaaacttcactcaagtgagcttaaaactggcataattttgataccaaaagtaagctgaataaccaatacaaaaaacagaactaactggagtttttctcccccaaaacatagtcccaaatccaaaacaacttatataagggatgcaagtaacagaaaaagtcaaataaaacaacagtggttcctgaatttaaaggaaggatgcccacttctctctctctcaagaggcagatggtcagtttttcttatccttgtctttcttggtttgctgggccccagattgctgggcctgggactgtagtaactgagccgctgctttcttcttctggaagttgttcacctcctcctcaagctccttcttcttgtcttccactttcttcttttcttcttggtgtgtccgctttanaaggtcaaacttctcgtgaagctctttctctgcctcctntagttcagcttctttatccttcactctcataacaacatttgtc

SEQ ID NO: 212135 - DNA, 617 bp, Homo Sapiens
ttttttttttttttttttatagaaaaactactgattttattattatcaatgccaaacaaatctttaaatcaactataatttatttaagcataaagttactttcacatttgtccacaaccacagtaaatacagttcttggcataaagacacagacttcagaatttaaagcctccccacctgaaagattacatatataaaactcccactattgtttatataatagtggattaatcaaattgaaatagttataccgtctaaaataaaattgaaataatttactcataagattcatatttaaatcatctttatttacaaaatactatcctgagaattataattccattaagcttcaatttgagcaaaagtgtaatcacttaagtaacagcagttacttaaactgaaaatgagatcagtcaaaattacttttgaagagagcaaaaatattgtcaggtttcttgctgtggttctggatgttcagtagcaggctcatttgaaggtggaatcaaacctgaggggaactcacttctaccttcagaatgtgggggtggggggaaaaatccaggtcttgggggaaggtaaggaggaaaacccctcggtggatagacatttctcattgc

SEQ ID NO: 212136 - DNA, 692 bp, Homo Sapiens
ttttttttttttttttttcttgtgtttacagtttatttaatggaaaagagattggcctattctggttttgatgcctgctttgccccgggatgagaaggcttccaacatgtcacttagaagaaaagacaagggttttccctggtttctgacaccagaggggcttaggcttcttcatccacagcagagttttctgggatttctttttttagagaaagaggacttgtttgaggggttactgagttgacagaggaatggtttccatagatgggaacaaagcggttgtcaaaagctagaggagtttgttccgggagctggatgacggggctggaggacagcatcatcctgttttcagcttccatctgaagacccaagttacccatcctggggtgagtgcccacctcagaagtcaaattctcccctcttaaaggcatagtctgcccttcaggggtgactgatatgtttctggaggggacagtcaccttttcacgggccacagccttccttctaggggccactgtattctgtctaagggtctcagtctgaaaatggacaggggtcatagtcgttcctccagggctcacagactgatgactcacaggggtcacagactgatgacccacaggggtcagggtcttttccccaggggtcacagactgataaccacagaggtcagggtctttctgtcagtggtc

SEQ ID NO: 212137 - DNA, 713 bp, Homo Sapiens
ttttttttttttttttttaaattctcagtgatccttattctgattccttttggttttgacaattaaaaattatgaaagctggttgttttgtctcctattgctgaaataatttagttgatttaacactacagatggtgttaggataatgaatacagaacatcaatgagaatctaaattatatctcttgagacctccctcattccaagggaggtctcataagtatacatgcatacatgtataacttataaaaaaaaaaaagccacataaatcaccatgacattatagaagcagattcaagagaaaatagaaaaatgtgttcaccattaaactcaatactaatttttagaagtaacaacctatagaatcaacattaatgagacgaaataatatgttgcagttaagaacaacaggctttggagtaaataagaagtaggtttgagttggtgacttttgctgtgtggccttgggcaagctatttaatatacctaggcttcagtcttcatcagtaaaatgagataatactactatctcacagggttgtagcaagaacaaaagaagataatgcatgtaaaaccagagtgcttagcacatataataaagctaaattatcattagccattgttactatgattattattaattataattatcctagatacatatctgagcatgattatgtatttttcctatttacccagcttgacaaggtgctt

SEQ ID NO: 212138 - DNA, 605 bp, Homo Sapiens
  misc_feature (561)..(561): n is a, c, g, or t
ttaattttttatttgtttatttatttattttattttttgagatggagttttgctgttgttgcccaggctagagcgcaatggtgcaatctcggctcaccacaacctccacctccggagtgcaagtgattctcctgcctcagcctcttgagtagctgggattgagggcatgggtcactacactcagctaattttttgtatttttagtagagatgaggtttcaccatgttggtcaggctggtcttgaacacctgacctctggtgatctgcccgcctcagcctcccaaagggctgggattacaggcgtgagccactgcgcccggcatgaaattttaatagctagtcttcgttttgaacagtgaacattatagatctatcccccaattcatcctcttttttcaaaatgagtttaaaaaggtctctctctttttcacaagctagaaagtatccttcgtatgatgaagattcaaattgcatcttattatcatgtcctgggacacttctctgaaagaatatgatgtcactttttgtatccttgatgttatcaggaggattcatttcctntaaggaaatattttgttctcacaggagagagttgaattttctca

SEQ ID NO: 212139 - DNA, 676 bp, Homo Sapiens
ttttttttttttttttttcaataagcagctttttattgaaggactgaaagaattaaatagaaggcacagtagcactgtaaagctttctcagaacataataatctttttctatgtatgtgtggaacccagactttcttttttgttgttaaaaatgtcttctggacaatcagaaaatctttatttgtcatccttccctttggtctttctgtaaaccatttctcgaaaactggccagaatcttgttctctctctttcgtctctcttcttggttaaaggatgcaagggctctcttctcatcagcactgtagatctggttctcttttcgcagtcgcacagcctccattcggcgatgcctgctaccactcattacataacctgagcattcaaatgatgcaatttcttcacttgtcaagccaatttcacctcttcgtgggatacgttttccagcttttacatattcagccatagctgcaccttcaccaggtaacagagcatggccatagttcaaaggtttatcatcttgagaggtaagtgtttttggagcctctgggccaattaaatctgatggttcttcagcctttgttcgatccttccagggattttccagaaactcttcttgggattctttagagcttgaatcactggactcttttctgctcttcttagactctttttct

SEQ ID NO: 212140 - DNA, 693 bp, Homo Sapiens
ttttttttttttttttttcaattataaaatgtttttatttcaattacataataacacgttttcctcaaattttattgaggttttggtctttttgcattcaattctatcttgtaacagtaatatgaatccacataatttcataaaatgtcaacaacattcataaggtacattcctttgtgattttatattttacaattttaaatctaactttacaattattttaaaaaatttttttatatagaaaacagatattttcttcaggcagatcaaaacaagaattttccagtaagaatatactgggacataacaaatgaaaatatttataccaaaataccaaaagtgattcagctctttaaaatatcctactatagtctaattagtagcttgtacaagaacaagtaaccattttttactgctcttttgaatgatgattagaaattcaaacaaagtattttaaggttcaaaaactttttttttttttttttttttttttagagacagtgtctcactctgtctcccaggctagagtacagtgtgcaatcatagctcactgcagccttgaactcctggcctcaagcaatcctcccaccttggcttcccaatgtgctaggtttacaggcgtgaaaacattgtgttgtgtgtgtgtgtgttttttttttttttttttacacagagtttcgctcttgttgtcca

SEQ ID NO: 212141 - DNA, 732 bp, Homo Sapiens
  misc_feature (674)..(674): n is a, c, g, or t
ttttttttttttttttttagtatttcttgttatatttcataaacagtctaacaaaacactaacaaagttattttgcttattattctgatgctggaataatttggtcaaatattcataaatagttatcaactttaccaaggcacaaaaatcaagaatacatgctttctataaactcatttactactttaaagtttttaactgtttagcagttataggaaatttttttaatcgaaaagaaaactatttacatttcaaatacaaaagaaaattaaaattattcttgattgatctctaaaacccaaccacttagatgctcattattattattttctttcaccaatccagtatactctattcaacatgtgcatcctgtgtacttactaagcatttatttgcacaaggattttctgtgtcaggttaactttgctgtgtagattctgtgtagctacctgaattcgtccaagaaaaagtctcacattttttggaaaaccaatgctgctacactgtttccagatctgcctccaaagctgaacttgggtgttggtagctcttcgagaagttcaaatctaaaatgccaacgagggcctggcatggtataatcccagcactttgggaggccaggtgggagaacacttgagcccaggagttccagaccagcctggacaacatggcanacctcgtctctgctaaaaatacaaaattatccaggcatgatgatgtgtgcctgtagtt

SEQ ID NO: 212142 - DNA, 796 bp, Homo Sapiens
  misc_feature (756)..(756): n is a, c, g, or t
tttttttttttttttttaaattatatggttatccatcccatccagagatcgaccgcgaggtggtgcgcaggctgcgcgagttctaccggcctttcaacctcaagttctaccagatgaccgggcacgactttggctgggatggataaccatataatttaaaaagaaaaaaaaaaaatcaaaatataatatatttttttaccaatcggtagagaagagacagtttaatatttgtgctgaaaatatgtttcagtatttttttcaatgaatgttaagagattgttctcactcccgccccatcttaatgtataaccaacaccaaacacgtggatcaacagaaaaggaaaatttcactcgtctaaacactttcaattttcagtttttattttatgttctatatacccagtcataaagtataagcatcagttgtcattaaaagttttcagaaaatcttgaggttaaacatctctctctctttttttaaaatacaaggccctgataaaattgatatctatccttatatttttctccctttttcccgtgccactttttcttaaattatttcccagttagtattatcatatgtttgtacccgtcacagttttcatagtgctttcaaatacacctttttgatcattaaaataaaaaaataaatcttgctctgttgtataagatcacaataggtaaatattattatccccattttacagaaaggaaaactgagtctttgggaggtgaaataatgtatctaaaggtcanatgttggatggaccctggacaaaattcatcttcacttgtt

SEQ ID NO: 212143 - DNA, 711 bp, Homo Sapiens
  misc_feature (691)..(691): n is a, c, g, or t
tttttttttttttttgttcaaaaactttatttgccttctgctcattataattacatataatcttcaaggagtttaaatgacaaccaaatccaaggcctggcccccaagaacacagtgataggattcagcatttggtgtttctaattatacaatgactacatatatatcatagacttgctctcatccattctccaccataaagtttcaatttcctcttaaaatatggcagtcaagtttagtctcattcaaaatcttatctggtcctacagcatattacagacttagactcactcttctgttttaattgatgttactgtgtagccgaagattttaaaaaaagatttatagatatacacttgaaattctgcagtcttgaaatactacaataaatttttcttacttatgaaaagccaacaacaacaaaaaaggccaggccaggcataagacagaggggaagggaagatgaggagggaggtttgagagtcccatcattttgccttgctgaaactgggtttcagtagaaatatttggcaagaatagtgtggaaaaggaggatggagaaagaggttactctgattttatgtaataattcagtttcaaaacatactgatatcaacctccaaaaatagtagttcacatctgcaatacaaataggcacacacggtaaagatggttaaaaagtagaatttanaaggctatttgtccatcttc

SEQ ID NO: 212144 - DNA, 746 bp, Homo Sapiens
ttttttttttttttttataattatattggttttattataacatcaaatacaattgaaaaagatacagtatttttggtaagcagtttaaagctagtaagctagcgttcagttagtcaccttgcttgttgacatttgaagatgcatgaattgaaaactgactttgaggcgtacactctgattcaaagattaatgtctttattagggtctgaatgtcatccaaaccatggtgaagagattcaaatagcattcttttgaggaatccagtattgaaaagggaacttgaccacagaggtccaagttctattgctgtctttccaggcatgcttccatgacagttacaaggcagctgtctatatgggttttcttctaccatattaccatccttctgaaaaattctctcttcacaccactgacaatggatcaggtattgaatcttcttggctgtttcatctgctgaagtaggtcccctcaaaactctcacaactaccaacacaaaatgttccagagccactgcaaacagtacttctatgcctttgttgcatcgggctgcagctcttgccactgcagctacaacaattctggctgctagttccttgtaatattcagttcggacaatgttacatccgtagtgacgccgggcaacatgctgtgccttggcatataaagaactgatatctgtagaagtcactgacactatgccaaggtttcttatatttctgaatgcagatctagatattcactgatgt

SEQ ID NO: 212145 - DNA, 702 bp, Homo Sapiens
  misc_feature (653)..(653): n is a, c, g, or t
ttttttttttttttttttaatattgaaaaaatacaattaaatttttattaaaaatacatactccttacgcgatctttgtgtacattttgtgtgaaaaggaaaaaaaaataggaaaggcattaagactacctaattatttatactgtatttggtagaagcgtgtttcagtcaaactttaacgaaaaataagttattctgttttcatttgctcccggacgtcagaaggcagagtttcaaacagagcatcttctacaactaaaccagctcgcttcagagcccgacagtcacccagttcaggagggaggatttcaaagtgattaccttttacatctaagtaggaaagaaatagcaaatttccaattttcggtgaaagtacagataggctgttttttccaatcttcagagttttaagtttcttgcagaagtagagttcatctggaaggctttccactttgttacatgtgatggaaaaatactgtaaactttgtagaactccaatttcaggggggataaatcgaatgtcattgtacgataagtccaagtatcggatcttgttgcataggaagaggtgggaaggcagcacctctattttattgtgactaaaggacaggcgttccaggctggtgagtttctttatatgctctgggatgtangtgatgctgttatgccacagttttagcactgtcactttcttaagtgctg

SEQ ID NO: 212146 - DNA, 731 bp, Homo Sapiens
  misc_feature (599)..(599): n is a, c, g, or t
ttttttttttttttttttagtagagatggggtttcaccacattggccaggctggtctcgaactcctgggctgaagcaattcacctgcctcggcctcccaaagtgctgggattacaggtatgagtcaccatgcccagcctaggtttagaatttttaaatattggcttgaactatatagtttttttttttttaactacagggaataaagtagaagttatcctgcattacgatgctttgttcaaacacagaaatgatacatcatatggcaataattttgttgataaaattcaaattaatctactcaaattattatttgtagcatgaaagttaaagatcagattgtacttctgcaggactgtggagataataatacatatggaggttcttattcctttccttaatggcatagattagtaatttgggtagaaaagaaaagacaaactttaaaaaaaaatagtgcctctaggttttttttgcttgttttttgtttttgagacagggtcttgctctgtcacccaggttgaagtgcagtgatgtgatcttggttcactgcaacctgcgcctcccaggctcaaggggtactcccacctcagtctccanagtagctgggactacaggcatgcactaccacacctgggtattcttttttctttttctttttctttttttttttttttagtacagaccgggtttcaccacgttgcccgggctggtcttgaactcctgacctca

SEQ ID NO: 212147 - DNA, 731 bp, Homo Sapiens
  misc_feature (638)..(638): n is a, c, g, or t
ttttttttttttttttttcaagataaattcaaaagttttattgcaccaaatgccacagaaaaatggatcaaaataatacataaacaagttaaaaaaaattcccacacaatgacattggtatctattcagactgatcaaaaacgaagtcctatcaatttctcttatggagcttcaaatgacaaattccagaattttctcgtttttgaaataccacttaagtttaagcatattgcaatctcactttcaagatatatcgttcatcatattttgacatttaaaaattaacattcagaggggacttcttgatttaggcaaaaattatattaaaataccctctcccccaagcacaataaaaaacaaatggttcacatttaccaagagaagctgaagacattttcaatttaacgtggaagtatgcatgaacaaaatattctctaaagtacatattagcggaaaaatccagactttaaaagaattttgggatactttatattctttattatttttatgtacaaccaactctagtgaagaacctaaaaagctacagactaaatttttataaaatctcaggacctaattataagagcccaaacaacggtttagtatcatttagcaagcggggatttttctccctccanaaacgttaattttgaaaaatatggttaagtttacaaagttgcaatgtgtacacggcagttccatgggatgtgaaaagattatagttactttca

SEQ ID NO: 212148 - DNA, 651 bp, Homo Sapiens
ttttttttttttttgtttgtaattttatttaaggagaaatactctttccctttgatacgactataatattataaacagcaaggaatatgttctgctttctgcaattttagaaagtcattccattctgggtgacagaatgaggtaagactgtctctttaaaaaaaaaaacaactcacacctgtaatcctagcactctggccaccgaggcaggtggattgcttgagcccaggagttcgagactagcctagcaacaaagtgagattccccctcctctctctgaaaagtaaaaaaaattagccggtcatggtggcacatgcctgtggtcccagctaaatgaaaatctgaagcaggtggatctcttgagcccaggagctcaaggttgcagtgagccatgttcgcgccaccacactccagcttgtgcaacagagaccctgtctcaaaaaaaagtcatctgtgtgtttcttgcaggcacatctatggcaatgcttgtaccatgaatttaaaacttctaacttgatggcacttttttattttttttgagacaagagtctcactctttcgcccaggctgtagtgcagtagtgtgttctcggctcactgcagcctctgcctcccgggctcaatatgaggcaccctcctgagtagctggaat

SEQ ID NO: 212149 - DNA, 696 bp, Homo Sapiens
ttttttttttttttttttgtatttgaatgtttagcattatttaatagcctgaaagtggaaaacaatccaaatatccatcaactagtgaatgggtaaataaaacggtcctcagcatgtactattatttggcactaaaaagggatgaagtactggtaccagctacagcatggatgaaccttgaaaacactatgctagtgaaaagagtcagttacaaaagaccacatactgtatgattctattaatatgagatgtccggaataggtaaatccatggagatgaaaaacagttgagtggttgccaaggagtgggaggaatgagggaatgaggggtggctgcgaatgggtaccgggtttctctttggggtgatgatatgtcctggaactagacagtggtgatggttgcacaaatctgtgactctcataaaaatcatgttaaagtttacatattgggctgggcgtggtggctcacacctgtaatccctacattttgggaggccaaggtgggaagattacttgaggccaggagtttgagatcagcctaggcaacacagtgagaccccatctctaaaaaaataaaaaaaaaatttttaagtttacatattaaaatcataaaaagtaaattttactggtttgtgaattacatctcaataaagctatttacaaatttgaaaaaaagaaactctctgggactgggaac

SEQ ID NO: 212150 - DNA, 678 bp, Homo Sapiens
  misc_feature (515)..(515): n is a, c, g, or t
  misc_feature (608)..(608): n is a, c, g, or t
  misc_feature (667)..(667): n is a, c, g, or t
ttttttttttttttttttaagaactcgggttttatacaatagaatgttttctagcagatgcctcttgttttaatatattaaaattttgcaaagccctttgagctactgccttagtctacccactgtccttttgttatgaggtagaggatctcatgacaccatacacacaaacccatcattgcctgtgaatgcacgtagggccagaattccccagttcccgctcctctgagggttgatactgctgggaatgccaaccactccacaagcagagggaagccccctcaggcctgcaggaggagccgcagcagtgtgtccaattcaaaccagcagcaaagagcctgacattttcccatccatctatgaggaaagccatctcacagaacatggacataggcaacttgctctcccacaccaagggatgggaatctctcctacctatagtcatccctgcactcctgactttactccaggacccagggtccaactaatggcagagcccctcttggttccttcanacaagaaaagcaatacctacggactggtgtacacttccatccttggttataacaggaatgttatcaagctgtcagaacaggatgaagtgctcncagtggatatccatcagggagggttagggacactcgtggcagcctgtctagcagcctgngctctctgaaa

SEQ ID NO: 212151 - DNA, 758 bp, Homo Sapiens
ttttttttttttttttttggtttagaaatcttttattgtttctccaaatgacaatacaagtaccaaaaaccaacatgacacacaggaaaaaataaaagtgcaattttaatatagtgaatgtgatacatgtataattcctcataacaaaatggtcaaaacctttaaaagatccacaatagatatctgaaaatcttagcaatgctgtatatattttgaggactaaatgatgaatttatattcaaattgttcaaatatattttcaaaactttcagagcacagatcattgttaattttgcttttatttaaaaaaccaagagaatacatttctatgtaaattagcaatcaggaatttatctgtttttgggcttcttcatctatctaaagtgtatatttagtgaccagaattatagtcatcctatagtgaaaaaatagcatacaaaatcaaagtttaatgagtaaatcatgacattatgccatactaagaagacatcaaacatctaaaaccataggaagagaatatattagcccttacagaacttaaatttttagaaattctgaataaggaaatatattctgcacagataacggtatgacacacccagtgttctaatacagtacaacttaaatagcatcctagggtaaagagtaacatattccccaagaaacagaactaaaatatttcctattttatgagaagagtgagtaagacaacaggatacctcctcaacagcacactataaacattattcatacgaatc

SEQ ID NO: 212152 - DNA, 662 bp, Homo Sapiens
ttttttttttttttttttcgtaaacaaaatttaatacaaccatatagtcaagtaataatggttaaaagacattttattagatacaacttttaaaaaattaaactatgcaagaagtatatttaaacaaaacatgtaagtaagtattcacgtgctacaacttaactaagaacaattaaatacaaagcattctttccactatgaagactctggagcctctaattgaaagcaaatgaccttaggtctatactagttgtaaagcagattatacttttgttcaactctaaatttgtattgtcttagagctccaacaactctcaataaaaatttaaataaagaaaccttgggggaggggtgatagggaaggggagagtaagtgcttttttaagaaagttaaatgaaaaagcctgaagagggaaaaaattgtacataagtatggaacaaaaataagtatacttttttgacattcgatgtagatactgcaaatgaatttacacgggtttaatcaatgtaagatagatatttgtctgaatattttaaaaagcacctaggtatcaaaaaataaaaacaaaaaatataatgaaactccaaacatccaacaatctcgccttaacattctcattcgtgccaagcaaccacacggttggtgcttattacacaattta

SEQ ID NO: 212153 - DNA, 777 bp, Homo Sapiens
  misc_feature (710)..(710): n is a, c, g, or t
ttttttttttttttttttacagatgagcatgacacatttatttttcaggggaaaagacagatacgtagaaaaacctcttcaattccatatgcatttactgaatttttcctgatgagacctgcattagcaagagagagtgaataattttaagaatagcaaaatttcttaaaccagtgtggcaacttcgcctgttccaaaatttgacagattctctttttttatttttattttatttttttgtttctactattgttgtacaactgggctctttgctatcctaccaagtttaaaacgtgtggcatttgacatttagcctagttatatttgcaagtttccacactgcaatacgtataaaggctgtttggacataatctcctcaggtgcagtttaacgactaaattttaccttgaattcaggtttatatcaaatcttacaattctgaaaagttactctgccagcaacaggtactacaatgaaaaattaacaaagcctgtaacactacaaaatgctctgctaacattttcaatttttaagactccttttcagtaacaattcgaggaggaagaatctacagccaattccaaggccagatttcattcaatttggtcttccttcggcagtaacctaaactcaatttcacatttctccttcgataacattaaggtcgctcggtccggttactgcacacctccaattttagcgtccaaganactgaaagaacggacgttgctactcgctcctccagcctctctcactcagaagcttggcaacgtgcgc

SEQ ID NO: 212154 - DNA, 686 bp, Homo Sapiens
ttttttttttttttttttaaagaaaaaataatatttatttgcaatataaacaaagtcccgttgttggttcgggatatatatatatatgtatgtgtgtgtatatatatacgtagggtcacaaatcttccttcataagatcataaagcaaaactggccaccttctggcataccctcatttacacaaatctggtacatctttctgggttttctttttaaaaataaaagagagaaaaagagaaccatgtacagcatggaagcttgttgtcaatttctcgactgtggcaagattttaatctgctgcgctaaagaatccctgaaagccacccccgtgaggtaagaagcagtggggcagagtttttctgtggcctcactcacatgctgagtgctgctccgtcagggaccctggcctgactcctctgcctgccccaggcccccatgcagtcctgacacctggtggaactgaggctggagaaggaacaaaactggaggaagataacggaatccgtggcttcgttctgtggaggcagggggaagtgaacagagccttaccccccttctgctggtccatccttgccccacttgcccccgccctaaggttgaaatgggtgcaagtctcctggcagtagaaggcatgggcaagatgagggcagggcaagcttccaaggggacaagggggctgggagtgg

SEQ ID NO: 212155 - DNA, 695 bp, Homo Sapiens
ttttttttttttttttttcagtttttggtcattttaattgtaaaaaccaagacatttatataaataagaccgctgtgtaaaatacgattcacccttctactaaaacccttttcccacactcgaaaagaacatagaaaacccagcagagagcagtacaaatcagcatgcggtccctgatgcgaagtcgcgggcaggccagggttccctgcggaagcagcctcgtggtgagagcactcctgcccaggtgtcccaccagaggctcggtgacccctcgagaaactgccaggtagcagctcccacacaccagcccctggctctcaactgtacgggtcgaggaggggacgggaaaggctgcttggtccccaccaaggctgggggctgggggggctgctggcccagtgagatgcagtggtctgttcagcctggggtcaagttgggggaaggggtttctgaggggtcagcacctccccagaggacaaggagagaagctgcctgtgtcccttgaaagaatcatctccttcttggggccattttcatatgaccactaatgacaaggacggccgacacttcccggcagtactggggatggcagggcagtggggctcccaggatgcaaggggaaggcagccctggagaaagggggactggcgtgttcctgtgcggaagatctcatctcccacctcctctaccctgtc

SEQ ID NO: 212156 - DNA, 724 bp, Homo Sapiens
ttttttttttttttttttatcctttcactttttataaatgtctctgacatgtaaataacccaagaaaataaaaaggcaggagctgattacacaattaccagtaaactctatcatcttttagaagatcaacacacagctaacgccatatacagcatgcagtaatgtctgagaaaggaccctgcggagaaataaaatggctagaactctaacaaaaaaaatatatgtatatatatactgtataatatatgtcatcaaaggaagcatagccaacaaacccaagatacagtgcagatcacctttccatttctaaacagtgtgtagagagcatagtattgtctgcaagagatgtcagaattgggaggagtccgtagcgctggtggagatgttggttaaatcggatgcattttttggtggatatgccaaatcctcaccaggtgattagtgcctggtgtgtggtccaccagttgtaaacctagttaagaagtatactattcatttttactgtttaacaaacatacttctcttcacccttctcagttgtatttttttagttttgtcttgtttttgcagtaagttctagactcatatcagaaaatataattaatgaaattaataatgaatcagaatcccttgttatccatgatgttcatgtagtacaatgataaaaaaaaaaaaaagtttaacggtatcttttgtgacttgtttgtgggacgttgttgctgtc

SEQ ID NO: 212157 - DNA, 807 bp, Homo Sapiens
  misc_feature (699)..(699): n is a, c, g, or t
  misc_feature (775)..(775): n is a, c, g, or t
ttttttttttttttttttaaatcaaaactgtttattgtaaaaaaacttgaaaattgttttttaaaaaagaaacattgatttcacaagtcttcaggttgtttatagacatagctatagacaacatctcagtttcatacagaactcattcaatcatataaaaataaacacaaatttacattgactcatcaactatacaatttaaaaaggcacttggaaggggtattgtattattgcatttgtggtatgcatttgaaatagtttaagtacattaatgaatttgtaagaatcctcttttgcacttattcccatctttaattaattttcaaaaattattaaaatgttttaaaatagtaagacaatggagcatgcgccaggaatgttcaaagctaatctttccctcctcccccaaggcacatactgttaattggcaaaaacaaaacaaaacaaaaatacttttaatacattctcctgtgttttgttcttgttatttttttcctcccttttaaaaatatactttaaagcactacaggtaatcaaaaaaaggctttagttcaacaatggcaaccagacaaccgacatgtaatggagtaaacttggaatactttttaaggcacctgagttcgcgtctggcagatctcttcctatgggaaatcctattacagactctattacaaagcaatactgttcttttcagttganatgatttggcagcaatggtaatctttgcatttttttaggaagaaaagatgcatgtgcttttcattttatctttgangagaaaggtactgtcttttattctctcaatct

SEQ ID NO: 212158 - DNA, 635 bp, Homo Sapiens
ttttttttttttttttttgacgtatatatttcattttattgaaacattcagaaaatactgggagtgaagcctgacttgcaatacagttctctttgctggcaatgagcatctgaaataatgacacttttttctttagtgcatatgaactgtttgtctccagaacagaaaaccaaaagtttaaaaacaagatactcccgttgacatcaagtcttcagaattattcatctgatgcttcctagtttccaaagtttcgcttttttcgatttgcacaggcagctgttgaacgctgatgctacacaaacggttacaattgtttacttaagcaaaaaatgccaccagactgactccatcctcaaaatgcagtcatctggacggggggaggcatcacacttggggagccttgccaggggccagatcataaccctgaggtgacacagggtaggacgcgcaaaaccaccggcgccagggcgtttccgcagggtttcccaaaactcaaacgcagcggctcacggtttgccacgtcccccaggagaatggtagacacagagaggaaatgtggagagggcacaaaccgcaaggtgaagaaaacgaacaaacaccgagttgatacggatagtccccctcgtgccgaattc

SEQ ID NO: 212159 - DNA, 750 bp, Homo Sapiens
  misc_feature (664)..(664): n is a, c, g, or t
ttttttttttttttttttacaatacaattttcattttattttaaacatattttgcatgatataaaaatattgatcacagtgagttttaccaattgttgttgctataaaaatgaatgcagaaacaatatttttagtggaaataaattatatagtcattcttttaaagaaatcacaagaggaaaatcttggctgtttggtcattggcagaaaaccagtctttacaagaggccttttgcagatgagctccagtccatttctgtaaagttatccacatggttcaggaaagacagacttttgtctttgttagcatggacccacaagggtctctctgttcacagacagttctactgtggcaacacagttttccataatagaaaatcgatgaactggaaaacagtacaatcttagctcatttgtggtcttttccaatatgaagggacacaacgacacacttcttcactatatgaaaatcctggctcacaagccttctggcggttcgtacatggccgtctgtaacagctgcatgtttggtggtggaacttctttccttttaacaagcatttctgtggactttctgtacattcacaggcacattttccaggatttaggggttgatttctggggcaggttcttttacatacacactggcatgtgttttcatcanattctcggttggccccacattggctggggaagatttgtttttacagacacactggcatgagtttctgtctagttctttgtggggtc

SEQ ID NO: 212160 - DNA, 738 bp, Homo Sapiens
ttttttttttttttttttcaggaaaaagtatttattttacaccattacaaaaatatttaggcacataattttcatgtttatgtcacctgatttacatacctcaattcctcagtaccttttaacactaaaaatggtcatttggtaaatagactctaaaatgaaaaaatactgtgagaagctaacacctgtagacaaaaatcagttgatcatcagcatgagaaagaaaacatttgtgaaaaaaataatctctaaaaacatttttgtgagacaataaatctaaccagtagatttctttttaaaaagtatttttaaagaacaaagctttaaaaaaaaaaaaactacaacactgtaaactatatcctcatgccatgaagcagcatcctgaaagtaagacctagaagactggcttagaaaacagtaatggtgccagggactcacaatatatgacaactgagacaggcctggaagcaggggcagcatggggtcaagtgctttcaattcagagaggggaaaaggaacgctggcctttccaggagccatctaaaggtaaaaactgagaaagatttaactgaattgacattctaaaatgtaactatgtttctttaagatagaaaataattttcctggccggacatgtggcacacacctgtaatcccagcactttgggaggctgagacagaagggttacttgaggccaggagtttgagaccagtctggcaacagagtgagacctgtctt

SEQ ID NO: 212161 - DNA, 646 bp, Homo Sapiens
ttttttttttttttttttcaattccaatttttattagccattctatgtacattgataccaagtcctgaaaactgataaaaacatgtccagaatttctttttttccttttctgagaaagggtcttgccctctcacctaggatggagtgtagtggtgcaatcacagctcactgcagcctcagaatctcccagtctcaagtgatcctctcatgtcagtctcctgagtagctgggactacaggcacatgccatcacacccaactaatttttttattttttgtagagatgagggctatgttgcccaggttagtcttgaactcctggactgaagcaatcctcctgcctcagcctcccaaagtgttgggattataggcatgagccacaggacctggcccatggtttcttatacagtcaatgtacaaatgctcatttatattttgcacaataatgaagataaaaataacaattatagcaacatacaaatatgtacaaagattccagacagactttgttttttggcttataacaatgtgtagatactacacaaagaatgaggatgtaattttcatttacaagcaaaatgtgaccaaaatcccttttcttcttaaaattgaaaaatgaaattccttgagaatactaattagtgacg

SEQ ID NO: 212162 - DNA, 723 bp, Homo Sapiens
ttttttttttttttttttgcaacatacaaaaattttaattatttttgcaaaaagaaagccaactattcgccttgggaaataataatgaagtacaaatagctctgactctgcatttggacaaggatgaaccatgatagatatttagaaagggttttaaatcatgtgtatgttggctacagagtaaaaggaacagagaagactcaagctattgtcaggtgtgtatgtgtcatcagcacacactgggggaggagagtcctcactaagtgccacaacccctgatagctgtcagtctctcatgaagcaccatgatctggcatggactcccaaatgccacttgagagaaggtcttcacagcagactgtgcatctgtgtcacaaaacacggctgcaatgaacaacagtgttcattttttgcccttccaaatgtattcttgtgtatgatcgaagcaaagaaagttgaggatggagaacacgagccttcaccatcagttctgctgctgaagccttctccaacagccctaaggtccgagagcctgatgaacttctgcactgatccgtgtatcattctggaacttggtggccagatcccaaacaaatgagaagagttactattccaaggctgcttgcaacacacaaacactggcctctttacacggagcaggaacaaaatttagatcctatttgacctaagtgtggttaactattcactctgtatccggctgga

SEQ ID NO: 212163 - DNA, 663 bp, Homo Sapiens
  misc_feature (565)..(565): n is a, c, g, or t
ttttttttttttttttttaaacagctagtttgatacactttaccaatttaatatccacctgtcagtgtagacataataacattttgcatgtactagcttgggtctataagcatctagggtgctcaagtgttcatctttgtaaattatcaccaaggctgaaagaaaaggacaacaaggaagcctcttgtcccactggggtatgacataatacaagttgctaactcatagtcctttgatggccaagaaactgtgctgaggtcacttatctaaagtaggtaaagatttagatgaagatttcgccattgctttcctagtctgatatataattcaaatcagctaggggtcagataagagctatctgcaggctgaaaacaacaacaacaacaacaacaataataataatgacaatgctagtagtcataaactaaaagtccacactttaaaaattaataaaactggccaggtgcagtggctcatgcctgtaatcccagcactttgaggagccaaggagagcagatcacgaggtcaagagatcgagaccatcctggccaacatggtgaaatcncatctctactaaaaatacaaaaattagctgggcatggcggcgtgcacctgtagccccagctacttggaaggctgaggcaggagaatcacttgagcctg

SEQ ID NO: 212164 - DNA, 673 bp, Homo Sapiens
ttttttttttttttttttagtgtatcaagtttattcacaaatcccagtacaacccccttcagggatttcagaaacctgtcccccacccccaacccctccaggtcatgtcagctgatgtgacaacggcgacattattctcccagcaaggccggatgccagtttagggcatgatgttggcgacgctcctccacagggcgggaaggttgatgaaaggcgtgttgaccgaggccccagaggctaacggcgtggttgtggcccctccttgatggctggaagatccgctttgatggttgccattcagcagctggttggcctccttgctggcttggttgaccccattatgagcattctgcagctccttcccggcctggccagcagcatggtgggcaccttggccaagcttctccacttcctttccagcctggtcagcagcatggttgaccccttggccaagtttctctgcttccttcccagcctggtggaccccagtgtggaacccttggaccgctttgtctgcttccttcccggcctgtccagcagcgttgttgaccccatggccaagcttctctgcttcctttcctgcttgtccaataccatggttgatctcatgggcaaccttgtccatgccgtggttgagcccctggacgcctttgtccaactcctttgcggtgtg

SEQ ID NO: 212165 - DNA, 618 bp, Homo Sapiens
  misc_feature (599)..(599): n is a, c, g, or t
ttttttttttttttttttattttttaagagtatttattccaaacacaatgttcactttaaatgcaaaatagctggtagaaaaaaaaacactgaaaaatatactgaccctttgccccatatacagacatcagcctttggtatttgctttcaggtaattaggtaaaacaaacaaacaaaaacttgaaactattatttatctccaagaaaacaacgtagagttgaggtattctatttaacagatgtgatctccatccaataaggtctctctgttaattaacagccttgtgacatgctgttccaatcctttcctcctaaagtagaatttcatttgagcatatgttcataaaactgacagtgttccttaataatcactaaggttgccatagaaactccctggtgctggtgcccagccgcacggaggacaggaggccttcacagggcactgaggagggcctggcacggaccctgaactggcccgcctgcccctccgtgtgcagcccctgcccacggctgcacgggacagctgggtgcagggctcttgcctcaaagggtcacaggttgcccctgcatctccaaattaagaccaccaactccacctnggagctggtgtcagcatcc

SEQ ID NO: 212166 - DNA, 629 bp, Homo Sapiens
ttttttttttttttttttaatcataacacagaaaagcttttattatcatagcaaaatcacttgattcctcatcctttagcaagaagagctggtaagttacaatgttctttggatgggtgagagcactgaatatctgagtttactttcacaaattataacttcaaactaaccttttgaaatcttctgccagcagtaatgccacattaaaagatttctaacataagttgctgaatttcaggcatacatgcaatgagagtcacccctctcttaacagactccagaaattgagcatttgttggttcattgtaaggtctcaattctccatcatctaaactgaaaccattgctccacagtttaagcaaaatctgaacatcttgcagctgattttctccatagatatattcagaccgcttacaaaaagaactacccaatctgtatcctccacctgtaaatgacttagatttatcatcacctgaagctcttgtggcttcattcagagggacagccccatgttcccttgcctctttgaaaagttcattcacaattttcccagttgaaggtcgaactatatttaatccactgtattcatgttcacttgagtaaaccgttgaggtggtgtccgtgggctc

SEQ ID NO: 212167 - DNA, 678 bp, Homo Sapiens
ttttttttttttttttttaatcgttataacagttttattcaagtctctgtgtgctctggcattgagaccaggctgagatcagcattacactgtaatacaataagaggtttagccattgaaccaagcctgcttggcatccctagttaacaatttacagtacctcgaaagaaaaaaaaaaaaaagccaaaggaaagaacctggtaagtttccttcaggactttttcatctttaaatattgttgacaacatacaataacttaaatcccaaagcaaagtgggaattcaaggacacggggtcaggacacatgaacaagacactggagcagagaaggtctagggataaaaactagtagctaattacagagcaaccaaacaaacacatgtgtgaactttcacttcacctagacttaaaagccctaagggggaggaaaaatcccaaagaaagcttttctgtgaactaagtaaaacccatctccaattcctttccttaatcctctacaagccttagactataagatatctgggtttcggtggggagtgcaggatgagtagggagggaaatcagaaaagaaagtgagcaagttcatcacctcccttctttgctacaactgtgtatcaaaggcatgtggctcaatgtgacaaaaaggcaaaagcctgacctcaagtgcccagggaggag

SEQ ID NO: 212168 - DNA, 711 bp, Homo Sapiens
  misc_feature (634)..(634): n is a, c, g, or t
ttttttttttttttttttagaaagtacccggttttattatctttttatcaaaaaaaatcagtaacagacaacagtgtgagaggtgcctacagaggaggtgctcactccaacacagcccaaggggaagggcactgggggcagaagaggacccagccagctgggaccctgggttgcagtggtgacgggagctaatggccactggtgcagcaagggagggtggttcccctcaccgcagccactggggtcaggaggagacacgacctgcccaggctaagccaccaggcctcccctctcaggagagggagggtcccagacaacaggccccagctggggcctcatcagccctcccccattcccccccccctacccagggagacaagggtcgtcccagcacagctgaggctgtgactcgttaagccagtttagttctctagaatagtgctgtccaacagatggacatgctctcgctgtcagtacagtagccatgaactacatacagtgacgcctctagaaacgtggttagtgcaactgaggaaggaatttttaatcttatgtgattttaattggcttaactttaaacagccgcatgtggttactgtattggatagcacagccctagagcctgaagaaaganaccaaagacaccagctgggtcccaaacagaaggcagaaagggtagaacatccacctcaactattccagccccatcag

SEQ ID NO: 212169 - DNA, 679 bp, Homo Sapiens
ttttttttttttttttttcacacccaacagaatggctttaataactttaaaaagacaataacaagtgttgacaaggatgcagatactggaactcttatacactgctggtagacatgtaaaatggtacagccactttagagaacagtttggcagtttctcaaatggttaaatacagagtcaccatcaactgctcctgctcctctgatccctgtggtaaggcttcacacatacctggttcttaaaatggccaacaagtatcaagtcaggtctacctcccatggtctccatgctcctctctgaggccatctcttccctaattccaaaccctcggaactgtatttcatccactaaaacactggtttttgctcttcactagttcttccctgacaggtgcaaagtcttctgatttttctccttgtttcctacacattcttcctccacaaaatccatgggctcttgtccatgagagcagctcctgtgacaacaccaagttcaaagtcctctctttttccacctagaagtaaactaatcacctcatgaaagggtaactaacttctgctgtagataaagacatatccatccttcctatctgaaacaccattagccacagaccagcatgcctaaatgcctaaacaggtgagaaactaaagaaaaggtggtatctgaaatctcagatgac

SEQ ID NO: 212170 - DNA, 732 bp, Homo Sapiens
  misc_feature (685)..(685): n is a, c, g, or t
  misc_feature (705)..(705): n is a, c, g, or t
ttttttttttttttttttgacaatttactctttattgattaaaaatgaagaaaacatgcagtaaaatacaaagtccaaaaaaaggaggaaaaagttgaatattttacatcttccataacctagcatacatcataaggaggaatctccacttattggtacatcattattctctcctccagattattaaatattatcagctggctctaggatttggttcaaaacttaagcaaaaacccaacaaatcctttagtcgtttagaaagaccaaacatttcacaaatagcattggcacatattactttgtgctatagttagtccctactccagggacaaggggatcctgggacctagtcaaagaggtgcactctgaatcagcattcctagaaaggagtacagtcactcactaggttacgtgctgttccacctgggcagtttctgttcatgtattttctcagtatcactgcacaagccagcaaagggagtctaccacacatcatgcagaagaagtaacactgtcctgggacatggtgtctgtcttctaattcctagcagggcaaacaatgaactgaaaagaaggagaaaccccagcccaattctatttgccatgactgccccactgcagttcacaggtaatgatgggctagagaaagtgaacaggggatgggctgctgctcactcccagctangcaccagaccatctccacanagaatgctagaacagagtgatgctgcc

SEQ ID NO: 212171 - DNA, 657 bp, Homo Sapiens
ttttttttttttttttttgctgagggtagggagtatggcatttattaaccctgtgtttcccccgtcactggtcactgctcttgactcgtagaacaacaggtacagaactgcaagggatcatccccagctccgtgatcaccagatccacaagctctgggggagtcacatcatagactagattcaacaaccgtagggatgcgtggttctgccagttagccagcgcaacatgttctccccgcttacattgcagatcatcagggtcatctagctcattagagacaaaggcatcagtctgcacacgctcacagaacttgtatgtttcacagcaaaccagcactggtacattatgggctcgagccaccagggctaactgtgctgtccctacccgtgacatcacagacccgttggccaagagtgcatgagctcccaatagcaccttggaaacctctgggagcacataggaggctgcaggaatcagcaggtaggaggctgggacaccagcatggactagagaacgtagtgtgtgccttccttccagccatggccggctgtccaccactaccacccgaaaccgccggccctctgtccaagcctcctgaagaattcgtgataccagagatgagcatccatataccaggatcacatctccattactga

SEQ ID NO: 212172 - DNA, 728 bp, Homo Sapiens
tttttttttttttttcttacatcagattttattatactgaaatacaagctacatttttacaaaataaaaattctttgtgagtggattgacttaattttatttctgtataagctaaatatgttgatctgttttatgaacatgtattttataaaaatggtcacaatatattttttaagttaactgatttattgagggaggaggaggagagttgaccaaagtctacatgcatagacagtcctaaaagcgtatctcaaacatgaagatgtaaatttgagagttaatgatacaaatttcagcaaaaacattttacaggcagagagtgttttggtgtttataaaagctgaactccttttgaagggcttttgtacaaatacgcatgctcatatactatatgcatatataggtgtacttcattttgagaaagtccagtgtaatactagcatcaaatttacaaaacaggtttagtgttgactgactgaagaactcactacaggttttacttcaactgcttacattcaaaagtattcaatttacaaattttaggtacttactgtgtaaggtaagtacatctatacataaatacttttatgcaggtataatataaacatagcaaatagctgaggctattttctaaggtgtttggcttagtgaaccttttttacatctttatagttttaaagtcaaatacatagcagtctttatttgggtgtatgttatcacagaggaat

SEQ ID NO: 212173 - DNA, 690 bp, Homo Sapiens
ttttttttttttttttttgccagttctattattaagaattttatttttgagcattctatatacatttataagtgtacatatgatgtattttatgtacatggattaggaagttcttcaagggcaccattaagtgcccactggaaaattttctacaagagaatagtttggaaaataacagatcaatttaggagactaaaactatacattgatataaagaatggatataggttttctcaatccagaatagtaccctcaccccctctgccctcccctctcctagatggtcaccatagggcagtaaagtttaatcagttgagcacggagcttcagggcgctggcacccagactatgatggagagaaggaaagagcaacaaacaaacaggcacgttggtagttggctacagcctgggtataagcccatggcatcttcttcccccgagactggggatgtcccggcaactgagtaagggatgggcctcctgctgctgacttctccatagtgaactcaatctccttgcctcacaagaacatcagagaggtcctctgttccttccagttttagattcttttcattggctaaatgtaggagacaggcaaaagccagaggtatggagaggttctgagccatgacagggggcaggctcctctgcaggtccttcgtgagcccgctaagcacttctcgtcagcac

SEQ ID NO: 212174 - DNA, 706 bp, Homo Sapiens
  misc_feature (679)..(679): n is a, c, g, or t
  misc_feature (690)..(690): n is a, c, g, or t
ttttttttttttttttttactttaaaattacattttatttctctttatgaatatttgctttttgttttttgtaaaaaaaaaaaaggttcattttacatcttcttcaagagtcttgtgcctcctggtaagtgcattggtttgtttcacagtactctccacgaccaaggacggttcttattgctggaaggagtgagtggatgtccacgccagggcggggctggaggacataagaagaatcggggccctggcaggaagcctggggcctgtgctccaacaagagcaaggaggctgaaggagcagaccggggctcagctgagcgtccgtggccggacctgcagcctctccagggtgttcctagcccttcttcggtgaggaagggcagaaagaaggggcacgggtgaaggtgggtcagggggcaaggtgggctgggggccgggcatgcagtgggaggggtgctggctcctgcctcgagtgtttgctctcactcaagaaatgcgggttcgggggtccttcaccccctagcagctcaggaagcccctttccattctggtctccagccccacctccaggaataaaccagcggcctgagacccgcttcctgaacccccagggtcctgtccctgctttagtgcaacaaagacctgagtggagaagtctccagtgaatgaaagctgagtcncagccctgtcnccacccatcctcagac

SEQ ID NO: 212175 - DNA, 635 bp, Homo Sapiens
ttttttttttttttttttcatttttcttacttttaatatctaagataaaaaaaaaaacccaaccaccaaaacaacccatttgcatgtcggcgacacgcctggtctcgggctccctttctggggctgtcctcccaggcggctcccaggtcctcatccagggaagagcccagcctcggccagaagccaccgcggcctccagttccgcaccgtgacaacctgggacccagcctttcagaaaggccaccaggaactgtttttaaagaatagggctgcactaggaggaagttttcccttgaggctgagagttatttcttgtggagaaatttcattttattgcctagtcccttcaggaacttattgacaccgctgtgctctccactggggagtgtttccagatactcttgggctcggacctcaaacagacctttggcatcctgccggcgcagctcccgctcctggatgaagccccgaaacatctgagtctccatgaagacctccaggaagtggcggaggctcttggaggagacagctttgcggaaggcctcccgctgcagggttctctcctcacgctcgcccgacgtcaggaacaaagagtagtgtcccacaatctccacgaagaagcggacaaaggcttc

SEQ ID NO: 212176 - DNA, 692 bp, Homo Sapiens
ttttttttttttttttttaggtgtccttatgagtatatttatgtgtcacacacacatgtacacactcaatgctggacgggagggaggttgagacggacaggacaggaggaggcacccaggtggcactggcacaggggaggagaggggacacagcgagtgtgtggccccactttggccccccaccgcctcccaacaggaggtggacctggagctggaagaacaggaaatgcttattctcttagaggacagtttcaaagtgcagaaatttctcttataaaaatcctcttccctccatgctctgccccttgctgaagcccagccccctgcgcaggctgtccgtgaggctggggcaggacaaggtcaaggggaagggcgtaaggccaaagcactggaagggcccagaccacatgggcctaggcatagtggctgccgggcgtcagggggtggtcccctctgtggtccagctggtcctgtaagcgggcaaactccgccagctcgttgagctcctggaactgtcggtcagtcttatggctaaccagtgagcggtagaagtggacggcgaagacgataaagatcaggccgaagggcaccatgatggtggtcgaggcgatggcagctgcctggcccggggtgatgccgctggtgctgacgttggctgctgcgccactggcggggggcttgctggtgggcct

SEQ ID NO: 212177 - DNA, 726 bp, Homo Sapiens
  misc_feature (599)..(599): n is a, c, g, or t
  misc_feature (695)..(695): n is a, c, g, or t
ttttttttttttttttttaaccattaattatatttattttactgtgagataaaagcaaaacataacattcggagaaagagaccagtaactgacctatttattttatattatattaatgtgaatcctcattagaaatgtgataacgttattgcacaaacaaaaccgtgggcagaaacatcccagcaatgcaggggcgcccataccgggttacaagggatgtccagcatgtgtttccctggaacactcagagtctgcacttttcctgcaaatgggaccatgtctgattatttattatgaaagaacactttaccgaccatttttttctcagttggtataatgtagaaataggcttttttacatccattaaatagtcttgaaaacatttttgcactaaatcaaacgagctgatatcagaaagcaattgccaccttccacctggagtaatgtgtgcatttttaatgctatgattatatgcttctttagggtgacacagtttctcttctggcttctataacacctgcattaatcttccttttttgctgttaaacaaaacttgctggcattatgcatcccatccactgggggtgggctgggaacanacaggtttcgatggttcttcacaaggagacaacaatctgaattatcttttacaaacagtgaaaatgacaagatgtttgtctctcagtatgcatttntaaacaacataaatagaatacacttctttta

SEQ ID NO: 212178 - DNA, 669 bp, Homo Sapiens
ttttttttttttttttttacttggtagacaaatatttatttgtagaaaatctataaataatatttttttcacaatcacactgtttacttgctgccatgtttattataaggaatagcttttcattttcttctagaaaaacaagcaaaaccagaaagtgcttggaaagtgaccttgaatgcaatttaaaaccctacaaaaatgctgtataaactcagtatactaatgcagtatttggcagatctttgaatattttctccagaacataacagtataccagaggttgcaaattcaggtcatacaagggccaagtggatgacataagtgagcagcatggtggcagtggtactgtggcaaagtggagagcacaaggctcttcccaagtgagccaccaccgcttggtcctgcagactgatgccaggaaagaacaaaggcctctgtgtagccagagcctctgatgtttaaaaagaagcagaaatctggactttaatgtgaaatagccccattttttagaataatggttctaaatgttttttacaacactgtatgggtcacacaaaacacatccatagataggattaagacctctggtccacggtgtatgttttctgaactttttcaatagcatggtcttgccgtctttataactgcttaccacttaatttgtatagc

SEQ ID NO: 212179 - DNA, 602 bp, Homo Sapiens
ttttttttttttttttttagattctaaatctgttatttaattacttttcaattgaaaaacaaaacagacagaagaaacttattagaataaggccacctaggaatgttcttaacttttccattcagcttttggctgatatatgaaaatacaaataaatacatcctttccccaggtgcaaggctaaaccagcagctccaagggcttggtctacagtgctcagaaagacacactgccttaaaagtcaggctagtgccctagctccggtggcctctgcaaatgaggccttgacagtcgtcagtggacagacacatagtatccagcaccaggtcttgggccttcctgcttcccagagtttcacaggtaggacgcatgtgaggggagcagtccgtacttctgttggaggatggctgtagtactttccagggcacagcctggacgaatgatgccaaactttccgggcacagacaaatcaaccacagttgagccaaggcgacactcggggctctggccatccccaatttgtcccccatcaataaccaaggacaactgaggccagagatcctggaactcctcgacattcaaagaactggcctgggagctga

SEQ ID NO: 212180 - DNA, 603 bp, Homo Sapiens
ttttttttttttttgtttccttaagaaaataaatatttccacgaggtcaagccaaagtacaggggctggagacggggtgggaagtggggcaaacactttagatgagcacagtagctcctgctagctggggcatcagggcactcaccatgtccctgcacaagatgctcacccactccaccttcccatcctggagctgcacaaattgtccctttcttgaagttgatgcaatgtgtctctgtgttagatatgagctcccaactgggcccaaggacttggggtgatggaggctgcaggctcttgccaaagccaggtttaaatccctgtttctattttaccagcagggaagaaatgagagtcgagttgagaaaatgctcagttaagacagtcagtcacgggacagctgtatcctcaggaccagcctgtcatcgataagtccaagccctggctactgctgctggagaggcaaaggaacaatcttgcctttcagcgccgtcggaaagctcgagatattctccaggcattgggttcctcatagcggttgtacaagggttcaagacgctgttgcttcttctgtttgcttagcttagttgggtctgagacctt

SEQ ID NO: 212181 - DNA, 663 bp, Homo Sapiens
  misc_feature (643)..(643): n is a, c, g, or t
ttttttttttttttttttcacataaaagcctcctccacttgccaaataaaaaaagacaaaaccaaactggacacaacacaaatcaaggagagacatacacgatgtgaggggccgaggcccctgcaggtctctggcttcccggcatggtacattcttatgtaattcaggaacagaggcactagggcccctctggggagtaggagtaaaaaaataaggagattatagtctccctgtgggtcccaggcagggcaggggcagacacaatctctcacagttttttcttgtttttggttccacttctggtccccgagtggggctggctccccgtgcctcagcctctgctctgcccttgggcctgctccctctagctccccagctggtggaagggcctacagctgggaacagatgtcccagccatgtgtggtgggaccagcaggacagagtctaccggggggacgggaagcaaggaatgaggaccagcagttccgagacgctgttccctcactgactggccacccctgggtgctctggttactggcacagggcatccatcctcggccttcaacccttgaggggcttgtcggcaccgccactggggctactggcactgtcactcttcttcctgcgcaggctctcaatccanctggagctggagcgggtggt

SEQ ID NO: 212182 - DNA, 653 bp, Homo Sapiens
ttttttttttttttttttcgtttaccacataaagtttttattgaactcaaactcaggggctccaaagcctgaggaagaagagggaggctggggtttgcacgcagaggcccaggccccaccccggggccccactccccaccccacctaccttttacccgctcctgactcaacgagagtttcagcagctaccaatctaagctaacccactctaattaggtaatcccctgccctcccccctccctgctctagcagttgccaagccaggcacccaccaaggagccgcggctgaggccagccctccgctgacctctctccatttctcccagggcctcccgctgccggcctggcctccctccaacccacttcccacaagtctccagggcatgtcacttcctccaccctggttctcttcttccagcatcctcagctcctccattctcctgcggcttctccactatcctccctaaaggttcctctagctccctggccccttatcttctgcccacacctcccacccctgctggggccccaggtcagcgccggcccgccgcgtgggtccgctggtggcggatgaggtcggagctctgggagaaggctttccgcagtcatcgcacttgtaaggccgctcgccactgtggacccggtgatgctgc

SEQ ID NO: 212183 - DNA, 704 bp, Homo Sapiens
  misc_feature (624)..(624): n is a, c, g, or t
  misc_feature (678)..(678): n is a, c, g, or t
ttttttttttttttttttaacacatttgctgtttttattggtgccttgcatggcagtaatactgaaaaaggagaatgcaaaaaaataaaataaaataaacaaaaaacaaaaacgaaaaacaggttggtggcaacccacatcttttttttaagagcacataaactcctgttttatttttattgtggcatgaatgataacataaaaccaaaaacatgaaaatatacaacttatattacactatgtgttatgaacaaaatataaatctataactctatgttatatttacataattacttattattttattaaatttcaagtgagatggtaggttgcacatactttgttttaagctccaggcatttgattgtctcttttctattttttttccatttttacttgtaaaatccaaaatattagaaggactaagagctttagagccagtggagctatataaatactgttttagtgaaccagtgacggaaacactggggaggacaggaatcaatcaatcagtaggaaactcaacacatcgtcttcaacctgggaagttgatagttataggatactttaaaattaaatactgtaaaagcctggctaaaccaacagctatgccctacaagacanagggatacctgaaccactttaagtggccttcatagttttccttgcagaccccgntagttttattttattattaatttgat

SEQ ID NO: 212184 - DNA, 673 bp, Homo Sapiens
  misc_feature (43)..(43): n is a, c, g, or t
ttttttttttttttttttgaggctttttccgttttatttcttntgggaaaggaaaacaaaaagtctttccatcacatatggtagagatatatatttatatatatttatatataatttcttttgtggttggacgtcccaaagctgagtctgttcatatttttttctatttttttcttactaatgccttctcttctccctgcccctgtggcctaggcccaggttctagggcaggtacagtgaggggtgaatggaatgggcagtggtcgccaggatggcctcccacccagctcagagacctggtgaggaccacccagaagggctgtgcagagggttagaggccacacagaggggcactcatgtttttgtgggggatgcacagctcattaaacagtcaccagtcatgggaggaggctggtcaggggctaggggacttgctcacagtagttgccagctctctccaccttgccccccaaaactcagtcttgggggtgggaggaaaagagtgaaaaagagagagatataagggctgagggccaagcctcctccaatttttattgctggtgaattacaaatttgcttttcccttcctgtcttggggagataactctgagagggcccaagagaacaactgacattggctgacctacccctcatgccaggcctaccctgggca

SEQ ID NO: 212185 - DNA, 717 bp, Homo Sapiens
  misc_feature (555)..(555): n is a, c, g, or t
  misc_feature (646)..(646): n is a, c, g, or t
  misc_feature (676)..(676): n is a, c, g, or t
ttttttttttttttttttgatttatacttttgtttatctacaacccaataacagacatgagggatggccctgtctctctgggacagagcctcacagatgatgtccatgttttgtgtgaatgaaactcaaacactcttcagtttttagagtcattttctggtatcgagcgaccacaccgaggagcacaccctgcttccaaggctgctgccttctgcacacagtgggggatccccacccaccctggctcccctcaagggctgcgtgcacagtgcccgctttccagttacctgacccaccctgagtccctattccattttgctcggggctgacctcagacatgccctgtggctcagctctgccactactcagaacaccagcctcagcttccctatgtcccccagattcagcagcccagcagggattgggggaaatgctcccacatcaggtgggtggtggcctggtccctgcagactggactggcttttcagccatctccaggaagcaacacctagcagacaactgtcccttaaccccaagggtgatgcacacttctcncctggtctttctgccccccgatgcccctacatttacacagcagtgcgcagacccttgccgcaacctgcttgtcttgctgaccctgctgtangagcgcctaactgagtgccgtctccctccnaggcagctggttgatcctgtgggacgtgccttcacctttgc

SEQ ID NO: 212186 - DNA, 657 bp, Homo Sapiens
ttttttttttttttttttactaaaagaatagatttttattaagcgttgtaagtttctttccatcagcattaacagaacaacagaccaatttccatcacagaacaactcctgaggcattctcattcctttctgaaactcttccattaactcctgaagtttccccaaagaagcatccattcaaacttacattaataaactatggagcttttgtggtgaggtgggccaaaaaggcagggaatttggaatctgggagtgggaaagagaaatacatattatccatccactaaacacactgtcaaaagcacaggagaggagatagtaatacaggaaaaaaacaatgaaataattttttacttttgtcaataacatcatttatcagggagcactaaaagtcactgactccttgcagttaaagtttctttacctagtgtgttattctaaaaacagaatagaacagaatagaacagaacagaatagaacagaatagaatagaatagaatagaatagaatagaaggtaggaggggaagtgctttctgggaagcaattaaaatgaagtcatcagatttggctgggttatgagagattaataaaatctgaaatatttattttgcttcatttacatgaaaattcactagtcattagttactaccaacacg

SEQ ID NO: 212187 - DNA, 656 bp, Homo Sapiens
ttttttttttttttttttaaaaatttaatcaccttttgaagtcctaagcctttatcataattcatccatctagacagttcattctatactatagattccaaggcccccttaagagggggagtaaaaagaaaattgggagagaaaaccctctgagaggcagggttaaattatctcaaagatgactttctattgatgctgtagtgaacttgcttcaccccgaaacccaccaatccacagtagggtcaaccgattaagtccactgctttttagtctccaagaatcagttttacaaaagatgccacatctgttcctttggattcatgtagggtgaaaaatggatgttgcattagctctgggtatgtaggccgttctttggaattcttctttaagcactgtgaggtaaagtcaacaaactctgcagagaacttgtctgctgggagttgtggcgatggctcctctaccacctgtttgagctgctgaaatggagttccccatgaatcatagggaaatcgaaggatggccaactcaatcatcgtgatgcccagactccaaatgtcagacttcacactgtatctcttctggttgagctctgggtttattctttcaggggccatgtatggtttgcaacctgcatcaattgttttagcaacagagtc

SEQ ID NO: 212188 - DNA, 765 bp, Homo Sapiens
  misc_feature (687)..(687): n is a, c, g, or t
ttttttttttttttttttagacccgagttttataagaaatttattttttcacagatacagaacataaatccaagaaaaattattattatttttcacaattatgactaaatcatgttatttctagttatttacaagtactacaatgttctatgcatttcttcatcctagacattaataaaacacatccctttggtcttagatacttctctttggtctgtgttttctcctttctgaattttaatcttctgtgatgtgaggaaatttacgtgaacctttcacatatctatttttttccttgtgcacagttgataatttcctcccttagattccctatttgctcaaaaggcaaatcctctaagaagtcatctgcagcccatagcattcgtctcagagcagaaagaattagaacatcctttacagggtccagctcccactcagaggaataattgctaaccaccgagatgtcagaaagagcaaatccaagttttctttggacttcctctagcttggacctcacaggctcacatctctctatttctataaggtcaccttttgtaatcaaatccatgctatccacatgagtgagcaaagccacatgtaccacaccagcgtttaccaactcccttcgaattcttttgatctttactatcatctgagaggagaagtattgaatagagctggcatcanatacaaatgccacacaatgaattctgtccttcagcgatggggaacaatgtagtcatgatgatttaatttgattgattc

SEQ ID NO: 212189 - DNA, 508 bp, Homo Sapiens
ttttttttttttttttttaagactggacttgctttatattaaatttgtaaaagtgtgcactggcagcagcctgggcggggctggggtggagcccggggtctgcttgggcctgagccacccacaggtccttttcttccccttcttccttggaaggcagaactgcccaccaaggcagggatctgtctgacttgaagctccgttctggggtctgggaggcgtgggcaggagtgagggccccaggccctctgagcgctcaccccagctggggacaggccccgtggttttcaggcacaagacggtagcccggcctccagcaaccctaaacagctgggctgctgccctcttcctcctcctcagcccagagggtctcccaggaccctgagggccatccacagaagaagtgggccaggttgcgggtcaggcctcggtcgaaggggttgctggggcgctggcggagataggcgatgcggtgtgaggagatgaattcccaggtggtggtgttgctggc

SEQ ID NO: 212190 - DNA, 703 bp, Homo Sapiens
ttttttttttttttttttacattccagcctgtaatgtaattcaaaacaaacaagtcagagacatcgctcaaatgacagaaccaacaaatacagatgctttgcatcaaggaaatgaatctactgaagaaatgcaactgaggagcagcagcccctccagggcctggagctgagcttctggtggaacggcgaggcccccttctgggcaaaggcacacagtgcgcccaaagggctgtgcaaagctgccctgtagtcatggaggtgaactggggacttcctgctgtggataccctttccagtgttgtgttcaaaattttacattttagattttaaatttattatatggattataaaagaaataaccatttgtttcagattaaattgaccattctatttttcagtcagcattctcaccaccaaatggcacctatcccctttaccctgtgttccttttgctttttgccaaaactcttattgtcctccaataaactgtgtaatctatcatatccatctccccttgctagaatataagctccatgagggtgggataatttggttttttgctcaataacaattgtcccatttatgtctttatcttttaagactattcatcttcaaataagacataaataaggttttattatagcaatatgctataatttttacgtgacaactcaagcacttgttttacaagtatgcatttttt

SEQ ID NO: 212191 - DNA, 536 bp, Homo Sapiens
  misc_feature (509)..(509): n is a, c, g, or t
ttttttttttttttttttactggtacatttaataaatgtttattagcacctatcatacaaggcacaaagaagagtaaaagacctcatggatctgaccaatttgtgaaagattcattagaggcaaaatgaatggtcagagcagcagccccccacatcagagccatccaaccagatgtcctaaagtgctggctgagggcaattaacaagtccagaaggccatttaaatacactgggtgagaacaaactattttaggtcctacaacttccagaccactctcccatggcctcttatcaaatgacttcttccaatcactttctagaatgtagaagataactcatcgtctcagccagactacattttctaatacccgatgatgtatagtggtaaataaagccctggtccacaatttctgtaaccattaagggctccagggtggcttcagttcagtgacaaatgagcaccaatgttggcatgaataccatgggtcactgtgaaagagtttttttcnctacatggcttctctgatgttgaacaa

SEQ ID NO: 212192 - DNA, 622 bp, Homo Sapiens
ttttttttttttttttctcagcaaggcaaggtttacttctgcagaaggtggctgcttgcgcctgtagcagtctcaagagcacattggacagggaaaggaaggggtttttaaccctaatgcatcatagcttttgcttctgtgttttttcctcattggctggtggttgaaccacacaatgtaagctgatcccgattggcagtttcaaatagagtaggggtatggattacagtgatagtgaagggcagttttggtcggcgggaaagacagtttctgcgggaagggcagtttacagaacaaaggttacagaacaaaggacaacgaagttggacctttgtagagcaactcattttgtctaataattttccccttttgattttgtagtccttcctcttcatatatttctaacaggatctggcttcactgctcttcttggttgcttagaaataaacgtttatctgaatagggtgggggagagttgtgggaggtcttggtaagggctgtttctatgagcttttgaactagtccgcagacacagggtataatacagcaccctaagagaatgagcacccctattatgatcacaagggaggtgagaatagaggccattagtcctttccatcta

SEQ ID NO: 212193 - DNA, 674 bp, Homo Sapiens
ttttttttttttttttttgtataaaaataaatatttattgccatttgaagctttatgtacacctttaaaagcacatgtacaaatgtgggaaattacaaaaatcaacctaaaaccctttttctcaaagtatacataaatgtacatccaagatcagtggtgctaccatcattagaataaaaaataagtctgtctggacataaacaagcaatcattttaagtgtcattcagatattctcctttatatttaaaactccaaaaaatactaagaggcccaatatatccagaaaattgtgttttcactttaccctaacttatgaatagtggtatacaaatatatttccatctttttgtccagccagcaaatgagagtctgtacccgaccatttcacaaaagaccaatgttggtcagagacaggtgggaggagggcagtacactgaccgagaagtaagtcccaaatggcaattgttccagaagtcaagattgctgctgcacagtgatctttcacgtcaccttccaggaacctgccagcctgccctggaggaagacagtacagcatcacacccacgctgagagtcgtcttagggttaatcacaatgagctgaaacacagggcttcgcaacgactcactctctttggcacagggatgactcaggacaataaagagaagcccatt

SEQ ID NO: 212194 - DNA, 652 bp, Homo Sapiens
ttttttttttttttttttaacaggaagaaatatgccttttattaggagttgcatatgtacagagaaagctgtttctcacagctcaggggaggctgtgagaaagagccactgtcatccaaggtcactgcgcgtacactggtaacaccacttagacaccgccgcacgtgattaagaaacagaaccatgacacagaaatgcagaagagacacgggtacgtgtgtggacacatcatttctaaaaacaagtcaacacaaaaatacaatgtgccaataaaaaaaaaatagacatatccatacatgtctttttttctgtttttaaagtaaatacatggtatgctgagctttcacctccagctttttccacatcgggattcacaggcactttagcaccccagccatggtttacaatacaggatgttcagaacaatgaaggaagatgggagccaccgagatccccgagacccacacacacactctaatactgacgcgagagtgagcttcctgccaccaccgctgtgggacccgaaaatgttctctgtgtgatgtgtaacggcttttcctttgtcttttatgtttcatggcagaactacttaggagcgtggcatcgccagtcagacatgcagtgtgtggatgcattagacaagcatcaattg

SEQ ID NO: 212195 - DNA, 721 bp, Homo Sapiens
  misc_feature (699)..(699): n is a, c, g, or t
ttttttttttttttttttacacagcatcttgggtttatttggggttgggcacctcaggttcaggcacagtttgttcctgggtagagtcacaactgctcctctcagctctcttggcacttcagggggctgcccctgcaggtcccctccccacgtccccgtttcctgcacacacgtctcttcccccctccctgctccccgagtctctcattctttcaccagcctgtagatgtggtgctgagccccgtgctcactggctgacacctcaaagacataggcaatgcacagcaaggtctcctgtgtgtctctgttggtgaccacctgcaggatggtgaagttctccagcacgctgttcatcatgtacttctcagggaggtgcttgagcttgtggatgaagttgatcatgtactcacagagcggggaccggtggatgcggtaagagtagtgtccattctcatagcgagcatactctgtctcaactttctccaccacctgcttgccgaaagagcagaccttcgtggagcaggtgatgatcatgttctcggggctctcatactggctggagaccccatagaaggagctgccttcatcctcgatgttggtgttgaggtctgcccagaacttcacaagaaaaaaggcattggagggtacccgttcgaagagatccttgagtcaccctttttctccgggaatttgtcatanatttggcggatgtccacggctt

SEQ ID NO: 212196 - DNA, 627 bp, Homo Sapiens
ttttttttttttttttttaggttccaataaaattttatttatgaacactaaaatttgaatttcatatgcttttctcatgccacaaaatattattcttttgattgtattcaacctttttaaaaaccatttttagctcacaagctgtacaaaaacagacggtgagtaaattggcccacagaccggtttgctagcccctgggcttaagagatctgtccacttactcctcaacatgcagagtgtgaactgtgtgaactgcataggccacagcaatcttactgcatccattcccgctgcatcattatttttgatttgtattcattcagtccaccgaagcattcacttggcacctctccaaatctgggtactgtgcaagatccttccttgggacactgaaggaaaatcagacacggcccttctctcaagttcgcagactctccggtatccagatactacggctctcatagtatcagaaaacacagccacaagcgcaggtaagtatcagaggtgttttacgagatacatgtatcagattcttaaggctgctgtaccaaaataccacaaactgcatggcttaaaacaacagaaatttattccctcacaatcctggaggccagatgtctgaaatca

SEQ ID NO: 212197 - DNA, 824 bp, Homo Sapiens
ttttttttttttttttatgtttaaaattaatgactttattgacacaaactttgcaatgaaaagtggtatcctaataggatagtaaggattagtttctgtctcatacatacatgaaaaagtagccagatgcatttttagtcacatggtttaacttctggttgctgtctccgtgaaatccagattgttctggggagggccagatcatgtgccctgcatttccttctcccctgtaagtgagaaagtgtttctatataaaacagagacactttcttaaggtgataaattccaaacaacatgcagcagtgaactgatgcagaaacaaagctgtaaagagaagccacaaagcacatccccagggagaaagagcccttgaacttgcaggatcactgccaacctttggcagctgggggctcctgctgagtaatgccagtggggacatatgaatcacaggtttttcttttatcttattattgttaaaaacattttttagaacataaagttcctaaaagccctttctcaaagaatcacaaaatgatgaaggtttagaaaaactatagttgcgtgtatggtaaagtcttgtacattgattagaacacctagtttaagacacaaacctaccctgaatataaaagtttccattgcagagtgatttgcaacacacactataccttaagggtctaattcagtctcctagttatgaagtcactgttagattcaggatagatagtcacgactaaccagaccccaatccctcaacatctgcatagtacctggcacaggatggacatttaatgttttttgtgataatatacaatctgcccaat

SEQ ID NO: 212198 - DNA, 677 bp, Homo Sapiens
ttttttttttttttttgtaagcattcattcattcatttattcagcactgaaacaaacaattattgggcattgatgatgttcaggcaggcaggtgctaacaagcactgacaagtacatgaaacacagcccctgcggtcccgcacgctgcaggggaatgccgatcaagaggccgccttggtgattgctgagtgatcaaaaggcacacagaggagggagacaagtccttcagtagattaaatttggccctgctttataaaaaatgctatcagagccagggaaaatatctatgatgcttcgtttcacataaacccgagggatacactcacctcagctatcaacagcaaagtgtcttctttgaagctgaaccctttcattttatcttcaatttcctgctgagtccttaagttcctctccaaagcaaacgatgtttgctgaggttgggtaaactgaagcagaagcctgaaaaaccgaaaagtctcaatgcgtggcgaaaagtcccaacgcttccagataaaggaaagccgcgaggaaatgttcagaaagcccaggtattgagtcggctgcaagtcccaccaggttaaaaagcaggtacccaccctcactagaactatcatttcaatccctaaagcttccgacttggaatcaattgcccaactttacattggagattcatcttt

SEQ ID NO: 212199 - DNA, 615 bp, Homo Sapiens
ttttttttttttttttttgaacatttatttatttattttattgtttatttttgagactgagtctcactgttgccctggctggagtgcagtggtgtgatcttagctcactgcaacctccgcctcccaagttcaagagattctcctgcctcagcctcctgagtagctgagatgacgggcgtgtgccaacacacctggctaattttggtatttttagtagagatggggtttcaccatgttggccaggcttgtcttgagctcctgatctcatctcaagccacccttcttggcctccgaaagtgctgggattacaggcatgaggcaccgcgccgggccgaacatttaatttttgattgtagaacttgaatatctcttgcagtgacactttggttatcacttgatcagaaaaatactcgtcccagctcaaacattacctctatggtaatgaggatgacaatcatccactccaagcggagtgccctcttctcattcaggtgattccgcattagatctgttagttccatgcagtgctgaagtttttcattcatgaccttaactcttcggccaatgctaaggaattgacacgttttatcgtaaagtccttccaggttttctctg

SEQ ID NO: 212200 - DNA, 728 bp, Homo Sapiens
  misc_feature (657)..(657): n is a, c, g, or t
  misc_feature (714)..(715): n is a, c, g, or t
ttttttttttttttttctgcactcattttgatatatttatttgatttatttacataaccagtagaaaggagattttaaaaatatttattacatttgtttctagaaatcatagaaaataaaaattgatacaattttgatatacaactttagaaaggcatatttatcctttcacaccagagaagtttatgcaatgccagacatggaaataccaaagccactggtgacaaagggtaaacgctactgatagaagaaagccttgtccatttttatagttttcttctctaccattatttatttttgagcaaataccagtccagtggaaagagttctgaacataaaaggcacctagagtaaaaattagaccttaactaataaaacagctgtacacgtttacatcaagaaaaaaaaacccggccagcacagctcatgcctgtaatcccaggagttagcctcggcaacatggccaaacccccgtctctacaaaaaaatacaaaaatcagctaggcgtggtggtgcgcgcctgtactcccagctacttaggaggctgaggtgggagagtcactggagcctgggaggtcgaggctgcagtgcaagattgagaattgcaggattgcactgcaatccagcctgtgctacagagtgagatcctgtctcganaaaaaaaataaaaaataaaatgggcctatcaatgcaacgttcctgcaaggcattganntatataatgcaaa

SEQ ID NO: 212201 - DNA, 728 bp, Homo Sapiens
ttttttttttttttttttaataagtaaatatatttattaaatataaaaggtacacagtaaatataaatgaactaaatgctttagttaaaagacaataaaaattatgaaataaaaatgtatacacttgaaagtatttaaaataaatctaattttcataatgaattttaagcattaaggagttttgtaactgaatagtggaactcagaaagacatcctattcagaaggatctctcatgataatagtttccttcactattgtagtatactgtagagtttcaagaaaaaaattaaaggccaaaactgtcttacattaccattgctgtttctgcaatcttcaacaaaccaaaattttctctgtaattgtgaaaaaagaactcctccttaagcataactaaaattttgccttaaccttatcaaatacccaaaactgtagaaagagataaagctgttaatagagacatgggtatccctttttatcaggtcaggagggtaagtctctaatagagagttctagtaacttctcaaaaggtaactaatgaaggccttccttctaaaccagatagggggagatagaatgctctgagtattaaaggcatctcctgcaagccactgatacctttgttgacagagcacacagaagaaaatagcagttaccaggttacctataggtgaaatttgtttccacataaagaccactgggtccaggctcatggagtatgactcctgag

SEQ ID NO: 212202 - DNA, 707 bp, Homo Sapiens
  misc_feature (544)..(544): n is a, c, g, or t
  misc_feature (645)..(645): n is a, c, g, or t
ttttttttttttttttttacaacaaaataaaacatttatttttttgaaataacaaaatcaacaagccattttctagagtaactaagaaagaaaagagactgggcatattgactcatgcctgtaatcccagcattttgggaggccaaagtgaaaggattgcttgaagccaggatttcaagaccagcttaggcagtaaagtgagacatccaactttgcaaaaacaatttttaatcagcaagacatagtggctcatgcctctagtcccagctattcaggaggctgaggtgggaggatcctttgagcctaggggttcaaggctgcagtgagagatgattgaaccactacactccagaacgacagtgagaccccatctccacctttctgctttctttcaacattataaaccaaattactatctttttgacccagagttatgataggaaccatcttgctacaaagtggtagcagatatatgtctgattgtatgtttttatggcccctctcaacctctggctgtcacttctctgtcctttctcagttgtcncttaatagtctattctaacccctgtaaaatagggacaaatctcattgttctgatgtttaagggaaggcccagcagtacgtcacgtgctcaggaaaattcanagagttcctcattgttcttcagtatagctctttcatttgtcatggtctgaggaactactgac

SEQ ID NO: 212203 - DNA, 649 bp, Homo Sapiens
  misc_feature (617)..(617): n is a, c, g, or t
ttttttttttttttttttaaaatctcgcccttggtgtattgactaagtcagtaagcagaaagcaccttcttcctggagaaggatcaagtcctcaaaaggtaggaaatgtcaaagtgtcacttcattgtcattaaaaaaaaccaaaaaacaaaaaacaacccaacaaacaaaccccctaaaccaaaaccaccctgtgaccaaaatacccccgagtccaggaattgctgtaaacaaacccagatgcaggatcaacccttctcagcggcagtcggagctgacggcagtcactgcagtatcagtcctcgaggcaggggctggcgggagtgggcaccaggagggccaggctgccaggctgtgcgcgtgatatgtacctggagctgcagacctgggggttgcccatcctcaggaaggctgacctttctggggtccccgcgttctccctgacccaggaggacaaaagcccctttcagccctgtgagccaacaggagaaacagtgtctttcattggagtttctaaaatactctccaaagacagaaaaattcttctgtttgcccagtggtggcaggaatagattttcccagaggggttctcagggtggctgtctgtccatctgtcncgtcctccaagcgcttggttgttgagtgaggc

SEQ ID NO: 212204 - DNA, 693 bp, Homo Sapiens
ttttttttttttttttttaaaatatactgtgtactttattttcattggctataagcattcaatacatggttgaatgaatgaagaaatgaatgaatcaatgaaagatggaccagagctcagccatctcccagtttttcttcagcaggaccccctgctattattgtccctgagaacttctcactgagagagtctgacataaaacaaaatgtattaatccttcatttctcccacaaatgccgatgcgcacaaactaagctagcaccatcgccagggaaatcaaagacggggacactggagatggtcagatgcccacagcccagacagtcacagtcctagcttgggctccctgccccagggttggcacgtggagcactgccctgggtctccatggcccatagccagacagaccctttttcttacttttctcaaaccaaggtgttcacccaagacgttcaaaatttaaacactgaatctctaaatggaaactaagaagactgacaacaccaagcgctggcgaggacgcagtatgacaagaacctggcacactttctggtgggaatgtaaatgctgcactcactccgggaaaatgtctggcagttcctagcaacactgagttttcctgccctgtggcccagagctccaccccaggggcttaccagaaagacaggaaaatgtatgtacacacaacctgtg

SEQ ID NO: 212205 - DNA, 688 bp, Homo Sapiens
ttttttttttttttttttcacaccgctaagggctttatttcacagatcatggtggtgagtttggatttccagccctcaccacggttaagtcacacatttcccgacacctgctcatttctccagatctgaaacatctcacccaacacatcctagttgttgtaaaccccaaatgaactttccagaagcaaaaacaataacagattcagagaaccctggtcacacctgctgagcaggtcccctctactctggttgcatatagaatgcttgtttgctcaaaagagaggcgctctcaacatcaaggcacaaagaaagacgtctccaggggcaaaatgatgacgaagtgaccagcggcctctgcgaggcccgaggcagagtcacgggggaggcgagttcagcctgacgggcattgggaggaagagccaaggacaggtctcccgctggggctcaggcgtcctcacgcgtacttctccaggaagttgatgtggaagtctttcaccttctgcagcaccgttttcagcttctccactggagggaggatagtcatcctgaagtggtaagtgccttccctctgcccaaagccactgccgggcacgacacagatgccagtctcctccaggagcttcatgcagtagaacatgtctggagcatttgatgggcctgagcagctccacagctttggcaggaatga

SEQ ID NO: 212206 - DNA, 670 bp, Homo Sapiens
  misc_feature (313)..(313): n is a, c, g, or t
ttttttttttttttttttgattcagggccgagcagggctccctggaagccccctcttcctgccccaactttattttggttctagaatcattccagttggcatacccggtccccaccacggctgtcctgggcacacagttaacatgtcatgcagttagggggagggagagaggggagagggcagggggggagtcagtggcctgcaccgcacagccactgggttagagaaagtcggggtctcccaggctgcaaagccttgtccagccatgtgtctcctggccctgggctgacctcctgctgtggccatagggtanacagcctggccttggggctgggccatggctgtgtcaggtagggaaagccaccatcctgcctccagtcccctgggcccttgttctagcccctcctccccccatatcactggggataatttgttggcctgggtctccatagctcaccagttatggaccaaggaacaggggcagccagcctgagggtccatgctgtcacctgtgggtggccccaccgagcagatgataccccacctgctggcctgggtgagctcagcccttcccagcactcagccatgaaggcaagaagcggcttcctgggactgcgggacaccaggctggggatgacaagctctgcctgctctcctcctactggggctg

SEQ ID NO: 212207 - DNA, 749 bp, Homo Sapiens
  misc_feature (680)..(680): n is a, c, g, or t
tttttttttttttttttaaagaagttcgaaatgtttaatatttcatgcagttaacatgcttcaaagctttaagtctgaagttttagacttatcccaaatccttgctaagaagtcaagaccactatggaattcacactgctttctatagacttccactgacttgcagctaatggtccttacacagcaaagttgggatttctagacgtctccttccaggttcggaaaagcctcactaggcaagtggcaagactgtgaagacaatgaaggttcagaattcagtcaaatggaaacaagatcaggaaacaagatcaaggactcatctgtccgcctggcaccactttagttttgaaggtgacgccaccacgcatccccgcagcacacactccttcctgtgccgactcccgctatttgcttgcctgagccagttcatgtttcagtaagaacgatttttctcccaacagtgccagttttcttattcccaattttgagagttgacccaaaattgtgggctatgagggatggtttttaaaactcctctaatggttcccaggcacagagcgttgaaaaggagggatttcttggctattctgaatttgtgcattgctgccatactacttcccaacacgaaccagcaagaccaccacaccaaggagtgggtaacatcttgatttaatttacanataaaaagccaaaaccctcaatgcaaaggaaaactgcagtttacacttattctggagatcatttttaac

SEQ ID NO: 212208 - DNA, 666 bp, Homo Sapiens
ttttttttttttttttttgtttacaacattttaatgtaacatttacatataatgaaatgcacagatcttgagtgtacattctttgaattttgacagatgtatatacttgtataactcaaatccttatcaagatacagaatgttaccatcacccaggtgatgttccctcatggcccttccccgtgaaatgctctgttaagtctttttttttttttttttgagatggagtcttgctctgtcacctgggctggagtgcagtggtgtgatctcggctcactgcagtctctgcctcccgcgttcaagcaattctctgcctcagcctcccgagtacctgggattacaggtgcccaccaccacgcctggctaatttttgtatttttagtggagacggggtttcaccatcttggccaggctggtcttggtgatccacccgcctcggcctcccaaaatgctggcattacaggcgtgagccaccgtgcccggcctctgttaagatttttaagagcagaatcaagaaattgaaggatttgctgttattcctacctgcattggacttgacctgggtgttgggtgagtagcaatctgttactgtttctctatgtggacgatgaggaaagggttgagaaatccagcgaaaggacacttctgttaatagctcaatctgctg

SEQ ID NO: 212209 - DNA, 636 bp, Homo Sapiens
ttttttttttttttttttgagtgcaaaaaataaatataaaatttattaaaacacccacaatattttaaagataccaggagtaatacagttcacaaacccagttgtttgtgtaaattataataaaatacaaatcaaaaaggatacatacttgcaatttctaggcaccctaaattaaatttactgaaacactgagggagaagggagggtaaggaggggtagctcaggaggcaaaccaataaagtggaaggaaaaaatattaacaaaaaggtaaaaattatacaaaataaaattatcagcataaatttactgtactaagaatatctacagtttaatacacatcctattgccttgagacattgcaaaaatctaccattcatccatcaaccccagataaacttcatttcaagtagccacagtttacaaagtcaagacggaatattcaagtatggttgttaagttcacctccattggaagccaagtaaccaaacaggaattcaaagagataagaaataaaacacatcaaaaagctacaggggttctagattaagtctaatgtattaatatgccattatacgacctgcccttgtttctttaattggaatacatgaaaaagaaatgacatcactcctgtttttc

SEQ ID NO: 212210 - DNA, 651 bp, Homo Sapiens
ttttttttttttttttttacacattaacagtctcctctttttattgaaaacagtttgcattatttgtagtgaaacaaaaatcatgccttgatgaatgtaattttaatatatccatctcttattaaacaaattatacatttaattcttggcacctatatttaatatcttttatactaacaaagattacatacacgcattgaaggaagactacacactcatgtctaagcctctctcatcagttaagaaatataccctatattgaaaaatgcatgtatttgaagttttgacctaacacagtggattaaagcttagacaatatttactttgccgcactttgattcagaaagggccatatgtgaagatatgatcctaaccaactttaacatgtttctataatgatctctcagtaaaaagatttatattaaagatattgagatataaaatagttacaaaataagctgtaaccttatagctacccattggtaaaagtctatagttaatatatttggataaataactcaagtcagcagcaaagtggttaaacatttgtgatttgattttatctcagcttggaatgtggttggagtgtcccacttctaacaactgtttgctaagttaaggctttggtgtttacacagtgttgaatgaagc

SEQ ID NO: 212211 - DNA, 636 bp, Homo Sapiens
ttttttttttttttttataaatatataactatatttattttgaatattaaatagtttttaaattacaagcaatttattgaatcacactatgcatcaatatacagtaaaaatcttacaatttaaaaatgtacacaatttaaactgaaagttcattgactattatattgccatgaacctcttctgcctgtgttaaagcacagcagggaggcctggtgggtgtgacggccccctacgtcctcctctgcagacggaatccgacggtggatccatacaccagccccatgatcaagatcccgctcggcccacgtaggcctgagtgcttaaccagcacgtgtccacaccggtcaaactgatcttcacaggctgttggtaattcaacactgtcaatgcatctttaagaatttctttatagatgaaagagaatgttctttgttaataaagacttgagccaaccccattgctacttaggaatattgttttggagatttccatcggaagtcactgcgtatacccattctttttttaaggctacttcccataaggctcatgttttgaagccactctaacagaagcccaacctctggcgtctaacccttggttcacttctgaattttcagatgatgggctgagtcaagg

SEQ ID NO: 212212 - DNA, 637 bp, Homo Sapiens
  misc_feature (567)..(567): n is a, c, g, or t
ttttttttttttttttttaaggtgccgcatgttctttttagtttccatacatcgtctgtcccagagtgaggagaagttgatctccttcccacatccaccacaggctgcgtgagggaagcctggctccccacaacttgctccttctccagccctgcccctctcaattaaaacaatgctttcttttttcttttcttttttttgagacggagtcttgctctgtcacccgggctggagtgcagtggcgcgatcttggctcactgcaagctccgcctcctgggttcacaccattctccagcctcagcctcccaagctgctgggactacaggcgcccaccaccacgccaagctaattttttgtatttttttagtagagacagggtttcactgtgttagccaggatggtctcaatctcccaaccttgtgatccacccacctcggcctcccaaagtgctgggattacaggcgtgagccactgtgcctggactaaaacaatgctttctaaagcgcattctgcagcctgatgtgcctgtgaggtgagaggtgtgggagggacagaagctttgttcanagaggtttgggagaggctggatacttagctcccttcttgtaagtttgccacacacattggcatattaaag

SEQ ID NO: 212213 - DNA, 696 bp, Homo Sapiens
ttttttttttttttttttagaaatcaggttttttttatttaatacattctaatcaaatagtaacagcagtaaataaacactttgaaaaacaggcaggtatccccctgtatctggaagaaaattaagtcaaagtattctacacagtagaagggagacaactgtttatgtccatggttagacaattcaaggacaacttggatatttctaaagccatttccaaaaaatcaatggcaacaggttgggacacagctatttcaaagggtagaatgcctatacctacattggtttttattaacggggattgagttgcacctgtatagcatgatattcttgtctttagctttaaaggaaaagagaaagtcttttccatttgcaccagtttgaaatatttctgaaataaggctcccatagaatggattactacagtactcattcacatgagagttcctacatgtagtaaaaagacaaatacaggacttcatggtcactttttttggttgatttggttaattgcataaaatgggataaatactcacatacatcatctgtttaacaaaactcctaggtacatcagaatgcaaaatataaaatgcccaagagactctgatcagcaggcatatcaaattgcagtgaggcctgtgtcagcttgggtcttcccacttcttcagtattcctatgaggagtctttctctccta

SEQ ID NO: 212214 - DNA, 673 bp, Homo Sapiens
ttttttttttttttttttggctgtaattatatttattagattaacaaggcagatgtgaattttctcttctataatccagtaagtctgtgtattcgttgactcagacagacaagaagccacaaggaaacaaagaagtaatcatttgttgagagacgttattaactatgatcttccctgaagctaccgggatgggaaaggtcagtgtcttcctttgaaccctgagacaattaggggctcttgaggcctgctgtgcccctgctgccaaggcagcctcaagttcaaggagcagctaatcacccactcctgcattcagtctgtcttgcctgatgagggctacgcaggctgcctcccattggtgtgcactgtttcctttttcagctgctaaatggctgaacaccatcggcctggggtatccctttttggggaatacgtctgtctgtctgaactcctttcccttcaaatggcactgtgataaaatctggtcataccatgctccagcactggaagtacatgaaagcacgcagtctgtgagtgcccatgaggactctcgtgctgggcccccgtggccctggctagctgtcgtaccagtcgaggaagagcaaggagaaggagcacatcacgagggaagaagaggatccacacgcggaagccagcgttgtttttaatggcctgg

SEQ ID NO: 212215 - DNA, 723 bp, Homo Sapiens
ttttttttttttttttttcgacagtcttgctctgtcgcccaggccagagtacagtggcatgatcttggctcactgcaacctctgcctcccgggttcaagcgattctcctgcctcagcctccctagtagctgggattacaggcgcccaccaccatgcttgggtaatttttgtatttttagtagagacggggtttcaccatgttggctgggctggtctcaaacttctggcatcaagtgatccgcctgcctcagcctcccaaagtgctgggatgacaggcgtgaggcactgcgcctggtccattacatattcttattcggatcttattcggatctagggcttctattagccgtacttccaaaggagggcaattgttcgtccttctagtagccattgctgaagggtctgtgagaaatgatttggaaaaaaattaggtgagcagatacaaatgaaacccaggatctctgtcactggaacccacgcaactgcttcacaatggatgtcttctctgtggcctacataaattcttaaggggaaaaaagcccttccttaggtcccaggccaacatcctttgcccacttctctaccaactgaaattgccaagttgaaggtcttctctcaccatgcttgactttcctgaagcatctgactgacagaagtggccggcgcaccctgcttctccagcccgctctccactctctgggggctgctctttctctgctgact

SEQ ID NO: 212216 - DNA, 673 bp, Homo Sapiens
ttttttttttttttttttcatgattgaactattcaaaaacatgtatttatttagaacaatagaaatacgtgttctcagactgtcctctagagtttttgagactattagttcaagagtttcaaagtatattacttgtaaaaacaatactgattaaaaaaattttttttaacaaaaaaacagaaatctgatttgatggtaccttgaaaataccctaaataccaaattttctccaacctaacattacagctaatttaagaattcctccttcattggtaaaacattttttcctcattaaatgtgggtactgaaattggatagaaacactatgaatgtgaaaataccaccaattttctgcagtaaaaaaaaaaaacccaaaaaacaaaaaaacaaacaaaaaacctagaatgttctttggaatcactgaaatatcacaaacttgggttttttcttacagtctgtgcaccttctttcaggttctctgttttgcttgtagtactgactgtgtgattctaatttttatagattcaagtcttgcaatgcaatatccatgcttgacacaccggtgtctctgaccagtgagaagttatgcataacccagaaacgctgtcatttacatctccataaagacttctgccccaaataaaaacttcagaatgacacaacacatcctgtg

SEQ ID NO: 212217 - DNA, 672 bp, Homo Sapiens
ttttttttttttttttttgatgttcacaattcagtttattcaggcaacatattggctgttttcagtgtggacagctacacttaagagcaaacatgatgaatctattgagaattcagaggtagcctttatctgcatttttttttaaactaaaaggtatttaggaaccaccttctgtagtgatttggctaagccaatacattcactttagacaataacatggcaaaacatactgaaagaagcataagcgagggcaccgtaatggcactggtgtgactcggacacacacacagactggtctggggctgaaaaacttcttgctgggtgtgacacagggtagcctgaccacagagtgacacacgggggctacagcacacgctgctactccagcaaaataacgggcacaaatgacagctttgacacgacagtaacctcatggctttaagatgactctgaccacagagatgcaaggaggcccttgcgtcctagtagcaggcggagcagatgcctcccgtctggactgtcccaggctgggtggaactcaaagaccatgctttggagagccacggtaagcgacgaggaatcaaacagaccacaacagtgttcacaagactgcaacgagtctgcttaggactaaatcatcaggcaccaagagacatgttctcctagtaacga

SEQ ID NO: 212218 - DNA, 686 bp, Homo Sapiens
ttttttttttttttttttacagtcagaatatttacagaagtatttattttaaaagtagacttaaaaaagaaaagtaatttagattaaaagatccaaggtgtattgtttcatgtaggtgttactgctacctatactttcaccccatttattaagcccaaaacacttcaagcaacttcaggttcataaattaataaggaggtacagaagcccaaccaggatgggaaagaatgtgtttcaggttagaaggggacagcatggctcctcaatgatgtcttgtatggaacatttgtgctccactgtaatgaagattttcttcctgaaaatctgaatgtgacattttagatcctctggttgttggtttagtctcccgattgtaatggtgtgctgaagtcaggtggttgactagaaggtcaatccaagctcctaggctcccctctcttgtaggcctcaattatccacctgtgaggctcaggagggctgaccaacctgaaggttgggaaaacttgcttaaatgaggaattgccatttcagcataaactgtccttaagtctactgtagaaattgttttcattctggagatggtgagtcccagaagatcatggccaagatgatgtcctaagtagcttcctctgagattttatgcccaagagggagcatctggccacttgcttcttcttacatttcta

SEQ ID NO: 212219 - DNA, 674 bp, Homo Sapiens
ttttttttttttttttttgctcttacaattatgtattaaacaaaggtttagtttaacagaatgattatgcaatgtacagtttaaacgtatcagttttacaaaagaaattcagttaggacttacaggaccgaatcctactttggatagtattatttctaaacaactgggaagcttttggggaaaaaaaaccccaaatactttaatcttaactccatttatacatttctttccatctttccccaaaagaacatttctagagcacaaaatagattcaaaattgtttaattagatacattttatatatcctgaacataatggctcccatagaaataaactagtattttgtacacaaactttatttactgtgccacattcataatatactgggccaagtgcaaacatttattacatcccctggtgtgtgcagagctctgctcccacaaacacctcattatctaggatgacagagaacaagattagacaagatggataattaaaatccacaaggtaataacaaaaatgtactttatgattataaactcttctccagctacagctgtaaccagtactaagcaaaacagtttaatcaggttttcctccctaaatccagcccccaagccactgctccttggggcaggatctaataattgattagtggggttgctgaaaggcct

SEQ ID NO: 212220 - DNA, 730 bp, Homo Sapiens
ttttttttttttttttttaacaggttttaaaaatatataatttaattccacattaaagccaagctatcgtggtgggaagaaggtgtaaaaatcggtggaaaccctgaaggccgagtacacacacgaagagagagggagttagctgagaagcagcatccagggaaagaaaggtctccacaagctgagatgatggccctctgccctctgaactgttcattaacaagtcaccagtcccagttctttgttcaaatcctcaaacttggagaggcactgctccaatgagacagctacagcaaccacagggaggaagtgctttgggctgcaggagagacagtcaaagccaaatcacgtccaggcgggatgaagtaaacctggaccgaggagcctgacccagctgcggagctcacacatgccccatagggacggtcctgccatatacacaaacagcacactcagcatgtgtgcagaggcaggcaactcctgagcttggttctcgcggggtgggggtgaacaatatactttaatggccaagaagatcccagctctctgcatgagacccacatcctctcctgggctgtcactcaatcttgggaaatactggttcaaggaagagaaacaagggctccattgtgtgagagcagcaggcaagtccccttctgcatctggacaggacccccccttctccctcagagcaggctcagctcagctgctgacattgctttcctgatgg

SEQ ID NO: 212221 - DNA, 640 bp, Homo Sapiens
ttttttttttttttttttgtacaaggcagttaaaaaaaaaacaccccaaaaaaagaaaacacaaaaaaccccaaacaaccaaacaaaaaagctttgagctgtgtcctttcatatggagtcaacacgaccctcctcaaatatcattttttttttgtttgtttgtttcctgaaacgcgagaattcagcaggtatctttggcaacactttatcacgaccttaatttaaagaataaaaataaaatcgattcacgtctatatacagtatgtgattgcgcggagtctggggagggcggggctgggctgggggggtcccggctctgggcccatgcagaggctgtggcccccaggacgggcgggtagttaaggcaaagtgggcgggcaggacaggcgaagctgagtgcggagctaggaacgagggtttagtgcaatccccgaggtctgtgtaagtgtcgcggtgggccgcagcccttgttcctacggaagtcccagagggctccaccccccaagtccggtcgcccccactggctaggacgacagctgtgattttagagttggttttattgcgagggggtgcatggataggggaaggtggaaagagggccacccctcagggggcctctctgggagctggggaggggtgt

SEQ ID NO: 212222 - DNA, 677 bp, Homo Sapiens
ttttttttttttttttttagtttttaaaactttattcacttcaaaacctttatcagagacacggttctgttctggggtgggggtggccttgacaatgagctgatgttagcccttctccaggctggaggccaaggccagactggggagggggccttgggcctttcaggacttgccctagatggaaagatttgggccactccaatggaggatcaaagttggggctccagcttcccctcatcctagaagaggatgggggggggtcctcaggggtttttcggaggatggagaggcaagcagccgcctttccgtctggctgcagagagctgggacagaggccaagaggggcccatctgtcgcctcccagtcctgccagcttctctgagcaggctgggctggggaggaggacggggggacagctgtctggcccgggagatgggaacaggggccactttaggaggacaggaagctggactgtttgcttgtttttttaagatttttgatttttttttccatttcttaaataaacatgaatatatatatattttttcttttataaaactttcatggaataagggtagggtgggggcttcggtggcctggcttcctggcatcactcgtcatcaaagttctgactcaggaggaagttggcagccaagttctcatttttttcacacgcg

SEQ ID NO: 212223 - DNA, 721 bp, Homo Sapiens
  misc_feature (578)..(578): n is a, c, g, or t
ttttttttttttttttttgcaatgacaagataaagtttattagatggagaatgttaatacagctgaaacctttgaagaattcagaccagtcctcaaaccattcatcctgagtacctggaatgttatatgatcttgagtgggatatttcccctctatgacttcagctgtaagatgacactgttcttttgtaccagtacatgaagactagctaattaaaatactatactagttcattcaaaaagtatttactgagttgctactacgtacaaggcatcatgcaaacagactgtgcagtattacataaaatttttaaaatagatttccataaataaacaccatgataggattatgtaacatcttccagggaattttaaccgtttggatgtactacacagtggttctggttctaccagtctaaatgaattgacttgtttttttttccaccatcactcctccctttcaattcaattcattcattctggtgtgcagcccatttctgtctattttctaatgatatgaccagagccaccatgtaggcttgtgccctgcacaaggatagataccccactggggaacanacgggaccaaaatccactctgtgttctgctggccaagccgggtgacctggcctgggctggcgtcctcccagaagaagggttcatttttccagtttgcacacatgtgctatttgtgggttagctgaggccctgcttatgtcttc

SEQ ID NO: 212224 - DNA, 714 bp, Homo Sapiens
  misc_feature (630)..(630): n is a, c, g, or t
ttttttttttttttttttgtttatagcagctttatttcataaccgcaaatgggaaacaactcaaaaggccatcaaaaggacggatatacaatcgatggactatactaaatgaaaaggagcaaaatactgatatatacaacatgaacgaatgtcagacagtacattgaaggacagaagcccgacaaaaatgagcacataatgtatgattccccccttttttttgagacggagtttcgttcttgtcgcccaggctggagtgtagtggcacgatcttggctcactgcaacctctgcctcccgggttcaagcgattctcctgcctcaccctcccgaatagctgggattacaggcacccaccacgcccagctaatttttgtattttttagtagagacggggattcaccacgttggccacgctggtctggaactcctatcctcaagtaatccgcccgcctcggcctcccaaagtgcaggcgtgagccacagcgcccagcctgattccattctatatgaagttctccaacaggcaaaatggttatggagatcaaaataaaggtggggtcgggaatcgactgggaagagacgtgatgaaacgtttctgggacgatgaaaagggtctgtgacttggtangatcacggagcggttaggggccaaactcatcttcctgtgcacttgctgtgtgcactggcgctgtgtgtaaatgccactcgattt

SEQ ID NO: 212225 - DNA, 696 bp, Homo Sapiens
ttttttttttttttttttacattttccagtttattataaaggatacaactaggatcaaccaaatggaagcgatgcatagggcaaggcatggggcggggcacagcaggaggaggtgggaacagagcttccatgtcctctccaggtgcaccaccctcccagcacatcaatgcgttcatcattccagactttcggaacctcctgttcaagagtgtttggagcccagtctctagccccactcccctccctggaggttgggggaaggagctgaaagtttccatctctagtaatgtggatagtctttctggtgaactcccatatgtatgttaataaaataaatgattaaattttgtcttctttttgtttgttttagagacaggggtctcgctctgttgcccatggggcagtgcagtggcatgatgctagcccacggcagcctcgacctcctggactcaagtgatcctcccgcctcagcctcccagagtgttgggattatgggtgtaagcaccacgcttggccttctcttgttaatatatctttcgtctgtttaattcacaggtccccaaagactaaacctgagggtagataaaaagtttttcctcccagacactgtctacaaactgattctaaaatttacagagaagccagggcactgtgttttgcacctgtagtctcagttgcacacttgggagctacttg

SEQ ID NO: 212226 - DNA, 730 bp, Homo Sapiens
ttttttttttttttttgtaaaaacttgtttttaattttgtataaaataaaggtggtccatgcccacgggggctgtaggaaatccaagcagaccagctggggtggggggatgtagcctacctcgggggactgtctgtcctcaaaacgggctgagaaggcccgtcaggggcccaggtcccacagagaggcctgggatactcccccaacccgaggggcagactgggcagtggggagcccccatcgtgccccagaggtggccacaggctgaaggaggggcctgaggcaccgcagcctgcaacccccagggctgcagtccactaactttttacagaataaaaggaacatggggatggggaaaaaagcaccaggtcaggcagggcccgagggccccagatcccaggagggccaggactcaggatgccagcaccaccctagcagctcccacagctcctggcacaggaggccgccacggattggcacaggccgctgctggccatcacgccacatttggagaacttgtcccgacagaggtcagctcggaggagctcctcgtgggcacacactgtacgaacacagatctccttgttaatgacgtacacacggcggaggctgtagaagcagacctcgttgagacactgtttgcaaggcctgtgtatggagtagaggcgggtgcacgggtactgttcctcacggcagtcaagaggcccaggctctgtgggctccagctctgc

SEQ ID NO: 212227 - DNA, 753 bp, Homo Sapiens
  misc_feature (732)..(732): n is a, c, g, or t
ttttttttttttttttttaaacaacagaaatttatttattacagttttggagcctggcagttgaagattacagtgctggcaggtctgttttcttctaagatctctctcctttcttgcagatggttgttttctgtatcctcacatggtgtttccctgtgcggacaggcccctgatggctttttataaggacactattcatacgggattagagcccccatcctagcagctttactttagcataaccacctctatacacaccttatctttaaatacagttacatcctgagatactaggggttgggacttcaaattatgaatttggtggagccacagttcagcctataataataatggagagaaatgaaaacatgtgttcacagaaaaacttgtatgtgaatatttatagcagcattatttatagtaggcaaatgtggaaacaacccaaatgcctatcaaacgataaatggataaatcaaatatggttatacttctaatggaatatgatttggacaaaaaagaaatgaaatacttatacatgctacaacatggatgaaccttaaaaacattatgctaagtgaaaaaaagcagtcccaaaatactgtatatttctgtttataagaaatgtctagaataggcaaatctttattttttttagaggatgggttctcactctgtcacccagatgggagtgcagtagcagtatcataattcactgcagcctgaaactcctgngcttaaatgatcctcctgcct

SEQ ID NO: 212228 - DNA, 682 bp, Homo Sapiens
ttttttttttttttttctcacatcaaaatccgtgttatactttattatcattgcttaacattcggggtcccacgctgagtgtgagctgggggcaggcaagattgattcctgttttacttcactgcagtatctgcagcacccaggatgaagtccaggacaccaaagatcaaggtgcttcatgagtgaaactgtaagggctggctgtaagccccgcttctgggatgggagaaggtgaggctgatctccaaagcaggtcccccccaccccacactctatcaaagtacctgaggcagaatccccaatgatgcacccccagtggtctggctcctggggaaggcaatcaactctgccccagcaggtccagcagataggccaagtggagtttcagggtcccgtggatggacaggggttcagcaatagccgcagaaggaaccctaaggccatccaggttctccaaaagctggctgcacccctggtctaggccaggccgccattgggatcggtcaggcccagcaagtcctctgccaggctggtgagctcgttctcctcgagtgcctccaccaggcgctgcagcgtggcgcggcggccctcggcctgcacgaagcgccgcagcagctggaaggcctgctcgtacagtccctcgcgctcgtactcgtaggccagcgagtccagcgccgggtcc

SEQ ID NO: 212229 - DNA, 752 bp, Homo Sapiens
  misc_feature (691)..(691): n is a, c, g, or t
tttttttttttgttttttagtaaactttattgtaccgaacaaaaaaaatgattttgcaatgattttctctcccacaaaagcgtgggtgaaaaccagtaacttataaaaatactttcggactctaataatacatacattcacaccttatcttctgagtatttaaatgggggaggttcacctgaaaaaacccatagttttttgcctcaactgacctgtaaaaaagtccacctatatcaactttctgccaatctggagaagatctgttttctttgatctgacgtcatgtgttcacaagcttctaaaatgtttgccaaaattaaagtctgctggatggtttttgccttaacccatattcttccattcattccaaatactatctccagtggatagagttttcccacttcctgtatgatttcacaatctggagctaatagctttctaattaagcccagagtcactttaaaaagcagaccatcctgtccaatgacacccattccattggctcgtccacagctgtcaatacagaccatctctggttccatgtctttattagcaaccacaaattggccatagatgagatctccaacctgcacatttggtctgtttcttttagttgcaccttcaaatgacaagtaagacaaagaagctggctcactccctccaacatcaactttgaatatatctccagatntagctgtcactatgccaatcacatggtctccttttactggaacataccgcttctgctgaga

SEQ ID NO: 212230 - DNA, 639 bp, Homo Sapiens
ttttttttttttttttttagcgaacagcttcttttattcttgtttgaaagtatttttctgcttacaaaagtaacttatacttgatctaaaaaaaaaaaaaaaaaagaaaagaaatcacacaatgttgaaagcaaagattcacccatttggccccaaaagccctgcggacagaaaaaagcctatggctgggttggtggcctgggaggatgcccctgttgtcaaggttacagggacttgccgggcgccacaaagcagggggcaaagttctccccagcagcctcaggaggccccgctgctaatccactgtcttctgttctgtctgtgcctgggtcctgcctgctccgtttctgctcaggctcctgaggggctgcctcaatggcccgctgggcctcggggtgggtctggaggagggccttggcaagggtggcggggccgggcacccccagggacatgacacagtgcacacccttgcgcttggcccccgccaccttggtgctgtctttggaggctgtgagcaggaccagtttggagaactttctgggcttcctgggggctgccgggatgacttctgtgcctggcttgggggatggctcctggctggccttccactctcaccctcctgctcgctgggctcgggca

SEQ ID NO: 212231 - DNA, 729 bp, Homo Sapiens
  misc_feature (718)..(718): n is a, c, g, or t
ttttttttttttttctttcatggcattagaatgtattttgcagtacaagatacataccaataaaatataaacaaaaagcaaacaaacgcattttttaaaacttagctattaagaacatttcaattgtcaaaagatacatttgagtagaatataccaggtcaatttttctatttaacttctactccagcaatacaacatacatcagtgacatcaaataaggcagtcagacttctgtttattttatttcttacaattctcactaagatctctaaagagagtcttattcttttgtttaagtagcataagagagtcttattctttaaaaccattatgtttacatgagaaagtatcttttcctcttcaaatatgaagacagatatagggattacatgaaattaatagcaaagttaattgaatgtggtagccagcctccaagacggtcccaatgattcctgcctcctggtattaatatcctgtgttgtcacctcccacactgtaccaggggtctgtgcaactgttaataacgaaccacgcaacagtaagcattcctgctagccatgttccactcataagccaacttgtaacaaataaagcagtaacatatattccttgcaatccaaaaacaatgccaatatagaaatacactggctcaataatctcattgctaccagtggcttgatataaaatgctagcaataagttccggatacagagacatntgctgcactgc

SEQ ID NO: 212232 - DNA, 683 bp, Homo Sapiens
ttttttttttttttttttgagtactgaatgtctttattgataaactaaatatatatttaaagcataatacgataattatgtagaggataaaatataaattgttcacttaggagattaatacataaatcatatttacagaccattgacttgagaaatacagttcgatgacatttcaatttgagcaaaagatgaggtgctcaagtatggcattctgtctcattaagacagaattcaaactttctgcaaagaaaaagtccctcatttcttggtgtgctccaggacctccatattctttagatttggaggcaccgcccattgaggagctggctgcagtgtcagcgtgagaaggaggaggaactccaggccaggggcggggtactccagatccactggcctcaaggacccctcagatggagtcagtgtgggagcacagagcctggcagctcgggaggcctgggtggaggggaaaagaacagtgctgctctaagacccagccccctcgtgggggagagagcagcagggcttggctctcagctgcatggcaggtgtggaaaagctccttgtgacggggtggctctcatggcctctcccagggcctccagcgttgttagcatctctaccagctcctcttgttgcctggagagtctggaggatgtctcttctttcagttcttgaacgagggt

SEQ ID NO: 212233 - DNA, 678 bp, Homo Sapiens
ttttttttttttttttttaggcaataaaacttcatattatgaaagcaatatattccaagtttcaaagatttgacaagttctgtagagtatctttcatcagtacatgaaaacttccaaactgcatgatcttctgccaggcaggactgggtgctattcgctggtttgaggtcgaatccatttcaaggcatgtcgtggtgggacattaatggtgggatggtagaatgtgcagtccggtcttgtacattgagtgttaaacctacaatgttttggatgatagaagggacattccatcttcttacaagcagggaagtaacggcagagctgactactggaaggtggtgctggtggtgcaactggttttggagacagtactggaattcttctactcacatgagtgaagggacaatctggtttagtacactttgcatcatatttacaatttgggtgaacaaacaaacatttttcagcaaatttacaattggggaaggctttgcagggtgagatggggtgatggtaggcacactcatccccatttttacaagcaggccagtacttgcagcgctccaaaagtttttctggtttctgtgccacactcagttcactcatctcagcttgactcatctgcagagtttctgccattactgggtcgatttgcagtcgggataataattgcctctg

SEQ ID NO: 212234 - DNA, 601 bp, Homo Sapiens
  misc_feature (475)..(475): n is a, c, g, or t
  misc_feature (516)..(516): n is a, c, g, or t
  misc_feature (591)..(591): n is a, c, g, or t
ttttttttttttttttttggtagaaagaaatagatttattctcatgtacaaagcggtcagcccacgggaccatatacgacagttgcacagagtcctagaaaaacgcatctctctaaaggcaactcagaaaggtaaggcaggtggaccccctcccccaccccacaacgcacacagaatgaaacggagaaaaagagagaagccagtggccgggctgacccaagagtcccggccctatggggtctcccaagccccagggcacaggtggatatggccttgaagagagagccctgccagggctgaggccaggtctctcactggctgcaggaatgggtaaggggctcaggccaaggggaacactcagggggcctctgagacactcagggttgggctctctgtgccttagggttgcagaaacattccatagcctctgctgggactccgcagagcgatagagctattttagacattgatctanaatggatcttagagcatggattgtcttacccgctccctgtntggcccagacaggggaagagactcgcccagcgtcacacaggcaggaggaagcatggctggctcattcatacctgngcctgtctcc

SEQ ID NO: 212235 - DNA, 720 bp, Homo Sapiens
ttttttttttttttttttgcagatttgctttattttaattttcaacaccaagaacaaagccagtcaaaaataaacaactaaataacaacaataatttgccacctactgctaatattcagtcccaaaccaatggttgatttttgcgatactaagataaaggaccaggttgacaataaggtattcttcggtctctctgatccacaccagctccacgtgcactcttccttccgcatcaacgtagtccacgttgtatgtctgtcccaagaagctagagctgtcagagggtgtggcaggcgatctcaggcacaccggggaactgaaacaccaaaagggtttcccatgttcatccaaaagagttacgtccatcatggaacaactctttatacagccatcaaaaatatcagttttccacgagaggccaacttttccaataagaggtaggtgttctctgttattttttaaatgtataacaatgagcttcacatgtccattttcaatatttcctggagctgagtcagtttagagagccgagtgaaatactggggcagaggaagcagtgggaaaagccctgtgggctctctggatccacaaggaagccatttctgccttgcctaggaaggatccttggggagggttgccagaggaactgggaaaagaccaaaggaaaaggaaacctccagctaaactttgtaacaactccagctgaaacgcatgtctcct

SEQ ID NO: 212236 - DNA, 666 bp, Homo Sapiens
ttttttttttttttttttaaccagccatataagtagtttatttaaagtccgtaatgaccttagccctccacatcattaaatgcgacaatatattatttactaaagttattaaccacctcctttgaatttgtacatatcagggacataagtgcttatgccaaaaagaatatagaaaatgcctgcaatctcattaacccatttccccctttaccatcgcagtctaacttccttcagaaagttccttaaaggaaaaaaaacaaatataagaaccagaactagtttgaagaaattccccaaggatctaattcaaacagacatctaattcaaacatatatatgtgatttcttcatattattttcttgcattttatttttataaggttctaacaaaactattcacctcaactctatgcctttacaatctcctctaggaggtttgaagttcaactgattttttttttcccctgccctggaatctctgaaaacaggaagtgagcacagaagttctcaaagggaagctgactggtagttgagatgtgctgagctacacctctctacatggctccacggctattctcagagggagggtctacatcaggcgcttttctggaacaaaataaatgccatcttaaaaaagaaaatttaaaatagtagcgttcacacacct

SEQ ID NO: 212237 - DNA, 671 bp, Homo Sapiens
  misc_feature (523)..(523): n is a, c, g, or t
ttttttttttttttttttaaagtggcaaaaaatgtgtattctatgcctctgtgaccccagccccctccatcttcagcggactaggttgaagtgctggtctgctcctctggtcctcttcagccagcatgggactggtgaggaaaaggttgtgctggactcctcaccgcctggctacctgaccttggtgttgagcttcaggtatgccacatagtgtgtcaggagcagcctttggaaggcaccgctgtagaaggcccaggccgggatcaggctcagaaagcccgccaagatttcatgggcaaggcagccacaggtttcacctccaattgtgacataattcaatgactctttgacaaactcatcagcagtcttggttatcacatttgtatttagatactttgtcattgcagtcgagacagcatatggggtcagcacctggatgatgacttcttttgctttatattcctcttgcagggccttggaaaatgcgcacacaaacgccttggaagctgagtacatggagtanagaggccaaggaaacagggctatcccagaagaaatgttcaggatgagacctttctgccttgattccatatgtttcagaattagctgtgtcatcttgactacggaggtgatgttacactggatgaggctctggatttcatccggtgcgt

SEQ ID NO: 212238 - DNA, 643 bp, Homo Sapiens
  misc_feature (629)..(629): n is a, c, g, or t
  misc_feature (634)..(634): n is a, c, g, or t
ttttttttttttttttttacgaccaaacaaaaaatgtattagagacataggcttatacaaaacatcttgtaaacaaaagggaagaggttgatattttctgtacaaaatatgcaggtttttctttcttttttaataatctgtaagatgcatcatacttctggcattttcaaaaagtgaaaactgtataaaaataaatattctatgtacaaacacacacacaggccaatccaaggttagaggcatcacttgttccagcagccttggactggtaagccatcttcgcccaatgggcagggggcatctaatccaggcgctccttggtctcccttatcccctttaggccctctagagcctttcttccccctctccccccggtttcccttgtccccgggtggtccatgtaaaccaggaagcccagctgctcccgttggtcctgtcatcccagggtctcctttgctgcccctctcgccctttggtcccgctgggcctggaactccaattggtcctggagtacccggtggcccaggcctgccgtccaaacctgaagctccgggtagtcccaggggaccacggtctcctttttctccctggaagctttctctccttttgctccatctagtcctgcttcnccctnttggtccag

SEQ ID NO: 212239 - DNA, 840 bp, Homo Sapiens
  misc_feature (814)..(814): n is a, c, g, or t
  misc_feature (823)..(823): n is a, c, g, or t
ttttttttttttttttttcgagtaagctggtaagtggtataataggaatagtagaagaatatgccatagctatggctcaagaataggaataagaaaaatgtgcagtagacgctgtttgtccgacgatgatgaaagtgtgcacggccggctgtcctccgattgaggggccttgtcaaggcctcagaggcagcgaggtcacagcctggtggagggtctgggtgtgcgctgtgtccatctgcacctcacagacaccagtcatggggggatgaaaccgggccaagaacacatgtgtgcacaggctgtgtgtgcctgcatgtgtgggatgcgtgtaggctgtggcgggggtggagatgagggataggacagaaaatggcccatccaaccccacatcctggccgggcgtgtccaggtccctgtggggcgagggtttggctgccccagacgtgacagggacttggctctgagggtcaggacctggctgggaacacaccattgaagagggaacagaaaccaggccctgggacgctagagaccccaagagctacctggctgggtctatggtcagggctgtagtggaggaaggtgtcaggatggccattgtctcaactcctgtgggcggcacagccccaggctgggcctctgggaggagggtgggatggatgggagatcagagccctggcgcctgggacaagggttggcctggatgtggggcccaggtgggcacggctgggagcgccaagtatgtgacacagaccccacctggaccccgtgctgggggctgggtccaccgctctcctctcacgtctctcttggngatgcccancttgggctgggcgcagg

SEQ ID NO: 212240 - DNA, 767 bp, Homo Sapiens
  misc_feature (577)..(577): n is a, c, g, or t
ttttttttttttttttttaatcgaagtgacattttaatctaaaggtatacaaatctatcgcctacatggctgatttttccatgagagtctcatttacaagagaaacacaattatgaaatccgtaccctttactttttaagggtaacggaagaagcataagtttctgctaggacagcgcttacgctctcccccatgtttattccgtggttaaccacatggtagatccacagtgattcaggaagatgaattatctgcaacacgcagaagttcagtcctctggcatgtacgaatcctggtgtggtttttgcacaacattctgcctgggatgcgtggggagaagctgtgataacaggatcgggattcattcatgcttcattcatctgggaggcctgcgactgcccggcacagtgtgggctgagcctccagcgccgagcaccagacactccaccctcctgaggcacttgtgcggatgcaggtgagatgcccagaccagcacggtgtgcgtggggggtcgggcaccagagaacttaagataagattcaactgtgtggatgggtctggtggaggtggtggctcncgggctggggaggcataaagacgaatcccggtgacccttgccctgaaaagctgctatgtacatttagtagaagactgtcgatgaaaacagactctcagaagcaaagaggggcctcgacgggcccccccacccatgtgcaaatgcagtcttactctctccaccctcgaagggagcgtcctcctcacctttc

SEQ ID NO: 212241 - DNA, 749 bp, Homo Sapiens
  misc_feature (698)..(698): n is a, c, g, or t
ttttttttttttttttttctccttataagacttttattaatgccagaaatgaaacagcaaaaacaaaatgaatttgaaaaatcagtgtgattgtgggtgcagagatggtatgaacagggactgaggaaaaagccaggtctgaggagagccttcagtttcaactcggaacttttaaaggtcatgattcagctgatcctgtgaagtggactgtacagtgggtaggtcgcttcgtgtctttatagccaggctgtgtgctggacatcaaggctcttccctccccaaggaaagcttaactcccagtgctcctgggtttgtcaccttctggacttgcaggcttgagacccttgggtcccccgtcctgcactggacgacccctgactgggaggaattttctaacgaggtgagacagaagaaaatgaaacaaaaaggaactacagaaaacgatgtggggttaattgctgcattgccctgttatgctgattcccacatcttgtaggtctctgggatcatttctgtaacaaacattaggcccttggttagaaacatagctctctctcacacacacacatcgatcatctccaccaaaaccaatattttgacttatggtgcctttgctgctgtcagctcaaaaactacctgtactttgtttccttgaatcgttatgcttttgcatagccatcctctagcagttttatcanagcaggacataattgcctacactctggaaatgaggggtgagtcactttttc

SEQ ID NO: 212242 - DNA, 720 bp, Homo Sapiens
ttttttttttttttttttaaaaataaaaatatacttgctttatttaccaattttctaaaaggcaaacaggtcataaaaagacacaagcagtcaaacaaatctattgcactgggtaaagaaagtttggtttgcacacaaacaaaccacttgtccagcaaggctcaacaaatcatcacagaaactctgagagcttatttacatatctcttcgggaatatattaaaaagaaggctcagtttaaaatagagaaaaactgtttaacacctgtgtaagcacacacactaaagaaaacatgacttgatgcttggcatcacgtaaacaaattcacaagatgatcctattaagtcaactgcttggcacgcgctgaagctacagttaacaatcagtgagcacatattaaatgataaaataatgctgatggtaaacattcataacagcagagtaagattttggcagttttgtgtttcggtaacataactgtaaccttagatgaacacctatcccttcatgatctgactttagaggcaaggagtttgtaacatctaatggccataagaatgcagactgctaccttatcataggcataggcagctgatgttactttgtaaattaacgaaaaattaaagtgttcttgtgtttatgaagaataggtttaatagtcaggcatacgatggttttacgatgaaaacctagtggattacaaagagatttcacctccatc

SEQ ID NO: 212243 - DNA, 748 bp, Homo Sapiens
  misc_feature (649)..(649): n is a, c, g, or t
  misc_feature (674)..(674): n is a, c, g, or t
  misc_feature (736)..(736): n is a, c, g, or t
ttttttttttttttttttaaactatgagaccatttatttcttccctgccctgcagcgttcagtgggcttacgcacctccggctgccaccatgggctgccctgcagggaaggcctgtgtgaggcagacctttcaggccagaggaggctacaccacgggctcccgcagattctagcaggtgggggcatgagacttcaggtcataggagcagacatcgcagccgtccagcaggtctgcctgagagacgccattgaggctgggggcaaccagagctctggggttgtcctgcacgcctgtcctcgtgagtgtgtcctggagaagttctcggattcttcggttttccctgaaggtagattcccaaataacttcaagttcaccttccatttctctgttctgctgcagcgcctggtccagcacctcctgcttgtccttcagcacctggtgcaggtgccgcatctcctgccggtactgggctgtcttgccggcgaagtcctcctgctgctccagcagacggtgactgatgtcccccagcttcagtgctgcctgcttcttgtagcccttgactttttcctctaactttcccaggcgaatgttgctttttatgactttattaagcactccatccttctcactttctaaacattttgccanacacataagactgtcacgttcctgngttatattttctgccaggccaacaaggtttgccaggtactgatgagcagacatttcgttccncatggctttttc

SEQ ID NO: 212244 - DNA, 792 bp, Homo Sapiens
  misc_feature (624)..(624): n is a, c, g, or t
  misc_feature (775)..(775): n is a, c, g, or t
ttttttttttttttttttgcttttccattcttgttttaatagcattgatgatttgcaccatttggagatagagctctggcttatttattataaaacaggagctgggcacagtggtgcctacccacaatgccagctactctgaaggctgaggtgggagaattgctggagggcaattcgaaaccagtctgggcaagatagtgagacctcatctcaaaaaaaaaaaaagaaggaaaaaacaaaggagttgatgaaaccaaattatgacaaactaaattaaaaaattaaaaaatagcattagtgggaacactgtggtatttcctgaggtattaaaattttacaactagtaaaggtatttattataatttattcggattgtttcttagtttatttttgacatggataaaattattgtttatctaggagcctcagagttgagagaggatagttgtagagaagtatttctaaaatggaattatcatccactaccagctaagagaaaatagttacttgtttaaagataccttaaagcaacatatattgtagtttcaagagaacaggctgacagtcaagaaataggcttttaacaaacccactggtttgctggattctaattgcctccttcanactatgtaattgtgtctttctggtttctgtggagatatttccacttgtttattttacactggaataaacaattatactgttgatctgattacagaactatttatataggcgctgtgagagtaatatctctgagccttcaatgactgtatanacaacacacactttgag

SEQ ID NO: 212245 - DNA, 765 bp, Homo Sapiens
ttttttttttttttttttcagagatttttattgtttcagactgagtcatgcatactaaaattattacatattttcaccactttgacttagaaaatgcactagaaaaataaactttggtcaaaacaaacactgaagtacatgaatccaccatgtatccctatactcaaagccaaactgaatttcagtttgaagcaaggaatgtgaccagtggctgaaacagtgccctaagctggtcagagaattagctcacctcccactccatcagaggctcttggtcagagaggtttcaagtatttcacttgtaacaggttcctacctgatatgccaagaagccgaggcatagctacaagaatccacagcagcagcatctcactgcctcactaaacctgctgcccagtgagatgaaaagaaaaacagccccatgaaacaggaatttcatcactatcatctccatccacaaatcacattgatccttcgcatgaagcaagctcctgttgactgtgatgtttgttactagcattttaagcaaaccatttctctaagtcaggagagcagaagaatgaatttatttatttgacacagaatattgctttgtcacccaggcgggagtgcagtggcatagtcttggcttactgcaaccgctgcctcccaggttcaagcgattctcctgcctcaggagaattgcttgaacccgggaggtggaggttgcagtgagccaagattgtacacttcactccagcctggcgacagagtggactccgtctc

SEQ ID NO: 212246 - DNA, 758 bp, Homo Sapiens
ttttttttttttttttttaaactataggactaaatatttattatccacatagaaaccaaagcattatgtggtttttagtggcacttattttgaaaagcacatggcttacccatgaacaaagcagtagtcatttaaatttggcttactcagcagtcctaaaggctaaattctggttttgtttgtgctgctgagaaaacaaaacaaccacaatcccagcaagtttgcttatgaaccttatttctcttatttttgagaaaatatgatcctactaaaccttgaatgaagatttcaaatctatatgcaaagacacataggcattattgttttgcagatggaaaaataagggctcaagtcatagacatatatgatggcagagcaatgagaaaatcctgggctgttttctaacatggtaaaatagggtttcatacctcctgaattcagcaaggatgtaatttgcaagtaactactcctttgaaaatcagagttatccacacttgtagtgaaattcattcctgatggtgcttactgggttccactctggtgtcggaagctgaaccggagactgaccaggttccttcaaggatcctcagccatgcaaaagggaagcgcctttctgagggagccaagcttgcatctagaccttcacagtggtgcaacataacttctcagagatcggcatggtaccattcagtgaatttgggaatttcaggagaagacaagtgtcagcacactgtctgctgaagtgcgatacctggctt

SEQ ID NO: 212247 - DNA, 737 bp, Homo Sapiens
ttttttttttttttttttcaaagagaattgaagtaattttactgtcattacactagtaaaaattatctgagtcatgatgcttaattgacagatattctaacaattagaaaaatgctaattgtatattataacctgttaaggatcacaaggattgatgcagtctaagaatgggaaacttaacaatcatcaatggctagttcagaccaaagtctgctccttgactgaatattcccatgaaattctcaattcaaaaatctcaagtcttatctttaaactgcttgcttgtactacagccttatcatttctttcaaatgatcaagaagaaacccttcgcatgtcatgaagaagcatcctggtatgtgtcaagaagtacattatctagttttaaagccatttcttcaatatccacatcttcagttttgtcataattgtcatcactctctttacttcgttcttttcttactgcctttaaacacctgtcaagtctctttatgaacaggtccacatcctgcatcttcattccgatggctgatgcagcattgaggtaagcacaagggtaattatttgtatgtgacataaagcctctgaaagtatagccactcacagtttgcatggacccaagaggcacaaccctggctccagaaacctgtctggtaaaaagcatcgagccaagctgagtgacagctttgtcacggtgttcatctagtgttttaagtgtcatagctaaagatatggat

SEQ ID NO: 212248 - DNA, 672 bp, Homo Sapiens
  misc_feature (649)..(649): n is a, c, g, or t
tttttttttttttattttatgacttaccctcagaagtcaaactctcatttcttcaatagtgtagtggttacacaagtcaggcctattcaatgtgggaaggaaccacacaagggtgtgaatagaagaaggcagggatggttgggggccaacttagaggctggctgccatgcaggggaagcctagaagcctggtaggggttcatgtaccctgccaccatcctcctttcacttgctattcctcttcactgaagaccccaagaagcatatctcatttcagaaaccagcagagatgatgacttataagtcatggaggaaggacgaggtggatttgaagagaaagccacaaaataggaagggtgaaggtctccagtccaaggaccaggtctggaagactggaaaaacggaacagatgacgtttagggaagggagacacaggctgccccaaggttcaagaataaagggtagcataagacaagagtgcttacccttggcagtggagtcacacttctccttttacaaccccaaagaaagtctggtgtccagttcagccctgcttgtgtcacgtatcctttgctgctctgagtccttggggcctgagaactgggacccatgagtcctgctgcccagctgctacgggctgaattctgtcnccctaaattctcctcgtgccgaa

SEQ ID NO: 212249 - DNA, 711 bp, Homo Sapiens
ttttttttttttttttttggtgttttctcaactttattgtggacaggagaagggtaagtagacttgaaggttttttattttttaatgaagaaacaatttatcctgtgtttgataccagatgagactgtaagggtcacatactccttaagcctacacatcaattccaggtgaagtgcttcaggcttggctcattctgacacctaagaagggccctctaggccacggttgggaagactgtttttgccttagcgccgtgcaggtttgggcattatataaacttttacaggcttgctgaagggaatggtgccctcgatgctggtttccacctgtggtgacatctcaccaccctccatccaggggcattttggaatgcgagcactggagttgtaggccagcagcagcctcacttccacctggcatgcctctgtccaagcggtgtgggagagataaacctgagtgatgagccggtgccgccctgggccaggattccggaagtctgcaggcttggggtgaatcatctgagcctggccatctggatataagacctggaccttaacagtgttctgaggatcctgcacatgctccagggttgcatcaacatccagggcaaccaccaacccagaggtaaaccgcaaagggttgtctgactcgcccgctggctcgatgatggtggctgaggctttgtggatctgctctggaagcgggagatgc

SEQ ID NO: 212250 - DNA, 774 bp, Homo Sapiens
ttttttttttttttttttacctagaggttataggaagggatgaacagagatgacagacaagacaaaaaaggttatgagagaattcctcattatacatgggtagaattcaccccagaaaccaaagaacttttcataattacaagggagggacagcacagggcacaagatctttgaggtgttagaagacaggctgacagaccaagcttggtgactggcttaataagtctcctaccacttgaaattctgtgttatttatttaaagagaggcagaggaagagttcagaagccagaagatttttggaagagaagttgagcctcttgcattttcttacatcattaatttccttcaccagaagatatagttggaccaaattgcaatagggttcgccaatggactccattatgtagtcgacctgtgctcctcactaggccctgatttcgctatctgataacaaaggcttctgaactcttattcttttcctcactaacaaacctcaataatctacacttagcattaaggtctccaattcagggttatggaagaaactagtcttccataacccaacgtttctacacatctcaagtccttatcagagttataggttcagttttcacatttccagggagaaaatctgctccttggcagtcttcaaactttacctgacatacattatataccctcagcccagggcctcaatctcttaacatctccatgaacacccagcaacaacaaatatatcatttatcacactcatcccacttgacatcagtagc

SEQ ID NO: 212251 - DNA, 771 bp, Homo Sapiens
ttttttttttttttttttcagcttaaaaatattgcctttattcagaatcataagggtttttttaaaaaaatcttaccattatgaaagttaaaaaaaatatagcactcagtacaatgaattactgcatttaatattcaaacacttaaggcacatttctcacagtttacatgtgagaatttagcatgatccaaactcaaatatccatttctcgtatctttcaatgtctgcagcagacactgacttagaaaccttttttaaagccatctcgaaatcctccatagttgtaggcatgtgcatttcttctttggaaagatttcggatttcctctggagtcaaaccttcaatgcgccttctcattgccatcaaggacgcatccctgcacacgttggtaatgtccgcacctgaataaccttccatgttttctgctatacttgcaaggtcaacatcatcagccaattccaactcacgtagacttattcgtaatagctcctccctgccttttgctgacggcaaaggaatatagattcgtttctcaaggcgtcgtcttaaagcctcatctatatcccagggaaaattagtagctgccagaaccataaccattttggaagggtcatcattttcagaagtacctccaacaccatccatctgaaccagcagctccgctttcacccttctgcttgcttcatgttcttcagaagtccctcggcgactacagatggagtctatctcatcaataaatatggtggctggagaataaaatcgagccatttc

SEQ ID NO: 212252 - DNA, 732 bp, Homo Sapiens
  misc_feature (669)..(669): n is a, c, g, or t
  misc_feature (722)..(722): n is a, c, g, or t
ttttttttttttttttttccacagatgggaagaacttatattctaaagatgttaatttccccttcaatgcaattcttctcaaacttccaacagacattttgttcacagaactttgacaagctgattataaaatgtacctgaaaaagtaaatgtgcaatatgaccaagacaattttaaaaaagaataaggggctgcgcacggtggctcatgcctataatcccagcaccttgggaggccgagatgggtggatcacttgaggtcaggagtttgagactagcctggccaacatggtgaaaccctatctgcaccaaaaaatacaaaaattagccgggcatggtggcgcgtgcctgtagtcccagctactcaggaggctgaggcaggagaatcacttgaacctgggaggcggaggttgcagtgagcggagactgcaccactgaaccccagcctgggcggcagagcaagactccgtctcaaaaagaaaaaaaaggaataaaggccttgggggaagggtggagtgcttatcttatcaagccataagacactttattaagctttgctcattaatatgtactattggctcagaaatagacaaatagatcaacagaaccggagtctagacagggaattgagagaaaagatggtgttggaacaataaatggtgcttagcanactggatatctggaaaaagagcaattagagctctgtgtcacaccatacatganaacacatctc

SEQ ID NO: 212253 - DNA, 705 bp, Homo Sapiens
ttttttttttttttttttcagatataagaggtttattaaggaaaggctcccagagacaccagtaaataaatgggagggtagggaaagggattaagcccagcaagggtgtgatttcatgtaatgtcccagcctcaggccgatctagaggaaagggagtgctagagcataaattactcctcagagaatgtccttccttgaggcaagggagctgggcttttgactcgtagcccagtcagtcagcggccttggccaagaggacggagaactcccagaccctgctggctctccatatgggctgactggctccaataccaggtcacaggtgccagcctttaacctcaaagcacttaattgggattgggcacacagagctggccagagaccctaggggatctgggtggccaccaacactgctggtcatggcacagcacctccattactaccctgcacactgcccggcaccagttacaggtctttcattacattctgctgcaagaggaaatgagtaatatcctttgacagtcctgggtttggcttttcatcatccaaagatgtacttccttcctccagtgggtagaagtgggtgtccctggaatgcctctgtaagacggagcagccgtcccggttgaagatcacccgggccaatttgaaactgcggagggcaacttttggctctcctggcctcttagttgagtgattttctga

SEQ ID NO: 212254 - DNA, 703 bp, Homo Sapiens
ttttttttttttttttttctacaagttcctttattaataaagcaaaatagaaaagaacaaggtccccaaatgacccacatgattcaaagtgcaaatttactccaacctgcaagagaaaacgaatggcaggtcttgactgtgggggccatggaaatttggggtgattaaattgcctttgaatcatacaattgtagcagctgaaccatatctgattaactctttggtctctgttattggaacaaaaccgacgctatgcctgcagccgccagactgcaaccaaaaacacagtttggggtcagaagacattaaaaatcacaataaaataggatgaatgttctaagtcacgcaactgaatcaaggcacctttttttttcaaaagcaaaaagttgtttaacaatattccagaatagtagatacttcaaaaaccagattacagtatatatcattttgctgcacattttagtctattttctgtatacatagtcacacattctttaccctctcccaacttatacatgctttatccccccagtcatgtgctatgtaggtataaaaaaataaagttgtatctaaacaagtgatttaaaaaaaaaaaaactaacgaatgccacgatgataacactgaacttgtttccctcttgaaggacattggaaatgttaccgaggttcattttccccaccactgaatcatcttcctccatgt

SEQ ID NO: 212255 - DNA, 600 bp, Homo Sapiens
ttttttttttttttttttaaaggatacattgccttatttatttatatcccaaccttattacaaaaaggcttacaagatgcagatattatagtaatataaaacgattaaaacttagaaaaatgagaataaggaaaataaaagtagaaaaggaagacagaaccaagaacatgactagcatacaaaatacataaacacttgctgaaggtagaccacaaattgggctctaaatggtctagtatcagtacaaacagaaaaatacaatcagctgaatatttagtgtccttaaggtaaaaaccaaacagcaattcaggaaaagcataactgggtccagagaaaatttctcccacgcattcttaaatagaatattatgaactgttacgataaacaccctttacagtatccacagcaattaaatttattttttttcctgagacaagatctcactctgttgctcaggctggatgcagtggcacgatctccactcattgcaacctccatctcccgggttcaagcaattcttccccctcagcctcctgagtagctgggactacagtgtgtgccctcatgaccagctaatttttgtattttttggggagaaac

SEQ ID NO: 212256 - DNA, 524 bp, Homo Sapiens
ttttttttttttttttttcatggatctagacacaaaatcctctttatttttttcaaaaatccttttaaaatttagcaaaatgaatacagtagtaaatacaaacaataatgcaccatgaccaagttagtttcatcccaggaatacaaggttggcttaatattttaaaatcaatcaatataatttactatactaacaggctataagacaaaacccatatcaccatctcaatagatgcagaaaaagcatttgacaaaatttaatacctattcatgaaaggaaaataaacctctcagccaattaggaatagaagggaattcctgaaactgataaagggcatccataggccaggagcagtagctcatgcctataatcccagactttgggaggacaagatgggcggatcgcttgagcccaggagttcaagaccagtgtgggcaacatagcaagacccttctctacaaaaaataaaataatttttaaagggcatacacaaaacacctacagctaatggtaaccctcgtgcc

SEQ ID NO: 212257 - DNA, 661 bp, Homo Sapiens
ttttttttttttttttttctttgaaagttcagctttaatgacaaagatctattacatcagtctttttcttcaaataagatagatgtgaataaacaacttcaaacaggaggtactatggcctcttcaatacactgtagccagtgcactgggcccttggggatgcccagtgatatacacgttaaagcagtaatgtaagtctgtgagccactgttcctgaacacttccactcttcaatgtcgtgatattcttgatgatctgctgcaccaagatcgcattggtcaacatatgagtcctgaggggtgcatgctgaagcagcagtcgaagcagctggcccacaacaggcagctcctcaggcccaactctgttcacccgcaggctctgcagcatcaacctgaggactcgaggcaagagagccaggatggagacacagaccccccacagcttgtccctctttcttagatgttctgcttcccctttctctatagtgagcagaaaataaagaagactgtagcaacaagaagccagaaatggcagtagagtctcactaactacacaagtatgatccaggagcttacagataacaccaaaaacacagccagccgtgctgtcaggaattacagtcaacccaaccaaatgcttactgatggcactttgcaagatg

SEQ ID NO: 212258 - DNA, 694 bp, Homo Sapiens
  misc_feature (675)..(675): n is a, c, g, or t
ttttttttttttttttttaaagatttcatcattactttatgaatctgtcgctttgcaagaccgacatcatcagaaataggtacaattcactcagattcaaatttaagtagcaggaaataaatatcaaaacatcatcactggccctcaatacaaaacctctatgccacccaaaacaccctccctgtcccaaccccaaatggccactccctggtggctgctgcttcactgctgccgtctcccatacataccacgagagtgtcacacggccctccgtgaggctggcgccgcaggcttaaacagctggctgagagaagcaggagtgaaacatgccagcgactctgtgctgcgaatctgtccccactttctttttataccacaaacttctttaaggatctggtctttcaataggagcgatacatagctttttagaaaaaggaaaaaaaaaaaacccttaaaaaggaggagggttcattctgattactccaaaccggtcatcttctcaaagtagagcagttcagattcacaaagtctatcagaggtgagggcaggccaggaggccacctgggcagggcaggcgtcccccgggcatgtgcccggcagggctggaggagctggtagggtgggcaggacactatgtgctcagaggtccggccggccgtctgtcctccacagaanaagctgccaagttggggtg

SEQ ID NO: 212259 - DNA, 694 bp, Homo Sapiens
  misc_feature (661)..(661): n is a, c, g, or t
  misc_feature (680)..(680): n is a, c, g, or t
ttttttttttttttttttcccagttagaaaacgttttatggacacggaacgctccactgtaacgggcaggcagaacacactcctttcccaggctcatcaattaaacagaaaacaggggagctctcctcaccccagcctggccctgtgctccccaatggcccctgcgaggcccctaccatggcctgcctgggagacacaaactatgacaggaacacactggactgatacagaatgaggccagacacacccatgcctgtgcctcccaagagcgaccccaggacagtggggcagacagaggtgtctacactggcagaaacaagggctggagccacacgtgatgctcggacacaaacggcacgcagctctgcagcctggccacacacccttcgcgtatgactccactcctcagggttcacggggctgtgtacagagactctctctgctgacacgatggccacacgcccttcgtgtatgactccactcctcagggttcacggggctgtgtacagagactctctctgctgacacgatggccatatggccttcgcgtatgactccactcctcagggttcgtggggcttggagactctgctgacatgataccacagacaattcattacctccccgcggctgcttcccgcatgccaaaggggacaggatncaagtccttgtctgatgancaaaactctacacg

SEQ ID NO: 212260 - DNA, 697 bp, Homo Sapiens
  misc_feature (599)..(599): n is a, c, g, or t
  misc_feature (648)..(648): n is a, c, g, or t
  misc_feature (652)..(652): n is a, c, g, or t
ttttttttttttttttttatggacagggtagtcaaatttatttcaaaacaaaagctttgttgggctgcatcaaatgcaggagaaaaggaatacttaggggcatggttaaattaccagtgtgcgtaacagtgaggtatgcctcaaataagcctttaaaactttataaactgaactagaacatacccatgcagtaatattttttcagtgctactaatgaaaaaaaaaaattaaagcctgcactggaaatttacaatatggcagaatttgttacttttaccttttgaccctaatgtacagattttatgacagggtctgtgttaaaaatctaaacattttcacaagattttaaacatcactggaaagctgaatttagaggaaacaatatcagataaaagtacaatgcccgtgacagccaacattatgtaactgggctgtatgaggttgtttagaaggctagggttaaaaagatagatagacaaaaagatttttaaaaatcacccccaaagttgatgcgctgatttgaacataagtacaccagatactacagcaaggggatatacactgcaaaaaggtcatctatttacagaagagtgatttanagacattatggttttctttacagatgtaagaacagcaactgttcacttnttanaaactctacatctcaaccctccactattattatagtccactgaat

SEQ ID NO: 212261 - DNA, 756 bp, Homo Sapiens
  misc_feature (711)..(711): n is a, c, g, or t
ttttttttttttttttttagagttgttttaatgcaggttataatatccacagtacgttggtatgtggcataacttattaggggtgtactggtatggacttctcagcagaggtggccaatctgaacaaggcccaggtccctcccatgcctcctctcctaggcttcttccctgcagctgaaggtggcccatcagcaatgcccgaggggatctctgttcagacgtgagtcctgccttggcctctcccagcaatgcccagaggcagcaggggcttcaggggtcgccctggacaggtcagaggccaggatcagccctgcctggacccctcttgcctcctcctaccctctccaggctttagcccagccttagcaacactctcaccagctcaaatccacattttcccagagggtcctccctcccatccttcctttcccacatccctccccagctgggcccaggtcttggcttcgatgccttctctggcctccctcatcctgcaacagcccctcctgtccagggcctggctcaaggctggtgtgggagctacatgcccagtgaatatacatgctgcttcagacaagcctgcttcccctccaagggtttctttattcaacctgcaaagtcactgtcagcaacttggcctggccctctgctgcttccaacaaggaaatgcttaaaagtcaggaaatgcattgggtgcctttcctagtacanaaattgactataccactttgggcacctgagactaacaacagcatt

SEQ ID NO: 212262 - DNA, 723 bp, Homo Sapiens
ttttttttttttttttttccaaaggaaacaaacaactacttttattgttaaactttcaattcacagattaactttcaaaggttcatatttcccacgttcttttttttttttttgagacagggtctcgctctgtctcaaggctggagtgcagtggcacgatcttggctcacttcaacctctgcatcctgggctcaaaaaattctcctgcctcagcctcccaagtagctgggactacaggcatgcaccaccctgcctggctaatttttgtattttttgtagagacaggatgtgttccccaggctggtctcgacctcctgggatcaagcgatccacctgccctggccttccaaactgctgggattacaggtgtgagccaccgcactcggcccctatttcccacattcttaatgacaccccatccacagtggtccaatcaactttcaaattagctctggggaaaaaaatacatttaatgaaagctagaaaacctagagaaggtcttgctcttcatctttcactgcagctatggacagctcggcaccacatttgcaccaatcagcatgtttgcccatgtcctgccaaggagagaagtttacatcatcactgacaaggtgtgttcacctattctcatcacgtaacactgatggattccatacctaatttatcaatctaagacattactggaccacgtaaccttacatataactacctgaccatattttc

SEQ ID NO: 212263 - DNA, 694 bp, Homo Sapiens
  misc_feature (622)..(622): n is a, c, g, or t
ttttttttttttttttttaaacaacaaaggttgatttcttgctcactacatatccattgtgggttggtggggtgggagtgggggattctgctcatcgcttaggaccccaggctggcagaggagggtttcaactggagagctgcttctatgtggcaacctggacccaggctctcaaagcttctgcccagaagtgaccctcggcggttctgctcatgctccactcgccggggcagccccgacctaacctcccagcaggcagcgcatcacatgttacaggtgcccaggagaggagaaactgcacctttgtcaacaaagacgaccacggaggggagactgctgatggagggtggtcaggagtaggggggcttgttcctgcctgcaggttctcccctatctcccaggactgagctcgacacaggcacaggctgaggcctttggaaagctgggcttgggagcttctgtgacctggcaagctttgccttccttaaactttctcagcagatggtgaaatccaatttggaatgttcagccgggcccagtcattctaacctcatctcagccgtcagctgtgaaacaacaaggtcagggctgggttcagaaagccatcaggaaccaaagtgtngtttgtttttttgtttttgttttgttttgtttactttcaggaactaaggaggaaaaaagtgaaggacaggaa

SEQ ID NO: 212264 - DNA, 669 bp, Homo Sapiens
ttttttttttttttttttgccattggtacgaatgctttattgaaactaaatacataatacacacaatgagatgaagacaatatagaagtccgcatagtcatcataatcccgttccttggccggttgaggcagctcagtggctgagcccagtcaagccaacccgcagcttcactcacgacttcaagatttgatgctaattcttttggatttctacagttattaaataagtgtctgagtggactgtctttgttcctttgtgttttgagggctggctgggtaggagtgggggtggtttgtctgtggcagtgaatttttgccaggagaggaacattaaatgccaaaggtaggtggcagtatttcagtctctgccccagccgacaggcagagagaccttcacaaataataagacccaagaaagactgggcctcacctaggcttgtgttccaggaggtgctgccagtctcttcattacagtcaggctctgaggttggggaagtggaagtttccagcttttcatcctcatccctgagggctagaatcagtcagcactatctaaagagagatgtggctgtaaagtggtcatctgaaggtagatacgcctggatagttctggtccaatgcggcgagaagtggatgtcacaccttccccacggcgcacctgtatgtctg

SEQ ID NO: 212265 - DNA, 747 bp, Homo Sapiens
ttttttttttttttctttattcagatttaatttctcttacattctcaaagaagccaaggaaatccaggtatgcatatatctttaaaaattttacagaatagactgaggtataaggcaagaattgactatctcttaatttctttagttctttatctcatctattttactgctcatttttcacatttctaagtacttattccactgctgttattatcccaattcacaaaatagaatggatttcccaatctgaataaaacacaagactcttacccttaaactatatacacagaactgtgtgactgctgtcattcataaacttggatgctgaagttcattcaaccatcccttaaaaaaaaacatttgaacaattccaaaagagaacaaagataaatctccaagtcacccaatagaacagaaacctactactgagaacactgaccgctctcttcagagtgaagaatgggcctcatgtcacacgaggcaggggaagctgctggacgcggccctggaaggtgcactggcccagtccccctcccactggccttggctgcaactcatgctcagactccctcttcctcctctctcaaagctgcttcacgcagggatgggaagaaaaagcgaactcttgcactgaccttgatcacatactcaaggactttcacatagctggtttcagcgagggcccttggaccccacaggaactcatagcgtgcgggatcactgtccgggcactgccggtactccagg

SEQ ID NO: 212266 - DNA, 744 bp, Homo Sapiens
ttttttttttttttttttgaatgcaagaaaattttaattgtatctagctagaagtacaagtatatgttacatgtaaattttcttacataactatcattggtacatggaactacatcagaccaattacattgttttaagtttctgaacaaaccaaaattacttaatgatttaataaataacaataccatcctaaacatacaggacacaactcacaaccccttaccctcacctttggcacgaattcaatacacgagacaagactgtcaagttaacatcagatgttctccctgttcttcaattgacattgattgcataaaattatttagtaaatcttcttcctttttttcttcactcatgtgtgattcagaatcatctgaagaaactgtttgcatgaacagtttccttggtcttctaaaaatcttcagtgacttacatcttgttttagatgcatatccagtttttatcccttctttgtttctcactggccgccaaagggaatgctgtatgagcatttcaggtgcagatgcagctgcgatatcagaagaccccgagtcctctctctccagttgatgtcgccatgtagtgcaagggtaatgctgtttctgtgagtaacgggagctaaggcggcttctgtgatgagtgaggacacctggcttttgtgagctgtgctgaagtacgtgcatgtactgcctcttcattaacatcttcagatagtttgcattatagattttagcaatgctgcac

SEQ ID NO: 212267 - DNA, 602 bp, Homo Sapiens
ttttttttttttttttgtggaagaaatacatttattttcttttaaccaaaatagatgagaatgagtctctatcctgctacctggtttgttgttattatggtttgttcccctctccagaatcacgaaaaggtcctggggtctcacacagtgcaaaacattgaggtgagccctctaagccttggtctgcacaggttctgctcatacatgctcttaagcttgcaaattcagaagtgttggtctgtgtgccccaggtacaagagaccttcccagggagccttggtgaccagggcccagcatccctggggactccatgcagccttttccctaggaagttctatcatctccaggtgctttgccacaatcagggcaggagtctcaccgctcataggccccgtggacttttttgtcccctacttatcttttggaaaactacccccctttttctctccccttcttcctccgggaccctgggcctaattgcagttcactagagctttcaccatagggtccagaagcacagctattctcatgcagtcctgctgtccaccctacaaaagcaactaaggcaaggaaatgcaaagaattcaggtatgttcttggac

SEQ ID NO: 212268 - DNA, 715 bp, Homo Sapiens; identical to SEQ ID NO: 57771

SEQ ID NO: 212269 - DNA, 665 bp, Homo Sapiens
ttttttttttttttttttgaaaataatgtagaaaactttatttttgtttccagtacagagcaaaacaacaacaaaaaaacataactatgtaaacaagagaataactgctgctaaatcaagaactgttgcagcatctcctttcaataaattaaatggttgagaacaatgcataaaaaaagttgcacaagttccttattttccttaatatttcacttctatttaatacaagctgggacataaaaattctgttggggatacctgggggaagatgtgagaaactaatgctgaattcagcttatacatgatgaaaagaaaaaccagacaaaaggagcacataaatatgcatacagtgtaactgttattattttaatacccacgataagggatttttgttagcatgtttagggggaacgaggattggtgggatccttgggccacaggaatctgaggcaacggaagatatatagagtgatcgtccccctgccgaaggaacctggcatctgtcaagcagatgctgcagttcaaacttcagcttttaagatagatagctattgaaggcagagggtcagcaggaggatgtgtatttctaatctaccctggtaaagtcataggtaagactcaaaagcgggatcttattcaaaaggcaggtatttcctttgttttct

SEQ ID NO: 212270 - DNA, 538 bp, Homo Sapiens
tttttttttttttttgttagtgagatagtttatttagggacaaaatacattaagatgttttactccactagagcaatcttccagatgtctggaagatgaaaataacattgttcattaatgctattaccaaaacataactattgcacaccctactaaaacaatgttatacacgctgtatttcagaatatcaatgcttttaacttccaggttgtgacagcctccttccagatgacacttaaaaatgcccacctcctagaattcatgccttgtgtaggagtctcccacgttgtagttgacttggtctgtgtgaccaacaaaatacagaattggtatgacactttcagaggctaggttacaaaaaacatcatggcttcttccttgccctccggtgttgcttgctctggggacaaataactgccatgttgtgagaggccctctggaggggaacatgtggcaacaaactgaggtctcctgccaacagctgtgagtcttgcgggaagcagatcttctagccccaatgacaccttcgaaagattgt

SEQ ID NO: 212271 - DNA, 489 bp, Homo Sapiens
  misc_feature (472)..(473): n is a, c, g, or t
ttttttttttttttttctgctagagatgtgatttagtcttttcatgtttttgcccaacctgatctcaatctcctaagctcaagagatcttcctgctttggcatcccaaagtactggcattactggcatgagccaccaatgcccaggctaatattgattttttttattgcttttactccatttaattttcaagccttgcttaaattagtattctaaatgtttaaaatacttagatccatttgaatcaaatgaatctaaagaagttcacggcacaggtcaaattgataaaggtgatgaacttgatacagtttttcttttcacaaaaaatcttgcacgactacaaaaaaaagtaagcaaatccccaaaacagagaaaatgtgtgtaaaagccacatgatgtgaccacaacacaaagaaaccaagaaattagtaaccaaaaattggataaaatgaatcaaaacacttgaattttannaagtcttatattgata

SEQ ID NO: 212272 - DNA, 689 bp, Homo Sapiens
  misc_feature (672)..(672): n is a, c, g, or t
ttttttttttttttttttcccagttctaatacaacaggctttattctgttctacaattttaattccataaaattgataaaggcagtcactctattcattttacagaacatgaagtatttattttatggactcaagttggagtaaccaaagaggtttgcacacagtgacaggatgcagtgtttggggcccagttctattaggcattataaatgcccaagatgagagttgtaaccatgcagagtagtgttttctgaatatttggaaagattcttctggtctagtacaagatggtagaagagagggttagccatcctggagtatgaactcggcctaaaacatttccagtttagttgatttgttggaaggacttaacgtggcaggtggagaggtcatcagcagcatcccagcaactccaagtacagggaagaaagaaacgtaccaaacacacaaggtggatggggtatggtgcttgttctcataacagtaatagccagccttctagagcagtggctcctcaggcagccattcatactttatgtgtagcatgctttgcaacagtgaagctccacatttcccacacctccattttccttacactgtctttgcccattctgcttttcctctttcgcaattctttttgtgctttccttttctcttttgcctctgaatcangatttggtgagttgggt

SEQ ID NO: 212273 - DNA, 704 bp, Homo Sapiens
  misc_feature (610)..(610): n is a, c, g, or t
  misc_feature (642)..(642): n is a, c, g, or t
ttttttttttttttttttaaaaacataagaaaatttattaaaatttaaaggtaaaaacatagtttcaaaagatttagtcatatgaaaggtgtgatagagaatggatgctttcttgaaattcaaaatcacatccaagagtatcactttcagaatgttctagtggactggatttacttttatttgtcttggatgaaacagtcactattctattttctttcttgacagaaacgtattttttcaaagacctacttttaattggttcattaaccaaagaactagtttccctagtttctttgcttttctggttttcaggacagtcagatcaggaatgcaggtcctttccagggtgttgcttatcagagtgttttttggtatattcacctgttttggtctttttctctgaagaagatctgctatttctggacaactcctcttcttttctttgacttccagttccagaagtcgcatctggtgaaggagaacacattctagcaatgaatccttcaaaagactcctgccgctgctcagtagctgggactcctaggttgttgctggaagttcctaagccctctggagtagaaactgggacaggaaaggagtcgagaggcanaggaattctagcatcacctgtaattttctganacttcattagtgttccttcattgtaagctgactgcatacaaatagaaacctggatattttgc

SEQ ID NO: 212274 - DNA, 705 bp, Homo Sapiens
  misc_feature (409)..(409): n is a, c, g, or t
ttttttttttttttgtatccatttttttttaattgcagtcttgattgttctcctggtttctggtcccccccatgccttcccctgacccccagggtatggccctctgcctgaaccaagttcagtattcaggttcttccctatagccagaagtggaaagggtccccagagcaaagagctgcattctgtgcatgtgctttctgggatttaccactctctagaattttgctcctttagttctctttgcttctatagcaataagttgcatttaaatattttttgtaattttatagttgtcctcaatcagtccattctgctgccgactactataccttacccaatagcaaaatctatttttttttaaaagtgtctgtcactcaggctggagtgcagagcgagactctgtctcaanaaaaaaaaaaaaaaaaaaaaggaaaaccttttctctacatgttcttaaattgctagatatcctgcaattcaacacctctggtctatattaaatttagattttaacctaaggtgtccacacattggatacagttaaaaatactttctcactatctgatgttcactaagaaggtacttcttattacatatactctataaaatataacctcatagtaaatgctttcctatagtttgtgcattttctgtggcctcttgacttcacacagaatgattttccacattcattacatccatagg

SEQ ID NO: 212275 - DNA, 690 bp, Homo Sapiens
  misc_feature (662)..(662): n is a, c, g, or t
ttttttttttttttttttacatttgtaggcacaatttattttaaaatccacacaagaaacccagaaatgcagcattatcttcagacatcacattctagctctgtttaaataccacatatgctaaaaaccgacgccaggacattctctaaatgagttacaaatcagtttctggaaaggaagtgctccatgaaaagcttatagcaagataactcaggctttcaggtggagtatggcacgtgaattagccttacagtaattgtgtacatagtatgtttagtcattattgaatcaaaagtttcaggaagtaccttttttaatgcatacgctgagagaaccgtcaatatgcctttgttcctgctgagggatctgccattctggaggtacaaatactgcagatagaatatcaccgcaggactacgtcaagttcagagtgttcaggatcatttctatataaaactacaattagctgaactatggcaaaggtccttgaacataaagcctttcttcatttcattgcatcttaataagtagaatgccactaccgtaaatgctgcttatatgtattttattcacatataagttatgaattttctaactaccctctgtagctataaatttttcccttcctgaaaatctctcttccacacctgttctgcttgtcnctttgttccctaaagcctgtattttttc

SEQ ID NO: 212276 - DNA, 677 bp, Homo Sapiens
ttttttttttttttttttcaaacatctttgatttattaagcaggtgcttctgggagaaactggtaaaaaagtagggataactatagcatttcaggtgaagtcgtaggataagccgggtactgctgagagcttagatgacaactgcacatcctctgggcaacaaagttatagtttgaagctctgcacttgtcattactggcttatgaatggctgatacactcaacaaactaaaatactcttatgaagagcagctttataaaacctactagaaacattacggccaagacacatcagaaccaaagcttagtaatcttcagggaagatggtaacattgattcctagatcatcatcatcatcattttcaagttcttcatcactttctttagtaatacactgggcacgtgttttttctgggtttctttttttcttatgaatatatgatgagttatttttctctttgatcttgggatgtaagttagtcatcgtttccctttccaaagcatgctgtaggcagttgtaaaacctctcaattcttttcttgttttcctccattttttgatttgccacatttaacaggaagtcaatatattcctctgtcaccatcagttttcccttatggcttaatggaacttctaaagcatgtgtactccggacagcaacatagttttcctctcttt

SEQ ID NO: 212277 - DNA, 699 bp, Homo Sapiens
tttttttttttttttgttcgccgattcctttatttatttaggaggtgggggcaggacgcggagtaagtttcctatagggaaagagttgagaagagtctgcagggactgacctagaaagcagtgacactccgtagttggaaaaaagcagagcacatctttaagtacctggtgtgagttttgtaagaaaacctaccttatgaatgagtacagtggaatactacttagtacattcatacatgtttctaccatctcaagatttttatatatacagtatatgatctgtttttataaatgtacagcttgaaaaaagatccttcttgtagtaagtacagcatttaaacacaaaccaatatgggccagccacattctaattgaagacccagagaaagcaaagccagcagcccagcccccagcccccagcccctgacctgcttggcggccctgatggtcccggcaaagtgtaaaccagtgcccctctgtcgccctgggctcagcaggccagcttacccttggcacgtacatgggaagtgcctgctcacgctaagcccagtctgcagagggcgggtcctccctgaaggaaggtggcagagaggaatgtgtctatcaggtatagacaagagagatgaaagaaatgtgctcttcaactaaaggcacttgtcagcggccacctacagccattctctaggcctggtgagcaag

SEQ ID NO: 212278 - DNA, 646 bp, Homo Sapiens
  misc_feature (577)..(577): n is a, c, g, or t
tttttttttttttttcttagttaatatctttaattttttatgtagaatatactatttttttctccaccaaaataacaatatatttgcaggcgggaacatgtatgattttaaatgcacttttgaaatcttagagtagaaccactactctagtaatacttgtaataaaattaaaatagttttaaacacttccataaagaattaggggtgcccagctccttgatttccccctagggataaagatatccatgtacaattccaggagcttccctgtaattcctcaaaaaagcactagtaaaactcttaggaggatattagataaagctcacttagcaatagccctttttccccacatattctggaaggttctacaaaagctattagatactcattcctggttctggaaaattaaataagccaattcttggtaggattttccaaatggcttaccacagaggatttatcctcttttgaaatatttcatcccataaagaatagaagctctgccttcatagcatttcaagcttctgtatttctgggacaaaaaatgtctaaacagaattagatctccaggtctcanaagcacagagatatatcaagagaaatctggagttaaaccaaacaaaaatctgtaaaatgtgtaaatatc

SEQ ID NO: 212279 - DNA, 787 bp, Homo Sapiens
ttttttttttttttttttgataaatacatgtcattttaataatcagtactggatagtggatgaaaacatgcattagactaaaaatgccacaaatttgtttttatatccattcactataaaacttccttttttaaaatttaaagtcttgtttcctattttagaatacgcaataatcgggaggatacatgatggggagccagttttcagtaaaagatgcacaatgggtccatccaagtaacttcatcagttgaatacaatttttccagttttcttttgttggtttttcttccacaagtttagttgcaaatttaaggcctctcccatacattttatttactaatgcatgtttatatgcaaatgtcaaaaccttattgtcaaagagatcagtccatttagtagtttcccaaaatgtttctgccagagaatccaaaggactttctccttcctcctcctttccttctgcatcagtggaaatggctccgtcttgagcctgggtgtgaagaagatggtctgccagggcacaacctttcctacaaagggcatctacgagggtggatttttgtttgtccatgtcattttttatagtagctgcatcaggcctgggatcagtcttcattgcaatataaactgctagggctgtttgatctatatgagaaatacagcatttgccgcatcaacaatttcattaagtcttttcattcgttccttttcagcatccaattgatgaagtcgtgcaacgtacagaggaagatattaggatatgtttcttcaattcgttaaaatgtca

SEQ ID NO: 212280 - DNA, 612 bp, Homo Sapiens
ttttttttttttttttttggctatcaatatatttattattagcatgacatattatgaaaaattattttccaaagacttagccagtaacactacaaaaatagaaagcccgttaattcctgtgaatttatctgtgtgtgtccatgtccagtaattatttcactgtctgtctgaagtactaacaatactaaatccaatgctcggcgccacgcctcaatctttggtgtaacaacgtcataaactctcggaatctgctccagtttatttgaaatgtctgaattaaaaattctactatttagtttactatattcattcaagatgtaagatgaaggagagccagagtctgtggcattttgcagatgatgttgaatgtatgtgctggcttcaaattctgatgagtaattggcagtgttatataggagagttgaaaggtatttctgccatccatttgccaggaatttaagcacagttggtctgtatattgccagagatgaagccagccaagaggaagtattatgcagccaccctgagcaggcatggttttcttttttcagagattgctctgcaagaatatgaagacagctaagacacaaaaattcaactgcaccacctcca

SEQ ID NO: 212281 - DNA, 641 bp, Homo Sapiens
  misc_feature (613)..(613): n is a, c, g, or t
ttttttttttttttttatattttatttatattatatgctatattcttataataaagcaagctaaagaaaatagtaagaaaatcataaggaaaagaaaatatatttactactcattaagtagaagtggatcatcataagtgtttcatctctgtcgtcttcatactgagtaggctgagaaggaggaggaaggggagggcctggtcttgccgtctcaagggtggcagaggcagaagaaaatccatgtataagtggatccttgcagttccaacctgtgttgttcaagggtcaactatatatagctttacattgtaacaacagcaaaatgaactacaaatctgttggaaacttctcaaaaattctcaaggatgaacataattaaaccagtatgaaatccctttggctaaaaacaaaagcaaactaaagtactccaaaataattttgcacctggctgttttacacttcaagaatagctttcttggctgggcatggtgacttacgcccgcaatcccaacacttcggaaggccgaggtgggcggattcctgagctcaggagttcgagaccagcctgggcaacacggtgaaaccccatctccaccaaagtacaaaaaattanctgggcatgggtggcgcgtgcctgcact

SEQ ID NO: 212282 - DNA, 700 bp, Homo Sapiens
  misc_feature (604)..(604): n is a, c, g, or t
  misc_feature (679)..(679): n is a, c, g, or t
  misc_feature (689)..(689): n is a, c, g, or t
ttttttttttttttttgtgttttaaagttcattctttattctgttaatacactaataattcaaatcaattttaggaaaaaaaggaaactacagataggcataacttaaaaaaaacatcacctgtaatctcaccagagataatcaccatttgaccataaataacaagcaatctgtctcacttatctattactgtttaacaaccctcccccaaaacctcgtggcttaaaacaataatttgttatttctagtgagtctgtgggttgattgggatcgactgagtagttcctctgttttctgtggtgtagctgaggatacacccacattcagctgggagcttaaggctggaacatccaagataatctctcatcctcaagagtctctctccacatggcctctcatctttcagtaatccagctgagcttctttgcagcatggtggctagcttccaaaaaggataaaaggaaagctgccagtctcttaaagcctaggcttggacatatactaaatttcttctgctgcacttcagtaagcaaagccattcataaggccagccaaaactcaagagaaacagactccacttgtggacgggaagagcagcatgtangcacagggatggaaagactgactggccatcatactgggaaactatctatcacacaatttgatttgctaaacacanagtaagttantgaccatttct

SEQ ID NO: 212283 - DNA, 689 bp, Homo Sapiens
  misc_feature (630)..(630): n is a, c, g, or t
ttttttttttttttgtttgcagcacaatttattatctggccatagtatttgggtacattatcaggtaccgatttaacaccatgtaacctctcttgacacagagcaacccaaaaagaaaactttaaaatgtgcgacagcaataaatatcaagctttgtcatctaaaatgtataaatataaaatatcagtcatttctggaaacatcttaagaaaatccggcaaccacatgtccatgagtaggtgtctgatgttgacggtgcttacattcagaacatatcacctcagatccaacacaattatttttatgtcttttaccaacacatgtttgcatatactgaacagcctgggctccttggtgtgtggatgaaagcccttttttttacaagcagaaacctcaagcatgccagcattggtgagcctgaagatgccagtgtctttatgctttggtgagcaaacaatggcaatggcctctggcaacatgagttgataggaacagtgagtgtgaagatcaacgctggataaaaatgcagtttgagtgggatgtgtatggatccatcctagagtgaggagatcatgttgatcctgaacattgaatattcctctacattctccatgtcacaatagtctggtnccgcagactgctttggcacattacatgggtaatagtaattcattatgtgtcagttttcc

SEQ ID NO: 212284 - DNA, 654 bp, Homo Sapiens
ttttttttttttttttttaaagattgaaaccaagtttactgtttcttgaacagaataggaagaaaatattttaaatggctgagctggtcattagactattactcatttatcttaaaggcagaaacttgtcaacccaactacgtgaaacagagaagcatgatttgcttaagcaggcgacattagagttaggcctctccactgaagcttcccgaccgtcagcacgtggcagacaggacgcgcccatcattccgcaagggagaaccggagaggcccgggagagtccttggctgtcctctcatcgaatgatgggtgctgagcgatcattcgtcacagtcggacggagtttcacagtggcaaaggggttttctccgctgagaaaaggcggctttgcagtcccgttgcaaccgaaactgatcgctgtaaactgggatcttcggaagtacctgaaggagcggggggcatctttggtgagcatttagaaagggtgtcgtaatctttcctaaccacattgcttctctcgatcatgggtgaagcctgaggagttccagacacgggggtagaggctggggtctttatttcttcgatcatattcatgattttctctggcactttgatggcatcaacacaggtctcctgccaccgaggcagcttgga

SEQ ID NO: 212285 - DNA, 742 bp, Homo Sapiens
  misc_feature (721)..(721): n is a, c, g, or t
ttttttttttttttttttgaacaggaagaattatttattcagatttaatttcttttgcattctcaaagaagcaaaaacatacacatatttttaattttacataatagactgaggtataaggcaagaattaactatcttttgagttccttgtatcatgtattttactgctaattcgttcacaatataggcaaatacatattccactgctgttattatgtgacaactcacaaaatggaatggatttcccaatctgaataaaaaacaggactcttacccctaaactatataaacagcactatgtgtgactactgtcattcataaacttggatgctgaagttcatccaaccatttgttaaaaggaacatttgaacaattccaacaggaaacaaagataaatctcaaagtcatccaacagaacagaaactcactgctaagaatgctgactgctctcttcaaagaggcaggaatgggcctcatatcacacgaggcagtggaagctaatggatggggccctggaaggtgcactggcccagaccccctcccactggccctggctgcaacatgtgctgagactcactcttctccctctctcaaagcccgttcatgcaggggtgggtaggaaatgtgaggttctccaccgatctttagtgtatggtgcaggactttcacatagctggtttcaatgagggcccttggacccacaggaactcgtagcatgcangatcactgccgggcactgccg

SEQ ID NO: 212286 - DNA, 626 bp, Homo Sapiens
tttttttttttttttgttagagaattttgttttattgttttggtggcatgggcataattggagaaaccattggggtattcactagtaacctacattgttagtttccttggttccagcaggtaatacactgggttccgtcaccctggagatggctacggggaggctgagtgacttcccaaagtaataaagagtttggaatcagaattccaggtctgactcccagcagactgttctatttccttacacacctgcactttcatcaatcttctccagctccaatttcttgtgccccttcaacagcatctgcaggcaggatgatctttccgataaaaaccagttgcagaagttcctgttgcttccctttggtttttcctcagggtagggagaacagagcagctgcattcacatggccccatttccctctgcttccccttcccacttgattattcaggcaagtgggattgtaacatcatggccatcgccatagtaacggagcttgaaagatgctacactgccctggaacagacgtcttgctgggtaccaggagagagccagggatgccaagccaagggggaaggggaaagtcctggtttggtggcacacaggggcgaatgtcctgaatctac

SEQ ID NO: 212287 - DNA, 689 bp, Homo Sapiens
ttttttttttttttttttaacctgtaacaaacattgtatttaatgcatgagaacagatattagcaaattttcccgtaaaagctcagatggtgaatattctaggtttttcgggcaataccgcctctgtctggactatttaacagcattgctgtggcgtgacagtagccatcagacaatatgtagaaaaatgtgtgtaactgtgttccaataaaactttatttacaagaagagaccattggctggatttggccccccggccaccagtttggaaacccctgcattagaatcattcgcattagtcagaaacaagagaaagacgcttgagtcctggccaacatgataatatacacaaagtataaatattagaaaggcagagacacaactataattatttgcataattatatgactgtttacctaaaaagttcaaaataatgaacggacaaactattacaagtgaccaagtgtaacatcaatatacatcaatcaacagtgtttactaaaacagcaatacagaattacaacattttatgggaaagtgtcccattcatataacaaaaactttggtggatttcataaaaatccacaaaatactcaagaacaaaccaagaaatgagcacatcggacatcaaagaaatcttaaaaatttttgccaaagctctaaattcggttgagagctggaatccattt

SEQ ID NO: 212288 - DNA, 616 bp, Homo Sapiens
tttttttttttttttttaagcatataaaaattacactcaaggtactttacaaattaatgtgttgaaaatctgatgtgaaataaaagttcttcaagagttgacagttacgttaccaaaaaaaaccaaacaccaaaacaaaaacacaaatcttcagtcttttaccctccctaagaaagtgaacagatgaaaaaataatttcttaagtcatgtaatcacacatcatcagctggcagggatgggatgcttatctttgctctggtgaagtaggcaatcttctccctgaaggactgcacctgccgaggcaccttctggctctgctcccggagccgacacacgtccttggagacttgcctcatcaacttctctgcattcagaccttgcttctgctcttctttggactgttcagcctgcttctcagcttgcttcagaagcctctggaacctctcatcctccagcacgcctggtggaaggtcagtctctccctgagctttcagttcctccagcttctgccgcaagtccctcagcgcctgcagctcatcattgaggcggctctgccgggtcagagatgcctgaaggtccagttctaagtctagagatgtccgcactgggcattcct

SEQ ID NO: 212289 - DNA, 633 bp, Homo Sapiens
ttttttttttttttttttaaagacaaatatttctttctttaatagttaacctttgttgaaaaccaccaataaatatcacttacattagggaggcaccatggtaaaattaatgtctacttcttatatttaaaaatgcagggataatatttctgttgcacctttgtatcaatagtcaactgtagtgactgtctttctggccacagcagaagaaaaactgagggagataaagtcaaaaaggaaaagcaagaggcatgagcttggtgcaagacatgtgaaactaccttgaaaacatttcctattctcttgtttacaaaaaaacaggcaggtcacatcacaccattaatgcttcctttccttattttacatactgtagtcactccttattttaaccttgaggctgattaaaaaaagattttaggagaagggtaaagaactaaacttcaacatgcctttaaaaacaaaacaaataaacctgacaggttcaaggtctctcacatttcctcccttgcaacatctcttggctgttagcaggacacagatacacagggaagggagccgagctggctacagcagttactaagctgccgagagaggggacgggaatccttcattgactactcgataagccaagcc

SEQ ID NO: 212290 - DNA, 629 bp, Homo Sapiens
ttttttttttttttttttaagtaagaaacaaggtatcgctctgttgctagactggagtgcagtgacgcgatctcggccacatgatccactagcctcagcctcccaaactgctgggattacaggcaccactgcgcccggcctcatttatttctttaattctaggaaacagtattttttttaatccagtgtattcgcttggtttttctagctttattactgctttgtttccaacatgctgttatatagtggtgacaaaacaaacaagatgctcaatctcatggaaattatgaggcagacagattagcaacagtgggatattttgcaggggagagggagaccatacattctaggtgaaatgtgagctaagaccaaattagcaagcagctatcatgcacgtatctgagtgaggaacacagctaaacgtcaattccaaacaataacgaattgatcaatgatgaatttaatctcagagttgctggatgcctctcttcaggtctgctcagacctcaattttccaatcttgtcccccaagaaaaagattaaacctgtcttgtgctgagtagtgtaatattccagtacggcttctcttgcgccctagtgctagtacgaagagaaatcaatgaaaaatg

SEQ ID NO: 212291 - DNA, 668 bp, Homo Sapiens
ttttttttttttgtttttaatatatgcagaatttatattactttttaatttcttttccctgagattgggttcacagtttggtagaaatactttaaagaggtagttagcaggggtgaagaggaaacaatgtttatactaacagcacctggaaaaataagtaacaactgtcattttgatctcagcatctacctctcccccttgaatctgcaaatgctatagaaggagatgatcattttcctttttattcttatctgcctggattctctctcctattaaatccaccccagtatcactaatcataaaaatgagttgcctttccaaagatatgctataaagcaaaccttcaatatcaggttgtttagatttagaagagaaaggctcaagtaagttcacttttattcatacagtcattagagaaaatgagcaaaatttccagtaaccccaaccactgccttttctccctggacctagtaaattcctatcaactctttagttgactctaagaactgggctctatgagatcctgacagctaaaacacaggtacagaggagcctgcataaacgttttggtccaggtcttggcctccagtcttatgatgggctggtagaatattgcttcatcagatgcttgtgacagggattgcaaactcgctcaagcttgatacttg

SEQ ID NO: 212292 - DNA, 726 bp, Homo Sapiens
tttttttttttttgttttctgtggttttttttatttttaatttttttaaatttttattattattttttaaaataaattcagtgttcacatttctataaagaattaacccagtttcaggaaaccctgccccagcagggcaggtaagcaacactctccctgcccacatctagtttgatttcacgccctgatgcttcaaggtgcccagaaaagcggcagcttgtggaagaggaaatctatgcccggcccgtgcttggggcccagggctcagtaagctttcgagaaagcagaggggaagactagcttactgcaaaaacctttttaaaaaatattcatacacttcagtgagcgcctgttgagacgttaggggaacaagagcttggaaacatcccgtccaggccattgggaggcagcgtcttcctcacaccccgtccctggatgtcgggggtgcagggggaaggtcccggctcttccactggagaaaggagactcacctggcttcctagttcatgtttgactatttcctctaaaacctgtgctgagtctttgactgcatgcacgggaagcacaaacgttcggcttgtatgcaaaaaaagtacaaaaacaactagaatataaaagtttttggtaatataaggccatctgttcaagtccaccttggaaacctgtaacagatatttaaatactacagtgaaaaggcatcttaatatacttttttaaaacatctga

SEQ ID NO: 212293 - DNA, 620 bp, Homo Sapiens
  misc_feature (581)..(581): n is a, c, g, or t
tttttttttttttttcttggtttggagactacacttttattaatgcagcctaaaattaagtttataagcagcaacattaaactattagctgtttgaatacatagctaaaatgtactccctcctcccctaacataaacatgtagccaactcttctcccctcagcctgtacttttccagttgatttttgtttagcctaattgtaggtttcacatttctgcttttttcttttactcatatgaaaacctctggccctttcatcgtggggcatgaaccggccaagacacctgataatagaaaaaaaaaatcatagacaaacatgtagcaaccatcagaccatggtgaatgtaaagaatagaccctcatgaggctgggcgccgtggctcacacctgtaatcccagcactttgggaggccgaggtgggtgaatcacctgaggtcaggagttcgagaccagcctggccaacatggtgaaaccccacctctactaaaaatacaaaaaatagccaggcatcgtggcatgcacctgtaatcccagctacttggacggctgaggcaggagaattgtttgaacctgggaggcanaggttgcagtgaaccaagactgcaccattgcactccagc

SEQ ID NO: 212294 - DNA, 744 bp, Homo Sapiens
  misc_feature (683)..(683): n is a, c, g, or t
  misc_feature (724)..(724): n is a, c, g, or t
ttttttttttttttatttgaaaggtattttatttttgatggttataccctcattcaacaaagaaaggatgaaaacatcaacacataggcaggcagctgttgacactcagcacacacaaagactgtcctacaacttgtagtcactctgtaaaaagtatcatagtcaggtacttgttcctaaaattcagtatgattctttccacacactacttttcacagctttgtgcttgactgactctagttactttggttcattcacatagatcttacatgactcaagtctgcaccttgtacagtttctgttgccctcctgcactgcaatctcttgacagttcacgcaactaataactcctctgccaccaaacatcagcttattctgttgaatagtaaaaaattctaaaagatggcaatgtgtcattaaatgcataagttaaaaacagaagaaccctagttttgtgatagccaaaatacacagggaaaacaaaaacaaaagagtctttaaaagggattttgtatcactgaagtgcattttaaactatatgaagtacattatacagacaggcatagcaaatacatatttggggctcagtagtaaagattttatttagtttcatgtaaattcaattagctaagttctttaatacctacaaatcacacataattacattttcatgtaccttacanaaccataataaagtatgacaaattaaaaataacattatgantaactctgcctgtgctgtta

SEQ ID NO: 212295 - DNA, 713 bp, Homo Sapiens
ttttttttttttttttttaatttggaatcctaactctattaatagtgttgatacatttcttctaaatttgctgccttgcctcagtagatctttactctgggatccaggtgactgtctgggtaatttaggtgatgactcttccaacaaacaatctgtaatccccacattattagaattgggtaatacatgttttttggctttttggaactctcctgaattgtagataatacccctacattccaaacactcccaattttgctcccatgaccgtaatgaggagcaggctaaatgtgtgccactggaaccacaacactgacagcgctttatttcccatttgctatcaggtgcattatagtctcgcccttctttgcaacgacatcttcgaacatcacaacgctcatagtgctgcagaagctcttgataagcgttttcctctaattcccaggaagcatctttttcaggaatatgaattcccattctcaacatctctttctgaaagatgtcactattattgcatattgtacacctaaagaaaaacactcccgcatttattgcttgaacctgtaaacagtctctatgaaaccaagcgttcttacaacaaggacttcgtaatatgttataacttggaataggctcaataaattccaagcaaatggtgcatggtaaggactctctataattattagatgtaattatttgaacaggtcgatggt

SEQ ID NO: 212296 - DNA, 626 bp, Homo Sapiens
ttttttttttttttttttgttttagatatgttgcttttattcaaaagaataaaatgcttgacaaactctttaatcacaaggtttgaaccaaaccaccagtcttctacaacaactctgtgaggtaggtatctgcatagccacaagggatccacatagtcctttcttcccttgtacctctcaaacactgagaattgtagtagttgaaaccactgttctagtgggcagttagaacagttgttttccccgtcttgttccccacagagctgcccaagttattatctgctcctggggttggaccatctgttttatgacagttatgatattgttgtttaaaaaaaatccaaattgttactttgatttatatgatctaactctgaatcacggaagtattactatgatgttcaaaactctgattgactctacttgctttaaaaactctcagatcccttctgcatttatcatcagagatcggtaaagatgacaacaagcaggtctaaagttctgagatgttagcacatacccttttcacaatttaggaagctttaagatcatttagtatttttttatgttacaaatttggtacaataacctctttcaggaaagtcttagtagtactccaaatatta

SEQ ID NO: 212297 - DNA, 769 bp, Homo Sapiens
  misc_feature (721)..(721): n is a, c, g, or t
ttttttttttttttttttacgaacatattgctttatttcttggtagtaaattaaggctttctagattcatacagcacgcagtgatttgaacattagaattaaaaaacaacaacaacaaacaatgagcattcaatttagcagagccaggaaggaagcaatgttttaaaacagataaatttcctagtgagacctttggtttggtctccaaaaatctgctgagctgtttccccagtaacctccatcatagattcccaccccaagggagaacagaatggatgaacaggagactgggagaaaagaagaaactggcaagacggtatgtgctgggcaatcagtgtgaacagtcagctttgtctcatgtttggaagacagtttaggtgatgcggtcagggattcattctctggatctccctgctcattctcagagtattaaaccagctcactcggaagaccccagggccaaggattagggacaatcctttgtgacacccaaatcctgaaacttcaaatagggtcacaagtcacagagctgaggaatgctgccttcaacttctttcatggttttaaactctgtggctttcactagatcctggcctagctaaatgattcatttcccccatggcacagagccttgattacacatgtaatttgatgatgttgattggatgggaggcatgatgtttgaaagaaactcctgggcagaaccacctcatcacactanactctccatcccccacaggagacgacagtatgcacaggagcctacagt

SEQ ID NO: 212298 - DNA, 746 bp, Homo Sapiens
  misc_feature (696)..(696): n is a, c, g, or t
ttttttttttttttttttaatatataatagacaagtttatttgttcacctaaagtagttttaacagcataattctataaaaatgaacactaatggaagatttatctaagccatacaaaagtagtttaatggaaaagacccagtaatttaaacgttttcatataaggaacatgatgcacactatgggatctatgcatcaccttcaaaatgtaggaaggtgtattaatttcacatatttaatgtattatataaatgtatttaacaacctatcaacttctgacattctgaagaattaaaatttaagtctaatgatgataaaatgcttcatctatgtcttctcaaggtcaggacaactgcctaggccagggagactgagctcccctgactcatgggcaggcctcgaccccgctacactggcctcatgcattactctaaatcaaagccttcgatatacatgacttaggatcaggaataacagagaagatctcagcaggctccatgttctctctactgtacctgacaacagtataagcaacaactcaagtgaataaccggaccaaaattatgataacagaaaaactcattaaaagctctttaaagcaaaaatctcaacttaagtgaaaaatgtttaatattcttctttggaactgtaaatgacctttcatttaattttctaagattttaacctgaacttggncaagaaagaaaggaaaaaggaaaaataatttgtataaaatttgccttttc

SEQ ID NO: 212299 - DNA, 791 bp, Homo Sapiens
  misc_feature (664)..(664): n is a, c, g, or t
ttttttttttttttttttaccatttaaaaaaacaatttatataaatagattcgtatacaaagaagaaacacatatacagagtaccccaattaccagtatggtggaccctaccccttcttttctgcattgggaaacagaacagagaacagaaaaaatcattccatcttgctcttaactctttccacctatgtgctcagtttttcaagtagaatttctattcctttgctggtgcttttggttttttccagtgtaggaatcaagcttttcagtgcagctttgactttgtttgcaacttccaggtcacaactctggaggaggctagaaagaataatggcacctcgatttacactagcccaggacttcaggttcttcataccaacatgctctacaagtgtttttgcaaaacaaccttctctcccattttctttcatctttttatcttgctctattaaccacttcagaactagatgtcctgcaggatgttctgcaatgtgaagctctccgtccttgccaccaggatgcagtcctgttgctgccaagctggcgatggcattcatggtaggctgaacgtctccagtggcagatcccagaatgtcagacaccaacacacacgcagacttatctagcaccacttcttgggcgtgttcttgcaggtagcttaaanagctggagaaatggattctaggagctcccgtctgcggacctctgtatctttcttactgtgtgcatttccatctcctttttgcagaacttcatgatttctcgtactgtatgtgcaggatctctggggc

SEQ ID NO: 212300 - DNA, 708 bp, Homo Sapiens
  misc_feature (637)..(637): n is a, c, g, or t
tttgtttttgttttttttggtctaaatagaaaaaaggaaaaggagaaagtaaattcttagggccagacctcgaaatgccccaagtgtccaattggcagctatagcatttgtgaggaggttcctttgccctcagacgagtagtttcaacatttcagtgaaaacaaaggttgcagaaagctgaaaacccagatcttgaaggttgctgtcatatatgtgtttgtgtttcttatattatttccttttgacttcagttttgcatcccaaatatgtatggggtggcattttaacagtcaatgagtcaaacagtcaaaggaggacaggaggggagccagctggtaggagggagcagcaaccgtgtgtggaccaagcgccatttttgttttatagacgtgtcttgaagggatggtcccagaatatacaaaatatacaatctgtcctaataaccaccccgcttgcttgcataggccatttgatggtcctaaaggcagtctttggagttgaggccagtgccagctagctaggaatgcgggtagatagagaccactactggatgtgtgagtgtggcatgacaagtaaggactgtagactcctttggagtcagcttgcagagtaaatgtgaggcctctgttaatcctgngggttctaggtcacaagtcatggtgggcctagccaaaaaaaaaggaaagaaagaacgtgtctctcctttta

SEQ ID NO: 212301 - DNA, 750 bp, Homo Sapiens
  misc_feature (658)..(658): n is a, c, g, or t
  misc_feature (665)..(665): n is a, c, g, or t
  misc_feature (707)..(707): n is a, c, g, or t
  misc_feature (731)..(731): n is a, c, g, or t
ttttttttttttttttttaacggactagatttctattaatttatttaaggcaattaacatattagttctcaggccaaaggatttgtaaaacattacaccaaaaggagaaaaacaagcggtcatgaaacagccacgcaagcgcagctcagcccttgttgcctgggcgtacaactcttccccaggaagcctgggaagaggcaggtcctgggagcaagatcgtccatcatggagtcaccaggccacctggagccatgccgggggtggcatggacacgacagtgaggtctgcactggctacagcagatctgaggcacggagggagctgcacagccatgggcagggctgagcacagcacccttgaaataagttaaataacaaagccctaaaatcactagtaacagcataactgccacctcccccagaggccggcagccgccaaaatgtagtgcttggagttaaaggggtgaccccactcttaactacccacaaggaggactacaaagagttgtcagttattgctttaaggaacaaaggtctctaggtaggatttatcttctgctaaggcattaaggtaaactgagtcccagtgaactttcaagtctttttaagggctctaagcaggactgtcagctctgaggctccccctccatgctcttcanagcctgngtgggtgtcagggtgtctggcaaagtgggagtggaggctggncaactggctgggcacccacccganggaggggcagtgttctccc

SEQ ID NO: 212302 - DNA, 786 bp, Homo Sapiens
  misc_feature (675)..(675): n is a, c, g, or t
  misc_feature (694)..(694): n is a, c, g, or t
ttttttttttttttttttcattaaatattttgatttttattatctctctacaaagaaactacaaaaatacccataaaagcatcgaaaatgtactttaaaattctgaactgttatgatacatcttctatgatttacaagagtaaaatgttaaattctccaagttagaatttctgaattgattttgacaggaatttactagaagtaaccagaacatcaaagcttacaggttttctattcatccccaattaagtttctgaaaagctacacatccgttgacaagcacagtccactcagttacatgatgctgccactaatggtgaggctactctgaagggcagaggtctatatgatggaaatgcccagccttccaggcaactgctcaaagtggtcttattttttcccttatgtgtaaaataaaagtacaaatgtacatatggtaaaaaatgtaaatattacagaaagagctaaaataataagtacataaccttttctcccataccacagcaaatctgatgttttcaaaatcctcaaatagtcacatgagtaactcacaaactaaagtcaaccttggagtctctttatctgaaaattattttcaggcctttggaacggtgttgattgtctcatatattacctctgttacagaggaaagtcatgcagtcttctccttctcanaaaaaagaaaaatatttanagcaacacacacatactgttcagagacagcaaagtccagacagcatcgcagaatccattggatctagtcatggctctggagagtcccggtat

SEQ ID NO: 212303 - DNA, 661 bp, Homo Sapiens
ttttttttttttttttctggaaggaaaactgagttttttaagagcagtgtttcatcccgagctaaggtcaggattaatgcctatttttcatttggtttgcatcaaaagagctcgttttccttcccagcagctccagtggaattactttttggaattagaactgagaccaaacaaagtgatgatgtcagtcattgcttctttcaggtgccttccaaagcgatgagaatccgtctcagggcaagagaacttggaagaaatgtggaaattgatgaggttctctcccacaaggatgtacgacacaccatagccgtcatcagcaaccggtccaaagccccctccgctggacacgtactctgggttattctccaagtcaaacagctccacttgctgctgaggggtctggcttgttgataatctccaaggctcagataaaacttccttaaggaaaggggactccacagcgagatatttagacaccacgtaaaggcagaagaggtgacgatcgatcccagagccggtcatggcgaggcgatacatatgctgatgcttctcagacgccaacttgaacaacttcagcctctgttccaccgtctgggccgggtccaccatggcccgcacgaagtcgcatgactcagtggtgcaggagcgcacggtctccgtc

SEQ ID NO: 212304 - DNA, 665 bp, Homo Sapiens
ttttttttttttttttttattcatgaaggtgtgtattttttaaaccatcatttactttttctttacttttttttgcaaagatagttgtgctgccaagcaacttgaggtaaaggcattaaaagggttagactacaagaaatgaaaacaaaacaattgcgatacttcctataggagaccgcacaaaaagcagttggctggtttcatattgcataatgatgctgtgttccttgatgaagtaaacaatcttccttgtattaacataaggatcagaccttggcccccacacagtgttggtttctgtatggctggaggtgtccttactcaattgacttcactggaaacatacgttgtatgtcaattcatctttcagtacttcctctcagagaatatacttggactatttaagcgaagtacattgtgcgtaaggtatcttggtgaatctgtacagccttggcaagagcttgtggatctcgcccattgctttgtcctgaaacgtgacttccttcagcactgtcatgttctttgtccacaagatgatatctggctctaaatgctaccaggtgagcataatacgctggtgcaggtatagaaacagatcgtgtacagcgtacgtaagtgtggcagagctggtaagttagcagctgaagttcatctgcagtaaagca

SEQ ID NO: 212305 - DNA, 772 bp, Homo Sapiens
  misc_feature (764)..(764): n is a, c, g, or t
ttttttttttttttttttatgctatatgaaagcagccttctcttttaatataaaatcatatcaaccaaataaaacctgccaaagctacatcatttaaaatatgtacagtttcacacacaatattacaactttaaggaaaataaaacatacttttcaatatgatacaaagcatgcatctcaaagtcattactttaaaagagagcaacacaggtaaaattcaatgataaacttcacttcttggcagtactatagctggaatgagatctgtggcatgatcagcccaagatggatgcattgagtcttcatagactcattcgacaaaaacacccagaaagaaaggcttttgctaagaacacttcaaaaggtttagaacattgcaatgtaacttgcaccctggcagcacctgtcaccagactgtcagtgcaaaactgaaagaaaaacattaaaaggagatcgtgaaatgatacagtgggagcggggcagtttatgctaaaacaatcacacagaattctagatgagaaggaacatgaataggcttgaccaatttcgtgatcactgagcacagtaaagatcaaatttccaggtggaggtggtagacagggggcgtcaaggggagaaatgtggacctctggaagacgaagtcataagcagagctctgcccgcggaggccagagagcagcttctctggctgcggagttggagcctcggagggattccacggcagggatagatcacagcatacggaacgggactggtccatccanagagtgac

SEQ ID NO: 212306 - DNA, 762 bp, Homo Sapiens
ttttttttttttttttttctaataacaaaagtttttattttcacaaatattttaaaatgcagctacctttgagccacaaaaggaaaaagcagtattccttttatgtatttgatacaaatattaaacataactcagttttagttcattagctcagctcagtgaaaatagctcaggaaaaaaaaagtcataggtaatgctattggtatatgcaggaaaccagaagcgacgacattgagttcaaaatccatttagaattgtagacaggccacaaggggcaggtgaagagagcagccacagagtcactaatacattggacttcaaacagaaaaactgaaatgtcagttggtacacacctaaaacaaactccaactagaaagataattatgtagctcagacattgataacaggttaagaaatttgtacgtgcatactgttttttttttttgagatggaatctcgctctgtcaccaggctggagtgcagtgacgcgatctcagttcactgcaacctctgcttcccaggctcaagagattcagtctcccgagcagctgggactacaggcatgggccaccacaccccgctcatttttgtatttttagtagagatgaggtttcaccatgttggccaggatggtcttgatctcctgacctcgtgatccacctgcctcccaaagtgctgggattacaggcatgagccaccatgcctggccatgtatacacatcttaatacaatattttcagagataccattgcgtgatagcta

SEQ ID NO: 212307 - DNA, 733 bp, Homo Sapiens
  misc_feature (712)..(712): n is a, c, g, or t
ttttttttttttttttttgctcttctgcaattcggtgttttattctttccaaatctcaggcttatgcacaagatggaagagcactgttaaaattaaaaaatggacctaaagtggcttggctgacgtggctagcgggccactgagccgcgggtcccgggtcccaccctgctgtggggggagtccctgggccctggggcctcttggcactgtgtgacctgtgtgcaccccaggtgaccaggcgccgggacccctgcagggcagagcaacagggcaggggttggccctgcgggggagtgtctccagctgccgcgcacccgcaacagcccgttgtcccctcccgggccagctggtcttgcagccgtcctggcagagctgggggcagagcccgcagtcttgttcccagaggtctggagttgccgcaggtggtgttgcggtgcctctgtgcctgatgacccaagccggggctacctggctccggcaccacactcagagaatctgctcggtgctggaggccgagatgtccaagagccgccaggccgcgtaggggttgagctcgtcctggtctcggcagagcgccacacgtacagcatccgcagcaccttgtccgggtcaccctccaccacctcgcctttggggttcctgaccaccatcaccaactgtgcctggaaggtgatgatcagcaccggccctgctccatcatcttgcccatggncaggtcgacgttgtcaatgtc

SEQ ID NO: 212308 - DNA, 722 bp, Homo Sapiens
  misc_feature (714)..(714): n is a, c, g, or t
ttttttttttttttttctacagaccatatgcaagtttatttaaataagttaacactgcagagtgagtcaatttataagtataaaaatagatggtttagaaaccaaaaataagcaccacacaaaagcagattatacatacaccatcaggcctttggaatattaaggcaacataaatatctcaagcaattttagaagaatgctttacttatataacagatgttattaaaacatctcaaaagaggcagggctcacaatttttttcagtatgaggtcttcccttccatttttgttaatatattaatgattcttcttaaatactgtaccataattagtctagattaacaaatgggctatcaaagccactatcttgttggctagatagcggaacaattaattttcttgaaggctgctgacacactgaagatggtaatgtactgctcagttttttgaaatctgactttaatctatcagccttatgacgagatgggtgtccacaattcacactgatctttcctggctccaaatacgtggtttcttctgacaggtatggagtttgataacgctgacatttcattgtttgacaaatcatattactttcctctgtatctgaaagataaccggatggtgaaaactgtttggatttaacagattcacttggtatttccaaagttccttgtggcctaccatgtacaaatgatgcttcacgactgtcanaggataag

SEQ ID NO: 212309 - DNA, 821 bp, Homo Sapiens; identical to SEQ ID NO: 47548
  misc_feature (709)..(709): n is a, c, g, or t
  misc_feature (715)..(715): n is a, c, g, or t
  misc_feature (780)..(780): n is a, c, g, or t
  misc_feature (785)..(785): n is a, c, g, or t

SEQ ID NO: 212310 - DNA, 529 bp, Homo Sapiens
ttttttttttttttttttaaaaaactagaccttttaatcaggaatgtggaattgaaaatgctccccaagtcccctttccacagtgtttgggcagccctaacggaggcgccgggacgctggtgagccagggcctggtgagtaaacggccctgcctgccccagacagggagcatctggtggtggccacgcctcctgcagcagaggggtggggggagggccaggggacaccacggggacttcctgggctttctctgggaggccggtgctctggccacatctgagggtcttcctgacaaggggacacagctgtgacacggtgagtatcctgggctgatggcaaacccagccgggatggctgagccacactcacccccggctttcagagcggggtcagcagatgggcatcaggcgaaaatgttctgttcctggtacttgcgccggcgggcacagcgggggcagcccttcttcaccacagcctggcagctctggtggaagacggtcttgcactcggcacacctgactgtggtgtc

SEQ ID NO: 212311 - DNA, 467 bp, Homo Sapiens
ttttttttttttttttttctgacggcagcagaggccacccggcagccacactgagtggctccctgggaagggccttaaccctgcatgtttatttcggtaagaactggcaggggaggaagataaaagtgtatgttgccatctttcacagcaggaagccaacagatctatacgaagcttgccaccttcttgctggagagccgctttgtcggactattcatttcaagatcactcaggcgggcagaaagatcctcaaggcggttgatttgtttgtggcactggctacagtaaaactcaaacgcctcatcagtgaggatgctgtgcagctttgcggcaagagggtcagtgctgggcgtgaggaaagcggggtcactgcagcccagctgcccgttgcatagggtctctggggacagctccgcctcactgccttcaccgtagtcctcaaagtgctcctcgcccccgatcaccgt

SEQ ID NO: 212312 - DNA, 735 bp, Homo Sapiens
  misc_feature (710)..(710): n is a, c, g, or t
ttttttttttttttttttaatctttaatgaatatttaattaggaccttttcagacagtgtaatagttgggggaaaaaagatgcctttttccaacacaccactgagttgaagaggatggaaaaagtcaacagatgagtttcctgtctttcccgccagttcccttaaaccatttctgcttttcatttcttctccttttcttacatctctgcatctgtggactctcctatcgtctccaggagcaaggcagagacacattcttgtctgtgagcagatgacttgtctagaaatcatggacagcctgcaagtccttccagtcctcccaagaatctgacatggttttaggcagagaagaggctcagaggcctgctgactcaacatctcttacaagcgcctttgagtttctccaggaagcgctgaggttttctcagaagtcaaaaaactttttctgtattgtttgaaaagctggtccgactccctgaagccgttgttgagcagcatgttgatgccggccagggccagctccgcgtcctgcaggggcgccgccgccgccgctgccgcgtccgagtctccgtcgtcccgccgccgcggccgctgctgctccgagccggccatgggcgtgcgaggccctgcgctgggccgaggcgagatcgggagcagctgctgcggccccgcgcgcgcccggagcccggctctacctgcccggagtcaancggagccgggaggggaggggagggg

SEQ ID NO: 212313 - DNA, 691 bp, Homo Sapiens
ttttttttttttttttttaaagaaaaaggatttattatgtagcattctaattatttcatatcagtaggtaccttatattcttcataatcattggtatctagcaagtcccttttctccagttctgtaagttgttctcttgaggggttagcaggtagtgtcttaacagaggcttgttcatatatgggttttgcattaaaaaatagttccttccaatcatgcatcaacttatacggaatcagattatttgtcaacattcgatagtctgccactttagtggacaaatcaactatttgatccaaaatttctgcacatactgaataatgcttttcataacgagcttgagctctttccacagcaatctgatcatgaaatctcttttctttaaggaattgttcttcaaagtcaatcttggcttgttttgccaaagccgcttctcgatcaagagcatcctggaaatctttaagtcgtctttcctcatgttgtttttctctgaaaattctgttttgccataaaacttccttttcatgccgaacatgcatgagctgcacggaaatcctgcgctcctgctgggactgccgcatcagccggttaatcagctgttcctcccgataagcctcctcttgtgcttcgtgggctattaactggtccattaacaatttccgccgtcttttctccctttgctctcgtgcaa

SEQ ID NO: 212314 - DNA, 709 bp, Homo Sapiens
ttttttttttttttttttgtctattcatgaaaatagctgctttttatttgcctttgtctcactttgaatatatatgatccacaggttacagacttttccaataactacatttcaacttgtacttcatcagcaaacatttgagaggatgttatttcataggttaactattttgaattcattgttgatcaagttagtagtagtgggcaattttcttatagaaagcaattccaaacataatgagaagatgcttgccagctctaatcaataagctgtatgccttgtccttctccctgtatctgaggatcatatactactttattgtccatgtcctcatgcaacagacacaagggattactggaaagaaaaagattacaggatcagatttgtccttcccccactccaaaaggccaaaacatttcaacagctatgttttcaagtaagatttatatcctacaatatcctttgaggttttcttactagaatgaaacacattttaggagagttaatgatttcgttggagcggggagaaacaggcaagtcacaggattttcaaaaagtataacaattcaggtaagaatatacattaattaatgttgccctaagttttatcagttaaaatttttttttaatttcaagggaagaggctttaacatgagaaatacaatatatcccagtccattatctacatattcttcattttggccatgag

SEQ ID NO: 212315 - DNA, 630 bp, Homo Sapiens
ttttttttttttttttttaacttcaaacaggactttaattccaaaccaaccacagaaccggcgcctgggagcaagtgggactgaggcccaggtgctaacacggggctggcagtgtcgagagaacgctctggaagctcctaacagacggctccgcgtgcggatgcacaggccctgacgggcactctgagctgggcagtctgacaccaagcagtaaggcctcccgggcagcgcagcctcagtccacgagcacagcgggtggccctctggggggaggcagcacggggcgcagccctcggcaggcgagcgggcgggatggatgaaacgcagcggcaccaggagccccaggctctcacaggtgccacccccgaccccaggattttcaaagggacaggatttcaaagtcttcatcttctgagtcgaagaatctttccagtcgctctacatcagaagaatctagggacaggttcaggacgtcggggcaggccagatgtgaaggctgctgctccaccagctcaaacatgggcagggcacctccaagcagagacagctttttgacttgctggcaccaatcattgaagtcatcttcagtcttacagaaaaaccccacagcgatggacgggtcaagctcct

SEQ ID NO: 212316 - DNA, 503 bp, Homo Sapiens
ttttttttttttttttttatgaaaaaattacttttttaatgtacaaaaagacttatttacaagttgagcatgtcatctcaattcatagcatgtagaaaaagctaaaaatgttttggagatataaatttggctggacgactcacctacagtatattcagggatgtcttctgtacagaatatatacaggttgggactggcaagggaaatcctatctcaggaaggcgatgaacaccaccacagagccacagacccttagcaatgttccctggctttcatttgcagttggccttgtctctggacagagtttgatgtgctgggacgcagcgagcccagatgacgatgttggccttgtcctcaaactctcctaagaagttcctcattaaggccaaggtcacagtcagagtcacactctgagtggtgctgtttggcaaggttgccacacattccccatgaaaaggtttggggtgtgtgtgtgtgtgtgtgtgtgtgtgtgtgtgtgtgtg

SEQ ID NO: 212317 - DNA, 699 bp, Homo Sapiens
ttttttttttttttttttaaaccagagaggggtgcatttattttctcacattaaaaaaaaagctgaatttaagtagtctggggctggtatgtcagcaaaggcccagggtccttcccgcgttctgcgtcagcaaaggcccagggtccttcctgtgttctgctccactgtccttagggtgtgaccctttcctcacgctctcaggacagctgtcccagcaccagccatcacatccatgttccaggcaggaagaaggcaaaggggaagggtcctgcatgtggcagctgagtccccttcacaggagcttccctgcaagtctctcccagcaccacccacctccacgccacagctgcacaccccgggctgcaagggagcccaggacatggctctcgtctgcccgctattggaactgggcagaggcaccggggttctgttagtacggaggaaagagaatggacgctgggttagcaacttgcagagtccccaccacagccaggactcgggcaggagtgatccccactaaaaggcaaagatttcatgccaggctgcaatggggaagtgcttgggctggggtccaccttctcctaacaacatgaggctcttgttaaagatttaaccttgtgagagtggtctgtggcccacatgcacccagatcagctgcctggtgtgcctcggcccattccagggcttccaattcaccct

SEQ ID NO: 212318 - DNA, 833 bp, Homo Sapiens
  misc_feature (716)..(716): n is a, c, g, or t
  misc_feature (786)..(786): n is a, c, g, or t
ttttttttttttttttttaaaggcttatattacatttaatagtgttaattttgaagacaatagtgttaatttcaaacttccataaagggtaaccctacagttgaggtgtttgatgcagaaaccagtacaaatttcgattgttaggaaaccaaatgttctgaacattattttcattagaaaagggaaggtaattttatagttgtttgaggtgttgtaatacatctactgataggcccagctgtttaactaaactggctgtctgttccaaaatccatgtggggcttgggttttctgaatgtgcatgctcctgtgttctacaacattctacatatgaacaatctatcccactatggctcttgctacagtttttgttaaactcagcattattttcacagagtctttcatctttagcttcatcaatctttttctcagctggaactacatgacaaaggtccatatcctcaatggagtccaataaatctacaacatgggacggtggagtgattgatttcagatgtttgagcacatactcttcacactggccaactgcatccagaagattgtttattttattgatcaaagttgaattattattatgaaggtgacaccaggagagcaaagcactcaatgttcctcggagtcgtccatagtttaaaatgacttctgcacctttcttataaccttgattgaagccctgttgaagagtaactgctttngcagcatctattccatctctataaccttctttgactcgtctttgcatgttactctgccattcccgctgcngcaggagcgactcgtctgcttcctcgtcaaacacgtcccctttgtct

SEQ ID NO: 212319 - DNA, 694 bp, Homo Sapiens
ttttttttttttttttttaaaaaccgaataaatgttttatttctagaaaactgtgccttagccagagctcctctaggtgatcaacccatgtctggagctagctcttcctccaggacacgagagctgggggcctgagtacgtagcgccaggcccggtgtggatgctggggagaatcatcagtgtgggagccgaaagcccccgagggtggggtcctgcacagtgggccatgcctccaccagcaagatgtgcacaggtgacagggcttctccagcctagcagggccagcccaggccctcgtgccccagatggtcaggaccaggtcacagcttggctatgagcctgtttgtggcttctgtggactgtggtgaggactgggccaggaaaggctcagggtagcctgggaggaagaagcgcatggcagacagaggtgctggggagggggccacagggcacttcacaaatggaaggctgtcagagagacagggacaggccacacaagtgtttctgcacattcttcagggtggccacagactggggggtccaaggggaaggtgtagggacagaaggagggtctgagaaacgcacagcccacatgggccttgaaggatgcggctcacccagagacaggagtcctggcaggccccctccagcggtggagatgcctacgcgtgcggcaaggactggagggaagcgt

SEQ ID NO: 212320 - DNA, 774 bp, Homo Sapiens
  misc_feature (722)..(722): n is a, c, g, or t
ttttttttttttttttttaacaatcagaaatgctttaatcacctcacaaataatgaagcaggcacaaatttacaagcctgagtttcaagaaaatgaagcaaggtgatgataaagatattttattggggctctgctattagctgtttttattttattgtagatatttaaaatatttacattttcaattttagaggtctgcatttttccagttccaattcaattagctacacggagatattcatattgccttgactgttttcacaatgcttattttattaatgatctcaaaaaacatgtagtgcatctttaaaagtctcctccttagagtcttgtcaaatgtgagattagccaaagagcctcatcttgagaattgaaagtaagtttccagacctcaggtgcgacattctgactgccttgaagatacaatggggtggtgaacaactggacatttggggcttcctgaaggtgctcaggtggactatttctggaacccactgaaggtttgagtttctgtaagaagactagttctactgttgacacatttttcttttctggaacaacaacacacctgaattcacttaaagcatggcatttgatcacatcaaattgtgcacccggaggaggtatgtttcgagatcgaatgcgtggataaaaaacacagtcttccttcaccagtgcaatgtgggtgttcagaaggactagcgactggcactggtcatggncagagtcacccatgactttcactgttgtgtagagcagtaactgaacttctgc

SEQ ID NO: 212321 - DNA, 745 bp, Homo Sapiens
  misc_feature (656)..(656): n is a, c, g, or t
ttttttttttttttttttgacaggcttcttgtaatttatttgagttatttccaagcgacagttacaaaagttaatttttataatactcttgataagaaaataaaatttaaataaaaatacattctcaacaatacaacatggttacacaaattcactacattaagttttgataacttacattttcaaactgggtactgtaaaaaccaatatttactagcaacatattaatttccaaattaataaaaatggaagcagataatatcaaccaagattggtaatttaactctagaatgagtcttgtatttttcacatactgtaaaaacacctaaaaggctatgcagaattctgtctttacaggatgtaccgttagagcaaattaaaggtgctttcacttaagaaaaagatctgtttttcaaaacctggcataaatgaaatcaggcttcagaaacagaaacaaaagccatattattcgtcacctttttttgtttcataaaaaaaagcctagttttcacacttacccattacccgtgatattaaaaacaagtttctttggcaaataaaatagttcaatttgataaattatattcctgggagtaaaaatgtttgctattgcccatcatcttattaaatgaatattaaaaaacaaagctacacanaaacaaaacaacaacgaaacaagcaacagatcacaccacaatttcaactgatggaaatggctaaactaagaaccagaaccggcatttat

SEQ ID NO: 212322 - DNA, 711 bp, Homo Sapiens
ttttttttttttttttttgtcttttcaagcagtttatttccattttcagttctaatgttgactttttcataaatattcacctggaatctccactaaggctcctcatgagcagggcccaattcctagaatgtgcttggtgagttagcccctggtatacagtagaggctcggcaaatattctacagcctcctttctaatgatttcccagtggccagcgtttcccaacatgtgagatgtacagttcaaaaggccacagggaaactgacacagcagggccatttcaaaaggggaggatcttccaattcttctgattttaggaaattctgttgcgtgctaaccttgaacacatgctagcctccctttctcagatttggaaagatctaaagtaatagttatttctctaaaatgaaacatatatttcattttatatatatatatatattacagataccttctatctatggcaatttatgttggattattccacctatggcaatcacatcaagttttctttcctttttttttaagagatggggtcttgctatgttgtccaggttggtcttgaactcctgggattaagctatcctctcaccacggcctccccaagtgctgggattataggtatgcatcaccgtgcctggccaaattctctttgtaaatacatttgagtggtagtaactaattttaaaggaaaaaaacctgaagtaatcta

SEQ ID NO: 212323 - DNA, 725 bp, Homo Sapiens
ttttttttttttttttttcctccgtatttaattcggtatcacaggagcaccaataaatagtttcttcccgcccctgcaatcttcctcctgccccgggcagggccttaggggccggcgatcccgtcgggggcaaggcacctgcaacccagaacgcagcagctcaggccagctgaactgccgcgcctgcggaattcccgggagagttccaaagcggtgcgtccaagttttccggcagtgggcggggcctaggaacgcccccgcgccccgcgccggcggagcctcgaagggacttccccccaagagggcggggccactcagggggcgtggttttcgtcagcggctgtcacgatgacgtccatccaaatgcgcatggcttcggggctcggagccaccatgtagaaaaggcgttcgtaggttttgacgcagaaggtcaggcgggggttggggctcttgaaggcacagcgtaagtggtcataatagacttcctcaatggcctggaagtagatgacacctttgagcttggtctcttccttgtccgcatagtaggccaagcggcgggcttggcggtcaaagcagaaccatcgcttcctccaggtcttgatgcggccgcccatcttcaccaggggtccacggcagcagcacccagacacctgcacatgtgggcagttttccgggttgtggccccatccctccagatgctgccggagatcaagattcgcgggcct

SEQ ID NO: 212324 - DNA, 762 bp, Homo Sapiens
ttttttttttttttttttcccatttaattaaacgtttattcaatgaaaggatgtataaaaacttacaaatttgagaactcaactatacatgaaataggatgatgggatattcagtttttaacatatacatatactatagctattagctattctccccttctccttcagtccttacttctggctcctgttttgtcttgtgaggcccttcttttattggcctaacggaagattaatgaacaatttttactgctttcgggccaatggagaaaatttcaggcattaagaaagaagaaagaaaaaaaacaaccaaaaacctggagaataaacatcaaaatcaagttttttcccaaacagcaattagattttttgtcctgatttctctttgccatttatttttgatgcttcaattaatgttgccagtaaactatcagcattgactttcagtcattgaagttactacatcttctggtcacaaattcccctgtaagatgagtattcctatatccttttccctgcagtacacacactgatttaaaagttagtgtaaaacaaattatcactggcagctgctagaaaatggcatgtcatgttctattcagaaaggcaatttatagaatagtacattcaaatttgatttttacaacaaatttgtcagaaactcaaatacagcattttgttgttgctcaacttggaaagaagcagcaatgagataaggatgtgcataattcacctgtttattagcaagtaccacacatttttctc

SEQ ID NO: 212325 - DNA, 793 bp, Homo Sapiens
ttttttttttttttttttgcaagtttatgaatagtttattacatttcagtaagtgtattgtgaatcaataaagcaaaagttaaggacaatgagctcattaccaagccagttattgattctctggttccaaaatagaacagtacaggaagggtatagagaaaataggatttttcatgataaaaattttaagcatcttaggaacacagacctaaagaaactataagacacaacggaaatttcagcagctacttaggatgtttatttatttacctttttttgccaattagaattagttatttggtttttactcttaaaaaaaaaagtattttcaactcaagtcagaggagtttgccaaaactgaatattacctcttactgacttaattattctttcaatttcttgtatatcttcctctcttgcctttgaaaagtttaccttactagctatctatcttatatcactgtcgtagctcagactgccctaacaaaataccataggactgggtggtttaaacaccagaaatttatttcctcacagttctggtgattagaagttcaaactcaaggtgtcagcatggtctgtttctggagactactttctttctggcttatatgttccaggatgggatggttggaggagcccatctccagataccatcacattaataagggcttcatcatataaattttggggacgggaacatctagtccaaaacattcactaacagaaaaattgacactggctccatatcatcaagcagataatatggaaatgaacaagtcaatttgttttc

SEQ ID NO: 212326 - DNA, 678 bp, Homo Sapiens
ttttttttttttttttttctattttagatactaagatatcattagatatatggtttggaaaatattttttcccaacctgtagttttgctgattttttttcttggctgtactgacacttcttaacttttaaagtgactaaagtaactgccactgtataaaattaaagtttttcattttcattatgcggagaagacagacttatctatcccaggaatcagtataaacacagaacccactaaaacaagagagattttgccagaaaaccccatgtgactctttgggccgcaggtgcctcatctaaaatcgggagaggtaagctgtgaagctgacggcagccactaccgactactgagggccatgctttctcaccccgaggcaggtgctgctgtcctcactctttacaggtgaggaaccacggctgggaaaggccatcaccctcacatggttatatcaaggcctgtgtctgaactgctattctacaatgcctctattttccttaaaataaagacactctaaaagaaatttattcatttttacaaaggaaataaagtagaaattagattcctaccctgtggcaacaacagtgttctttgctcttatgtgatggatggacccgtcctctatgcacagtgcaatgacaccacggcactccctgttctctatcaggagatccaaggc

SEQ ID NO: 212327 - DNA, 717 bp, Homo Sapiens
ttttttttttttttttttgaatggaacgcatatctgcatagttttatttctttctcaattccaccagaaaaagggattttcagaaaaaggcacagttgtgcttcctctaaagatgtagtctgcggtttgggaagtgctggttccctgaggttatctggagcgctggttgtaaagaagaaagttcttgtcttggcagagcaggcagagtttcaggcttcggcagctgcctcccgcagctaagaatgcccaggtgcccatgagcaccaggattataaatgctgacgccaggtttattccataataagaacttatgaaggtctgggctgacaccagcaggtgggtcaggagaacgataaggaggatgccccactttttcttctcacagccatcaaaaaatacaatgccccagaatacatgcagcaagataatgaccagcgtcatgaaagctgaataaaggaagaattgaggagaatctccatgaatgcccactgtgcctggccccaaggagtcagatagggtattcacaaaggaaaatactccactcatgattccaaagcccaagccagaaacataggccagcagtcgcatagagggtgctgtctcacctgggtttatactcttcaaaccttcactggctttttttaggagtttataatatgcatatcggaacatttctttggatatagacagagacaaacgctccagagatcagcagat

SEQ ID NO: 212328 - DNA, 674 bp, Homo Sapiens
  misc_feature (628)..(628): n is a, c, g, or t
ttttttttttttttttttattaaagcaaacacagatttattactgagtgcaaaattcatacaaatttctgctgcttgagactattcccttaggtatcccaggagtttatgaatggtatcctttgctagaaggaaacttaggtagaaaaatgtgggtggcaactatcttaccctgtgccaggcactgaagatgtagagagtaagaactatgggccttgttgtaagcagctcattctccagagagaaaagcactcgtacacatactgagtacatgggccatcacaagggcatcccagcggggttgtgggaggtgctgtgtggacccagagatgggactgggcagtcactcccaccgaggtgtcctctgacacctcgcctaaacccccacctttctgcacatcgtggatcttgctgagttctccccgttctagtgtctttaggttcccacgggggcagcaactgtggagcatttctgcctgtgtctgagattgaagcaggaccctcatgaacaggcccagaccctcatgcatgtgcctgaaaaatgaggccactcaagaggggaggagcacaaacggcaatcaaagaatgggaagaggcaatgaaggaagatcccaggtggtcatcttcanatcacactcacaccagcagacacactaagatacatgcaggcctgac

SEQ ID NO: 212329 - DNA, 578 bp, Homo Sapiens
ttttttttttttttttttagaggctgtaaagacttttctttattgttcatttattctgttcccttatataagctaggtattaggctaggtatggaaatacaaaaaggaataagataaggcagctgccttcaaggatctcactgtctagggaaggggaaacacaaatatctcaacaccattgagtgagtgtgatgatagagatacgcattcagtcaacaaacatgtcctatgtgctgggtgctgtgctaggtgctgaagatacaatgaacgaagcaagcatggtccttgaattcaccgagctcctattcctgtgcccgcggctcggctcctcctcgctcgcgctgccccagccggggctgaggtaccgggccgggtccccggcgccccgagtctccgccccctcctcctcgtcctccaactcgtccacgtcctcggcctcctggatggcgacgcggatctgcaccgccgtcttgggcccgggccgagcctccccgccggactgggccatggctcgcgggactgcggcgccgccggggtcctcacgccggctggctgggccttgcggcgtgcctcgtgcc

SEQ ID NO: 212330 - DNA, 684 bp, Homo Sapiens
ttttttttttttttttttgcagctcccggcatttattgattgcagcccccacagagcacactgcccttcccaggtggggtgaagcccagcgaccagggaggcagaggatgcagcatccgccccgtcggactccttgtcggggagaaggccctaaggaggaaccgcagcccgcctgggccattcccccagggagccaagcgggggggcccaggtgcccgagggacgcaggcacaatccctgaagacagagaccgcctgctggtgagtggagaggctttggcaaaactaactgttaaagccactgcagggcaggcagcggtgcgcgggacctcggtggccctcgaccctcacccacaatggctccagaaccaccctgggccactccctcccaggcactcgcttgtggtctgcgttgcttgttcatcccacccagctgcggggtctcgcggggagttgcagctgcccgaggacatggaaggtctggttgctctcagcagacacgaagtgcagagctagcacttgggtgagcaacagccaggctgcacccacactctgccacccaagtcctcgatggaaagtgctggaagatgctgctttgggcatcgggggcaggaggcagggataatacccctcccctggcccaggagaggggagaaatcagcctctggtaccccctgttcccctg

SEQ ID NO: 212331 - DNA, 659 bp, Homo Sapiens
ttttttttttttttttttatcaaaagctctgtttaatgatcagacggaatggcagcaaggccacacggacagacggagccaaggacaggaccgccgcctctgaacccctccccactggtcaaacgtccaacaccaaaaaagagacgtccccaccccgtccccatgtacaaaatggcttcagtgaaggcgccattactccctgggaagctggtattttttgtaagggatcagggctcacccctgccaccctctgtccggaacagacccgtgagagcgcagcgctcagcagtccccgtgtgcagctggggacgactgacttgacagaaacagattctggactcgagtctggaggccgcactcaacagggcgggtggcgggcgggagctggggcccaggcaccacagacagccagggtgcgggctctgtctctgcggccacagggagcgctgcttcggaagtgaccacgtgcagcgaggggaggatgccggggcctggggccacgcctcggtcagttcccgcacggacgtctctgccctggagtcaggaggaccccatcagtgagtagaccatgccagtggcagatgtcctcgtgggttccagaagctcctagctgctgggtccagagggttaagaacccaggcaccaatgccgctgccaca

SEQ ID NO: 212332 - DNA, 594 bp, Homo Sapiens
  misc_feature (533)..(533): n is a, c, g, or t
ttttttttttttttttttgagatggagtttttagctctttttgcccaggctggagtgcaatggcgtgatctcgtctcaccgcaacctgcctcccgggttcaagtgattctcctgcctccgcctcctgagtagccgggattacaggcatgcgccaccacaccaggctaattttgtattttttttagtagagacggggtttcttcacattggtcaggctggtctcgagctcccaacctcaggtgatccgcccgcctcagcctcccaaagtgctgggattacaggtgtgagccccacacccagcctaaaaaatgtttttcatattatattccaggtaatcccagacctctatggggtaaatctggggatttcttggaagaaagtgcactcatggagggtctgtccacttggctcactccaacagtttgaatttggaattctgcttttcttcatgaagcacagtctcataagcccacacctacggtctgagttctgaactctcagcaggtgggaactgggaactgcgggttggctancaggggggccagctgtgtcaatttggtttttaggaagggtattcttttaattggcttctac

SEQ ID NO: 212333 - DNA, 675 bp, Homo Sapiens
ttttttttttttttttttaagctaaaatgttattgaaaacaaatgtttctcaacgagctgcttcggaacaatataacgtattatgaagctccgtacattttacatgttcttgcaatcttgacaggacaaaataagtcctcaactttttcctttgaattttgaaactgaaaccattttcttccttttccagactctcctgcatcaagaccgggctgtttggaagaaaccgtgtaaaaagtgcatgagcagtgagcatggaagacatggaaatgggatgcgtctggggctgaaggtagcattgactcagcgaaggctctcactctgcttccgtggtccccgctggggcagccagtgtcaggccaggccaaactgacacagcagaatgaagggctgtacagtgggtccccatgaaacatgttactaaaaaaaggtgcaacgagaaccaagtccctgtgcattcttagtcacaacggtgggcagaagaacccatacgattcctccctttggtattaaataacagtttttacaaagctttttagaaacacagcaaaatacatggtgggactggaaatgttaaccatcccaggttagttgtccactgaaataagtctcatccctaagtcataaataaataatctctttcctggtctgacttccatgccaggatcaatatct

SEQ ID NO: 212334 - DNA, 575 bp, Homo Sapiens
ttttttttttttttttttacagaaaatttttagtaattttattcatttttcatagctttacagcttttatgaaaataatgatcactgtaagtataaaatgaaaattaaagaaaagggataataacccaaaactctccctggccaaaaaaccagttagcatatggcaaatatccttccacacattatcttcaggcatatattcacaatgaaaggtgatcatttatattaactagatcttaccaagagagccaccagccctatttctcccctaaatacgagttctattcctgttcatggttctgtgttatcatcttgatggatttgttagaaagattccaagtgtgaacaaacccccttccactctcagtagttttacagggtttaccaccagcatggactagccaaaaacttgaagatgtgcattcagacaaaagttggtaacacatttctcatttctaaagctttttaccagtatggactttctgatgatatgtaagacgtgaacggtgactgaagtccttatcacatatgtcacatttgtatggtttttcgccagtgtggactctctgatgggg

SEQ ID NO: 212335 - DNA, 591 bp, Homo Sapiens
ttttttttttttttttttgaacacaataccatttatatatgatacacaagacaaacatatttgaaaggtacatccacaagtatgcaaacattcaaagttctggaaagacacacattaagccatgacaaccacagaagggctaaggaaaatttccatgttgaaacacttctggggccaggtgtgatagctcacgcctgtgatcccagcactttgggaggccaaggtaggcagattacctgaggtcaaggagttcaagaccagcctggtcaacatggtgaaaccttgtctctactaaaaatacaaaaattagcctggcgtggtggtgtgcgcctgtagtcccagctactcaagaggctgaggcaggagaatcacttgaacccgggaggtggaggttgcagtaagccgaggtcgcaccactgaactccagcctgggtgacagagcgagactctgtctcaaaaaaagaaaaaaattagccgggcatgctggcacatgcctgtaatcccagctactcaggaggctgaggcaggagaagcgcttgagccccggagatggaggttgcagtgagccaaggtcgcaccactgcactccag

SEQ ID NO: 212336 - DNA, 708 bp, Homo Sapiens
ttttttttttttttttttcattcaacaagtgtttattgagcatctactacatgccagacactattctagaaacctgggaaaggaggggttagggtagcttggagctgtcccagctgtagctctgtctcccagaagtgaggtctgcaggggaacagggtctgggggtcctcctgcctgggagagggaaggctgagtgtataaaaaggtggaagcctctagaaatgagaaggctgggtgtgtgggactcatgctggtgccttcccagacgaaggagagggcccagaggaggcagcttcctggagcagagacggcagcaggagcgcccgtgcccggcatcacctcctcttcagcacggatatgcaggacttcttgaggggcccgatctgcaagtgggcgtccacactctccaggaagaaggcaggcttgagtctgtgggtgaagagccccgcaaagtgactgtccaggcggctctggaaggggtcaatgggggaggccgggatgccaccccggcggggccgggaggccttcagcctccgcaggaggctcatcttgccgtcccgtacagcatagaaggccaaggcacggtcagcgtattccaggcagacccaaccgtgggcgaaaaggggtggggcaggggagcctccagcccatgaaaccagacggagaagctgcgtccattccactgcaggcagcaggagtgggcgttgc

SEQ ID NO: 212337 - DNA, 733 bp, Homo Sapiens
ttttttttttttttttttaaggttgaaattaggaatttcttttttattggccactaaagtcctagcaagtttctgacagaagcacagacagaaaatggaaacaaataccttactgggaatgtttccttgcttgcactaaccttgactacagcaataacgcattgcttaacagtcaaagtgcaccaggtcatttccgcaaatggcagggtgagtgactgtgccgttcccaaggaagcaaaacagacacaaacaggtcccacgcgctgggtgtcctggctgagtacagaggaggctgctagaccggcagtacccttttcccaagtgaggaaagccagctgtgacactctgcttgccggcaggggtccccaccctcccctccaccatctggcccatagctgtaccaccaattacattttcttccagcttccacttcatttcctacttttacagcatttcatcctctccttttgcagcctttacaaataagatcagaaatgtgtccaaacaagtgcattaagataggcccctattggccaagtcaaagagctctcacacatggtggtctttttgccttctcaagaggaacttgtataaacccatgtaccaacatacttgatggtatcaaggaaggatcccctccaaattttaagcatttaattgcagagtcttgtcaagaacttcttcccaactttacaactgaatggctgaatttgaagaaggtatcagcttatag

SEQ ID NO: 212338 - DNA, 698 bp, Homo Sapiens
ttttttttttttttttttggcggtgggcagtttattccacttcatgcagacactgacccacgcactcacggagcttaaaaataatacatcgaaccacacggatatcatcccctcctccccccagacacagaaagacacttggctgagtgggatggggtccgagggtccaaaagcctccgtcctgggagaaggcagcagtgtgggcccaggtcgggggaggggcagtgtcctttctccccggaggaaaagtgcagagccagggctaaggccccaaggcagggaggcccccctctcacagcagattggcaacgggcaggctgggaaggcgtccttcacagtggccatcccctgaagggccaggccgggccgggcccgtgggctgcagctcttgggaggctcaggagcatggtgggcagcaccctctgggtgccgggcaccccaggctcagtcttgggcactgtccgagcgccacttgagggcgtggtccttgtgggcgtcggggacaatctggttgcgcatgcccccgagcaggctggacgtggcctccgtggccaggatgagcggcttcaccacagtcgggggcagctggcggatcacgccccccacggcgcccgtcagccccttctgctcatggtcccgcgatgccacgtcacagatggtctgagctgtatccaagatgccctctcgcactgtgtcgt

SEQ ID NO: 212339 - DNA, 621 bp, Homo Sapiens
ttttttttttttttttttcacatccactggtttattattgatcacggggcatttcacatcgacactaaaattctttattgcaagttttacaataatcaagtaaattcagtccaaaaacacaataaccacgataggggtggggagagattctacctatagactgcctctctgaactgaaagttcattttgattttcttttggctcctcaaactgaacagctctgagaggctctccagatgcatttagctttgtctgctgtcttcgccccctctcctcccacacccccccccaacaataatacaaaagaacttcatagctttgttctccttaaaatgacttccccctcactaacctcccctggtgcattttcaatgcaaaaggcctaaggaaagagggggggaaggaggaggaggagaaggatgagaattggctttaaaatttctttccttttttcttttcctcatttcccctgaaattcacccaagccagaccatcacaccttgcaatatataatttttgcagctttttttcttaaaaaataaataaccccccaaaatggccttttaaaaaaaaacacccagcaggtaccatgctaagacaacatcacatgcttaaaagggt

SEQ ID NO: 212340 - DNA, 823 bp, Homo Sapiens
  misc_feature (655)..(655): n is a, c, g, or t
  misc_feature (771)..(771): n is a, c, g, or t
ttttttttttttttttttccttctgctgcttggcattagaaggctctcgtgtcttactaccaggcaatatcgtatgtgccgagagtctcagcttctctcctgtccccacggtgacactcgcgtcctcctcgtccgacgtgtctgacaggatacgatgggacgctttctttggtgcaatcgtgttatttttagtgtaacttttaacctccattttgggtatagagataaaactattggatttcgtttcttttctgtagtcctttttcaataggtgcttgtcgtccaccggaggaaccctgtcctgctcgtcgtcctcatcaaactcatactcgtccttgacgggggccgtggccttctgtggctctgggttcttggccttgtgcttgaggcctttttcgaactcggagtccgtgttgttgccgtcgactgaactggaaggtgcgaaggatggtgcgtcttcctcttctgagctctccgtcgagctctcctcgctggaagtgtaagtgcctttgcctaacaggaggttcaccatcgtgggggagttggccactttcagcggcgtctcgcctttcctgttgctctgctgcgggttccctccgtaccgcagcagcagcttcaccaccttgtagtgcccgttgttggcagcgtcgtgcanaggcgtgtcgtcatctaggcccttggtgttacctccgcacctgcagccagcagctgcttcgcgacgtcgtagtagccccggttacagggctcgtgcagcgccgtccagcctgcgangtccttgacgttgacgtctgccccctcgctgatgagctctttgatgcgccgg

SEQ ID NO: 212341 - DNA, 716 bp, Homo Sapiens
  misc_feature (694)..(694): n is a, c, g, or t
ttttttttttttttttttaaagatatgtcgttcatttattctgaatcttatattgatagataataccagaagatttcagcatagcagataaaatacagcaaatcctaaccagcacaggttttagtgacaaacgggcccgttccatggacatagatgacttcatcaggtaattacatttttgttttcctaagtgtttacatttctttactgtgacaccttcagattggagattttaaaggcttttaagcggtataaggtgctacctgggagagttattgcatagcacttccatggcatggaatagtatttggtgtagaagatggaggctagttagctgcagcagaatgaacattttctttaagaacagtagtaaagaacagtccgagccagaagattgcctttgtgttaatgtggtgtgcaggttccaatgtggtgtgcaggttcctcccttcctgctccttccccaactctcattcatagtcttagtcttaatagcttatccctccaaaatagtccataaggtagaaaaatcataatacatgtaactggatctgatttttaaaatttccttactgggaatagctgttgttaaatcaatcttaagcatacaataatgccagttagaatcctacctggttatccatttaggaataatacagttttgtagcctgaagcaagttctacacttctcaangtaaaagctgtcataattatct

SEQ ID NO: 212342 - DNA, 744 bp, Homo Sapiens
ttttttttttttttttttatcttgtcagtttttatatttaaagaaagaatacattgtaaaaatgtcaggaaaagtatgatcatctaatgaaagccagttacacctcagaaaatatgattccaaaaaaattaaaactactagttttttttcagtgtggaggatttctcattactctacaacattgtttatattttttctattcaataaaaagccctaaaacaactaaaatgatttgtataccccactgaattcaagctgatttaaatttaaaatttggtatatgctgaagtctgccaagggtacattatggccatttttaatttacagctaaaatattttttaaaatgcattgctgagaaacgttgctttcatcaaacaagaataaatatttttcagaagttatagttgtcttttagtatgtgatactaattaagattacttttgtattatcactatttaaaagatcctagtaatttattctttcaaataccatgttatttgttaccatcaccgatgaatacctcctaggcttatccctaaaaatgctcgctcagagaattaattataaacttgttttgtttttagtaagaaatggctaaagctctttttttccacaatcgttagtaactgtataaaaactcatgctgctccaccagtgggccttggaaaatgcatcaagaaggccaaaccagcttgaccctggctcacagacatggtcatgaggcgatttaaatttgtgcctcg

SEQ ID NO: 212343 - DNA, 674 bp, Homo Sapiens
ttttttttttttttttttcagttttggaattctttattactttgaacccaagagccactgataactggcacaatccaatgaaacagaggaagcagcagcttaaacaaaggaaaatacatttaagattataagtctgggggggcggttacaagcttaaaaagtgacccagacagggatatcattgctaaaaaaaaaaaaatccccttgtgacctgggtacattttgcaaagccacaggtttgcaatgttacacaagggccaaaggaggccatgagttgtctttggttgtggggacagagggtaactgttcatgaaaatagtgagtgtctgaagattaagaaaatcatgctgcagcagaggagaagggagaggaagacaggaaggaaaaggagatgcctgagggtcaaaagctgagcccaagcctaagcccaagctcaagctcaagccccagcatggcataattttgtgaattaactcaggctgagttgcctccagtctttggaatgtcatcttatactggtactgctgaggcagagggcagtaattggtgctttgggataggagaaggggcagttgctgaaatacaaaattaatagcatcccaagttcctcaattgcagccaaaatacatgtgttcgggcctttcggcagtatcgccccagaactacctgctgta

SEQ ID NO: 212344 - DNA, 715 bp, Homo Sapiens
  misc_feature (643)..(643): n is a, c, g, or t
ttttttttttttttttttcttctttggcttcactctcacaaactccttgaatttcttctctttattcttttccttgtcttttgtagttggggaactggcagagacccgcttcctggtcagggtctcctggctgggcttgtctgaagctgaagggcccctggtttggacatgcctctttcccgggctctcttctggctccagtgacttctccattccatggaaatacttcatgtgatagtgcaacagtttggctttgcggaaaaattttaaacagtccacaactttgcatctaaacttatggtctaggtcgacagctggtgcattagatgacccaaaatcatctgttttcttaaaagtatttgttacttccacagtcgaaatctcttgtaattccacaaggggagaagtcggttctgttttcatcgtgttttctcccattgatgggcagttcaactccaagcctgcagccccggatccatccccaaaggagtggcaagtcagtgcagatgagacctggccagcttccaaagcagacttcaactgaccttcttcagattccttggtactagacaacgtgtcttgcaaaggatccgtatcaaccaaatctgatacaaccaagtcaggatctaggatctcatgggtnccattagtggacagcctggaggaacgtctcctcgataagtctttgtcagtgttttccgagtagttttttgac

SEQ ID NO: 212345 - DNA, 747 bp, Homo Sapiens
  misc_feature (669)..(669): n is a, c, g, or t
ttttttttttttttttttgagttttcatattttttatttaagaaaatacttgaattgccttagacaatattaaatatttaaacaacatgagaaagagtgccagaggtcagaacatagtatttagttcactgagttgccctgacagataatgaatggggattgatttaatagtgaccaaatacactggccatatttactaaagtgctgtaaaatggccaagtgaggacaactgcatctaaaatgagatcaaatcctcgagtccattccttttagcagaaatgattaaaaccatcttggcaggaccaagtctttgcaaaacctatcaaatggatggatggcttcaagacagcagagaacccacaagcttgaagaggcctccggagagttcactcaggataaacggggtgctggcatcgtcctggtcctctctgtacagtaacagtgttacagccctgtgagttcagtagtaaaggatctggagtccatggggaaattctttatttttgttgctgggtaactgtgacccagaagagttgactttgcataaaaggaacccagagtcctctagtcttggtgtttttcctataatcttctcatagtggcatgtcttaatcctccaattccccaggaggctcctcaaaaggccacacaaggaagaatcagcagcanactgtacatattttattattattattcggttgggctaatcttgacacccccagagagagctatagttaagctgtgaca

SEQ ID NO: 212346 - DNA, 712 bp, Homo Sapiens
ttttttttttttttttttcaacagctaagaatttaatatgttagactattattaattatgaaaacacataaagaattctgcatataatttcagaggtctatgatttctaggggatccttagcctggttccggatggtcagtaagacaactttcttcaatgcctacattttccctctgaattccatctgtgtttactaagcatctgctgtgtcctgggcagtccaacccacatgagtatcttggtcactagtgtcatcagcacctttgaggggtagggatcattcctattctactgatgaggtgagataacttgtccaaggtcgcatggtgaagtcgctgttgaaatctgtcttctgactcgttgctctgtcttcatctgaggaaagacttgtgaggcttctgaggaggctgctctccatcctgctgtgttctgtcagtgacactttgtgcacacaggagatcctaagacacataccctaggccctcagagccggcagtgacttcttcaaaatcagttccggcagcgctgagtgtccatggaaaagagctcttattcagagcagcccttcctgtgtgcagagctacgcaagtaattaaatcacttcagcaacaagatcaaggggacggataagtgttagagactgtgtttcagtcctgactgcctcttatgcatgacctcaggaatgccattcacctctctgagtctggtttc

SEQ ID NO: 212347 - DNA, 757 bp, Homo Sapiens
  misc_feature (704)..(704): n is a, c, g, or t
  misc_feature (719)..(719): n is a, c, g, or t
ttttttttttttttttttcagctagaaataagttattttattttaaaacacatacagattaataaatattactggaaaacttaatagcctttttatttacatgaggcaataacaacatgctatgactacatctataaagcaaaatataagcaggtcttggccactgacacatgtgtctatgtatgctaattggaagctccccaatacatgtctatgacaaaacttttacacaaccaatcaacatttgacattttttacatcttcttcctctcatgattatattccattttcaagaaaataatagttatcctttgaaaaggcaaaacgctcaagccactgaaaaacagtatctaaatttctgtaaagtgcaaaaatactaaggtggggggcaattattatattctgacaaataaatattctgaacttttcaacatgaccctttggcactagtggtttgggagccctgacattcgcctggtgtcagttcagcatcagggttgagctgcttggaagcaggaagttcagcgtcatttattacaaatccagtgcaacagaatccacgtgtttcacaggccattaaatctttttcagaatacagacctcggccgaatgtcaggagcacatcacaccatcggaaggtgatctttctgtgcggctttctgaagtccctgtttaatttccatattttacaatagaacatatanaaccctttcttttanaacaaaaaaaggaaaactaaagcttcatggaatcatgc

SEQ ID NO: 212348 - DNA, 694 bp, Homo Sapiens
ttttttttttttttttttaaaaatgaaacaagcatttttttttattattttcttagaaaaggcggcgagaatcctgagtggaagggatctgaactttcatgtcatgtacttcgagaagagggtagatgagactcaagaatgataatcagaccagtcctactcctcccaacccccaaaagatggcatttacacatcacggaaacctatgggtctaacaggttattctctctctctcagttcttgggaaaagggagacaagccctcggccagattcctttagggaagagttctctgtgccggtggctggagcttgcggtgcgtgctcagccaggaggccccagccaggcacctctagactccgatgtgccacagagggcaggggctcccgctgtcacttccattttagaccaaacagctcctgggtgcagcgactctttcaccctctcttcagggtggggagaaacggggtggactggagcccgcgcggccctcacgaactctccctgagcagccccagcttccgcagggcctccctgcgcgcctcctccgaggagccgcggcccgcgaactgcacggtgatgccctggggccggggcagggagtctgcgcggcgccagtcctgggcgccgttgggctgccggggcccggggaagctctgacgggcccgcgtgctgggcagggccgggccagggcg

SEQ ID NO: 212349 - DNA, 786 bp, Homo Sapiens
  misc_feature (735)..(736): n is a, c, g, or t
ttttttttttttttttttctcagcaacaaaaacctgtatttaagcggctaattccagagatgagtagtggagagagcaaatgagcctggttagagctcactctgggaggagtatgtggacgacacttggctgtctcttcagggggccaggctgggcccccagcactcccggcagtggaaaggcagagctggctgccagctctggcctccgcctgggattcactcccatcctggctcagatctgtggctgtgcttcacccagtgggtcctccctcaaggagccaggcgggatctggaagggtctgcttatccccaccacagaacgcagactgttgctgtagtaacagaggagaaactcatcttcagtggtagggatattgctgatgtcgatgtaaacctggttcaggttgtcgctgcaggagaccttgctgtccccgacccaggcataggacacgtagtcattaacgtcccgcagccccaccttgtacagtccaatccagtcccacgggctgctggggaagtccgaggttgaagagtagctgaccatcatgtcattttccacggtccacaggtcctcgggcatcaggacgatcagcggagcagacaccaatggcttcagctccaagtcgaacgtgccggagacaggcttgtggtcgctgatgccgtacgtcatgtggctgctgtagcccctcagagacaaggagaagtgtgacgccggcggtatgggagtgtcggnngcagcacaggggctgcgcttcagcctccacaggatgcgatcggtccatgc

SEQ ID NO: 212350 - DNA, 742 bp, Homo Sapiens
ttttttttttttttttttggtcttcagtacttttattaaaaaatagtcacgcagacagtgccctggtggctctgccccgcatcccaactctggggtgggggaaaggggtcaacgttttcgcagccccaaaccgggccatcacttgcccaccgagtcgaatatgatgcggttctgctcggcgcgctcccgctggctctgcgtccgcgccagctccagcagggtccgcagcaggtgaaaggtgaggtcaatggacagagaagggttgtcccgccgcggccgctcgcctgccgtcccgagtcccaatcggccgggccccgcgcggcgcgggaagcgctccgccagcagcaagaggagcgcgcgggccccgccaccctggttccgtgccccggggctccagcgcagactcgggtcctggaccccggccgcctcggggctcctctggctgctcccagggcacagctgtaccaggagcagcagcgcggccagcagcgctgcgcgtcccgcctgcctcatggtgccgccggccaggttgtcggcgagcgtctgtacggtccaagattgagctccagtctctgtccctcggggcaggctgaagacgccttggggaacacagggtctgtcccggggctgtcgccagccttatatagtgccaggacagctccgactgacgtcagcgaagaaatgcactgattgtagaagcatgacagccacacttcgagtctgacggctggcgggccccgga

SEQ ID NO: 212351 - DNA, 683 bp, Homo Sapiens
ttttttttttttttttttgatttatacaagaatgttcatagcagttttattcataataggaaaaactggaaacattcaaatatctatcaatacaagaatggatcaataaactgtgatacattcattccatggaatggctaaaggaacaaacttttgacacacaaaacaacatggatgaatctcaaaaacattttgagtgcaataggagccatacgcaaaacagtgtgagaaaaatgataaataataatggtttcaagaaatgcagagcagagagcccagaggcaaagacccacaggacagagggtcagtcccaggctgtggatcctaactaagaaactcctgctggattttgcccagctccatttccaaactattttgggttattgacttctttatcccctccatgttccctcattttgaactagaatcactgtagtggttattctatgtctgtcccatcatttcacattaggggcagataagctgttttcagtttcacaggtcgacagaggtaagggaattatgtcaaggatctgcacttaatggacactctcggaagcctcattcacacctggtgtggatgttttagatgggattttaaacttttgatctgatgtggtctacatgacatttttcatgttgaactaatgctttaatgacatgaaatctggaaacctcagggg

SEQ ID NO: 212352 - DNA, 771 bp, Homo Sapiens
ttttttttttttttttttacattctggaatcatttattaatccaactggttacttttgaagagttttatggttagactaatatataacaaattgccaatcgttacaggtattacagagaacccagcaggcccctacgggcagagaacagataaagagcttatagactggttgcggctgcaaggagctgatgcaaagacaattgaaaaggtaaatttacaacaaagaaattcttatgctgttgttacacagctgctcagctcttaaggatctgatctttgtttcagattgttgaagagggttatacactttcggatattcttaatgagatcactaaggaagatctaagataccttcgactacggtaagagcctcaaaacagtttgtataagagaatacaactttttatgtgtgaatatgcttcaagagcagaaaacaaagggctgggcctccccccaaactctggagttctattaggttcaagctgggaaaaagccaaggtggggcagaaactgaaagccaggcagaagtcagaaataggaatgtgacagagaagagctggccaatctcctgccattaatgcctggctgggagtgggtggaggcacatggcaagcgtgcctgcacgctggacccacccccttctttaaactgcagcctggcttcttgttcccgagtcatttggaaatagcagctctctgcaggtacgtacctctaagggcatgtcctactactgctgggacacgagcgtcacctccatatgtgaggagaatg

SEQ ID NO: 212353 - DNA, 675 bp, Homo Sapiens
  misc_feature (584)..(584): n is a, c, g, or t
ttttttttttttttttttcgtatttcaagtgttttatttgctttctgtggtgtcaaatttggggtctcctagagcccagccccaggcagaatccggcatatccttctccgcctggggggcccgggacacaggagtttcagaaaaggcactggcaaaagttctagggcgggggtcagggagaagccacactgagcctggagggaccgggccctccttcggcggcagaaaacacagtcacctttggcagggaagggttttttcctagaaagaaatttaagacaagataaaaacctgagatgttagaggagcccccagaaccaagccggtgctcccctgggcaggcagagagtgaactcggcttccaaaggctcaggggaggcttgcccggccctcagccaggctcagatgccacaggccttggcaagcagaaagcctaattcaaatccctatgtggaatctccttgagacaaagtgtcacgacacaaaacccccaggccccagaccccacctctgaatggcttgggccagacgctggtctggatcgtcaggagccacggccactacccagtgaccaattcctgtcnctttttgtgtgttctgtgagcgctggagaggcaggcacttctgtgggtaactgggggaggcacagcggggagaaagagcaggaggagaaag

SEQ ID NO: 212354 - DNA, 724 bp, Homo Sapiens
  misc_feature (620)..(620): n is a, c, g, or t
ttttttttttttttttttcatttagtcaatccacatttattgatcacttattatgtaccaggcactgggataaagatgactgttagtcactcacagtaaggaagaaaactagcaaataagacgattacaatatgatgtagaaaatgctaagccagagatatagaaaggtcctattgggtccttctgtcaccttgtctttccacatccctacccttcacaggccttccctccagcttcctgcccccgctccccactgcagatcccctggattttgcctagagctaaacgaggagatgggccccctggccctggcatgacttgaacccaaccacagactggaaaggagcctttcgagagtggatcactttgataagaaaacacataggaatgaagagaagtccacaaatggccacccgtgctggtgctcaagaaaagtttgcagaatggataaatgaaggatcaaggaattaatagatgaataattgaatggtggctcaatagatgacttcatgaatgagtcagaaaataaacttccaatcttgaggcaaaactgaattttagcatttccaatgcttgtgcttgttcattgaacaccatgttccccagaaaattctctacanagatgttcatttttttaagttagaagtacttaaaagttcactgggaattttgcaatgcagttgagaaaactggagctgcctaggggaatttcagcattagggct

SEQ ID NO: 212355 - DNA, 617 bp, Homo Sapiens
ttttttttttttttttttcattttgcccaaatctgagttttatttttgctggaatcaggtcatctggcctggctgtcccaccaacccagctgggagcctctgagtggcctgccagcagcatctcattacaaaacagccccctggaaccaggtagccaaggaagcggcccacctgaaaggcatttagattgagaagaaaaactgcaccttcctgacaaaggtcaggggtcacggtgaagggagggctgctgggatcacagggacagcagcatcttctagcagcttggccataccagccactgaggtcctaactgcagccaaggggccgttctgcacatgtcgctcaccctctgtgctctgttccccacagagcaaacgcacatggcaacgttggtccgctcagccactggttctgtggtggaacggtggatgtctgcactgtgacatcagctgagtaagtaacaacgactgaggatgccgctgacccagggctggggaaggggactcccagctcagacaggcttggctgtggtttgctttgggaggagagtgaacatcacagggaatggctcatgtcagccccaggagggtgggctggcccctggtccccgggctcct

SEQ ID NO: 212356 - DNA, 695 bp, Homo Sapiens
ttttttttttttttttttgctattttgtattttttttttaatggaagggtgttggggtggcagtttttatccttgaagacctcagatatgctaagtcaacctaagcaaagtatactcggtggaaccctagctctgtggggtgatctgcaaaatagagtatcctggtcatgtaagttcaggaaatgctacagactcaaggattatttttggggattcaccatgcacagcacacattgaaggctgaaaagtccttgcagaaaggaaactgacttaactttgtttcttaaggatatttgaccacaaaacccttagtctgcatcacaccaacctgatgcctcctggaacctgtgttctgtagaatgcgtattagaaaatgttggacaacctgtttcattatcagaagtcccatttctgaggacagtgttctctgcctggaaataaggtccagattctcaattccagggacagccaaggtctgtcactctacccagtaaaacacattgcgtaaatctccatccatcaagggtatagttgctgcgcccttcacaaaggggagagagctcggaagaaggtacacaacgttttataaatagcttcagctaccttctccggcccacatctcactcacgttaaataaaataatttccccggtgagatgttgcagctgctgcccactgagcttgctgtgagcttta

SEQ ID NO: 212357 - DNA, 608 bp, Homo Sapiens
  misc_feature (542)..(542): n is a, c, g, or t
ttttttttttttttttttagcggttctcacattgtaattctcagaggtgaaaactatacagaaattgctggagcagtttgaatctctagaaaacattcacctccccacccactaccccaacccatgcccttgacctccaagaactgagccgagcctggggcacccgcggcctgtgctgcaagggtcaccttgtgacgagggccgtgcacagcctccgggctgagcagggacaaagactcctgtcccatccatggccccagctccccgtgagcggtaagagggcgcccagcagcgcttcctccatctaggcgggtctcgggggcccacgggaaatgccctccacaggtgtcccctgcacccacagcctcttgtcccctgcaccaccacgagcctgaggtgtgaaatgtgtccggggcactgtgggcaccgccagccaggctgggtgggaacgtgaatgccaggcctcggcccatggccctccctctggcagccgagtctccaaagcagctcaaggggtgaggaccacgggcgtcccggcctanccgctcccggccgaggggcaaatggggccgcacatgggcagggcggagcgttccgcctcgtcctcc

SEQ ID NO: 212358 - DNA, 762 bp, Homo Sapiens
  misc_feature (710)..(710): n is a, c, g, or t
ttttttttttttttttttatgatatacaccaacatggcttaagacgatttattgcaactgtaaaaaaatgcgcccccccccttttttttccagaaaggaagcgtggattgcattaatcaagctaaagacttttatacttctttacagtctgacacaaaaacagacagtcataaagataagcccgaatcatcaagaaagtgcacagtagtattttgcaaacccaatttagggaatcagggaagagtaaaatccacatggataaggtttccccttacttcccattcgtgatggtacagtgagttcatgttatggaacgcccactgctccaaacacatggcaatgatggacaaaatataaaaaggtaaactcaaaaaggcatggccaagacaaaacaaacaaaacaaaacaaaaacaaaagattattgtctccatgttgaagtactaggcttgttgctctggaagcaaaccatggtaaccagaagctaagctcctgcaatgtatagcggttccaaagtaccctgagcaagatggaagacaaaagccatactcacagattaaagcccaggactagaatggagctacccacaaacccaccaacccctgactgtaagtctgacaaaaaagaactaccaccaaactctgccagggtctttggttctgatgagctgcaggcttaaggaggtgaggatgcagacatgttctggcctcgntactaagagttgagctaatcacagctgagctaagtgagtggatttccaatat

SEQ ID NO: 212359 - DNA, 387 bp, Homo Sapiens
ttttttttttttttttttggtgacacatgtttaatttcaggaaacacagaagtcataatttcaatatcaatagcaaacttcacaacgaaactgcaccgaacgtcacaagagaccaaaatatttccacagttgatcttggacagtaagaaaaatactaataacagaagaatagccgctgttccagcagtccccgctcccgagggagccgctcggattcccaccgggtccgctcagagaggggcgttgtcctcccccaggacgcacagcccgcgcgcggccagcccactgctccctggcttctgcgccctggcgggggccgggtgggaccccaggcggtgcagctccgcgtgtggggctgcggggtccgagggtccgggccggcggggg

SEQ ID NO: 212360 - DNA, 531 bp, Homo Sapiens
ttttttttttttttttttgagttttgaaacagatgatttattgggaatggttaatacaatctaacttcacataatacagagccttttaatggcaaaaattccactttcatgacttctactttagatgagtaaagggagtaagagatggggataattttatatcccacatggggagagataatctggtacttttagttaaaaaacaaaagtacaccaaatatcctgtcatatttctaaataaatgaaggggaaaacagaatattgtgatataataaggttttctggtgtcattcttctaaggtgcccaggatttagactgttatgattttagaatatatgctgattattagatacaaaattttaaagtttgatataaaatgaatatatattcataaacagctgaatataaaatttaaccaatagagaatgattggcaaatcgaggccaatgcataaaaatgaagacacattaattttaactaaagcagtttttcttaataaatgtaaatttagttatgacagtatccttgtt

SEQ ID NO: 212361 - DNA, 637 bp, Homo Sapiens
ttttttttttttttttttacaatgaacatatgtgaaaaagaatttaattgcaaaatagaaaagtaggccagagtacagttttaagggtaattgcttttttatacagtatagataacctagagggatttcagggttaaacagttcataaagcaataaaacactgaaaaataaagcaagaaaaaggggtttgaagtaatattttaccaaaaaaaaaaaagaaaaagtgaacagtctgccagtgtttaatgtccatacattgtggaattcaacaatattgtgatgagagcaagtcatagcacagacactgagctttcaaaaggaaaagtagaagttacattagacatgtctattgcatcactgtaatacaaaaagttcctgttctacatacaaaagcaatttttttccgtaagaatcatttcctggggagaaataagtccataaaatatttcagaaacccatatgcattgggttttccaaaaacattatcttaaaatcagtgccttaaagtgctttcatgtggaaatcatgatggaaggcacagaatacagtttcacgtccccactcttaaattttcaaaaaagcacagattttgcagaattggcaaattcaagttatcttgtaggctgctccttccgag

SEQ ID NO: 212362 - DNA, 668 bp, Homo Sapiens
ttttttttttttttttttaaagctccaacatttattgtgtcaatgttaagcacactttttaaaagacaacatagaatgtatagaaacaaggggttggggactcatgcgcatttccacaatacaggtaattaggttggctggtttcagaagggccagggcatcactcatgacagcgatggtccacgggccctctctatgggactgattcactgttccaatgtgggtctgtttttttgtttttactttttattaaaaaatataaataaaatggcgctgcaggcctaggctggaaggactctgcaggactctgtcttcgcacaacggcttcttggaggctactgtcagaaaacatcacaaactagcaggatgacagaccacgctgacgtcgactgggcggcacgcgtccaccccacccctgggggcttcaaattttctcagaacttaagggctctcgagcttccatccgaaaactgccacacatcttgagctctctgggtactacgccgaatgggggtgtgtgaagaacccgcggggtcaggggacttccgtgttcgctttctaagtagattcttaatccatgagtgttctgtgcgtgttgcaagagaaacatgcactggtgaatggctgtttgcaagttgtacatgtgtagctgctgggctcatctttac

SEQ ID NO: 212363 - DNA, 606 bp, Homo Sapiens
ttttttttttttttttttaaacatatcagttttaattgtcaagattattccagggcaagagttcatttccaatcacttctctccggttcttgttcctaagcggcccaagccaagatgatcattccagtttattttcaactttccgctggatcttccatgccctccccaatttggccgacgcagagggaggcgaccctgctgggttcacagcagcaaatcgtcgtttaagtccaacaaactagtcaatcttggtcggctggcaccgaacaaacccatctcgctctgggtccccaggtgcagaatcgatgtgtgttcttcaccaacgcacagaccgcttcttcactccagtgttcacttcctccagtcttcagccgagaggacatctgcggtcataaggccactcggatgcagtggtgcttgagtttgcaaggcaggactcctttgttcaggtggtaaaagtcaaccaggtggatcaggtcagagaatttggtgttcccgtcatctaggctgaagaacgtctgcccgtcgtcctcgcaaggtaagatctggaaatttttaattttctggtgatgacacagtgtgagtacaaacctcgtgccgaattct

SEQ ID NO: 212364 - DNA, 549 bp, Homo Sapiens
ttttttttttttttttttgactacataacctagcagtggtctaatactgaccgtttcaatttaaatgctggaaaaatactgaccaagactttctgtgaaaaagataatggaaaacagaaaccagttagtaaagccatgcaaataggaagtgattttcagccccaagaggactttgtatcatctatggctccatttaaacccaagtagcatctgtcctggtggattttgaacatccttttgatttaacacagaagaaggtttgttctacctttaaaagcatatcctcttttttcccccaacagactcctcaacaagtggcttctaagacaagactggggttgttttcttactgaaaatcctgtgtttatccagtcttttccttttcaatttctgagtttagcttacctaacagcaaaacagaatcctcaaatttctcacagagcaatgaaaagcaaaacagttggtttctctgatcaacatcattttcagtatgaaaacaaaagttatgactcctagacctttgaaatatttacaaattgtactttaaac

SEQ ID NO: 212365 - DNA, 522 bp, Homo Sapiens
ttttttttttttttttttccttcatttagtatttattgaatgtctactatgtgcaaggcactcacccatggcctgacagaccacattcaagtacaaagaatcattagagccattccaaatctaagtgtcagaacactttgaagcaggatgtagagtggtcagaatgacttgaggtaaagcagaaacactcaacaaccagtacattaaaaggtgattttaatttttgacattccttgggatgatattcctttaggaagaagtagactgtgttaaattcgcatccatggcactgcttcctgaggcagtaattcttcaaagcctttccttccgtgtcaatactttccacatttgtgcgtttgaatggatccatgtgtttagccattattttactaaacacaaaatcatttgcacaaaaaaaaaaaaaaaaaaaacctattaccatacttgtctggtcatacagaattttagcaccacagaagaggaaagatgtttggcctgagagggcctacactccagtctgtg

SEQ ID NO: 212366 - DNA, 489 bp, Homo Sapiens
ttttttttttttttttttgccaaggactcctttggcagtgataaagcctataggctccttctcagaatgatgttttaagatgcataaaataaaaggcataggataacacagaaaattatcttgaaatacagttactaaaatgtttaaaaagtaattttcgatatagtaaaaagttttttaataatgtattaagtaactagatgcatatatatttcaagctatctaagtataatgtgacataaaaatattgattctttgtattagtaactgtcacagttcagtttccccagaaagcagaatctaagctggagattggcatttggggagtttgctagggaacgctcttgacatcaacatgagggaaggcaaggtggaactggtcagagaaggatgacattgagctgtgatgaagtctgagaggaagcttcagccaaccttacagaaggtctgaagattatatgacccttcagaagtgccctgaatcaaaga

SEQ ID NO: 212367 - DNA, 542 bp, Homo Sapiens
  misc_feature (527)..(527): n is a, c, g, or t
ttttttttttttttttttcaagtcttccacgtgggaggttttattatgttttacaaccatgaaaacataggaaggtggctgttacagcaaacatttcagatagacgaatcggccaagctccccaaaccccaccttcacagcctcttccacacgtctctcagagattgttgtccttcacttgcaaattcaaggatgttggaagtagacatttaaagtagcaggaacaccatcagtgaaacagaagcagaagtacgatgactttgagaaacaactgatgaaaaatacactacagaaaaccatttctattgtgttatgatgtcagggtggcagatgtgcccagggcttagtgtccatcctcccaggacactggtcataccgggccttcggtgatcccctccagaggcaagctgggtgcactgtcagctgtgggcctctcctctttcttcagtgaggctgggactcgcagactaacgtagggtttatggcaagctgtgttggccagaggaggatagtgctgtctgtagcanatgtatgcaaaaatg

SEQ ID NO: 212368 - DNA, 611 bp, Homo Sapiens
ttttttttttttttttgtgcaaatggtggcctttaataccaagaaagaccatgacaagtgacagaacaggagcaaattccctagtgtagtgccgagctagccttttgcaggaccctaaaacctgatctagtaacagaataaatcagtgtatttacatttatgtttgccctgaaaacccaggtaaggtctgaagcctgaggcatctctccttcctttcctcctccctctcttcctacctccttgccttctttcacttcctcaattcattcctctcccttctcccttcctctctcttcctttttttcctttctgcttttcccttttctcctttttctcctcattctctttaccatctacctatgtgaccctccaagcccctctgctatttctcccctgctcactccctctgccgttgtctccctcaggttcagcttccggggtggggaggcaagaaagggtcctcagcccagggagcacttgttggtgttcttcttgtcacaagttttcaggtcagtactgggaggcttgttgccgtttcctgatctccggcctcctgacttgagcaagatgtcccgggccagggaactaaaagcctcatccacattcatact

SEQ ID NO: 212369 - DNA, 661 bp, Homo Sapiens; identical to SEQ ID NO: 45458

SEQ ID NO: 212370 - DNA, 666 bp, Homo Sapiens
ttttttttttttttttttacattttagaccatttaatggaggtatttgttgcacatgtggttttagtgtaacgtaaacacaacatctctccccagaaacacttaacctgagttggaaatgaaatatgaactgaagagattcttaattcacacatacacttctcctcaaaatattagcaatgattccaactgaggattctgcttgaagttcaggactcggtcccaggacaggaatgaaggaaaactccgtgcagttcgaacgctctgctgaagtcaaaggactgcacctgcgggctcttaatcagagctagcttcctcaaacacccgcggaacgaggtctggctgcgcaggcatttttgcttcacaccagcaggatagccaccaacataaatgggattgttggtgtccactgaggtagactgggtgtgtggactttcagcgccaactgcgttcccatcaacaatcagagtgatacggtgtttgcttttgttagcttgaagagtgtgccattttccatcacagagcacagtggcggttttgggctcatatgcagctgttatcctgccagcaccattgttgacatggaacaagaccttgccgtccacaagctctagtccaatggcatccactttggcagtgctgatccccaggaggacgccattctgcg

SEQ ID NO: 212371 - DNA, 662 bp, Homo Sapiens
  misc_feature (579)..(579): n is a, c, g, or t
ttttttttttttttttttaaacttataaggattttttatttaaaggatttaaaaatataacacagtcaatataaacatgtactgggaattataaaccattctttcttctaagcactggatgagatactaaaaacatacagtatcttaccaatagccattaaaataggctaaaatgaaaaagaaaccgttgtaacaaggttactaatcccccaactttcaatgctgagttccttcatcatccatgtgcaatccagagatgacatctagcagggtggtaaaattattctggaaaatgccaactgtacttggacaaaataagttaattctatatggttgtccattaaagttttatgtggctatggttccactggagctaaaaattggcttttaactgtttccaaatcagaactagcagaggagagaagtaaataaagccaatggcactcccttcagaggctcaaaatggttagattttgatgcagatttaaccttagcgagtttcagtcagtccatttagatgatcctgtaggttcatacaaatacactgaaccgttggtttaacttctcttccttcctcanagtttatgataaagagactcatccctgtattgggagtgactgacataagttcagatctgctcagagtggctggtaaggaacac

SEQ ID NO: 212372 - DNA, 725 bp, Homo Sapiens
ttttttttttttttttttgctggtttaccttttatataataagtactgccaatatattaaaaggtggtgctgagcaaaaccattcaataaagatttgtcatttgatacatatggcacaatgtctgctgagaaagctaatcacactgattgatccatgcattgaatgtacgaagagttgaagggaaaggggaaaggatgataaagacaatgtcatgagatgtcagagaaaatactaatttcataatgcagctcaacaatagaaatcaatttcaaaatgaaatatgatgcataaactaagattaaagttagttaatgtggctgggcatagcagatgggactcttagaagaggtggcctccagggtggcagggccattgccctggctcaggctcctgttccctcctgggcccaccaagttcactgggccctcgcagcttccaggcccctcaggcattcagcttcaggtcgctgatgtatttctggacccacttcttattggggtcagcacagatctgccggcctctcttggttaggaggatgacacctggcttggggcactgggggctggtttcagaatagtcaactatgaacttttgtggaatctgccaggaggtatagacgaggcagcagagctctttgttggtaccaacttgtgcacaggagcagagggccatggtgcagacgaggacaaggagggcagctgcaagggccttcatgatgctgggc

SEQ ID NO: 212373 - DNA, 780 bp, Homo Sapiens
  misc_feature (639)..(639): n is a, c, g, or t
ttttttttttttttttttgcatctctgttctttttaataatttcagaataaagtctcatttcagtgcagtgggctgggtggtgggggagagggttgaaagccccacttgggtccccgagggtccattgagccctctcaggccagctccaggaatcctggcctggtcacagagcagagttgcttgcagggtcctagtggccatcgggcctgggcaggacatcatctctcagagggtcagaggctcagagctggtgcagctcagcaggtcacggccctccaccagctctgggttctcccgcatcatgtggtggctgcttttcccccaccagggcctcagctccagcagctggtgggtgagctgagcacagcgtacagcaaacacgttctccgccacgcagagcactagggcgatgccccagaggcacaggctggagctataaatgcgtgtggggtcgaagggacagtcaggtgcgagggccagtagttcagagctcccaaaagtgcaggcagccagcagtgccttgccctgggtggcaaaggtcatggcgatggaggccaagaggccgagggcacaggtcagagaaaggagagcacaggccacgctcgagctaaacactgtccagcgcaggggggtgctanggaggtagcgtgacaacacgatggctgcgatgcctgaagtgatgaccacgatggcggaagtgacagagaggatgttgaccacgcagtactgcagagccacgcatcttgaggggtgccacgtagcgcacactgtgccatgga

SEQ ID NO: 212374 - DNA, 622 bp, Homo Sapiens
ttttttttttttttttttcaggagcgaataccaacctttatttgcacttgggttccagttcaaagccaccttagacagtgtggcaaagtgggaaaaagcacagatcctgggaccaaggttcagattccatctcaagcgagcatatgaactgtgtgacaacaggcagacagtacctctgtgtctatgagaaagcggggagagcaacaccccagcttctagcagctctacagctgcctggacctgcaggccctcctaggcccacttcctccccagcacagtgtgtgttcccgggcgtgtgtggctctgggtccagctctgttcagggtgggactccaggtgaattactgaacctctgaggtgtacccccaaccccaaactttcaccaaaagcaataaagaggaactctagaactggagccaggactaagtgagaaaaactgcttataagtgcttaataaatactagttatttacaacttttgctcaagccgagggcagaggcctttgtacgcagctgccgaactctgactctagttctgcggaagaaaaggatgcagtatttgcttttgccatgatccctttccatttgattggcaggttaaataacatggttttcctcgtgcc

SEQ ID NO: 212375 - DNA, 674 bp, Homo Sapiens
ttttttttttttttttttcacgtgttgacaaagcccaagtgagaggcacttgtttttattgagcctttactatgtgccaggttttgtgccaagtgtcttacatacatttaatctaatctccacactaaccccaagattctattcttaatccccattttgcagatgcgataatggatggctaacaagttaagtgactggtgtaaggtcacatagctttgtgagttcctgaatcaggatttgaactcaggacactaaagtcctcatacttcctgtgcagtgacaccacctccctgggcacatctgtgtcctaagatatggtcattagacccactggaatgtaagcgccatcagggcagcgaccctgtctgctgtgatcacagctatgtgcccagcacagggcctggccttacgagtctccctaattgttagctaagtaatgtgcatggatgggcttggggagggtctagctcccaggcctttacatccctactgtctaggcagcagcacaagcccactttcccactcccctgctggactccatccgctggttcatgtcccacccctgctcagcagctgggctcgcagctctccttaaccaccgaccccagattgagatctccatctacgaggaccggtgcagcagtggcagctccagcagcggcagcagcagcggc

SEQ ID NO: 212376 - DNA, 712 bp, Homo Sapiens
ttttttttttttttttttaatatatagaaaagtttcatttattcgaattaaattatggtatgagtttcatatacaaataaattctgtgtaaataatacaaaatgctacaaatttcaatcttgtaaaaatgcaaaaatacttgtaatactatacatatataattcctttcacatgaccaacatgtacagtagttgacacgatgcacacgcgcttcccccccacagctgaggctgctgagacagcatcaagccttcgcttctgtgacgtcagcgctccctcccgcggctgcctcacggtgagccagcaggccctccccctcacacccccagctcaagatgcttcagattatgagccatcatcaggagggaagctacctattctctggctagttagaaggcactgtcatggggaaactgggtcctcctacagccttaacaccagcctgctaaactgagaacacgcctctaccgtggagaagcgcggtacatcactggtctaactcgttttcattctgcagcgtcttcatcgctagcccccagagagtcatgctggagaaaaactgaccctctgagttcctataagtggtggaagatgctcgactgcccagggggtcaccgccgtggttgtccaaagcagccagagaggaacggatcatggccatgccatcggcctgcagtggttcgccaccggctggggtgtcacatccgagtaa

SEQ ID NO: 212377 - DNA, 436 bp, Homo Sapiens
ttttttttttttttttttgcttgtgtttttccttcagtataaaaccactgtagaaaataacttctcttagaaaaaaaaatacagaagaaaaaaaccaaagggttatttttctttggcttcaagccccctcccatgacgtgcagggcagggggtgggcatgaggtgaggaggacgcaggaagcctccacccccacccctgcctggcaggtcccagattacatgatgctgcagttctgggggctctaagagagaaaacagaggagagaggtgtgagcagcagggcctggacccagaccctccctcccctggcccctagaagggaggtagcatctcccccatccctcacactccagccctgcccctgccctccagtctggggctcagacaagaggggcaggatgcagaggtgggctgtctaggactcaagctgtgggga

SEQ ID NO: 212378 - DNA, 541 bp, Homo Sapiens
ttttttttttttttttataagggtttatctttattttataaaaactgctacacacacacatacactctctctctcccctcttgctttcctcatttgacctagagaagtttggagtttgttcccacacattcttttcaaggaaataccattcagccatggtatgtttttaccacaatttattcatccattcccttactgatggtcttttttttgtttgtttttttggtccttaccaaaaaatacaatatacattagtaaacatataatcttaagtgctggcgctttttattccttagggatagattcccaggagattcctaggttgtaagagtatattaatgttaaaacagactcacaatgttgtccaaggaggctgttacaatctacatttctaaaagcagctatgaaaataacgttttcccctcctttgtgagtaagtaagatgacaacttagacaaaagcttattgggctatggatgttctggataaatttgttcagaaagtcactcaatatatagtgtgacagcacatcaatgatatc

SEQ ID NO: 212379 - DNA, 549 bp, Homo Sapiens
ttttttttttttttttttgcattgacatttttttatatttggtatttgtaagtctttaaaaaaatgttttcaggccattttttccttaaaaaaaaaaaaaagcaaccaacagcaatactctgtacaagtataacaaacattagaaatatgcatcattccaaaatagttacaggaaaattacagtttagagtccacatcaacacatcctatttgtatgtgcccccaagggagaaaaagctacagtatgttaaacacacagctgctacacagtagtctgaaaacccaggacttaaaacttttgaggcaaatcaacaacagtcaccaagacttgtttagctcaataagtacaatcaagcatttcaaaagagaaccaggctttttcatcccagatgaaaaacacacgtgatgggctgcatagctgacccccgcccctcgatccccaacccccgggagcctctgactcaacagagcacaaatccagtggagtcaattaggcggaagtctggctggaggtcacagtatggctgcagtgggcagacaccaaatgtc

SEQ ID NO: 212380 - DNA, 342 bp, Homo Sapiens
ttttttttttttttttttggagtttttgcactatataatagtacaaatattgtattttatattattttctcttaaaacatacaaatatgatacaatacaatttattttaataaaatgccaaccaatatagtacaacaaaatgaattcaatacattaagatgcaatacattacaacattaaaatcccacataagaacagcagtacccccaaggcccccaatgagtacagtatatctctaatgaagtagtcagtcagtcctgctgatgtgtatacattctagttaggagggtactggattggtagctaaagcttccaaggtaaaaaataaaaacaactcctaat

SEQ ID NO: 212381 - DNA, 544 bp, Homo Sapiens
ttttttttttttttttttaccatcacttttttatttggcagtaatagtaatacatccatgttacagtgcttattttggctaaagagccagtgcaattttttctgctactgtagtgttttacttttacacaaattaatgagtacagtccttacatttaggagacagaaacatttactgacatcagctaagtaaagctaatacatggttgttcacaaactaaacaaaacaataacataatatactcattaggaacaaagtagggatgttcttatttccactaatcacagattatataaattcttaaatttcacatacatatttctaaatctaagcaaaaaaattagaattcagcttaattcctataatcattttgaaatttacatcaaataatttctgaatatatattcacattaaaataaaagtaaatgggttatataaacataatttaaaatttctgattatgaaaagttatagagaagtacattaaatgttactttggcattcctatttcctaggcttacaggaattattaagaattcctttg

SEQ ID NO: 212382 - DNA, 512 bp, Homo Sapiens
  misc_feature (488)..(488): n is a, c, g, or t
ttttttttttttttttttaaggagggaagtgtttaatttctcattggggtcacgctaacagtagtcaacagaatctatatcacatagagtattagaattcaaatgtgagtgaccacaccaaacggaactagaatcctttaagcaatttgacgagagaaaagaaactctccctattactggcccaggatgaagtgttgctgacatccctcttcatatcatttccagatttaagacatgcttcctctccaaggcacatcttccctgatctgaagtagcctgttcccaagctggaaggagctgaactatcactgagcctttcccgagagctgctccggtggaagcccttggattctccactggcactttcactgtcactgtccctgcagctgttctgtcctggcttgagctgtctgagtgccttcggcattttctttctcttcccaaggtgctggcagagattgcggtcattttctcgatctgagctgtantggtgtgggtggctgagtctgctc

SEQ ID NO: 212383 - DNA, 744 bp, Homo Sapiens
ttttttttttttttttttaaaaaaagaaaactatatagattatctctttattaaaagaataatgccatgagtatacacaaacaaaactttcatattaaagttttgggaggtcacaggtttgcccatttccattcatagactactgggtctactgccaacaggtaagccctcgaaccttagatatagtcatgcaaattcaacccttacttgagtagacaagatgtgaaagttgaaggacacaggtaggatccctgattctattcaattacagtattccagaagtaaactttttggaggcagacttttaacaatgtacaagataggatagttttctgatcacagagatttgcatttctttctctgcgggtacagaccagtgtatatgtgtccatttggctggttttccattatggccgactagtgaatgctaagatttcataatgagaaagtcactgtagaagtttcctttcttgcttgggttttgaaaagcaggaacatgaatgaggaaatgaccaaaatcttcatctcagtggaaaacatacagtaaaggaggcaatccttctcagatggcattatctgtcacatgttctcttaaaaagtcaaagctcggggattctgggatgagcaggggacagatttcctggtgactcagtcactgtctctattctccaggtggtgacgatctgagcctcatccgtaccctccattttggttcttgtttaggggctactcactctatgctac

SEQ ID NO: 212384 - DNA, 683 bp, Homo Sapiens
  misc_feature (434)..(434): n is a, c, g, or t
  misc_feature (467)..(467): n is a, c, g, or t
  misc_feature (656)..(656): n is a, c, g, or t
ttttttttttttttttttaacatttcatttgctttccactcactccaccctgttctgttgttgttggcttagagtttaatctgttgctaaacactgggaagtctgggcttctcgggtgttagtgaggagagagccaaggtgggtctggggcagtggctggaccaaggcctccaaactgtgccctgtcctacatgcagtgcttggtggacatggagttggcatacccaaaggatgggccatactgagggaaaatgaaagtcctggtgtcctctgctgtattttggggtggcttcgtgcattgggtcagggttgcagtatttgggggcttcgggacaaaaaatttagagtagagcagtgtccttggctttggacagacaggaggatggacagaatgaccaaggaaacataagcaacatttgtggggtgtggtatanctgggtgtgaggatgagtgtgtgagagggtggnagggctccgtctctacctttgtttaatctgcttactgagttattggttttgttttttgttttttttttaagaaagctttccctggctgcttatcgccccaaggtcagctgtgctggctgctgcaggttcagttctgggataccagggcagtcttcaccaggcaggaggagcatcggaaaggtttcttanaaaaaaaaaaaaaaaagcgcttaacgc

SEQ ID NO: 212385 - DNA, 516 bp, Homo Sapiens
ttttttttttttttttttaatcattttttggttatgccaggtgtctcctgtgtgtccctccagatccctctccagccctagaaacctgagctctataaatgttgcctctctccactcatcttctctttggcttcaggttgagttcagccaacagatgcccctgtaggatttggacacagggagccaggggagaggggcatcagctgcctggttagcagggctgtgatgattcttctacctatgactctcagtgctgttgcctcttcctctggatcttggaagcttccatgctgaggtctgaaggtggctccctgcctcccactgatgtccttagaatcccatcctcacctaatacctggtattgaacactgcctttcttagatgtcatttaggctctcgtttcaattcccagtatgcttcctgcaaagacctcgatagatggactgaggggaatagtgcaaggtcctcccatccccagtattgggatctaggggcagggggtcccagctgtgcagt

SEQ ID NO: 212386 - DNA, 648 bp, Homo Sapiens
  misc_feature (606)..(606): n is a, c, g, or t
ttttttttttttttttttatagtcaaatatttatttgtattagcaattcaataaacaaacagaagctccatcacttttaagtagtattcatttagaggagtaataattggatgggaaggtggtgagcttagtagctcttacatggtgttctccaatctacaaaaacttttttccccttcaaacaacacataataataaagctaacaattatatagtgtttgccaagtaccagatactcatcaacatactttacagatttgaactaatttcaaccacacaataaccatgtgaggtagatgccatcataaactccattttgttaatgaggggcctgacacagagggcttaggaacttgtccaaagccacacaaataaaatgaagcagaggtgggatttaacccatgcacattgacttcagagtatacacacaaataaaaagctgttttgtttctcctgcatagcaaagtaataaacagtactatcaggtgggaatgggtaaaatttacatttgaataggggtttcgttatttcaaagttttggaaacaattgcaacaaacattgtactggcagttctgtttcagttttcttttttcttacaaatttanattaaatttcttttttagagatgggaccttgctatgttgcct

SEQ ID NO: 212387 - DNA, 735 bp, Homo Sapiens
  misc_feature (689)..(689): n is a, c, g, or t
ttttttttttttttttttagtctaagggatgaggaatttatttcaaagttatacaagtgcaaagaaatagatctagaagcagcaggggtttcaaatgagcaaaaatggaagaaatagaaagttaatgtttactgacatagggaaatcctcataagaggaatgaaaaaaatcgatttccaaagctaggaaaacatgtgggtcctacaagacttgcacgaaaaataattagatgtaaatgttcttaagaagaaaccgaagggagcggttaggatatttcaaatgtaagaaatacaaatgtaataagatacctagagaccatgtccctttttaataaacactcaggattttaaggaaagatgatgccttggagctctgtgcctttggcccgttggtcaaggtaattcgtcaagtgcaggcacacaaactggcctgcaagcacgttcaggggcttattttgtttttaaagagcaacaaccagaaggaaatgtctttaggtgccaggggtgagcacctcctaagaacacggggcatcttcagagccatggcatggcccagcaggagcaggggtcaccaccagcttttcttctcctttctcaggtggagacagacataagttcgaggtttctggaagacggctgcccacagagggcttgccttcctactcctcatttgaatcttttccatcatcnaatacctggcattccttttcccacaggtacagctcagtacaatctg

SEQ ID NO: 212388 - DNA, 649 bp, Homo Sapiens
  misc_feature (603)..(603): n is a, c, g, or t
ttttttttttttttttttcacaatttcaatttattatcaaaatatttccatctgatgacaaacctgaaaagacaggagatgcagagctacataggtgcagatttgcccttttatcagagacactctcagggacagatttaattttgaaagtccaatttgaaaaccacaagtatatatatctctagacaactgtccaatggcaatttttaccctaaagtttgtgcttaaatcttttcatcaatatgatttataagtttaaatagtctcaaattttcatctgtatatcgctttatagatcttggttcacaactgtttattttaagctgaaacttcaatattcattgattacctataataatagttactcataaatgtagttaataattaaatataaaaattattatttttacatttatataaatctctgaaaaataccaagttttgagagatagagcaagaaattgcttagaaaattgcaggaagcctgaagaatctcagcatcagtcaaagcaggtacaacaaaaaacaattttagacattcattttttgctttaagagtgcttaaaataaatgatcacagaatgaataactgatgtatggcanaaatgagtttaaaactatgtaagctccaaggccccaatgtgtataa

SEQ ID NO: 212389 - DNA, 720 bp, Homo Sapiens
  misc_feature (628)..(628): n is a, c, g, or t
  misc_feature (658)..(658): n is a, c, g, or t
ttttttttttttttttttgatttaagaaagaaattttactgtgtctttcatacacaaaagctgattaacaatggttaaaaaaacactactccactttttcacaggtgtacaaaaggaaatataatggaattacattcaacaataaagcttaaagttcactctaggtaatagttgcattaacattcacatacacaagcacagagtaagtatatttcaggagtcttagcatagcatacagcatacatatgggagattgatttcaggtaacatcataggtgttagtaagattagcaattcagagtgttatagaaaaggaaaactaaaccaaagagaaggtgtaggctagcacaccaagacaagtcacagaattagtagattgaaaaatctgctcactgtatgagaaaacaatatttttcttcaatttttgggtcttgatatatagttggttagagaaggttgtgtatcaaagtgcacataattgtttcttagaaaagagagagagagagagaaagagagatcattttatttagtaatacatgcaagaggcagccccagagtgacctgaaagagtaaagctgtgattggcaggtggccgatataatacagatgtttcaggcaattctcttanagcacttctgtagcagcaatgatcatttanatggctgtagactgaattctcttttgaggagagtttaggggaattgtattcatatttctctt

SEQ ID NO: 212390 - DNA, 658 bp, Homo Sapiens
ttttttttttttttttttgcttttcaatcaggctgctttattctgttgtggcaggagttcccgggcccctgggtgccacctctgcccactcccatcctctccccaagctcccatttctccagggtttgtccctgcggtgtgggcagaagcagcttcttgcccgtctgcaaaagctgcaaaagaccctttgcccggggcgtttcctttcccgttggggcttccactgacccggaggcgtcctagatgtagtagagcggcacctcgccacacagggtgttcacggccatgcccaggaaggccgggtcccctccggagggtgctgagcctgcatctcgcccctctgcctggcccagcttagacgtaggcactgcgggcttggcctgcagagagcattccatctggaagttgtggacttttctattgagagcctcaagactggggatgctctctggagctatcttcatgatgtagcagcaggtgccaggggctggcttgtaggcgatcagcagctgctggtagtcatacaccacgaggccagtggagccgatggagaaggtggcagtggtaaccaggtgctcactcagggccaggcgttgctgggcttccggcgccccatgtcatctccagaacatctccgtgtgtttctggctcatgtgga

SEQ ID NO: 212391 - DNA, 640 bp, Homo Sapiens
  misc_feature (24)..(24): n is a, c, g, or t
ttttttttttttttttttcaagangcagattgagtttaatgaacaaaaatctctgtataaaaaacatttaaaccttatcaaatgctttaaacacacacacacacacacacacacaaatccaaatccaatacacaatcttagaacattatctttgtgtacctcaacataacctgtaaaagtatttctagataaaactttacaagtgaagaaagaaaacccatgatgttacacttacacacttacacacacacacacacacacacacaatcattcttaaggaagaacaaaaacatggtaagagtgtgaacaggaagggaatgcatctttttttgtaaagcttatattaaaaaacacagcatgagtaaaataacttcctatgccaagagaagatgcagagagaggaaacagaaagcagggatgagactaactcattaataaatagtttgagaatgtcattcaagaacagtaaatttggggagttacagataatccccagttgtcaccacctcaaattctttgattccgataactaatgacacttaaaaagcatctatgtgttcatttcttgtaggtcttgatttgttcatcattatttaggtgtgctttgtctctttcagtggttattcctcagttcaactca

SEQ ID NO: 212392 - DNA, 556 bp, Homo Sapiens
ttttttttttttttttttaacatttatcaaatgtttattaagtaccagtcacagttctaactgcttagcttctattgttacttaatcctcataaccctatgtgttattagtcccattttacagataaactgaagacaaaggtaaaataacttggccaagatcactgagctagtaagcagaagggctaggatttgaactcaggcagtttggttcaagagcctgtgcttatactacactgcctcctaccagcacacatttaataagctgcatgcaccctacctatgaggcttccaacagtccacatgctcaaggaatctagggttgccaagagtctttcagtgtatttaggtcattaggggagccaaagtagggccatgtcccgatatgtaattcctacaataactcactatcagctcccaatccatgctgcagttcagatttctctaactcatgcctgattctctcagttgctattatgctcccttgcctcaccgtggaacacattacttttgtggccactctcaaagtccagtactggctgccgccgtacccaatc

SEQ ID NO: 212393 - DNA, 657 bp, Homo Sapiens
ttttttttttttttttttaaccagatctgtcttttaatagttaccagaatttagatgttaattccccagaggaaaaatgtccatggcacagtttttctggaaaagttcacatgtagacagtgaagcttctgaagttaggcgtcaaattagtagtgacaatcttttttttaatcttgaaagtccctagttttaaagaaagtagaatccatctggggcatgtctgcatcacagggtatcactcaagagtcatcatcaggccaaaaagactctgaagggaaccaggagggtttggcccttgctgtggaaagatgctactgaaagtataagagaacaccctaatgcacgcgtcaggcacgaaaccgtaccatgccccgctaagacatgggaccagagaacacgtcaacgtcaggccgctccaggaaaaccatccacaaagacaacagaagctaacccgaggtcgacactgccatgaagagtgttggctgaaaccgcagttaccagtgtctttactggacgcgaacatccctaaggacacggctgtgctgcttcctaagcatacgtgaccacgatactgtctttccccgggtctccttagcgccatcactgcaccaggcccagcatgcctcaagtcctccagagcttctcctgagacagact

SEQ ID NO: 212394 - DNA, 627 bp, Homo Sapiens
ttttttttttttttttttgggagaccagtctgcctttattcctgattccctccatgggtatgtgctaaaacttcccaattctactaaaggtggtggtgtacattttgggaagcgcactacataggatcaagggcttaggtaacagctggtttaacagattgccacaaacttagtggctcttaaaaaaacagaaatctattcgaaagttctggatgcttaaagtctaaaatgggtccacagggctgcattcattacagaggctctcagagcagggaggatcagttcatttccttgctcttttcagcttctaggtgtgggaaggctcgtggctccttcctccatcctcagagcacataactccagtttctgcttccatcatcacattgccttctcctgtagtcaaatcttttgtctctctcttaaaaggatactacctgtgattacatttaaggcccacctggatcatctaggatgttctgcctcatcccagcatccttatctgcaaagtcccttttgccatataagatgataaaaacatgttacatgctggttccttcccaggggctcctgactgactgacagatagatgataaacactgttactgcaaatccaagtaatgtccctcc

SEQ ID NO: 212395 - DNA, 640 bp, Homo Sapiens
tttttttttttttgttttcaactattttctaattttcaacaagagtgagcttgtacataccacactaacccaaagaggggaggcagaaaaagacatcagcaacggtctttggagtttggcctactggctgccaccctaaagtgggagataaaactctggaatctatcttgtatctgttggccaaattgcttaattccttcctattctcttcttgtaaaatgaggcactaatatcttaccggccagctccaaggggatatagagccaactcactcattcattcaacaagcaacgaaagccagctatttgtgtggggacagtgtcaggtgcaaggatatgtggctgttcacgagccggccctagacggaaaacactctaaggataacaatagctgctcttgattcttatttctggggtagcagtgggtcagtcaaggcaaagccgggctgtcatggtgtcctctttcagggagatgtcatgggcacaggcatggggatcagtcttgcccctgggggcaggcacaggaagtccaatgcataaaacctttggctgaggcttacttaaggttcctttcctttttttctttcctcccttgtacatagtttaaactctccacactaggtcattcaggcctggagtca

SEQ ID NO: 212396 - DNA, 627 bp, Homo Sapiens
ttttttttttttttttttgattgaaaatgatttattaaagtccaattagtatgcttttcatttcaaataatccatatagcctccagaaaaatatgcacatgtgtaaaagtccacgttcatttctttcacttccaatataaagtattctgtattttgtataaagtatgtgcaaacacctttctgctaatcgggtccccacattcttttcactacaggtactttacaagtctgccctctgctcaaacactaaccgtgcactgacatcctccttcctagacagccattcatctcccggacttctttctctcagacatcctcctgacctcccctgacctgcttcaccactgtgttacctcactggttacttgttacagcaaactgatgcaactactagtctacctgggcaacatattaaacaggtatcacctaatagggtggcagcctatcggggtgattcctggcgaatacacagtaaccaaccacatactgacacactcaacccatttgctacagatggacccacactaattgatatgacaatcctttattcactcggcacatttggtttctttgcattttcttccattttacattgcaggtgtggctaccaagagctggataacgagt

SEQ ID NO: 212397 - DNA, 711 bp, Homo Sapiens
  misc_feature (683)..(683): n is a, c, g, or t
ttttttttttttttttttgaaagacactcatttatttgttaataacacaagccaaacaaaaacatatctgggggatgaatctgcgaaacctactagggttaaaattttacttctcttaattgtttggcttccaaaacatatttggcttccaaaacagattcaaattcaaaaaatatttacggccagctgtggtggctcatgcctgtaatcccagcactttgggaggccaaggtgggcggatcacgaggtcaggagatggagaccatcctagccaacatggtgaaaccccgtctctactaaaaatgcaaaaattatctgggtatggtggtacgtgcctggagtcccagctactcgggaggctgaggctggagaatcacttcaacctggaaggcggaggttgcagtgagctgagattgtgccactgcactccaacttggtgacagagtgagactctgtctcaaaaaaaatgaataaataaaataaaaaataaatatgtacaaagtgcccactaggtagaaggtatatatcattagaatgagacaatgcctattaaatgttattgttgccgggtgcgctggctcacgcctgtaatccaccactttgggaggccgaggcgggcagatcacgaggtcaggagttcgaaaccagcctgaccaatatggtgaaaccctgtctctactaanaatacaaaaattagctgggcatggtggt

SEQ ID NO: 212398 - DNA, 627 bp, Homo Sapiens
ttttttttttttttttttaaggttttcacagagatttattttaaaccgtggcggcaactccgcattgagagttgtacattggtaatggctacacgtatattttggttagaggaaagcacagtgggaaagtgagcggagtaaaaacattcacaatattcagcagcatttgattgggggcctggatacagatgtttcaacatcctaggaaattcttgctcattaccacctaatcacattcaggaagtcaatgtcaggactggcagggagtgtggcaaatgccggaggggtccagctagaccacacgggagaaatctgttccaatgtcaggcttattacattctcagcctgaccccctgaagaatctcctcactttaaaaaaagaaagaaaaagatatccatacggtaatatgcccactgcagccaggtccagacttgggctgcagtccggtggatgtagagaatggaagatccgtgtccctggttagaagtagagcggtgggcaggcactaatgtggggccagcaccttccctgttgtccagttagtaacggtttttgtacatttcatataaagatttccttttgcaaaatgacagcaccttgaaaaacaaagtcatttaaaaagcaag

SEQ ID NO: 212399 - DNA, 649 bp, Homo Sapiens
tttttttttttttttcttcaccaatatttattggggcgcctattatgtgcaaggcactacactaggcgctggggaagatacaaagataaatctgacagactgccctcaaagagcttacagtctagtataggagcatacagtctctggagaagatattttaagtgtaactaacctcccccatcccacccccacaaaaaaaaagaaaaaacctactagacttggtttcttccatttacttttagtttagcagcttcacgtaaaaagcataaatctgaaagtcttttaaaatgcatacttttactggtaaacaaaattcattttcattagaaaaaatgctgaatatttattgcaattaagaaaaatcttcagccgggcacggtggctcacacctgttatcctaacactttgggaggccgaggcaggtggatcacttgaggtcaggagtttgagaccagcctggccaacatagcaaaaccccgtctctactgaaaatacaaaaattagccggacgtggtggcgggcgcctgtaatcccagctactccggaggctgaggcaggagaatcgcttgaacctggggggtggaggttgcagtaagccaagatcgcgccacttcactctagcctgggcgtaagagcagatctccgtctc

SEQ ID NO: 212400 - DNA, 691 bp, Homo Sapiens
  misc_feature (664)..(664): n is a, c, g, or t
  misc_feature (686)..(686): n is a, c, g, or t
ttttttttttttttttttgcaagttcatattttatttccaataggtttggagctttgttgatttttgcatttttgtaaaaaaggaaaaagttttcacttaattcattgaaagccctttcgtgctgagcccaagggggagcctgggccaggaccagaccctctcagccctcttgttcctaccgcagacacccggtgctgggggtgcggctgctcccctccgcccactctgccctcccgcccctgctgcatctctctctgtacagaacaatttttaaaatggaagctaagacacaatatacactggacaggcacacacacacgcacacaggcgtccgcccagaacagggcgggacaccagctgcactcagagagcaccaaggaatgcaaacggagcccctccgggtaggagggcagggcctgggcccccttggtcctcagtcctcagtccgcactcctccccgccaattgccctgctagctgccagagaggggagggggcagggagagctgggggcagctggttgggggcggtggtcatagaatgagtaccagcctggtaggcggccctggggccagggaggctcttgtggggagtccggggaggggcggcggggggaaggactgagggtggaccctcaggaacctgagggctggaactcctgggncttgcccctcaaggagcttcangggcc

SEQ ID NO: 212401 - DNA, 653 bp, Homo Sapiens
ttttttttttttttttttaacaattaggaattttttatcgttataggtgttgttaaaggactccagtagcaaagatcaaagtctccgaattttgcctttggagaagggggtttcatttcagacatcaaaggtaaggctctcaagtcaatttatgctctgctgggttgagtcagtcaggatacaaattaaggtccatatatttcagtgacaagaaggaaacggttatgtaaatacacaagtattaacatcaatctgtattaaattatgtaaacatatacatcttctgaggtcagcacatagatcctcttctttgagcagagctctactgaagcattgctcgaatctgtttggaagttgattcatcgttcaagtgctttgtagtgaacctgagggcatttagcagcccctccacactgtctggggcctgctccttcaaaacttttatgcagcctttcatatcgatcttggatgtcttgcagaaagctcccacagggtggacatggtcatagaggatgatgactcccaccatcaccctcatgcagaacatcagggtctcttcactcgtaaacctacttctgtactccggagtttccagcatgactttacagacacttgtcattgtgctgaggcagtctgtggtgttctctattggc

SEQ ID NO: 212402 - DNA, 685 bp, Homo Sapiens
  misc_feature (669)..(669): n is a, c, g, or t
ttttttttttttttttttaacaagcatggatagtattcatatgtaaaggtagtatcaatgagaaagagctggaagacagacctagctgtctgtcaggtagaatgagggtgaaggagatctaggatgcttcaggcattgcgcttgaacttaaaaaacaggatcagcaggccctgacttcataaggcccataaatacaaatgactagctccctttctcaaggtcattgaaaatatacagtagtttcagacatcacatgggtttgggcaaagggggcagatttccaagctaggtcacttaatggtatctcttgcctcaaaatagtcccatcaacactaatttaaattatttccacttttgttttaaagcttaagattctactcactgacattaatttgagctaacagcaatgtgtttgcttttaatgcagatttctctttaagagagataaaagggctatagtcactaacactttaatataaattagttaaagcaaatttctaacacttgagataggttatattttggaagtattgataagaatgactaggggatagaaggcaggtaaggaagttttggagaatgcagcatttgaggaataggtcacatgaagagggtatcatgagcatattgcctaggaagaagtgtaccaagcaattattgagagatcanagtacctttctccact

SEQ ID NO: 212403 - DNA, 469 bp, Homo Sapiens
ttttttttttttttttttcagaagccacgatgtattttatgacttaccctcagaagtcaaactctcatttcttcaatagtgtagtggttacacaagtcaggcctattcaatgtgggaaggaaccacacaagggtgtgaatagaagaaggcagggatggttgggggccaacttagaggctggctgccatgcaggggaagcctagaagcctggtaggggttcatgtaccctgccaccatcctcctttcacttgctattcctcttcactgaagaccccaagaagcatatctcatttcagaaaccagcagagatgatgacttataagtcatggaggaaggacgaggtggatttgaagagaaagccacaaaataggaagggtgaaggtctccagtccaaggaccaggtctggaagactggaaaaacggaacagatgacgtttagggaagggagacacaggctgccccaaggttc

SEQ ID NO: 212404 - DNA, 607 bp, Homo Sapiens
ttttttttttttttttctagggtggggagcatttattttaatttttgtcttgcagctctttgtagaggacctagcctttctctactgaactgaaggggtttggtcccatcacccgaagactggcccacctgcccacacaggtgggggcacaggaggtctgggaggccccaggaggtggaagttcagaggcctgcctggccctgtccatcccactggctgaggccaggccggagggccgaccccaggggccctctgtatgcaagccgacgcagacaagggcccagtgcatagttaagacacaaacaccacacagctgtccagagcctccaaagcactgtttatccaggctccatggaaccaagtgcccccagctgcctgccctagtcctcaggggggcactggcactacagtggcctcggcctgagaccctcgatgagccccagcctagcctgctccaaagccactgacacatgcatgtttagcccttggcccatcaagatggggccctgggaatgaactggctgcagaccctcctccatcccacacccccaggggctccatcagtcctggctagctcagcaccatgttaaatagcttccttgcaatc

SEQ ID NO: 212405 - DNA, 639 bp, Homo Sapiens
ttttttttttttttttttcctttgtaaattatgaaatatttattgtttagactgagtaatatgacatgaaacaacaaacctgcacatttctaatttataacaaatctgtttccttaatgggtggaaggaaatctgaggacagttctaaggagtcttgtctgctttcagtgcgatcttctagtcatactgaagacaatacctctccagattggtctttccccttcttctcctctccccggtcaacgtcaatcacatgcaccactccaggttttagaatcaggtcatccgtctctacctgactcctgttgtcctccacctccatgtagcttccttttgtttgctgggcagctttgctgaaggcttctttaaaacgacgtttgaattcaacatctggacagaagacatactcataaaggccaccagcgaggacagctcctatgatgggcccaacccaatatatccaatggttttcccaatttcccatgataactgcaggtccaaaggatcgggcgggattcatgctggcaccagtataattgattgcaaataaatgtccaattgcaacagaaaatccaattgctaaagctattgagccagtgacatcagtccgtttggaatcacagctggcaacctcgtgcc

SEQ ID NO: 212406 - DNA, 677 bp, Homo Sapiens
  misc_feature (613)..(613): n is a, c, g, or t
ttttttttttttttttctgggttgtgaaatttgtagtttttatttcattatacttttctgggtttttctaggttttcagcaacaaatactgacaaaaggaaatgaacagttttcagagacttactttaaaacagagttaaaggaatacacatgaaattggtaacagtggctgcctctggggtcggcatgggagcaggccttcccttgcagcttgcgccctcccgtaccttttaaattttgtaccaggcaggtattacttattcaaaaataaataaatttctacaaagaagatacagatatataaatactaaaaccacaggagctgagaagcagcgcttgatttcctgggggaaatcaagaaaaagtgctttcggctcctgggggagataagactccaggttcaggctgcccttttaggcccaaagcctccaagtcaccccaggacccagctagttccagtgtcttcactcagcaaggcctgctccatcggacacaaaactgatcaggagttggaccatctcctccctgggcatttttccctgcagtaggggtgggcaggctgtgggaggggctgcagtggacactgggcctctgagctgggaccacctgtgtnccctgggcctgacacagaccaggacctgatgcacgagtaagaatgaatggggcccaatcgccta

SEQ ID NO: 212407 - DNA, 694 bp, Homo Sapiens
ttttttttttttttttgtgtcacttaggatttattataacactaacaacaataacagagaaaatatacactgatacgacttataagacattacattcttttatctttggatttatttttttaatctaaggaatgaagactttgaaattcagttaggaggtccaaaaggtgggaaagggaaaggcttaggaagttctaaaacatgatatgtgagtagtatgattattaattatcttaatgaagaagaaaacagaaaaactgttaaagaactcaatgtggctaaggagaaagattgctcagaaaaaaagtgtacacacacaaacagcagatgcagagaggaacacacagagaggagtggaaatgtgcagctggagcctctaaaagtgccccaaacaagccaaacacacacaccacctagaccaagaaaagacataagaccaactaatgcatatcccaagaggcattccaaggagaaagaaaaaggaagtgttaagcctacgaattaatcagactggtagaggacgaaaaagcagaacaattctccatatcagaaaactaatatacaaacaggaaaggtcaacaaatacaacccccatggcttttttaatgttgataagaagtaagtccagaattctcattttatttctcatccttgagagaaaaattttccacaaggcaggtcaagattttatatg

SEQ ID NO: 212408 - DNA, 613 bp, Homo Sapiens
ttttttttttttttttttggagttctacacacttttattggaggggcaggcctgatagcaggctcacagctggtgaggctgctgatgtgtgcgcccttccagatgccccaggatccacaggctgtgttgggatgcaccttccccattcccagctgactacagtagtacagaaaaagggcccctctgagtgaggctgcaggcagtgctggccaagcagggctgtgtgactgaacgtggccgctgactcagaacagaggacatcctagggcagcaagcgaggatgggcaagagtattgggcatgccagccaccaccagccaaagctgcttccgtccttactctccgtgccacaataggtagcgtgtgcatgagccttgggcccagggacaaccccctcactctccatcttggttgggttggataagcccatattccactgctttgtccaggcaggctgcagcagcccttgtgacagggctgtggtcacccttagctagcactgacaagatctccatcatctcactctccatcagggtgctggcaatctccctcgaggcctccaccatgttcagcaccaccacagcaccccggtgctgcagctcctggttggagct

SEQ ID NO: 212409 - DNA, 616 bp, Homo Sapiens
ttttttttttttttttttgaaagctgaaaatttatttcactaatatacataagaagttcacaacaatgaacagacagaaaatagcagtatatacagaatttcactacttacagtacattacaatagagaaagcattttataaacagttcagtattggattaaaatcttttaaggatggctaattctattcagcaggaatctaacttctagacacccagcaaacccattcctatcagggtgagagagggcttttgctgttgctatagtgtactgtaaaaatatttgttccttataaatgaagtggaccacagcaacttctaaatgaacattatattcagtgtaagtctcatattattaaatttcagatttttgactttttagatcgcaattgtttttaaaaagcaatttaaatgtaacagtgtttactttgaccatagatgaagttttataataaaagtaaaactttttttttctgtttgcaaaagtatgaagcattaagaagcatggtgctatatatctctttatctacatttaccctggcccctctagttctgcatctaaacagaacctgtaatgtagaagttatgattatttgaacactttttgttttccttca

SEQ ID NO: 212410 - DNA, 643 bp, Homo Sapiens
ttttttttttttttttttaatggtgagcaggcaggtttattcagaaaaagctcagattcatactcgtaaaagtctgagaaaaacattaaaatgctattacaatacagttgacccaaacaacacaggtttgaactgcgcaggtccacgtatctgtggattttcttccacctctgccactgggacagaaagaccaactcctcttgctcctcagactactcagcgtgaagatgaggatgaagacctttaggatgattcacttctacctaacgaatagtgaatatattacttccttaataacattttttttttctctagcttaccttcttgtaagaatacggaatataatacatacaacacaaaaaatgtgttaatcaactgctttatgttatcaataaggcttccagtcaattgtaaactaactactaattaagtttttgaggagtcaggttatatgcagattctccactgagcaaatgttcagcgctcttaactcctgtgttgtccaagggtcaactgtatatatatttaagagttattatttacccagtagatcaagccaagaccaagttaggtttatgtgtttttggtttaaccaaagaaaatgttcagggactaaagcagtccatcaatagaacagactgcc

SEQ ID NO: 212411 - DNA, 690 bp, Homo Sapiens
  misc_feature (492)..(492): n is a, c, g, or t
  misc_feature (584)..(584): n is a, c, g, or t
  misc_feature (624)..(624): n is a, c, g, or t
  misc_feature (630)..(630): n is a, c, g, or t
ttttttttttttttttttcctgagagaaagtattttatttttattctgctttattcactttcatagctaagcatagatgccagtggtcacctgcccttggcaccatccttttgtagttatatatgtgtttgtacgattccttggtgcatgcctattttcttccccaccaacctctaagctccacaagagcaaggcccgtgtttggctcctccctggaaacctagcacctagtccagagcctggcacacacttcagaatgccacaaggagttattccatccactgccctgcctttgggcaggattgtccccaaccatcactggaagcctacgcactcccttcccctggcagtgccactagcccttcagtatatagattctgcctctcccagatggaaagtcctcctttatagctgaccagaatccctcctgctgcaagatggccggggccctttctcccgtcctttaaggggaattacagcagcacttctcanatttgggtaacatgccaatcatcaggaatcttaaaatttagactctggctcaccaggtctggaatgagacctgagattctcattcctaacangctgccctgtgacaacactgctgccgggccatgctctgangtacanggatatagacagcctgtttacccacgtcagagcagcccctaagttttcttccttgtctgc

SEQ ID NO: 212412 - DNA, 646 bp, Homo Sapiens
ttttttttttttttttttaattacaagtatgtaatttattgaagtactttttaaaaatctataatacgagcttttttcaagtgttggtatttatttttcttaatgtctgccttattacacctatgtttcattaaagattagtatttatagcacctccccaacaaggatgggctcataacaactgaaatatacaaaacaaatatataaaataaataacaacatcatgttaaagtgttttcaaaagcatcctctcatttcatcctcgactccacagtagtgaattcccaggctagagttgatatagtttgattatataaataacatgggcaaaagaaatcaattctaaaagtttttgtaattttcaactgaaacaggtcaagggcttctcaaggacaaaagaagccactcacagtttttggtaaattgttacgtttaaactcaggaaaacttgcacattaagactgcctgattatactttgtttagtaaacaaaaactaaaataaaaatttgactaaatagtttaccttaaaatcccataagaatcacttagaactgtatttttctcggaaaagtaaatactacaatttaccaaagggctattgccttccgatttttcttgggcctggaattagtacggtattacgac

SEQ ID NO: 212413 - DNA, 714 bp, Homo Sapiens
ttttttttttttttttttaactttactcataaaattttatttgaacaaaacaatttttgaaaatataaaaatttcataagaactgctttcctgttagatacaaaatttattttaaaaataaataattatattgacctttaccatcacttgtctaaattttactcatgtttattgtgaagacacagaggtgaattagaagagtatatcattatacattgtcaaataaagcgaaggtttccttatccaaatagagagaatatatatgtgattacttaatataaagcaaaagctatttctaccaaagaacagacatgcagttattgatctggaattggcatgattacaaactactctgcaattcttcctctccccaattaaggtgtctctcttgaactgattgaaagctgtttgataagtatacttttttcaagatggtgtgctcagttgggggtctttttattaaactgaaattctgtcattagctctgactagcaccagctgctgtataaattctgtgttgacgtagacctccattggtgttccaaatattgcagatgaatctctctctgcctccaaaatcctcagtcatgcagtatgaataattaacatctggtgtgggagatgtgccaagtgggacttttccttaatgtatttgatagattttagcagacagatttttacacatgtcaaaggacattgataaacttgaatcca

SEQ ID NO: 212414 - DNA, 669 bp, Homo Sapiens
ttttttttttttttttttaagtggcaatgtgacttgtcgtttatttcaatgaaaatttaaatgattcttacaaatcctctgaaaagtaaaactgatacttttataaacagaagtatatgcaaacagtcacaatatgcattaggacgactgacgatatttcttacatgccaggtagttcttccatcccagcaaacacctcttatctgaaagtgttttttctcctataaatttgcatctaaggtatttttaaaaagtcaaaaacagtgcagagtaactttgaattgatcaacaagaatattatacaattgtattatagttccactccgaatacgatagctaaaaaccaaatcaaccttctctttacagaacacaggctccaaacataatttcttaaatcatggtctgccactgaatctggctataaaaccttatcttgcactaaaaggatctgtagctttcccagctgagaatggagttcagaatactgaatcaacacaagaaaagagagaaattggggatgaagaaaactcagctaaatttcctataggaaggagagattttgacagtgagtagtcttttcaaaattcaattcttacatcctaccaccattaaacagaactctgagttaaagtgaatttggatgcaatcataacaaaatcaaataagacc

SEQ ID NO: 212415 - DNA, 644 bp, Homo Sapiens
ttttttttttttttttttacaagaagtttgtctatttattaattaattagaacaatggtgaatggttctccaataagcagagaaaataaaacttataatataaacaaataaccattcattcaacatttattgtggcagtttagatttaaataactttatatcaagggctgtatgattctgaaacaaataattaaaaatcccggaaagtcttttctcctgaacacatttaagaaactagaaatcactttgggtatgatttgtttagaagcaggaagatgaaaagggtagcctgtagaagaccttgccaccccaagaaatcactgatcttattgcttggtccttgggggactcactctccttctgtgccaggacacgggtacctgcctctttttttccctagatcattggaggtatcgaccactcgctgtacacaggcagtctctggtatacacccatccggcgggagtggtattatgaggtcatcattgtgcgggtggagatcaatggacaggatctgaaaatggactgcaaggaggtaataaaaccaagggagagcctgggaacataagggggtaggcagtacaatgtgaaggaagactctggttatcatgttgggaggatgaggcagaggtaataggacctgc

SEQ ID NO: 212416 - DNA, 722 bp, Homo Sapiens
  misc_feature (673)..(673): n is a, c, g, or t
ttttttttttttttttttcaaaatatctaatagacttagcaatcaatttagaacaaatatttggcccttaatatatctttagtgagggaagtagcttttatttcctgcttgtttaggttttctgttggtacataaaaacaaaattgctgtctcagactgaatctacttgaatctaggaaggcacatctcatccctattgtggtttttagggacacttttctctttcccagagatgagaggaccaattcaggacagaagagccctcgtgaataccaacgtgctagctcaggttcccttctttcctccatcagagctattggtagggttttaaggtcgtgtgtgcatcatgcttccaatgtcaagagatttcctcaaacagcctgtttactagatgaattttccagctggtgaaatacatgagctttgttgttttcctggtcttccaatagcctgtcattattgttagatattatggcacctgttgttgaatgtaggttcccttacagccctggtctagatgatcctagatggggtgagacatatgcaagccattggtatgtgcataagcagttgcaatgaaccttaggctgacttggtagtaggcatttgtctttctgttcatgcattgaataaacatttttaagaaccatctatgtgccaggctttgtgctangcactgacagtagagagatgaagacatagtccttgcacttaagggattc

SEQ ID NO: 212417 - DNA, 664 bp, Homo Sapiens
ttttttttttcatttcttataaatttattacataataatattataataattattatcaataataataatataagaaacatagatctctgtggggcgtatcacaacgtcagggtcaggaggcctcaggactggagcagggggtgaaaccccctggatggaactccatacaaaaggaggtgaagcggaactgaccctgtaaagttaaaaacccaaattgaacggaaccaaaacccacaggtgagtgtgagaccgagtgtgtatgtggcagtctgttacagtgactgctgctgtgtgacctggactgttggcggaaggatgagtgggtgtgactctgtgcccagggagtggggccggtgggccagggcggggcgggcaggcacagaccggcgtgccaggcccctgggttgtgaaaacttctgttttctttttttttttattttattaaaaaaagctagaaatataaacagaaacttgtgagtgacgtggatggagcttagtccagactccaaaccctaggtttaaaaacgtcccagggccccccaccccacaggtcatcgctgagtgtgaggagtcacagtgtggggggctgggcaccctcgggggtctttgactctccccagggcctgtggtgaactgactctaggggtccccctatgatgccctc

SEQ ID NO: 212418 - DNA, 697 bp, Homo Sapiens; identical to SEQ ID NO: 46302

SEQ ID NO: 212419 - DNA, 671 bp, Homo Sapiens
ttttttttttttttttttactggtaaattcattttaataatgaggggaaaaactttagttattaaaaacaaaagaatgaatacacatacacacactaaatgtggcagatgtttccaggagagattagcaacagagaggccacatgatcaaataaaatttacacttttgatgggattgtcccctcgcggccacccaagtgtttgtggaagaaagtctggagttgtttccaagcatccacctgagccatggcatgagccctgggctcccctccccagataataggactgcccaccaaggcatgcagggaagcccgacacagggggaagtaaggaggctcaatatagtgccctgtctctgggtaacagatgatctggggctttctcctcccatgggcctgcaagcgtttacaggcctcattagcatagaactcactcttccagttgtggtcatcctgacctaccaggaacaggaaggtgctctctgccctttccacaggaatgaagctcttctggtcaggtccttccaaagggctgttcaggacatccacaatgtctgcatagccatctttggtcaccttgatgcgatttctgttgacgcccacagggggcagggtctcgcccttgtagcgtaaggttccccaacattggccacagaggcgttgatgacgacag

SEQ ID NO: 212420 - DNA, 690 bp, Homo Sapiens
  misc_feature (618)..(618): n is a, c, g, or t
  misc_feature (683)..(683): n is a, c, g, or t
ttttttttttttttttttcagtctttaagaaaagctaaggcttgtttggctttttgtttatttttaggtttttggtgtcctcatgacctaacctcatcccagtgagtagagactgggaggggagagcagcagctggagggcaggctgggagcgcttgtgagggagaggagctatggacgtctgcttctctgccaagggagagagtgaggtaggcctgggcccgctgacttcagggtgaggccacagctactgcagcgctttttatttatttatttatttactgagatggagtcttgctctgtcacccaggctggagtgcagtggtgcaatctcggctcactgcaacctctgcctcctgggctgcagtgattctcctgcgttcaagtaattctcctgcctcggccttctgagtagttgggattacaggcatatgccaccacacttggctaattttttgtatttttagtagaaatggggtttcaccatgttggcgaggctggtctcgaactcctgacctcaaggatcctcctgcctcggcctcctaaggtgctgggattgcaggtgtgagccaccacgtctggccatactgcagcactttaaaggacggtgtctttttcntggacagctgagttctcatcaaaggtcggggctgtggatacactggagagggctggacatggtcncacacac

SEQ ID NO: 212421 - DNA, 625 bp, Homo Sapiens
  misc_feature (607)..(607): n is a, c, g, or t
ttttttttttttttttgtaaggtatattatttattgttagttacatgtggtcaatggtgacatactttcaataattaaaaatcgaataatactgaaataaccacagcagctttcagtataatttgcttaagttgttctagaaaacactgctaattttttgtttctgcagagtcaagtatagaagtgagcagattggtaaatttataaacatcatggaaagaattatagagaggaactggagccactcgaatgccatttggattccgcttgtcacaaaccactcctcttttttctagttcttggaaaacatcttcgtttggaacagaaaatgttattgttagctggcacccccgctcctctacatgagacggagtaattatgttcacaactggtttcttggttgctgctttatctttgccatagttatgcttgatcaggtattccagatagccagttagcaaaacagattttttccgcaatgccttcattgtcgcttgcttaaagatctctaaactagcatgcaaggaacagaccaacaaaatgggaggatttgaaattcggaatccacagaccccagggattaactgcagtttgttatccatcttanatctggtgctgagttcat

SEQ ID NO: 212422 - DNA, 608 bp, Homo Sapiens
ttttttttttttttttttgattcctgagacacaaaaccatttattttttggttcatttcagtatctatagcagtgcacaaataacacatttccatccacatgaatagttcccaattgttggcgcaaattaatcttttacaagctactgagcagtgaggttagaagataaacagtagatgaaatcgtacactttcccctgtatgtgaactttcttattacaataaactcctacatttgagctcaccacatccaatgactgcccctctctgttcatgtggcggccccggctgccccctgccacctctgccctgctgaggtagttctctgatcagccacctgggtggggcatgctgccattttcagtttggaaggaaaagcctgtaaatctgcttcctgggaagagagacactgctgaattgtcatttgcctccagaatgcagaaaacatcagtttcattgcagctcatcagggttgggaacacctgccacttcctttctcggttgcaattaacatggtgcatcttggcattgattgattccaagcagcctaacactgccagagtcaaggtttacatgaacagtacaacctgagatgatttttcacagttt

SEQ ID NO: 212423 - DNA, 674 bp, Homo Sapiens
ttttttttttttttttttaacaccggaaataatctcatcatttccaaagatgtcttcatgtcccatcaatgacatgctaccagacatatcagattccacaggataatggcaccaagctacccaagtagatgtttctggtattctagactgccgttcatgcttgtttcctaaagtatacttaaaagtttcaaatacagtttcacttagaaactgcaaccctccaagtaatgttatgtttacttaggtattaatgttatgtttacttaggtatgtatcagaggcaataatttccaaagcagatcttagaatataaccaatttgttagataactttatctctatcacatctgtttacaagcaaagtattactttgtctggacttatttcatcttcagtgtctgggatcgtgggcaacagagcagatcgcgttaagccccaaaatttttgaggtgacatgtcttttttggtggccgtaaacttccatccaatatggcttgcacagatcttacactgggcaacagtccaggcatacccaggaaaccagctgtgttctgtagaaggccggcctatcagattcaagttgcaagccttatacacagtaagtgtctcatgcacatatccatgaggattcacataagctgccatcggcccacataaggataaactgaatatttc

SEQ ID NO: 212424 - DNA, 691 bp, Homo Sapiens
  misc_feature (616)..(616): n is a, c, g, or t
tttttttttttttttaatttataacagtcccactcacctctatttattcattttgtgggaaaacccgacctcccacacccccaagccatcctgcccgcccctccagggaccgcccgtcgccgggctctccccgcgccccagtgtgtgtccgggcccggcccgaccgtctccacccgtccgcccgcggctccagccgggttctcatggtgctcaaacccgctcccctcccctacgtcctgcactttctcggaccagtccccccactcccgacccgaccccagccccacctgagggtgagcaactcctgtactgtaggggaagaagtgggaactgaaatggtattttgtaaaaaaaaataaataaaataaaaaaattaaaggttttaaagaaagaactatgaggaaaaggaaccccgtccttcccagccccggccaactttaaaaaacacagaccttcacccccacccccttttctttttaagtgtgaaacaacccagggccagggcctcactggggcagggacaccccggggtgagtttctctggggctttattttcgttttgttggttgttttttctccacgctggggctgcggaggggtggggggtttacagtcncgcaccctcgcactgcactgtctctctgccccaggggcagaggggtcttcccaaccctacccctattttcggtga

SEQ ID NO: 212425 - DNA, 661 bp, Homo Sapiens
ttttttttttttttttatgcttaaatcatctttattcagctcaggggtggggtggctgggagcatgaacttcaggtccaggaagatgggtttggatccagtctttgccatttgctctctgaaataacactcaaaacatttcactcctctaagcttcagtgtccttataaaaaattgggtaaacaatactggtcccgtgacattgtgtaaagattgaatagtacataataaactgtattaaaagattttgtcaaggtgtgtggcacatggtatgtgctcggtcaatagcctttgtgtgtagtaacggctctggtagtaattttgctagctggagagatggtaataattgtgacagcaacaagtatttttatccccatttcacagatgaagatataggctcagggaaaataaataaatatccccaagagtcaccgggtactgtgcccaccccaagacacatcctaagacctggcacatgttaattttaatgattatctgggtgaatgtattaataaaaggggaaagtggagccggtggcatggggggtggtgtgaatgcccaccgaggtctgaagtggggtgcagatttgttcatcagcagaaagttactcgggtcatgtctgcagtggggggctcttccctagaggccttggccggctgcct

SEQ ID NO: 212426 - DNA, 682 bp, Homo Sapiens
ttttttttttttttttttaatcaaatcgattctgacaaaaggagtttattgtcttgcttgttaaaaggctgaccaaaaagaaagtaagtctgaatgtttcagagttgggagaaagcctgattccttctgaccctgagatatacaaggaaactgaacaaataccaggcagcaaaatactgagacatttaccacataagaaagcattcttacatagcagttgagtactgggaaggttgttggggagggtattattcacaaacaactgtcaaaagatatgagaccaccgagtttttctttttctaaaaatcacactgagtgatattattctatcaagaggatattctgaaatacgtgggctatcgaaaaagatgtaagtacattttaaaaatgtttttaaaagcatagtcaaaaccattcaaaagagaactcactctgtaaaaacgattctcatattttttcatgagattatcacttggctactttaggatatttcttacatgcctggtcttcatcctgacatatgcagatgacacaaaatacttgggcttatgtttttacagcttcctaaaatataatgaaaactatttcctctgacactttgccatggggctctaggatacttttgatatatttcctaaaaatatttaatttagataacaaggaccaatgacaagccagaatt

SEQ ID NO: 212427 - DNA, 690 bp, Homo Sapiens
ttttttttttttttttttcctttaaaggtttatttctggcaaataaaaaaaaataacttaatgtggttagataaattaatgtatgtgattagatacgacacagggcagagctgaacgttcctgttttcttctggatcttgaaggttggtgagaggccgctgaatgagacccagcctcgtgttttgtgggatgaagagatgcagacaaagtgactcaggtacactgatgctccctggagggctgggaggtgggctcagaggaagaggccgaatccaaaccttttttattgaaaagaaatagctcttgtttgtagcatttaaaagaatcaacccaaactctgcacacactcatccgtagtgaccataaacatgacataccaagcagaggctcagaaagatggagcaacagactgaggacattttcaacatggtacttggggatacctttgggaaagatgccttccccagcagaggccagcactgtggagagataggaccagagccactactggcacagttgtcaagatcttttgctttctgaactctggggaccgctgccttttagcctgaggggaatgtctccaaatttcttgggttggtaagtctcagaagcagccagccccttggtcaacagagggtactttcctccaggaatctgagaatggaacatgctgatagtctgtgctgagat

SEQ ID NO: 212428 - DNA, 699 bp, Homo Sapiens
ttttttttttttttttatcaaaagtttgttttattttcaatacaagataaataccatgcttgttactagtgcagtttaaggccgacaatggccatatatcaaactgccgaacagtcacctaaatgctaaagaaaggaaagacaaagtaaacattaaacacaaaattgcaattacaaacattttaataaaatggaatgagctttttaattgaagctaatatgaagtctaattctcatggacagcaaaaaaaaaaaaaaaaagtctattagatcaattatcaccttacctttttgcacagaaatcttattgtgaagtcaccatagagtcaatagctaaaattttaagactttctttggccttctgatattaaacaaattatttacaaactgtgatcagtaattcgtggatattggtaaaatgatacaattttttgttgttgttgttaagggctttccattaaaaattgtaaaacaactttgtaaggctgtacagggctgtaaactactttgctaatataccatgggatgcagaggaaggaataatagaccttttttttaaggctaaagttatcaatgttatagatgcattccttaaaatacattatgatttatacccaaaggatcctttcccattaaataccacctgagtactacaattttcacagtaaaaaataaacatgaattcaccatagttatttta

SEQ ID NO: 212429 - DNA, 681 bp, Homo Sapiens
  misc_feature (677)..(677): n is a, c, g, or t
  misc_feature (679)..(679): n is a, c, g, or t
ttttttttttttttttttcggaattttatcatttattacaagaaaggggaaaaaagaaaaccttattttgctttcaaaaatacctgtgcaggtggcagatttttaaactatactgagtcaacggtgcaggtaaaccaccctcgggcccagtcctagagtagacacaagatcgcctgggagggccgctggcccctctaacgctctggctgtcagacttgggacaagtcccttaaccattaagtatatttggtccccaagagtgttgggagaagccactggaaggctgctggcctttccagcttgaccccgacagccttgctgtggcagaggcaggctgtcctcggtaaaggaggggagggggcattgcacttgagacattttagaatcaggagggagacagcggacagtggcgctgcctgggacagggtggggaggaatccactcctccccccaccccagccttctgtgccctgcacagaggtggaggcccagggcctgctccttctggaccgcccagagccatgggagtgggaggcccaaggggcagaggtgtgtgaggtcaccacgtgtgattgcaaacagcaaagaaaggaggaggagtgggggcgctggtggcagacgtcagggaggctgacgactgcgggggctccgactaccaaaaggcctcagtctgaagnanaa

SEQ ID NO: 212430 - DNA, 699 bp, Homo Sapiens
  misc_feature (618)..(618): n is a, c, g, or t
ttttttttttttttttttcaatcaggctgctttattctgttgtggcaggagttcccgggcccctgggtgccacctctgcccactcccatcctctccccaagctcccatttctccagggtttgtccctgcggtgtgggcagaagcagcttcttgcccgtctgcaaaagctgcaaaagaccctttgcccggggcgtttcctttcccgttggggcttccactgaccctgctcaccggaggcgtcctagatgtagtagagcggcacctcgccacacagggtgttcacggccatgcccaggaaggccgggtcccctccggagggtgctgagcctgcatctcgcccctctgcctggcccagcttagacgtaggcactgcgggcttggcctgcagagagcattccatctggaagttgtggacttttctattgagagcctcaagactggggatgctctctggagctatcttcatgatgtagcagcaggtgccaggggctggcttgtaggcgatcagcagctgctggtagtcatacaccacgaggccagtggagccgatggagaaggtggcagtggtaaccaggtgctcactcagggccaggcgttgctgggcttccggcgccccantgctcatctccaggaccatctccgtgtgtttctggctcatgtggagaccatgagcagggctcccacatcacacgacgatga

SEQ ID NO: 212431 - DNA, 681 bp, Homo Sapiens
  misc_feature (657)..(657): n is a, c, g, or t
  misc_feature (662)..(662): n is a, c, g, or t
ttttttttttttttttttaaggtaaaaggctttattattcaggatcagctcaaagtctgacatggacacaggcagggataattatctcattacagttgacctttggcacccatttaaaagtactagctttccaagtgagacatgttatacccagtagactcggtataatttctgacagccaaatgtatcccaatttcactcagtagggctgccaggagatgggtagggatacaaacaaaatcatctactttatcaatcttttttttttcatggatttttttcccccattggctttcaaagcaagtgagataaacagcgttactggcagatattggtcataaataacatcttcccaaagcccaacagtcaaaaaacaaacaccaaatataagcagattaggcagatttcctaaatattcagttaaggctatggtgtgcttggttttgaccagagcaattctatggcttccttttatttttctccctggataaaactatgcttacttgatccatgcaatttcagttgttacagctttaacttataagatcaaaggaattaaaaagttgtcagaatagattttcacataatgacaaaaactgacataaagtctacacagaactgacataaagtctacacagtcctcagggatatggatanaacanatgaagtttcatgactgga

SEQ ID NO: 212432 - DNA, 698 bp, Homo Sapiens
ttttttttttttttttttaacatgttaagatgttttatttcttaatcagctaatttgactgggaaacaaagatgccttttattcacattttctttgagtcgtgttactgtagtaaaagttccccacaagatttggcctttgctcacaagttttgcggctgccaattagtttccagagtcgctattttacaaaaatgcttctcacttttaaaaaatgtaattgaatgtctgttcatcacagagtttcttgtgttcaagcccagggtgttaaacatttttcaggttgacttgggtcagctttgaaaaatttcagacagtgaaacttgagaagggaccgtatgctatagtgtgttcctcacatcctgttaagtattaagtggatatttaaaatggagttgttatacctcttgactgacttaaagtgagccatatagtttacaagactattaattaaatgagaagattgcatgggatgcacatgtattttcataatcattcacattggcccggagttgccctttaattttcagactaattaaagtaacacattcaactgcaaagggtggatggctgcgtttctgcatagatgctaacactgatgaaagtgaaatggggaatttttcttttttaaaggaaaaggagtgggagaagaaagaatccgcctgagtggacctgactccattccattcatggctccct

SEQ ID NO: 212433 - DNA, 539 bp, Homo Sapiens
ttttttttttttttttttcatggtcaaacaatttatttactgtaaactttagactttgctcgggaaaacaactgaagctgctcctcaaatccctgcctaaaataccccgtgtgagcaaataagaggagtgggggaagagtccatgttcacagctgaaaggtccgagatactcaaaatcctcaagtccaagggtgtaggaaggaaaatctccttcagatacaaattaccagcagcaatatattacccctaatacttgaatagtgaggtagatacatggaaaagtcatgaaaatatagcagactcaggtcctctaggactaaagctctttagacataaacttacaaattccatgcaaagaggaactgaactgtacaaataacaaataatcactcaaataagttttctctctttttacagcttaaaaaaataaaaaaggcagaaggatgcccttccttctgcatatctctatacaattttacaattttattctaagtttattaccctcaagttaaatagtctgtttagtgttctgttggggc

SEQ ID NO: 212434 - DNA, 621 bp, Homo Sapiens
ttttttttttttttttttgagggtagagcagcatctatttaatataatttttatatagaaaatacaggcatatttaaaaatggaaacatgtaagaaagtatgtcacaaggaataacaaaatatatcacaaaataaaaaaagtaaccccaagtaacaagtttactaaacaagacccagcaccatgttggactttctttgcataagttccaggatgcccaggcactaccgaggagagatgatcctgcttttgggagagccagatggtcgtgcagtggttaaaacccagtcctccttttcctggaacagttatgtcccgtccaagaagaaagacagtgacatcggtttggtcttacacattttccaccatttaagcagggagactggcaaacagctgtatgacagcgagaccccgtccagccaggcgggcagtcacactggtaaggggccacacagcgacctccgttcagacagggaagaatgcagattggttcttcacagaggcgccccatccagccctctggacaggaacaagcatttgggcgttggcagatgcccccattctgacatggaaatcgacagacagctctgcaaataggaggtgatgtccatgttccattttct

SEQ ID NO: 212435 - DNA, 598 bp, Homo Sapiens
  misc_feature (565)..(565): n is a, c, g, or t
ttttttttttttttttctgggtggaggaacatgattttattggttctttcagttcaccacatccgactcgcgtctcggccctggcccgccttgcggaccttaaagcagtcagtccagggtttgggggaaacgtgctcacccgacggcagctcacaggaccccggagagtcctggcatggtatctcggtccggactctccgctgggcccacgaaggagaaaggctgcctcggattcctgcgcccaagccaaggtccggcgcccacggaggcaagtccggtctcacggtgacctcccgctggcgccgccttcgccgccaaccatccagttcttcctccaggccacgttctcctgcgtggtcgctgcctcctgcagagtggccagcaatagctgctgggtcctggccgcctcctccctgctccttgggtcctgcagtggcatctcctttagcatttcctgcttccgccgctctcccggggtcacgataacgaggagcgcgtagcccacgccagcccctgcgcccagcattgcgactgagatcagcattttccgcaaggaatccatggncgcctgcacagccagcgggagcgccacgggagc

SEQ ID NO: 212436 - DNA, 601 bp, Homo Sapiens
  misc_feature (531)..(531): n is a, c, g, or t
ttttttttttttttttttcatgcttatagcagctttattcataaaattcctcaaatggaaaaaattcaaacattcatcaacaggtgaatagataatcaaattgtaagataggcatatgacagaatactactaggcaataaaaaaggcacaagctacagatgcatgcaacatgagtgaatcttcaaaacaaagaaataatgcatgccgagattgtctttctgaagaaattcccctcattctttgggatcccgaggttctcaaaggcatagctggcaacaggccctgaaacagcttcttctggactaccctactagtcttggtagatttcctcgatctttggcattccttcttttcttccatggtcttcatttactgctgtccttcttgcctatcttgaattattctatactattatgaggagaacacaggttcttccatcctggaacttcagttctttgccttgctgggccaatatatacattgagccagattgtgtgcacactggtagttccaaggtgcaacaatcttcanaacatttgaggagtgtattagtccattctcatgctgctgtaaaggactgcccatgactgggtaatttata

SEQ ID NO: 212437 - DNA, 683 bp, Homo Sapiens
ttttttttttttttttttcaaaaactttattcttttctaataaaaatgatatatgttcattataaaaagtttcaaacacacatgagtctgaagaatgtaaagatcacccaaataccacagcccagaaaaaaaaatccttaacatttggtgaagatctctctatgaaacatacattatcttaaaatattcaatgttataaatgagctcatattcaacatatatcctgtagtctactttttgattcaataatattttgggaacatatatccatagcaataaacatatatctaaatatttttaaatgacaactgcatggaatttatttaatccatcttttactgaaggatgtttcagttgtttccaatgttttaatatcataaacatcatgaaatatacctttgggctcatgtttgaagacttggacaacttttattcattaggataaattcctaaacaaactgctgggtaaaggtgtatcaacatttaggttttcatacatgttgccaaattgccttctagaaaggttctaccaattttcactcctgccagtattgaacaagaattccatttttgtcaattgctttatctttgccaatatgggaggacaaattaataataataaaataaaataacacatctttattagctgttttcatgttcaaatagaggacacttttattttt

SEQ ID NO: 212438 - DNA, 676 bp, Homo Sapiens
ttttttttttttattattaggaagacaattttatttattgctttactaattaataacaaaataaaaactttgttctaactccacgcattccaaaatagtatagtttgacctatcagagaccacagccatggcccctccactaacttttcatactttacttggaagcaagttactattacagaacattaggctgcaaaaaagaaacaacaaaaaatttaaacaagtcatactctttttaacatcagtgaaatagtccaatgtatctgaaaatgaaaataaattgttttgaaattatctccacggtgactttgttattttcaaaagtacatatattatattacctctgcatataacctctttttgggggccgggttggggagacctaaaagagcgagccgatgaccatggcaggtgtaaataagaccttgctccaaacgtggcgtcttcttactgcttctgcttgcagcgtttgactctctgctttctggtgatccgccgcttttccatgtcctgggtgaaatatttgcttttatgattacatctcaaccgtgttgctgcttaggactgaatgtgaaactgatccctctcctactttatcttctttttcctgtgctgtaacgagaaatttaatgacttcagaaaatgtagagcccatgctgcaatgaaaatgtggcag

SEQ ID NO: 212439 - DNA, 690 bp, Homo Sapiens
ttttttttttttttttttgcttttcaatcaggctgctttattctgttgtggcaggagttcccgggcccctgggcgccacctctgcccactcccatcctctccccaagctcccatttctccagggcttgtccctgcggtgtgggcagaagcagcttcttgcccgtctgcaaaagctgcaaaagaccctttgcccggggcgtttcctttcccgttggggcttccactgaccctgctcaccggaggcgtcctagatgtagtagagcggcacctcgccacacagggtgctcacggccatgcccaggaaggccgggtcccctccggagggtgctgagcctgcatctcgcccctctgcctggcccagcttagacgtaggcactgcgggcttggcctggaagttgtggacttttctagtgagagcctcaagactggggatgctctctggagctatcttcatgatgtagcagcaggtgccaggggctggcttgtaggcgatcagcagctgctggtagtcatacaccacgaggccagtggagccgatggagaaggtggcagtggtaaccaggtgctcactcagggccaggcgttgctgggcttccggcgccccaatgctcatctccagaaccatctccgtgtgtttctggctcatgtggagaccatgagcagggctccacatcaccgcctcgtgccgat

SEQ ID NO: 212440 - DNA, 714 bp, Homo Sapiens
  misc_feature (606)..(606): n is a, c, g, or t
ttttttttttttttttttaacaggagagctttcattttattcattcttcatgtattcattcaaaagtgcttgataagtagctgcaatttacttgactgtcaaccaaaattgtgagaatcccagtatgatttcaaattgcccttttaggaaattaattagaaaagtgataacgagtaactttttgtcatcagttctaaaaagccatttgtgaatttacttttatacaggttttgtgacagtagggccaccagacattttgtattatacatgccactcctgccaaccatagatgtgatatttagagatgattctgtgcagttgccagagaaaacatgacatatgcataaacccaaagtcgtttgctagtgttgagtttaactctctagtttagagatgatcaagagttcatcttatgtggcagctccattggctggggtgctgtgttgagacatctcctgaggccaatatggatcagtagaaaaagtgccttaggatctgggcaagagggatacttggcatcctggctgttccatcttgagggctgcatcccagcatccttcaggcctactgaccaggagcattgtccagctgttcattttctcctgngtagaggagaattcacctcatgtgccgtgttccagcaggaaggtcaatctgcttgaaaactgcctgaggttacagcagttgtgtgggccgcccagtccacaggtcctc

SEQ ID NO: 212441 - DNA, 616 bp, Homo Sapiens
ttttttttttttttttttagcaaaacaaaactgttttatttatcaaagacaatgaaaaaattagaaaatacagaagaggttataaagcataataaattttattttttggaaatggaaaaatgtccctgaatagttagatgtaccttttagtagtaatgtctaataataaataagaaatcaattttataaggtccatatagctgtattaaataatttttaagtttaaaagataaaataccatcattttaaatgttggtattcaaaaccaaagatataaccgaaaggaaaaacagatgagacataaaatgatttgcaagatgggaaatatagtagtttatgaatgtaaattaaattccagttataatagtggctacacactctcactacacacacagaccccacagtcctatatgccacaaacacatttccataacttgaaaatgagtattttgcatatctcagttcaggatatgttttttacaagttaatcctaaagtcataaagcaagaagctattcatagtacaagattttatttgctaagctttacaaattaaactctaaaaaattattacaatgatactgaaagatattttattggccttttaaaagacaaac

SEQ ID NO: 212442 - DNA, 604 bp, Homo Sapiens
ttttttttttttttttttaatagtgcattaaatattttatttaaattaagaagtataacaaaatcacatacatttgttccacggtttgaataaaatttccaataactttcaaataatgcacacatagtatcgcatggatcaaattccgtacatttcaatatggtcatgagataggctgtattccaaaatttggtatataaatccatacataatatatactatatacattgactttaaataatctaactatgtcatttttaaaagtcaaagcaacttatttctaatgaaagttacaatatgcatgccatattgacacctattcaatagataaaatctaggaaaatcttttttgtgaatactatttatactggaatgcaaattcacataaaaatacttcctttaaagcatgttctatttcacacaagaaattaaatgtgagctacttttaaaattgcaagctttatttttaatcaaaccaattcaattttaagtttttagatcattctcatacaacttcctctaatttagctaaaaccatcgacagggttttattgttacatttggccttaaccttaaaaaacaaatttgtttacatttcatattt

SEQ ID NO: 212443 - DNA, 634 bp, Homo Sapiens
ttttttttttttaattttaaagaaggtatatttatttaacaaacatgtatgaactattcattaacaatccaggactgtggaggacaggggacagaaacaagcctcgaagagatcacaatatggtggagtgcatgcatggcacacctggctatctgaatcagacgtttgcctctgtgtgtgtgatgaagacagtagtgagtggaatggacagagagtaactgtaaattctgtagggaggaaaacgaacgtttactcattctctaacagtcttttgctttactatggtcatatacaacagttaatctcccatcctcagttcccagatacccaccagaaaaccggtaattaacctctggataaactttcactgattacagatgaggagcgaggcaaccttaagccataaacaatattcctacagtatgggggagccgcaatcatctgaatgccagttttcagagccagcctgtgaacgtttcatctgagggatgttttcccgatgatcatcttatcattatcgcatcttaaaagctggagaagccctcaaagccggtttggcacaaatgtcaactcaagggaggaatgccctctgtaacactcctggcagctacaggctttccacagcagcggaatg

SEQ ID NO: 212444 - DNA, 632 bp, Homo Sapiens
ttttttttttttttttttaaagaaggaagggctttattcggccgggagcattggcaagactcacgtctcaaaaactgagctccctgagtgagcaattcctatccctcttaagggcttacaactctaagggggtttgcatgagagggtcgtgatcgattgagcaagcagggagtaagtgactgaaggctgcatgcaccagtaattagaatggaacagaacaggacagggattttcaaagtgcttttctatacaatgtctgtaatctgtagataacataaccgattaggtcagggctcgatctttaactaccaggcccatggtgtggcgctgggctgtctgcctgtggatttcatttctgccttttagtttttacttcttctttctttggaagcagaaattgggcataagacaatatgaggagtggtctcctcccttagtggcgcatgcctgtaatcccagttacttgagaggctgaggcagaagaatcacttgaacctgggaggcggaggttgcagtgagccgagattgtaccattgcactccagcctgggcaacaagtgcgaaaccccatcacacacgcaaaaaaaggaggacactatggtaggctgcttgggacgtaggagctgtatctga

SEQ ID NO: 212445 - DNA, 690 bp, Homo Sapiens
  misc_feature (666)..(666): n is a, c, g, or t
tttttttttttttttcttatttgatgatatttattttctctgccaagctgtatagtaaaaggaaaataagtcacatctggtcattggcatttgtatcgtcattctgtaaagacaaaagagtacctatataagaagctccacgtagtgcaaatcgacatctggtaggctgctcgcccccaggcagcagctagagtctgtaattctctgcgtcatcctcttctttttcttcatttttgctttttcttcgcttgagttcttctctgaaattatatgcaaagagttgtgggtcttcatcacacatttttctgtatacatcacagaggctcttaaagtgtgagatggagagctggcggggccgaagagtagggtctatgtctgccaactctaacagcctgcccgtgctttccaagcgctgcgcttcagggaataacattctgagccctcgatggcagtatttccttcggaactgaaatacattctgaaccactttttccaccagcttgaatggctgctctatcttgggctgtatcaagggagtgaagtgcaccacgcccacgtccacctctggtttggggacaaagcttgtcctggaattgtaaagatgtgtcgaaattgcagaggtactgagccataacagagaggcgactacgctgtttgcttcctgtnatggctgcagtctctctgcacttc

SEQ ID NO: 212446 - DNA, 694 bp, Homo Sapiens
  misc_feature (596)..(596): n is a, c, g, or t
ttttttttttttttttttcattttgaaaaatgtttatttaccttaccttttcttggccaagtcaattgctttggtcatctgcacaaagattctaaacactggctttcagcatttctttttccaagcaaatgaaatttatcataacaagacagagctctgattttagtctctgtggagtctgggctctgatgacctaggctagtcatcatctaagcctggaatgactgtttgggacccccatggccagcttgaagctttccttcctcagccactctgggcccctgaagaggtcacatgcatctgtggcagagactgtattataacaaagttgtttaccccaaagtcagcaaacacatgtacctagaactcatcccaattgtaggttgctcaccagacaggttacacgatgtgcaccagttaacatgccataggaaaattacattccaagaaaaagcaaaatgctataaaaacaaaaaaaacaaaacacccaaaacagctctccctcctttgatctgatggtctgcagaggtcctcaaatccacacactgccactcttcaagaccaaccgtccactgggccttcttaatctcatccanagtcgcattcacaactttgacaggagcttgggttcttcatgtggcagctgcaccatgtagtgtcttctcactttgcagactctaacctcaagtctctc

SEQ ID NO: 212447 - DNA, 674 bp, Homo Sapiens
  misc_feature (527)..(527): n is a, c, g, or t
ttttttttttttttttttcaggtgaaattaaactgatttaatcagcacacattatatacatgtatcaaatttcacactccataaatatgtataacttatatgtcatttaaaaataatgataaaattatatccagattcaagcgcctcttgtagcgcttcccacagtcctcacatttggatgggttttctccactgtggtctctttgttggtctttacagtatgaccggcatacaagcctctttccacagtcttcacatttcaatggctttctttggcagtggagtttcttatgattcaaaatactagaagcatgtctaaagctcttcccgcagttatcacagttataagatctctctcccgtgtgggttctatggtggaagtcaagacctgacttactaatgtagcccttcccacactcctcacatttgtatggcttttctccagtgtggactcgttgatggaccaaaagatatgaggaccatttgaagctcttcccacattctttacaattatatggtttctgtcncatatgaatcatctgatgcttatgcaaatctagcctatcaatgaaacctcttccatacttttcagatttgtacagtttctctgctgtgtggaccatgcaatgcctattaagactttgactaagacagaagctcttaccacatatttc

SEQ ID NO: 212448 - DNA, 638 bp, Homo Sapiens
ttttttttttttttttttacaattgtaaaataatttatttaagtattgcagaaccaattaataagaatctgcaagttttccccaagaaactctggaaccatagtgcctaatgccctttaaaatcgatactaaaggagagagaataaaaggactgcttgatgtgacagtcactggtgcatccctatccagtcagaaacaaaactgtagctccagaattgacctgatgatgagcatctgcagctctgccttccagggtctatctcctctctttcactggcgtgcaggaactgcagtaaaatgaggacccccagagcgactgtccttaccaggactcagaacgtttggcctccgtattctggcatccatttctggagttcgtcatataaagcagcctccgacctagctccaatggaagcacctgcatttggagtcagtctctccagaggcagatgcttgggcatgtgctcaggaagagcctcgaggaaccgtgattacgcagcagcccaaggctgtaacaatctatttgttctcaaggcatatgagtcccaggttcgaagccgtccttccaccccatgcatatcctttgcttcaacagcagtgaggatgcctccaggaagtgtattgtactcagggcttac

SEQ ID NO: 212449 - DNA, 661 bp, Homo Sapiens
  misc_feature (516)..(516): n is a, c, g, or t
  misc_feature (542)..(542): n is a, c, g, or t
ttttttttttttttttttcattttaactatgtttattgtgcacttagtaggccagatactcttctgatatttgagaatacagtggtgaataacacaaactccatgctttcaagattcccacacccagatactaagacatattaaaatttacagcaattaaaacagtgtagtttggtacaataacacatatagcaatgatacaaattaggggaaaaaaccctggcttctataacaagtgagtatacattaaagacagtattgcagaatggcttcaggattaatttgattaatttagagagagcctatttcaggtcttcctagctcatccacacacatcacctttcagtgttctttataggtacttaaaacttaaaaaaaggcccaggcgcggtggctcctgcctgtaatcccagcactttgggaggccgaggcaggtggatcatgaggtcaggagattgagaccatcctggctaacaaagtgaaaccccgtctctattaaaaatacaaaaaaattanccgggcgtggtggcgggcgactgtantcccagatacttgggaggctgaggcaagagaatggtgtgaacccaggaggcggagcttgcagtgagctgagatcgcgccactgcactccagcctgggtgacagagcgagactctgtctc

SEQ ID NO: 212450 - DNA, 576 bp, Homo Sapiens
ttttttttttttttttttgaaacagacagccctgtatttctaaaaccattcaaggctccttcattaattggcttccccccaaaagaaagatttctttattaagaaataccagagagtgaaaaacccccaacacatacacatttgtaggctcacacaaaagtgcagagatttacatattaaattgcatttaaattagaaaatagatttaaaaacaaaatactttttttctccaacaaagtaaagagatttggtcagtaggaacgggtgctttatgggtaaaggcaggatggtcaggacagggagaatggaatttagctgctacggaatcagaatccacctctaacccaacctcactcctggggtaaaagcaaaggaggagatgatgatctcagctagggccaggaaggcctcagagctgaatggacatgaagaaatggctcaccacagccaatttccacctgcccccagaggtttgggatcagtgccaaccatcctggcctgggaaagtagggtgcataggaagcttgaggaagaaggaggaaggggagagttggagacagtgtcagccattgaaaa

SEQ ID NO: 212451 - DNA, 657 bp, Homo Sapiens
  misc_feature (638)..(638): n is a, c, g, or t
ttttttttttttttttttaaagattttcttttccccccttttccccctcccggccactccggtttgtgtttgccacaagactcataattcctttagaaagtggagtcgaattcataaaagtgatggggggagagcgcggagagggaaggctgggagccccagggagtcttcactacctacactgccgctcagctcccggcgcgagtggaggtcggggtggggagacgcgactcctgcccgggatggctgacactctgcgagccccggcggcccgcggccgggccgggtgactaggcggagggcgcggagggtccgcggcgggcgggtggcgctgcagcagcctgggcacggctgccgccgcccgcgggcgagagtgtgcacgggtgtggaaggccggagtgcgggccgtgaggggtgtgcgcgcttgagccggagcggggctcgcccctcgtcggctcccgccgcccagccggtgatcgctctccggccgtccccggcaccctcggccccccacggcggttggtccgggcgggggaaggagaaagtgagactcggtgtcatcaccaatccgtcgccagaaggggaggaaactggaatccagcagcggcgagcagcagctggacggtaacatctggaanatggaaaggcgactccccc

SEQ ID NO: 212452 - DNA, 581 bp, Homo Sapiens
ttttttttttttttttttgttatagttacttcaagtaacacagcttgcttcatataaataagttaaaacatctattttttttcaagacaaagccattcaggacaaagagatgaacagaaagcagatctacttatacaggcgctataatggcaataaacaggctcatgattaaaagatgaattagggcaacgagaacagggcttcttcacagaaggaacacaagggagtttcagaaagtcaccttagtactgacactacgcgggatccgctaatactgctcagtactttaaacgctcagatactcagggacggaaggcccctcctgccgcggccatgctcatgcttttcagcttattatcttttttccacttcattctccggttttggaaccagattttaatttgtctctcggagaggcaaagagcatgtgctatttcaatcctccttctgcgggtcaggtaacggttgaagtggaactccttctccagctccagggtctggtagcgcgtgtaggccgtccgggcccttttgccttccgggccgcctatgttgtcatgacttatgtgcagcttgcgcatcca

SEQ ID NO: 212453 - DNA, 584 bp, Homo Sapiens
ttttttttttttttttttgtagagatggggtttcaccatgttgcccaggctggtctcagactcctgggctcaagcaatccactcgccttggcctccccaagtgctggaattacaggtgtgagccactgcacccgatcataatcccaactcgcagcatctgtgtggcctggggccagttccctccttcccagccttgcttcctgtgagttgggtgtggaggtgagtgtgcaacagctggcacgtagcgcagtgagtgttgaatctgtgctggggccacagcagcccgagcttgtcactagcaatggcagggatggcactttccccagctaagtcagacctccctgcagcccaccctgcggctctgggcccagcctgctcctcctgggggagccgacgggtgtgagttgggggcacagagccccagccctgtgtggggctcctggaggctgcggacagacggggaagctgtgaaaggagacaccgccccgcccggccatgcagcctgcacctgggccaggccagggcccccagggcttccaccctttctttgtggatgctggggattttcagctggaccatctccc

SEQ ID NO: 212454 - DNA, 609 bp, Homo Sapiens
  misc_feature (20)..(20): n is a, c, g, or t
ttttttttttttttttttanatttcagaagaagtttattaagaggttttaggctttaagcatatgtgaaaagcaaaaattacattttaaagtatataatttgcattttccaccttctcaatgccaatgaaatattctaggagactctataagataaccaattgattttctactactcccaaattttaactttgtaatttaaagaggaataggcaaatagagctgctgtggttctggttctccctgcaggatgaagggggcctgcaaaatgtctcctacttccattctagtcattcagcaaggtgccttcctctggatgcactgtctgtatacttttgccatgttgcatcacataatgattctgcccaccttcaccatttgactgtcagtaaaagaatgtatgtgctcatttcttcttttattatagcgcagtgctcttcatgaagtctgaatcttgtttcatttgtgattgtaattagcacttgcttcttcaagactggctaaatgatgataatcagtgaagttctgtgatgggcacatggatgtgtattatatttttctactttggttaatatttgaatattccaataagttttaaaataacttgttt

SEQ ID NO: 212455 - DNA, 724 bp, Homo Sapiens
  misc_feature (639)..(639): n is a, c, g, or t
  misc_feature (669)..(669): n is a, c, g, or t
ttttttttttttttttttaatttgaaaatcacatctgctttattaaaatttaagcaataatcacgagaattttttagaatttagaacaacaaattttttttcagatagaagcattttatcactaactacatgacagtaataaaaagtagaggccaggctcggtggctcaagcctgtaatcccagcactttgggaggctgaggcaggcagatcacctgaggtcaagagttcgagaccagcctggccaacatggcaaaaccccatctctactaaaagtacaaaaattagctgggtgtggttgcaggcgcctgtaatcccagctactcaggaggctgaggcaggagaatagcttgaacccgggaggcaggtggttgcagtgagctcagatcgtgccattgcactccagcctgagcaacaggctgatcctgggggttatgcgattctgacatttatcttatggtcactggagtggcttctggaagtctttgatgcggttcatccacctaacacaattttagataatcatgtttttcagaggagtagaggtaagatcaaagagccaagacccagtcattctcagagatttcttagtattgaggatacccaagtttcactttggatgcactcccaggacatttgntaacgggataagatttctcaggctcttcanataacagggttctgcttggatcaggaaacctgctttgttattcttgcagtaatac

SEQ ID NO: 212456 - DNA, 828 bp, Homo Sapiens
  misc_feature (731)..(731): n is a, c, g, or t
  misc_feature (795)..(795): n is a, c, g, or t
  misc_feature (810)..(810): n is a, c, g, or t
ttttttttttttttttttgaggcaattatcaattgactttatttcctttcatatggtaacaccagcagtgtatgatatttgtaaataaaatacgtcataaaaaaatttaaccttattacctattatcagttaggttataccatcctgaataaaaaatatttgggccgggcatggtggctcacgcctgtaatcccagcactttgggagaccgaggggggcgattcacgaggtcaggagattgagaccttcctggctaacacggtgaaaccccgtctctactaaaaatacaaaaacaaaattagccaggcgtggtggcaggtacctgtagtcccagctgcttgggaagctgaggtgggagaatggcgtgaacccaggaggcggagcttgcagtgagctgagattgtgccactgcactccagcctgggcaacagagcaagactccgtctcaaaaaaaaaaaaaaatggcgtctgtaacagtttcctggtattttcaaccaggttctaagaacaaattgattttttgaagtggtgacatctagtcacattaaaataaaatccaaataaagtaagttcaatacagttaccacataatgaatggtagagtttaaagaaaattattattagcatcaaatcaattgttatgaataaatagtaatttgatattacaagttctttaatgaataccttggtaacttgctgacaacttaaaagataataccactgatattcanatacagtttataatcaagtccagtggcagatactgaaccgcccacctcccactcaatttgtganaactgtcttttgtanggttggctacatgggtat

SEQ ID NO: 212457 - DNA, 776 bp, Homo Sapiens
  misc_feature (662)..(662): n is a, c, g, or t
  misc_feature (717)..(717): n is a, c, g, or t
ttttttttttttttttgtggtttgcaataaatttatttaatcagaacttcagagggttctagaaacctgcatttttaacaaggactgcagatgattctaggttttgattaaaagtgtggtttggggaagcaactttaccctttattgtgtgttaaattacatatacaataaaacaaaaagtcacgtaatggaacaaaaaattgctttatacaaaatattagtagatacccaaatataatatggtcttaaaaataaaatcatatgtatatagttgtattcctaagtacagtagtgcccccctcatccaaagtttccctttctgtggttttggttacctgtagtcaaccacattctaaaataggtgagtactgtacaagaagatattttgaaagcaagagagaccaaccacattcacataacttttattatagtatgttatcattgttctattacattattattaatctcttgctatgcttaatttatacattatactttatcataggtatatatatatggaaaaaacagtgtataaaggtttggtactgtttgaggtttcaggagttcactgggggccttggaatgtatctcccgaagataagggggaactactgtaagcaaaatcgaaagctatacaacaatcagaaatgggaagagagcanatccaagtataagtgaagacattcctctgaattcccagcattcatcgagcatcanaaacgaccaatcttttagtccttttcttgtacattattctgtatcacattctctgcatc

SEQ ID NO: 212458 - DNA, 653 bp, Homo Sapiens
ttttttttttttttttatgtttaccggtttattataaaggatatcgcaaaggatacagatgaagagatgcacatagagcaaggaatgagggaaggggaaggagtgcagagcttccgtgccctccctgggcacgccacactccaggaagtgccaggtgttcagctatccagaagctctctgaaccctgtcctcttgggtttttatggaaggttcatgacatcaacattccttcccctaggattgagaccctctcatgggaaggtctttaggacccactgtgaaaaaggtgggcgaacattagtgaaaggatacccagaggtcagaggcctgtcccaagccctaacatacccagtattctaacaaagactggaacaaggactatgagagttacgagtcaggaatgctggatgaaaaccaatatatatcataacaccacacccagcattggcactcagcacacaggtgttagaaacaagttactcctaagcactcttcctgcgtggcctccgcccacagccgcccctcacagggctttcagcctgccagtagaaatcactcgagggcccacacatgcaaggccctgggcacacggcacagtcctgactcaaagagttggcctcagctcctgggggttgccctggcctcattcaccc
